United States Patent Application Publication US 2025/0327064 A1 - sequence listing, part 2

SEQ ID NO: 16169 - DNA, 120 bp, synthetic construct; identical to SEQ ID NO: 5180
  source 1..120: mol_type = other DNA

SEQ ID NO: 16170 - DNA, 120 bp, synthetic construct
  source 1..120: mol_type = other DNA
acagtgtgatgatcaaaaccaggaaagcatcaatgaatatatgagaaggtggaagaacagagcattttctcattgatcatcctactagtctcctcccttcacctcaatcttcacagtacc

SEQ ID NO: 16171 - DNA, 120 bp, synthetic construct
  source 1..120: mol_type = other DNA
gccaagaataataggtgaaaaaataaacaagtctgcattaaatgaattagataacctaccatgccaaaatattttatcctatccagttctctgtatttcttcactcatctcattttttct

SEQ ID NO: 16172 - DNA, 120 bp, synthetic construct
  source 1..120: mol_type = other DNA
aggtgaatatttcacaagtgagccagaacatttacagtgtaaacaagagcagttgctacctttgctttttttttcccacttcttcaatatgatcaccatgcttttcattaccctgctact

SEQ ID NO: 16173 - DNA, 120 bp, synthetic construct; identical to SEQ ID NO: 5181
  source 1..120: mol_type = other DNA

SEQ ID NO: 16174 - DNA, 120 bp, synthetic construct
  source 1..120: mol_type = other DNA
tactacaaatcctgaaaacaggatttgtggagggcaagatctgccctttcctcaccaacctcttggcaaatcttcagcaaacattatataagaccgcactgccgggcgcggtggctcacg

SEQ ID NO: 16175 - DNA, 120 bp, synthetic construct
  source 1..120: mol_type = other DNA
cgtggtggcgggcgcctgttgtcccagctactggggaggctgaggcaggagaatggcgtgaacccgagaggcggagcttgcagtgagccgagatggtgtcactgcactccagcctaggcg

SEQ ID NO: 16176 - DNA, 120 bp, synthetic construct
  source 1..120: mol_type = other DNA
tggatcacttgaggtcaggagttggagaccagcctggccaacatggcgaaaccgcatttctactaaaaaatgcaaaaattggctgggcatggtagtgggtgcctgtaatcccagccactc

SEQ ID NO: 16177 - DNA, 120 bp, synthetic construct; identical to SEQ ID NO: 5182
  source 1..120: mol_type = other DNA

SEQ ID NO: 16178 - DNA, 120 bp, synthetic construct
  source 1..120: mol_type = other DNA
aggaaatctgtctggctttgaaacctgtcctgctacatgttggctgtgagctatgtggccaattatttcacctctgaaaaagttggtttatcaaaggagtgatgtgctcatttaatgcaa

SEQ ID NO: 16179 - DNA, 120 bp, synthetic construct
  source 1..120: mol_type = other DNA
aagccttcaaaattcaagcttccctacacctggtagtaaatgtacctcatttactaccttcaaaattcagtgccttcaaaattcagtgccttcaaaattcaaacttccctgcacctggta

SEQ ID NO: 16180 - DNA, 120 bp, synthetic construct
  source 1..120: mol_type = other DNA
aaaaaaatggaaatgcccatttccaatttctctagtttagggaggaaagcaatatacagcccctataatgaagaaaagaagatgttcaggtaatgtcaattaaatgaaagctcatctgta

SEQ ID NO: 16181 - DNA, 120 bp, synthetic construct; identical to SEQ ID NO: 5183
  source 1..120: mol_type = other DNA

SEQ ID NO: 16182 - DNA, 120 bp, synthetic construct
  source 1..120: mol_type = other DNA
caagtagctgggattacaggcatgtgccaccaccccggctaattttgtgtttttagtagagatggggtttccccatgttggtcaggctggtcttgaactcccgagctcaggtgatccgct

SEQ ID NO: 16183 - DNA, 120 bp, synthetic construct
  source 1..120: mol_type = other DNA
gacttttgtgtaaatgaactcacaataaacttattggggtcccactctagccaaaatacatggagttttagatatttaatccaagtgtctgattgacctgttttggccactgggctctca

SEQ ID NO: 16184 - DNA, 120 bp, synthetic construct
  source 1..120: mol_type = other DNA
ctctcaccttggccacctcttcactcactcacctctttagtaattcagttaattttttggtcgaggatcaagttgctaaaacttcttttagatcaataaatgagatagacaaactgcaca

SEQ ID NO: 16185 - DNA, 120 bp, synthetic construct; identical to SEQ ID NO: 5184
  source 1..120: mol_type = other DNA

SEQ ID NO: 16186 - DNA, 120 bp, synthetic construct
  source 1..120: mol_type = other DNA
acccaggagtggtggtgggcacctgtaatccaagctactcaggaggctgaagcagggagaattgcttgaatctgggagggggaggttgcagtgagccgaggtcatgccactgcactccag

SEQ ID NO: 16187 - DNA, 120 bp, synthetic construct
  source 1..120: mol_type = other DNA
ccaaatattttttaattgaagagattttgaaaatcaaaatgtctttaaccctgaataatttgttagaaaattaaactttcaatttgatggtccagtgtttgagctccttttcagatcctg

SEQ ID NO: 16188 - DNA, 120 bp, synthetic construct
  source 1..120: mol_type = other DNA
taagaaaagccagtgtaactgtatgacttgaggctgtctattctgttctactgtaggggagatcatctatttgcagttcttttgtatctagaatgtagttataaggtcaaactaccgtgt

SEQ ID NO: 16189 - DNA, 120 bp, synthetic construct; identical to SEQ ID NO: 5185
  source 1..120: mol_type = other DNA

SEQ ID NO: 16190 - DNA, 120 bp, synthetic construct
  source 1..120: mol_type = other DNA
gtaagatagaaagaaaaacctagaggtttcagaaatagagtcatacataagggatctttgtattaaatttcagattctcaaaactcacaagcaaagagaaagattaaattataatgttta

SEQ ID NO: 16191 - DNA, 120 bp, synthetic construct
  source 1..120: mol_type = other DNA
accaccaatgaagacggcgggtttcattgccacgagtctcggattttcctggggttttcaaaaccatcttgatttaccagaagataatctgtgctactatcctatcctaaaaaaatgtgc

SEQ ID NO: 16192 - DNA, 120 bp, synthetic construct
  source 1..120: mol_type = other DNA
caatttaaaatttaaaatacaaataaaaaataaaatgttacacgcatgcattgtggagtagctaaatcgagctaattaccatatgcattacctcacatagttatcatttttgtagtgaca

SEQ ID NO: 16193 - DNA, 120 bp, synthetic construct; identical to SEQ ID NO: 5186
  source 1..120: mol_type = other DNA

SEQ ID NO: 16194 - DNA, 120 bp, synthetic construct
  source 1..120: mol_type = other DNA
cttccacctcatctttcatgcacctcagactagcatcaggaattaattcaagagggttcgttcttggatttgggggaaagtttaatattaatattaggatgttgtagttttgttttgttt

SEQ ID NO: 16195 - DNA, 120 bp, synthetic construct
  source 1..120: mol_type = other DNA
taccgagtagctgggaccacaggcgcgtgccaccacggccagctgaatttttgtatttttagtagagacagggtttcactgtgttagccaggatggtctcgatctcctgacctcatgatc

SEQ ID NO: 16196 - DNA, 120 bp, synthetic construct
  source 1..120: mol_type = other DNA
ggatgaagaacccagtaatgaaaagcaagacttcgttacacaatgtgtggagcccaaagtcctgtgaaccgcactggtcacagacccatgaagctggccctgatgagaggtgtagaagag

SEQ ID NO: 16197 - DNA, 120 bp, synthetic construct; identical to SEQ ID NO: 5187
  source 1..120: mol_type = other DNA

SEQ ID NO: 16198 - DNA, 120 bp, synthetic construct
  source 1..120: mol_type = other DNA
cacatgaacagggggcgcagacacaccctctgcactgagttaggacaatcgccttatgtttgtgggatatttctacattttccctcccagtagtctaaatttgtagtcctaataataact

SEQ ID NO: 16199 - DNA, 120 bp, synthetic construct
  source 1..120: mol_type = other DNA
aaatattatagagggagacctaaatgcataaggcaagaggtttgaaggaaagataaaggctattgtatctgttgaataaaatatctaggaggccattgatttggactggcctcctccact

SEQ ID NO: 16200 - DNA, 120 bp, synthetic construct
  source 1..120: mol_type = other DNA
acttatgtttcccacctatgctgttaggccatgttattggttggcattctctgaacctgctctggtttgtagggttgcctgattcttcaatcgtttttgttgtgttttgctatgtttcat

SEQ ID NO: 16201 - DNA, 120 bp, synthetic construct; identical to SEQ ID NO: 5188
  source 1..120: mol_type = other DNA

SEQ ID NO: 16202 - DNA, 120 bp, synthetic construct
  source 1..120: mol_type = other DNA
cctgaccaatatggagaaaccccgtctctactaaaaatacaaaattagccaggtgtggtggtgcatgcctgtaatcctagctactcgggaggctgagacagaagaattgcctgggaggca

SEQ ID NO: 16203 - DNA, 120 bp, synthetic construct
  source 1..120: mol_type = other DNA
aactttgagtcacaaaaagtcaccagctgttctgtgaactaaattacacaagctctagaacacatgctccatccaaagtaagtgggaattgtcttttccatgcaaaaagtgccacaccaa

SEQ ID NO: 16204 - DNA, 120 bp, synthetic construct
  source 1..120: mol_type = other DNA
tataggagcatgttcctgaaatctacagcataaatgaattgtattaaagacttctcccctctctagtagagatgtcagttgctgcttacaggtccttttggagtgaatgctgttgtcatt

SEQ ID NO: 16205 - DNA, 120 bp, synthetic construct; identical to SEQ ID NO: 5189
  source 1..120: mol_type = other DNA

SEQ ID NO: 16206 - DNA, 120 bp, synthetic construct
  source 1..120: mol_type = other DNA
attggttagaagtaaatcacaagtcccattcacactcaagggaagagtattacacaaatacttgaacactaggagatagaaattattggagatcaacctagggaatctttgtcaaagtaa

SEQ ID NO: 16207 - DNA, 120 bp, synthetic construct
  source 1..120: mol_type = other DNA
aggttaggctttagggcctttggaaggtgattaggtgataaaggtggaatcttcatgaatgggattagtgctcttataaaatatgcctgagagagacctttttctgtaaatggccaagta

SEQ ID NO: 16208 - DNA, 120 bp, synthetic construct
  source 1..120: mol_type = other DNA
aattgagtataattattgataacgagaaaaattaaataataataataattattattattacagatgggggctcaaagttagcctttcctatcatcaaagtcatttgctaatgctcatctg

SEQ ID NO: 16209 - DNA, 120 bp, synthetic construct; identical to SEQ ID NO: 5190
  source 1..120: mol_type = other DNA

SEQ ID NO: 16210 - DNA, 120 bp, synthetic construct
  source 1..120: mol_type = other DNA
taggagaatatatctgctgaaaatttctgtgggattggagaattgcttcttttaacttttgacagcacaagcagtgcacagggcagcttgatattactatgattctagcagtgttagctg

SEQ ID NO: 16211 - DNA, 120 bp, synthetic construct
  source 1..120: mol_type = other DNA
aaagcattatccaatctgaaacaaaagctaacttccaaagccagtcagtgtttgatcatagtaattgagggcagttcttccccttcaaaaaaaaatttccatctcatccctgagttaaac

SEQ ID NO: 16212 - DNA, 120 bp, synthetic construct
  source 1..120: mol_type = other DNA
caggaccttcagcttctaatttctgtcaaaaatttgtaaaagtgatgcctggtccaccagagcaaattaagtctactgttcaataacacctgataccatcaaattttttccacaaattat

SEQ ID NO: 16213 - DNA, 120 bp, synthetic construct
  source 1..120: mol_type = other DNA
ctctccttctcataattttgccatcactagctgtaacatatcttagcagatttagctgcaggttgcagtgaattattgtttttcaacttcttagaaaatactgtacttctaggccgtgcg

SEQ ID NO: 16214 - DNA, 120 bp, synthetic construct; identical to SEQ ID NO: 5191
  source 1..120: mol_type = other DNA

SEQ ID NO: 16215 - DNA, 120 bp, synthetic construct
  source 1..120: mol_type = other DNA
tgaactgcatgaatctatcaatctagctgggacacacatatatattccactaactcatttggtagctgttgtcctaatctgtgaatctcctttgaattttcctcttggcagagaaagttc

SEQ ID NO: 16216 - DNA, 120 bp, synthetic construct
  source 1..120: mol_type = other DNA
aagtcactgaggttattaactccttcactcattttccttccttttcaaacttagtaaaccataggaattgcttgagctcatttccaggggttgacttttaaagtgaaagaacttgtggca

SEQ ID NO: 16217 - DNA, 120 bp, synthetic construct
  source 1..120: mol_type = other DNA
atttactcatagttccttctttgatcttgcttgaatttttccctcggcttgtgttcccatgaggcaacaaggctccaagacaactacagtgaggttatgaagagcaaaagaaaaagactg

SEQ ID NO: 16218 - DNA, 120 bp, synthetic construct; identical to SEQ ID NO: 5192
  source 1..120: mol_type = other DNA

SEQ ID NO: 16219 - DNA, 120 bp, synthetic construct
  source 1..120: mol_type = other DNA
ctaccttcgaagatcctccacccctgattttggacataacaggtggcatccaaaggctttggaaacaaactgaaactgtacatcctcccaacataagactacataaaaatagcaaagatc

SEQ ID NO: 16220 - DNA, 120 bp, synthetic construct
  source 1..120: mol_type = other DNA
gttaagaacaacaaattgaagtttagagagggaacgtatactgtaggcgtggattttaatacagtactggccagtgctcttgggattataattcaactataggcatgcgaagagttagaa

SEQ ID NO: 16221 - DNA, 120 bp, synthetic construct
  source 1..120: mol_type = other DNA
gccagctacataatttacaggcccagtgtaaaatgaaaatacagggtcccttattcaaaaagcaggggcaactgccatcaaaagtgctaaaatacaaagcttttccctttcagtcgctct

SEQ ID NO: 16222 - DNA, 120 bp, synthetic construct; identical to SEQ ID NO: 5193
  source 1..120: mol_type = other DNA

SEQ ID NO: 16223 - DNA, 120 bp, synthetic construct
  source 1..120: mol_type = other DNA
ccaaaacccagaattgaaccagtctcctttagatcttcaggctgatgccctcccaaccgagctatctcagcttactgtagactgaaaattttattcaatttctctttcaatacttcgatt

SEQ ID NO: 16224 - DNA, 120 bp, synthetic construct
  source 1..120: mol_type = other DNA
cagtgtggaatggataggtggaggagggagatagaagaaaagtaacaggaattaaaaaacaaacaaaaaactttctgctcttccacatcctgttggttgagccagacacagcaaagaaaa

SEQ ID NO: 16225 - DNA, 120 bp, synthetic construct
  source 1..120: mol_type = other DNA
gggtcaggtttctgtctcctagcgatgattttgaatgagctattaatcctttgttttatcctctttcatctagtctttgtcatagtcttttgcactgggtggtgcagaagtttatggcgt

SEQ ID NO: 16226 - DNA, 120 bp, synthetic construct; identical to SEQ ID NO: 5194
  source 1..120: mol_type = other DNA

SEQ ID NO: 16227 - DNA, 120 bp, synthetic construct
  source 1..120: mol_type = other DNA
accacgagaaaggttactgaattgcagactaaatgacaatgcatctgcttctaggacattcccagtccaacctgaaaagggtagacaattgctgaaacatgtttatatgaatattgtttt

SEQ ID NO: 16228 - DNA, 120 bp, synthetic construct
  source 1..120: mol_type = other DNA
ctaattaaagtgtggagcacattactgctaattattttcaatattcacctttttattaagagctagaacaagtctttattgtggatcggaagctgattgggaaactaggagctagtttta

SEQ ID NO: 16229 - DNA, 120 bp, synthetic construct
  source 1..120: mol_type = other DNA
aaatacaattgtattacatcaggatactagatgtgtaatgtaaaaaaagtttttttttgctgtaaaaattattagttgatcaggaatggtgagaagggaaaaaatttattaggtttcttt

SEQ ID NO: 16230 - DNA, 120 bp, synthetic construct; identical to SEQ ID NO: 5195
  source 1..120: mol_type = other DNA

SEQ ID NO: 16231 - DNA, 120 bp, synthetic construct
  source 1..120: mol_type = other DNA
aattggaagagctctggactaaaggtctagactaaaatcagggatccttctccatgactgaacagtcctcaatgttggaagtttgtgctttttgctggtggaggaaagtagctttcatgc

SEQ ID NO: 16232 - DNA, 120 bp, synthetic construct
  source 1..120: mol_type = other DNA
atactgttagctgccaaacagtatccagttcagtgatttcacgaaagtagtggaatttaatccagcgatctttctccaaccaacagaaaatgaaaccaacaaactgaaaacaagtgatat

SEQ ID NO: 16233 - DNA, 120 bp, synthetic construct
  source 1..120: mol_type = other DNA
ttcattctcctttctggttctttgcatgcgtttgtcactttttctcctactcctataaaaagaggacagtgtcaaatgtgttgcttttaatactatgctatttattctggcactcatctg

SEQ ID NO: 16234 - DNA, 120 bp, synthetic construct; identical to SEQ ID NO: 5196
  source 1..120: mol_type = other DNA

SEQ ID NO: 16235 - DNA, 120 bp, synthetic construct
  source 1..120: mol_type = other DNA
gtttggcggtatcgctaaagagatagactaaaaaagaatggaaataagaaaaaataggcagctcagagaaaattttccgtgcatctctgctttaggggcattaggtcgtccaaggatgag

SEQ ID NO: 16236 - DNA, 120 bp, synthetic construct
  source 1..120: mol_type = other DNA
tttttctgggtgagttagtgtgtaaaggttgtctaaatgtaaggtggcactcagcgctttgcctcgcgaacgcttaaaacatcatttgggtgactgaaaacagccagctctcgttcgctg

SEQ ID NO: 16237 - DNA, 120 bp, synthetic construct
  source 1..120: mol_type = other DNA
cctcaggtcaggagttcaagaccagcctggccaacatggtgtaaacctcttctctactattagccgggcgtggtggccggcgcctgtaatcccagctactcgggaggctgaggcgggaga

SEQ ID NO: 16238 - DNA, 120 bp, synthetic construct; identical to SEQ ID NO: 5197
  source 1..120: mol_type = other DNA

SEQ ID NO: 16239 - DNA, 120 bp, synthetic construct
  source 1..120: mol_type = other DNA
cacatatcactgtaccaaaggccccaaaggcaggtgtggccaaaggtgtgtggatgaggaataggactagataaagttgcttgaatttctagaaagaaacacttgttaaagagtaagtaa

SEQ ID NO: 16240 - DNA, 120 bp, synthetic construct
  source 1..120: mol_type = other DNA
aaaaggatgttttaaatgtgaagttgaaattccaaatatagcgtcaaatttcctttgtttgaaaaaactaagagcgtgctcctcctagttccttaaggagcaggagagggagcaaggatg

SEQ ID NO: 16241 - DNA, 120 bp, synthetic construct
  source 1..120: mol_type = other DNA
aattatttctgggcaaagaaaaaatgatagaccttctttctctttgaccctcatttcattgactcctgattggcccgcagagttgccaaatcagtgaaaaacagcttggaccaccttcca

SEQ ID NO: 16242 - DNA, 120 bp, synthetic construct; identical to SEQ ID NO: 5198
  source 1..120: mol_type = other DNA

SEQ ID NO: 16243 - DNA, 120 bp, synthetic construct
  source 1..120: mol_type = other DNA
attttcactgcttctggctgtctgcacaattagaaatactaggaggagggtacaaaagagcagaactcagaaagttgtctggggaaatctagattcagatggaagaagaaaacaggtccc

SEQ ID NO: 16244 - DNA, 120 bp, synthetic construct
  source 1..120: mol_type = other DNA
gcagatgaatgaggaggatgtccttaagttccttgccgcaagaacccactcaggtggcaccaatctttacttccaaatggaacagtacatttataaaagtaaaagcgatggcatctacat

SEQ ID NO: 16245 - DNA, 120 bp, synthetic construct
  source 1..120: mol_type = other DNA
gaaatttgctgctgccactggagccactccaattgctggctgcttcactcctggaaccttcactagccagatccaggcagccttccgagagccacggcttcctgtggttactgaccccag

SEQ ID NO: 16246 - DNA, 120 bp, synthetic construct; identical to SEQ ID NO: 5199
  source 1..120: mol_type = other DNA

SEQ ID NO: 16247 - DNA, 120 bp, synthetic construct
  source 1..120: mol_type = other DNA
gtctgaaggcctgcaggtgccgtctgtgcctatccagcagttacctactgaagactggagcgctcagcctgacacagaagactgatctgcagctcaaactgctcaggccactgaatgggt

SEQ ID NO: 16248 - DNA, 120 bp, synthetic construct
  source 1..120: mol_type = other DNA
agaaagaacgaacgaaagaaagaaacaaagaaagagtaagaaagaaaagaaaagaaagaaaaaagaaaaaaaaacctaagtgtatgctgtcacagtcactgctctagcaaactcttcagt

SEQ ID NO: 16249 - DNA, 120 bp, synthetic construct
  source 1..120: mol_type = other DNA
acataggaggcatttaagtttaagggacttaaacttctgttacaacctctttactcttaccccgtgctcctggagagattctgaaacctcaaccatcacaatggcacaaataacagacac

SEQ ID NO: 16250 - DNA, 120 bp, synthetic construct; identical to SEQ ID NO: 5200
  source 1..120: mol_type = other DNA

SEQ ID NO: 16251 - DNA, 120 bp, synthetic construct
  source 1..120: mol_type = other DNA
catttataacatagccaaccagaaacaacctccaataaagagtcaaaaggttttagactggaatgcagtgtttcctgagcctgaggaaccgccctgagaacttcaatggtataccggttt

SEQ ID NO: 16252 - DNA, 120 bp, synthetic construct
  source 1..120: mol_type = other DNA
cagacgattatcattcaggcttgagaacgccaacctagaaagtggagctgcagaaactgtagtgagctgagctgctggaggacatttaggtaggaggaagccgtggaactgaatcaacgg

SEQ ID NO: 16253 - DNA, 120 bp, synthetic construct
  source 1..120: mol_type = other DNA
agaagaggaagggacgaaggagagagcttcaagccagatctttacggaggcctaagatttggatggccctgaaattgtccgcattgccaatgtctcctaggctcctctataatgttttgt

SEQ ID NO: 16254 - DNA, 120 bp, synthetic construct
  source 1..120: mol_type = other DNA
gattacaggcgagcgccaccgcgcccagctaattttcctgtttgtagtagagacagggtttccgccatgatctcgagctcctgaactcagctgatccgcctacctcggcctcccaatgtg

SEQ ID NO: 16255 - DNA, 120 bp, synthetic construct; identical to SEQ ID NO: 5201
  source 1..120: mol_type = other DNA

SEQ ID NO: 16256 - DNA, 120 bp, synthetic construct
  source 1..120: mol_type = other DNA
ggggagaatgaggaaaggtctgtagtctgtcagatatgggtggagtgggggtgggggggggaggagagaaatctaatggatgttttccaagggcgatttttttttcttctctttctgttt

SEQ ID NO: 16257 - DNA, 120 bp, synthetic construct
  source 1..120: mol_type = other DNA
gtggcgcgatctcggctcactgcaagctcagcctcccgggtttatgcaattctcctgtctcagcctctggagtagctgggactacaggtgcccgccaccacgcccggctaattttttttt

SEQ ID NO: 16258 - DNA, 120 bp, synthetic construct
  source 1..120: mol_type = other DNA
ttctctatttcagtaaataactataaagctgtgctgaagcagtcaggttgggaggctgaaggagtgttaggacccatagtacaaatgaatgagtaccaaatggcttaccttcgctgtgag

SEQ ID NO: 16259 - DNA, 120 bp, synthetic construct; identical to SEQ ID NO: 5202
  source 1..120: mol_type = other DNA

SEQ ID NO: 16260 - DNA, 120 bp, synthetic construct
  source 1..120: mol_type = other DNA
tcctctcacagccgtcatctatttcaaggactgctgttagccaactttctttgtcagtttccgtccacctggagcgaagttccaagattgaatcttctggtatgtcttcagattctctcc

SEQ ID NO: 16261 - DNA, 120 bp, synthetic construct
  source 1..120: mol_type = other DNA
ataaagacgagttctgtgagtgctgcagaggaaacgtagatccaggtgaggagacaagacaagatgttaatgcacaaaagtcaactaaaaacgaatttaaatcttaaacttaagccccta

SEQ ID NO: 16262 - DNA, 120 bp, synthetic construct
  source 1..120: mol_type = other DNA
aaagcacaggcaacaaaagcaaaaatggataagcgagactatagcaaactaaaaagcttcttcacaggaaagaaaacaatcaacaaaggaaaaaggcaagctatggaatgggagaaaata

SEQ ID NO: 16263 - DNA, 120 bp, synthetic construct; identical to SEQ ID NO: 5203
  source 1..120: mol_type = other DNA

SEQ ID NO: 16264 - DNA, 120 bp, synthetic construct
  source 1..120: mol_type = other DNA
aaaatgatgacaccactatggaaaatagtaaggggtcgcctcaaaagataaaaatagaactaccatatgatccagcaatcccacttctgggtatatgtccccaaaaaatcgaaattagaa

SEQ ID NO: 16265 - DNA, 120 bp, synthetic construct
  source 1..120: mol_type = other DNA
acaatggaatattattcagccttttataaaaaagaaattctgccatttgcaccagcatcaatgattaacctggaggacattatgctaagtgaaataagccagtcacagaaggacaaatat

SEQ ID NO: 16266 - DNA, 120 bp, synthetic construct
  source 1..120: mol_type = other DNA
aaattttagttatgaaacatgaataagttctagagatctattgcacaacctagtgccttcagttaacaataccataatgtacacttaaaattttgttaaaaagataactcggccgggagc

SEQ ID NO: 16267 - DNA, 120 bp, synthetic construct
  source 1..120: mol_type = other DNA
aaaaattagccgggcgcggtggcgggcgcctgtagtcccagctactcgagaggctgaggcaggagaatggcgtgaacccggaagtcggaggttgcagtgagccgagatcgcaccactgca

SEQ ID NO: 16268 - DNA, 120 bp, synthetic construct; identical to SEQ ID NO: 5204
  source 1..120: mol_type = other DNA

SEQ ID NO: 16269 - DNA, 120 bp, synthetic construct
  source 1..120: mol_type = other DNA
tctggatttggaaatgtggcagcggcttcatcggcgactctacagctataggtttttttgtttttgattttttatagagacgggatgggggaagggggcgggtcggtcttctccctgtgt

SEQ ID NO: 16270 - DNA, 120 bp, synthetic construct
  source 1..120: mol_type = other DNA
aacgaagccgaagacagaggactctttcagagcaaatttttttgagcaaggaggaaagcacaaaggaagctggtctcaacctgagaaaaccaattcaccctttgtaaaaccctccctaca

SEQ ID NO: 16271 - DNA, 120 bp, synthetic construct
  source 1..120: mol_type = other DNA
cccagcaggggcgtaagggagagtagggagaagtttgtccctaatgtacaggttatgttcttactatactagaaaggcaagtggctgggaactgaaatgagctgaggagtggacgcaagg

SEQ ID NO: 16272 - DNA, 120 bp, synthetic construct; identical to SEQ ID NO: 5205
  source 1..120: mol_type = other DNA

SEQ ID NO: 16273 - DNA, 120 bp, synthetic construct
  source 1..120: mol_type = other DNA
ggagcagtagcccctggtattggaggtttgaggaaagtgacgttgtgtcagttctcatgtggaagcagcctgcagctttgatgcaggcagcaactgtttagtttgtgtttctttttgttt

SEQ ID NO: 16274 - DNA, 120 bp, synthetic construct
  source 1..120: mol_type = other DNA
gctagctcagctggaaatgcatcaggccactagtccggaaatttaggaatcacgatcctgttctgatgtagatacttttcattttcccatacttctttttgattcatactcaacaggcta

SEQ ID NO: 16275 - DNA, 120 bp, synthetic construct
  source 1..120: mol_type = other DNA
gaggtattcattcaaggctcttttctgccctactgtcaagtggatgaacaaaacgctgacttaagatatgaggaggattgcagtgttgagagtgcaaaaagtgtcaagtcaaaacatgga

SEQ ID NO: 16276 - DNA, 120 bp, synthetic construct; identical to SEQ ID NO: 5206
  source 1..120: mol_type = other DNA

SEQ ID NO: 16277 - DNA, 120 bp, synthetic construct
  source 1..120: mol_type = other DNA
ataaatttattaatataaaaaattattggtcaggagcagtggcttacacctcaaatcccagcactttgggagaccaaagcaggaggatcaattgagttcaggagttggagaccagcctgg

SEQ ID NO: 16278 - DNA, 120 bp, synthetic construct
  source 1..120: mol_type = other DNA
caccagaggccaaggcaggaggattgcctgggcctaggagtttgaggtagcagtgagccatgcttgcagtgccactgcactccagcctgggtgacagggcgagacctcaactcaaaaaat

SEQ ID NO: 16279 - DNA, 120 bp, synthetic construct
  source 1..120: mol_type = other DNA
agaccaagacaagagaactgagtccaggagtttgtgctcaagtaataacaatactatcagcactcaatcttggtatcttaaaacttgacatttaaatgaaattttaatttgagtcaatta

SEQ ID NO: 16280 - DNA, 120 bp, synthetic construct
  source 1..120: mol_type = other DNA
tattattttttgagatggtgtctcactctgccacccaggctggggtgccagtggcgtgatctcagttcactgcaacctccacctcccgggttcaagtgattctcgtgtctcagcctccct

SEQ ID NO: 16281 - DNA, 120 bp, synthetic construct; identical to SEQ ID NO: 5207
  source 1..120: mol_type = other DNA

SEQ ID NO: 16282 - DNA, 120 bp, synthetic construct
  source 1..120: mol_type = other DNA
cctagctaacatggtgaaaccccgtctctactaaaattacaaaaaaattagccgggcttggtggcatgcgcctgtagtcccagctactcaggaggctgaggcaggagaatcgcttgaatc

SEQ ID NO: 16283 - DNA, 120 bp, synthetic construct
  source 1..120: mol_type = other DNA
tttgtatgtcaatctaggaacaattcacagccgtctctactttgaaccacccaaaaggctgatttatgtgaatttaatttcacttgacaattaattaaactcctctgcatatcctgcctt

SEQ ID NO: 16284 - DNA, 120 bp, synthetic construct
  source 1..120: mol_type = other DNA
cctcagcaatatgtgggtcctgtgagtttcttagagggccctggctcattttgctgatagggttgccaaactcttagtgtgataatagtgcattctttgaccactttgtttctaaattct

SEQ ID NO: 16285 - DNA, 120 bp, synthetic construct; identical to SEQ ID NO: 5208
  source 1..120: mol_type = other DNA

SEQ ID NO: 16286 - DNA, 120 bp, synthetic construct
  source 1..120: mol_type = other DNA
tgttttatttaagcttgtgttgagagtaataaggaaatcgtagaaatcagagagaatggcataggccctgtaagtcaccatcatctttaatgcggatgttaaccagtacaagaaccccgt

SEQ ID NO: 16287 - DNA, 120 bp, synthetic construct
  source 1..120: mol_type = other DNA
tagctttacagaaaaatttagaagatattagagttcccatataccctgcacccaatacccctactattatgatagtccttactattaagatggtacttttctgccgcgcgcgatgactca

SEQ ID NO: 16288 - DNA, 120 bp, synthetic construct
  source 1..120: mol_type = other DNA
aggcatggtggcgggcacctgtaatcctagctactcgggaggctgaggcaggagaatagcttgaaccctggaggtggagattgcaatgagcagagattgtgccactgcactccagccagg

SEQ ID NO: 16289 - DNA, 120 bp, synthetic construct
  source 1..120: mol_type = other DNA
tttgagaccaacctggccaacatgatgaaacctcgtctctactaaaaaaacacaaaaattagccgggcgtgatggcgggcgcctgtaatcccagctactcgggaggctgaggcaggagaa

SEQ ID NO: 16290 - DNA, 120 bp, synthetic construct; identical to SEQ ID NO: 5209
  source 1..120: mol_type = other DNA

SEQ ID NO: 16291 - DNA, 120 bp, synthetic construct
  source 1..120: mol_type = other DNA
tcaagttcccaaagtcttgggaacaagccggtttttttttttttaactggcttgcagaaagctcaaggagatgtgcagaaagtaaagatatttcctgacaatagtaagaacacgaccacg

SEQ ID NO: 16292 - DNA, 120 bp, synthetic construct
  source 1..120: mol_type = other DNA
agtttctgttttcaaacctttaacttcgtaattagagatttaacaacttgaaggggggcggggagaggcgggggaggaggtgggcagaaggaataaaactccatctaaaattcctaatag

SEQ ID NO: 16293 - DNA, 120 bp, synthetic construct
  source 1..120: mol_type = other DNA
aagaactcaagtctgcaatgaaggagtggacatgacagcgtaagagggagcatcattgtttgatctattttaaccttttccgtctcaaagatacgatggtgcttcctccaggaagaaaag

SEQ ID NO: 16294 - DNA, 120 bp, synthetic construct; identical to SEQ ID NO: 5210
  source 1..120: mol_type = other DNA

SEQ ID NO: 16295 - DNA, 120 bp, synthetic construct
  source 1..120: mol_type = other DNA
ctatgttgatagggtaggaaagattaaaaaaaaaaacaacaaccaagtttgtaaagtaaaccaatcacagattccctcagttttcgcatcgtcttggcttcatggaaatgacgagttact

SEQ ID NO: 16296 - DNA, 120 bp, synthetic construct
  source 1..120: mol_type = other DNA
gtcaaaactcaagaattgttttaggccatattttggatggtgtatcctatgtacactaatttattaagtaatgacccatgtttgagaccacggaacgctagttctggggccggactagat

SEQ ID NO: 16297 - DNA, 120 bp, synthetic construct
  source 1..120: mol_type = other DNA
gtgatccagtttggggaggctacttgctctagtcagtgctgaagaatccatctccattttgggcaagatgcactaccatgacttatgtttcaacagactcaaacttattcacatgttttg

SEQ ID NO: 16298 - DNA, 120 bp, synthetic construct; identical to SEQ ID NO: 5211
  source 1..120: mol_type = other DNA

SEQ ID NO: 16299 - DNA, 120 bp, synthetic construct
  source 1..120: mol_type = other DNA
aggaagatgctaaaaaggattggcactgagatttgaaagaataatgctaagaaactattaaattgtatgaaatgtttgtttataccagtgataccatttcctttccaaagcctttcagtg

SEQ ID NO: 16300 - DNA, 120 bp, synthetic construct
  source 1..120: mol_type = other DNA
gtattttgggaggaatccaagagagatttgaaagtatgacattcttaatctctctataacaatctgtctagataatttcactgaagaaatgaatggaggagggtgtctgtagataaaggt

SEQ ID NO: 16301 - DNA, 120 bp, synthetic construct
  source 1..120: mol_type = other DNA
aatgtagctactttagccattttacaaaaacccataatgcatgaccctaataatgttcttaactttagaatttggaaaactcagcatttcctgtgaggtgtgatccagtgtacaacaaac

SEQ ID NO: 16302 - DNA, 120 bp, synthetic construct; identical to SEQ ID NO: 5212
  source 1..120: mol_type = other DNA

SEQ ID NO: 16303 - DNA, 120 bp, synthetic construct
  source 1..120: mol_type = other DNA
acgtggagaaaggagaaccctagtacactcttggtgggaatttaaattagtacaaccgctttggagaatagtatggaggttcctcagaaaactaaaaatattaccatatattccagcaat

SEQ ID NO: 16304 - DNA, 120 bp, synthetic construct
  source 1..120: mol_type = other DNA
atcaacagataaatgaataaagtaaatgtggtacgtatacacaacggggtactattcggccatgaaaagaatgaggtcttgtcatttgcaaagcggatggaactatgttctgtgcgggaa

SEQ ID NO: 16305 - DNA, 120 bp, synthetic construct
  source 1..120: mol_type = other DNA
gaaggggagaagggaaaagatatatatatatatatatatacacacactcaccaaatatatatatatatatataaatatatatatttatatatatgtacactcacaagactatgaaggatt

SEQ ID NO: 16306 - DNA, 120 bp, synthetic construct; identical to SEQ ID NO: 5213
  source 1..120: mol_type = other DNA

SEQ ID NO: 16307 - DNA, 120 bp, synthetic construct
  source 1..120: mol_type = other DNA
tcacatattctctctcatttgtggaagccaaaaataaaacaattgaactcatggagacagagagtagaatgatggttaccagatgctgggaagggtattggagggggcagtgagatggtt

SEQ ID NO: 16308 - DNA, 120 bp, synthetic construct
  source 1..120: mol_type = other DNA
tgtctgtaacaaagaaatgataaggtgttgaggcgatggatgaggtgatggatgcttcgtttatcccaatatgattattacacattgtatgcctgcatcaaaatatcccatgtatcatat

SEQ ID NO: 16309 - DNA, 120 bp, synthetic construct
  source 1..120: mol_type = other DNA
ttactgcctttgtctgtctgtgtttggagaacgaatatctggcagaaaaatgcttgctgtgtttaacatcactatttctaaaacctttagactgtgaccagcaaaagcggcactaaatac

SEQ ID NO: 16310 - DNA, 120 bp, synthetic construct; identical to SEQ ID NO: 5214
  source 1..120: mol_type = other DNA

SEQ ID NO: 16311 - DNA, 120 bp, synthetic construct
  source 1..120: mol_type = other DNA
tgtgtagaagacgctccatctcaggttacgaaaatctacagaaaggaaatgtttaaaaagagaaaaggaaaatattcctagggattataatgtctctcttaagcagggtcttcgaaaaga

SEQ ID NO: 16312 - DNA, 120 bp, synthetic construct
  source 1..120: mol_type = other DNA
tggtagaacatcagacttttaatctgacggtgcagggttcaagtccctgttcaggcgaaatatttgtgtgttttactctagctccggagtccccaacctccagtaaacgtaaccgcgtat

SEQ ID NO: 16313 - DNA, 120 bp, synthetic construct
  source 1..120: mol_type = other DNA
cagaagtccaaaccctattgtgaactgcgtatgaaagggatctagattgtgggctccttatgagaatctaatgcttgataatccgtcactgttttccatcagtgccagatgggactgtct

SEQ ID NO: 16314 - DNA, 120 bp, synthetic construct; identical to SEQ ID NO: 5215
  source 1..120: mol_type = other DNA

SEQ ID NO: 16315 - DNA, 120 bp, synthetic construct
  source 1..120: mol_type = other DNA
gtggaatgatttacatcatgaaattaccagccctaagggattgccttagtgaagttgttttccaaacaccagaatacagaaatctaaactattttagagactgttgacctggagatttgc

SEQ ID NO: 16316 - DNA, 120 bp, synthetic construct
  source 1..120: mol_type = other DNA
cttacctacagagaaaaccaatttgcataacagtgggtatcttatcagaaatcacagaagtcagaaagagtggcacaacagttttcaaggaccgaaagaaaagaattgttaattctgaat

SEQ ID NO: 16317 - DNA, 120 bp, synthetic construct
  source 1..120: mol_type = other DNA
ccagatggaaagaaatgataaaagaagaaataattgacaccaggaaagaagaaagaacatggtaagcaaaaaaaaaaaaggtaaaaacaatacattttccttttcctcttgagctttcta

SEQ ID NO: 16318 - DNA, 120 bp, synthetic construct
  source 1..120: mol_type = other DNA
agcctgactaacatggtgaaaccccgtctctactaaaaatacaaaaaattagctgggcatggtggcacacacctgtagtcccagctactcgagaggctgaggagggagaatcacttgaac

SEQ ID NO: 16319 - DNA, 120 bp, synthetic construct; identical to SEQ ID NO: 5216
  source 1..120: mol_type = other DNA

SEQ ID NO: 16320 - DNA, 120 bp, synthetic construct
  source 1..120: mol_type = other DNA
cctgtaatgccagcactttgggaggctgagggggatcacctgtggtcaggaattcgagaccagcctggccaacatggtgaaaccctgtctctactaaaactacaaaaattagctgggcat

SEQ ID NO: 16321 - DNA, 120 bp, synthetic construct
  source 1..120: mol_type = other DNA
aaagtatactagtagtccacaaagaaggctttaataaataaatacatacatacatacatatccccagaaaatggcagtaacagggtacaaatagaaaacaaactgctagatttcagccct

SEQ ID NO: 16322 - DNA, 120 bp, synthetic construct
  source 1..120: mol_type = other DNA
aaatataattatacatacaggttgaaattaagcatataaaaatatataacattcaaatgttaattaaaagaaagcaaaagtgagtatattaatataatatgaactttatttatttatctt

SEQ ID NO: 16323 - DNA, 120 bp, synthetic construct
  source 1..120: mol_type = other DNA
agctggaattacaggcacgtaccaccatgactggctaatttttgtatttttagtagagatggggtttcactatgttggtcaggctggtctcaaactcctgacctcaggtgatctacccac

SEQ ID NO: 16324 - DNA, 120 bp, synthetic construct; identical to SEQ ID NO: 5217
  source 1..120: mol_type = other DNA

SEQ ID NO: 16325 - DNA, 120 bp, synthetic construct
  source 1..120: mol_type = other DNA
acatattctgggccataaaacaaacctcaaatttaaaagaattaactcacacagtatgatccctgaccacaatgaaatcaaactaaaagtcaatcacagaaagacaacagaagaacatcc

SEQ ID NO: 16326 - DNA, 120 bp, synthetic construct
  source 1..120: mol_type = other DNA
tcaagacaacctaaaaaaacactgagagagaaatgtataccactaactgcatacattagaaaaagaaaaaagtctcaagtcagtcatctaaacttttatttgaagaacccaggtggggaa

SEQ ID NO: 16327 - DNA, 120 bp, synthetic construct
  source 1..120: mol_type = other DNA
caataaaagaagacctctagtaagacagaaattttaggaagagagatgacacaaattaccaatatcaggaataaaaagaggatatcactgtagactctgctgacatcaaaaggatatgtt

SEQ ID NO: 16328 - DNA, 120 bp, synthetic construct; identical to SEQ ID NO: 5218
  source 1..120: mol_type = other DNA

SEQ ID NO: 16329 - DNA, 120 bp, synthetic construct
  source 1..120: mol_type = other DNA
catgtagagaaggaaaaaaaaaaaggaaagtgatgtggaaattaaaatagcagctgcataggaatctcaacatagtgcttaaaatgtgcataaacgagactaggagtgccctgcgctttt

SEQ ID NO: 16330 - DNA, 120 bp, synthetic construct
  source 1..120: mol_type = other DNA
attattcagaatatatatatatataatatacatagtatatactaataatatataaggatatattatatcctaataatataagtaaataataatatataacttgttaaataatcatataaa

SEQ ID NO: 16331 - DNA, 120 bp, synthetic construct
  source 1..120: mol_type = other DNA
taagggaatactattgtggtggtaaactgaggaacggaaagactgatacaggagaacaggaggatatttattttaaggtaagcagccactgagtggattcacatccaaaaagttgagcac

SEQ ID NO: 16332 - DNA, 120 bp, synthetic construct; identical to SEQ ID NO: 5219
  source 1..120: mol_type = other DNA

SEQ ID NO: 16333 - DNA, 120 bp, synthetic construct
  source 1..120: mol_type = other DNA
taatcatacagtgcttaatttgtggccttgcagctgcgtcaaaagaaaaacaagaactgactaaatacagacatttgtaaaaacagttatgcttaagaagccagggaaaggagtaacagt

SEQ ID NO: 16334 - DNA, 120 bp, synthetic construct
  source 1..120: mol_type = other DNA
tccttgaagtgagctgctaggcaaacgaaaacttgtttcttttctttttaaccctttcctgttacttttcttggagtgaatgaatgcatatttatttttaaatttctgccttactatgaa

SEQ ID NO: 16335 - DNA, 120 bp, synthetic construct
  source 1..120: mol_type = other DNA
aattaaatttgtaacataatttaaaaaaaaaatcaagaatctggccgggcgtggtggctcatggctgtaatcccagcactttgggaggccaaggcgggctgatcacctgaggtcagaagt

SEQ ID NO: 16336 - DNA, 120 bp, synthetic construct; identical to SEQ ID NO: 5220
  source 1..120: mol_type = other DNA

SEQ ID NO: 16337 - DNA, 120 bp, synthetic construct
  source 1..120: mol_type = other DNA
cctggctaacacggtgaaaccccgtctctactgaaaaaacaaaaaattagctgggcgtggtggcagggagcctgtagtcccaactactcgctggagaatggcgtgaacccgggaggcgga

SEQ ID NO: 16338 - DNA, 120 bp, synthetic construct
  source 1..120: mol_type = other DNA
aaaaaactttccatttatttatgaagttaatagtatcctgatgctaaaaccaggtaaatacagtacaaaataatgagtattggtgcataaatacttaccaaaatattatcaaatagaatt

SEQ ID NO: 16339 - DNA, 120 bp, synthetic construct
  source 1..120: mol_type = other DNA
atcacgtgatcatatcacagtagaaaaagaatttgtcaaacttcaatagctactcatgacaaaaagtctcagaaaaataggaatagagaacagctaacactgtacatcacggtaaaagac

SEQ ID NO: 16340 - DNA, 120 bp, synthetic construct
  source 1..120: mol_type = other DNA
tctcggctcatttcaacctccgcctcctgggttcaagcaattcttctgcctcagtctcccgagtggctgggactacaggcgcaggccaccatgcccggctaatttttgtatttttagtag

SEQ ID NO: 16341 - DNA, 120 bp, synthetic construct; identical to SEQ ID NO: 5221
  source 1..120: mol_type = other DNA

SEQ ID NO: 16342 - DNA, 120 bp, synthetic construct
  source 1..120: mol_type = other DNA
tctcccacaaagtcaaaggaattagaataattatttaaaatctaggagggaaaaacagtctacctgatttcaagactatttcattacattgttgtattcttgtattattgtattattact

SEQ ID NO: 16343 - DNA, 120 bp, synthetic construct
  source 1..120: mol_type = other DNA
atattctcaactggtttttgacaaagttgcctaagtagtaattccatggaagaaaaataagtctcatgccttcacaaaagtgaacttaaaatggatcgcagatatgaatataaaatgtaa

SEQ ID NO: 16344 - DNA, 120 bp, synthetic construct
  source 1..120: mol_type = other DNA
tcctcctttcctctcctgctatgtcagttgctttggctggtacagaggctgaccaaatagaaatagaaataagagagcagtaaaggcaatgaattgggtcatgtttttactttttatgtg

SEQ ID NO: 16345 - DNA, 120 bp, synthetic construct; identical to SEQ ID NO: 5222
  source 1..120: mol_type = other DNA

SEQ ID NO: 16346 - DNA, 120 bp, synthetic construct
  source 1..120: mol_type = other DNA
gaaagaaagaaagaaaaagaaagaaagaaagaaagaaagaaagaaagaaagaaagaaagaaagaaagaaaagaaagaaaggaaaaagagaaagaaagagaagggagggtagaatgataag

SEQ ID NO: 16347 - DNA, 120 bp, synthetic construct
  source 1..120: mol_type = other DNA
gacggtgtcaaagagataataaatgcatccccacccctgatgtaaggcaaatacaaacctcactggctttcctaggtggtttgagtttttgattgagaataggcagggaaccccgggaac

SEQ ID NO: 16348 - DNA, 120 bp, synthetic construct
  source 1..120: mol_type = other DNA
ttgggaggccgaggcgggcggatcacggggtcaagagttcgagacaagcctgaccaacatagtgaaaccccgtctcgactaaaaatacaaaaattagctgggcatagcggcgcgcgcctg

SEQ ID NO: 16349 - DNA, 120 bp, synthetic construct; identical to SEQ ID NO: 5223
  source 1..120: mol_type = other DNA

SEQ ID NO: 16350 - DNA, 120 bp, synthetic construct
  source 1..120: mol_type = other DNA
aaacaagtatgaaacgaaaagaaaatgtctgcattaccttccttcaaacaaaaaaaaaaaatgtatcttataacgaacatatggtttgtccctggggcacacaaccagtcttcagctaag

SEQ ID NO: 16351 - DNA, 120 bp, synthetic construct
  source 1..120: mol_type = other DNA
aacatcgtactctgttgcctctcaaagacacttttgattcaacggcaaacatatacacagaggacagcagttttgaaacatgcagcattggaaacccctaaaaggtgtcatcagtagata

SEQ ID NO: 16352 - DNA, 120 bp, synthetic construct
  source 1..120: mol_type = other DNA
gaagtgccaacacacctgcaatttactcacctttactttgcatctattttccattgtggcagaaaagctttctctactttttcatatggggcctctgtttgctgttaacagaggtttcca

SEQ ID NO: 16353 - DNA, 120 bp, synthetic construct; identical to SEQ ID NO: 5224
  source 1..120: mol_type = other DNA

SEQ ID NO: 16354 - DNA, 120 bp, synthetic construct
  source 1..120: mol_type = other DNA
gcaatacaggaaaatgaatcaatcgtatggactatcagtagggaatgtgttgatccttattgatttcgctccttccgtgttgaagacctctaattccccgacagtcttcgttcggttgtc

SEQ ID NO: 16355 - DNA, 120 bp, synthetic construct
  source 1..120: mol_type = other DNA
ttgactctggatttggctcagaaaacaaaaacaacgaccaaaacgaaatgcccggggggcgggggggggcttttctgcctttcttcttctcagcctttccttctctttaatcatagtaca

SEQ ID NO: 16356 - DNA, 120 bp, synthetic construct
  source 1..120: mol_type = other DNA
atgttgaggcttacattatagagatgggagataagtgaaggcaatccattgggttacgtttttactctctatacgtgcagaaataggatagaaaaaggtgaggaggcagaaggctatgtt

SEQ ID NO: 16357 - DNA, 120 bp, synthetic construct; identical to SEQ ID NO: 5225
  source 1..120: mol_type = other DNA

SEQ ID NO: 16358 - DNA, 120 bp, synthetic construct
  source 1..120: mol_type = other DNA
aaacgttgagttgtcaggatctccttcttctgttatgcttggcaaggaatcaaattctggtttttcattctttcgatttctttcagagatgacgcaaagttattgaaattcagctttttc

SEQ ID NO: 16359 - DNA, 120 bp, synthetic construct
  source 1..120: mol_type = other DNA
gggtctttagctggtgtgttgtcctgcgcctgtactcacagctattccagaggctgaagcaggaggatcacttgaccttgggagctggaggctgcagggagctatgatcacgccactgca

SEQ ID NO: 16360 - DNA, 120 bp, synthetic construct
  source 1..120: mol_type = other DNA
ggtgagataaaaaataagtagaaacaggatttaagaggtacgggggaaagtggtttagaaaaacaaacaggctattgccaaacagaaggaggtgtagaaaaggggagtttttaacaactc

SEQ ID NO: 16361 - DNA, 120 bp, synthetic construct; identical to SEQ ID NO: 5226
  source 1..120: mol_type = other DNA

SEQ ID NO: 16362 - DNA, 120 bp, synthetic construct
  source 1..120: mol_type = other DNA
ctgtctctactaaaaatacaaaaattagctgggtgtggtggtgcattcctgtaatcccagcttctcgggaggctgaggcaggagaattgcttgaacctaggaggtggaggttgcagtgag

SEQ ID NO: 16363 - DNA, 120 bp, synthetic construct
  source 1..120: mol_type = other DNA
gaaccctggtatttattattatttatcatgattagggctgtgttctttgaactacataagaagatgagaagaaaatccatttcctgacaccaaatttctagtgactgttaactctttctc

SEQ ID NO: 16364 - DNA, 120 bp, synthetic construct
  source 1..120: mol_type = other DNA
gaaataacattgatcccttgtagaactggcagaaaacagcaggttatatggcagacttgtcttttcggttggctgatggaatttctagaacaaaaataggaagcactgaatgctaggttt

SEQ ID NO: 16365 - DNA, 120 bp, synthetic construct
  source 1..120: mol_type = other DNA
atgctagggagataatcttagctctttgatgctgcagaagtaatattaggacaatttgcagaaacactccttcatcattatgtcatgttgcacccagagaaacctggatgtctactggat

SEQ ID NO: 16366 - DNA, 120 bp, synthetic construct; identical to SEQ ID NO: 5227
  source 1..120: mol_type = other DNA

SEQ ID NO: 16367 - DNA, 120 bp, synthetic construct
  source 1..120: mol_type = other DNA
aattgcccagtccaagttaagagtgttgtaagtgtaaaatacatatcagatttggccaggcacagtagcttgcgtctgtaatcccagtactttgggtggctgaggtgggtggatcacaag

SEQ ID NO: 16368 - DNA, 120 bp, synthetic construct
  source 1..120: mol_type = other DNA
ggagaattgcttgaacctgggaggctgaggttgcagtgagccgacatcgggccactgcactccagcctgggtgacagagcgagaatccttcgcaaaaaaaaaaaaaaaaaaaaaaaatat

SEQ ID NO: 16369 - DNA, 120 bp, synthetic construct; identical to SEQ ID NO: 1681
  source 1..120: mol_type = other DNA

SEQ ID NO: 16370 - DNA, 120 bp, synthetic construct; identical to SEQ ID NO: 5228
  source 1..120: mol_type = other DNA

SEQ ID NO: 16371 - DNA, 120 bp, synthetic construct
  source 1..120: mol_type = other DNA
tgcatttctatgcatgatctcctttgatctttacaacatcccattttacaaaatcattattaacatcatttttaagccattgaatggcagacaaatcatgcttggaattgccctaggcct

SEQ ID NO: 16372 - DNA, 120 bp, synthetic construct
  source 1..120: mol_type = other DNA
ttcttaatggagtaaaacacaagcttctgagttgagaaagcctcagtgaaaggataaagtacctgattcccagtttctgtacagtcaatgtccctaacccaaggttacttctcatttggt

SEQ ID NO: 16373 - DNA, 120 bp, synthetic construct
  source 1..120: mol_type = other DNA
aagaaaaaaaatcaaaatgaccaaaaaaagacctattatcccaacagagaatttcaagagaggagttgaagtgaaaaagggaaaatggggcacatgcacctgagtcttgactttgctgcc

SEQ ID NO: 16374 - DNA, 120 bp, synthetic construct; identical to SEQ ID NO: 5229
  source 1..120: mol_type = other DNA

SEQ ID NO: 16375 - DNA, 120 bp, synthetic construct
  source 1..120: mol_type = other DNA
aaatacaaaaaaaaaaaaaaaaaaaaatttagccaggcatggtggtgctcgcctgtagtcccatctactcagggtgctgacatgtggagtcacttcagcctagagaggttgaggctgtag

SEQ ID NO: 16376 - DNA, 120 bp, synthetic construct
  source 1..120: mol_type = other DNA
aaagaaagaaagaaagaaagaaagagaaagaaagaaagaaagagaaagaaagaaaaaaaaagttcttacagcactttaataatggagttgactcaagatacaaacccgggtttttctaat

SEQ ID NO: 16377 - DNA, 120 bp, synthetic construct
  source 1..120: mol_type = other DNA
tacatataaataatatcaaatcaaaaatgacttgtaaatgccacagcatatagcacgttggaatttcttaggttttaaaactaataacttcctaagtttaagactttaaataaggacggg

SEQ ID NO: 16378 - DNA, 120 bp, synthetic construct; identical to SEQ ID NO: 5230
  source 1..120: mol_type = other DNA

SEQ ID NO: 16379 - DNA, 120 bp, synthetic construct
  source 1..120: mol_type = other DNA
ttcagtggaatatacaaaggagagagtgatacaaacatgtacattacctttatcagactttcaaaaactcccaaaaattggagatatgtaagcttctgggattggcgtataagtgctgta

SEQ ID NO: 16380 - DNA, 120 bp, synthetic construct
  source 1..120: mol_type = other DNA
tctaacgctctcccaactgagctatttcagctactctaagcacacacccttagtcatttcttcaaaatataaaaacgtcatttgtagagtgagtgtattttctaatgcctaattctgttt

SEQ ID NO: 16381 - DNA, 120 bp, synthetic construct
  source 1..120: mol_type = other DNA
agatcacgccactgcactccagactgggcgatagagggagattgtctaaaaaaaataaattaaataaataaaataagtgacaggaaaagaaagaaaagaaggatctcttatgtcctccag

SEQ ID NO: 16382 - DNA, 120 bp, synthetic construct; identical to SEQ ID NO: 5231
  source 1..120: mol_type = other DNA

SEQ ID NO: 16383 - DNA, 120 bp, synthetic construct
  source 1..120: mol_type = other DNA
tacgcccactttacaaatgaagatttttatattttgaagaaattgctaacggcacgtgcttagagtagccaaaattgctcagttgggagagcgttagactgaagatctaaaggtccctgg

SEQ ID NO: 16384 - DNA, 120 bp, synthetic construct
  source 1..120: mol_type = other DNA
ttaagtcaaaagtgtaaaaacattgaacttctctggttagacataggaacaaattcagatgtttacagaatttcggaaacaaccctctctggaatgagaaaattgctgaggccgacgatg

SEQ ID NO: 16385 - DNA, 120 bp, synthetic construct
  source 1..120: mol_type = other DNA
tatttttcaattatttcctcaaaaaaagttttagattctcttacagacttttttctccccttgtaaggtctgagccttctcagacaggaaacaacattcctctactctagttttatcccc

SEQ ID NO: 16386 - DNA, 120 bp, synthetic construct; identical to SEQ ID NO: 5232
  source 1..120: mol_type = other DNA

SEQ ID NO: 16387 - DNA, 120 bp, synthetic construct
  source 1..120: mol_type = other DNA
tgtaatctcagctaatcgggagactgaggcaggagaatcgcttgatcccaggaggtggaggttgcagtgaaccgagatcgcgccactgcactgcagcctgggcgacagagcgagactccg

SEQ ID NO: 16388 - DNA, 120 bp, synthetic construct
  source 1..120: mol_type = other DNA
ccgtgaagtggaggaagcaaaggacaaaagggagagaggtagagggcaaggaaaagcatcctcaagattattagtacttggatagactggatggtagagtgagtctgatcgccacatctc

SEQ ID NO: 16389 - DNA, 120 bp, synthetic construct
  source 1..120: mol_type = other DNA
cacctctctttacgttgctggacagaccagttgagctctttgggtatgcacgtaatgtcgcatttttattttcagttcaggaaatgctgatattggagcttctgagggagctgcagtgat

SEQ ID NO: 16390 - DNA, 120 bp, synthetic construct; identical to SEQ ID NO: 5233
  source 1..120: mol_type = other DNA

SEQ ID NO: 16391 - DNA, 120 bp, synthetic construct
  source 1..120: mol_type = other DNA
agaaatgccacactttgagacgaatttaagagtcctttattagccggcgaccaaaagaggactaacgctcgatattctctcggccccgaggaaggggcttgattttcctttatactttgg

SEQ ID NO: 16392 - DNA, 120 bp, synthetic construct
  source 1..120: mol_type = other DNA
ctatcataaggcattaggtatgggggttctgccagacacaaactcaaggctttatggtgttatctcttgagtgaaatcctgggaacttcgtgcattgtttgcttcagtaccttatcagtt

SEQ ID NO: 16393 - DNA, 120 bp, synthetic construct
  source 1..120: mol_type = other DNA
tcagctaagggacagcctattcatgtggaaataaggctaggtgattaacggagagtctaaaaacaacgttaggtattacattccccacttgtgtttttggggaatcaaatcgttgattcc

SEQ ID NO: 16394 - DNA, 120 bp, synthetic construct; identical to SEQ ID NO: 5234
  source 1..120: mol_type = other DNA

SEQ ID NO: 16395 - DNA, 120 bp, synthetic construct
  source 1..120: mol_type = other DNA
cagcggttttgaagaactacttcagctagagactctacctgggaatgtaacaaatctacgacagactggaggttacttaaattagcatctacctgttgagatagggccattattccagtt

SEQ ID NO: 16396 - DNA, 120 bp, synthetic construct
  source 1..120: mol_type = other DNA
ctgggatctaactcagggggagaaatgagaagttgtccttctggtccactgtacacgtatacccagggaagtacatgaacttacatgcacaggagaggtcctggttcagttccattaatg

SEQ ID NO: 16397 - DNA, 120 bp, synthetic construct
  source 1..120: mol_type = other DNA
taggcacttggtaagagactgaggtgcttatggaagtaagcagggactgattacaagtagtctgaaagggagaagcagataagttatacccggtactaattagacaagaagcgtttccag

SEQ ID NO: 16398 - DNA, 120 bp, synthetic construct
  source 1..120: mol_type = other DNA
cctacataataagggggttttgcttttagacatagccaacaatcttgggctagtttaggctgggtgaggttaagaaggtgatgtaccctgcctagtatggacatcaggctgtgttgaaga

SEQ ID NO: 16399 - DNA, 120 bp, synthetic construct; identical to SEQ ID NO: 5235
  source 1..120: mol_type = other DNA

SEQ ID NO: 16400 - DNA, 120 bp, synthetic construct
  source 1..120: mol_type = other DNA
tacacgtgtccaatcagggcagaaaaactggtaaatatctcaacagctagagtcagggtgatttccaggacagaggtaaaagtcaacattctgaagtcctttttccgcacctttggagct

SEQ ID NO: 16401 - DNA, 120 bp, synthetic construct
  source 1..120: mol_type = other DNA
acataaatcaactgcaaaggagacttccttggaggttcctgccctccaagtactgtttgcgaatatacgtcttgtcatgaaataggtgagaagaagggaataggaaggtgcagaggacat

SEQ ID NO: 16402 - DNA, 120 bp, synthetic construct
  source 1..120: mol_type = other DNA
ttgttggcctttttgatgcgggagtgacgaatccaagcaggaatgccatccaccttcagagctgttggcatggtgaggatgacagtatgaggtcctatgtaagcaggagtgagtccttct

SEQ ID NO: 16403 - DNA, 120 bp, synthetic construct; identical to SEQ ID NO: 5236
  source 1..120: mol_type = other DNA

SEQ ID NO: 16404 - DNA, 120 bp, synthetic construct
  source 1..120: mol_type = other DNA
ctagcccagtaaggagtgcaccttactctaagaaaggctaaaggaaggagccttactcagttctcaccggtctctaagattaactttgtaagagtgctttttagggtgcggttcatgcgt

SEQ ID NO: 16405 - DNA, 120 bp, synthetic construct
  source 1..120: mol_type = other DNA
gcagcaggcagcccatgtcgagggatgatttcattgagtaaaaacctaactaccatggtggcagtctcattcttggtggcaaatgcctcagtccatacggagaaggtgtctactagtact

SEQ ID NO: 16406 - DNA, 120 bp, synthetic construct
  source 1..120: mol_type = other DNA
tttacctgggcacaagttgtacaccggagagctgcttgatctgctaagctttgaagatagggaatcttaaaatggctctagaggagccgggccagttttgctcctcctaaatgggtggta

SEQ ID NO: 16407 - DNA, 120 bp, synthetic construct; identical to SEQ ID NO: 5237
  source 1..120: mol_type = other DNA

SEQ ID NO: 16408 - DNA, 120 bp, synthetic construct
  source 1..120: mol_type = other DNA
tagtctttcctgctgaggtgcccacgctcctgatagatggctccatgtacatgtacagtagttaaagcatacctgctgtcagtgtaaatgttaataagtttatccttaccccatcggaga

SEQ ID NO: 16409 - DNA, 120 bp, synthetic construct
  source 1..120: mol_type = other DNA
gagaaagctgctaccgcctgtaaacatggcggcgtccaccttctttaggggcacatcttggagatcaggtgggccagtttctgtagtttctaacagttcctggcagtcatggacaggtgt

SEQ ID NO: 16410 - DNA, 120 bp, synthetic construct
  source 1..120: mol_type = other DNA
tttgccagaagcacttcgtaataaagtctctacggcatgaggagcggtaaaggttaaattttgacctagagttaacttatcagcctcttagactaggcttgctgttgccactatgactcg

SEQ ID NO: 16411 - DNA, 120 bp, synthetic construct; identical to SEQ ID NO: 5238
  source 1..120: mol_type = other DNA

SEQ ID NO: 16412 - DNA, 120 bp, synthetic construct
  source 1..120: mol_type = other DNA
ggaattcacgtacctgtctcttggtggtgggagtggggattcgtaggatggcttctttccgggcactggtgagtgccctttttccttggcttatgtcgtatcctaggtaggacactgtgg

SEQ ID NO: 16413 - DNA, 120 bp, synthetic construct
  source 1..120: mol_type = other DNA
aggcaactgtctttagtttcagtagctaataaaaggttgtccacctactgaagaagagtacagttaaggtgactagcttggaatggtataggatcctgctggagggcctctccaaaaagg

SEQ ID NO: 16414 - DNA, 120 bp, synthetic construct
  source 1..120: mol_type = other DNA
gcaaggaaggcatcctttaggtcaaggacagtgtatatactgtaagttctggcgggagcaggttgagtagagtataaggattggggacagttggatggacagtaacagtctgtttgttaa

SEQ ID NO: 16415 - DNA, 120 bp, synthetic construct
  source 1..120: mol_type = other DNA
tgacacggtgtgagtatgccagcttgtaacagtcattgaatatggggattaatctcctgtctagcctgctgactcataggatattgctttacctggacaggcaaggcagtggccaggagt

SEQ ID NO: 16416 - DNA, 120 bp, synthetic construct; identical to SEQ ID NO: 5239
  source 1..120: mol_type = other DNA

SEQ ID NO: 16417 - DNA, 120 bp, synthetic construct
  source 1..120: mol_type = other DNA
tgtcccaagctcacttctcgtgagtgtgtgacaggatattcctgaatagctccagtagacctttgtacagccactcttttattagagacactgcccaagggggtctgtagtaccgagtgc

SEQ ID NO: 16418 - DNA, 120 bp, synthetic construct
  source 1..120: mol_type = other DNA
gcggggagggtgagggcctttttcttttctgatttttcctctggccgtagtgggcattcctttttccagtgcccagtctgcttgcaataagcacatttgtccttttctaggggagcctgt

SEQ ID NO: 16419 - DNA, 120 bp, synthetic construct
  source 1..120: mol_type = other DNA
gctttatcagctgctgcctgtgctgtttgttttcttttttcaaactctcgattgtcaaaaactttttgggctatctctaaaagctgagtgatattcatcccaggaaatccctccagtttt

SEQ ID NO: 16420 - DNA, 120 bp, synthetic construct; identical to SEQ ID NO: 5240
  source 1..120: mol_type = other DNA

SEQ ID NO: 16421 - DNA, 120 bp, synthetic construct
  source 1..120: mol_type = other DNA
tcctcctctggcctattggctgatgtgaggaaatactttctggcctctcttcggatatgttccctctcttcagaggtaaaaagggtcaaaaggagctgctgacagtcatcccaggtgggc

SEQ ID NO: 16422 - DNA, 120 bp, synthetic construct
  source 1..120: mol_type = other DNA
aatggggctgagcgctcatcacccggagggacttgtgcttctttccgcggtagagggggggctacttcctcctgccgcggccgcaatcgagaggcaataggcggcgagcctacaggggat

SEQ ID NO: 16423 - DNA, 120 bp, synthetic construct
  source 1..120: mol_type = other DNA
gagggtccaggcggaagtgcggtctggctcaaaacgaccttggaggcagaattatgaatggcgcatgagcggagccatggtggggagcttctgaccaaactcagccattgatcaatgtgg

SEQ ID NO: 16424 - DNA, 120 bp, synthetic construct; identical to SEQ ID NO: 5241
  source 1..120: mol_type = other DNA

SEQ ID NO: 16425 - DNA, 120 bp, synthetic construct
  source 1..120: mol_type = other DNA
ggggctggagtatcggaagaacagaattaacataaccagaaggagccgaaagacaacaatagctcacactacttgccacaggacggttaactagctttaagattgagggaggtcgggcgc

SEQ ID NO: 16426 - DNA, 120 bp, synthetic construct
  source 1..120: mol_type = other DNA
aattagctgggtgtggtgacgggtgtctgtagtcccagctacttgggaggctgaggcagaagagtggcctgaacctgggaggcggagcttgcagtgagctgagatcgcgccactgcactc

SEQ ID NO: 16427 - DNA, 120 bp, synthetic construct
  source 1..120: mol_type = other DNA
tctttccctggacctgtagcctaaatacttttggtgtctccacgactcaaaggcaaatagctcaaattcggccttttcttttaagagtttgaggagtgagagcagagccaagtcctggag

SEQ ID NO: 16428 - DNA, 120 bp, synthetic construct
  source 1..120: mol_type = other DNA
tctttcctagggtaggagagtagccacagaggaatagaataagggtttaaacgaagtaaagtggtacgggcgtaggtttctctgcacagtgccgtatttaagggcacagaaaaagttacg

SEQ ID NO: 16429 - DNA, 120 bp, synthetic construct; identical to SEQ ID NO: 5242
  source 1..120: mol_type = other DNA

SEQ ID NO: 16430 - DNA, 120 bp, synthetic construct
  source 1..120: mol_type = other DNA
gtatcgatgacctgacatacgaaactttgacaaccactaaacaggacaatagacaccgagcaggacaacaaacacaaaacaaacaatagacccttgggtatataaacaattatggtaggt

SEQ ID NO: 16431 - DNA, 120 bp, synthetic construct
  source 1..120: mol_type = other DNA
tgggcttctcttagcattggcaggcaggtataaacccccggctcggatggagctatgcccgatgctgccttaagccttatgaggtcgccacggaacggcaggtgagggcccactcgaact

SEQ ID NO: 16432 - DNA, 120 bp, synthetic construct
  source 1..120: mol_type = other DNA
agagtttataacaatttttgttatttcccgttctaaacaaaggtcccagaagacctgaacgagaggaggagaagagatagagcaagggggagagaaagaaaaagaggaggagagagtgag

SEQ ID NO: 16433 - DNA, 120 bp, synthetic construct; identical to SEQ ID NO: 5243
  source 1..120: mol_type = other DNA

SEQ ID NO: 16434 - DNA, 120 bp, synthetic construct
  source 1..120: mol_type = other DNA
ggacctggaaaattttttttcaggtggctcctcgcctataagccggccgtccctccgggggagcccggagctagcccggctctcgcccagtggcgaatatatctcgctggggcttccaaa

SEQ ID NO: 16435 - DNA, 120 bp, synthetic construct
  source 1..120: mol_type = other DNA
tgattttcctttatactttggtttagaaaggggagggggagcttagttgcagcaattctacagaagtaaaagcatgcaaaaaaattaaaaagacaaatggttacaaggaaacaaacagtt

SEQ ID NO: 16436 - DNA, 120 bp, synthetic construct
  source 1..120: mol_type = other DNA
tgcttcagtaccttatcagttaattggactctttgatatgtaagagtcagcttacacaagttaactgcttgaggaagggggtgggtaaggagtctttgacgtcttgtaaatgaaggagcc

SEQ ID NO: 16437 - DNA, 120 bp, synthetic construct; identical to SEQ ID NO: 5244
  source 1..120: mol_type = other DNA

SEQ ID NO: 16438 - DNA, 120 bp, synthetic construct
  source 1..120: mol_type = other DNA
aagatataagtttactagtctgcaaaatagctcactttgtctgttcttatcagcctgcccagctacttaggtcataagtcaaacacttaaagagcccttgagctaaccaggattgcaatg

SEQ ID NO: 16439 - DNA, 120 bp, synthetic construct
  source 1..120: mol_type = other DNA
aggaacctggggagggacttgcgcactaggggacaaattgcttgttgaaactgttctgggtgtgcctgcacgccagacacccgatcttgatctctcaagaccgtcattaaaagtctcact

SEQ ID NO: 16440 - DNA, 120 bp, synthetic construct
  source 1..120: mol_type = other DNA
caaaattgacttaaggggtggtttgtgatcgcctggtagatggtggacggttacagcttttagaaagtgagtaaaagagatgatgcatacagaagccccactgggttgcttagcttctgc

SEQ ID NO: 16441 - DNA, 120 bp, synthetic construct; identical to SEQ ID NO: 5245
  source 1..120: mol_type = other DNA

SEQ ID NO: 16442 - DNA, 120 bp, synthetic construct
  source 1..120: mol_type = other DNA
acaaaacaaaacaaagaaatgaggttttggctgggtgcagtggctcacgcctgtaatcccggcactttgggaggccaaggtgggcagatcacgaggtcaggagattgagaccagcttggc

SEQ ID NO: 16443 - DNA, 120 bp, synthetic construct
  source 1..120: mol_type = other DNA
tcaggaggctgaggcaggagaattgcttgaacccagaaggcggagcttgcagtgagccaagatcgctccactgcagtccagcctgggcaacagagtgagacttcatctcaaaaaaaaaaa

SEQ ID NO: 16444 - DNA, 120 bp, synthetic construct
  source 1..120: mol_type = other DNA
ggatcttggactctggagttcagagagcttgccatttcagaccagaaacttccttaaagaaccaagagaagtaattttctccctgctaaatttcagctgaggtgattgagatcttttcct

SEQ ID NO: 16445 - DNA, 120 bp, synthetic construct
  source 1..120: mol_type = other DNA
agccacttgtagtggaatcttttagtgaaagcttgcaggacttttgcaacctgggtgaggaagcagttagaagaaagtaagaaacgcaaaagaacttgagccttaaccttctgatctgaa

SEQ ID NO: 16446 - DNA, 120 bp, synthetic construct; identical to SEQ ID NO: 5246
  source 1..120: mol_type = other DNA

SEQ ID NO: 16447 - DNA, 120 bp, synthetic construct
  source 1..120: mol_type = other DNA
caggagatcaggagcttgggaaaatgttttggtgatctccgttgcctgagtctgtgctctgtgtcatcaagacaatcactgtatgtttccaattccactgtttatgaattcccgacacta

SEQ ID NO: 16448 - DNA, 120 bp, synthetic construct
  source 1..120: mol_type = other DNA
gagaaagatatcttgtggtaaaaacaaaggcattgttcctgatgttcctgatttgtggtcagtccaagatcaactcaccccaaagtggtctccccatcatattagactttctggagcata

SEQ ID NO: 16449 - DNA, 120 bp, synthetic construct
  source 1..120: mol_type = other DNA
aactcaggtatgtgtgaaaataccctaaaattcagtacaaatagaggcaaattaactgcatttcaaaagaataacataaccacattgaagaggaaagaactgatataagaaaatggttta

SEQ ID NO: 16450 - DNA, 120 bp, synthetic construct; identical to SEQ ID NO: 5247
  source 1..120: mol_type = other DNA

SEQ ID NO: 16451 - DNA, 120 bp, synthetic construct
  source 1..120: mol_type = other DNA
actaaaaggaaccagagatactaatagaaagtagctattagtgtcaactacacagactccaggactgtgccagggaaactgcaaaatgaacctaagatatcttgccttgccagaatgtaa

SEQ ID NO: 16452 - DNA, 120 bp, synthetic construct
  source 1..120: mol_type = other DNA
ttttagcatcagtgatgacaataactgattatcattcttgggaacttaaacaaataaatatggaggacgggacgattttccttacagtggtttgccaaatgataaatgtgaaagtgagtg

SEQ ID NO: 16453 - DNA, 120 bp, synthetic construct
  source 1..120: mol_type = other DNA
atacaaaaccttggccgggcgtggtggcgggtgcctgtagtcccagctactcgggaggctgaggcaggagaatggcgtgaacccgggaggcggagcttgcagtgagccaagattgcgcca

SEQ ID NO: 16454 - DNA, 120 bp, synthetic construct; identical to SEQ ID NO: 5248
  source 1..120: mol_type = other DNA

SEQ ID NO: 16455 - DNA, 120 bp, synthetic construct
  source 1..120: mol_type = other DNA
ccaaattccataacccgatgtaatcttatcatggctaatacagattaagaaacgttgcacaaaaccactggaaaaactcttcaaaaacatgtcggtgttgtgaaagacaagaagattaag

SEQ ID NO: 16456 - DNA, 120 bp, synthetic construct
  source 1..120: mol_type = other DNA
aatttttaatagactttatattagactatattcacatttatcaatgtcaaatttactgaacttgataattgtgttgtgttaaggaattgacctttttcttaagaaatacacattgaagta

SEQ ID NO: 16457 - DNA, 120 bp, synthetic construct
  source 1..120: mol_type = other DNA
tgatttgtcattgaggaaaagatgttttgaaattatcccaagatttgaacaatatatgcttctcagatggtcccactttattttaaatgttgcaaggcagagacaaaggtacaaatttct

SEQ ID NO: 16458 - DNA, 120 bp, synthetic construct; identical to SEQ ID NO: 5249
  source 1..120: mol_type = other DNA

SEQ ID NO: 16459 - DNA, 120 bp, synthetic construct
  source 1..120: mol_type = other DNA
ctttattagtcttcaggaaatatagagtttgaaactatcatagcccaggaaaccctttaaatagggccatcagtaggccagaaattttgattagtgccttgaaaataaaagcatagccgg

SEQ ID NO: 16460 - DNA, 120 bp, synthetic construct
  source 1..120: mol_type = other DNA
aaaaaattagcctggcgtggtggcgggcgcctgtggtcccagctgctcgaggaggctgaggcagagaatggcgtgaacccgagaggcggagcttgcagtgagctgagatcgcgccactgc

SEQ ID NO: 16461 - DNA, 120 bp, synthetic construct
  source 1..120: mol_type = other DNA
actacagttaaaatgtcttacacatctgtgaactatttgtcctcttctcagaggagggacacttttttaggtactaaaaaagaattgtctggcacttcatggcagcaacatgtttgatgt

SEQ ID NO: 16462 - DNA, 120 bp, synthetic construct; identical to SEQ ID NO: 5250
  source 1..120: mol_type = other DNA

SEQ ID NO: 16463 - DNA, 120 bp, synthetic construct
  source 1..120: mol_type = other DNA
gaagaaaggaatggagggagggagagattgacagaacagattagaaaacataatccaactatacactatctaaaagaaactcatttcaaatataattatataagcaggctgaaattaagg

SEQ ID NO: 16464 - DNA, 120 bp, synthetic construct
  source 1..120: mol_type = other DNA
caaacagcagagctgcaacatgtaaaaaaaaaaaaaaaaaaaaaaaacaggaccgggcgcgctggctcacgactgtaatcccagcactttggaaggccgaggcgggcggatcacaaagtc

SEQ ID NO: 16465 - DNA, 120 bp, synthetic construct
  source 1..120: mol_type = other DNA
ctgaagcaggagaattgcttgaacctgggaggcggaggttgcagtgagccaagatcgtgccactgcactccagcctgggcaacaaagtaaggctctgtctcaaaacaaaacaaaacaaaa

SEQ ID NO: 16466 - DNA, 120 bp, synthetic construct; identical to SEQ ID NO: 5251
  source 1..120: mol_type = other DNA

SEQ ID NO: 16467 - DNA, 120 bp, synthetic construct
  source 1..120: mol_type = other DNA
taaaaaaatcgacaaatgcagttacattagagacttcacttctctctctctcttttttgtgaatttgttcttattggggaagacggcacagggtgggaaatgtcgccttgggctatggta

SEQ ID NO: 16468 - DNA, 120 bp, synthetic construct
  source 1..120: mol_type = other DNA
tgctcttgccagccgcctcttcaggcccactgctgaccagctcctctttggagaatttcctcgttttcttggagccacttctgtggcctgactcttcggtgtcattaactgtttcctcct

SEQ ID NO: 16469 - DNA, 120 bp, synthetic construct
  source 1..120: mol_type = other DNA
gaaaaagatttctttttcttgggtttggagaaagagatagatgggtcttccattccattctcctgatgaatctcctggggcttttgctttttcttctttttgggtttttcaatcgtctcc

SEQ ID NO: 16470 - DNA, 120 bp, synthetic construct
  source 1..120: mol_type = other DNA
cccgccaccacgcccggctaattttttgtatttttagtagagacggcgtttcaccatgttaggcagggtggtgtccatctcctgacctggtgatccacccgcctcggcctcccaaaatgc

SEQ ID NO: 16471 - DNA, 120 bp, synthetic construct; identical to SEQ ID NO: 5252
  source 1..120: mol_type = other DNA

SEQ ID NO: 16472 - DNA, 120 bp, synthetic construct
  source 1..120: mol_type = other DNA
aggacaaagagaaagccttagtagagatcaaaaaaataaattaacctgaataaaaatgaaaacacaatgtatcaaaatttccaagacaacttaatctctgagagagaaatttacagcact

SEQ ID NO: 16473 - DNA, 120 bp, synthetic construct
  source 1..120: mol_type = other DNA
cgcgtggattacaaggtcaggagttggagaccagcccggccaaaaaaaaaaaaaaaaaaaaaaaaaaaaaaaaaaaaaaaagaaagaaaagaaaaaagtctcaaatcagtcctttaagct

SEQ ID NO: 16474 - DNA, 120 bp, synthetic construct
  source 1..120: mol_type = other DNA
tcctttaaaagatcaataaaagaagacctctaggaggactgataattttttaagaagagagatgacacaaattgccaatatcaagaataaaaagaagagtatatcactatagactctgct

SEQ ID NO: 16475 - DNA, 120 bp, synthetic construct; identical to SEQ ID NO: 5253
  source 1..120: mol_type = other DNA

SEQ ID NO: 16476 - DNA, 120 bp, synthetic construct
  source 1..120: mol_type = other DNA
aggtagctaggattacaggcacgtgccagcacgcccggctaatttttgtatttttagtagagatggggtttcaccatgttggccaggctggtttccaactcctggcctcaggtgatccgc

SEQ ID NO: 16477 - DNA, 120 bp, synthetic construct
  source 1..120: mol_type = other DNA
ttaaagtgttttttaaattctcccttcttacatcttcttttccttctgccttcaagggctgtcacacgaagagtagcgtaggtggataaaaaaacagaatggtcagtaccgcctggggga

SEQ ID NO: 16478 - DNA, 120 bp, synthetic construct
  source 1..120: mol_type = other DNA
acccagcatggatttcatcttggggacgttgtggctccagttttgagactcaagtaacgatggatggagaggagaacaaggaccacctgagctcgaccacaagagctcgaggagggaagc

SEQ ID NO: 16479 - DNA, 120 bp, synthetic construct; identical to SEQ ID NO: 5254
  source 1..120: mol_type = other DNA

SEQ ID NO: 16480 - DNA, 120 bp, synthetic construct
  source 1..120: mol_type = other DNA
ccgaggaaaggacagagaagccgcctatttccaatccctactgttcgtcagggggagagtgttgaaccaggtctctctagaccctcctgcttaagcccctttgttataggtaggagagtg

SEQ ID NO: 16481 - DNA, 120 bp, synthetic construct
  source 1..120: mol_type = other DNA
cagggagtctcagtatattttaaacttaaattggttttcagaagtacttataccttgttcctaaggaattcagggtgtccagatttcaacctgcctagcagtgcgaagctctatgagtcg

SEQ ID NO: 16482 - DNA, 120 bp, synthetic construct
  source 1..120: mol_type = other DNA
gaagagtgggcaaaaccaaggtcaccacacaaaagtatatccctacacgagataagtggaaataaagcactggcttaggtgtggagaggaagagacaaatgtgaaaacgcagaaggtaga

SEQ ID NO: 16483 - DNA, 120 bp, synthetic construct; identical to SEQ ID NO: 5255
  source 1..120: mol_type = other DNA

SEQ ID NO: 16484 - DNA, 120 bp, synthetic construct
  source 1..120: mol_type = other DNA
ctaatttttgtatttttggtagagacgggtttcaccatgttggccaggaatgtctcgatctcttgacctcgtgattcacccgacttggcctcccaaagtgctgggattacaagcatgagc

SEQ ID NO: 16485 - DNA, 120 bp, synthetic construct
  source 1..120: mol_type = other DNA
aatgattacagtgtcttcctcagagcttagaaacttccaagctctaaggaaaggccttaggtttcaaattgaaaggccaaaatagcttgagatggctccaggtattttggctggaaagag

SEQ ID NO: 16486 - DNA, 120 bp, synthetic construct
  source 1..120: mol_type = other DNA
ctgatgtaatgcaaatacgtcactggctttcctacgtggtttgagttttttattgaaaataggcagggaaccccgggagcaactctttctccttagcaagcatctggccctgaactcctt

SEQ ID NO: 16487 - DNA, 120 bp, synthetic construct; identical to SEQ ID NO: 5256
  source 1..120: mol_type = other DNA

SEQ ID NO: 16488 - DNA, 120 bp, synthetic construct
  source 1..120: mol_type = other DNA
gctaagcaggtttcaccagacagtatccctcctggatactggttatggatattttcaccggataaaagaatcaagaagtgaggacatcccagcctgatagagtgttagactggtggatgg

SEQ ID NO: 16489 - DNA, 120 bp, synthetic construct
  source 1..120: mol_type = other DNA
taggatttcctgggagttccctggtcatgcaatgcaattgtgatgggattgacagagaaagaacaaaaaaaatttgttttcttttgtttttacctgaggaagtgctcaacacacctgcga

SEQ ID NO: 16490 - DNA, 120 bp, synthetic construct
  source 1..120: mol_type = other DNA
aggaaaatggaatggctgaggaaatacaggaaaatgaatcaattgtatcagtagggaatgttgatccgtattggtttctgctcctctcatgttgaaggtctcttattccctgacagtctt

SEQ ID NO: 16491 - DNA, 120 bp, synthetic construct; identical to SEQ ID NO: 5257
  source 1..120: mol_type = other DNA

SEQ ID NO: 16492 - DNA, 120 bp, synthetic construct
  source 1..120: mol_type = other DNA
catggtgaaaccccgtctctactaaaaatacaaaaattacccgggcctgatggcacgcacctgtaaacccacctgccgaggcagaagaatcgcttgaacccgggaggcagcggttgtaat

SEQ ID NO: 16493 - DNA, 120 bp, synthetic construct
  source 1..120: mol_type = other DNA
tttccttctctttaatcatagcacaaaatgagagcaaatgtgaacctcccgtggatgtgcacacttttgtttgggttcaagagaccctgttgggatcccattcttctttcttcctcattt

SEQ ID NO: 16494 - DNA, 120 bp, synthetic construct
  source 1..120: mol_type = other DNA
gcaacccattgggttacgtctttactctctatatgtgcagaaataggacagaaaaaggtgcggaggcagaagtaagtctatgttgcttgagaattaggtttgagcactaccagagcaaaa

SEQ ID NO: 16495 - DNA, 120 bp, synthetic construct; identical to SEQ ID NO: 5258
  source 1..120: mol_type = other DNA

SEQ ID NO: 16496 - DNA, 120 bp, synthetic construct
  source 1..120: mol_type = other DNA
tctcaaaaaaaaaaaaaatcacttcctaggtttcagactgtaaataatttatttaatgtcagcgcttcatggaagacttcactggaatatgcaaccaaagcagagagtgatgcatatata

SEQ ID NO: 16497 - DNA, 120 bp, synthetic construct
  source 1..120: mol_type = other DNA
ggttgtatcagccgagcgctgtgtcttacgcctgtaatcccagcactttgggaggccgaggcgggccgatcacctgaggtcgggagttcgagaccagcctgaccaacatggagaaactcc

SEQ ID NO: 16498 - DNA, 120 bp, synthetic construct
  source 1..120: mol_type = other DNA
agttcgctccattgcactcagcctgggcaacaagagtgaaactccgtcaaaaaataaataaataaacaaaataagggttctattaggcaaaactgaaagaaagaaagaaaaaaaaaaaac

SEQ ID NO: 16499 - DNA, 120 bp, synthetic construct; identical to SEQ ID NO: 2014
  source 1..120: mol_type = other DNA

SEQ ID NO: 16500 - DNA, 120 bp, synthetic construct
  source 1..120: mol_type = other DNA
tcccctacatggtcactgctcagaataccaagggaattcaaaagaaaattttctaggcttttccttttctctgggctcttgtttttctgtcttgctcttcaacgatatggcaaaaaggaa

SEQ ID NO: 16501 - DNA, 120 bp, synthetic construct
  source 1..120: mol_type = other DNA
ccaccttgggtggtacagagacccagggagtggaaatggaaagtataatatgtttattttagtgtgaccacgcaaggcatgtttttaaaaggagaaaagtacagagtggcgagaattgtg

SEQ ID NO: 16502 - DNA, 120 bp, synthetic construct
  source 1..120: mol_type = other DNA
ttctgagaggtcttcaaaaatatggtaagttggccggatagaaaatccactgtctcatatctcactatttcttacctctaaactatatcccctgaagctgctaggagaaatgtaagagaa

SEQ ID NO: 16503 - DNA, 120 bp, synthetic construct; identical to SEQ ID NO: 5260
  source 1..120: mol_type = other DNA

SEQ ID NO: 16504 - DNA, 120 bp, synthetic construct
  source 1..120: mol_type = other DNA
tcacaaaaaatcgctattgagtaaaataaaatatgctcgacatcttttgctataaaggaaatgcaaattaaaaacacaacaatgctggacacagtggctcacgcctatactcccagcagt

SEQ ID NO: 16505 - DNA, 120 bp, synthetic construct
  source 1..120: mol_type = other DNA
tacaaatacaaaaatttagacggccacatgcccctgtagtcccaactactcaggaggctgaggcatgagaatctcttgatcctgggaggcaaaggctacagtgagccaagattgtgccgc

SEQ ID NO: 16506 - DNA, 120 bp, synthetic construct
  source 1..120: mol_type = other DNA
taacccaaaaagtggataatatcaagtgttgctgagtatgtgaagcaattggaacgtgcatacatggctgatgagactgtaaactgctatatctacactgggaaactatctgaaaatatc

SEQ ID NO: 16507 - DNA, 120 bp, synthetic construct
  source 1..120: mol_type = other DNA
catttatacccaagagaagtgcatgagcatctcccttgaaggacatgtatcagaatgtttacagcagcattagacatttcaaccaaaaacgaggggtgctgcaaatgtacttggacagta

SEQ ID NO: 16508 - DNA, 120 bp, synthetic construct; identical to SEQ ID NO: 5261
  source 1..120: mol_type = other DNA

SEQ ID NO: 16509 - DNA, 120 bp, synthetic construct
  source 1..120: mol_type = other DNA
gctgaggcaggagaatggcgtgaacctggtaggcagagcttgcagtaagccaagatcgcgccactgcactccagcctgggcgacagagcaagtctccaccttgaaaaaaaaaaaaagaag

SEQ ID NO: 16510 - DNA, 120 bp, synthetic construct
  source 1..120: mol_type = other DNA
tgtggtttgaaagtgtcccctccaaagcttaggtgtcaccatgtgataattatcaagacatagggcctttaagaagattaagccatgagggttccttcctcatgaataatattaggtacc

SEQ ID NO: 16511 - DNA, 120 bp, synthetic construct
  source 1..120: mol_type = other DNA
cccagcctccagaactgtgagaaaatgtttctgggcctggtgcagtggctgtctcctgtaatcccagggttttgggaggccaaggtggatggatcacctgaggtcaggagttcgagacca

SEQ ID NO: 16512 - DNA, 120 bp, synthetic construct; identical to SEQ ID NO: 5262
  source 1..120: mol_type = other DNA

SEQ ID NO: 16513 - DNA, 120 bp, synthetic construct
  source 1..120: mol_type = other DNA
cagagagttaggataattgaaatgaggcaaaaggcagctgttggttgctgaaaaattcagtatcttggcctgaattttggttatatataataagccgtaagctgaataggtttcatgtgt

SEQ ID NO: 16514 - DNA, 120 bp, synthetic construct
  source 1..120: mol_type = other DNA
gagacggagtctcgctctgtcgcatcctcatgattattaggacttggatggacgggatggtacagtgagtctaagcgccacatccctccgtcgcttcctctggatatgagggaagaaagg

SEQ ID NO: 16515 - DNA, 120 bp, synthetic construct
  source 1..120: mol_type = other DNA
gagagtgatactgggttttggtttgcccttcaggaaccgctgatactgtagcttctgagggagctgcagggatttcccgatttcctgcgtgcctgtgttaaaagttagaagcgggatctg

SEQ ID NO: 16516 - DNA, 120 bp, synthetic construct; identical to SEQ ID NO: 5263
  source 1..120: mol_type = other DNA

SEQ ID NO: 16517 - DNA, 120 bp, synthetic construct
  source 1..120: mol_type = other DNA
cagtatagctgaatccctcacaagtcgagtgggttgacctcagattgactttagcgatggcttgtgaccacctgatagatagtggccgttacagcgtttagaaagtgagtaaaagaaagg

SEQ ID NO: 16518 - DNA, 120 bp, synthetic construct
  source 1..120: mol_type = other DNA
aaataaaagcagattttcttttaacaagatagtattaagatgcttgcagagtatttctctgtggatttctgcttggcactgtgataccacaaagagctctaatctggaggtatgggttgt

SEQ ID NO: 16519 - DNA, 120 bp, synthetic construct
  source 1..120: mol_type = other DNA
ttctcctatactgatcttggtccctggagttcagagtgtttgcatctcagaccagaagcttcctcagaggacccagagaagtgctttttacttccaccaaatttcagctgaggtgaatgc

SEQ ID NO: 16520 - DNA, 120 bp, synthetic construct; identical to SEQ ID NO: 5264
  source 1..120: mol_type = other DNA

SEQ ID NO: 16521 - DNA, 120 bp, synthetic construct
  source 1..120: mol_type = other DNA
aatcctaggcagcaaataacctcaagtgaatgaacacgcatcaccctctgtatgagagagaaatgcagaggccaacacaattcaccttgacagacagaaaaatttaaagttggggaatat

SEQ ID NO: 16522 - DNA, 120 bp, synthetic construct
  source 1..120: mol_type = other DNA
gactcagggccttcggaaaacgctttggtgacggccaatatgtgagcctgccctctgtgtcaggataatcactatatgtttccaattccattgttaattccctacatgaagcgcttcctc

SEQ ID NO: 16523 - DNA, 120 bp, synthetic construct
  source 1..120: mol_type = other DNA
tgtgagcctgccctctgtgtcaggataatcactatatgtttccaattccattgttaattccctacatgaagcgcttcctcttttaggcacggctgggccaaaagaagagtagcttagccg

SEQ ID NO: 16524 - DNA, 120 bp, synthetic construct
  source 1..120: mol_type = other DNA
gaaaaattagccgggcgtggtgacaggcgcctgtaatcccagctactctgaagtagagaattgcttgaacccgggaggcagaggttgcagtgagccgagatcgggccactgcactccagc

SEQ ID NO: 16525 - DNA, 120 bp, synthetic construct; identical to SEQ ID NO: 5265
  source 1..120: mol_type = other DNA

SEQ ID NO: 16526 - DNA, 120 bp, synthetic construct
  source 1..120: mol_type = other DNA
aaataaaactgactcaagtgcgtgtgaaaataccttaaaattcaatacgaatagaggcaaattcaaatggcgttgtctatcgcttctcggccttttggctaagatcaagtgtaaaattgc

SEQ ID NO: 16527 - DNA, 120 bp, synthetic construct
  source 1..120: mol_type = other DNA
gtatcagggttatttttgtagagctagggctgtaagaattctgagattttgtgtgaattttaggattgggaaaatgagtgtgtgtgaccgggtgtgttggaaccaggctgtcactgtaag

SEQ ID NO: 16528 - DNA, 120 bp, synthetic construct
  source 1..120: mol_type = other DNA
ttggcaggccaagacgggcagctcacttgaggtcaggagttcgagaacagcctggccaacatggtgaaacccccgtctctactaaaaatacaaaaattagccggatgtggttgtgcgtgc

SEQ ID NO: 16529 - DNA, 120 bp, synthetic construct; identical to SEQ ID NO: 5266
  source 1..120: mol_type = other DNA

SEQ ID NO: 16530 - DNA, 120 bp, synthetic construct
  source 1..120: mol_type = other DNA
ataaatatggaagatgggaagattttctttacagtggtatgccagctaataaatgtggaaagaaggataaaatttgcaaatccccattagaaaattagaaaatctggacaccatcagaat

SEQ ID NO: 16531 - DNA, 120 bp, synthetic construct
  source 1..120: mol_type = other DNA
gaggaagatgatacttttgcagggaagaaatagtagttacaaacttaaccaaatgatgaaagctaacttcactaataatggggaaaattggcatcacatgcttcttggtgtgatagagga

SEQ ID NO: 16532 - DNA, 120 bp, synthetic construct
  source 1..120: mol_type = other DNA
ttgtgaaagacacaattgagcaactgttctaaattaaaggagactaaagagtcaagacaattagattcatatgtgtctgtgaaatggatcctagcttgggagagaaatttctataaaaga

SEQ ID NO: 16533 - DNA, 120 bp, synthetic construct; identical to SEQ ID NO: 5267
  source 1..120: mol_type = other DNA

SEQ ID NO: 16534 - DNA, 120 bp, synthetic construct
  source 1..120: mol_type = other DNA
tatatatatatggagtatatatatatatatggagtatatatatatatatggagtatatatatatatatggagtatatatatatatatggagtatatatatatatatggagtatatatata

SEQ ID NO: 16535 - DNA, 120 bp, synthetic construct
  source 1..120: mol_type = other DNA
tatatattccattgttgctgattgtttggttgaagaggcaagatggtctgaaatgatcccaagatgtggacaatatgtgcttctcatgtggttcccattccattttaaatgtttccaggc

SEQ ID NO: 16536 - DNA, 120 bp, synthetic construct
  source 1..120: mol_type = other DNA
ttgggagtcaatcaactaaggacatctgaaggaaacagaatttaattctcagagtcaggaggtgatgagagactgctttggtagggaaagtaatagtaaatttgttctttcttggttaaa

SEQ ID NO: 16537 - DNA, 120 bp, synthetic construct; identical to SEQ ID NO: 5268
  source 1..120: mol_type = other DNA

SEQ ID NO: 16538 - DNA, 120 bp, synthetic construct
  source 1..120: mol_type = other DNA
taacacggtgaaaccccatctctactaaaaaatacaaaaaaattagccgggcgtggtggcgggtgcctgtagtcccagctactctggaggctgaggcaggagaatggcgtgaacccggga

SEQ ID NO: 16539 - DNA, 120 bp, synthetic construct
  source 1..120: mol_type = other DNA
aaagagtgttgaagaactcaaacatcttcagccaccagaattcagttaacatttataaaacagtccacacaggaagagcagaacacactagtcaaatccacactgaatataggtaaaggt

SEQ ID NO: 16540 - DNA, 120 bp, synthetic construct
  source 1..120: mol_type = other DNA
aaattaaagtaaaaatcagtcacaaaaagacagaaaaatgtccaaacgcttggaaaatgaacaacacactactaaacagttcatacaacaaagagaaaaccttagtagatatcaaaaaat

SEQ ID NO: 16541 - DNA, 120 bp, synthetic construct
  source 1..120: mol_type = other DNA
cagcactaagtgcatacattagaaaagaaaaaagtcccaaatcagtcctctaagctcttacttgtagaaatcaggtgggaaaaagagcaaaataacccaaagcaaatagaagaaaggaaa

SEQ ID NO: 16542 - DNA, 120 bp, synthetic construct; identical to SEQ ID NO: 5269
  source 1..120: mol_type = other DNA

SEQ ID NO: 16543 - DNA, 120 bp, synthetic construct
  source 1..120: mol_type = other DNA
gcatggtggcaggcgcctgtgatcccagctactcaggagactgaggcaggagaatcgcttgaactcaataggcggaggttgcagtgagccaagattgcaccactgcacttcagcctgggt

SEQ ID NO: 16544 - DNA, 120 bp, synthetic construct
  source 1..120: mol_type = other DNA
tacgtggtttaagtttttgattgagaataggcaaggaaccccaggaaaaaatcttccccctcagcagccacctgatcctgggacctccttcttaaacttctagaacagtgcttctcaaac

SEQ ID NO: 16545 - DNA, 120 bp, synthetic construct
  source 1..120: mol_type = other DNA
ctaattccccaccccttgctctcctgtgcagtgtccgctgtggctgacatgccgctgtttgcctggagagaaccaatagatgccaggaaattaaaaaagaaaaagtatgaaacacaaaga

SEQ ID NO: 16546 - DNA, 120 bp, synthetic construct; identical to SEQ ID NO: 5270
  source 1..120: mol_type = other DNA

SEQ ID NO: 16547 - DNA, 120 bp, synthetic construct
  source 1..120: mol_type = other DNA
agttcccttttcaaaaaaagcagttgtaatcagatggatcgagaaagaacatgaaatgtttgtttggttttttccaaggcagaaagcgcccacacaattgcgatctacttaccttttact

SEQ ID NO: 16548 - DNA, 120 bp, synthetic construct
  source 1..120: mol_type = other DNA
aatatgaatcagtcttatggaatatcagtagggaatgttgatccgtattagtttttgcttcttgcatgttgaaggcctctaattcccggacagtcttcgtttggccgtccagcgtcctgc

SEQ ID NO: 16549 - DNA, 120 bp, synthetic construct
  source 1..120: mol_type = other DNA
tcgctctgttctttggcccagaaaacaaaaataacttaaaaaaaaaaagatgcccactggcatttttctctcttcttggtctttgcgtctctttaatcatagtacaaaatggaaggccgg

SEQ ID NO: 16550 - DNA, 120 bp, synthetic construct
  source 1..120: mol_type = other DNA
aaaaaaattagctgggcgtggtggcgggcgcctgtaatcccagctacttgggaggctgaggcaggagaatctcttgaaaccggaaggcggaggttgcagtgagccgaggtggtgcgactg

SEQ ID NO: 16551 - DNA, 120 bp, synthetic construct; identical to SEQ ID NO: 5271
  source 1..120: mol_type = other DNA

SEQ ID NO: 16552 - DNA, 120 bp, synthetic construct
  source 1..120: mol_type = other DNA
tggaggtgtcggggatcgaaccgaggcctcatacatgcaaagcatgcgctctaccactgagctacacccccttactataacacccatttgtaataattttcaggaggtaactttcatttt

SEQ ID NO: 16553 - DNA, 120 bp, synthetic construct
  source 1..120: mol_type = other DNA
actaatgggggatacagattctttagaatactgtgtaggacttgaaacgaaaaacgaaagattagaaaagtgtcagataataaccacaagaagtttcctttgtggcctgaagacgttgag

SEQ ID NO: 16554 - DNA, 120 bp, synthetic construct
  source 1..120: mol_type = other DNA
caaagccattgaaattcagccttttcctgcctaaaacgcttcataattgttgtttgctcagtcggaatatcaaaggtaagatttgatagaggaaagccatgatcagaagaaaacctgaga

SEQ ID NO: 16555 - DNA, 120 bp, synthetic construct; identical to SEQ ID NO: 5272
  source 1..120: mol_type = other DNA

SEQ ID NO: 16556 - DNA, 120 bp, synthetic construct
  source 1..120: mol_type = other DNA
accagctttgggggtggagatgagggttgaattatgagagtaagacgaaagataaatagaaacaggattgaagagtagttcagaaaaacaaacatgctattgccaaagacaagcaggcac

SEQ ID NO: 16557 - DNA, 120 bp, synthetic construct
  source 1..120: mol_type = other DNA
ttacacagagaactcaggcaattaactccgtctccagcctggggtttgtaagcattagtagtagtagacacattacatggaggtggataaagactaaaaagtgtactttgagatatggaa

SEQ ID NO: 16558 - DNA, 120 bp, synthetic construct
  source 1..120: mol_type = other DNA
gtgagactggattctttgaactatataagaagatgagaagaaaacccatttctcggaaccaaatttctggtgacgattaactctttctcattctggtttgcccatatatgagcctttgcc

SEQ ID NO: 16559 - DNA, 120 bp, synthetic construct; identical to SEQ ID NO: 5273
  source 1..120: mol_type = other DNA

SEQ ID NO: 16560 - DNA, 120 bp, synthetic construct
  source 1..120: mol_type = other DNA
agaaacctggctgtctatcagattcttgggaattcataataagaagatatgcttttttgtttgccacatgaaaggggggaatttaaaataattaaatatccatatctatcttcaggctat

SEQ ID NO: 16561 - DNA, 120 bp, synthetic construct
  source 1..120: mol_type = other DNA
tcatacatactcagttctgaaaacctaaaaatatataaagtacctgtttaaatctgcactttccaatatggttaccattagccacattggctattgaatgcttgaaattgcccagtccaa

SEQ ID NO: 16562 - DNA, 120 bp, synthetic construct
  source 1..120: mol_type = other DNA
aggccatttacgtatattattaaaactggacataaaagacggaaacagtaaacatcggggactactagggagtagctgggaaggggaaaggcttgaaaagctaactattggatactatgc

SEQ ID NO: 16563 - DNA, 120 bp, synthetic construct; identical to SEQ ID NO: 5274
  source 1..120: mol_type = other DNA

SEQ ID NO: 16564 - DNA, 120 bp, synthetic construct
  source 1..120: mol_type = other DNA
cacggtgaaaccccaattctactaaaaaatacaaaaaattagccaggcgtggtggcaggcgcctgtagtcccagctactcgggaggctgaggcaggagaatggcgtgaacccgggaggcg

SEQ ID NO: 16565 - DNA, 120 bp, synthetic construct
  source 1..120: mol_type = other DNA
gctgaggcggcaggagaatcgcttgaaccctggaggcagaggttgcggtgagccgagatcgcgccattgcactccagcctgggcaacaagagcgaaactccatctacaaaaaaaaaaaaa

SEQ ID NO: 16566 - DNA, 120 bp, synthetic construct
  source 1..120: mol_type = other DNA
tccggaagataaagtagaagacttgtattatcttttaattggacagcattgtctagagatgatgttatctctttaaatgctgttctgggagattcccagagccagagaacatggagcatg

SEQ ID NO: 16567 - DNA, 120 bp, synthetic construct; identical to SEQ ID NO: 5275
  source 1..120: mol_type = other DNA

SEQ ID NO: 16568 - DNA, 120 bp, synthetic construct
  source 1..120: mol_type = other DNA
cagtttctgtagagtcagtgtcctcaccctgaggtttcttctcatttggtactaattttcctttttcaacttgctgcagttctgatgttgaagtactgtagattgtttagtctcctcaca

SEQ ID NO: 16569 - DNA, 120 bp, synthetic construct
  source 1..120: mol_type = other DNA
attacccccaacacagtatttcaacagagaagttgaagtggaaaagggaaaatgaggcacatgcacctgaatcttgatgactttgctgcccatttgctttcattttcagtattctaaggc

SEQ ID NO: 16570 - DNA, 120 bp, synthetic construct
  source 1..120: mol_type = other DNA
ttgtttttgttctttcctggattccaacacagaaattagttaagatttggaaattctggacaagggtgccaggcttcctgtcagtaagaaaacttagaatattcctgtaattaggcctgg

SEQ ID NO: 16571 - DNA, 120 bp, synthetic construct
  source 1..120: mol_type = other DNA
gtgaaacccagtctctaccaaaaaaattaaaaaaaaaacaaaaccaaaaaacaaacaaacaaacaaaaagccaggcttgttgttgcatttctgtagtctcagctactcaggaggttgaca

SEQ ID NO: 16572 - DNA, 120 bp, synthetic construct; identical to SEQ ID NO: 5276
  source 1..120: mol_type = other DNA

SEQ ID NO: 16573 - DNA, 120 bp, synthetic construct
  source 1..120: mol_type = other DNA
tggaatttcttaggttttaaaagtaataacttgctaggtttaagactttaaataatttacgtcctgtcagttaacacttcatggaagtcttcagtggagagagtgttacaaatatatata

SEQ ID NO: 16574 - DNA, 120 bp, synthetic construct
  source 1..120: mol_type = other DNA
agaaaaaagaaacaaaaaaaccacaaacacctggagttatatatagacctctgggattggtgcgcaagcgctgtgttgaaggagtgacaattatgctaaaaccaaaatgcaactgccgaa

SEQ ID NO: 16575 - DNA, 120 bp, synthetic construct
  source 1..120: mol_type = other DNA
tagggtcagtgtatcttccaacgcctaattctgttgtcttcaatatcacccgtcattcactcacctcccctccacccaagaaatataagttctgctgcaatttatgtgtgaaataggatc

SEQ ID NO: 16576 - DNA, 120 bp, synthetic construct; identical to SEQ ID NO: 5277
  source 1..120: mol_type = other DNA

SEQ ID NO: 16577 - DNA, 120 bp, synthetic construct
  source 1..120: mol_type = other DNA
gtataatatgtttgtttgtttgtttctttgtttctttgttttgagatggagtcccgctctgtctcccaggctggagtgcagtggcacgatctggacttagtgcaacctccgtctttcagg

SEQ ID NO: 16578 - DNA, 120 bp, synthetic construct
  source 1..120: mol_type = other DNA
tggtctcgcctcggcctcccaaagtgctaggattacaggcttgagccaccgttcccggcctattccttggagttcagagaattgtggtctgcacattgatgcataagaattgtttttttt

SEQ ID NO: 16579 - DNA, 120 bp, synthetic construct
  source 1..120: mol_type = other DNA
tgtctctactgaaaacacaaaaattagccccgcgtcgaggcgcgcccctgtagtcccagctacagaatctcttgaacccaggaggcagaggttgcagtgagccgagatcacaccactaca

SEQ ID NO: 16580 - DNA, 120 bp, synthetic construct; identical to SEQ ID NO: 5278
  source 1..120: mol_type = other DNA

SEQ ID NO: 16581 - DNA, 120 bp, synthetic construct
  source 1..120: mol_type = other DNA
aaccctctctatgtctggacagttttcaaactgagtctcctattctgaaagagtcaaggctttcagttttagccaaaatttgatggaagggtcgataagaaattgttcttgaagccagga

SEQ ID NO: 16582 - DNA, 120 bp, synthetic construct
  source 1..120: mol_type = other DNA
cctagtcaacatggtgaaaccccgtctctactaaatgcacataaattagccaggcatggtggcgggcgcctataatcccagctactcaggaggctgaggcaggagaatcgcttgaacccg

SEQ ID NO: 16583 - DNA, 120 bp, synthetic construct
  source 1..120: mol_type = other DNA
ttaaataaataaaatttataaaattatgttcgctttcagtctttgtcttgtcctcccgcttgtaaggtccgagccttctcagacaggaaacaacattcctctgggtttatcccctccgcc

SEQ ID NO: 16584 - DNA, 120 bp, synthetic construct
  source 1..120: mol_type = other DNA
tggaacgtgatgcggaaattaaaacagcagctacatataaatctcaacacagtgcttaaaatgtgtgtaaatggttctaggactgcgctgcactattgtgaaaagttcattcagaagtaa

SEQ ID NO: 16585 - DNA, 120 bp, synthetic construct; identical to SEQ ID NO: 5279
  source 1..120: mol_type = other DNA

SEQ ID NO: 16586 - DNA, 120 bp, synthetic construct
  source 1..120: mol_type = other DNA
cgggctgagctctttggagtgatgttgggttttggtttgcgcctcaggaaccgctgataccgtagcttctgagggagcttcagggattgcctggcttcctaagtgcccgtgttgagagtt

SEQ ID NO: 16587 - DNA, 120 bp, synthetic construct
  source 1..120: mol_type = other DNA
atctcctagaataaagccaatcgaaagccaacttcaccctaaagaaactcttcctggcgtttgcaacgagctcctttactcctaacgtccagctcttggctcaggacctgcagagcgtca

SEQ ID NO: 16588 - DNA, 120 bp, synthetic construct
  source 1..120: mol_type = other DNA
gggctgacctcagattgagtttagcgatgacttgtgaccacctggtagatggtggaccgttacagcatttagaaagtgagtaaaagaaaggatgcatacggaagcccacacgcttgcttg

SEQ ID NO: 16589 - DNA, 120 bp, synthetic construct; identical to SEQ ID NO: 5280
  source 1..120: mol_type = other DNA

SEQ ID NO: 16590 - DNA, 120 bp, synthetic construct
  source 1..120: mol_type = other DNA
tttatttatgaaaaacaacaaaatgagctttctcctatactgatcttgtttcctggagttcagagtatttgcatctcagaccagaaacttccttgaggacccagagaagtactttttact

SEQ ID NO: 16591 - DNA, 120 bp, synthetic construct
  source 1..120: mol_type = other DNA
caaatcatcaaccaccggcagtgtaatcttttagtgaaagcttgtagggcttctcaacctggttagagggagttagaagaagaaacagaaaaggacgtgagcctttttagcttctgatct

SEQ ID NO: 16592 - DNA, 120 bp, synthetic construct
  source 1..120: mol_type = other DNA
gtggactgcttagaaaatataagtggataatcctaagcagcaaatagattcaaaggaataaacacgagtcacctctgtgtatgagagagaaatgcagaggccaacacaattcaccttgac

SEQ ID NO: 16593 - DNA, 120 bp, synthetic construct; identical to SEQ ID NO: 5281
  source 1..120: mol_type = other DNA

SEQ ID NO: 16594 - DNA, 120 bp, synthetic construct
  source 1..120: mol_type = other DNA
cacggtgggctccccatcgcgttagatttcctggagcatacttgcattcaatcatttgagtgtgtcctggcatacaacattctcttgcaaattttctgattataatgttctgtattcttt

SEQ ID NO: 16595 - DNA, 120 bp, synthetic construct
  source 1..120: mol_type = other DNA
acacaaatagaggcaaattaaaactgcattgtgaaagaataacataaccccattgaaataactgatttaagaaaatgcttgacaaagttcgttgttctaattgtaagtacaaaaagaaga

SEQ ID NO: 16596 - DNA, 120 bp, synthetic construct
  source 1..120: mol_type = other DNA
gttggaaacaggctgtcactgtaagagaaagcaggtaaagaatagtcctgttggtgttgatgggaattggaggcatcagtatgaaattatacatatgtaattgtataggccgggcgcggt

SEQ ID NO: 16597 - DNA, 120 bp, synthetic construct; identical to SEQ ID NO: 5282
  source 1..120: mol_type = other DNA

SEQ ID NO: 16598 - DNA, 120 bp, synthetic construct
  source 1..120: mol_type = other DNA
gattttcaaataccattctctactaaaaggaaccagagatactaatagaaagtagctactagtgtcaactacactgactccaggactgtgccagggaaactacaagatgaacctaaaata

SEQ ID NO: 16599 - DNA, 120 bp, synthetic construct
  source 1..120: mol_type = other DNA
tccagacccgcctggccaacatggtgaagtcccgtctctactaaaaatacaaaaaatggcctggcatggtggctcatgcctctaatcccaactacttgggaagcagaggtaggagaatcg

SEQ ID NO: 16600 - DNA, 120 bp, synthetic construct
  source 1..120: mol_type = other DNA
atagtgtgtgtgtgtgtttagccgtaaagagagaggagaatcattgtggcaaaatatcgggaattggtaaatatgagtaacttgtgtgtggcagttctttgtatcatttttgcaactttt

SEQ ID NO: 16601 - DNA, 120 bp, synthetic construct; identical to SEQ ID NO: 5283
  source 1..120: mol_type = other DNA

SEQ ID NO: 16602 - DNA, 120 bp, synthetic construct
  source 1..120: mol_type = other DNA
atggatttcgtcttggggacgctatggctccagttctgacactcaagaaacgatggatggagaggagaacgaggaccaccttcgaaaagagttcgagagggaagcagggacgcggtgggg

SEQ ID NO: 16603 - DNA, 120 bp, synthetic construct
  source 1..120: mol_type = other DNA
gcttttcctcgctgtccgcgataagcgagagggctcattccctgttggagaagtgagctgaaaacactttcctcgcaagatctccctcgttttgctcaaggcagtcgcggcgttgagaac

SEQ ID NO: 16604 - DNA, 120 bp, synthetic construct
  source 1..120: mol_type = other DNA
cctactgttagcgagggggagagtgtttaaccgggaagagagaccctcccgctgaagcatagggtcctttgttatagataggaagagtgttctttgcttttgtttttgttatagcttgtc

SEQ ID NO: 16605 - DNA, 120 bp, synthetic construct; identical to SEQ ID NO: 5284
  source 1..120: mol_type = other DNA

SEQ ID NO: 16606 - DNA, 120 bp, synthetic construct
  source 1..120: mol_type = other DNA
tgggaaaagccaaggttaccacataaaagaagatccttacatgagacaagtgtaaataaagcagcagctgaggtgtgtgtagaggaagagacaaacgtgaaaatgtagaaagtggataca

SEQ ID NO: 16607 - DNA, 120 bp, synthetic construct
  source 1..120: mol_type = other DNA
acatttcatgcatatgctggattttaacaaccagaacattggtagacttggtgggggctggagagacagcagtcactcccaaccctgaggatgagtcctcaccctgagggtggagagaaa

SEQ ID NO: 16608 - DNA, 120 bp, synthetic construct
  source 1..120: mol_type = other DNA
attcctgtgagttcctccacaggaaaatcagtctgttgtgtgtgacctgaaaagttgcataaatattcaaagggtcaaagaaatggtaaattcaaccccatccctgacataagacgaata

SEQ ID NO: 16609 - DNA, 120 bp, synthetic construct; identical to SEQ ID NO: 5285
  source 1..120: mol_type = other DNA

SEQ ID NO: 16610 - DNA, 120 bp, synthetic construct
  source 1..120: mol_type = other DNA
agtatgaaacaaaaagaaaatacatggcatgtgtgtattaccttcctccaaaaaatgtgtctcaaaacaaacatatgattggtctggaggcacacacacagccagtcctcagctaagcag

SEQ ID NO: 16611 - DNA, 120 bp, synthetic construct
  source 1..120: mol_type = other DNA
cctcatagagtgtatctatcatgccagcctgataggctggtggactaggaacaaacatcatactctcttgcctctcaaagacactttaattcaataggaaatatgtacagagagaacagc

SEQ ID NO: 16612 - DNA, 120 bp, synthetic construct
  source 1..120: mol_type = other DNA
aaagcgatgtaatcaggtggatcgagaaagaacatgaaatgtttgtttgttttttcccaaggcaggaagtgcccaacacacctgcgatctacttatcttttagtctgcatgtattttgca

SEQ ID NO: 16613 - DNA, 120 bp, synthetic construct; identical to SEQ ID NO: 5286
  source 1..120: mol_type = other DNA

SEQ ID NO: 16614 - DNA, 120 bp, synthetic construct
  source 1..120: mol_type = other DNA
ttcgctctgttctttggcccagaaaacaaaaataacttaaaaaaaaatagatgccttcagggcgcttttctcccttctcctttgtctttgcgtctcattaatcatagtacaaaatgggag

SEQ ID NO: 16615 - DNA, 120 bp, synthetic construct
  source 1..120: mol_type = other DNA
ttggtgatgtcgaggttcacagcataaccagtggagatagttcaaggctgaacattgggctacacttttactgtctatatgtgcagaaataggatagaaaaacgtgaggaggcagaagtc

SEQ ID NO: 16616 - DNA, 120 bp, synthetic construct
  source 1..120: mol_type = other DNA
tctttgtaataattttcaggaggtaactttcatttcctgagactccgtgagcatgctggtagtagtggtcagtattatggagtgcggagagctgttctgagcaggagatacttggtacta

SEQ ID NO: 16617 - DNA, 120 bp, synthetic construct; identical to SEQ ID NO: 5287
  source 1..120: mol_type = other DNA

SEQ ID NO: 16618 - DNA, 120 bp, synthetic construct
  source 1..120: mol_type = other DNA
tgcacttagcattttttcataagggtccttagctggcgtggtgtcttacgcctgtactcccagctactctagaggctgaggcacgaggatcgcttgagctcgggagttagttgttgtagg

SEQ ID NO: 16619 - DNA, 120 bp, synthetic construct
  source 1..120: mol_type = other DNA
ttcataaggcgtgaatgaaaaacagctatggggatggagagaagggttgaattatgagaataagaccgaagataaatacaaacagggttgaagaatgctttagaaaaacaaacacagcag

SEQ ID NO: 16620 - DNA, 120 bp, synthetic construct
  source 1..120: mol_type = other DNA
gctcatactcaatttaaagtatctgtggggcacacttgtgaggatgtttctcagagaattcaggcaattaactctgtctctagcctgggatttgtaagcattaatagtagtagacacatt

SEQ ID NO: 16621 - DNA, 120 bp, synthetic construct; identical to SEQ ID NO: 5288
  source 1..120: mol_type = other DNA

SEQ ID NO: 16622 - DNA, 120 bp, synthetic construct
  source 1..120: mol_type = other DNA
tgagtgatagacttcactgaaggagaaactagagaattgttatagacaaaattgatgtgtattcatgtgtgtttgcctgcctgactgtgtctgtgtgtgtgcatgtaaatgatgggaagg

SEQ ID NO: 16623 - DNA, 120 bp, synthetic construct
  source 1..120: mol_type = other DNA
cataataagaaggttgcctcataaaaatgggagaattttaaataattaaatatctgtagctatcttcagactatctaccagcaacacgattgaaacatgttttttgtgtgaaatctgtag

SEQ ID NO: 16624 - DNA, 120 bp, synthetic construct
  source 1..120: mol_type = other DNA
tctgcactgtccaatatggttaccattagccacattgggtattgagtactgaaaattgcctagtctaagttaagatgtgttgaaagtgagaaatatataccagatttcaaagatgtaatt

SEQ ID NO: 16625 - DNA, 120 bp, synthetic construct; identical to SEQ ID NO: 5289
  source 1..120: mol_type = other DNA

SEQ ID NO: 16626 - DNA, 120 bp, synthetic construct
  source 1..120: mol_type = other DNA
ttaaaataatattttggacatgcaaggtgatttacatatattagtaaaactggacataaaagatggaaacaatagacactggggactactagagggggaggcgagaaggggaaaggcttg

SEQ ID NO: 16627 - DNA, 120 bp, synthetic construct
  source 1..120: mol_type = other DNA
ataaaagttgaaattattattattagtattattattttgagacagagtcttgctctgtctctcaggctagagtacagtggcgctatctgggctcactgcaaactcctcctccaggtttca

SEQ ID NO: 16628 - DNA, 120 bp, synthetic construct
  source 1..120: mol_type = other DNA
gaacccctgacctcaggtgttccgcgcacctcggcctcccaaagggctgggattacaggtatgacccaccttgcctatctaaaagttgaaattgttaaaaaattatataaaataagtatt

SEQ ID NO: 16629 - DNA, 120 bp, synthetic construct; identical to SEQ ID NO: 5290
  source 1..120: mol_type = other DNA

SEQ ID NO: 16630 - DNA, 120 bp, synthetic construct
  source 1..120: mol_type = other DNA
tattagcctcatttttaaggtattgaatgagagacgaatcatgcttagaattaccctaggcgtttcatttcaacaaaatgtaaaggaatcactactgtgctaggcaagaaaacattcaat

SEQ ID NO: 16631 - DNA, 120 bp, synthetic construct
  source 1..120: mol_type = other DNA
ccgggttcaagggattctcctgcctcagcctctcgagtagctgggattacaggcatccaccaccacacccagctaatttattattattattattattattgttattattattattttgta

SEQ ID NO: 16632 - DNA, 120 bp, synthetic construct
  source 1..120: mol_type = other DNA
cagcctatcaaatatttcttaatgaaataaaacacaggcttctgagttgagaaagcctcagtgacttaaagggtaaagtatctgattcctagttcctgtacagtcaatgtccccaccctg

SEQ ID NO: 16633 - DNA, 120 bp, synthetic construct
  source 1..120: mol_type = other DNA
aggttggtctctcatttggtaccaattttcctttcacaatttgatgcagttctgatgttggagtactgtagtttattgtctcctcacacagtatgcaggtgttaggggaaaataacactg

SEQ ID NO: 16634 - DNA, 120 bp, synthetic construct; identical to SEQ ID NO: 5291
  source 1..120: mol_type = other DNA

SEQ ID NO: 16635 - DNA, 120 bp, synthetic construct
  source 1..120: mol_type = other DNA
gttggagaccaggctggccaacatggtgaaatcccgtctttactaaaaatacaaaaattagtcaggcatggtggtggacgcctgtaatcccagctgcttgggaggctgcagcaggagaat

SEQ ID NO: 16636 - DNA, 120 bp, synthetic construct
  source 1..120: mol_type = other DNA
cttatttttgttctttcctggataccaatgaggaaataacttaagatttggaaattctaggcaaggtttccaggctaaagaaatgtcctgtcagtaagaaacttaaaaatattcctgtaa

SEQ ID NO: 16637 - DNA, 120 bp, synthetic construct
  source 1..120: mol_type = other DNA
ttcaagaacagctgggggaacatggtgaaacccagtttctacaaaaaaaaagtacaaaagagagagagagaaagccaggcttgttgttgcatttctgtagtctcagctacccaggaggct

SEQ ID NO: 16638 - DNA, 120 bp, synthetic construct
  source 1..120: mol_type = other DNA
ggcgcggtggttcacactgtaatcccagcactttgggaggccgaggtgggtggatcacgaggtcagtagatcgagaccatcccagctaacatggtgaaaccccgtctctactaaaaatac

SEQ ID NO: 16639 - DNA, 120 bp, synthetic construct; identical to SEQ ID NO: 5292
  source 1..120: mol_type = other DNA

SEQ ID NO: 16640 - DNA, 120 bp, synthetic construct
  source 1..120: mol_type = other DNA
tagctgagactacaggcgcccgccaccgcgccccactaatttttttgtacttttagtagagacgggggtttcaccgtggtctcgatctcctgacctcgtgatccacccgcttcggcctcc

SEQ ID NO: 16641 - DNA, 120 bp, synthetic construct
  source 1..120: mol_type = other DNA
cttctacaggtttcttcatagttcttgtgatttaaaacacccctgcccaacacacataaataacatcaaatcagaaatgaattgtaattgccacagtctatagcatattggaatttctta

SEQ ID NO: 16642 - DNA, 120 bp, synthetic construct
  source 1..120: mol_type = other DNA
cattacctttatggaattttcaaaaagcaaaaaatgggagttatatatagacctctgggattggtgtgcaagtgttgtataaaggaaagacaattatgcaacaaccaaaaggtatctgcc

SEQ ID NO: 16643 - DNA, 120 bp, synthetic construct; identical to SEQ ID NO: 5293
  source 1..120: mol_type = other DNA

SEQ ID NO: 16644 - DNA, 120 bp, synthetic construct
  source 1..120: mol_type = other DNA
gttcaagaccagcctggccaacatggtgaaatcccttctttacaagaaatataaaaattagccaggagaggtggcgcacgcctgtagtttcagctacttcggaggctgaggcaggagaat

SEQ ID NO: 16645 - DNA, 120 bp, synthetic construct
  source 1..120: mol_type = other DNA
gtcaaatcagcaagatagatgctcccatgcttggtcaccttggaaacaccgctcagaaaactaaaggaaactatctaaaactaaaatgaaattatctagacttttccttttctctccttt

SEQ ID NO: 16646 - DNA, 120 bp, synthetic construct
  source 1..120: mol_type = other DNA
gcgagccaattctttttctctgtttccttccttttactgatctagtgctaacacatccaccttaggtggtacagagagccaggggtggaaaaggcaagcatatgtttattttagtgtgac

SEQ ID NO: 16647 - DNA, 120 bp, synthetic construct; identical to SEQ ID NO: 5294
  source 1..120: mol_type = other DNA

SEQ ID NO: 16648 - DNA, 120 bp, synthetic construct
  source 1..120: mol_type = other DNA
atatcacttcaaaagtgtgaaaacattggactcctcttgttaaataacttagaaacaatttcagagtttaccgaatttcagaaacaatcctctctggaatgaggaaatagctacagccaa

SEQ ID NO: 16649 - DNA, 120 bp, synthetic construct
  source 1..120: mol_type = other DNA
tcaattaaaatattttttgaataatttcctcaaaaattttagattctcttacaggcttttttctttttttctctccctcttgtaaggcccgaacctccccagacaggaaacaacattcct

SEQ ID NO: 16650 - DNA, 120 bp, synthetic construct
  source 1..120: mol_type = other DNA
ggaaattaaaacagtggctacatataaatctcagcacagtgcttagaatgtgtgtaaatggttctaggagtgcactgcactattgtgaaaagttcattcagaagtaaacgggagggaagg

SEQ ID NO: 16651 - DNA, 120 bp, synthetic construct; identical to SEQ ID NO: 5295
  source 1..120: mol_type = other DNA

SEQ ID NO: 16652 - DNA, 120 bp, synthetic construct
  source 1..120: mol_type = other DNA
gcacgtgatgttgcgttttttgtttgcgggttcgggaaccgctgatactgatagcttctgagggagctgcagggatttcccgatttcctgagtgtctgtgttgagagttaaaagcggaat

SEQ ID NO: 16653 - DNA, 120 bp, synthetic construct
  source 1..120: mol_type = other DNA
agttcccgtttgtttgctccacatgtttcctttagaatgaagccgattggaagtcaacttcaccctgaagaaattcctcctggcgtttacaatgagcttctttactccccaagtccagct

SEQ ID NO: 16654 - DNA, 120 bp, synthetic construct
  source 1..120: mol_type = other DNA
taatataggtgaatccctcacaagttgagtgggttgacctcaaaattgactttagcgatggcttgtgaccacctggtaggtggtggaccattacagcgtttggaaaatgagtaaaacaaa

SEQ ID NO: 16655 - DNA, 120 bp, synthetic construct; identical to SEQ ID NO: 5296
  source 1..120: mol_type = other DNA

SEQ ID NO: 16656 - DNA, 120 bp, synthetic construct
  source 1..120: mol_type = other DNA
gggattgggagaataaaagttcattcattatttttattgatggaaaacaaagaaatgagctttaccctatactgatcttggttcctggagttccgagtgcttgcatctcagggcagaaac

SEQ ID NO: 16657 - DNA, 120 bp, synthetic construct
  source 1..120: mol_type = other DNA
acattaagttttagagtttgtgggtttctaatggaaaaagtgaccaccagcacatcaggtcctcagccactggcagtgaaatcttttagtgaaagcttgtagggcttctgcaacctgggt

SEQ ID NO: 16658 - DNA, 120 bp, synthetic construct
  source 1..120: mol_type = other DNA
gaaacccccatctctactaaaaatacaaaattagccaggcatggtggtgcatggttgtaatcccagctactcaggaggctgaggcaggagaatcacttgaatccgggaggcagaggttgt

SEQ ID NO: 16659 - DNA, 120 bp, synthetic construct; identical to SEQ ID NO: 5297
  source 1..120: mol_type = other DNA

SEQ ID NO: 16660 - DNA, 120 bp, synthetic construct
  source 1..120: mol_type = other DNA
ggggaaggtcatggagctcttcttacagtgccacagggaagaaaatggacctctggaggtactggggaatcagcccaagacctcgtgcatgataagtacactctctaccactgagctata

SEQ ID NO: 16661 - DNA, 120 bp, synthetic construct
  source 1..120: mol_type = other DNA
ctaagtgccccctctcttaggcacggttacatcaagaaaaggtacgttaacagtaaaaagaaaaacactgttcctgatttgggatcagcaaatctatttccaaatagagcatttcaaaag

SEQ ID NO: 16662 - DNA, 120 bp, synthetic construct
  source 1..120: mol_type = other DNA
tattttctgtaatgctaaggcaatagcaattctgatattttgtgtgaattttaggattggaaaaatgagcatgtgtgcgcctgtatgttgttggaaccaggctctcactgtgggaaagga

SEQ ID NO: 16663 - DNA, 120 bp, synthetic construct; identical to SEQ ID NO: 5298
  source 1..120: mol_type = other DNA

SEQ ID NO: 16664 - DNA, 120 bp, synthetic construct
  source 1..120: mol_type = other DNA
atggccaaatctgacacattttgagcattaatgatgacaataagtgattatcaatcttgggaacttaaacacataaatatggaagatgggaagattttccttacagttgtgtgccaagtg

SEQ ID NO: 16665 - DNA, 120 bp, synthetic construct
  source 1..120: mol_type = other DNA
tcgagaccagcctgaccaacatggagaaaccccgtctctactaaaaatacaaaactgtggtgagccgagatcacaccattgcactccagcctgggcaagaagagcgaaattctatctcaa

SEQ ID NO: 16666 - DNA, 120 bp, synthetic construct
  source 1..120: mol_type = other DNA
tctgtgacatttccatgacctgaatgtaaccatgactacacaaattaagaaacattcaacaaaaccactggcatatgctcttcaaaaacatattcatgaaagacaagaagattaagaatc

SEQ ID NO: 16667 - DNA, 120 bp, synthetic construct; identical to SEQ ID NO: 5299
  source 1..120: mol_type = other DNA

SEQ ID NO: 16668 - DNA, 120 bp, synthetic construct
  source 1..120: mol_type = other DNA
gctgattggttgttgaggtgaggaagaggcaagaccgtgttctgaaataatgtcaagatttggacgatatgtgtttctcaaatggttcccattccattttaaatgttgctaggctgagac

SEQ ID NO: 16669 - DNA, 120 bp, synthetic construct
  source 1..120: mol_type = other DNA
tgcaaactctgccacctgggttcaagcaattctcctgcctcagactcccaagtacctgggattacaggtgtgtgccaccactcccgactaattttgtatttttagtagagatgggggttt

SEQ ID NO: 16670 - DNA, 120 bp, synthetic construct
  source 1..120: mol_type = other DNA
aggcgtgagccactgtgcgcagccaactcctttataatcttataagaccaccgtaggatatgtggtctgtggtttactaaaatgtcaacatgtagcacattactgcactcatatcagatt

SEQ ID NO: 16671 - DNA, 120 bp, synthetic construct; identical to SEQ ID NO: 5300
  source 1..120: mol_type = other DNA

SEQ ID NO: 16672 - DNA, 120 bp, synthetic construct
  source 1..120: mol_type = other DNA
actcctattcaacatagtgttggaagttctggccagggcaatcaggcaagagaaacaaataaagggtattcagttaggaaaagaggaagtcaaattgtccctgtttgcagatgacatgat

SEQ ID NO: 16673 - DNA, 120 bp, synthetic construct
  source 1..120: mol_type = other DNA
taacagacagagagccaaatcatgagggaactcccattcacaattgctacaaagagaataaaatacctgggaatccaacttacaagggatgtgaaggacctcctcaaggagaattacaaa

SEQ ID NO: 16674 - DNA, 120 bp, synthetic construct; identical to SEQ ID NO: 5301
  source 1..120: mol_type = other DNA

SEQ ID NO: 16675 - DNA, 120 bp, synthetic construct; identical to SEQ ID NO: 2459
  source 1..120: mol_type = other DNA

SEQ ID NO: 16676 - DNA, 120 bp, synthetic construct
  source 1..120: mol_type = other DNA
ggacataggcatgggcaaggacttcatgtctaaaacaccaaaagcaatggcaacaaaagccaaaatagacaaatgggatctaattaaaccaaagagcttctgcacagcaaaagaaaccac

SEQ ID NO: 16677 - DNA, 120 bp, synthetic construct; identical to SEQ ID NO: 5302
  source 1..120: mol_type = other DNA

SEQ ID NO: 16678 - DNA, 120 bp, synthetic construct
  source 1..120: mol_type = other DNA
gttggtgggactgtaaactagttcaaccattgtggaagacagtgtggcgattcctcaaggatctagaactagaaataccatttgacccagccatcccattactgggtatatacccaaagg

SEQ ID NO: 16679 - DNA, 120 bp, synthetic construct
  source 1..120: mol_type = other DNA
caatgatagactgaatttaacaaacgtggcacatatacaccatggaatactatgcagccataaaaaaggatgagttcatgtcctttgtagggacatggatgaagctgggaaccatcattc

SEQ ID NO: 16680 - DNA, 120 bp, synthetic construct
  source 1..120: mol_type = other DNA
ggggtggggtgataggggagggatagcattaggagaaatacctaatgtaaatgaggagttaatgggtgcagcacaccaacatggcacatgtatacatatgtaacaaacctgcacgttgtg

SEQ ID NO: 16681 - DNA, 120 bp, synthetic construct
  source 1..120: mol_type = other DNA
tcacgaggtcaggagatcgagaccatcctggctaacacggtgaaacccggtctctactaaaaatacaaaaaaaaaaaaaaaaattagccaggcatagtggcaggcgcctgtagtcccagc

SEQ ID NO: 16682 - DNA, 120 bp, synthetic construct; identical to SEQ ID NO: 5303
  source 1..120: mol_type = other DNA

SEQ ID NO: 16683 - DNA, 120 bp, synthetic construct
  source 1..120: mol_type = other DNA
actattgcagtatatgaaaacaataaaaatatggaaataaaaaataacttaaaaattaaaaaggtggccgggcacggtagctcacgcttgtaatcgcagcagtttggaagttggaggcgg

SEQ ID NO: 16684 - DNA, 120 bp, synthetic construct
  source 1..120: mol_type = other DNA
agaggttgaggcaggagaatctcttgaacctgggaggtggaggctgcagtgagcggagatggcgccactgcactccagccttggggacagagtgagactctgtctcaaaaaacaaacaaa

SEQ ID NO: 16685 - DNA, 120 bp, synthetic construct
  source 1..120: mol_type = other DNA
ttttagcactaagtgttgggtttagaagcaggatttgtgaccattttaagttggaagacccccagctgtgggggatattgaagttttggcaaataaagcttgaaatggaacgcagaatac

SEQ ID NO: 16686 - DNA, 120 bp, synthetic construct; identical to SEQ ID NO: 5304
  source 1..120: mol_type = other DNA

SEQ ID NO: 16687 - DNA, 120 bp, synthetic construct
  source 1..120: mol_type = other DNA
agagcctcaacaaacaggaggaaaaaaagcagaatagagatgcttattgttctttgaaggaatggacaagatattaggaggaggaggtgagtttgtttgggaacgtgttgaacttaccat

SEQ ID NO: 16688 - DNA, 120 bp, synthetic construct
  source 1..120: mol_type = other DNA
ctcaaagtgtcctttgagatatgaagatcagaaacttacttactgatagttgtgaaaagcaaaaaaatgaacttcttcctagctgatcttcaaccctggaattcacactggttgtcacca

SEQ ID NO: 16689 - DNA, 120 bp, synthetic construct
  source 1..120: mol_type = other DNA
ttggtaagcatattgctgagcccctttcgaggttgggaacaccttatggtttggcagaatttctctctgttggctcatagggatagcggaataggtaagaggaaacataatggcaggttt

SEQ ID NO: 16690 - DNA, 120 bp, synthetic construct
  source 1..120: mol_type = other DNA
ttttggccgggcgcggtggctcatggctgtaatcccaacactttgggaggccgaggcgggcggatcacgaggtcaggagaccgagaccatcctggctaacacggtgaaaccccgtctcta

SEQ ID NO: 16691 - DNA, 120 bp, synthetic construct; identical to SEQ ID NO: 5305
  source 1..120: mol_type = other DNA

SEQ ID NO: 16692 - DNA, 120 bp, synthetic construct
  source 1..120: mol_type = other DNA
ctgtttgccccaaagtacagagaacactgtgagaattgtttaagtttctgtaagcattcagaaatatctatgcatggggagacataggatgagttccaaatatatgagatttttctgatg

SEQ ID NO: 16693 - DNA, 120 bp, synthetic construct
  source 1..120: mol_type = other DNA
atctctagacaatctacaaccagagagaagattgtaactggttgagtactgttttcttaaagttgacaaaaaggtggagtaatagttttcatgtaaggagctcttatatgataatctaga

SEQ ID NO: 16694 - DNA, 120 bp, synthetic construct
  source 1..120: mol_type = other DNA
actagacagtaaagggttaaataatcttttttcttcaattaaatatgtctttgaaaagaataaaactctaccttttgagtcagattgactacatggcctgatggattgtgtctgcttcca

SEQ ID NO: 16695 - DNA, 120 bp, synthetic construct; identical to SEQ ID NO: 5306
  source 1..120: mol_type = other DNA

SEQ ID NO: 16696 - DNA, 120 bp, synthetic construct
  source 1..120: mol_type = other DNA
gatctcattgaagtatacaaccccaaaataaaatatagttgaatttccaaaattcatctacaatgtaccttaaaatgattcactattgtcctaggccaaagataggcactgtttgctctc

SEQ ID NO: 16697 - DNA, 120 bp, synthetic construct
  source 1..120: mol_type = other DNA
ccatttctaccctaaattacagaggtggacttccttaaagaagtctattgtggggagcagaaaaaaatatttccatttgggcctgagccctagcataaagcaatggtaataattcatgat

SEQ ID NO: 16698 - DNA, 120 bp, synthetic construct
  source 1..120: mol_type = other DNA
agtgagtataagtggcaaagagacattgtggaactgtactttgaaaatgagagaagagagagaaaaaatgtcaacagaacagaaaattatctatttcccacatcaagaaagtctgggtcc

SEQ ID NO: 16699 - DNA, 120 bp, synthetic construct; identical to SEQ ID NO: 5307
  source 1..120: mol_type = other DNA

SEQ ID NO: 16700 - DNA, 120 bp, synthetic construct
  source 1..120: mol_type = other DNA
tggaatgattacaaggtcttattctatttaaaatgtttcagagcaaggatacaaacttcccagtttacattagaagttagcacagcctttattgcaaaacttgcgaaaaagaaaataaag

SEQ ID NO: 16701 - DNA, 120 bp, synthetic construct
  source 1..120: mol_type = other DNA
aaaaattagccgggcgcggtggcgcgcgcttgttgtcccagttactcgggatgctgaggcaggagaatcgcttgaacccgggaggcggaggttgcagtgagtcgagatcgcgccactgca

SEQ ID NO: 16702 - DNA, 120 bp, synthetic construct
  source 1..120: mol_type = other DNA
cagagaggcaaggaacagagtcaatgattagaacacaaaaatgattcagcaatagaaatatatattttttgcaattatgttttctgttagaatagaaaattgggggaaaaaacacagccg

SEQ ID NO: 16703 - DNA, 120 bp, synthetic construct; identical to SEQ ID NO: 5308
  source 1..120: mol_type = other DNA

SEQ ID NO: 16704 - DNA, 120 bp, synthetic construct
  source 1..120: mol_type = other DNA
cggcagaagtgtgacgcctctacattcattgatgaaaataactttctcaatttcccagtttggaaggctttgcgtttgtcagggctcagcctgcgatggatcatggctaaacaaggacca

SEQ ID NO: 16705 - DNA, 120 bp, synthetic construct
  source 1..120: mol_type = other DNA
cggtgaaaccctgtctctaccaaaaaaatagaaaaaattagccgggcgtggtgacgggcgcctgtagtcccggctactcgggaggctgaggcagaagaatggcgtaaacccgggaggcgg

SEQ ID NO: 16706 - DNA, 120 bp, synthetic construct
  source 1..120: mol_type = other DNA
tttatcttttatttcctactttttaaataacaatactccaaaggttaatgagctcgtcaatttggcgacgccattgaagttttggaatccggagccgtctttgtcttccagctccatctt

SEQ ID NO: 16707 - DNA, 120 bp, synthetic construct; identical to SEQ ID NO: 5309
  source 1..120: mol_type = other DNA

SEQ ID NO: 16708 - DNA, 120 bp, synthetic construct
  source 1..120: mol_type = other DNA
gacccttttgctaggtttcagaaccattagttgtaatcagccaaggtctattttatttagttatttctgatatctcaaatttaggttttgcgtccctctttgctgacagctgagcaaacc

SEQ ID NO: 16709 - DNA, 120 bp, synthetic construct
  source 1..120: mol_type = other DNA
tagaagaacccgggatgaaacattttctcccgtgtcttgactctctcctttctttcaccgctgctttaaagggctgccagaaagccacaaagtacaaagcgaggcatttagagaccatag

SEQ ID NO: 16710 - DNA, 120 bp, synthetic construct
  source 1..120: mol_type = other DNA
cgcggactggggagcgaggaagaggagcacccgccagatcgcgccccctttcgggcagaatccgctcccggtccggtcccgattggcagaaaacgatacgagggcggtatacactcaaca

SEQ ID NO: 16711 - DNA, 120 bp, synthetic construct; identical to SEQ ID NO: 5310
  source 1..120: mol_type = other DNA

SEQ ID NO: 16712 - DNA, 120 bp, synthetic construct
  source 1..120: mol_type = other DNA
gcgagagagttcgggtccggtatacctctctctccgcaccacattcttttgtagtacctgtgaaacattcatgaaaacggaccacagaagaaaacctcagtaagttccaaagtatagaaa

SEQ ID NO: 16713 - DNA, 120 bp, synthetic construct
  source 1..120: mol_type = other DNA
ggaaatacaaattttaattacataatttcttgaaagggacaaaagtgcaaatgtgacatagaatctgtgagatagagctaaagcatttatcagaaggaaatttatttcctcacataccta

SEQ ID NO: 16714 - DNA, 120 bp, synthetic construct
  source 1..120: mol_type = other DNA
gaggaaggaagggttgtaaggacaaattcagagaatgagttagaaacaaagtataactaataaagatacaaaaaaggtggatatttgaaagtcaacaaaatagacaaacctctagccaac

SEQ ID NO: 16715 - DNA, 120 bp, synthetic construct; identical to SEQ ID NO: 5311
  source 1..120: mol_type = other DNA

SEQ ID NO: 16716 - DNA, 120 bp, synthetic construct
  source 1..120: mol_type = other DNA
gcactaaaaatgaaaactacaggtcaatttcacatatgaaatatatgaaatgtaatgcctaaatcttaaataaaatttatagcaaacagaatacaatagcacatttaaaacagtaataca

SEQ ID NO: 16717 - DNA, 120 bp, synthetic construct
  source 1..120: mol_type = other DNA
cagaaagacaaatttcacatcttttcagtcatatgtgggagtttaaaaagttgatctcatggaggtagagagtagaatcatagataccagggtcagggaagggtgtgtgcattggagctg

SEQ ID NO: 16718 - DNA, 120 bp, synthetic construct
  source 1..120: mol_type = other DNA
ggcaccatcccagctcactgcaacctccacctcccaggttcaagtgattctcctgcctcagtctcctgagcagctgggattacaggtgcctgccaccacagccagcctctaatgttgata

SEQ ID NO: 16719 - DNA, 120 bp, synthetic construct; identical to SEQ ID NO: 5312
  source 1..120: mol_type = other DNA

SEQ ID NO: 16720 - DNA, 120 bp, synthetic construct
  source 1..120: mol_type = other DNA
aaaaagctatccctaatatatactatcaaaataaaaagggccaggcacagtggcttacgcctgtaatctcaacactttggaaggccaaggccggcaaatcacttgaggccaaaagtttga

SEQ ID NO: 16721 - DNA, 120 bp, synthetic construct
  source 1..120: mol_type = other DNA
aatcccaggaggcagaggttgcagtgagccaagatgtcaccacagcactccagcctgggtgagagagcaaaactccatctcaaataataataataataataaatactaaataaataaaaa

SEQ ID NO: 16722 - DNA, 120 bp, synthetic construct
  source 1..120: mol_type = other DNA
tggatcaccaggtcaggagattgagaccatcctggctaacatgatgaaaccccgtctctattaaaatacaaaaaattagctgggtgtggcggcacgtgcctgtagccccagctactaggg

SEQ ID NO: 16723 - DNA, 120 bp, synthetic construct; identical to SEQ ID NO: 5313
  source 1..120: mol_type = other DNA

SEQ ID NO: 16724 - DNA, 120 bp, synthetic construct
  source 1..120: mol_type = other DNA
ctttgtcacttcattttcagcaaatttcagtgggcagagaggaagcttttccgccacccctacatagttaatactctaccttgagcatggcacacagagaatactaaggtgctaatagct

SEQ ID NO: 16725 - DNA, 120 bp, synthetic construct
  source 1..120: mol_type = other DNA
tgagtgttcagcatctagaacttttcttccacaaagagaaacatgcaattgttaccacctctagctccagagtcctagctcagagatttttcctatagaaagaaatgagccagccgggca

SEQ ID NO: 16726 - DNA, 120 bp, synthetic construct
  source 1..120: mol_type = other DNA
ctggccaacatggcgaaaacccatctctactaaaaatacaaaaaaaatagctgggcctggtggtgtgtgcctataattccagctactatggaggctgaggaaggagaatcgcttgaaccc

SEQ ID NO: 16727 - DNA, 120 bp, synthetic construct
  source 1..120: mol_type = other DNA
aaagtagatagcttccaatcctttcccaaaataactgatttaatttgtaacatagaatagagaagtggaaagctaagggcattctcaagaatggtggagattttgatgaaaggtaattgg

SEQ ID NO: 16728 - DNA, 120 bp, synthetic construct; identical to SEQ ID NO: 5314
  source 1..120: mol_type = other DNA

SEQ ID NO: 16729 - DNA, 120 bp, synthetic construct
  source 1..120: mol_type = other DNA
ataccaaaaactgcatcaccacgaagactaatgtcagaggattagcactcttgggagtgaaatatccagggttatataatactccatgttaataaaatgaatggcaataatcaaatatca

SEQ ID NO: 16730 - DNA, 120 bp, synthetic construct
  source 1..120: mol_type = other DNA
gcggatcacgagttcaggagatcgagaccatcgtggctaacacggtgaaaccccgtctctactaaaaaaaatgaaaaaaattagccgggcatggtggcagacgcctgtagtcccagctac

SEQ ID NO: 16731 - DNA, 120 bp, synthetic construct
  source 1..120: mol_type = other DNA
aaagaaaagaaaaaagaaaaaagtactcagcaaactaggaatagaatgaaactacctcaacttaataaaagccatacatgaaaagcccacaggtaatatattcagtggccttagcttttc

SEQ ID NO: 16732 - DNA, 120 bp, synthetic construct; identical to SEQ ID NO: 5315
  source 1..120: mol_type = other DNA

SEQ ID NO: 16733 - DNA, 120 bp, synthetic construct
  source 1..120: mol_type = other DNA
agccagaccccgtcttgaaagaaaagaaaaggaaggaaagaacgaaagaaagaaacaaaagtcatccaaactggaaaagaaaactaaaattatctgtttacagatgacatgatcttatat

SEQ ID NO: 16734 - DNA, 120 bp, synthetic construct
  source 1..120: mol_type = other DNA
ctagcaatgaccaacctgaaaagaaaattaagaaaacaatcccatttactatagcaccaaaaagaataaaatatttaggcataaactgaaccaaggaggtaaaagacttgtgcgggaaaa

SEQ ID NO: 16735 - DNA, 120 bp, synthetic construct
  source 1..120: mol_type = other DNA
agattcaatggcattcttatcaaaaactcaatggcaattttgcagaaataggaaaatatagaaaaaaatcatcctaagactcatatggaatctccagggaacctgaacagccaaaacaat

SEQ ID NO: 16736 - DNA, 120 bp, synthetic construct
  source 1..120: mol_type = other DNA
ctttgggagaccaaggtgggtggatgacgaggtcaggagttcaaggccagcctggccagcatggtaaaaccccgtctctactaaaaatacaaaagattagctgggcatggtggcacgtgc

SEQ ID NO: 16737 - DNA, 120 bp, synthetic construct; identical to SEQ ID NO: 5316
  source 1..120: mol_type = other DNA

SEQ ID NO: 16738 - DNA, 120 bp, synthetic construct
  source 1..120: mol_type = other DNA
tcaaaatgggttaaagacctaaacataagaccaaaaactatacaactcctcgaagaaaacatggaggaaaagcttcaggacattggatttgacagtgatttcttggacaagccaccaaga

SEQ ID NO: 16739 - DNA, 120 bp, synthetic construct
  source 1..120: mol_type = other DNA
tgcaactgataaagggttaatatccagcgtatataaggaacttgtacaactcaacaacaacaaaaaacaaataacctgattttaaaatgggcaacagactttaataaacatttcttgaaa

SEQ ID NO: 16740 - DNA, 120 bp, synthetic construct
  source 1..120: mol_type = other DNA
aaagaatagaaaataacaagtgttggagaggatatgcagaaattggaaatgtgtgcactgttggcgggaatgtaaaatggtgcagccattatgaaaaacagtgtggagttcgtggtctat

SEQ ID NO: 16741 - DNA, 120 bp, synthetic construct; identical to SEQ ID NO: 5317
  source 1..120: mol_type = other DNA

SEQ ID NO: 16742 - DNA, 120 bp, synthetic construct
  source 1..120: mol_type = other DNA
ggaagctccataccccttccaccataccttgccctgccagtctattcatctgtgtcctttataataaactggtgaatgtaaatgtttccctgagttctgtgagccactccagcaaattaa

SEQ ID NO: 16743 - DNA, 120 bp, synthetic construct
  source 1..120: mol_type = other DNA
cccaacctgcaggaactgacattaccttcaggtagacagtgtcagaactgaattggaggacacctagctggtgtctgctgcttgatgtgtggggaaaaaccttcacacatttggccacag

SEQ ID NO: 16744 - DNA, 120 bp, synthetic construct
  source 1..120: mol_type = other DNA
tcacaaaattaaaattatgattcccatataatccagcaaacctacttctgcaggggtttcaaaagaattcaaaagcattcaaagtaggatcctaaagagataactgtagcattattcaca

SEQ ID NO: 16745 - DNA, 120 bp, synthetic construct; identical to SEQ ID NO: 5318
  source 1..120: mol_type = other DNA

SEQ ID NO: 16746 - DNA, 120 bp, synthetic construct
  source 1..120: mol_type = other DNA
gaatatacttaatactactaaactgtatacttaaaaatggttaggatgataaatttaatgttatgtgttttacttttatttaaaacaatttaaatacgttcagataaataaaaatgagtt

SEQ ID NO: 16747 - DNA, 120 bp, synthetic construct
  source 1..120: mol_type = other DNA
atataaaaaattagctgggtgtggtggcacatgtctgtaatcccagctactggggaggctgaggcatgagaatcgtttgaacctgggaaggtgaggttgcagtgagctgagaatgtgcca

SEQ ID NO: 16748 - DNA, 120 bp, synthetic construct
  source 1..120: mol_type = other DNA
tagctgggaatgtttatgttaggaaagacaaaagatcttaaatcaatagcccttacattgtaagacactgaaaaaagacgagcaaactaaagctaacgcaacaggaaggaaagaaataaa

SEQ ID NO: 16749 - DNA, 120 bp, synthetic construct; identical to SEQ ID NO: 5319
  source 1..120: mol_type = other DNA

SEQ ID NO: 16750 - DNA, 120 bp, synthetic construct
  source 1..120: mol_type = other DNA
tcacttgaacctgggagccgagattgtgccactgcactccagcctgagggacagagtgagactgcatctcggaaaaaaaaacaaaaaacaaaaaagaaatcccctgttagaagagaataa

SEQ ID NO: 16751 - DNA, 120 bp, synthetic construct
  source 1..120: mol_type = other DNA
ggactggttggacagtgggtacagcccatggagggtgagctgaagcagggcggagcatcgcctcacctgggaagtgcaaggttcaggggatttccctttcccagccaagggaaactgtga

SEQ ID NO: 16752 - DNA, 120 bp, synthetic construct; identical to SEQ ID NO: 5320
  source 1..120: mol_type = other DNA

SEQ ID NO: 16753 - DNA, 120 bp, synthetic construct
  source 1..120: mol_type = other DNA
ctgtctgacagctctgaagagagcagtggttctcccagcacggagtttgagtcctaagaagggacagactgcctcctcaagtgggtccctgacccctgtgtagcctaactgggagacacc

SEQ ID NO: 16754 - DNA, 120 bp, synthetic construct
  source 1..120: mol_type = other DNA
gctggtgatacccaggcaaacagggtctggagtggacctctagcaaactccaacagacctgcagctcagagacctgttaggaggaaaactaacaaacagaaagaaatagcatcaacatca

SEQ ID NO: 16755 - DNA, 120 bp, synthetic construct; identical to SEQ ID NO: 5321
  source 1..120: mol_type = other DNA

SEQ ID NO: 16756 - DNA, 120 bp, synthetic construct
  source 1..120: mol_type = other DNA
agctgaaaaccatggcacgagaactacgtgacacatgtaaaagcttcagtagccgattccatcaagtggaagaaagggtatcagtgattgaagatcaaattaatgaaacgaagcaagaag

SEQ ID NO: 16757 - DNA, 120 bp, synthetic construct
  source 1..120: mol_type = other DNA
taacacggtgaaaccccgtctctactaaaaatacaaaacattagctgggcatggtggcgggcgcctgtagtcccagccactcgggaggctgaggcaggagaatggcgtgaacccgggagg

SEQ ID NO: 16758 - DNA, 120 bp, synthetic construct; identical to SEQ ID NO: 5322
  source 1..120: mol_type = other DNA

SEQ ID NO: 16759 - DNA, 120 bp, synthetic construct
  source 1..120: mol_type = other DNA
caatcccaagacacataattgtcagattcaccaaggttgaaatgaaggaaaaaatgttaagggcagccagagagaaaggtcgggttacccgcaaagggaatcccatcagactaacagcag

SEQ ID NO: 16760 - DNA, 120 bp, synthetic construct
  source 1..120: mol_type = other DNA
gagaaataaaatcctttgcagacaagcaaatgctgagagattttgtcaccaccaggcctgccttacaagagctcctgaaggaagcgctaaacatggaaaggaacaactggtaccagccac

SEQ ID NO: 16761 - DNA, 120 bp, synthetic construct
  source 1..120: mol_type = other DNA
taaatgtaaatgggctaaatgccccaattaaattagacacagactggcaaattggataaagagtcaagacccatcaagtgtgctgtattcaggagaccaatctcacatgcagagacgcac

SEQ ID NO: 16762 - DNA, 120 bp, synthetic construct; identical to SEQ ID NO: 5323
  source 1..120: mol_type = other DNA

SEQ ID NO: 16763 - DNA, 120 bp, synthetic construct
  source 1..120: mol_type = other DNA
tctggaccaagcagacctaatagacatctacagaactctccaccccaaataaacagaatatacattcttctcagcaccacatcacacttattccaaaattgaccacaaagttggaagtaa

SEQ ID NO: 16764 - DNA, 120 bp, synthetic construct
  source 1..120: mol_type = other DNA
actgaacaacttactcctgaatgactactgggtaaataacaaaatgaaggcagaaataaagatgttctttgaaaccaatgagaacaaagacacaacataccagaatctctgggacgcatt

SEQ ID NO: 16765 - DNA, 120 bp, synthetic construct
  source 1..120: mol_type = other DNA
catcacaatgaaaagaactagagaagcaagagcaaacacattcaaaagctagcagaaggcaagaaataactaagatcagagcagaactgaaggagacagaaacacaaaaaaccattcaaa

SEQ ID NO: 16766 - DNA, 120 bp, synthetic construct
  source 1..120: mol_type = other DNA
ggggatatcaccaccgatcccacagaaatgcaaactaccatcagagaatactataaacacctctatgcaaataaactagaaaatctagaagaaatggataaattcctggacacatacact

SEQ ID NO: 16767 - DNA, 120 bp, synthetic construct; identical to SEQ ID NO: 5324
  source 1..120: mol_type = other DNA

SEQ ID NO: 16768 - DNA, 120 bp, synthetic construct
  source 1..120: mol_type = other DNA
cttatccaccaagaacaagttggcttcatccctgggatacaaggcttgttcaacatatgaaaatcaataaatgtaatccatcacataaacagaaccaaagccaaaaaccatgtgattatc

SEQ ID NO: 16769 - DNA, 120 bp, synthetic construct
  source 1..120: mol_type = other DNA
acagccaatatcatattgaatgggcaaaaactggaagcattcccttttaaagctggcacaagacagggatgccctctctcaccacttctattcaacatagtgttggaagttctggccagg

SEQ ID NO: 16770 - DNA, 120 bp, synthetic construct
  source 1..120: mol_type = other DNA
ctccttaagctgataagcaacttcagcaaagtctcaggatacaaaatcaatgtgcaaaaatcacaagcattcctatacatcagtaacagacagagagccaaatcatgagggaactcccat

SEQ ID NO: 16771 - DNA, 120 bp, synthetic construct
  source 1..120: mol_type = other DNA
ggaagaacattccatgctcatggataggaagaatcaatatcatgaaaatggccctactgcccaaggtaatttatagattcaatgccatctccctcaagctaccaatgactttcttcacag

SEQ ID NO: 16772 - DNA, 120 bp, synthetic construct; identical to SEQ ID NO: 5325
  source 1..120: mol_type = other DNA

SEQ ID NO: 16773 - DNA, 120 bp, synthetic construct
  source 1..120: mol_type = other DNA
taattcaagatggatgaaagacttaaatgttagacctaaaaccataaaaaccctagaacaaaacctaggcaataccattcaggacataggtatggacaaggacttcatgactaaaacacc

SEQ ID NO: 16774 - DNA, 120 bp, synthetic construct
  source 1..120: mol_type = other DNA
ttttgcaatctacccatctgacaaagggctaatatccagaatctacaaagaactcaaacaaatttacaagaaaaaatcaaacaaccccatcaaaaagtgggcaaaggatatgaacagaca

SEQ ID NO: 16775 - DNA, 120 bp, synthetic construct
  source 1..120: mol_type = other DNA
ggtgatcattaaaaagtcaggaaacaacaggtgctggagaggatgtggagaaataggaatgcttttacactgttggtgggactgtaaactagttcagccatcgtggaagacagtgtgata

SEQ ID NO: 16776 - DNA, 120 bp, synthetic construct
  source 1..120: mol_type = other DNA
ggcactattcacaatagcaaagacttggaacaacccaaatatccatcaatgatagactggattaggaaaatgtggcacatatacaccatggaatactatgcagccataaaaaaggatgag

SEQ ID NO: 16777 - DNA, 120 bp, synthetic construct; identical to SEQ ID NO: 5326
  source 1..120: mol_type = other DNA

SEQ ID NO: 16778 - DNA, 120 bp, synthetic construct
  source 1..120: mol_type = other DNA
tatttatttatatttctgaccccctactacagcttcttacttttgacaattgtcctttttttttttttgagattgaggctcgctctgtcacccaggctggattgcaacagcgcaatctca

SEQ ID NO: 16779 - DNA, 120 bp, synthetic construct
  source 1..120: mol_type = other DNA
ggggttttgccatattggccaggctggtctcaaactcctgacctcaagtgatcctcccacctcggcctcccaaagtgctgggattacaggcatgagccaccatgcccagccaattgtcct

SEQ ID NO: 16780 - DNA, 120 bp, synthetic construct
  source 1..120: mol_type = other DNA
ggattacatatggcctatactcctgtggtgccaaaacgacaaatctttttactccactgcaatcaattgttgaaggtgcatcatcccaggaagggtgtgcttttgggagaatcaactctc

SEQ ID NO: 16781 - DNA, 120 bp, synthetic construct; identical to SEQ ID NO: 5327
  source 1..120: mol_type = other DNA

SEQ ID NO: 16782 - DNA, 120 bp, synthetic construct
  source 1..120: mol_type = other DNA
gctcactgcaagctccgctttctgggttcatgccattttcctgcctcagactcccaagtagctgggactacaggtgcctgccaccacacctggctaattttttgtatttttagtagagat

SEQ ID NO: 16783 - DNA, 120 bp, synthetic construct
  source 1..120: mol_type = other DNA
tttcttctaaattattttccactttactaatactcttttcagttgtgtcaagtttgttgttaatttatccttcaagttcttaattttggttattatatatttcaattacaaataaatttt

SEQ ID NO: 16784 - DNA, 120 bp, synthetic construct
  source 1..120: mol_type = other DNA
taatttccaaatctgaagtttagtagattctatttctggtatctgtcatttctttttctttctttcctttcttttctctttttcttttttctttctttctctctttctttctctctcttt

SEQ ID NO: 16785 - DNA, 120 bp, synthetic construct; identical to SEQ ID NO: 5328
  source 1..120: mol_type = other DNA

SEQ ID NO: 16786 - DNA, 120 bp, synthetic construct
  source 1..120: mol_type = other DNA
ggcagccctaggtttctgtttttgttcctctaaccctatgaggctatcagaaacatagataagtctcttggcttctacatccagattacaaatgttgccagggcaaaaggggtcccaact

SEQ ID NO: 16787 - DNA, 120 bp, synthetic construct
  source 1..120: mol_type = other DNA
tgttgtctttaccagggggattatctgaattacctagacatccattatctggaacagagttctgtctctcttcacttgtcttaattgaaaactagagtcagcacccctgaatatcagcgg

SEQ ID NO: 16788 - DNA, 120 bp, synthetic construct
  source 1..120: mol_type = other DNA
agacaagattgaaaacctaacttaggaatatgtgcctataacaatagctgagtcttggccaatcccagtggctgtaattcaaccattcatacactgctgagtgttcaaattgtgttcaaa

SEQ ID NO: 16789 - DNA, 120 bp, synthetic construct
  source 1..120: mol_type = other DNA
ggctggagtgcagtggctcgatctcagctcactgaaacctctgcctcccgggttcaagcaattctcctggctcagcctcctgagtagctgggattacaggagcatgccaccacagccggc

SEQ ID NO: 16790 - DNA, 120 bp, synthetic construct; identical to SEQ ID NO: 5329
  source 1..120: mol_type = other DNA

SEQ ID NO: 16791 - DNA, 120 bp, synthetic construct
  source 1..120: mol_type = other DNA
aggtgtgagtgagcctataccaacaaggtcaggctcaaacctagccattttcttccaaagtgttaaccacagtattaaatagcaccaaggtttttaaaataactgagacatttacacaca

SEQ ID NO: 16792 - DNA, 120 bp, synthetic construct
  source 1..120: mol_type = other DNA
ggatcacctgaggtcgggagtttgagacaagcctgaccaacatggagaaaccccgtctctactaaaaatacaaaattagccatgcatggtggcgcatgcctgtaatcccaggtacttggg

SEQ ID NO: 16793 - DNA, 120 bp, synthetic construct
  source 1..120: mol_type = other DNA
aagagatataatccagtaccttatatctgtgctacaccctcatactgtagactttgtatgactgtacgatgctcttctttgcatgactatacaaggcccttcaaaacccgagaaaagtgt

SEQ ID NO: 16794 - DNA, 120 bp, synthetic construct
  source 1..120: mol_type = other DNA
tttcccctaaatctttagcaagcacttgttggattagtgaatctttgcccttgcgtgcaagtcagaggatggcagctcaaactcactagaatccatctggttgtctcctcttttcttttg

SEQ ID NO: 16795 - DNA, 120 bp, synthetic construct; identical to SEQ ID NO: 5330
  source 1..120: mol_type = other DNA

SEQ ID NO: 16796 - DNA, 120 bp, synthetic construct
  source 1..120: mol_type = other DNA
actatccttttgccaacatctactcagatgactggactaatacagtcatgcctagatcaacctcagggatatgatctgaaaaattagtcattagggcatttcatcactgtgcaaacattt

SEQ ID NO: 16797 - DNA, 120 bp, synthetic construct
  source 1..120: mol_type = other DNA
ggcaatggaacacacagatacgtatttgtgtacttaaacacaggaaagatacagtaaaaatatggtattatagtcttataaaaccatggtcgtacatgtagtcagtcattgacggaaagg

SEQ ID NO: 16798 - DNA, 120 bp, synthetic construct
  source 1..120: mol_type = other DNA
aggttgttcatacatattatatgctattataaggtattttaaactaccatgaacaccacaataaaacatgggaaaatgttaatgatttattagaggaaaataactcagttatgaatattg

SEQ ID NO: 16799 - DNA, 120 bp, synthetic construct; identical to SEQ ID NO: 5331
  source 1..120: mol_type = other DNA

SEQ ID NO: 16800 - DNA, 120 bp, synthetic construct
  source 1..120: mol_type = other DNA
ataaccctccaaaaaactaaaactatagcaaggcttcagttttccacctccagtaccatttgcgcatttacaaatggatttcattcagttttccaaaattttaaaaaattgaacgttgtt

SEQ ID NO: 16801 - DNA, 120 bp, synthetic construct
  source 1..120: mol_type = other DNA
tctatatctgtgctgtccacctggtaggtatgacatgccacgtgtggctattgagcattgaaatgggaatagtacaacagctgttaccaaaacctaataacaagtatcattcaaagcttg

SEQ ID NO: 16802 - DNA, 120 bp, synthetic construct
  source 1..120: mol_type = other DNA
attctcaaaatctgagaaagcaacacaaatttatggtcttctttaaatcaacatttgaaaacaccatcgcaaaattacaactgagacagtgagagatctaacctaaccaattccatcttg

SEQ ID NO: 16803 - DNA, 120 bp, synthetic construct; identical to SEQ ID NO: 5332
  source 1..120: mol_type = other DNA

SEQ ID NO: 16804 - DNA, 120 bp, synthetic construct
  source 1..120: mol_type = other DNA
tgtggcccccatccagaaattaagccaacacaagaggacagcttcgactccctctgatttcatctccgacccgactaatcaactttcccaactcactggtcccctacccaccaaattatc

SEQ ID NO: 16805 - DNA, 120 bp, synthetic construct
  source 1..120: mol_type = other DNA
aactcattgggtggttacacattttcaaattttcagagctttccttagactaaaactttaccatcagtcctaaggtagtatgatccatgctacaaaactcgccataaaaccttactatgt

SEQ ID NO: 16806 - DNA, 120 bp, synthetic construct
  source 1..120: mol_type = other DNA
tggccacgtggttcaaccagaagatccgcagaatcaaggcccggcaagccaaagggcgctgcatcgccccgcgcccggagagtcgggacccatctggcccattgtgctgtgccctgctgt

SEQ ID NO: 16807 - DNA, 120 bp, synthetic construct; identical to SEQ ID NO: 5333
  source 1..120: mol_type = other DNA

SEQ ID NO: 16808 - DNA, 120 bp, synthetic construct
  source 1..120: mol_type = other DNA
aatgcttggcggcaatgctcggctcttcggcatatgggcaaaaagagccaaggaagctgaaaaacaggatgtgtgaaagcaaaaataaagccctcttggggacttgtaataaatacgttt

SEQ ID NO: 16809 - DNA, 120 bp, synthetic construct
  source 1..120: mol_type = other DNA
ggagaaataacacaagatttaggaactatgccaacgtttacgaccccaggtctagaggtcaagccgtgcacttggtctctcaagtcgcctgcttggccctcttccaagtgtactttcctt

SEQ ID NO: 16810 - DNA, 120 bp, synthetic construct
  source 1..120: mol_type = other DNA
aatgttgctgcagactccttacagataactgccaccgctaatatgttgagatgttcacacatgcatgtgtgaggcccttcaaaatgtgagctgcggttagaattgggaagagaagggagt

SEQ ID NO: 16811 - DNA, 120 bp, synthetic construct; identical to SEQ ID NO: 5334
  source 1..120: mol_type = other DNA

SEQ ID NO: 16812 - DNA, 120 bp, synthetic construct
  source 1..120: mol_type = other DNA
cttgagttcaggagttcgagaccagcctggccaacatggtgaaacccccgtttccactaaaaaaaaaaaaattagccgggcatggtggtgcatcatgcctgtaattccagctactcggga

SEQ ID NO: 16813 - DNA, 120 bp, synthetic construct
  source 1..120: mol_type = other DNA
aaaaaaaaaaaagcctacaaaaagcttacaaagtctaaaatcggacgaacaagaggacacctgatgggggaaaagaaaagagattgcgatgggaagagagtggtggggaaatccgtggga

SEQ ID NO: 16814 - DNA, 120 bp, synthetic construct
  source 1..120: mol_type = other DNA
ttgcttgatcttcgataatactgggaaatgtaaccaatgtgattgggcttgttaatttggtgccttgcttgtttttcgggttttggaattctgccagtctgtgcttccgcggcctctttc

SEQ ID NO: 16815 - DNA, 120 bp, synthetic construct; identical to SEQ ID NO: 5335
  source 1..120: mol_type = other DNA

SEQ ID NO: 16816 - DNA, 120 bp, synthetic construct
  source 1..120: mol_type = other DNA
ttatcggtcgtgccaagaagcatattttgtcgaacttaattttgaattcgctatactggatattgtttcctgactgcgctgagagaaggaaaactgaatgttatatcgaaagtcccgtgc

SEQ ID NO: 16817 - DNA, 120 bp, synthetic construct
  source 1..120: mol_type = other DNA
tgattctgcttggaaaggttgccaggaaaccgcgagcataacgcagaaagataaaacgaaagccctaaacgccgccgtgggaatttaagtccaaggggcagagaaaacaggaggggaatt

SEQ ID NO: 16818 - DNA, 120 bp, synthetic construct
  source 1..120: mol_type = other DNA
gagatgcgcactgggaagagaaaagagccaggacgcacctgcatttatggcgccatcgcccgggcggaatcctccacggaataaaaagtatgcagaagcaaggcgatttatgactgcata

SEQ ID NO: 16819 - DNA, 120 bp, synthetic construct; identical to SEQ ID NO: 5336
  source 1..120: mol_type = other DNA

SEQ ID NO: 16820 - DNA, 120 bp, synthetic construct
  source 1..120: mol_type = other DNA
gaaatgccatactgtatacgtacaatgcataggccaaaggcgaccctatgacccagagattagaaagactcggacgtcttttgactgggttcaggtcacactactcccaaaatacgacac

SEQ ID NO: 16821 - DNA, 120 bp, synthetic construct
  source 1..120: mol_type = other DNA
tgatcttccaattaaagtaggtgataagaccgtcaattcagaggggagaaaatgtacttggaggaaataaacgaagacacagagatgccaaagagaacctgaataaacaggctttgctaa

SEQ ID NO: 16822 - DNA, 120 bp, synthetic construct
  source 1..120: mol_type = other DNA
ctaagcataaaaatataggaagtcctcacttattgtcagttggtttttggaaactattactttaagcaaaataaaactaattctaccatagactagactaattgatttaagagttaattt

SEQ ID NO: 16823 - DNA, 120 bp, synthetic construct
  source 1..120: mol_type = other DNA
aatatgagctgcacctcaagttaagatcagcaaaaacgacatgattgatttatttttggtgaatcagtgactgcaattctagtggtggcaggttatatcaaggaataaatgtttgtgaaa

SEQ ID NO: 16824 - DNA, 120 bp, synthetic construct; identical to SEQ ID NO: 5337
  source 1..120: mol_type = other DNA

SEQ ID NO: 16825 - DNA, 120 bp, synthetic construct
  source 1..120: mol_type = other DNA
aagataagctgcagaccatcaacaaattacagctcataaacgtagtgtaaacccaaagaacaatcaagatccatcgcagagagcgaaaaatcacttccgcaccgtgggaaaaagcccgaa

SEQ ID NO: 16826 - DNA, 120 bp, synthetic construct
  source 1..120: mol_type = other DNA
gtccatcttcacagagtgctcattggcgcgtttacaatccctgagctagacacaaaagttctccaagtccccaccagagtagctagatacagagtgtccattagtgaattcacaaaccct

SEQ ID NO: 16827 - DNA, 120 bp, synthetic construct
  source 1..120: mol_type = other DNA
agctaaatacagagtgtccattggtgcattcacaaaccctgagctagacacagggtgccgattggtgtgtttacaaaccttgagctagatacagagtgccgattggtgtatttataatcc

SEQ ID NO: 16828 - DNA, 120 bp, synthetic construct; identical to SEQ ID NO: 5338
  source 1..120: mol_type = other DNA

SEQ ID NO: 16829 - DNA, 120 bp, synthetic construct
  source 1..120: mol_type = other DNA
ggggccgctccgagtgcggagcccgccgagcccacgcccacccggaactcgcgctgggcccgcaagcgccgcgcgcagcctcggttcccgcctgcgcttctccctccacacatccctgca

SEQ ID NO: 16830 - DNA, 120 bp, synthetic construct
  source 1..120: mol_type = other DNA
agcaagcgaaggctgtgagggctgccagcaagctgtcacctctcagtatggcggctggctgttttagcaccatgtcgtttattgtcatgcatttgtaggattatgaaatgcttcctgaat

SEQ ID NO: 16831 - DNA, 120 bp, synthetic construct
  source 1..120: mol_type = other DNA
ggacaggtggccattccatcacagggcgggctcatacacacacacacacactcacacatatgctcgcgtgctctttcactcagactgatgacgctagactcagactagatatgctaatga

SEQ ID NO: 16832 - DNA, 120 bp, synthetic construct; identical to SEQ ID NO: 5339
  source 1..120: mol_type = other DNA

SEQ ID NO: 16833 - DNA, 120 bp, synthetic construct
  source 1..120: mol_type = other DNA
ttacaggcgtgtgccactatgcccagctaatttcgtatttttagtggaaatgggggtttctccatgttggccaggctggtctcaaactcctgacctcaggtgatccaccagcttcagccc

SEQ ID NO: 16834 - DNA, 120 bp, synthetic construct
  source 1..120: mol_type = other DNA
tctgccctagaccttcctataagtgcttttgggacaacactgcaggagtccccaaaggtgaaaatttacctgcgggagttaataaaaacaggaatccccaggccttaccccagagactga

SEQ ID NO: 16835 - DNA, 120 bp, synthetic construct
  source 1..120: mol_type = other DNA
gaatttgatattcaggcaagtttgaaaaccactgggcctgaaaatctagccacaacagaaactgaaactaggatctggggaaagttaacaaggggaggagaaagattggaaagtattaca

SEQ ID NO: 16836 - DNA, 120 bp, synthetic construct; identical to SEQ ID NO: 5340
  source 1..120: mol_type = other DNA

SEQ ID NO: 16837 - DNA, 120 bp, synthetic construct
  source 1..120: mol_type = other DNA
cagggttcaggcagtagacatacactcttaagtgacatggtgggtgatctgtcatgctgcaatccaccctgcctcccatttcttacattctttctgccaatcttgtgtgagactccttga

SEQ ID NO: 16838 - DNA, 120 bp, synthetic construct
  source 1..120: mol_type = other DNA
gtagggtggaaggaaagaactatacaggtctataacgtctagccatggcttgcgcatacaggtcacatctacagtatacgtaggagcacaaaaagcagaagttaactacaattataatgt

SEQ ID NO: 16839 - DNA, 120 bp, synthetic construct
  source 1..120: mol_type = other DNA
atatcatggatctgagttgacaaatggtttaaagtacctctgacattactctcttcatcagggaaataggtgcaacagttagcacctagaaaggcacattttgggtctttgtcacgttgg

SEQ ID NO: 16840 - DNA, 120 bp, synthetic construct; identical to SEQ ID NO: 5341
  source 1..120: mol_type = other DNA

SEQ ID NO: 16841 - DNA, 120 bp, synthetic construct
  source 1..120: mol_type = other DNA
tgcaagttccgcctcctgggttcacgccattctcctgcctcagcttcctgagtagctgggactacaggcgcccgccaccacatctggctaattttttgtatttttagtggagacggggtt

SEQ ID NO: 16842 - DNA, 120 bp, synthetic construct
  source 1..120: mol_type = other DNA
tatcattgtgttttctcccactggcactattagggatgccactgtgggcttcaggcctggattacaaaaccacccatgtcttcttttcctagaagcagccacaatagccaattgataagt

SEQ ID NO: 16843 - DNA, 120 bp, synthetic construct
  source 1..120: mol_type = other DNA
tatggcagttatcatggcaccaccctccagtactataaaactaatccagtatggaggcatattccagctcagcttcaggtccctgtagccatcactgcttggcagatccactggtgttct

SEQ ID NO: 16844 - DNA, 120 bp, synthetic construct; identical to SEQ ID NO: 5342
  source 1..120: mol_type = other DNA

SEQ ID NO: 16845 - DNA, 120 bp, synthetic construct
  source 1..120: mol_type = other DNA
atctcggctcactgcaacctccgcctcccggattaaagcaattctcccacctcagtctcccaagtagctgggactacacgcatgcgccaccacgcctggctaatttttgtatttttagta

SEQ ID NO: 16846 - DNA, 120 bp, synthetic construct
  source 1..120: mol_type = other DNA
ctatattttcttctgatgcccagtgttggatatctttgctatgcccatcaatgtaccagggcctagcagatattggcggggtacccttatatatggtggttggcctgatgggtggctcca

SEQ ID NO: 16847 - DNA, 120 bp, synthetic construct
  source 1..120: mol_type = other DNA
aaattcatccctgtgacatctctggtgattactaatacagcagtagagtctgtatgcttgggcttgtttcaccaatatttttgttttgtcaaatgcctcttgttctatttatgtcatctc

SEQ ID NO: 16848 - DNA, 120 bp, synthetic construct
  source 1..120: mol_type = other DNA
agtaaacctaggaaaacctggagttgctctactgtctggagagtagactactatgctatcttatcaatgacggctttgggtatgtttcacatcttacccaaccaggtaactctcaggaat

SEQ ID NO: 16849 - DNA, 120 bp, synthetic construct; identical to SEQ ID NO: 5343
  source 1..120: mol_type = other DNA

SEQ ID NO: 16850 - DNA, 120 bp, synthetic construct
  source 1..120: mol_type = other DNA
ttgtgaatcttcagctgaaagaatactggaaaaggtattaatgcagtcagtcacagaatggatacttcccagcttcggtactgcttgctctagcagttgagcaatattggatacagctgc

SEQ ID NO: 16851 - DNA, 120 bp, synthetic construct
  source 1..120: mol_type = other DNA
ttgtaccttatgtactttctggattgtttgggtgatttcagagtgcccccccaatagcaggaagtattgtttcatgttcattacctgcaaggatacaggtgcatatttggcctatcccct

SEQ ID NO: 16852 - DNA, 120 bp, synthetic construct
  source 1..120: mol_type = other DNA
catttcccactaagaggctcagaagtgttgtctgaaattggtgggttctatggtctcactgacttcaacaatgaaaccgcaaaccctcacagagagtgtcacagctctaaagttcgcggg

SEQ ID NO: 16853 - DNA, 120 bp, synthetic construct
  source 1..120: mol_type = other DNA
aaaaacagcgtggacccaaagaatgaccagttggaaaatttattgcgcatagtgaaaaaaacaacgctttcacagtgcagaagagacaacccagcgggttgctaatgctggttcgggcag

SEQ ID NO: 16854 - DNA, 120 bp, synthetic construct; identical to SEQ ID NO: 5344
  source 1..120: mol_type = other DNA

SEQ ID NO: 16855 - DNA, 120 bp, synthetic construct
  source 1..120: mol_type = other DNA
aaaagactctccacgtccccaccagactcaggagcccagctggcttcacctagtggattccgcactggggctgcaggtggagctgcctgccagtcctgcgccctgcactcgcattcctca

SEQ ID NO: 16856 - DNA, 120 bp, synthetic construct
  source 1..120: mol_type = other DNA
gtcccgagccctgccccgtgggaaggcagccaaggcccggcgagaaatcgagcacagcgcgggtgggccggcactgctgggggacccagtacacccttcgcagccactggcccgggtgct

SEQ ID NO: 16857 - DNA, 120 bp, synthetic construct
  source 1..120: mol_type = other DNA
cgctcgtgtctctccctccacacctccctgcaagctgaaggagtgggctccggccttggccagcccagaaaggggctcccacagtgcagtgggggactgaagggctcctcaaatgccacc

SEQ ID NO: 16858 - DNA, 120 bp, synthetic construct
  source 1..120: mol_type = other DNA
accaatgccctatattataaatgccattttttgaattggaaatgatccagacattcaacaagtacttaaaacaattttaaggttttaaactacacaaaaagttcacccgtaagcatttat

SEQ ID NO: 16859 - DNA, 120 bp, synthetic construct; identical to SEQ ID NO: 5345
  source 1..120: mol_type = other DNA

SEQ ID NO: 16860 - DNA, 120 bp, synthetic construct
  source 1..120: mol_type = other DNA
tatctagcagaggcaaatgtaaaactaattggtaaactgagacaaaaacgtatgctgacaattcaaggacatttctatttttattttaccaataattttaaagccagattatttattaaa

SEQ ID NO: 16861 - DNA, 120 bp, synthetic construct
  source 1..120: mol_type = other DNA
tttaagcatgtatctatacacacaaaccaatatccaacagcttttacttggaactctagccatgagacaacatcataaatttactattttacaaaagatagttggatcaggccgggtgca

SEQ ID NO: 16862 - DNA, 120 bp, synthetic construct
  source 1..120: mol_type = other DNA
aaagtagctgggagtggtggcgcacccctgtaatcccagcttctcaagaggctcaggcaggagaatcacttgaacttgggagatggaggttgcactgagccgagatctcaccgttgcact

SEQ ID NO: 16863 - DNA, 120 bp, synthetic construct; identical to SEQ ID NO: 5346
  source 1..120: mol_type = other DNA

SEQ ID NO: 16864 - DNA, 120 bp, synthetic construct
  source 1..120: mol_type = other DNA
agtgagttttatttcaacaccaatagcttaataatggcatatttgagtgttggggtgatcagacccaacaccaggtcgtgggggcgacaaagtcctgcagagtcacagaaatgagaaaaa

SEQ ID NO: 16865 - DNA, 120 bp, synthetic construct
  source 1..120: mol_type = other DNA
gggggttgaaaggaaatggtgtatcaagtgaaagagaaacatatggctactttagataatgggagtgctaaaagcaaggagccagcaagtctagcagacatacaagtcctgttgtctccc

SEQ ID NO: 16866 - DNA, 120 bp, synthetic construct
  source 1..120: mol_type = other DNA
caatatggtgaaaccccatctctactaaaaatacctgggcgtggtggtgggttcctgtaatcccagctactcgggaggctgaggcaggaaaagagcttgaacccgggaggcggaggctgt

SEQ ID NO: 16867 - DNA, 120 bp, synthetic construct; identical to SEQ ID NO: 5347
  source 1..120: mol_type = other DNA

SEQ ID NO: 16868 - DNA, 120 bp, synthetic construct
  source 1..120: mol_type = other DNA
gccttattgcaacaatagcacatttgctatccttatcctactttgatatcttagcctcttgcaatatgcgcttagtccccgccacattttctgaatatccctatacttcctcagcagtcc

SEQ ID NO: 16869 - DNA, 120 bp, synthetic construct
  source 1..120: mol_type = other DNA
ccaattgttatgagcaaaacttgggactgtaacgtccccctaaattgggaagcagccaacagaccaaagaatgacttggacacgtacagcttgacaagtaagatgaatttattaggactt

SEQ ID NO: 16870 - DNA, 120 bp, synthetic construct
  source 1..120: mol_type = other DNA
gtatagtgctgccatctcggctcactgcagcctccgcctcctgggttcaagtgattctcctgcctcagcctcccgggtagctgggattacaggcacccgccaccccatcctgctaatatt

SEQ ID NO: 16871 - DNA, 120 bp, synthetic construct; identical to SEQ ID NO: 5348
  source 1..120: mol_type = other DNA

SEQ ID NO: 16872 - DNA, 120 bp, synthetic construct
  source 1..120: mol_type = other DNA
acctaatctggtgggggattcatcacactacggaagggaaaagaggaaacccatgaggtgagaggcagcgtgctgggtagtggagcctcaaggatgctcaggatttggatgctcagatct

SEQ ID NO: 16873 - DNA, 120 bp, synthetic construct
  source 1..120: mol_type = other DNA
gcaacagaaggtgtcaatccttcgagttcagttgttcacaaagcataggtccatcagaatcatctggatgacttgttgaaacatattggaacatcctttgggaatttctgatttagtgga

SEQ ID NO: 16874 - DNA, 120 bp, synthetic construct
  source 1..120: mol_type = other DNA
acctcttacaagagacccagcttgtcttgtctgagacttttgtgactcactgagtctctgaatgggctcagcattttctcaggtgcatctcttaaactgtatgtttgaagttcgttagtc

SEQ ID NO: 16875 - DNA, 120 bp, synthetic construct
  source 1..120: mol_type = other DNA
gaggcaaggctgcatagggttgggcagctccagttgcagaaggaaacaccaatttagcatgtttgctttcttgctttttttgcctgcttatttttagcatatctagttgagaatccaaaa

SEQ ID NO: 16876 - DNA, 120 bp, synthetic construct; identical to SEQ ID NO: 5349
  source 1..120: mol_type = other DNA

SEQ ID NO: 16877 - DNA, 120 bp, synthetic construct
  source 1..120: mol_type = other DNA
gagaccagcctggccaacatggtgaaaccctgtctctactaaaaatacaaaaattagcctcgtgtggtgtggcaggcgcctgtaatcccagctgctagggaggctgaggcaggagaatcg

SEQ ID NO: 16878 - DNA, 120 bp, synthetic construct
  source 1..120: mol_type = other DNA
aaaaaagtctcaagcgcagaaccgtgaaaaagctaaagttgttatacaattggagagcgaatgattcaacattttgttaatcattgaccttattctctgtcctactctaaggagggcata

SEQ ID NO: 16879 - DNA, 120 bp, synthetic construct
  source 1..120: mol_type = other DNA
ggtctaaactagcagagacttgagtgacaaaaaacaaagaaggaacctatttgaactggagaaagaaggtggatgctgcaggattgagagactttatggattttaaaagaaacaaagatg

SEQ ID NO: 16880 - DNA, 120 bp, synthetic construct
  source 1..120: mol_type = other DNA
tttatttgtgggaagtaggatggtatccagaaggggatgaagctgtttggttttggacaagaatttaaaatacttaaaggcaacttcatggaaatgtctgataaacatgatctgtggatc

SEQ ID NO: 16881 - DNA, 120 bp, synthetic construct; identical to SEQ ID NO: 5350
  source 1..120: mol_type = other DNA

SEQ ID NO: 16882 - DNA, 120 bp, synthetic construct
  source 1..120: mol_type = other DNA
agagaggaagctaagcacatatttctgggtatattttgcagaagacacaggatgcaaagtacaagtggaagagaaagtggggatggagccaaagttgagacaaaaaagggggcagaaata

SEQ ID NO: 16883 - DNA, 120 bp, synthetic construct
  source 1..120: mol_type = other DNA
aggcttaacattttcaggttagcaaggtgagatttaaaaggagaggaaaaaacatctccatgaactctcagtacttatttttattttagaattagaaccctgtgagaaagctgacaattg

SEQ ID NO: 16884 - DNA, 120 bp, synthetic construct
  source 1..120: mol_type = other DNA
atctgtccttgggcagttctagaagatgtcctaagccccaggtgacctgattccaattcattaaaaaggtgagccacatatattctttcaacagtaagtgtcccaatgctgatgatgaag

SEQ ID NO: 16885 - DNA, 120 bp, synthetic construct; identical to SEQ ID NO: 5351
  source 1..120: mol_type = other DNA

SEQ ID NO: 16886 - DNA, 120 bp, synthetic construct
  source 1..120: mol_type = other DNA
catgttatcaaaaattattttagaacagagaatcctcttcagtttttacatttgtccttgtacttgttcatcatggcgatattatgttttgttaatggttgctgcatagatagggcgcag

SEQ ID NO: 16887 - DNA, 120 bp, synthetic construct
  source 1..120: mol_type = other DNA
ctgggcgtggtggcgcgcgcctgtagtcccagctactcaggaggctgaggtgggaggatccctttagcccaggaggtcgaggctgcagtgagccgttatagcgtcactgcactccagcct

SEQ ID NO: 16888 - DNA, 120 bp, synthetic construct
  source 1..120: mol_type = other DNA
accagccatggcccaacatggtgaaatcccgtctttactaaaaatgcaaaaattagccgggtgtggtggcgcatgcctgtagtctcagccattcgtgaggttgaggcaagagaattgctt

SEQ ID NO: 16889 - DNA, 120 bp, synthetic construct; identical to SEQ ID NO: 5352
  source 1..120: mol_type = other DNA

SEQ ID NO: 16890 - DNA, 120 bp, synthetic construct
  source 1..120: mol_type = other DNA
tcaatgtcccttcctcatcgatgtccctgggttcctgagcaaagcctaaagtaagacactctaaaaattttgactgaatattcggcaataatttgagcttggtcttaaccccaaagaaaa

SEQ ID NO: 16891 - DNA, 120 bp, synthetic construct
  source 1..120: mol_type = other DNA
ttttgctcggatttcattgtgttagaataacatgtcattttcaaggaaccaaaatcatactgtgtaatggacagaccggtgttatagttctacttaagggttggacgtttcacatctttc

SEQ ID NO: 16892 - DNA, 120 bp, synthetic construct
  source 1..120: mol_type = other DNA
cttcaagtcaggaatggaagtcactaagctccatgtaaataaacagtatatgtgaactgaataacctactttgttccggccttacgccaaccctgcacttccaacagaaccatctttgaa

SEQ ID NO: 16893 - DNA, 120 bp, synthetic construct
  source 1..120: mol_type = other DNA
tgcagcatcagttcagaactgaaaatctccctatcccacttctcgaagccattaatcagagatttcaacagggttcaccgctgatgacccatctaactgctcgtcctctcacagtttctg

SEQ ID NO: 16894 - DNA, 120 bp, synthetic construct; identical to SEQ ID NO: 5353
  source 1..120: mol_type = other DNA

SEQ ID NO: 16895 - DNA, 120 bp, synthetic construct
  source 1..120: mol_type = other DNA
tgctccggtctggctgccaattaacaactaaaggtagaagtcttatttaacgagtatatacggtgtgcctgccctgtgacaactgctttataaaagaacaaagcagaaatagcacttggc

SEQ ID NO: 16896 - DNA, 120 bp, synthetic construct
  source 1..120: mol_type = other DNA
ggatggggacttctttaggaagcatccaccctcctggaggtcctgaagaaatgctatttagctgaaaaatgagtatttttcaggcagaaggaatagcatttgttaattcactgagaatct

SEQ ID NO: 16897 - DNA, 120 bp, synthetic construct
  source 1..120: mol_type = other DNA
agggataaagggagttaaatttctgggaacaagatctctcacagagattctctatggctgagactctgaacatggtttaaaattagtgttctccagattttcactaactaccaaaaaagg

SEQ ID NO: 16898 - DNA, 120 bp, synthetic construct; identical to SEQ ID NO: 5354
  source 1..120: mol_type = other DNA

SEQ ID NO: 16899 - DNA, 120 bp, synthetic construct
  source 1..120: mol_type = other DNA
aacatttaccgaatgcatacactgtagctgcactattccaactatgagaaatatattaatagtcttcttttacagatgtagaaactgacacctaaaagggtataacacattgcccaacac

SEQ ID NO: 16900 - DNA, 120 bp, synthetic construct
  source 1..120: mol_type = other DNA
atataacataaaatgtcactttaactttttttttttttttgagacagagttttgctttgtcgccaggctggagtgcagtggcgcgatctgggctatctcggctcattgcaacctctgcct

SEQ ID NO: 16901 - DNA, 120 bp, synthetic construct
  source 1..120: mol_type = other DNA
aggatggtctccatctcctgacctcgtgatccacccgcctcggcctcccaaagtgctgggattacaggcgtgagccaccgcacccagcccttgttttggcattttaaagagacagggtct

SEQ ID NO: 16902 - DNA, 120 bp, synthetic construct; identical to SEQ ID NO: 5355
  source 1..120: mol_type = other DNA

SEQ ID NO: 16903 - DNA, 120 bp, synthetic construct
  source 1..120: mol_type = other DNA
tccatctcacagcatataccagcatatatcccatattgtatgtatattcattttttaaaatttcttatattttgatgcctattctgcttacgcagttttatttttgttattttgcttatc

SEQ ID NO: 16904 - DNA, 120 bp, synthetic construct
  source 1..120: mol_type = other DNA
ttgagtctctgctttcaattcttttgggtatacacctagaattgctaagtcatatgctacacccatgtttagctttttaagggaaccaccaaaccggtttccacagtggctttatcattt

SEQ ID NO: 16905 - DNA, 120 bp, synthetic construct
  source 1..120: mol_type = other DNA
gttttgatttgcatttcccctagtgaataaagacagagtactttccaagtgcttattgcctatttacatattttgtttggagaggtgtctatttgagttctttgtgcatttaaactgagt

SEQ ID NO: 16906 - DNA, 120 bp, synthetic construct; identical to SEQ ID NO: 5356
  source 1..120: mol_type = other DNA

SEQ ID NO: 16907 - DNA, 120 bp, synthetic construct
  source 1..120: mol_type = other DNA
ttttttaaagacagtgtggctggagtttgttctttctgatgttcacccatgttctgagtttcttcccgctggtgggttcctggtctggctggcttacaaggagcgaaacatgcagacctt

SEQ ID NO: 16908 - DNA, 120 bp, synthetic construct
  source 1..120: mol_type = other DNA
ctcacacaggaaatacaaacctcaaaaagcaagcagcagtaaaatttattacaaagaacataaagaacaaggtttccacaacagagagatcgactccgagtaggttatcgtggctgctcc

SEQ ID NO: 16909 - DNA, 120 bp, synthetic construct
  source 1..120: mol_type = other DNA
gattggtgtgtttacagtccctgagctagacacagagtgctgattggtgcatttacaatcctttagctagacataaaggtccccactagagttgctagattcagagtgctgattggtgta

SEQ ID NO: 16910 - DNA, 120 bp, synthetic construct; identical to SEQ ID NO: 5357
  source 1..120: mol_type = other DNA

SEQ ID NO: 16911 - DNA, 120 bp, synthetic construct
  source 1..120: mol_type = other DNA
ccgcagcgcgggcggacgggcagtgctgggggacctggcgccccctccgcagctgctggcccagatgataagctcctcactacccgcgctcaagacaccaatccgcactagctcatggtt

SEQ ID NO: 16912 - DNA, 120 bp, synthetic construct
  source 1..120: mol_type = other DNA
gagaatctttatgtcttgtagctaagggtttgtgaatgcacctaatcagcactctgtatctagctcaaggtttgtaaacacaccaatcagcaccttgtgtctagttcagggtttatgaat

SEQ ID NO: 16913 - DNA, 120 bp, synthetic construct
  source 1..120: mol_type = other DNA
cactttgcgtctagctcagggtttgtaaatacaccaatcacactctgtatctagctaatctagtggggacttggagaacttctgcgtctcgctcagggattgtaaacgcaccaatcagta

SEQ ID NO: 16914 - DNA, 120 bp, synthetic construct; identical to SEQ ID NO: 5358
  source 1..120: mol_type = other DNA

SEQ ID NO: 16915 - DNA, 120 bp, synthetic construct
  source 1..120: mol_type = other DNA
acgaacccacctgaatggaatgaaactctgaacatatgcaaacatcagaatgaacaaattccccacacactgctcttcagaactgccacactcacggccagggtccatggcttcattctt

SEQ ID NO: 16916 - DNA, 120 bp, synthetic construct
  source 1..120: mol_type = other DNA
actacaacatatatgtatactataatgtttataatgcctgaaccccacccataaaaatgaacatgccataacctggtcattgtgagaaccataagtgtacccaaatacatcgtagtaggt

SEQ ID NO: 16917 - DNA, 120 bp, synthetic construct
  source 1..120: mol_type = other DNA
aacacctgtaatcccagcactttaggaggccgaggcgggtggatcacggggccaggagatcatgactatcctggctaacacggtgaaaccccatctctactaaaaataaaaaaattaact

SEQ ID NO: 16918 - DNA, 120 bp, synthetic construct; identical to SEQ ID NO: 5359
  source 1..120: mol_type = other DNA

SEQ ID NO: 16919 - DNA, 120 bp, synthetic construct
  source 1..120: mol_type = other DNA
aggagttcaagaccagcctggccaagatggtgaaaccccgtctctactaaaaatacaaaaaattagcctggcatggtggcacgcgcctgtaatcccagctactccagaggcggagaattg

SEQ ID NO: 16920 - DNA, 120 bp, synthetic construct
  source 1..120: mol_type = other DNA
agtttgtttccacagtaagtgaagacaggccatgtcacaaaaagacggggaacaacactggactgtagctcgtagacaaaggaaaccttgagaagtttaacactgtatcatagttttaga

SEQ ID NO: 16921 - DNA, 120 bp, synthetic construct
  source 1..120: mol_type = other DNA
agtctattactgtatgattctgaagctgtgggaggaagcaatgccctcctacatatcaactcatgaattacatatacatcttcaaaagatcagagatttccattttagccatctcgtcaa

SEQ ID NO: 16922 - DNA, 120 bp, synthetic construct; identical to SEQ ID NO: 5360
  source 1..120: mol_type = other DNA

SEQ ID NO: 16923 - DNA, 120 bp, synthetic construct
  source 1..120: mol_type = other DNA
tccctttctctcaatttgtaccaacatcactagatctgtgtgacagtctgggaataggactacacatagtggtccaggttttgaacagagacaagaaaacaatttatttcttttttaatt

SEQ ID NO: 16924 - DNA, 120 bp, synthetic construct
  source 1..120: mol_type = other DNA
ccacctcagcctcccaagtagccaggattacaggcctgcaccaccacgcctagctaatttattttttgtagagacaagggtctcactatgttgcccaggctggtctcgaactcttcgact

SEQ ID NO: 16925 - DNA, 120 bp, synthetic construct
  source 1..120: mol_type = other DNA
attggatatagtgagcatcttttcctgaaagagagagcagggaatcacaaatattacaaagctctgttttcacaaaggaagtctcaggagtgagtgaccatttcgcctaccctctgaata

SEQ ID NO: 16926 - DNA, 120 bp, synthetic construct
  source 1..120: mol_type = other DNA
gaaaacacatttatttctgctaaaacaagttctagccaacccatttcctgggcatgctcttgacaaatttactaaagttaagtgaggcaagaagctgccattcaaacatttcaaaattgt

SEQ ID NO: 16927 - DNA, 120 bp, synthetic construct; identical to SEQ ID NO: 5361
  source 1..120: mol_type = other DNA

SEQ ID NO: 16928 - DNA, 120 bp, synthetic construct
  source 1..120: mol_type = other DNA
ggcctccattgtgactaaagctttctccacattccttaaagtgataaggtttctctcagtgtgtactctatgatgcttaagaaagagtgggctctgattaaaagctttcccatgcataag

SEQ ID NO: 16929 - DNA, 120 bp, synthetic construct
  source 1..120: mol_type = other DNA
acgcttgtggatttccctccagtatgaagcctctgatgtttactaagatctgagctccaaatgaaagtcttgccacactgatcacattcatagtgtctgtgaaaatacagcttctataat

SEQ ID NO: 16930 - DNA, 120 bp, synthetic construct
  source 1..120: mol_type = other DNA
ttacagggtctctcttcagtgtggatcctttgctgttgaataagatttgatttcttagtgaagaactgtctacattcatcacttttacaacccctctttcccataagtattttgttcagt

SEQ ID NO: 16931 - DNA, 120 bp, synthetic construct; identical to SEQ ID NO: 5362
  source 1..120: mol_type = other DNA

SEQ ID NO: 16932 - DNA, 120 bp, synthetic construct
  source 1..120: mol_type = other DNA
aaaaaaaaaaaaaaaaaaaaaaagctgctcatggtggtgtgtacctgtagtcccagctactcaggaggctgagatgggaggattgcttgaaccaagaggtcaaggctgcagtgattgtgc

SEQ ID NO: 16933 - DNA, 120 bp, synthetic construct
  source 1..120: mol_type = other DNA
cagtaagttctatttccctttccttcaacagatttgcaaatttagctgtaaatgaaggatttgaacacaaacaaattcacactaaactctagtttcagtgtttcctatcttgttggctat

SEQ ID NO: 16934 - DNA, 120 bp, synthetic construct
  source 1..120: mol_type = other DNA
gttatgaaagcacacaaaactgtgtctgacacactgtaagcattattaagtgtgagttgctattgttaccattgttgtcacatctcagtatcccaacatgttgcttatcttaaattgaaa

SEQ ID NO: 16935 - DNA, 120 bp, synthetic construct; identical to SEQ ID NO: 5363
  source 1..120: mol_type = other DNA

SEQ ID NO: 16936 - DNA, 120 bp, synthetic construct
  source 1..120: mol_type = other DNA
cagaaaaagggaaggcagtaaaagctttctagatggaaagtatatacatacaaagttattaaggcacttttaaaatggtactttcagacagttgagaacagtttggtctagctggaacac

SEQ ID NO: 16937 - DNA, 120 bp, synthetic construct
  source 1..120: mol_type = other DNA
cacggtggctcacgcctgtaatcccaccactttgggaggctgacgctggtggatcacgaggtcaggagatctagaccatcctggctaacacagtgaaaccctgtctctactaaaaataca

SEQ ID NO: 16938 - DNA, 120 bp, synthetic construct
  source 1..120: mol_type = other DNA
ctccagcctggtgacagagcgagaatccgtctcaaaaaaaaaaaagaaggtgtgtgtaatattagctttcagttttatgcaagtcactatagtgacagtgtgaaagatggtcttcaagga

SEQ ID NO: 16939 - DNA, 120 bp, synthetic construct; identical to SEQ ID NO: 5364
  source 1..120: mol_type = other DNA

SEQ ID NO: 16940 - DNA, 120 bp, synthetic construct
  source 1..120: mol_type = other DNA
tacacctcccgggtttaagtgattctcccaccttcgccccctcgagtagctgggactacaggcacgcaccgccacacccagctaatttttgtattttctggtagagacagggtttcacca

SEQ ID NO: 16941 - DNA, 120 bp, synthetic construct
  source 1..120: mol_type = other DNA
aaccagaatagaggacataccactacccacttattgaacatattctaaataagttttcttatcctaaaatattttatattccaatattggaatcgcctgagtccagggtggtcaaggctg

SEQ ID NO: 16942 - DNA, 120 bp, synthetic construct
  source 1..120: mol_type = other DNA
ggaaggaaggaaaagaaaaaaaattatagaaaatagattgtcggttgcctgcaggttgggggaggctgagagatggggagtgactgctaaggagtatttttttttaccttgaggtgataa

SEQ ID NO: 16943 - DNA, 120 bp, synthetic construct
  source 1..120: mol_type = other DNA
caataaaatcctttatttggtcaatgtacggtattctgtcagttgagacaaaagttaacattcgaatttagatttagattttatatcttcagcttcttctatctagaaaaggcattcact

SEQ ID NO: 16944 - DNA, 120 bp, synthetic construct; identical to SEQ ID NO: 5365
  source 1..120: mol_type = other DNA

SEQ ID NO: 16945 - DNA, 120 bp, synthetic construct
  source 1..120: mol_type = other DNA
tccagtattggaatataaaaaaatttaggataagaaaacttatttagaatacattcgataagtgggtagtggtatgtcccctattctgcttaaaacccaggatcaccactttgggaggct

SEQ ID NO: 16946 - DNA, 120 bp, synthetic construct
  source 1..120: mol_type = other DNA
agctactcgggagtctgaggcaggagaatcctttgaacctgcgaggcagtggttgcagtgagccaagacagcgccattgaactttagcctgggtgatacagcaagactctgtctcaagaa

SEQ ID NO: 16947 - DNA, 120 bp, synthetic construct
  source 1..120: mol_type = other DNA
gaaggaagaaaggaaggaaagaaggaaggaaggaaggaaagaaacgcaatttaattcagttcaactgcagttgagcatttgtgggggtgggggcggggttgggatgaggggttggagaca

SEQ ID NO: 16948 - DNA, 120 bp, synthetic construct; identical to SEQ ID NO: 5366
  source 1..120: mol_type = other DNA

SEQ ID NO: 16949 - DNA, 120 bp, synthetic construct
  source 1..120: mol_type = other DNA
aacttcatcccgccttacagataaatgccattttactttgaaaagcagtaggtgggggtagggggcgagaaatagaaaattccatcagtttggtgaaagcttttagaggataacgtactc

SEQ ID NO: 16950 - DNA, 120 bp, synthetic construct
  source 1..120: mol_type = other DNA
aaatctcctattatataatctgcagtttactttgttttcttgttggagaaagtggtttttggagtccaagtatgcagagggcacctaggattccagagttaatgggactgaagagaaaaa

SEQ ID NO: 16951 - DNA, 120 bp, synthetic construct
  source 1..120: mol_type = other DNA
gccaaatgctagaggggaggtttggtgggaggaaaagctgcttttaatccgaaagccagcaaactgagaagatggaacactagtgttctaaagtaccaccttaaaatttaaattttacca

SEQ ID NO: 16952 - DNA, 120 bp, synthetic construct
  source 1..120: mol_type = other DNA
gttcaagtgattttcctgcctcagcctcctgagtagctgggattacaggcatctgccaccacactcagctaatttttgtgtttttagtagagacagggtttcaccatgttggccaggctg

SEQ ID NO: 16953 - DNA, 120 bp, synthetic construct; identical to SEQ ID NO: 5367
  source 1..120: mol_type = other DNA

SEQ ID NO: 16954 - DNA, 120 bp, synthetic construct
  source 1..120: mol_type = other DNA
ctcaatctcctgacctcgtgatccgcccgcctcggcctcccaaagtgctgggattacaggcctgagccactgcacccggccagcaatatttcttctgtaaaagaaaagaataagtgttcc

SEQ ID NO: 16955 - DNA, 120 bp, synthetic construct
  source 1..120: mol_type = other DNA
aaatacaataaatttttcacggtgattacatttgcgagaggaacgtacagctttcatatttcattcaatggttaaaatggtactcaattttgactgacaaaacggtaatgatcagatgcc

SEQ ID NO: 16956 - DNA, 120 bp, synthetic construct
  source 1..120: mol_type = other DNA
ggacctgtgtaagatttttaaagagactgcactgtcacgagccacagcgttgtgagattggtaggaaagtgctccaggaaatatctaggggagggcttggatctgagacacagagtgtga

SEQ ID NO: 16957 - DNA, 120 bp, synthetic construct; identical to SEQ ID NO: 5368
  source 1..120: mol_type = other DNA

SEQ ID NO: 16958 - DNA, 120 bp, synthetic construct
  source 1..120: mol_type = other DNA
ggttcacgccattctcctgcctcattcccgagtagctgggactacaggcgcccgccaccacgcccagctattttttttgtatttttagtagagacgaggtttcaccgtgttagccagaat

SEQ ID NO: 16959 - DNA, 120 bp, synthetic construct
  source 1..120: mol_type = other DNA
tgtttatgcctactgctgagatcaggatatctctaaagtaaggagaggaaaaagaaaagtatgtgtcagaagtgggattcgaacccacgcctccattggagaccagaatccccaccgcgg

SEQ ID NO: 16960 - DNA, 120 bp, synthetic construct
  source 1..120: mol_type = other DNA
acgcagaaacgcgatgacgtcagggttgcttggtaacagaagggcagaaagccacttgtggattgaaaaagcaaaagggttcgcaggactagaaaatgtttctgcataaaactggatcaa

SEQ ID NO: 16961 - DNA, 120 bp, synthetic construct; identical to SEQ ID NO: 5369
  source 1..120: mol_type = other DNA

SEQ ID NO: 16962 - DNA, 120 bp, synthetic construct
  source 1..120: mol_type = other DNA
ttgtcttgggctctaaaagtggtagccgggaacggctgggaaggtctccacagggaccaccacatgggcaaggctggtgtccgcgccgagggatcggcgatcccaggtccggggaaactc

SEQ ID NO: 16963 - DNA, 120 bp, synthetic construct
  source 1..120: mol_type = other DNA
acatcgcctgatccacttttctgtttctcagccttcgccaagcaatctgagctccaggccgggaagccccaaggtcacaaattttaatggagccctgaaactaaacagaaatcatccctc

SEQ ID NO: 16964 - DNA, 120 bp, synthetic construct
  source 1..120: mol_type = other DNA
ctggcaaacacggtagaggttcaataaatacattttaactcaaccgtcttaactcttgtatttggggctgtgaggttcagatagaggaaatataaagttggatattttaattagattttg

SEQ ID NO: 16965 - DNA, 120 bp, synthetic construct; identical to SEQ ID NO: 5370
  source 1..120: mol_type = other DNA

SEQ ID NO: 16966 - DNA, 120 bp, synthetic construct
  source 1..120: mol_type = other DNA
aaaaattaaaatcatccataatctcactagtcagaggtaactattaacatttttatatatttagtctttcatatggtatacattttccaaaaatggtcatgtgtagtaaataatttgcta

SEQ ID NO: 16967 - DNA, 120 bp, synthetic construct
  source 1..120: mol_type = other DNA
taattttttattttcatcagcaatgctgtaaaaactatccttacataaatattttcaaacatccacgattatttccttaaatttctaaaagtgaaaccattacatcaaattttttttttt

SEQ ID NO: 16968 - DNA, 120 bp, synthetic construct
  source 1..120: mol_type = other DNA
agtagctgggactataggcgcccgtcacgacgcccggctaatttttgtatttttagtagagacggggtttcactatgttggtcaggctggtctcgaactcctgacctcttgatccgcccg

SEQ ID NO: 16969 - DNA, 120 bp, synthetic construct; identical to SEQ ID NO: 5371
  source 1..120: mol_type = other DNA

SEQ ID NO: 16970 - DNA, 120 bp, synthetic construct
  source 1..120: mol_type = other DNA
ctcctggcacattttaataggtaacaaatgatatagcgcccccccttttttttctgatttgattattagtgaggtccaatattcatgtttaaaggatttttatactccttcctcagtaaa

SEQ ID NO: 16971 - DNA, 120 bp, synthetic construct
  source 1..120: mol_type = other DNA
atctcttattaacaagaatcccattatgtcccttaaacatttagttacttccatcttacagaaactagaagctatacaattaacaatgttcccatgtcaatttttaaaacccaactgtgg

SEQ ID NO: 16972 - DNA, 120 bp, synthetic construct
  source 1..120: mol_type = other DNA
agtggcgcaatctcggcttgcttcaagctctgcctcccaggttcaagcaattttcctgcctcagcctcccaagtagctgggactacaggctcgtgccaccatgcccagttaatttttgta

SEQ ID NO: 16973 - DNA, 120 bp, synthetic construct; identical to SEQ ID NO: 5372
  source 1..120: mol_type = other DNA

SEQ ID NO: 16974 - DNA, 120 bp, synthetic construct
  source 1..120: mol_type = other DNA
tttttagtagagatggggtttcaccatgttggccaggctggtcttgaactcctgacctcaggtgatccgcccgcctcagccttccaaagtgctggtgtgagccaccgagcccagacatga

SEQ ID NO: 16975 - DNA, 120 bp, synthetic construct
  source 1..120: mol_type = other DNA
tctacatttttatgaaaacatctgtaagaggaattttaaaaggcctgacaaattatttaaagagggaagcagagggactaaaaaggaaagaagctaacaatggcggtctatgaaaatgaa

SEQ ID NO: 16976 - DNA, 120 bp, synthetic construct
  source 1..120: mol_type = other DNA
agattggggtggaaattgagatgatgctgtattcaaatgagactgaccataaattggtagttgaagttgggagatgatataggagggttcgctgtgtattttcttcatttttgtatatgg

SEQ ID NO: 16977 - DNA, 120 bp, synthetic construct; identical to SEQ ID NO: 5373
  source 1..120: mol_type = other DNA

SEQ ID NO: 16978 - DNA, 120 bp, synthetic construct
  source 1..120: mol_type = other DNA
tccaacgggaaaaaggaaatgtaatggggcaatactgtcaaatggaagtactatttggcctggcatggtggcccatgcctgtaatcccaacactttgggaggttgaggaggaagaatccc

SEQ ID NO: 16979 - DNA, 120 bp, synthetic construct
  source 1..120: mol_type = other DNA
agacttcatataggaggaatttctggtttcaacaaagtgcaggatttagtaatgtgcttatatcattaagtcaaaatttagtgcaggacggagctagtgggcaagtctcttagtctcaag

SEQ ID NO: 16980 - DNA, 120 bp, synthetic construct
  source 1..120: mol_type = other DNA
ctacattttttcacgttattttccccctctcctaattaacttttcaaaggatagaagccatgctctcttgtattctcttcaggagcaagttcagctggggcacccaacactggctgaatt

SEQ ID NO: 16981 - DNA, 120 bp, synthetic construct; identical to SEQ ID NO: 5374
  source 1..120: mol_type = other DNA

SEQ ID NO: 16982 - DNA, 120 bp, synthetic construct
  source 1..120: mol_type = other DNA
ttgcatgttggcctttatcagaaaaaacaagagcacctgaagacacacaggcatgtgcacatacgtgcatgcacaaacacacacttcctggaacagcaaaagaattaaggaagaagttat

SEQ ID NO: 16983 - DNA, 120 bp, synthetic construct
  source 1..120: mol_type = other DNA
atgtctttagtgactcaattcctgactcggtgaactcaaaagttgcttacctttctgcagatgagtaaacttagaatcacaagttcatttaatcccattcaaaatggcaggcttttaaaa

SEQ ID NO: 16984 - DNA, 120 bp, synthetic construct
  source 1..120: mol_type = other DNA
gctctgctgcttcctagctgtgtaccttggataagtcatttaccctctctgctgcagtttatctgtaaagtaagacaacagtacacacttgataaaattatcatgagcattaaggaagct

SEQ ID NO: 16985 - DNA, 120 bp, synthetic construct; identical to SEQ ID NO: 5375
  source 1..120: mol_type = other DNA

SEQ ID NO: 16986 - DNA, 120 bp, synthetic construct
  source 1..120: mol_type = other DNA
ccagcactttaggaggccaaggcaggtggatcacaagggtcaggagttcaagaccaccctggccaagatggtgaaaccccgtctctactaaaaataaaaaattagccgggcgcggtggta

SEQ ID NO: 16987 - DNA, 120 bp, synthetic construct
  source 1..120: mol_type = other DNA
actccacctcaaaaaaaaaagaactgtaggctatgaatgtccaacactactttcttagcaccactagaaagtagtgacatggcactgagaaagtggttttattttccagtttgaagtaaa

SEQ ID NO: 16988 - DNA, 120 bp, synthetic construct
  source 1..120: mol_type = other DNA
tctgaacccaatcctaccaacacccagaaagcaacaacaatgtaaacatccatattcagtttatttttaaacagaggggcacgtacccacagagaagcaggactgagaaccatcatgggg

SEQ ID NO: 16989 - DNA, 120 bp, synthetic construct
  source 1..120: mol_type = other DNA
ttgataggatgcacttaagcatggtcaattcccccttcccccaaaggaaatggagaaaaggagccaagaagtcaatgaatccctggaatattgtcccagaatccttccagggatggtata

SEQ ID NO: 16990 - DNA, 120 bp, synthetic construct; identical to SEQ ID NO: 5376
  source 1..120: mol_type = other DNA

SEQ ID NO: 16991 - DNA, 120 bp, synthetic construct
  source 1..120: mol_type = other DNA
ggaaaactgggataaagggagccatgctgacagggccttattccagtctaggttgttagaaaggagccctagcccagaaatgacagcaaatagccataatcattatgtggggctgaacca

SEQ ID NO: 16992 - DNA, 120 bp, synthetic construct
  source 1..120: mol_type = other DNA
ggtggacatctggtttttatttctaggatatcttgatacatctcattacatttcacaatctgcatgggaaggaaaaggatggtagagaacatggacatcctgtctcccactgcaagggcg

SEQ ID NO: 16993 - DNA, 120 bp, synthetic construct
  source 1..120: mol_type = other DNA
gtctccatggaatgaccatgattcccaacatggccagaaaacccatctatcccactcatggggcagatgatcagaggagctgcacttttccctcccgagtaactcagactgaagtagggc

SEQ ID NO: 16994 - DNA, 120 bp, synthetic construct; identical to SEQ ID NO: 5377
  source 1..120: mol_type = other DNA

SEQ ID NO: 16995 - DNA, 120 bp, synthetic construct
  source 1..120: mol_type = other DNA
tggagagcccaagacacagggaaacagattgaacctctcggggttgtcaggcaggtcctgttggaggtaactgtaccgcacttgccgcagattatcagagaggatcaggctggggtaggc

SEQ ID NO: 16996 - DNA, 120 bp, synthetic construct
  source 1..120: mol_type = other DNA
acacccagcgcctttctactacctccccaataataagaggttcccactggaggttgcacgtattttatttagaatatattctaaacttcacatttcaaaaattactgcttggattagctg

SEQ ID NO: 16997 - DNA, 120 bp, synthetic construct
  source 1..120: mol_type = other DNA
tggagcgcagtggtgtggtcatagttcattgtaaccccaaactcctgggctcaggtgattctcccgcctaagacacccaagtagctgggaccataggtgtgcactaccaccctaatttta

SEQ ID NO: 16998 - DNA, 120 bp, synthetic construct; identical to SEQ ID NO: 5378
  source 1..120: mol_type = other DNA

SEQ ID NO: 16999 - DNA, 120 bp, synthetic construct
  source 1..120: mol_type = other DNA
aaaataatgaaaaaggttttggctttcagagatttgggattttagaactgtgggtaagggactgggaacctgtatcagtatgcttactttttaaatcactcttttaaaattattttttac

SEQ ID NO: 17000 - DNA, 120 bp, synthetic construct
  source 1..120: mol_type = other DNA
gagccactacacccagcccaaatcactcttttatccattctataagatctttactctgcacatcgaagctctattcatcttcttctaatgtccagtccaaaacacacatcctccaagttt

SEQ ID NO: 17001 - DNA, 120 bp, synthetic construct
  source 1..120: mol_type = other DNA
tctaaaactgtgtatgacccatgtcatctcctctggcatttagtattacagcatcttgctatcatcaagtgttttcctgcttcaaaaacactgataatgggctggatatgtggctcatgc

SEQ ID NO: 17002 - DNA, 120 bp, synthetic construct
  source 1..120: mol_type = other DNA
taaaagtaaaaaaattaggcaagcatggtggtgcatgcctgtaattccagctactcaggaggctgaggcaggaggatcacttgagcccaggagtatgaggctgcagcaagctatcaccat

SEQ ID NO: 17003 - DNA, 120 bp, synthetic construct; identical to SEQ ID NO: 5379
  source 1..120: mol_type = other DNA

SEQ ID NO: 17004 - DNA, 120 bp, synthetic construct
  source 1..120: mol_type = other DNA
tctaaaataccctgcacaatgttaggcagtgtaggatacaagcaaagtactcatttaatacttgttgaaaataaatatggatcagagccactgcacaccaaggactgcagatccactgta

SEQ ID NO: 17005 - DNA, 120 bp, synthetic construct
  source 1..120: mol_type = other DNA
gaatacttctgcaatgttaaatttacccaggctctatagtagggtgaaagcggttgtgagggggaagggaagtttcaaactttgctctgaggcacagtgatgggatgacacaagactcct

SEQ ID NO: 17006 - DNA, 120 bp, synthetic construct
  source 1..120: mol_type = other DNA
ctacttttggggaactgcggtttccaccctataatccttctttaacacctgagattgattttaccctatggcttcagctctgagacatttcaggaggcaaagatactgttaacacataga

SEQ ID NO: 17007 - DNA, 120 bp, synthetic construct; identical to SEQ ID NO: 5380
  source 1..120: mol_type = other DNA

SEQ ID NO: 17008 - DNA, 120 bp, synthetic construct
  source 1..120: mol_type = other DNA
aattttttcatatgatgtatggctctatcatccaaccaaaagctttaaggggagagggattgggaatcttaagtacagggataaccacatgcctgagactggtagaatatgggataaaac

SEQ ID NO: 17009 - DNA, 120 bp, synthetic construct
  source 1..120: mol_type = other DNA
cataacttttgagttgcataagtcatctgtgtacaagagctgaatggctcaagtgacactcactgacactctggggtaaacatgaccattcatttataaggcactttatagttgaaacag

SEQ ID NO: 17010 - DNA, 120 bp, synthetic construct
  source 1..120: mol_type = other DNA
aaccacttctggtattatccactgtattgagtggagtttctccccatttgtcttgcttgtagaggacatgtatctgctagctctatgttgctagatgccccaaaaagtatatatctgaat

SEQ ID NO: 17011 - DNA, 120 bp, synthetic construct
  source 1..120: mol_type = other DNA
accagactgcccaggaattttagtattcctgggtggaataatatatggccaactctttactgaatgtggctcgtgagcagaaaaattttaatttggaaaagcttctccaaatgcctagaa

SEQ ID NO: 17012 - DNA, 120 bp, synthetic construct; identical to SEQ ID NO: 5381
  source 1..120: mol_type = other DNA

SEQ ID NO: 17013 - DNA, 120 bp, synthetic construct
  source 1..120: mol_type = other DNA
gctcaagtgaaacgtatccaaggtagtttttgttcattctttccgaagtaaacaatcaaattaattctggattgattaatttttggattgcttatttttctcctccatcaatgcagactg

SEQ ID NO: 17014 - DNA, 120 bp, synthetic construct
  source 1..120: mol_type = other DNA
cccttatcccacgtttcccactttcagtgcagatgttcttttttccaagcaactttacatcaaaagcccagtaggtagataaatttaccttggattttctccatatctgactgcattttt

SEQ ID NO: 17015 - DNA, 120 bp, synthetic construct
  source 1..120: mol_type = other DNA
ctcctcacattacctgtgaactgctttagactctccgtcaagaatagacatttttgggcaaaaatgtggattttctcttgcaaatctggaggtgtgatccaaggttcaggaatcctgatt

SEQ ID NO: 17016 - DNA, 120 bp, synthetic construct
  source 1..120: mol_type = other DNA
caggttcaagcgattctcctgcctcagcctcctgagtagctgggattacaggcatgcgccaccatacccagctaattttgtgtttttagtagagatggggtttctccatactggtcaggc

SEQ ID NO: 17017 - DNA, 120 bp, synthetic construct; identical to SEQ ID NO: 5382
  source 1..120: mol_type = other DNA

SEQ ID NO: 17018 - DNA, 120 bp, synthetic construct
  source 1..120: mol_type = other DNA
ccatgacagtccttgatatttatggtgggcaattaacccgaattctcaggttcccaaatatggaaagaatgacatgttcagatagaaaggcactgtgggggacattacccaattccctag

SEQ ID NO: 17019 - DNA, 120 bp, synthetic construct
  source 1..120: mol_type = other DNA
taagttctggcctatgagaagtaagacgtatctcatggtgttttgagaaatctacttaaaaatgtaacatgacaggaaacagtggctcatgcctgcaatcccaacacttttggaggccaa

SEQ ID NO: 17020 - DNA, 120 bp, synthetic construct
  source 1..120: mol_type = other DNA
aatgtgatgcgacttatctccttcttcttggttggcattctaccagctattgtggactatatgaggaccataccttagggatggtagaacagtgaatgggaagaaacctgagtctctgag

SEQ ID NO: 17021 - DNA, 120 bp, synthetic construct; identical to SEQ ID NO: 5383
  source 1..120: mol_type = other DNA

SEQ ID NO: 17022 - DNA, 120 bp, synthetic construct
  source 1..120: mol_type = other DNA
ttttattatgtttaagccttaagccaataaaattttgggtttcctatcttatatagccaaattcaatccttaatgtcacaaactgctagggtctgaggcagctaactctgtatgttaggt

SEQ ID NO: 17023 - DNA, 120 bp, synthetic construct
  source 1..120: mol_type = other DNA
catcaacatgattctatcaacacaggcctcccagccaaactgccccatctataaggacctccccaatctccttaaatgctcccacatagtcaagctgcattttgctttagaaggttttca

SEQ ID NO: 17024 - DNA, 120 bp, synthetic construct
  source 1..120: mol_type = other DNA
tcctgcaaaacaactttgccctggcttactgccccctccaagctctccctctttgatcgtgttccagctgccagggagttcttcctcacttttttttttttgatggaacatagagaaata

SEQ ID NO: 17025 - DNA, 120 bp, synthetic construct; identical to SEQ ID NO: 5384
  source 1..120: mol_type = other DNA

SEQ ID NO: 17026 - DNA, 120 bp, synthetic construct
  source 1..120: mol_type = other DNA
actgagtagagctgtggttcatctaattctttgtatactagtgactctcttcagggatatgtgtcaatttgataagatgtccatcctcaggctcagggctcctttcaggatttacaaatg

SEQ ID NO: 17027 - DNA, 120 bp, synthetic construct
  source 1..120: mol_type = other DNA
aaaacttcggttttctttcacagatgtttgttgaaaaaccaactacagactggctctcatgggagaaattagggagaaaaggatcactggaacataactcagtgttgaggagctaaaagg

SEQ ID NO: 17028 - DNA, 120 bp, synthetic construct
  source 1..120: mol_type = other DNA
tcaaggacctcaggatttcaaatttactaacttaagcgtcctatgattggacctcaagcttgcctacctgtccagcttgctttctttttattatgaaataatttcaaatacacggaaaag

SEQ ID NO: 17029 - DNA, 120 bp, synthetic construct
  source 1..120: mol_type = other DNA
cccgggttcgagcaattctcctgcctcagcctcctgagtagctgggactacgggtgtctgccatcacgcccagctaatttttgtgtttttagcacagacagcattttgccatgttggcca

SEQ ID NO: 17030 - DNA, 120 bp, synthetic construct; identical to SEQ ID NO: 5385
  source 1..120: mol_type = other DNA

SEQ ID NO: 17031 - DNA, 120 bp, synthetic construct
  source 1..120: mol_type = other DNA
ctttttttaacttggatagtattccatagtgtatatgtgcataattaactaaaacaatcttgtaggtttctaagtcagactatttccagtattttgcaattataaaaatgttgcagcagg

SEQ ID NO: 17032 - DNA, 120 bp, synthetic construct
  source 1..120: mol_type = other DNA
attgatacgtaacagacatatatattttgggggtgcatgcgataatttaacatgttcataatttgtaaagaaatcagtgtattgggatatccatcacatcgttaaatatttgccttttct

SEQ ID NO: 17033 - DNA, 120 bp, synthetic construct
  source 1..120: mol_type = other DNA
gaggtcgggagtttgggaccagactggccaacatggagaaaccccgtctctactaaaaatacaaaattagccgggcatggtggcgtatgcctgtaatcccagctactcgggaggctgagg

SEQ ID NO: 17034 - DNA, 120 bp, synthetic construct; identical to SEQ ID NO: 5386
  source 1..120: mol_type = other DNA

SEQ ID NO: 17035 - DNA, 120 bp, synthetic construct
  source 1..120: mol_type = other DNA
agaaattctcctccaaaagggtcatgattttgcattcctaccagcccactggcatatgagtgtctctccgacacttcgtcaaaagtgtattaagttgaaaatttttgctattgtaacgag

SEQ ID NO: 17036 - DNA, 120 bp, synthetic construct
  source 1..120: mol_type = other DNA
cttattataagtacagctgagcattttttcacatgttcacaaagcaatttatgtcttttgcagcttgtctatttgtgccttcaacccatttttctctagaattttggtcttttctctcgc

SEQ ID NO: 17037 - DNA, 120 bp, synthetic construct
  source 1..120: mol_type = other DNA
ctaataccaacagctttaattatatgggctttaaaatatggtgtagtatctagtagggccagttctccctcagagctcttctttcacagtgtagcctacctatgtttttttttttttttt

SEQ ID NO: 17038 - DNA, 120 bp, synthetic construct; identical to SEQ ID NO: 5387
  source 1..120: mol_type = other DNA

SEQ ID NO: 17039 - DNA, 120 bp, synthetic construct
  source 1..120: mol_type = other DNA
actgggattacaggtgtgagtcactgcacccggcctatcccataaaaataagcacataataatatgtgcttattttatatgtgcatattattatgtgcttatttttctatctgaagttga

SEQ ID NO: 17040 - DNA, 120 bp, synthetic construct
  source 1..120: mol_type = other DNA
ctgggtgatggttacactgaaatccgagacttcactacataatatatccgagtaacagaaaaaaaaaagaaactgcatttatgaatgtgaaggacaacttgctttccctgtcttatcaaa

SEQ ID NO: 17041 - DNA, 120 bp, synthetic construct
  source 1..120: mol_type = other DNA
ttttatcacttgttttttttttgcaaatggaaacagcatgttctcttctaatatgtcttctagtggctgctatctggcatatgaaggctgctgatttctgtatgttaacttctttcccaa

SEQ ID NO: 17042 - DNA, 120 bp, synthetic construct; identical to SEQ ID NO: 5388
  source 1..120: mol_type = other DNA

SEQ ID NO: 17043 - DNA, 120 bp, synthetic construct
  source 1..120: mol_type = other DNA
gcactttgggaggccaaggtaggcggatcacctgaggtcaggagttgaagaccagcctggccaacatggtgaaaccccatctctaccaaaaatacaaaaattagctaggtgtggtggtgt

SEQ ID NO: 17044 - DNA, 120 bp, synthetic construct
  source 1..120: mol_type = other DNA
gccactgcactccagcctgggcaacagagtgagactttgtctaaaaaaaatttaaaaaaaggttttaaagccttaattatggtgcttgcttcagcagcagatatcctcaaatgggaacca

SEQ ID NO: 17045 - DNA, 120 bp, synthetic construct
  source 1..120: mol_type = other DNA
cagcagcactattgacaatagccaaaaggtgcaaacaaccaaaatgcccatcgactgatgaataaacaaaacatattatatatccatacaatggaatgttattcagccataaagagaaat

SEQ ID NO: 17046 - DNA, 120 bp, synthetic construct
  source 1..120: mol_type = other DNA
tctgcctcccaggttcaagtgattgtcctgcctcagcctcctgagtagctgggattacaggcatgcgccaccacgcctggctaatttttgtatttttagtagggacggggtttcaccatg

SEQ ID NO: 17047 - DNA, 120 bp, synthetic construct; identical to SEQ ID NO: 5389
  source 1..120: mol_type = other DNA

SEQ ID NO: 17048 - DNA, 120 bp, synthetic construct
  source 1..120: mol_type = other DNA
aggcggaggttgcggtgagcggagatcgtgccgttacactccagcctgggcaacaagagtgaaactctgcctcaaaaaaaaaaaaaagtatgctaagtgaagaaaaaggctacgtactgt

SEQ ID NO: 17049 - DNA, 120 bp, synthetic construct
  source 1..120: mol_type = other DNA
ttgcttaatagtgtgaggtttccttttgggtggtaaaagtgttttagatccagacagtggttgataatttacaacactgtggatttactaaatgctactttgtgccagagttttacactt

SEQ ID NO: 17050 - DNA, 120 bp, synthetic construct
  source 1..120: mol_type = other DNA
ttgcttgagcccaggagttcaagaccagccgaggcaacatggcaaaactccatctctacaaaaattacacaaattagccaagcatggtggtttacgcctgtagtcccagctacttgggag

SEQ ID NO: 17051 - DNA, 120 bp, synthetic construct; identical to SEQ ID NO: 5390
  source 1..120: mol_type = other DNA

SEQ ID NO: 17052 - DNA, 120 bp, synthetic construct
  source 1..120: mol_type = other DNA
aaactccgtctctataaaaaatacaaaaattagctgggcgtggtggcacacgcctgtaatcccagctacttgggaggctgaggcaggagaattgcttgaacttgagagggggatgttgca

SEQ ID NO: 17053 - DNA, 120 bp, synthetic construct
  source 1..120: mol_type = other DNA
cactgaccaaatactcctactagttctcgcaaaccaactgtctttcccatactctgaaacaatcatttcttcccatacaacagaagactctctgacactaattcctggcatatgtacttt

SEQ ID NO: 17054 - DNA, 120 bp, synthetic construct
  source 1..120: mol_type = other DNA
gcaatggcgcaatctcggctcactgcaaccatcgtctcactggttcaagcgattctcctgcctcagcctcctgagtagctgggattacaagcatgtgccaccacacccggctaattttgt

SEQ ID NO: 17055 - DNA, 120 bp, synthetic construct; identical to SEQ ID NO: 5391
  source 1..120: mol_type = other DNA

SEQ ID NO: 17056 - DNA, 120 bp, synthetic construct
  source 1..120: mol_type = other DNA
actcaactccccctaatgtggctcctgccccaattattccattgtgatagttctacctaagatcaccaatgatggtcatgttattgaatcaaatgggtatcagctttgatattatttgac

SEQ ID NO: 17057 - DNA, 120 bp, synthetic construct
  source 1..120: mol_type = other DNA
tgacgctgtggctcacacttgtaatcccaacactttgggaggccgaggagggcagatcacgaggtcaggagtttgagaccagcctgaccaatatggtgaaaccccgtctctactaaaaat

SEQ ID NO: 17058 - DNA, 120 bp, synthetic construct
  source 1..120: mol_type = other DNA
cactccagcctgggcaacagagcaagactcaatctcaaaataaataaataatattaaattaaaattaaaatgtaaaaaccatacttattgcccaggacatacaaaaacaggggatggacc

SEQ ID NO: 17059 - DNA, 120 bp, synthetic construct; identical to SEQ ID NO: 5392
  source 1..120: mol_type = other DNA

SEQ ID NO: 17060 - DNA, 120 bp, synthetic construct
  source 1..120: mol_type = other DNA
catttttaatggcttttatcaaatacctataagaactatctgatcgccacactaaaatataattcaggaaagcttatttggcacttaatcccagtgcctagaatagtgcctgacacaaag

SEQ ID NO: 17061 - DNA, 120 bp, synthetic construct
  source 1..120: mol_type = other DNA
gactgctcaggtaacctaaccactcctgctcaagtgctcattgttttgtggctatagtaatacattaaaactacaggatactggagtgaggagagtctttgaatgacatgtggtctaagc

SEQ ID NO: 17062 - DNA, 120 bp, synthetic construct
  source 1..120: mol_type = other DNA
atgagacaacgcaattgactaattcaagttgtgtgaaccagaacttctagtttacacagtttccttccaaggtgcacaatatagagtttggcaagctcttgctattcctgcagagttaaa

SEQ ID NO: 17063 - DNA, 120 bp, synthetic construct; identical to SEQ ID NO: 5393
  source 1..120: mol_type = other DNA

SEQ ID NO: 17064 - DNA, 120 bp, synthetic construct
  source 1..120: mol_type = other DNA
cggctcatttctagggccttcatagttctcctgtgaccatgtagcccaagacctcattatggattaaaacaagcacagtgctaactcattatttccagtctttactgactggatatataa

SEQ ID NO: 17065 - DNA, 120 bp, synthetic construct
  source 1..120: mol_type = other DNA
gtgacagcctgcaatgaaagaaactggtaccatcttcacagaagcaatttcacacaatgttcatgtgatgaacaagaattcaccacataggcaatgagcgggaagcctttccaggcagaa

SEQ ID NO: 17066 - DNA, 120 bp, synthetic construct
  source 1..120: mol_type = other DNA
tgggggtaaggactctatcccaactgggaagcatggaagattgtcacacaggaaagtgacagggtcagatatgtgccctatggaggatggaacaaccaataacagcttccttgcccaatt

SEQ ID NO: 17067 - DNA, 120 bp, synthetic construct; identical to SEQ ID NO: 5394
  source 1..120: mol_type = other DNA

SEQ ID NO: 17068 - DNA, 120 bp, synthetic construct
  source 1..120: mol_type = other DNA
gagaaacaccatctctactaaaaatacaaaaattagctgagtctgttggcgtacgcctgtagcctcagctacctgggaggctgaggtgggagaatcgcttgaactgggaggcagaggttg

SEQ ID NO: 17069 - DNA, 120 bp, synthetic construct
  source 1..120: mol_type = other DNA
aggccttgagactggaggaagagggcagagtaaaaaattcagaattaaggcattgttaagaaaggagaataagccaaagagaagcaacagtggggattacacaaatccactattagcaat

SEQ ID NO: 17070 - DNA, 120 bp, synthetic construct
  source 1..120: mol_type = other DNA
tttccaagggttccaaacttggcttctccatgctttccccaaaagtaagggaatcttagttctccgggtgagttcccactgccatgtgcggttgatccacctctacctacaagttctggg

SEQ ID NO: 17071 - DNA, 120 bp, synthetic construct; identical to SEQ ID NO: 5395
  source 1..120: mol_type = other DNA

SEQ ID NO: 17072 - DNA, 120 bp, synthetic construct
  source 1..120: mol_type = other DNA
actcctttggcaatctgtgtctatcttagcagcctgtggcttcaaccactcagctacctcgtcaggactatttgtgtctatcttaaacaatgagtcatctacctgtccctggtaggatat

SEQ ID NO: 17073 - DNA, 120 bp, synthetic construct
  source 1..120: mol_type = other DNA
tgaaagtgacttatttccctcatgtgtgaaatgggcaaacaccatcttcccaacctactcaagagttctcaccagagtgagtgaaataatatagctgaaaggtccataaatgttaagtga

SEQ ID NO: 17074 - DNA, 120 bp, synthetic construct
  source 1..120: mol_type = other DNA
tatatgtaatactttgtttccacgtttctgtttagctgtgccagttcacaaagggctctgtgagtcacatgattccacaatattcctcataactgtgttatctcctgagtctcagagtgg

SEQ ID NO: 17075 - DNA, 120 bp, synthetic construct; identical to SEQ ID NO: 5396
  source 1..120: mol_type = other DNA

SEQ ID NO: 17076 - DNA, 120 bp, synthetic construct
  source 1..120: mol_type = other DNA
acagagaggaaatgacggctgtgaaccacacgtccggctcagccattttctaggcggaaaaaaggaagcccctttggctctctcctccctttgtccgactcgcgctcccgccctcccgga

SEQ ID NO: 17077 - DNA, 120 bp, synthetic construct
  source 1..120: mol_type = other DNA
gcttcaggggctcgcggtgcttctcgcacacgcccatctcgccgccgggccccgacggccgctcggtgcgcagctgctttaccagttgggtcacgttggccaggtgccggttgggccgca

SEQ ID NO: 17078 - DNA, 120 bp, synthetic construct
  source 1..120: mol_type = other DNA
ctgcgaagtactgcaggcacacggggcaggtggtctcctgctgcaggcactcggccacactcccggaggccatggcgccggcctgcgggggcgcacgggcatgggccccggcgccgagct

SEQ ID NO: 17079 - DNA, 120 bp, synthetic construct; identical to SEQ ID NO: 5397
  source 1..120: mol_type = other DNA

SEQ ID NO: 17080 - DNA, 120 bp, synthetic construct
  source 1..120: mol_type = other DNA
cgcgcttccagcgagtgacaaggtttcgtggcctgggggcctgagctgtttcctcttggaaaggccgaggaggctccgccactctcctttggactggtcgcgctgaagctctatcctagg

SEQ ID NO: 17081 - DNA, 120 bp, synthetic construct
  source 1..120: mol_type = other DNA
aaaagaaagctggctttggccgcgcgcagtggctcgcgcctgtaatcccagcatttgggaggccaaggcaggtggatcacgaggtcaggagatcaagactatcctggccaacatggtaaa

SEQ ID NO: 17082 - DNA, 120 bp, synthetic construct
  source 1..120: mol_type = other DNA
gacccgagatcgccactgcactccagcctgcgggacagagggagactctgtctcaaaaaaaaaaaaaaaaaaaaaaaagaaacgaaaaaatgaaagctggctttgtataggtgctgggga

SEQ ID NO: 17083 - DNA, 120 bp, synthetic construct; identical to SEQ ID NO: 5398
  source 1..120: mol_type = other DNA

SEQ ID NO: 17084 - DNA, 120 bp, synthetic construct
  source 1..120: mol_type = other DNA
agggttgttgtattgagtagcaactaaaaattgcttgctcctttctgaagtatagagaaactaagaatcctgcggtgacccagggtcttggagtcccacaatactcattgtcttatcatc

SEQ ID NO: 17085 - DNA, 120 bp, synthetic construct
  source 1..120: mol_type = other DNA
ccatcactttatttttattttttcaaagtgaaagtaagattattaagaaaataaaggaataaagaatggctactccgtaggcaaagcagcccacatcatcactttagagagttccactct

SEQ ID NO: 17086 - DNA, 120 bp, synthetic construct
  source 1..120: mol_type = other DNA
agctttagcccatttccagaaaaatgtagagtacttgggccaggccacaccacagtctggtcttggtttgagattgggtcaacaatgaaatttgtaagaattaaaggatatgtctattct

SEQ ID NO: 17087 - DNA, 120 bp, synthetic construct; identical to SEQ ID NO: 5399
  source 1..120: mol_type = other DNA

SEQ ID NO: 17088 - DNA, 120 bp, synthetic construct
  source 1..120: mol_type = other DNA
ccccgtctctaccaaaaatacaaaaactcgatgggcacagtggtgcacacctgtaatcccaactactctggagactgaggctggagaatcacttgagcctgggagacagaggttgcaggg

SEQ ID NO: 17089 - DNA, 120 bp, synthetic construct
  source 1..120: mol_type = other DNA
aggtgggagtgggggaaagggaatatttacattagcaatctctaacagtccccttccttttttttaatttaaaaaagttacacctgtctttttctcaataaattttgtaagaaaaaagaa

SEQ ID NO: 17090 - DNA, 120 bp, synthetic construct
  source 1..120: mol_type = other DNA
tgcccagcccctcttccttgagtgtttactgtcttcccttcatcatccagatttcatggaattttgatttgcttaatttacctgttcatgttaatttctattactaatcctaacctatat

SEQ ID NO: 17091 - DNA, 120 bp, synthetic construct; identical to SEQ ID NO: 5400
  source 1..120: mol_type = other DNA

SEQ ID NO: 17092 - DNA, 120 bp, synthetic construct
  source 1..120: mol_type = other DNA
cacttccggaggctgaggtgggcggatcccgaggtcaggagatcatgaccagcctggccaacacagtgaaaccccgtctctactaaaaatacaaaaattagccgggcatggtggcgcaca

SEQ ID NO: 17093 - DNA, 120 bp, synthetic construct
  source 1..120: mol_type = other DNA
cgcgccactgcactccagcctgggcgacagagcgagactccgtctcaaaaaaagagtattaataaaatatactttttttttttttgagacagagtctcgctctgtcgcccaggctggagt

SEQ ID NO: 17094 - DNA, 120 bp, synthetic construct
  source 1..120: mol_type = other DNA
gtattttttttagtagagacagggtttcaccgtgttagccaggatggtctcaattccctgacatcgtgatccgccctcctcgggctcccaaagtgctgggattacaggcgtgagccaccg

SEQ ID NO: 17095 - DNA, 120 bp, synthetic construct; identical to SEQ ID NO: 5401
  source 1..120: mol_type = other DNA

SEQ ID NO: 17096 - DNA, 120 bp, synthetic construct
  source 1..120: mol_type = other DNA
tctaaacctccctgccctaagggaacgagtgacttttactagtattggccaaatccaagggacacttttcagtcttcatcttaacatctcgaaggcattttatgtggagtcctaatcagg

SEQ ID NO: 17097 - DNA, 120 bp, synthetic construct
  source 1..120: mol_type = other DNA
cttaccatcaaacgcctcgatttatcaagcaccttggctgacagaagaatgcgggttaagcttcctgctaccttagcgttatcaatcagtccaagttccattgtataaaatccctagcaa

SEQ ID NO: 17098 - DNA, 120 bp, synthetic construct
  source 1..120: mol_type = other DNA
atcttttccccctacaccacaggcccagttagtcgtcacttacctgtgacattttacactgttgatccctccctccttggatcattcttcttccaagcagcaaactgagtgggacctgat

SEQ ID NO: 17099 - DNA, 120 bp, synthetic construct; identical to SEQ ID NO: 5402
  source 1..120: mol_type = other DNA

SEQ ID NO: 17100 - DNA, 120 bp, synthetic construct
  source 1..120: mol_type = other DNA
acaaaaaattagctgggtgttgcggcgtgcacctgtggtcccagctactggggaggctaaggtgggaggatcccttgatcccaggaggcagaggttgcagtgagccgagattgcaccact

SEQ ID NO: 17101 - DNA, 120 bp, synthetic construct
  source 1..120: mol_type = other DNA
gattgtggaataactggctagctacttgggagaaaaaagatctcatctcacttcttatactgaactatattattgatcaatgaaatttttttaagaaaattaatccataaaaattccagg

SEQ ID NO: 17102 - DNA, 120 bp, synthetic construct
  source 1..120: mol_type = other DNA
ttcttataaaaaaattttctaaacagctgaatgataaaggaaaattggggaaagatgtttttagcaaattaaacaaaggatgaatttccttgagacaaaatatttgcacaaataaaagca

SEQ ID NO: 17103 - DNA, 120 bp, synthetic construct; identical to SEQ ID NO: 5403
  source 1..120: mol_type = other DNA

SEQ ID NO: 17104 - DNA, 120 bp, synthetic construct
  source 1..120: mol_type = other DNA
gctgggcgtgttggcgcatgcctgtaatcccagctactcaggaggctgaggcaggagaatagcttgaacccgggaggcagatgttgcggtgagccgaggtcacgccattgcactccatcc

SEQ ID NO: 17105 - DNA, 120 bp, synthetic construct
  source 1..120: mol_type = other DNA
tcccatctggacagagatgtttgattatacaaggattgccattacagcattgtttggatttgtaaaatactgggaccaacgtcaatatgctccaacaggggataagttaatgaaaatatt

SEQ ID NO: 17106 - DNA, 120 bp, synthetic construct
  source 1..120: mol_type = other DNA
gaagaagaagaagaagaagaggaagaagaaggagaagaagaaaaagaagaaataatctaatagggaaaggtgtctgagatttatttactcattaatttattcaacaaatgtttgttgagt

SEQ ID NO: 17107 - DNA, 120 bp, synthetic construct; identical to SEQ ID NO: 5404
  source 1..120: mol_type = other DNA

SEQ ID NO: 17108 - DNA, 120 bp, synthetic construct
  source 1..120: mol_type = other DNA
aataattcaaatgtcctcgaatggtgaagagttaaacagtggcacatccatattatgaaatactacccagagataaaaatgaatgaactactgagataggcagcaacttggatagatctc

SEQ ID NO: 17109 - DNA, 120 bp, synthetic construct
  source 1..120: mol_type = other DNA
tatttatttatttatttatttatttatttttgggaaagagtcccactgtgttactcaggctggagtgcagtgggacaatctcggctcactgcagcctctgccttccgggttcaagtgatt

SEQ ID NO: 17110 - DNA, 120 bp, synthetic construct
  source 1..120: mol_type = other DNA
aactcttgacctcaaatgatccacctacctcgacttcccaaagtgctggaattacaggagtgagccgctgtggccagcccacaacattctcgaaatgataaaattatagagatagagagc

SEQ ID NO: 17111 - DNA, 120 bp, synthetic construct; identical to SEQ ID NO: 5405
  source 1..120: mol_type = other DNA

SEQ ID NO: 17112 - DNA, 120 bp, synthetic construct
  source 1..120: mol_type = other DNA
cgcccaggctggagtgcagtggcatgatcttggctcactgtaacctccgcctcctgggttcaagcaattctcatgcctcagcctcccaagtagctgggattacaggcatgtgccaccatg

SEQ ID NO: 17113 - DNA, 120 bp, synthetic construct
  source 1..120: mol_type = other DNA
gagcgagccactgcacccagccactgaatcttaattacatcctataactgtatgtgaatctacaattatgtcaaaataaattttaaaaaatttctgcagtcacagcatcaatgacttgtc

SEQ ID NO: 17114 - DNA, 120 bp, synthetic construct
  source 1..120: mol_type = other DNA
ctatggcaaggggactgagataatgctcactggtctatgcatcaagacccactgaaaaatgtaattgtcattagtcatctaaatataatttatttttgaattggttatgtgcttcccaac

SEQ ID NO: 17115 - DNA, 120 bp, synthetic construct; identical to SEQ ID NO: 5406
  source 1..120: mol_type = other DNA

SEQ ID NO: 17116 - DNA, 120 bp, synthetic construct
  source 1..120: mol_type = other DNA
agcccaggagtttgaggctgcagtgagctatgatcatgccactgcactccaacctgggcgacagagtgagatcctcatcttaaaaaaaaaaaaggccgggtgcggtggctcgcacctgta

SEQ ID NO: 17117 - DNA, 120 bp, synthetic construct
  source 1..120: mol_type = other DNA
ggcgcatgcctgtaatcccagttacttgggaggctgaggcaggagaatcacttgaacctgggaggtagaggttgcagtgagccaagatcacaccattgcactccagcctgggcaacaaga

SEQ ID NO: 17118 - DNA, 120 bp, synthetic construct
  source 1..120: mol_type = other DNA
tgtatggcagaagtgattctataccagtgccaggccagggctgtaagagggctgacagcccctgtcttgtgtctctgagtcctgagacaccatagatatgtctttattagtctcctcagg

SEQ ID NO: 17119 - DNA, 120 bp, synthetic construct; identical to SEQ ID NO: 5407
  source 1..120: mol_type = other DNA

SEQ ID NO: 17120 - DNA, 120 bp, synthetic construct
  source 1..120: mol_type = other DNA
ttggggctgggagttcaagaccagcctggccaatatggcaaaagcctgtctctactaaaaatacaaaaatcagctgggcatggtggtgcacacctgtaatcccagctactcaggaggctg

SEQ ID NO: 17121 - DNA, 120 bp, synthetic construct
  source 1..120: mol_type = other DNA
atagtcacattgggggttaaaattccaaaacatgagttgggagctgtgtgtatgtggtgggcagagtggacacaactcagtccatagtgatgtccacctactctactacgggactccata

SEQ ID NO: 17122 - DNA, 120 bp, synthetic construct
  source 1..120: mol_type = other DNA
aggtgttacagaaaaatcatcccagtgagccctacctgttggggcagtttgttatgcagtatgaaataatcagaataaggagttgcattcagttattaatcaaatcaatatgtggttact

SEQ ID NO: 17123 - DNA, 120 bp, synthetic construct; identical to SEQ ID NO: 5408
  source 1..120: mol_type = other DNA

SEQ ID NO: 17124 - DNA, 120 bp, synthetic construct
  source 1..120: mol_type = other DNA
acacctgtaatcccagtactttgggaggctgaggcttgcggatcacttgaggtcaggagtttgagaccagcctggccaacatagtgaaacgctgtctctactaaaaatataaaaaaatta

SEQ ID NO: 17125 - DNA, 120 bp, synthetic construct
  source 1..120: mol_type = other DNA
ttggcaacacggagagagactccatctcaaaacaaaacaaaacaaaaaaagagaaatacctgagactgggtaatttataagaaaagagttttaattggctcatgattctgcaggctgtac

SEQ ID NO: 17126 - DNA, 120 bp, synthetic construct
  source 1..120: mol_type = other DNA
ctgtcttggctcactgcaagctccgcctcccgggttcaagcagttctcctgtctcagcctccaagtagctgggattacaggcgtgcaccaccgcgcttgtccaattttgtatatttttag

SEQ ID NO: 17127 - DNA, 120 bp, synthetic construct; identical to SEQ ID NO: 5409
  source 1..120: mol_type = other DNA

SEQ ID NO: 17128 - DNA, 120 bp, synthetic construct
  source 1..120: mol_type = other DNA
gtaaaatatacataaagggaacaagccttcagtgtataagctaatgaattgttacatgtgtgtacccaccatccagatcaagaggaaaaatattttcagcatccaggaaggctgtctcat

SEQ ID NO: 17129 - DNA, 120 bp, synthetic construct
  source 1..120: mol_type = other DNA
ctgcctgttcttgaacttcatatgaagagactcctatcatgagcacttattggggttttaaattgttgtctgttatgaataaagctgccctaaacgttctggtggtatatgtctgttcat

SEQ ID NO: 17130 - DNA, 120 bp, synthetic construct
  source 1..120: mol_type = other DNA
atagtgaatgtgctaattaacacttctagcagcaatgcatgagaattctagttgccgcacatattacaccaacacttggtacagcatatgtgttttaaaatattttagctgttcaggtgg

SEQ ID NO: 17131 - DNA, 120 bp, synthetic construct; identical to SEQ ID NO: 5410
  source 1..120: mol_type = other DNA

SEQ ID NO: 17132 - DNA, 120 bp, synthetic construct
  source 1..120: mol_type = other DNA
actatttgaatgtagtctttagggaagttcctgatcaagtcttttgtcattaaaaaaaaattatttgtctttttcttgttgatttacaagagtgctttatatatttaggatgagtccttt

SEQ ID NO: 17133 - DNA, 120 bp, synthetic construct
  source 1..120: mol_type = other DNA
cacaatctcgactcactgcaacctccgcctcccgggttcaagtgatcctcctgcctcaggctcctgagtagctgggactacaggtgtgcgccaccacgctcagctaatttttgtattttt

SEQ ID NO: 17134 - DNA, 120 bp, synthetic construct
  source 1..120: mol_type = other DNA
tttcattttcttaatgatgttttttgatgaatagaagtttccagttttgatgaattttatttcatcgactttattgatttatttttaaaatttttacacttatttatttatttaatagac

SEQ ID NO: 17135 - DNA, 120 bp, synthetic construct; identical to SEQ ID NO: 5411
  source 1..120: mol_type = other DNA

SEQ ID NO: 17136 - DNA, 120 bp, synthetic construct
  source 1..120: mol_type = other DNA
ttatatcataaatttgtaaatgcatttctgtctattcacctcgttttaaccactatctccaaaaagcagaaaatagctgcactaatggaaaaccagttcaccagatttacttattctgtt

SEQ ID NO: 17137 - DNA, 120 bp, synthetic construct
  source 1..120: mol_type = other DNA
tgtctggctattttttttttttttaagacagtgtctggctctgtcgcccaggctggagtgcaatggcgtgatctcggctcattgcaacctccacctccccggtccaagcaatactctttc

SEQ ID NO: 17138 - DNA, 120 bp, synthetic construct
  source 1..120: mol_type = other DNA
ttgccctcgtgatccccgcaccttggcctcccaaagtgctgggattacaggcatgagccaccgcacgcggcctattttttgtatttttagtagagatggagtttcaccatgttggccagg

SEQ ID NO: 17139 - DNA, 120 bp, synthetic construct; identical to SEQ ID NO: 5412
  source 1..120: mol_type = other DNA

SEQ ID NO: 17140 - DNA, 120 bp, synthetic construct
  source 1..120: mol_type = other DNA
ctcttcatgaatctcttcttgtggacatatttatttacttatacatttcttaattcaacatatatttattgaatacatttttgaatatggcaatatacattcatatttgttattattatt

SEQ ID NO: 17141 - DNA, 120 bp, synthetic construct
  source 1..120: mol_type = other DNA
aggggtccgccaccacgcccatctatttttttgtatttttaatagagacagggtttcaccatgttggccagggtggtcttgaactcctgacctcaggcaatccgcctgcctcggcgtccc

SEQ ID NO: 17142 - DNA, 120 bp, synthetic construct
  source 1..120: mol_type = other DNA
ctgagctccatggtataccataattaccttctttgacaaccttttgttcttcctgggattaataattgcctcctgttctttgcttacttttctaaatatttattcctaattcaaaaccag

SEQ ID NO: 17143 - DNA, 120 bp, synthetic construct; identical to SEQ ID NO: 5413
  source 1..120: mol_type = other DNA

SEQ ID NO: 17144 - DNA, 120 bp, synthetic construct
  source 1..120: mol_type = other DNA
gctgggttcagaaatctagttgtggaaactattttcctttattgaaatgatttagaaggcattgcctcattgtctttcagcttttggtgttggtgctgctgtggagaaaaaaagatgaca

SEQ ID NO: 17145 - DNA, 120 bp, synthetic construct
  source 1..120: mol_type = other DNA
ctgatatttcacaatgacaagctttattgtggggctttgccacaccctatgcagggtagttggtgggccttttaaatctggagacttaaggtctttggttctgaaaaataatcttatatt

SEQ ID NO: 17146 - DNA, 120 bp, synthetic construct
  source 1..120: mol_type = other DNA
ttcaccccaaactttccagatttctacaaccttattttgaaattttaggccaggcgcagtggctcacaactgtaatcccagcactttgggaggctgaggcgggcggatcacctgaggttg

SEQ ID NO: 17147 - DNA, 120 bp, synthetic construct; identical to SEQ ID NO: 5414
  source 1..120: mol_type = other DNA

SEQ ID NO: 17148 - DNA, 120 bp, synthetic construct
  source 1..120: mol_type = other DNA
tttgtttcctcttaggttcttcctgcccccttctgtttgtattcgtccttgtcttattgtagaaatattttcacaaccacctgattatccttggttgtcgtacatattttaagtaaggca

SEQ ID NO: 17149 - DNA, 120 bp, synthetic construct
  source 1..120: mol_type = other DNA
cgttgttttaatttttattttttccttgtaaattgacttggatatctcatctgtctttctttatctctggaaaactttatcccagtttcccttgacatactccttcaacctcctgggaga

SEQ ID NO: 17150 - DNA, 120 bp, synthetic construct
  source 1..120: mol_type = other DNA
gctgacacttccttcatgctactctggtttagcacccctgcacttcaccctctttcaactcctgaccaagtcaactcctgttactcacatcgacagtcatttttcatgttcaagacccct

SEQ ID NO: 17151 - DNA, 120 bp, synthetic construct; identical to SEQ ID NO: 5415
  source 1..120: mol_type = other DNA

SEQ ID NO: 17152 - DNA, 120 bp, synthetic construct
  source 1..120: mol_type = other DNA
cgcaagctgagtcacggttcctgattccatttaaatagaacgttttgttcacttgtaggaatttccttttccatttctttcattaaatcgcgaacgtagtaatgacttaacgctggttac

SEQ ID NO: 17153 - DNA, 120 bp, synthetic construct
  source 1..120: mol_type = other DNA
ctccaatggaggcgtgggttcgaatcccacttctgacacaactatcttattctccttttactctactttctcagccatttctgtgttttcattctttctacctcaactttttttattcta

SEQ ID NO: 17154 - DNA, 120 bp, synthetic construct
  source 1..120: mol_type = other DNA
ctgtgttttcattctttctacctcaactttttttattctaactaaaatgatacactctcaatgaggtctgcccccttgcttttcagtcttgttcgctgtttagtagtgaatcacgttttg

SEQ ID NO: 17155 - DNA, 120 bp, synthetic construct
  source 1..120: mol_type = other DNA
attacatactggccctgagctcataggttattgggaccgcagattacatgtttttcctcacggccagaaaccatcaaaaataaaagtgatgaaactgaaattgaaagcagcaaggttcac

SEQ ID NO: 17156 - DNA, 120 bp, synthetic construct; identical to SEQ ID NO: 5416
  source 1..120: mol_type = other DNA

SEQ ID NO: 17157 - DNA, 120 bp, synthetic construct
  source 1..120: mol_type = other DNA
tgggaatatggttattcctggagatttttattttctttcgtttccagcccacgaaaaggtgaattgaattttagtctcacggtttgaaagggagaaaagagagaaaagaaaaaatatact

SEQ ID NO: 17158 - DNA, 120 bp, synthetic construct
  source 1..120: mol_type = other DNA
gtctcccgcattcctccaaaatgccttaagtgcagggctgagtctcagtagtctttgatagcccacggtctgctactttgtagaagctcaaccaatgcttgttgcatgaatgcataaatg

SEQ ID NO: 17159 - DNA, 120 bp, synthetic construct
  source 1..120: mol_type = other DNA
agttcaaaagggaataattatttctcctcctcctcctatcttcttttgcctttccaggtcccagctcccaggtggacatcttagcgtccagatgacccaacatataggtgtcctttagta

SEQ ID NO: 17160 - DNA, 120 bp, synthetic construct; identical to SEQ ID NO: 5417
  source 1..120: mol_type = other DNA

SEQ ID NO: 17161 - DNA, 120 bp, synthetic construct
  source 1..120: mol_type = other DNA
aagcagtgaaattagaagacttctgcctaggcgactgtaaagtgctcctaagcatctacccacctccctgcacacaaaaactctccattctatctcctcgagtctcctagccttaaaaga

SEQ ID NO: 17162 - DNA, 120 bp, synthetic construct
  source 1..120: mol_type = other DNA
atgtttactgtttaagaagataacagaatctcaaaagctaactcttcaactgtgttcaactaaggaccttaaactgctctctgaggataggtgaagcgggaaaggctctaggtgtctggt

SEQ ID NO: 17163 - DNA, 120 bp, synthetic construct
  source 1..120: mol_type = other DNA
gatgagcgtgcgtggcttatttattcttgagtctggagttaagaaggttgtactttttccttaggattgcccttggttggttcacaaatttcgcaaagtgaatgaaaacacatgaaggcc

SEQ ID NO: 17164 - DNA, 120 bp, synthetic construct; identical to SEQ ID NO: 5418
  source 1..120: mol_type = other DNA

SEQ ID NO: 17165 - DNA, 120 bp, synthetic construct
  source 1..120: mol_type = other DNA
agtcctttcattcccattcccacatcaccataagcccttccctcaggccccttcttcagcattccttgcttctcagcatagcccgagaacccccgatccctgacactttgcttcttctca

SEQ ID NO: 17166 - DNA, 120 bp, synthetic construct
  source 1..120: mol_type = other DNA
gctccacatccacttggattccagggagtaagcctctcgacttcaggagtaagcaaggccaaccgtttggtttgagcctgttgcttctaagaaaagcgaggaaaaatcctgagacctcct

SEQ ID NO: 17167 - DNA, 120 bp, synthetic construct
  source 1..120: mol_type = other DNA
acggaacttcacaagggaggaaaagagtgaactcattattatttgtcttgtcttcgtttcagaggcggtacatctacgaaagccctaatcatagagggaaagactcctcgttcctggccc

SEQ ID NO: 17168 - DNA, 120 bp, synthetic construct; identical to SEQ ID NO: 5419
  source 1..120: mol_type = other DNA

SEQ ID NO: 17169 - DNA, 120 bp, synthetic construct
  source 1..120: mol_type = other DNA
agggggcaaggcgtctgttttgccattttacttcttcttgatccaaaatgagtaagacaacaaaggaagttgacaaaacgttgttctttctctgctttctctatagaaaagtgtacaata

SEQ ID NO: 17170 - DNA, 120 bp, synthetic construct
  source 1..120: mol_type = other DNA
ccaaaattctcatctcccctcccgccctgcataccaattggagatagagctggtagcattttcaaatgtttttcagatatgcttggcaattgtctttgttttaacaacaccagagtcaag

SEQ ID NO: 17171 - DNA, 120 bp, synthetic construct
  source 1..120: mol_type = other DNA
ggaatggcttaccaccaggttgccaccaataacattccatatgaaaaaagaaaggaaacaaaaaactgacaaaaaactcccccctcagtctcattgcattggaccttttctcttgcttcc

SEQ ID NO: 17172 - DNA, 120 bp, synthetic construct; identical to SEQ ID NO: 5420
  source 1..120: mol_type = other DNA

SEQ ID NO: 17173 - DNA, 120 bp, synthetic construct
  source 1..120: mol_type = other DNA
gggctgctttctaaattttgttcttcctgtcaggtcactccaacaatggcagttgaatcccatctctatttgttctcttcatgcattccagaatgtctcactgtccattacataagtaag

SEQ ID NO: 17174 - DNA, 120 bp, synthetic construct
  source 1..120: mol_type = other DNA
ttccagccctacaaggtggtagctacttcccagtagttatcacctctgagttaccatggtgtgcccagttgaaatacctagtcttattcctttttttttgagacagagtcttgttctgtc

SEQ ID NO: 17175 - DNA, 120 bp, synthetic construct
  source 1..120: mol_type = other DNA
ccagctaatttttgtatttttaccagagacggggtttcaccatgttggccaggctggtcttgaactcctgacctcaagtgatctgcccgcttcggcctcccaaagcgctgggattacaga

SEQ ID NO: 17176 - DNA, 120 bp, synthetic construct; identical to SEQ ID NO: 5421
  source 1..120: mol_type = other DNA

SEQ ID NO: 17177 - DNA, 120 bp, synthetic construct
  source 1..120: mol_type = other DNA
agggagaagagaatttcaggccaagggaacagtaattacaaaaggcttggcaggaatgccattggcatgttcaaggaacgaaggaggagactagtgcagctgtaggtcagtaaacaaggg

SEQ ID NO: 17178 - DNA, 120 bp, synthetic construct
  source 1..120: mol_type = other DNA
atgatcatgttcagagagggaattcgctgcataggggagagaaaagacaacagtgatttaagttgtggaggtcagccagaccttgagaatattctgattcatgagtctgagatagaatct

SEQ ID NO: 17179 - DNA, 120 bp, synthetic construct
  source 1..120: mol_type = other DNA
agcctctggagtagctgggattacaggcatgcgccaccacgcccggctaattttgtgtttttagtagagatgtggtttctccatgttggtcaggctggtctcgatctcctggcctcagat

SEQ ID NO: 17180 - DNA, 120 bp, synthetic construct
  source 1..120: mol_type = other DNA
ttttggaagccccagtcaaggacttactcggcctatattcatttatcctatgttgaccgtctctggagagatcatttcctcccaaaattctcctcatttttgtttagtcatccagggctt

SEQ ID NO: 17181 - DNA, 120 bp, synthetic construct; identical to SEQ ID NO: 5422
  source 1..120: mol_type = other DNA

SEQ ID NO: 17182 - DNA, 120 bp, synthetic construct
  source 1..120: mol_type = other DNA
tctcggctcactgcaacctctgcctcccaggttcaagtgattattttgcctcagacccttgaggtagctgggactacagtcatgcaccaccacacctggctcatttttgtgtttttagta

SEQ ID NO: 17183 - DNA, 120 bp, synthetic construct
  source 1..120: mol_type = other DNA
ttgctttatttctgcctttccctgtaaagagcttttcttggtaaataagcagctgagacatcttgacacctcctgccctccaggttcccaggggcagtctgggcccaagttttctttctt

SEQ ID NO: 17184 - DNA, 120 bp, synthetic construct
  source 1..120: mol_type = other DNA
tttacataaagccagtgtactcttaaaagtaatctcatcatgtcatttcttcctgcttagaattcccagtggcttcacattgctgctagggtgcagtcagctctctgcactactagccat

SEQ ID NO: 17185 - DNA, 120 bp, synthetic construct; identical to SEQ ID NO: 5423
  source 1..120: mol_type = other DNA

SEQ ID NO: 17186 - DNA, 120 bp, synthetic construct
  source 1..120: mol_type = other DNA
agaggtcatctccctttataatccatgctcttgaagatagagggcagggtgtgatttacagtgtgcgatttacagtgtgcattattttgtctcaccttacttttctctatgttcccttta

SEQ ID NO: 17187 - DNA, 120 bp, synthetic construct
  source 1..120: mol_type = other DNA
cattgtgctagacctagcctttgagggatttctgctgtgagattaaagtggtcaagagattaacaaacttgtctaaagtggcacaagcaaaatggttaaaatacagtgttctaaatgatc

SEQ ID NO: 17188 - DNA, 120 bp, synthetic construct
  source 1..120: mol_type = other DNA
tcaacattttgtaacctgaacgttttctcaagagcatgtgttacagtgactgtttaaacagtgtaatttgtcgtttaacggctgcttttcacttgtaaaatatgaacgccccaagggctg

SEQ ID NO: 17189 - DNA, 120 bp, synthetic construct
  source 1..120: mol_type = other DNA
tgttcccatgtgttaggagtattcttctttctggtgggttcgtggtctcgctaactcaggagtgaaactgcaaaccttcggagagagtattacagctcttaagacagcacgtctggaatt

SEQ ID NO: 17190 - DNA, 120 bp, synthetic construct; identical to SEQ ID NO: 5424
  source 1..120: mol_type = other DNA

SEQ ID NO: 17191 - DNA, 120 bp, synthetic construct
  source 1..120: mol_type = other DNA
gacacacaggttctccacggccccaccagagccgctagatacagtgtcgattggtgcactcacaaaccctgagctagacacagggtgctgattggtgtgtttacaaaccttgggctagat

SEQ ID NO: 17192 - DNA, 120 bp, synthetic construct
  source 1..120: mol_type = other DNA
ggagttgcctgccaaccccacgccatgcgctcgcactcctcatcccttgggtggtcgatgggactgggtgccgtggagcagggggcggcgctcgtcggggaggctcgggctgcacaggaa

SEQ ID NO: 17193 - DNA, 120 bp, synthetic construct
  source 1..120: mol_type = other DNA
gggatccagtacaccctctgcagtcgctggcccgggtgctaagtcccttattgcccggggccggcagggcctgccggctgctccgagtgcgaggcccgccaagcccacgcccacccggaa

SEQ ID NO: 17194 - DNA, 120 bp, synthetic construct; identical to SEQ ID NO: 5425
  source 1..120: mol_type = other DNA

SEQ ID NO: 17195 - DNA, 120 bp, synthetic construct
  source 1..120: mol_type = other DNA
aagatctcggctccctgcaaccttcgcctcccgggttgaagcgattcccttgcctcagcctcccgagtagctgggactacaggcgtgcgccaccacgcccggctaatttttttgtatttt

SEQ ID NO: 17196 - DNA, 120 bp, synthetic construct
  source 1..120: mol_type = other DNA
aggtgttcttaaggtcgcagggaagactggagcataacctttgaagactaaagacaagacaaacccggcgattacgtctgtagttatacattgcttttacaagtaattgtttggagtaca

SEQ ID NO: 17197 - DNA, 120 bp, synthetic construct
  source 1..120: mol_type = other DNA
atagatgggaataaagaaaaggaacatggataggatttaagttggacgatatcaagtttctgcacctttttactcactagaatgtgcaggaagaaggcttttgcagggagcccggatagc

SEQ ID NO: 17198 - DNA, 120 bp, synthetic construct
  source 1..120: mol_type = other DNA
ggttcaagtccctgttcgggcgggagtggtggcttttagtacctgattctggtatcatgtttgaaaaagccaaaaaggatactatcgttttatagggacagatttcatatactgcaaaaa

SEQ ID NO: 17199 - DNA, 120 bp, synthetic construct; identical to SEQ ID NO: 5426
  source 1..120: mol_type = other DNA

SEQ ID NO: 17200 - DNA, 120 bp, synthetic construct
  source 1..120: mol_type = other DNA
caagaaagttataatatgttcatattctggcttggcatatttctggcatttagttaccgtgagtcagccctgcaagtcttaaaaactctaggtgaatttaaaaatagtttccggccgagc

SEQ ID NO: 17201 - DNA, 120 bp, synthetic construct
  source 1..120: mol_type = other DNA
gcgtggtggcgggcgcatgtagtcccagctactcgggaggctgaggctggagaagggcgtgaacccgggaggtagagcttgcagtgagccgagattgcgccactgcactccagcctgggc

SEQ ID NO: 17202 - DNA, 120 bp, synthetic construct
  source 1..120: mol_type = other DNA
tgcggtcaggagttcgagaccagccgggccaacatgctgaaacagtctctactaaaaatacaaaaattagccgagagtggtggtacgcgcctataatcccagctacttgggaggctgagg

SEQ ID NO: 17203 - DNA, 120 bp, synthetic construct; identical to SEQ ID NO: 5427
  source 1..120: mol_type = other DNA

SEQ ID NO: 17204 - DNA, 120 bp, synthetic construct
  source 1..120: mol_type = other DNA
tgttaagatgttccctataaaacgcttccttaagtcggcaacagaatgaactgttaagagagctgtcctgaaatacagacccctgaggtccagacatgttggaggagagccctctctttt

SEQ ID NO: 17205 - DNA, 120 bp, synthetic construct
  source 1..120: mol_type = other DNA
tgacaagaagcatggaaagaaaaccataacatttaatatgcaaattaaatgattgatttgagaaatacttgtttatcagataccgtgctaggcactgaaaatatagaactggataaaaca

SEQ ID NO: 17206 - DNA, 120 bp, synthetic construct
  source 1..120: mol_type = other DNA
aggaaactttatatagtaaaaaattctatgaagaaaataaaacagcttgaggttgatgtgatgggaggttggtgagtgaaagaagggatggtgtgttggtttcctagggctgccacaaca

SEQ ID NO: 17207 - DNA, 120 bp, synthetic construct; identical to SEQ ID NO: 5428
  source 1..120: mol_type = other DNA

SEQ ID NO: 17208 - DNA, 120 bp, synthetic construct
  source 1..120: mol_type = other DNA
ctactgcgctaaggaggcagacaactagtgctcctcagcaggtgttttcaacactgatttttaccttatttaaacatttttgtctacattacctttattttaaatttctaaaataaaata

SEQ ID NO: 17209 - DNA, 120 bp, synthetic construct
  source 1..120: mol_type = other DNA
cttaggtggaaaatttccaaaacgtcctgtccagaaacctgacaattaacctgcacgggcgtccatccattttgtctggagagatcaggaaaacggcctgtttttctctctccctccata

SEQ ID NO: 17210 - DNA, 120 bp, synthetic construct
  source 1..120: mol_type = other DNA
tgtgctcaaacgtcttgtaaggccgtcttaatgtacagcaaacttcttgtaaggccgtcttaatgtacagcaaactccttgtaaggccgtctgttttaaaaaaatacctccctaagtccc

SEQ ID NO: 17211 - DNA, 120 bp, synthetic construct; identical to SEQ ID NO: 5429
  source 1..120: mol_type = other DNA

SEQ ID NO: 17212 - DNA, 120 bp, synthetic construct
  source 1..120: mol_type = other DNA
gggctttcggtttttggcgataggttggagagaatatatacacacaaaaagtgacaaccccatccttgttcccacccctgccccagggccgaaagcaacactgattttattgccaatgga

SEQ ID NO: 17213 - DNA, 120 bp, synthetic construct
  source 1..120: mol_type = other DNA
catcgctctgagtgaggcgacttaaatgcgcgatgttaccgttttcagccgtgaccgtagcactcggtctttgactgtagactgttgtgtctacatagtgctagtttgtattgctagttt

SEQ ID NO: 17214 - DNA, 120 bp, synthetic construct
  source 1..120: mol_type = other DNA
gcctcccgagtagctgggattacaagcctgcaccaccacgcccggctaattttttgtatctttagtagagacggggtttcaccatgttggccaggctattctggaactgctgacctcaag

SEQ ID NO: 17215 - DNA, 120 bp, synthetic construct; identical to SEQ ID NO: 5430
  source 1..120: mol_type = other DNA

SEQ ID NO: 17216 - DNA, 120 bp, synthetic construct
  source 1..120: mol_type = other DNA
gtgtttttgtctcccaaaagtgacaccagcgctctgtagagaatagcattgggcttgcttacaaggagaccttaaaaaaagttaaaattaaataaaagaaaatggtattgggcagaatat

SEQ ID NO: 17217 - DNA, 120 bp, synthetic construct
  source 1..120: mol_type = other DNA
acagctgattctatcagacgaccttgctctctacaacataatgatgtgtcaaatccacctcaaccattaaaaaaaaagtttcccttagctcttacatactttgatttgaaacatgatgtt

SEQ ID NO: 17218 - DNA, 120 bp, synthetic construct
  source 1..120: mol_type = other DNA
cagtgcaaatgtaaattttggcaaattccattcagactataaactttctaccaaagaaaatgaaaagatcttacatgtgacgtgttctgcacatgttgttcacaacactgctaagaggcc

SEQ ID NO: 17219 - DNA, 120 bp, synthetic construct
  source 1..120: mol_type = other DNA
atacaaaaaatcaacggggtgtggtggcacatgcctgtaatcccagctactcgggaggctgaggcaggagaatcacttgaaccccagaggcagaggttgcagtgagccgagatcgtacca

SEQ ID NO: 17220 - DNA, 120 bp, synthetic construct; identical to SEQ ID NO: 5431
  source 1..120: mol_type = other DNA

SEQ ID NO: 17221 - DNA, 120 bp, synthetic construct
  source 1..120: mol_type = other DNA
aagaactaccgtaaaacagaaatttatactttcatttgtttgacgttgtcgaagaacaaaatttcaacacacttaggttaaagatcagatcaacttttattggcaattcatgaatcaggc

SEQ ID NO: 17222 - DNA, 120 bp, synthetic construct
  source 1..120: mol_type = other DNA
aaggaacaataggtggattggtaattacaaagtgactgtccttgtaaggttaaagcagaggatacttccttaacatgctggctgaggtagtctggacccttttctactggttattgtgaa

SEQ ID NO: 17223 - DNA, 120 bp, synthetic construct
  source 1..120: mol_type = other DNA
caaaacaatagcctcccattaattttaacaatgttatgttatgtagattgtgacataaagattcatacactaagaaaagattctttttttaaaaaaaaaagactgcttcagaatgcaagt

SEQ ID NO: 17224 - DNA, 120 bp, synthetic construct; identical to SEQ ID NO: 5432
  source 1..120: mol_type = other DNA

SEQ ID NO: 17225 - DNA, 120 bp, synthetic construct
  source 1..120: mol_type = other DNA
aaaagaaaataaagatgtcttaaatgttgcagacaggtcacagaaagaatattggaaaaagaaacagaaagggtaaagatactcgattgtttcatgcgacagaaagaaatgtcattattt

SEQ ID NO: 17226 - DNA, 120 bp, synthetic construct
  source 1..120: mol_type = other DNA
gttgaaataatatagcctatgagacttaaatatccaatagttttaaaaagttaaaataaatcactacataagagaacagatagaaatactaaaaacatattgttatatttttcccaaaca

SEQ ID NO: 17227 - DNA, 120 bp, synthetic construct
  source 1..120: mol_type = other DNA
cctgcctgggctcccactttggtggcatttgaggagcccttcagcccccccactgcactgtgggagcccctttctgggctggccaaggctggggtccacttcctcagcttgcagggaggt

SEQ ID NO: 17228 - DNA, 120 bp, synthetic construct
  source 1..120: mol_type = other DNA
gccccgggcaatagggaacttagcacctgggccagtggctgcggagggtgtactgggtccccagcagtgccagcccaccagtgctgtgctcgatttctcgctgggccttagctgccttcc

SEQ ID NO: 17229 - DNA, 120 bp, synthetic construct; identical to SEQ ID NO: 5433
  source 1..120: mol_type = other DNA

SEQ ID NO: 17230 - DNA, 120 bp, synthetic construct
  source 1..120: mol_type = other DNA
gacgtggagaacctttatgtctagctcagggattgtaaatacaccaatcggcactctgtatccagctcaaggtttgtaaacacaccaatcagcaccctgtgtttagctcaaggtttatga

SEQ ID NO: 17231 - DNA, 120 bp, synthetic construct
  source 1..120: mol_type = other DNA
cacaccaatcagcaccctgtgtttagctcaaggtttgtgagtgcaccaatcgacactctggctgctctggtggggccttggagaacctgtgtgtcaaaactctgtatctaactaatctgt

SEQ ID NO: 17232 - DNA, 120 bp, synthetic construct
  source 1..120: mol_type = other DNA
aataaaagcaggctgcccgagccagcattggcaatcctctcgggttcctttccacattgtggaagctttgttctttcgctttttgcaataaatcttgcaactggtcactctttgggtcca

SEQ ID NO: 17233 - DNA, 120 bp, synthetic construct
  source 1..120: mol_type = other DNA
taacactcactatgaaagtctgcagcttcactcctgagccagtgagaccacgaacccaccagaagaaagaaactccgaacacatctgaacatcagaaggggcagactccagacccaccac

SEQ ID NO: 17234 - DNA, 120 bp, synthetic construct; identical to SEQ ID NO: 5434
  source 1..120: mol_type = other DNA

SEQ ID NO: 17235 - DNA, 120 bp, synthetic construct
  source 1..120: mol_type = other DNA
tgagcttcaaggacaacgtctggcttaacagataaaaatggatggtttgatagataataatggtttataggtgattggaggtaacaggatgattgccaatggcttttccttcttttcaga

SEQ ID NO: 17236 - DNA, 120 bp, synthetic construct
  source 1..120: mol_type = other DNA
ctttctgctgtgaaaaaagattaaaagaggtcatctcataaacttgaggctggtatacttgaggtctttcattaacattcaaggatttaatatttgtgaaagaagaccctcaggggtcta

SEQ ID NO: 17237 - DNA, 120 bp, synthetic construct
  source 1..120: mol_type = other DNA
actgcaagctccgcctcccgggttcacgccattctcctgcctcagcctcccaagtagctgggactacaggcgcccgccaccacacctggctaatttttttgtatttttagtagagacggg

SEQ ID NO: 17238 - DNA, 120 bp, synthetic construct; identical to SEQ ID NO: 5435
  source 1..120: mol_type = other DNA

SEQ ID NO: 17239 - DNA, 120 bp, synthetic construct
  source 1..120: mol_type = other DNA
cagattgctcctgtaggacctgggagacacctcaaatactgtgagtgcccaaactgtggaagtgagaaagggagatcctccgcccccgagcacacacccccactggggaaactgaaggtc

SEQ ID NO: 17240 - DNA, 120 bp, synthetic construct
  source 1..120: mol_type = other DNA
ggccactcctgctggcatcacagggatcctttgggagggcagccagaggcacagggaaaatggcacaggaagaaggaaacctccagctgagctttgtaacaatttgaactagtcaagaaa

SEQ ID NO: 17241 - DNA, 120 bp, synthetic construct
  source 1..120: mol_type = other DNA
aactcttcttgcccactgcctggaaacagatttggtgctgttaggggaggcacagtgggagtgagactggcccttcagattgcatgggagctgggtgaagcctgtgactgctggctctcc

SEQ ID NO: 17242 - DNA, 120 bp, synthetic construct; identical to SEQ ID NO: 5436
  source 1..120: mol_type = other DNA

SEQ ID NO: 17243 - DNA, 120 bp, synthetic construct
  source 1..120: mol_type = other DNA
tttcacaccctgccacctccactggaacagatgctggtatccaaggctgagagacccatagatggttcacatcacaggactccgtgaagacaacccccagtaccagctcacagcctggta

SEQ ID NO: 17244 - DNA, 120 bp, synthetic construct
  source 1..120: mol_type = other DNA
aagaatctgaacaacagttttagccttagaccctccctctgacagagcctacccaaatgagaaggaaccagaaaaccaactctggtaatatgacaaaacaaggctctttaacaaccccca

SEQ ID NO: 17245 - DNA, 120 bp, synthetic construct
  source 1..120: mol_type = other DNA
cccaacacaaagaaatccaaaaaatgatacaagaagtgaagggagagaccaggtgcagtggttcatacctgtaatccctgggaggctgaggtgggcagatcatttgaggtcaggagtttg

SEQ ID NO: 17246 - DNA, 120 bp, synthetic construct; identical to SEQ ID NO: 5437
  source 1..120: mol_type = other DNA

SEQ ID NO: 17247 - DNA, 120 bp, synthetic construct
  source 1..120: mol_type = other DNA
gcttgaaggcaaggtctttgaattaaaccaatccaacaaacacaaagaaaaaagaaaaagaaaatatgaacaaagcctccaagaagtctgggattatgtaatgaccaaacctaagaataa

SEQ ID NO: 17248 - DNA, 120 bp, synthetic construct
  source 1..120: mol_type = other DNA
aaacacctggaaaattcatcacaaaaaagatcattgcctaggcacattgtcatcaagttatctaaagttaaggcaaaggaaagaatcttcagagttgtgagacaaaaccaccaggtaacc

SEQ ID NO: 17249 - DNA, 120 bp, synthetic construct
  source 1..120: mol_type = other DNA
atcctgcaaaactaagcatcttatatgaaagaaagatagtctttttcagacaaaccaatgctgagagaatttgccactaccaagccaccactacaagaactgataaaaggttctctaaat

SEQ ID NO: 17250 - DNA, 120 bp, synthetic construct
  source 1..120: mol_type = other DNA
ctaaaaatacaaaaaattagccaggtgtggtggcgggcacctgtagtcccagctactcgggaggctgaggcaggagaatggcgtgaacccaggaggcagggcttgcagtgagccgagatg

SEQ ID NO: 17251 - DNA, 120 bp, synthetic construct; identical to SEQ ID NO: 5438
  source 1..120: mol_type = other DNA

SEQ ID NO: 17252 - DNA, 120 bp, synthetic construct
  source 1..120: mol_type = other DNA
catcaagacagaaagtcagcaaagaaacaatggatttaaactataccttggaacaaatggacttaacagatatatacaaaacattccattcaacaactgcagaatacacattctattcaa

SEQ ID NO: 17253 - DNA, 120 bp, synthetic construct
  source 1..120: mol_type = other DNA
aaatcaactccaaaaggaaccttcaaaaccatgcaaatacatagaaattaaataagctgctcctgaatgaacattaggtcaaaaatgaaatcaagatggaaattaaaaaattccttgaac

SEQ ID NO: 17254 - DNA, 120 bp, synthetic construct
  source 1..120: mol_type = other DNA
ctaaggtcacatctcaaggaactggagaaacaagaacaaaccaaacccaaacacagcagaagaaaggaaatgaccaagatcacagcagaactaaatgaaattgaaacaaacaaacaaaaa

SEQ ID NO: 17255 - DNA, 120 bp, synthetic construct; identical to SEQ ID NO: 5439
  source 1..120: mol_type = other DNA

SEQ ID NO: 17256 - DNA, 120 bp, synthetic construct
  source 1..120: mol_type = other DNA
taatcccagaattttgagaggctgaggtgagtggatcacctgacatcaggagttcgagaccagcctggctaacatggggaaaccccatctctactaaaaatacaaaaaattagctgggtg

SEQ ID NO: 17257 - DNA, 120 bp, synthetic construct
  source 1..120: mol_type = other DNA
agagtgagactccgtctcaaaaaaaaaaaaaacaaaaaaaaaattaccaggtcaggcatggtgacccatgcctgcaatctctttgggaggccaaggcgggtggatcacctgaggtcagga

SEQ ID NO: 17258 - DNA, 120 bp, synthetic construct
  source 1..120: mol_type = other DNA
ccaattatccaggaggcgaggctgcagtgagccgagatcatgccactgcactccagcctgggtgaccgagcgagactccgtctaaaaaagacaaacaaacaaaaaacattatcaacaaaa

SEQ ID NO: 17259 - DNA, 120 bp, synthetic construct
  source 1..120: mol_type = other DNA
tctatgaagccggtatcaccctaataccaaaaccaggaaaggacataaccaaaaaagaaaactacagaccaatatccctgatgaacatagatgctcaaatccttaacaaaatactagcta

SEQ ID NO: 17260 - DNA, 120 bp, synthetic construct; identical to SEQ ID NO: 5440
  source 1..120: mol_type = other DNA

SEQ ID NO: 17261 - DNA, 120 bp, synthetic construct
  source 1..120: mol_type = other DNA
cttcaacatagtactgaaagtcctagccagagcaatcagataagagaaaggaagggcatccaaatcagtaaagaggaactcaaactgtcactatttgttgatgatatgattgtttacctt

SEQ ID NO: 17262 - DNA, 120 bp, synthetic construct; identical to SEQ ID NO: 5441
  source 1..120: mol_type = other DNA

SEQ ID NO: 17263 - DNA, 120 bp, synthetic construct
  source 1..120: mol_type = other DNA
caaaatatcaccatcattcttcacagaattagaaaaaaaaatcctaaaattcatatggaatggaaaaagagcccacatagccaaagcaagactaagcaaaaagaacaaatctggaggcat

SEQ ID NO: 17264 - DNA, 120 bp, synthetic construct
  source 1..120: mol_type = other DNA
cttacagccaactgatcttccacaaagcaaacaaaaacataatatggggaaaggacactcttttcaacaaatgtgctgggataattggctagtcacatgtaggagaatgaaactggatcc

SEQ ID NO: 17265 - DNA, 120 bp, synthetic construct
  source 1..120: mol_type = other DNA
caaggatttcatgcctaagaacccaaaaacaaatgcaataaaaacaaagataaatagttgggacttaattaaactaaagagctttttcacagccaaaggacagtcagcagagtaaacaga

SEQ ID NO: 17266 - DNA, 120 bp, synthetic construct
  source 1..120: mol_type = other DNA
agtgggctaaggacaggaatagacaattctcaaaagaagatatccaaatggccagcaaacatataaaaaatgctcaacaccactaatgatcagggaaatgcacatcaaaactacaatgtg

SEQ ID NO: 17267 - DNA, 120 bp, synthetic construct; identical to SEQ ID NO: 5442
  source 1..120: mol_type = other DNA

SEQ ID NO: 17268 - DNA, 120 bp, synthetic construct
  source 1..120: mol_type = other DNA
actacttagcaataaaaaggaatgaattaatggcatttgcaatgacctgaatgggattggagactattcttcttttttttttttttttttttttttttttgagacggagtctgtctctgt

SEQ ID NO: 17269 - DNA, 120 bp, synthetic construct
  source 1..120: mol_type = other DNA
atggctaatttttgtattttagtagatacagggtttcaccttgttggccaagctgggtttgaactgctgacctcaggtgatctgcctgcctcggtctcccaaagtgctgggattacaggt

SEQ ID NO: 17270 - DNA, 120 bp, synthetic construct
  source 1..120: mol_type = other DNA
acaatggactttgggggaagggtgggaggagagtgaggaataaaatactacaaatagggtgcagtgtatacttctcgggtgatgggtgcaccaaaatctcacaaatcaccactaaagaac

SEQ ID NO: 17271 - DNA, 120 bp, synthetic construct; identical to SEQ ID NO: 5443
  source 1..120: mol_type = other DNA

SEQ ID NO: 17272 - DNA, 120 bp, synthetic construct
  source 1..120: mol_type = other DNA
tggaggaatttagtttatagtttaagttggaagcaaagatgataatatccctccttgtttggggtgctaaaactgcctttgtaagacaaatgaaagaccataaaattaggattctgaaag

SEQ ID NO: 17273 - DNA, 120 bp, synthetic construct
  source 1..120: mol_type = other DNA
atatagatcctaagattggtcttaaagatgcttttcagacttttgtattctaccaaccgactgaccccacctggatttgggactcacaactcaactgatcctatacctccctccaaccct

SEQ ID NO: 17274 - DNA, 120 bp, synthetic construct
  source 1..120: mol_type = other DNA
taacttctaaaccttcaggaagactgatttaagcaataactccatcttccacgtggctggccttgtgttaattaaactggtttttttgtttgtttgtttgtttgttttttacctccgaac

SEQ ID NO: 17275 - DNA, 120 bp, synthetic construct; identical to SEQ ID NO: 5444
  source 1..120: mol_type = other DNA

SEQ ID NO: 17276 - DNA, 120 bp, synthetic construct
  source 1..120: mol_type = other DNA
ctccacctccctcaagctgttctccaagctggccttcagatttctcatggagtccaggtcgatctccaaggactggactgtatatctctgctccgtgagcgtcatctcagcagctccaac

SEQ ID NO: 17277 - DNA, 120 bp, synthetic construct
  source 1..120: mol_type = other DNA
atcttggcgaggtcctgagatttggggacatctacctccacggtcaacccagagatggcaatctgggcttgtaggccttttacttcctcttcttggttcttcttcaggaagagcagctcc

SEQ ID NO: 17278 - DNA, 120 bp, synthetic construct
  source 1..120: mol_type = other DNA
cactcgactctgaagtcaacagcagcaagtcgggcattgtcaatctgcagaacgatgcgggcattgtccacagtatttgatctgagcccccaggtcctccatggtcttgaagtaatttgt

SEQ ID NO: 17279 - DNA, 120 bp, synthetic construct; identical to SEQ ID NO: 5445
  source 1..120: mol_type = other DNA

SEQ ID NO: 17280 - DNA, 120 bp, synthetic construct
  source 1..120: mol_type = other DNA
gccgcgctgcagactggctgggaaccgtagctgggcgcctggacagagcccagggaccggtagttggtggagaaggtggagcgagtggtgaagctcttgctgtccggggaggagagcgag

SEQ ID NO: 17281 - DNA, 120 bp, synthetic construct
  source 1..120: mol_type = other DNA
tgcagggtgggggcaggaagaacctgtctggtgattacatgaccaatgattgtgagtgagacaaaggttttgtaagctactaatgctgataattaatcatgaaatttaagttgtgtaaag

SEQ ID NO: 17282 - DNA, 120 bp, synthetic construct
  source 1..120: mol_type = other DNA
ttgggcttggtgcctgcagtttaggttaatgtcaaggtcaagggtagtgtgtttttcaaaatgtatattgtgacacccttgtggcacatgaagttaattgagtggatcatgagtagaatt

SEQ ID NO: 17283 - DNA, 120 bp, synthetic construct
  source 1..120: mol_type = other DNA
tatattttttattatgggttccactaaaaaagtttgaaaaacagaatgggatatttagaaatgaaaaagtcaaggacctgggggagactaatggctgagggaatgcatgtccccctgcac

SEQ ID NO: 17284 - DNA, 120 bp, synthetic construct; identical to SEQ ID NO: 5446
  source 1..120: mol_type = other DNA

SEQ ID NO: 17285 - DNA, 120 bp, synthetic construct
  source 1..120: mol_type = other DNA
gagttccagaccagagtggccaaagcggtgaaaatccatctctactaaaaacacaaaaaattaggctgggcacagtggctgacacctgtaatcccagcgctttgggaggctgaggcaggc

SEQ ID NO: 17286 - DNA, 120 bp, synthetic construct
  source 1..120: mol_type = other DNA
aagatcgccccactgcactccagcctgggcaacagagcaagactctgtctaaaaaaaaaaaaatatatatatatatatatatacatatacacacacacacacacatatgtgtacatatat

SEQ ID NO: 17287 - DNA, 120 bp, synthetic construct
  source 1..120: mol_type = other DNA
tgttaaggagaggattactatcaagcacccccatcagctttgtaggcttcttttcactgggctccaaattcagtcttgctgactctggtaacttcaaaacattttagcatgcaatagcat

SEQ ID NO: 17288 - DNA, 120 bp, synthetic construct
  source 1..120: mol_type = other DNA
tctcctgcctcagcctcccaagtagctgggactacaggcgcccaccaccacgcccggctaattttttgtacttttagtagagaccaggtttcaccgtgttagccaggatggtcttgatct

SEQ ID NO: 17289 - DNA, 120 bp, synthetic construct; identical to SEQ ID NO: 5447
  source 1..120: mol_type = other DNA

SEQ ID NO: 17290 - DNA, 120 bp, synthetic construct
  source 1..120: mol_type = other DNA
tctcggctcactgcaagctccgcttcccgggttcacgccattctcctgcctcagcctcccgagtagctgggactacaggcgcccgccaccatgcccggctaattttttgtatttttagta

SEQ ID NO: 17291 - DNA, 120 bp, synthetic construct
  source 1..120: mol_type = other DNA
agtgtaattttgtctagttctgagttgtttttttgtttgtttgttttgttttttttgaggcggtgtctctcgctctgtcgcccaggctggagtgcagtggcctgatctcggctcactgca

SEQ ID NO: 17292 - DNA, 120 bp, synthetic construct
  source 1..120: mol_type = other DNA
catattagccaggatggtctccatctcctgacctcgtgatccgcccacctcggcctcccaaagtgctgggattacaggcttgagccaccgcactcagcctgagggagtgtaattttgtct

SEQ ID NO: 17293 - DNA, 120 bp, synthetic construct; identical to SEQ ID NO: 5448
  source 1..120: mol_type = other DNA

SEQ ID NO: 17294 - DNA, 120 bp, synthetic construct
  source 1..120: mol_type = other DNA
tgtgtcttcagttcttctgagtctgtttcctttattctaatacaagattaccaccaccgttttacatgagactttttccctcctcttccttctcctctttctgtatctttcctggattac

SEQ ID NO: 17295 - DNA, 120 bp, synthetic construct
  source 1..120: mol_type = other DNA
ctgaaatatgacctgagcactgagagctaagagtcctggagagaggacttttgacattttcccttttctatgcttcatcagccctgagggttgtctttctgtaattcatccaccaaaatg

SEQ ID NO: 17296 - DNA, 120 bp, synthetic construct
  source 1..120: mol_type = other DNA
ttcaagccattctcctgcctcagcctcccgagtagctgggattacaggcatgcgccaccatgtatttttagtagagatggggtttcaccatgttggccaggctggtctcgaacttccgac

SEQ ID NO: 17297 - DNA, 120 bp, synthetic construct
  source 1..120: mol_type = other DNA
gcttccacagaactggcaagaagagcttgcaaaaatacccgtcatactgacctctctgttcagaacacttttctgtctctccatagccttttagggaaagctcaaagtatttagtattgt

SEQ ID NO: 17298 - DNA, 120 bp, synthetic construct; identical to SEQ ID NO: 5449
  source 1..120: mol_type = other DNA

SEQ ID NO: 17299 - DNA, 120 bp, synthetic construct
  source 1..120: mol_type = other DNA
gatgtgattaaggttagggaacttgtgatggagagatgatcctaatcactagagtcttaaaagtggaaagaggaagcagaagagtagttcagggaggtgtgatctgaggacgccatccac

SEQ ID NO: 17300 - DNA, 120 bp, synthetic construct
  source 1..120: mol_type = other DNA
acagagactttgatccaacaactgcaaacaactgaattttgccaataatctgaatgagcagaaaacagattctcccttggggccaacagaaaggaatgcagcctgccaataccttgattt

SEQ ID NO: 17301 - DNA, 120 bp, synthetic construct
  source 1..120: mol_type = other DNA
tcttgaaatgccagccgttttactatttcttacaattctgtgaatagactgggcttacctgggtgattctgctccacatgatgtcagtaaggactccattcctctgaaggcttgattgag

SEQ ID NO: 17302 - DNA, 120 bp, synthetic construct
  source 1..120: mol_type = other DNA
gacccacagtgcctagccatggccttttcatgtggcttgggtttctcatggcatggtgactggattctgagagggagcatcccaagatttagcattccagaaaaccaagtcagaaggtgc

SEQ ID NO: 17303 - DNA, 120 bp, synthetic construct; identical to SEQ ID NO: 5450
  source 1..120: mol_type = other DNA

SEQ ID NO: 17304 - DNA, 120 bp, synthetic construct
  source 1..120: mol_type = other DNA
cctctgcctccagggttcaagcgattctcatgcctcagcctctcaagtagctgggattataggtgtgtgccaccacacctggctaatttttgtatttttagtgtgtgtcggtggcggggg

SEQ ID NO: 17305 - DNA, 120 bp, synthetic construct
  source 1..120: mol_type = other DNA
ctacaggcctcagccactgcttcatctttttactttggtccatgaacctttgattttctgctcaggtctacttgaactaggaactagtaattttcccaggcattcatacctttttagctt

SEQ ID NO: 17306 - DNA, 120 bp, synthetic construct
  source 1..120: mol_type = other DNA
tttcaggtagcacctcatccagtaagccattcttgttcagattaggtgcctgtattggtgatcttgtacacagtaccctgcccttacacctatggaagaacttaggagtaaatcttcact

SEQ ID NO: 17307 - DNA, 120 bp, synthetic construct
  source 1..120: mol_type = other DNA
acctcggcttactggaagctccgcttcccgggttcccaccattctcctgcttcagcctcccgagtagctgggactacaggtgcccaccaccacgcccggctaattttttgtatttttagt

SEQ ID NO: 17308 - DNA, 120 bp, synthetic construct; identical to SEQ ID NO: 5451
  source 1..120: mol_type = other DNA

SEQ ID NO: 17309 - DNA, 120 bp, synthetic construct
  source 1..120: mol_type = other DNA
tggcttccaccatggaaaaaattatgtatgcgtgaggacaagagctaaaaaacaagaaagaaaatgtctagagtcacttgtgaggctggaactgtggttttctttctttcctttctttct

SEQ ID NO: 17310 - DNA, 120 bp, synthetic construct
  source 1..120: mol_type = other DNA
tcttttcatgttctaatattataatgatgtgacaagaacttgtagaaccatcaggtccaaaagcatcaacaaccttgtcacttgcagcgtgggctgctgatcagcaacactgacctaacc

SEQ ID NO: 17311 - DNA, 120 bp, synthetic construct
  source 1..120: mol_type = other DNA
ctcaacacagtccttcactctttcccttattaaatttacagctgtttgtttaattgacctttttgtaaaggttccgaggacaacatagtaagggatgctcattcatctctctgccagtgc

SEQ ID NO: 17312 - DNA, 120 bp, synthetic construct; identical to SEQ ID NO: 5452
  source 1..120: mol_type = other DNA

SEQ ID NO: 17313 - DNA, 120 bp, synthetic construct
  source 1..120: mol_type = other DNA
caggtcaaactccccgtgttgggcgacggtgggaccgcgcctgcgagcaacgcctgcagttccgcccgggacatccgacgagacccggtctcttttaacttcccttttcgggatttcttt

SEQ ID NO: 17314 - DNA, 120 bp, synthetic construct
  source 1..120: mol_type = other DNA
tcagtcagtgggagccggaagaaactcgttagtgacttatcatcttggaaatttctccatgttgcactcttcctttccccaaacaacaagacagtagtctgttttgcattttgcaaatgc

SEQ ID NO: 17315 - DNA, 120 bp, synthetic construct
  source 1..120: mol_type = other DNA
ccaagtcagtttagcaagaacccccatatcatctatgtttaacctccatttctgatcaggctcctcattctccaccatcccccagatgattgatgtctgattaccttggcctgtcttcag

SEQ ID NO: 17316 - DNA, 120 bp, synthetic construct; identical to SEQ ID NO: 5453
  source 1..120: mol_type = other DNA

SEQ ID NO: 17317 - DNA, 120 bp, synthetic construct
  source 1..120: mol_type = other DNA
acttcataatctaagacagagatttggaaaaggtttgaacttccagctttttcaggaacttcccacataaaaacctgtacacaactattcttatcggattggataaaacacctaaagaga

SEQ ID NO: 17318 - DNA, 120 bp, synthetic construct
  source 1..120: mol_type = other DNA
tgactaaaataaaaatagtggcaacaaccaaatgctgatgaggctgtatacatgtaggtgggaatgtgaaatgtagctgttctggaaaacagttggcagtttcttaaaaagctaaatgtg

SEQ ID NO: 17319 - DNA, 120 bp, synthetic construct
  source 1..120: mol_type = other DNA
agctgaaaatgactcaaatgtctttcagcaggtgaatgttcaaactggtaaattcataccacagaatgctagtgagcgagaaataagaatgaactactgatgctgaacaacctagatgaa

SEQ ID NO: 17320 - DNA, 120 bp, synthetic construct
  source 1..120: mol_type = other DNA
gaaatgatgaaatcataaaagtgaaaaacagattactagttgccagaggttgaggcaggaacagtaggcaagtgggtgtggctgtaaaagggccaaaaggaatccttgtggtgatggaaa

SEQ ID NO: 17321 - DNA, 120 bp, synthetic construct; identical to SEQ ID NO: 5454
  source 1..120: mol_type = other DNA

SEQ ID NO: 17322 - DNA, 120 bp, synthetic construct
  source 1..120: mol_type = other DNA
aaattggagggatagggagctgaaagggaagagcaagagagtatggagaaaaataatggagagtcaagttgatacaggagatacaaagaaattgcttaggtagttagggcaaaagagtcc

SEQ ID NO: 17323 - DNA, 120 bp, synthetic construct
  source 1..120: mol_type = other DNA
aggctggcagctgcaccgatagaaaaggtctacctgggggtgaggcatgtccaccatgaggctccaccttcccttttttgttagcatgtgtacagtaagaaagaaatgggcaacatggag

SEQ ID NO: 17324 - DNA, 120 bp, synthetic construct
  source 1..120: mol_type = other DNA
agacaccatctccccactagctcatctgtaaaaccccctgcatttcaccgaatttcggcaacccatttttccaggacccctctctgtagcagagagatattttctttctttcgcctatta

SEQ ID NO: 17325 - DNA, 120 bp, synthetic construct; identical to SEQ ID NO: 5455
  source 1..120: mol_type = other DNA

SEQ ID NO: 17326 - DNA, 120 bp, synthetic construct
  source 1..120: mol_type = other DNA
ttttgttgtccaaagatagaggtttagacattctgtaatttgaagagaggcacgtaaggaggagagagatgaaagacacaaacatagagcaaaatggaatgggtagagggttcaaaagct

SEQ ID NO: 17327 - DNA, 120 bp, synthetic construct
  source 1..120: mol_type = other DNA
tgctggctgtctccctttcacagcgcagcagccacccctcccctcccccacctctagcaagtagccactttttcaacagcttaggcggctcctttttccaggaaacttcccttcagttca

SEQ ID NO: 17328 - DNA, 120 bp, synthetic construct
  source 1..120: mol_type = other DNA
caacaggaaaaccacaaaagaagaaaaacagctcctgtcttagctgattagccaaccttgcgaccttctaccattgtaacatgctctaccctaactgatcaatcaacttcgtgacactgt

SEQ ID NO: 17329 - DNA, 120 bp, synthetic construct; identical to SEQ ID NO: 5456
  source 1..120: mol_type = other DNA

SEQ ID NO: 17330 - DNA, 120 bp, synthetic construct
  source 1..120: mol_type = other DNA
gaacagaggtcgcaaataaaatgtaattagtattgctcaagattaaacttctttcagcacgtttgccttttcttcttttatctagtgagatgttgaaacccatacctagagttctgctac

SEQ ID NO: 17331 - DNA, 120 bp, synthetic construct
  source 1..120: mol_type = other DNA
gagtgtttctgtattgtagaaggaaaattccatatttgtattgccgtgggcacaaaaaaccgagcgctctcatgccgaaacccgggatcgaaccagggacctttagatcttcagtctaac

SEQ ID NO: 17332 - DNA, 120 bp, synthetic construct
  source 1..120: mol_type = other DNA
caggtactccgaaggaaccaaagacaaattaaaaaattatttcgttcttcaaatggctcaccactttatgcaaagaaaagcaagaagacaattacaaattgatgctacaatttattctcg

SEQ ID NO: 17333 - DNA, 120 bp, synthetic construct
  source 1..120: mol_type = other DNA
aggtcagtgaatacgagagcatgaccgtgcactaactcgtcggaaaagtagaagtcaactgtgtgcgtatgtgttgagttctcgcttcataaatatgttttaataaacctacttcagctt

SEQ ID NO: 17334 - DNA, 120 bp, synthetic construct; identical to SEQ ID NO: 5457
  source 1..120: mol_type = other DNA

SEQ ID NO: 17335 - DNA, 120 bp, synthetic construct
  source 1..120: mol_type = other DNA
agcgtagaccgagtgtccggcattgttctaagtaagcgctttaacatttttaactcaattgggtgattcagtaagcgggaaattccggagacaatccattaggagttagttgagattagc

SEQ ID NO: 17336 - DNA, 120 bp, synthetic construct
  source 1..120: mol_type = other DNA
ctactctatcttcctcggatttctctgtaagtttcacgctgctccaactgggcgctaggggatagccctagaaatacctacacagtaatttaatattctgggccaaagcagtttcaggac

SEQ ID NO: 17337 - DNA, 120 bp, synthetic construct
  source 1..120: mol_type = other DNA
tgagaaacaggcaaacaatgaattcagcaccatctctgaatgcacatttggtaaatttaccgagagctactggagaaaaagcagactttttgtttctctcctgacaaggtttggtgaccc

SEQ ID NO: 17338 - DNA, 120 bp, synthetic construct; identical to SEQ ID NO: 5458
  source 1..120: mol_type = other DNA

SEQ ID NO: 17339 - DNA, 120 bp, synthetic construct
  source 1..120: mol_type = other DNA
gtagctgggattaaaggcacgtgccaccactccaggttaatttttgtatttttagtagagacgcggtttcaccatgttggccaggctggtctcgaactcctgatctcaagagacccaccc

SEQ ID NO: 17340 - DNA, 120 bp, synthetic construct
  source 1..120: mol_type = other DNA
tctcttccctggctccatatattcacagtttccaaaacttccttgagatgggacactcttttgtcatcttgtcagttctgtccttgaattaataaactttgacacatacataagatcaat

SEQ ID NO: 17341 - DNA, 120 bp, synthetic construct
  source 1..120: mol_type = other DNA
tgatcagttcttgaaaagcaccctcttttcgtgatatcacacgttgtctcctctatgtgcagcaagaatctcttgcttcattagtttttatgcctctgctttcagaaaacagtctggttg

SEQ ID NO: 17342 - DNA, 120 bp, synthetic construct; identical to SEQ ID NO: 5459
  source 1..120: mol_type = other DNA

SEQ ID NO: 17343 - DNA, 120 bp, synthetic construct
  source 1..120: mol_type = other DNA
aacagctagggtcaaggaatcaatctgcaaatattcagagccagtaggcttgtactacactagtcactatggaaaatgaaaaatgaccaagacagaaatctcacctcttaacacccccca

SEQ ID NO: 17344 - DNA, 120 bp, synthetic construct
  source 1..120: mol_type = other DNA
tattaatattatcatcatcatcattcttctcaccgtacttggggaatgaaggagacagatactgtgagtaagttttccttttttttttttttttttttttttttagacagagtctcgctc

SEQ ID NO: 17345 - DNA, 120 bp, synthetic construct
  source 1..120: mol_type = other DNA
cgcccggctaattttttgtatttttagtagagacggggtttcaccgtgttagccaggatggtctcgatctcctgacctggtgatccgcccgcctcggcctcccaaagtgctgagattaca

SEQ ID NO: 17346 - DNA, 120 bp, synthetic construct; identical to SEQ ID NO: 5460
  source 1..120: mol_type = other DNA

SEQ ID NO: 17347 - DNA, 120 bp, synthetic construct
  source 1..120: mol_type = other DNA
ggatggcatcaagatttcaatttcaagctttctggtcatgcacagtaaagctggaattagagtctcttacgtatggcagttgttgacaagtccgtacaggtacctaagtgcttcccagaa

SEQ ID NO: 17348 - DNA, 120 bp, synthetic construct
  source 1..120: mol_type = other DNA
gcctatcaaacaaagcaaaccggttggactgaagctgtgggatcgggactgaaatagaaccagcgagaaaggcagtcctcctcgattcctagagagaacacattcagccagcagttggat

SEQ ID NO: 17349 - DNA, 120 bp, synthetic construct
  source 1..120: mol_type = other DNA
caggacaaaaaagcgagacccccgtttctaccaaaaaggggggggggtgggcggggggaagagagagagagagagaaaggaaaagaaagagaaagaaaagaaagaaaaactaggcgcggt

SEQ ID NO: 17350 - DNA, 120 bp, synthetic construct
  source 1..120: mol_type = other DNA
ctctgatcgtggcagagcgaggccctggctcaaatacatacatactttgttctgactttgtgtgcccttactctttcctcaggtgcacgcttgggctcgttactgctcagaattttagaa

SEQ ID NO: 17351 - DNA, 120 bp, synthetic construct; identical to SEQ ID NO: 5461
  source 1..120: mol_type = other DNA

SEQ ID NO: 17352 - DNA, 120 bp, synthetic construct
  source 1..120: mol_type = other DNA
tcctcagtgcattcgtgaatttctccaagcaggcctttccagatcgacactaagttccaatcccgagctgtgtgacccagcaccaattcagtcacgatgatgacttgcaattgcttaatc

SEQ ID NO: 17353 - DNA, 120 bp, synthetic construct
  source 1..120: mol_type = other DNA
ttcctgatgttcactggttgatatcgtcactttcaaataatttctcccatttttctgttttgttttcaccctcctagtttaccgtgcaggattgcaaacaccagagagaaaatcagtctc

SEQ ID NO: 17354 - DNA, 120 bp, synthetic construct
  source 1..120: mol_type = other DNA
tctgtgtccttgaaggttaaagctgtcaaaaagtggtctccctcaagttcggccatcttgctctcagagatctagaactggtaggagaatatagccttgatagtggagaggaaactattg

SEQ ID NO: 17355 - DNA, 120 bp, synthetic construct; identical to SEQ ID NO: 5462
  source 1..120: mol_type = other DNA

SEQ ID NO: 17356 - DNA, 120 bp, synthetic construct
  source 1..120: mol_type = other DNA
aggttgcagtgagccgagatggcgccattgcactctagcctgggcgacggactgagacttcgtctcaaaaaagggagtgactgtgttgcttttgctttcttggaaatcttttttcttagt

SEQ ID NO: 17357 - DNA, 120 bp, synthetic construct
  source 1..120: mol_type = other DNA
aaaaggccaggataggattttactctaaagtttctagagggagctggacgcagcccacaccttgattttggcccacatactgattgtggatttctggccttcagaaatacatatctgttg

SEQ ID NO: 17358 - DNA, 120 bp, synthetic construct
  source 1..120: mol_type = other DNA
tgtaagacagccgggcgcggtggctcacgcctgtaatcccagcactttgggaggcgcggtggctcacgcctgtaatcccagcactttgggaggcgcggtggctcacgcctgtaatcccag

SEQ ID NO: 17359 - DNA, 120 bp, synthetic construct; identical to SEQ ID NO: 5463
  source 1..120: mol_type = other DNA

SEQ ID NO: 17360 - DNA, 120 bp, synthetic construct
  source 1..120: mol_type = other DNA
aactttctttattatgatcttatttgtcataattttttgcacaatgcgtttttattttaggactcagtcaaaattttgggccaaggagaccgacgcgctgtcgcctgcactaagagaaac

SEQ ID NO: 17361 - DNA, 120 bp, synthetic construct
  source 1..120: mol_type = other DNA
gcaacgaacaactttgtcaatgcattgcattatactatagcagcaactatacttttaaatgattcgaatcttgaggtttcaaactgaaccgtcttgtgccttttgcccggcgggcatttc

SEQ ID NO: 17362 - DNA, 120 bp, synthetic construct
  source 1..120: mol_type = other DNA
tcagcggcgtcggggctccagccaggcgtcaccttccacagcgaacctgcgaaccacagcgtcccctgggggtctccgtccgcgtggccgcttcctcttacatcggtgacgcaagggaag

SEQ ID NO: 17363 - DNA, 120 bp, synthetic construct
  source 1..120: mol_type = other DNA
ggagctccagagaagaggtcatggggagaaggcacaccttaaacgccccggggtggggggggggggcgacattccctaatgggaaaaaagacacaccttaaacgcagtagagggcgacat

SEQ ID NO: 17364 - DNA, 120 bp, synthetic construct; identical to SEQ ID NO: 5464
  source 1..120: mol_type = other DNA

SEQ ID NO: 17365 - DNA, 120 bp, synthetic construct
  source 1..120: mol_type = other DNA
gtgaggtggcacgatctcggctcactgtaacctccgcctccccggttcaagccattctcctgcctcagtctcccgagtggctgggattacaggtgcgcgccaccacgccctggctaattt

SEQ ID NO: 17366 - DNA, 120 bp, synthetic construct
  source 1..120: mol_type = other DNA
gcacgcagcctgaaggattaatttatgtttggaatcagctgctgttcttcctccagcctctctgtagtgtgctcacttcacacttggaaccatagttatatggtatagagaagagacaac

SEQ ID NO: 17367 - DNA, 120 bp, synthetic construct
  source 1..120: mol_type = other DNA
ctcctcggagcagttctctctgcatacttctggtctgtctctcattctctagacctcagcttggaagttgtttctccttggaagccttccctcatctccttctcttcctctttccagctt

SEQ ID NO: 17368 - DNA, 120 bp, synthetic construct; identical to SEQ ID NO: 5465
  source 1..120: mol_type = other DNA

SEQ ID NO: 17369 - DNA, 120 bp, synthetic construct
  source 1..120: mol_type = other DNA
aggggcgttttgccatgttggccaggctggtctcaaactcctgacctcaagtgatcctcccacctgggactccccaagtgctgggattacaggtgtgagccaccacgcctgaccaccttt

SEQ ID NO: 17370 - DNA, 120 bp, synthetic construct
  source 1..120: mol_type = other DNA
tctcactacattcatgaatgataatagcctgtaattttcttttttaaaaaatttccttgtgttgtttgtttttcctcatcgttccctaatggtttggtattaaggttatacaggcctcat

SEQ ID NO: 17371 - DNA, 120 bp, synthetic construct
  source 1..120: mol_type = other DNA
tggtatcagactattcagatcttatatttttttcctgtactagttttagaaacaagagtcttcctaaggaaatataccagatgaacctggaaaatcttttcaccagaaagcaaggaggct

SEQ ID NO: 17372 - DNA, 120 bp, synthetic construct; identical to SEQ ID NO: 5466
  source 1..120: mol_type = other DNA

SEQ ID NO: 17373 - DNA, 120 bp, synthetic construct
  source 1..120: mol_type = other DNA
ctctgtcacccaggctggagtgtggtggcacaatcacggctcactgcagctttgacctcccaagctcgtctcccgagtagctgggaccacagtcatgcaccaccatgcctggctaatttt

SEQ ID NO: 17374 - DNA, 120 bp, synthetic construct
  source 1..120: mol_type = other DNA
tgcctggcttggttttttttaatgttaagaaaaaatggcattagagaaaaatttgaacagcgaatgaatctttgatgatgttgccaaatagataattttgtttaggtgtgataactgtac

SEQ ID NO: 17375 - DNA, 120 bp, synthetic construct
  source 1..120: mol_type = other DNA
tgggactacagcataggccgtcgtgcccctggctctattattagtttgttagttagtttgtttgtttgtttatttatttatttatttattttgagactgagtcttgctctgtcgcccagg

SEQ ID NO: 17376 - DNA, 120 bp, synthetic construct
  source 1..120: mol_type = other DNA
atttttgtatttttagtacaggcggggtttcaccatgttggccaggctggtcttgaactcctgacctcaggcaatccatccacctcagcctcccaaaagtgctggaattacaggtgtgag

SEQ ID NO: 17377 - DNA, 120 bp, synthetic construct; identical to SEQ ID NO: 5467
  source 1..120: mol_type = other DNA

SEQ ID NO: 17378 - DNA, 120 bp, synthetic construct
  source 1..120: mol_type = other DNA
caagcgattctcctgcctcagactctgagtagctgggattacgggcaagcgccaccatgcctggctaatttttgcatttttagtagagacagggtttctccatattggtcaggctggtct

SEQ ID NO: 17379 - DNA, 120 bp, synthetic construct
  source 1..120: mol_type = other DNA
caatacattttttttaatagaggaggactataaaacctatgggaagctctgatggcacgactatgacttgctgatgttcactacaggttatctggctaggccacttgctgagaaactcct

SEQ ID NO: 17380 - DNA, 120 bp, synthetic construct
  source 1..120: mol_type = other DNA
atctttctgggagataaggaaagtaggctggaggcgttgacattcagtatgctcctttttcaaatggaattcctgtcctccatgtgtctagcccacatatcctttgtttaaccttcttca

SEQ ID NO: 17381 - DNA, 120 bp, synthetic construct
  source 1..120: mol_type = other DNA
gactctgcttgcttcctaaatagcctctgacagactctcctcgttttagtctattcattctcatttccaggggtacatggtgccaccaattcttgagtcgcttaaagattctatgatgta

SEQ ID NO: 17382 - DNA, 120 bp, synthetic construct; identical to SEQ ID NO: 5468
  source 1..120: mol_type = other DNA

SEQ ID NO: 17383 - DNA, 120 bp, synthetic construct
  source 1..120: mol_type = other DNA
atccttttttcagtttccaaaattttgtagttgcctcttctgccattcttcctgattatgaatggttttactgtagcattagtgtagttctgagggggagcaataccaaatacacgtagt

SEQ ID NO: 17384 - DNA, 120 bp, synthetic construct
  source 1..120: mol_type = other DNA
ttgtgtttgcacgtggaatgtaattcgatttaaaaagtgagttttacctggtgatttttgtatgtaaattataacttagactaactcttgtttggtaactcttcagaattagaactacag

SEQ ID NO: 17385 - DNA, 120 bp, synthetic construct
  source 1..120: mol_type = other DNA
tctcctaaatgtacagatgtcctgtagcttctacttgtggattgtaattctattctgggatagttgcagaacaagattaacccactgttcataaagtagtccttcagaattttcaagaca

SEQ ID NO: 17386 - DNA, 120 bp, synthetic construct; identical to SEQ ID NO: 5469
  source 1..120: mol_type = other DNA

SEQ ID NO: 17387 - DNA, 120 bp, synthetic construct
  source 1..120: mol_type = other DNA
atgaacccccgtgcctgactcttatctgtgatttctaaacctgttctctccctgcctcccttttcactttgaatcttagcaatcctgatacaatatggagaagtaccattctagctttat

SEQ ID NO: 17388 - DNA, 120 bp, synthetic construct
  source 1..120: mol_type = other DNA
gaaagatgtggtgcacgcatatgggaattgcctaggaaagcctgagcacagaatttactagttacgtgatcctgggcaagtttgttaatctttctgtgcctcaaattcctgatctcatag

SEQ ID NO: 17389 - DNA, 120 bp, synthetic construct
  source 1..120: mol_type = other DNA
aaatgtgctcactgaaaaaatagtgaataagaaggtaaaggacaatgtctttggggaatctcacaattaagggtcaggaaatcaggaataactaatataagagacagaaggaccagccta

SEQ ID NO: 17390 - DNA, 120 bp, synthetic construct
  source 1..120: mol_type = other DNA
aacagtcactggagagagggatttcctactcccatcaagttcatgggtactccatacttgatgttttcttttcttatgtccagtaagatttgagctcactctaaaagcttttccacattc

SEQ ID NO: 17391 - DNA, 120 bp, synthetic construct; identical to SEQ ID NO: 5470
  source 1..120: mol_type = other DNA

SEQ ID NO: 17392 - DNA, 120 bp, synthetic construct
  source 1..120: mol_type = other DNA
tggattctctgatggatggtaaggcagtgcttatcttggaaggttttcccacaatccctgcattgatagggcttctcccctgtatgctctcgttcatgagccctgcgcttacagttatga

SEQ ID NO: 17393 - DNA, 120 bp, synthetic construct
  source 1..120: mol_type = other DNA
gatgctgaagtcttttccacactggggacacccatagtgtttctcccgagtatggattcgtttgtgtttgcttaggtctgagctccgactgaaggcccttccacacttgctgcactcata

SEQ ID NO: 17394 - DNA, 120 bp, synthetic construct
  source 1..120: mol_type = other DNA
aagggaatgcttaaactggaaggccttcccacagcagttacatttgtaaggcttctccccggtgtggataagctgatgcatacagagacggttcctggtcttgaaggccttcccacagtc

SEQ ID NO: 17395 - DNA, 120 bp, synthetic construct; identical to SEQ ID NO: 5471
  source 1..120: mol_type = other DNA

SEQ ID NO: 17396 - DNA, 120 bp, synthetic construct
  source 1..120: mol_type = other DNA
ggtcacttcctcagagccttctttctcttctctcagtttctcccttatagatgtttcccattgattctctaatttgacatcctgaacacaaacttctctaaccttaggatcccgggaatc

SEQ ID NO: 17397 - DNA, 120 bp, synthetic construct
  source 1..120: mol_type = other DNA
atacaaatgtcagagggaaggaaataagtgagatgggaggcgtgaagcaatgttaagctgtttgaagagtaaataacttttccatgctggaaaaattactaacgttgtggccaaaagtca

SEQ ID NO: 17398 - DNA, 120 bp, synthetic construct
  source 1..120: mol_type = other DNA
acctagtcatctaagccacaaaacaaaataatcttcaactctgtctcccttgtatttacccagctaacattttacaaattctacctgtgaagagagttacagaggaggtgctgaaatgct

SEQ ID NO: 17399 - DNA, 120 bp, synthetic construct; identical to SEQ ID NO: 5472
  source 1..120: mol_type = other DNA

SEQ ID NO: 17400 - DNA, 120 bp, synthetic construct
  source 1..120: mol_type = other DNA
aacctgatggttttgagtctcttctagggcctgacacatagctgcccttaggtcccatgacacatcctgaataataaataaattcatgtttttctgcttaagctagcttgggttaatttc

SEQ ID NO: 17401 - DNA, 120 bp, synthetic construct
  source 1..120: mol_type = other DNA
ccagtgcattctcactaattgctatatccctcaaacatcctttaccctgaatcccttctaatccatcctctgcactgcttccagattattctctctgaaaatcaagtctaatcatgtcac

SEQ ID NO: 17402 - DNA, 120 bp, synthetic construct
  source 1..120: mol_type = other DNA
agttaataaatcttaatacctgtgtgaacttgggaggatgacttcacttctcctttgcctcagttgctttatctaaatgagttaatgtatgtaaagcacatgccacactgaagtacttta

SEQ ID NO: 17403 - DNA, 120 bp, synthetic construct; identical to SEQ ID NO: 5473
  source 1..120: mol_type = other DNA

SEQ ID NO: 17404 - DNA, 120 bp, synthetic construct
  source 1..120: mol_type = other DNA
ctcactgcaacctctgtctcctgggttcaaatgattctccggcctcagacctcccaagcagctgggattacacccagcatgcaccaccacacccagcatgcaccaccacacccagctaat

SEQ ID NO: 17405 - DNA, 120 bp, synthetic construct
  source 1..120: mol_type = other DNA
ctgtgcccagcctctgagccttttttgagggccaaattgcaaaaatctattagataggttgcaaagaaccaattagataataacagaataattgcccaaatagtttgtcactgtttcaat

SEQ ID NO: 17406 - DNA, 120 bp, synthetic construct
  source 1..120: mol_type = other DNA
tctctattactcacctgggtaggagcagcttagggactccctgtcctgtggatcctgcacacaggggtctacttctcgctccagatgagagattaaaggaggtttaggaaatggaaatcc

SEQ ID NO: 17407 - DNA, 120 bp, synthetic construct; identical to SEQ ID NO: 5474
  source 1..120: mol_type = other DNA

SEQ ID NO: 17408 - DNA, 120 bp, synthetic construct
  source 1..120: mol_type = other DNA
aacaccccataaaaaaatgagaggcttgaggaagcaagaacccagggaaaacagaaggtaaatgtctccttttaactcattccaaatcagaaaacagcaactaggttagccaaaaaatta

SEQ ID NO: 17409 - DNA, 120 bp, synthetic construct
  source 1..120: mol_type = other DNA
aataaaaaaagaaggtagaaagcattaagtgtagggaaggtccttaccaagtgataccatgttcccataattttccaacatcacatccttatagagatgcctttgagcgtaggtcagaca

SEQ ID NO: 17410 - DNA, 120 bp, synthetic construct
  source 1..120: mol_type = other DNA
gaaaggaatttgcaaggaggaggtttatagaagtgaaaggctcttcccttttggtgggtatgtacaaatgagatgaaagggagcatggggttttgatagcaaaaaataatgaaagagaaa

SEQ ID NO: 17411 - DNA, 120 bp, synthetic construct; identical to SEQ ID NO: 5475
  source 1..120: mol_type = other DNA

SEQ ID NO: 17412 - DNA, 120 bp, synthetic construct
  source 1..120: mol_type = other DNA
tcctcaaatgtagaagcttctgcagctctaacctagggctttaggctactgccttacagtatccttcctcttcattatttttctagtctcaacttccagtgttgggcatcaggccctggc

SEQ ID NO: 17413 - DNA, 120 bp, synthetic construct
  source 1..120: mol_type = other DNA
aatcacttattccctggttttgaatagaccttcttcctgtatttgaatactgaagtcatttcttccaaaatacttggggtagaaggagggtgaaaaagagtgtgtgcatgcacgcgtatg

SEQ ID NO: 17414 - DNA, 120 bp, synthetic construct
  source 1..120: mol_type = other DNA
tagagaagaatcattcttcccgattttgcacatttttcctactaattccctagtactgagttatcctccctatgtcaatatagtatagcacacagagcattttaaaatgcaaaagaaact

SEQ ID NO: 17415 - DNA, 120 bp, synthetic construct
  source 1..120: mol_type = other DNA
gatcttgcctcactgcaagctctacctcctgggttcacaccattctcctgcctcagcctcccaagtagctgggactacaggtgcccaccaccatgcctggctaattttttgtatttttag

SEQ ID NO: 17416 - DNA, 120 bp, synthetic construct; identical to SEQ ID NO: 5476
  source 1..120: mol_type = other DNA

SEQ ID NO: 17417 - DNA, 120 bp, synthetic construct
  source 1..120: mol_type = other DNA
tacgaaaaaccgatttagaaccaagctgatttcttttcactgaaattgcccaagaagactcttctttagtttcagctacttatagcttttgaccaagaccaaggctgcatctcagtcatg

SEQ ID NO: 17418 - DNA, 120 bp, synthetic construct
  source 1..120: mol_type = other DNA
tctggatggcacacaactcacagcagacacatgtttgtgccttgttaatgttacataacagttcttttccttataacattaacacacttaaagctctcaattggatgttttcaaccatta

SEQ ID NO: 17419 - DNA, 120 bp, synthetic construct
  source 1..120: mol_type = other DNA
tatccatttatctattcctctctctgttcattaatgtattttattttttgaatcatttcaaagtaagttgaaagcatcagtacacctcacccctaaacagtttaacatgtatatcattaa

SEQ ID NO: 17420 - DNA, 120 bp, synthetic construct; identical to SEQ ID NO: 5477
  source 1..120: mol_type = other DNA

SEQ ID NO: 17421 - DNA, 120 bp, synthetic construct
  source 1..120: mol_type = other DNA
ctacagaatttctgaccctgaaaatccaccacagcagatttcacgaccatttgagaaaaagaagactgggagactcgtgcatccgagtttagcaatagctattattttttatttctaaat

SEQ ID NO: 17422 - DNA, 120 bp, synthetic construct
  source 1..120: mol_type = other DNA
ttttttgcaggtagcatatactaaaaagcttacttttgaatgtgcctactcctctgtccaaaagtctatgcctttctgggtttgattttatgactcctgaattgctatatactatctcct

SEQ ID NO: 17423 - DNA, 120 bp, synthetic construct
  source 1..120: mol_type = other DNA
aagcaattcttctgcctcagcctcctgagtaactggggttacaggtgcattacaccacacctggctaatttttgtatttttagtagagatggggtttcaccatattggccaggctggtca

SEQ ID NO: 17424 - DNA, 120 bp, synthetic construct; identical to SEQ ID NO: 5478
  source 1..120: mol_type = other DNA

SEQ ID NO: 17425 - DNA, 120 bp, synthetic construct
  source 1..120: mol_type = other DNA
ttataccacaagttttataagtgtaaaatatgtgcaaatatgtacgctatttaccatatatctcaggttatacaaacagtaaatgcctgactgcattgattctttctgataaattgcttt

SEQ ID NO: 17426 - DNA, 120 bp, synthetic construct
  source 1..120: mol_type = other DNA
tccaagcctcgtatagaaacaaaataagactttctataaatgctcattaatgaacagatttttgggccccagtgtggcattttccacccactctgtgtccttactacattctcagctgcc

SEQ ID NO: 17427 - DNA, 120 bp, synthetic construct
  source 1..120: mol_type = other DNA
cttggtggtcctgaactctcatccaacagcacaacctattgcaagacacagaatgaattcaggaaagttatgaaggtgagaaaaatacataggaagatgcaagcaaccatacaggtctat

SEQ ID NO: 17428 - DNA, 120 bp, synthetic construct
  source 1..120: mol_type = other DNA
aaataatggactcagttcctaataccttatgaaaactagaaatggcatctacaactacaaagctttaatgatcaccaggtcaagcagcaaaaacagtatctaggaggagacacctccaac

SEQ ID NO: 17429 - DNA, 120 bp, synthetic construct; identical to SEQ ID NO: 5479
  source 1..120: mol_type = other DNA

SEQ ID NO: 17430 - DNA, 120 bp, synthetic construct
  source 1..120: mol_type = other DNA
tggatttggggttcattagcaacactaaaccgctgtgatctcacatcttgtttccctgcatatttggtgaagggaaaagaggaatgtgaccacaggaaaaaatagggagtcactgagaac

SEQ ID NO: 17431 - DNA, 120 bp, synthetic construct
  source 1..120: mol_type = other DNA
ttctaactggtctcctttcttcaatccttgccttcctcctttctttttttttttttttttttttttttttgagacggagtctcgctctgtggcccaggcgggagtgcagtggcgcaatct

SEQ ID NO: 17432 - DNA, 120 bp, synthetic construct
  source 1..120: mol_type = other DNA
aaacctgaagtccttaccgaggtatacaaggccctactgaatgtgcccgtgacttctaacttcctctcctgctcacccaaaataagagctgaagtcttaagagtggcatacaagtctaca

SEQ ID NO: 17433 - DNA, 120 bp, synthetic construct; identical to SEQ ID NO: 5480
  source 1..120: mol_type = other DNA

SEQ ID NO: 17434 - DNA, 120 bp, synthetic construct
  source 1..120: mol_type = other DNA
ttaatatatacattgtttacggtggttctaccttcgctaaaatctaggctcttaggctccatgagggcaggaatttttgtcgtcttgttcacagttgtattctcaacgcctaaaacagcg

SEQ ID NO: 17435 - DNA, 120 bp, synthetic construct
  source 1..120: mol_type = other DNA
aaaaaaaaaaaaaaatgggtcacgagcccctgggaggaggtagggcaaatgggcgggaaatgctcattttggggaatggcttcgagggaggaaaccgcagccgactccctcctcaaatct

SEQ ID NO: 17436 - DNA, 120 bp, synthetic construct
  source 1..120: mol_type = other DNA
gcacagaccttcccgccggtactctccccaagaaatgagaaacagaaatatacagaagctccacttcctagtccgccaattatcatttccggtgattttctaggaaaggcgtcaactctc

SEQ ID NO: 17437 - DNA, 120 bp, synthetic construct; identical to SEQ ID NO: 5481
  source 1..120: mol_type = other DNA

SEQ ID NO: 17438 - DNA, 120 bp, synthetic construct
  source 1..120: mol_type = other DNA
ataaaattctgccacacttgtttcatccatctccattttttcttgctgaaacgttttaaagcaaaccccaaatatcttactttcaacttcattatgcatttattttaaaaaggatatttt

SEQ ID NO: 17439 - DNA, 120 bp, synthetic construct
  source 1..120: mol_type = other DNA
ttcattcaagatctaaagttccagtatttaatttgggcatgtgtcttaattcttttaaaattcacatctgaactagttcctccttccatcctcctcttcgtcttcccctcatatagtcaa

SEQ ID NO: 17440 - DNA, 120 bp, synthetic construct
  source 1..120: mol_type = other DNA
ctctagcctcatatttcctgtaaaacttgatgttacctctaaaggtttgattagagttaggtttaactttgttagtaagaatccttaggtggtgctatgtactttttgccacacatcagg

SEQ ID NO: 17441 - DNA, 120 bp, synthetic construct; identical to SEQ ID NO: 5482
  source 1..120: mol_type = other DNA

SEQ ID NO: 17442 - DNA, 120 bp, synthetic construct
  source 1..120: mol_type = other DNA
cttaggtgccatcaatggtaaccaccttacaaaatgtgatagccatcctataaaatggctagctgggccctactgtccagcattcacatccttgtgtagcccccttccacattgtaccag

SEQ ID NO: 17443 - DNA, 120 bp, synthetic construct
  source 1..120: mol_type = other DNA
ggcgcgatcttggctcactgaaatcgccacctcccgggttcaagtgagtctcctgcctcggtttcccaagtagctgggactataggcatgcatcagcatgcccagctaatttttatattt

SEQ ID NO: 17444 - DNA, 120 bp, synthetic construct
  source 1..120: mol_type = other DNA
gatgctacattatctctaatattaggttataaaataatctacggcttctgttttggtctgtttttctttcgtagatcacacacccttgggaaagccaaatgccatgttgtaaggagaggc

SEQ ID NO: 17445 - DNA, 120 bp, synthetic construct; identical to SEQ ID NO: 5483
  source 1..120: mol_type = other DNA

SEQ ID NO: 17446 - DNA, 120 bp, synthetic construct
  source 1..120: mol_type = other DNA
gttttctctttttgtgcacaacatcaagtgttctgcatcagttgataactaatgcaaaattttgttttctctttttgcatatcaatatgaacacatggatttaaaaaaatacattcaatg

SEQ ID NO: 17447 - DNA, 120 bp, synthetic construct
  source 1..120: mol_type = other DNA
tttttcctttatggcaagataaatgtttcagacacatgtcatacatttcctgcctcagacctggaatcagccatttttccaaggtgttctggtgctttcagtgggggcaaggattgcata

SEQ ID NO: 17448 - DNA, 120 bp, synthetic construct
  source 1..120: mol_type = other DNA
cccaccctagtttgtctatctgcaaaatgggtccagtgtaaatacctaaatttcagagccgttataaggataaattagttaatacgtggaaatcacttaacacattgcctggcatcaaat

SEQ ID NO: 17449 - DNA, 120 bp, synthetic construct; identical to SEQ ID NO: 5484
  source 1..120: mol_type = other DNA

SEQ ID NO: 17450 - DNA, 120 bp, synthetic construct
  source 1..120: mol_type = other DNA
ttacttaatttctctgtgtcttaattgctgcatctgtaaaatagtgaaaacaaatcccttatgcacaaattcattgtgagagggttaatatacatatattgtatatgaaaatgcctggcc

SEQ ID NO: 17451 - DNA, 120 bp, synthetic construct
  source 1..120: mol_type = other DNA
atggaaattggcattttaagtagaatgatccctaaggatactaagtctataattttgtaaaggactttagtgaatactgtgcaaaggcactgtgcaaggagctacaggagagatgctatg

SEQ ID NO: 17452 - DNA, 120 bp, synthetic construct
  source 1..120: mol_type = other DNA
accctttgctgttataaagatacttccacagtagactgttagcatatactttaataatctagttggattaagagacatttatttacattatttcctctaggctaaccacaatcgctcata

SEQ ID NO: 17453 - DNA, 120 bp, synthetic construct
  source 1..120: mol_type = other DNA
accttcttactttttgaaaatttggatatttgtcagacttgggcatttgttgcactactcaaaaatgggcttcaggggtcctgtggccaatcctcctgaactttagtatgctttaagctg

SEQ ID NO: 17454 - DNA, 120 bp, synthetic construct; identical to SEQ ID NO: 5485
  source 1..120: mol_type = other DNA

SEQ ID NO: 17455 - DNA, 120 bp, synthetic construct
  source 1..120: mol_type = other DNA
ctactcctcaccaattccttcccccttccttcccaggttaactactatcttgattttgatgttattattcccatgcatgttcacatatttttagtacatacgtgggtagccacaaatatt

SEQ ID NO: 17456 - DNA, 120 bp, synthetic construct
  source 1..120: mol_type = other DNA
aggggttactatgtaatttgtactcaactttacatgtagttttgagatttatccttcatgaaaaatgtggctctagctcatccattttaactgccatagacaggtcttcccattttcctt

SEQ ID NO: 17457 - DNA, 120 bp, synthetic construct
  source 1..120: mol_type = other DNA
ttttcttggaattttcccttctaaaagggtaatttcccataatttttggtagaaagtttatattctaatatgggaaagaacaatctaaaaagtatttactatggtacatagaggaaactt

SEQ ID NO: 17458 - DNA, 120 bp, synthetic construct; identical to SEQ ID NO: 5486
  source 1..120: mol_type = other DNA

SEQ ID NO: 17459 - DNA, 120 bp, synthetic construct
  source 1..120: mol_type = other DNA
ggacatctctgtactttcagctcaattttgctgtgaacctaaaactgctctaaaagataaaatctagtaaaaaaagtatttattacttccccaaacttttaaatatatcttttgtgttta

SEQ ID NO: 17460 - DNA, 120 bp, synthetic construct
  source 1..120: mol_type = other DNA
cttgaaaatacagaatacattacttataacgtatgcttgttggccctcatgatcctaaaagttatagcacatttaaatgtatgtgacttatggttctttttaaaataaagctactgagaa

SEQ ID NO: 17461 - DNA, 120 bp, synthetic construct
  source 1..120: mol_type = other DNA
aatgtacaaaacggttaaagatctctgccccgtggagcttatattcaagtaattctaattgactcgtgctttcattttctttgtttttctctttgtatactgaagaggataaatttcata

SEQ ID NO: 17462 - DNA, 120 bp, synthetic construct; identical to SEQ ID NO: 5487
  source 1..120: mol_type = other DNA

SEQ ID NO: 17463 - DNA, 120 bp, synthetic construct
  source 1..120: mol_type = other DNA
gcggggaggtgggtagggagggtcccgccagcagaggcatcttatttttaacctcttctcggctgtttttctctcgtccatttgctctcctcctttaagccatcctttaatattaaacat

SEQ ID NO: 17464 - DNA, 120 bp, synthetic construct
  source 1..120: mol_type = other DNA
atcattatcccaatttttagataggcctggagaagataataaacttgccaacagtgtcacagctggtaagttgagggtgggaaaccccggcctaacacatatattttctttttatgttct

SEQ ID NO: 17465 - DNA, 120 bp, synthetic construct
  source 1..120: mol_type = other DNA
cactttgaaccctttctattaataccttgcagtgggcagagactcatccttatagggatttgtatgtattccaggtataattttgcttccctgtctccaatgcccctgctaatactaccc

SEQ ID NO: 17466 - DNA, 120 bp, synthetic construct; identical to SEQ ID NO: 5488
  source 1..120: mol_type = other DNA

SEQ ID NO: 17467 - DNA, 120 bp, synthetic construct
  source 1..120: mol_type = other DNA
ataagtctctgttaaaagagttagggtgaggtttgaggtggttttagattattatttttgctaaagaacccagaaatgactaagtttatccctgtcaatcacttctgacactctactcat

SEQ ID NO: 17468 - DNA, 120 bp, synthetic construct
  source 1..120: mol_type = other DNA
ttaatattctatggggcaataagcagaactattcagaaatgatcctgggatctcactctagattgcccaggaaatgtgctagctacaactggagtttcccgttcctcttggaaagagggg

SEQ ID NO: 17469 - DNA, 120 bp, synthetic construct
  source 1..120: mol_type = other DNA
ctcagctctgctagcatctaaacccagactgcccggcaatcaagtagtctgcttgttgtcttactgaaaagtggtgttcaagtttatccttgacaagatagaataattgggtcaggacca

SEQ ID NO: 17470 - DNA, 120 bp, synthetic construct; identical to SEQ ID NO: 5489
  source 1..120: mol_type = other DNA

SEQ ID NO: 17471 - DNA, 120 bp, synthetic construct
  source 1..120: mol_type = other DNA
actaatttataaagagctaagtgagtgctcagataatcaaataatcacccatggagaagttcaaatctcttgcagaagttcagatctctgttggagcatgtagcctagatttaacctcca

SEQ ID NO: 17472 - DNA, 120 bp, synthetic construct
  source 1..120: mol_type = other DNA
gtttagctgtctcatgctctttgggcccagaggagaggaaaagcaagacaaagtcttaaactttccaccagatatcaagaccttgttgatgtcctagaacatgaccaatcagattaatga

SEQ ID NO: 17473 - DNA, 120 bp, synthetic construct
  source 1..120: mol_type = other DNA
cactaccccttccagcccactggaagaatgggttttttaaaaaaacatacactcaagatgagctctattagtcatttcctcatctcacttattattccagttaaaccaaggctgaaggac

SEQ ID NO: 17474 - DNA, 120 bp, synthetic construct
  source 1..120: mol_type = other DNA
acccaactgattgcaaataggattttggaataacagtttctgaggtgtcacaaagaactgtcagcccttgtgtctgttctctaatagaatttttactttcttctatgatcccaaatttca

SEQ ID NO: 17475 - DNA, 120 bp, synthetic construct; identical to SEQ ID NO: 5490
  source 1..120: mol_type = other DNA

SEQ ID NO: 17476 - DNA, 120 bp, synthetic construct
  source 1..120: mol_type = other DNA
tccttaggcaccagaatgcgagagaaggttgttccttcagggaatattttcttttggcagggccatgtcactgagtcaggcttactaattatgtcccaaggtgggctcagcctctggccc

SEQ ID NO: 17477 - DNA, 120 bp, synthetic construct
  source 1..120: mol_type = other DNA
ctgtagcggttgccgccagcctcccgtccccggacagcgcgcctctttcctccgcgcggaatctcgccttgccgagaggtgacagcgtggtgccaggcctcgctcgctctccgcgcctcc

SEQ ID NO: 17478 - DNA, 120 bp, synthetic construct
  source 1..120: mol_type = other DNA
aggcgggaactctcttgcgggccagtgcgagttccgggtgggcgcgggttccgggggccccacactcggagcggccggccggcgccaccgctccgggcagtgaggggtttagcacccggg

SEQ ID NO: 17479 - DNA, 120 bp, synthetic construct; identical to SEQ ID NO: 5491
  source 1..120: mol_type = other DNA

SEQ ID NO: 17480 - DNA, 120 bp, synthetic construct
  source 1..120: mol_type = other DNA
accaattagcactctgtatctagctaaactggtggggacttggagaacctttatgtctagctaagggattgtaaatacagcaatcagcactctgtgtctagctcaaggtttgtaaacaaa

SEQ ID NO: 17481 - DNA, 120 bp, synthetic construct
  source 1..120: mol_type = other DNA
caatcagcactctgtgcctagctcaaggtttgtaaatgcaccaatcagtgctctgtgtctagctaatctagtggggacttcgagaacttttgtgtctagctcagggattgtaaacacacc

SEQ ID NO: 17482 - DNA, 120 bp, synthetic construct
  source 1..120: mol_type = other DNA
ttttgtcctgtttcacattgtggtggttttattttttactattagctgcttggatctgcattttgttttgtgaggtgtaacactgtgagggcctgtagtttcactcttgaggtcagcgag

SEQ ID NO: 17483 - DNA, 120 bp, synthetic construct; identical to SEQ ID NO: 5492
  source 1..120: mol_type = other DNA

SEQ ID NO: 17484 - DNA, 120 bp, synthetic construct
  source 1..120: mol_type = other DNA
acacccagggctgcattctcatcagagacacctctaagttactgcgaagtcggagacaccagaaaggaagactccaacgtattccgagaggagtggaggcaaatgggatagactagccct

SEQ ID NO: 17485 - DNA, 120 bp, synthetic construct
  source 1..120: mol_type = other DNA
atagagggggagcttttcctggccaaacgtgggttattctcgttctcccttccccacactgtcgcagaggaggaagacgtcttggtcgccgttaagagctaaaacgaacgccaaggctct

SEQ ID NO: 17486 - DNA, 120 bp, synthetic construct
  source 1..120: mol_type = other DNA
ttagtaacactttatgttgcggataggtgaaagaaaaactgacgcttcggagatggggttgcccaaagaggaagagagaacagcgattagggccttaaacctcacacccgaacaaattcg

SEQ ID NO: 17487 - DNA, 120 bp, synthetic construct
  source 1..120: mol_type = other DNA
catgaacgaactcaaggctcactgagatgcaactgccatgaagaagtgggtgcagggtgagaggtctgtctacctccttagaaggaccactgtggcttgtgcagagatccgaagtttgtt

SEQ ID NO: 17488 - DNA, 120 bp, synthetic construct; identical to SEQ ID NO: 5493
  source 1..120: mol_type = other DNA

SEQ ID NO: 17489 - DNA, 120 bp, synthetic construct
  source 1..120: mol_type = other DNA
ataaaggtcaaagataaggataatttgtgtgtgtgtgtatatatatgtataaacttaaatgtcctttttgcttggaacgttcaaatttttttctagttatatctaaatatatatcaagca

SEQ ID NO: 17490 - DNA, 120 bp, synthetic construct
  source 1..120: mol_type = other DNA
cgattctcctgcctcagcctcccaagtagctgggattacaggcatacgccatcacaccgggccaatttttatatttttagtagaggcggggtttcaccatgttggtcaggctggtcttga

SEQ ID NO: 17491 - DNA, 120 bp, synthetic construct
  source 1..120: mol_type = other DNA
ctggttgtctttcttctacctaattgtatacttataccgtttaaccaacctctctttatcccacgtcttccctcctctttccaggccctgataaccaccattgtactccctagcttcatg

SEQ ID NO: 17492 - DNA, 120 bp, synthetic construct; identical to SEQ ID NO: 5494
  source 1..120: mol_type = other DNA

SEQ ID NO: 17493 - DNA, 120 bp, synthetic construct
  source 1..120: mol_type = other DNA
atgagagactttattaaggcttcaatttcattactcattattggtttgttagggtttctattcatggttcaatcttagtacgttgtatatgtttaataatttatccattttttctatgtt

SEQ ID NO: 17494 - DNA, 120 bp, synthetic construct
  source 1..120: mol_type = other DNA
gaaaggtttgttaattttgtctatcttcaaaaaatcaacttttcatttcattgatcaaatgtatttatgttttagtttcaatttcatttatgtctgttctgatatttatttctttctact

SEQ ID NO: 17495 - DNA, 120 bp, synthetic construct
  source 1..120: mol_type = other DNA
gctgtattctgtaggcttcggtatgttgtatatctattttcactagtttcatgaaatttttaaaattttcttagcttattcattgacccattggttgtaggagcatgttgatttccatgt

SEQ ID NO: 17496 - DNA, 120 bp, synthetic construct; identical to SEQ ID NO: 5495
  source 1..120: mol_type = other DNA

SEQ ID NO: 17497 - DNA, 120 bp, synthetic construct
  source 1..120: mol_type = other DNA
agcctatctctcccttgagatttattaatgtttgttttacatatttggatgctctggtgttgggtgcacagatatttataatttttaatatcctcttgatgaattgaccccttcatcatt

SEQ ID NO: 17498 - DNA, 120 bp, synthetic construct
  source 1..120: mol_type = other DNA
ttcactttcaacttatgtatgtccctataggcaaggtgggttcttgtagcaccacatagttgggtctcgtctctttacccatttaacttctatacatcttttaattggagaatttggtcc

SEQ ID NO: 17499 - DNA, 120 bp, synthetic construct
  source 1..120: mol_type = other DNA
gttaagttattttctctggtagaatgctttaattcactgccttctatttttagtgtattaattacagatttttgcattggggttaccatgaggcttacaaaacatatcttatagctactt

SEQ ID NO: 17500 - DNA, 120 bp, synthetic construct; identical to SEQ ID NO: 5496
  source 1..120: mol_type = other DNA

SEQ ID NO: 17501 - DNA, 120 bp, synthetic construct
  source 1..120: mol_type = other DNA
caaaaaaacttaaataacccccacaaaaccctgccctttaactctatacccctacatcttgactttttgttgtctcggtttacatatttttatattgtctatctcttagcaggtcactgt

SEQ ID NO: 17502 - DNA, 120 bp, synthetic construct
  source 1..120: mol_type = other DNA
tggtttttttcctcaaatattttctttatgcatgttagcatctttttctcttagattgaaggacttcatttgccatttattttaagataggcctggtggtagtgaattctcagcttttgt

SEQ ID NO: 17503 - DNA, 120 bp, synthetic construct
  source 1..120: mol_type = other DNA
gcctgtatagtttccattgaggagtctgttgccagaataattggagctctttgtatgttatttacttcttttctcttgctgcttttattttttattttattttattttttttgagactga

SEQ ID NO: 17504 - DNA, 120 bp, synthetic construct
  source 1..120: mol_type = other DNA
acccactaccatgccccactaattactgtatttttagtggagacagggtttcaccatgttggccaggctgatctcgaactcctgacctcaggtgatccacctgccttggcctcccaaagt

SEQ ID NO: 17505 - DNA, 120 bp, synthetic construct; identical to SEQ ID NO: 5497
  source 1..120: mol_type = other DNA

SEQ ID NO: 17506 - DNA, 120 bp, synthetic construct
  source 1..120: mol_type = other DNA
tttctcctctaactgtattttcaaatagcctgtctgagtttactaattccttccactgtctgatccattctgctgtcgagagtctctaataaatttttcagtttgacaagtatatttctc

SEQ ID NO: 17507 - DNA, 120 bp, synthetic construct
  source 1..120: mol_type = other DNA
ttgtgtgttatccttgagttcactgagtttctttaaaactgctattttgaattcttggtgagagagctcacataccactgtcttgcctagggtaagtcattggttccttgctttgtctgt

SEQ ID NO: 17508 - DNA, 120 bp, synthetic construct
  source 1..120: mol_type = other DNA
atgacagcatctacttttttttcgccctcttggtcttgccttctttctgacatcacatggagtctgcagtccaggttttccttggccctagtaaatgactggagcactgccggacccaaa

SEQ ID NO: 17509 - DNA, 120 bp, synthetic construct; identical to SEQ ID NO: 5498
  source 1..120: mol_type = other DNA

SEQ ID NO: 17510 - DNA, 120 bp, synthetic construct
  source 1..120: mol_type = other DNA
cagatttgggagagggatgtcacggatttggaagtctgattcttacagcgtctgcttgaagttttttacttctttgttgccacgggcactgttccatcttcatatttgagttctgggata

SEQ ID NO: 17511 - DNA, 120 bp, synthetic construct
  source 1..120: mol_type = other DNA
gccattttggaaccaaactctcacacattccatggaacatttctagccagcaaggtacaatgactagcaaggaaacaaactttttttttccttcagtatttcagttgactcacaagaaca

SEQ ID NO: 17512 - DNA, 120 bp, synthetic construct
  source 1..120: mol_type = other DNA
ctttgatagtttttcttttgatgctacacctagtgactaccatattttaaaacagacatgttctaattgctcttgaatcttcaactcgaaagaaactatggttttataaattagtgataa

SEQ ID NO: 17513 - DNA, 120 bp, synthetic construct; identical to SEQ ID NO: 5499
  source 1..120: mol_type = other DNA

SEQ ID NO: 17514 - DNA, 120 bp, synthetic construct
  source 1..120: mol_type = other DNA
aggaaagcttttagttttctgaccattttatttttgtttattttaatttttttatttcaatagggttttggagggacaggtggtgtttccttacatgaataagttctttagtggcgattt

SEQ ID NO: 17515 - DNA, 120 bp, synthetic construct
  source 1..120: mol_type = other DNA
tgcctttgcatttctgaccattttagattcagaattatggataagggattttcagcctatactgatcatgtctagaagttctgtttgtttctttaaaaaaaagttcatgtagcagcagat

SEQ ID NO: 17516 - DNA, 120 bp, synthetic construct
  source 1..120: mol_type = other DNA
caacctctacctcctgggttcaagccattctcctgcctcagcctccggagtagctgggactacaggtgcccaccaccacgcccagcttactttttctatttttagtagagatggggtttc

SEQ ID NO: 17517 - DNA, 120 bp, synthetic construct; identical to SEQ ID NO: 5500
  source 1..120: mol_type = other DNA

SEQ ID NO: 17518 - DNA, 120 bp, synthetic construct
  source 1..120: mol_type = other DNA
aagtcctcaaatgcacagttatctccattcctcttcatgggtcccacatgcaaattcaaagggagttagtatgaaacatgcagtggaaatcgggctgtgacattaacaagcttgttctgt

SEQ ID NO: 17519 - DNA, 120 bp, synthetic construct
  source 1..120: mol_type = other DNA
tcagcaagttatttattttcttatctgctatctggcaaactcaagatttctgttagttattggtttcctattctttggggcacaatttcagtttcaacttttcagcaagttgtttctttt

SEQ ID NO: 17520 - DNA, 120 bp, synthetic construct
  source 1..120: mol_type = other DNA
cctgaaactgaagaccattactgaatgcagttttcaattgccaatctagaagtttactaattctgtgtattggatgtgcatatccttgtcaatcattttggcctaagggagtctttcttt

SEQ ID NO: 17521 - DNA, 120 bp, synthetic construct; identical to SEQ ID NO: 5501
  source 1..120: mol_type = other DNA

SEQ ID NO: 17522 - DNA, 120 bp, synthetic construct
  source 1..120: mol_type = other DNA
attttctagtttccattatgtacttatatatacctctaggggatgttgtaaagattctataatattatgtatgtattctataatatgtatgtgaaagaaaaactgtatcttttcctttgc

SEQ ID NO: 17523 - DNA, 120 bp, synthetic construct
  source 1..120: mol_type = other DNA
tctgcagatttggtaacattttcatggagatttaataaaaaacattgacatattcattctacagacatttattggctatgtaattcatgtcagaaactgattcgacacagcaaaatcacg

SEQ ID NO: 17524 - DNA, 120 bp, synthetic construct
  source 1..120: mol_type = other DNA
ggataatgccctatacttatatggtcagggttttcaaggactatagaccatagactgatgagattcataaatacttttcagttgagacaagatttcagcagggtatgaaggttgaataga

SEQ ID NO: 17525 - DNA, 120 bp, synthetic construct; identical to SEQ ID NO: 5502
  source 1..120: mol_type = other DNA

SEQ ID NO: 17526 - DNA, 120 bp, synthetic construct
  source 1..120: mol_type = other DNA
ataaaagtaaaagaggaatcaaaaccttgaaataaaggtatgatgttcttgctgtggaaatttagaagccacagggtttaaggattgtagagacatcataagccctattactcccatctt

SEQ ID NO: 17527 - DNA, 120 bp, synthetic construct
  source 1..120: mol_type = other DNA
ctttcacttgcagagaggattttcaatctctgaaatggctgatttgcagagaagtggagtcgtttattctctagcacagggatttccagattttgaatgtatttaccagtaaaacaaagt

SEQ ID NO: 17528 - DNA, 120 bp, synthetic construct
  source 1..120: mol_type = other DNA
atttctttagtgctctacattctacttttttccatctaattcatgattctgctgaagattttttcatccacagtattctcttcagtgcactctttacatctttgtttcttaaagtgtaga

SEQ ID NO: 17529 - DNA, 120 bp, synthetic construct
  source 1..120: mol_type = other DNA
cttcatgtatatataaatgattgttccataaaacagaattactactgtgaggtgggagccacatgtattaaggatcttttgcaaccttgttgctgacttgatcctcattacagcttgagt

SEQ ID NO: 17530 - DNA, 120 bp, synthetic construct; identical to SEQ ID NO: 5503
  source 1..120: mol_type = other DNA

SEQ ID NO: 17531 - DNA, 120 bp, synthetic construct
  source 1..120: mol_type = other DNA
taacgatcataggccatcacagccaacagaagacattctgtggctcccaagtcaaggacaaaaaagaattggagtacacaccctccataagtaatagatttttttgggccccattgattt

SEQ ID NO: 17532 - DNA, 120 bp, synthetic construct
  source 1..120: mol_type = other DNA
atggagctgggtgtctagataagatacaagaatgatggttgtatttcctaccagagtcacaatatagatgatgaagacaaccactgagatgatgtgctctaattggggtcgatcagaaaa

SEQ ID NO: 17533 - DNA, 120 bp, synthetic construct
  source 1..120: mol_type = other DNA
atctctgaagtttctcaagggtatccaaaactctcttatttgcatgctctctctcatttggaacatctcttttaacatttccctatggcccagtgctcacaacttgttcatatttaatcc

SEQ ID NO: 17534 - DNA, 120 bp, synthetic construct; identical to SEQ ID NO: 5504
  source 1..120: mol_type = other DNA

SEQ ID NO: 17535 - DNA, 120 bp, synthetic construct
  source 1..120: mol_type = other DNA
tactcctcctccttatattttttttacccctcaacattgcaggcactgttgttattctatcaattttggtgttccctactacactgcctttttttgtgagtgtgttttttgttgccagga

SEQ ID NO: 17536 - DNA, 120 bp, synthetic construct
  source 1..120: mol_type = other DNA
acaccatctaaacagccttactgatttgttgcagttaaatattgaggtaattccagaactatttggccaccacgtacaacgatctgtgtccaatcctacttaccagccattcagcagaat

SEQ ID NO: 17537 - DNA, 120 bp, synthetic construct
  source 1..120: mol_type = other DNA
ttaggtaaaaccatcaccccattgggctctaaaagaatacagatacagataaaaatgtcatcaatctcaccatttctgattattgtatcatatcactaagtagacaaaatatttaatgac

SEQ ID NO: 17538 - DNA, 120 bp, synthetic construct; identical to SEQ ID NO: 5505
  source 1..120: mol_type = other DNA

SEQ ID NO: 17539 - DNA, 120 bp, synthetic construct
  source 1..120: mol_type = other DNA
aaaccaaacaaaacaaaaatcttgctctgttgcctaggctggagtgcggtgacacagtgacagctcattgcagcctggacctccggtgctcaagtgatcctctcaactgagcctcctaag

SEQ ID NO: 17540 - DNA, 120 bp, synthetic construct
  source 1..120: mol_type = other DNA
gcttcggcctgagccctggtgtcgagctaatggctgaattagtttaaacattttttctgctgataatttctgaccacgaaattcagacctaccatactttacatttatagtgtccttgag

SEQ ID NO: 17541 - DNA, 120 bp, synthetic construct
  source 1..120: mol_type = other DNA
attcagacctaccatactttacatttatagtgtccttgaggccatggaatagaaacctcatttgtttctggtatatagtaaaacaaggggaagatagatcatttatatatgtcattgtta

SEQ ID NO: 17542 - DNA, 120 bp, synthetic construct
  source 1..120: mol_type = other DNA
ccagtttttttatttttcgcaataggttgtcaactaaggaatgatagtgcttcattgcacagattctgaactcaaagtccctggcatcaaattccagcttcaccacttggaagctgtatc

SEQ ID NO: 17543 - DNA, 120 bp, synthetic construct; identical to SEQ ID NO: 5506
  source 1..120: mol_type = other DNA

SEQ ID NO: 17544 - DNA, 120 bp, synthetic construct
  source 1..120: mol_type = other DNA
acaatatgcacattgaactgaaaagcttcaggagcaggagatgacttgaggtctccaaatgctttgattaaaaaattcactcaaattcttttgactgctgttgggtttgtgttgggaatt

SEQ ID NO: 17545 - DNA, 120 bp, synthetic construct
  source 1..120: mol_type = other DNA
acagggaagtcaattacacttgaagcagcctctctcctttagtcaatgctgcttatattgaactcaaagatgattccttgcccagccctggctgattttctttattctgaaaataacaca

SEQ ID NO: 17546 - DNA, 120 bp, synthetic construct
  source 1..120: mol_type = other DNA
cctaaatcaataaataaaacattgatgattaccctaggagcttttctttgtgccttttaccaatgataactcttccctatcccctgaagtatccactatgctgctatttatagtaatccc

SEQ ID NO: 17547 - DNA, 120 bp, synthetic construct; identical to SEQ ID NO: 5507
  source 1..120: mol_type = other DNA

SEQ ID NO: 17548 - DNA, 120 bp, synthetic construct
  source 1..120: mol_type = other DNA
tttagcaggtataagacattactggctctctttaaactttggatcacgtaaagccctaggcattcttattagaaatgctgccaagtcaggcatgacaatttatgtagtttaatgttgtga

SEQ ID NO: 17549 - DNA, 120 bp, synthetic construct
  source 1..120: mol_type = other DNA
cttacaacactccagctgaagaaatagatggcaaaaaagaggcatgctacattttaatcgaaactcagtttttcatttttcatagtatggacttcagagcccaataatcgcgcataactt

SEQ ID NO: 17550 - DNA, 120 bp, synthetic construct
  source 1..120: mol_type = other DNA
aagtaaaaatatatggatcttttattataaagcatgaggtatattgctgtagtcatacaaaattcaagatgaaaggacgaaataaaaataggtaagaccctagactggttcagaccgcct

SEQ ID NO: 17551 - DNA, 120 bp, synthetic construct; identical to SEQ ID NO: 5508
  source 1..120: mol_type = other DNA

SEQ ID NO: 17552 - DNA, 120 bp, synthetic construct
  source 1..120: mol_type = other DNA
ctacctggagtcatcctctgttagagatagcagagaatacttaccagaagctgaaaagattagaatatattttcatgaaggaagaattcagagctgtcatgttctcatgtagtccaaaca

SEQ ID NO: 17553 - DNA, 120 bp, synthetic construct
  source 1..120: mol_type = other DNA
gtgccattcacacttaaatgcaacagctgaaataagatttaatagaagtctctatttaatgtggatattggaagtaaactaaatgtgggactggtgaaaatccttaattaggtttggtta

SEQ ID NO: 17554 - DNA, 120 bp, synthetic construct
  source 1..120: mol_type = other DNA
agaatcattaacatgtagcagggaagtatttatttacagctctaaaggctacctatgttgatatggtttagaccttgaggactgatgccccacagaggtgattaagtaaagctatgactg

SEQ ID NO: 17555 - DNA, 120 bp, synthetic construct; identical to SEQ ID NO: 5509
  source 1..120: mol_type = other DNA

SEQ ID NO: 17556 - DNA, 120 bp, synthetic construct
  source 1..120: mol_type = other DNA
ggagaaaccccgtctctactaaaaacaaaaaattagccgggcatggtggtgcatgcctgtaatcccagctactcaggaggctgaggcaggagaatcacttgaacctgggagacgaaggtt

SEQ ID NO: 17557 - DNA, 120 bp, synthetic construct
  source 1..120: mol_type = other DNA
aagtttttaaatttaaaaatttggagattaattatatattatattaaatttacattgaaaaatgaatatatgatgtaaactatataaaaatgaacacatttacttgaaatttggtttatt

SEQ ID NO: 17558 - DNA, 120 bp, synthetic construct
  source 1..120: mol_type = other DNA
atcgttctattttcagcaaattaaaaatagtatgaacactctggagcttatccctcaatttatggtctggaaacttaccaccatccccagcttctggtaattaccattccactctctgct

SEQ ID NO: 17559 - DNA, 120 bp, synthetic construct; identical to SEQ ID NO: 5510
  source 1..120: mol_type = other DNA

SEQ ID NO: 17560 - DNA, 120 bp, synthetic construct
  source 1..120: mol_type = other DNA
ctgttttatatagtggctgtattaatgtacattcccactaacggtgtgcaagggttcctttttttccctacattctcaccaagctgttatctttgctttttatgacaatagccattctaa

SEQ ID NO: 17561 - DNA, 120 bp, synthetic construct
  source 1..120: mol_type = other DNA
gggtcttttgcccatttttattttcatttttaaaatttttaaattattttattttattttttatttttatttttgagatggagtctctctctgtctcccaggctggagtgcagtgacaca

SEQ ID NO: 17562 - DNA, 120 bp, synthetic construct
  source 1..120: mol_type = other DNA
gagacggggtttcaccatgttggccaggctggtctcgaactcttgacctcaagtgatccacccatcttggcctcccaaaattctgagattagagatgtgaaccaacacagccagctccat

SEQ ID NO: 17563 - DNA, 120 bp, synthetic construct; identical to SEQ ID NO: 5511
  source 1..120: mol_type = other DNA

SEQ ID NO: 17564 - DNA, 120 bp, synthetic construct
  source 1..120: mol_type = other DNA
tgtggatattcagtttttcaacaccgtttattgaagagactgccctgtccccattgtgtgttcttggcacctttgttgaaaatcaattgattgtaaatgtatggattgatttttacgcta

SEQ ID NO: 17565 - DNA, 120 bp, synthetic construct
  source 1..120: mol_type = other DNA
ttgttttttgattcaaggttactttggctatggatttttgtggatccagacaaattttagaatcgttttttctatttctctacaaaatgacattggtacttggatagagattgcattgaa

SEQ ID NO: 17566 - DNA, 120 bp, synthetic construct
  source 1..120: mol_type = other DNA
agtgtacaaatctttcacctcctcggttaaatttgcacctagttattttaattaatttattttttaattatgattgtttacttaatttcttctcagatgattgttagtgcatagaaacac

SEQ ID NO: 17567 - DNA, 120 bp, synthetic construct; identical to SEQ ID NO: 5512
  source 1..120: mol_type = other DNA

SEQ ID NO: 17568 - DNA, 120 bp, synthetic construct
  source 1..120: mol_type = other DNA
gattttgtaatccactgatacaattacatactgattacctactctgtaatatggaatttaaaaaattccatgtgtgattttctaactctatcataggtcggtaacctctatacatctgga

SEQ ID NO: 17569 - DNA, 120 bp, synthetic construct
  source 1..120: mol_type = other DNA
ctcctataaacgccggtacatcctcccaaagcgtgatgggaatctccaaatcgctaaatgtgtcctgttactccgtttctcttttcccacatcaacgtctggtagaaggaaggccaactg

SEQ ID NO: 17570 - DNA, 120 bp, synthetic construct
  source 1..120: mol_type = other DNA
atcaggaccaggtaggtctcacccaattgggacagagaggtcccccgaggacagcatctgcgcggcgccgtggcctaaagaggaggccaggcctctccctaactccgccttcgcgggccc

SEQ ID NO: 17571 - DNA, 120 bp, synthetic construct
  source 1..120: mol_type = other DNA
caggtcaccgaggtggggtggggaagacaggttcgccgctgcttcaggcctgggatctctgctggaactctctacattttttaatcaatttaaaatttataataatgtatgttttttagg

SEQ ID NO: 17572 - DNA, 120 bp, synthetic construct; identical to SEQ ID NO: 5513
  source 1..120: mol_type = other DNA

SEQ ID NO: 17573 - DNA, 120 bp, synthetic construct
  source 1..120: mol_type = other DNA
taatcctcccactacagcctcccgagtagcggggactacaggcacaggccaccacgcccggctatttgtttgttttttgtggagacaggggtgtctcactctgttgcccaggctggtctc

SEQ ID NO: 17574 - DNA, 120 bp, synthetic construct
  source 1..120: mol_type = other DNA
ctggccagagcaaatccttgcttattattcgtttatgaaaatggcttgactcttctaagctgtaatttgaccaaataaatcttgaaataaatttgttacaatccaaacacaatgcagaca

SEQ ID NO: 17575 - DNA, 120 bp, synthetic construct
  source 1..120: mol_type = other DNA
gttcaacatatgttaagttcatctttattgatatcattttatttaattgctcattgcttattgttgttaggagagctatatatgtattttttaaattaaatttttttttttaacttttat

SEQ ID NO: 17576 - DNA, 120 bp, synthetic construct; identical to SEQ ID NO: 5514
  source 1..120: mol_type = other DNA

SEQ ID NO: 17577 - DNA, 120 bp, synthetic construct
  source 1..120: mol_type = other DNA
tgtcacattttctttatccagtccaccactgatgggcatctagattgattctatgtctttgctactgtgaatagtgctgtgatgaacatgcgagtgaatgtgtctttttggtagaacaat

SEQ ID NO: 17578 - DNA, 120 bp, synthetic construct
  source 1..120: mol_type = other DNA
gccgtgtgtaagtattccattttctctgcaacctcactaacatctgttattttttgactttttaataatgtccattctgactggtgtgagatggtatttcattgtggttttgatttgcct

SEQ ID NO: 17579 - DNA, 120 bp, synthetic construct
  source 1..120: mol_type = other DNA
gttgatttgtttaaatttcttatagattctggatattagacctttgttggatgcttaatttgcaaatattttctcctattttgtaggttgtctgtttaatctgttggtagtttcttttgc

SEQ ID NO: 17580 - DNA, 120 bp, synthetic construct; identical to SEQ ID NO: 5515
  source 1..120: mol_type = other DNA

SEQ ID NO: 17581 - DNA, 120 bp, synthetic construct
  source 1..120: mol_type = other DNA
aatcatagtggctgaaaaaggtgaagtgggcgtatggttagcatttaccaccacaatcctatgtcccagttatgatgaaaatgactctgatcaaattctgccatgaatatagagattagt

SEQ ID NO: 17582 - DNA, 120 bp, synthetic construct
  source 1..120: mol_type = other DNA
aagacaacagaggtagggttttactttcatgtcagcattgagaaagtggaacttatccatagtaggacacaggcccatttagggaacaagtcttgggcactacccctaaagtttaggcta

SEQ ID NO: 17583 - DNA, 120 bp, synthetic construct
  source 1..120: mol_type = other DNA
attattatgtgagttggctaggcatcaaatgttgaccaagaggtagataactgaaggtcctgtggtagctgccttggagggcagcctttctggctaaatgctagttgacctccccatcta

SEQ ID NO: 17584 - DNA, 120 bp, synthetic construct; identical to SEQ ID NO: 5516
  source 1..120: mol_type = other DNA

SEQ ID NO: 17585 - DNA, 120 bp, synthetic construct
  source 1..120: mol_type = other DNA
cccatagaatgtaatatttgaatgaataaatgcacttatatcaatagcctgacaaagtgttttaaagtatactacagttaccatgacaaagtgtttctctgaagaaacttgtctatgaag

SEQ ID NO: 17586 - DNA, 120 bp, synthetic construct
  source 1..120: mol_type = other DNA
acagtgatttggaatttgggagtacaattagtgaaaacaggtactggaattgctccagtgttgggaatggacccacatattcataaatgggtacttattggtactagaaaattttctaca

SEQ ID NO: 17587 - DNA, 120 bp, synthetic construct
  source 1..120: mol_type = other DNA
atttcaaaattttattcattgaaacataaacttggtcagttctattcaagacatcaatataaagagaaatcactgaattgtagaaaggtttgtataaattaaattgtaaaagtgtgagct

SEQ ID NO: 17588 - DNA, 120 bp, synthetic construct; identical to SEQ ID NO: 5517
  source 1..120: mol_type = other DNA

SEQ ID NO: 17589 - DNA, 120 bp, synthetic construct
  source 1..120: mol_type = other DNA
gacaaagacagattggaatagaagttgggaccgaaagtaaataagatcttccaaaacatggagcaagggggacctaaaaaagcagacatccagagagcaaagctctgtggtagggattgc

SEQ ID NO: 17590 - DNA, 120 bp, synthetic construct
  source 1..120: mol_type = other DNA
gttagtggtactttagagaataaaagaaaataggcttggttcactggcaagaggacaagaaatagtctttaagtggagaagaagctgtttcgtacagtagaaattggtaaggacagtggc

SEQ ID NO: 17591 - DNA, 120 bp, synthetic construct
  source 1..120: mol_type = other DNA
gagtgtcagaatttcttcagaaagtagaaagaattttaaaatttaacttatgcaggttgggcacggtggctcacgcctgtaatcccagcactttgggaggccgaggtgggtggattacct

SEQ ID NO: 17592 - DNA, 120 bp, synthetic construct; identical to SEQ ID NO: 5518
  source 1..120: mol_type = other DNA

SEQ ID NO: 17593 - DNA, 120 bp, synthetic construct
  source 1..120: mol_type = other DNA
catctatacccaggtattgcttgaaaaatgttaccaattaataattagcttaatttttacagcatgtttgaaaatttgatatgccatatcatttttatgcaacatacttcaataatacat

SEQ ID NO: 17594 - DNA, 120 bp, synthetic construct
  source 1..120: mol_type = other DNA
tatatgtatttgacctctagaggttcctgtacttcaaaattcatcactatatgacaattgagtatcatagcatcttctgcttgaatccatttataagtttttgtttaagaaatgagagaa

SEQ ID NO: 17595 - DNA, 120 bp, synthetic construct
  source 1..120: mol_type = other DNA
agaaatattgaaagaattagctatttacttgcactgaggggagtcattatgtgcattttctactatggttttcttagtccaccactcctcaagttatgatggttgactcagaagggttgc

SEQ ID NO: 17596 - DNA, 120 bp, synthetic construct; identical to SEQ ID NO: 5519
  source 1..120: mol_type = other DNA

SEQ ID NO: 17597 - DNA, 120 bp, synthetic construct
  source 1..120: mol_type = other DNA
ggatattgttaagcccgttgagactggtgctccacaacagtaattaagcataattatgatgcaggtcaaggtaagacatttccgaaattttctaggacatgtttttgaaggcttgggata

SEQ ID NO: 17598 - DNA, 120 bp, synthetic construct
  source 1..120: mol_type = other DNA
ttcaatgcctactaagagtcatggaaccctattatatgatggtgaatcgagaaagaactatacaaaattatgctttcaagaaacttataattacattggctagaggcttatcagttctat

SEQ ID NO: 17599 - DNA, 120 bp, synthetic construct
  source 1..120: mol_type = other DNA
ttttgtagggttataaagttagttttaaggaaataacttccagatcctccttgttcctttgttttcttcgctaacattttcttgaggaaatgccaggttgaggagttagacaggttctct

SEQ ID NO: 17600 - DNA, 120 bp, synthetic construct; identical to SEQ ID NO: 5520
  source 1..120: mol_type = other DNA

SEQ ID NO: 17601 - DNA, 120 bp, synthetic construct
  source 1..120: mol_type = other DNA
gaaataaaaagatttattctgttatgcaattccactacatataaacattaccacatttctaaaaattcacgtaaatccgccagttccacagatgtatgtcaaaagcctaactggtttcaa

SEQ ID NO: 17602 - DNA, 120 bp, synthetic construct
  source 1..120: mol_type = other DNA
ttacgatagagtagtaatagacttaaatagcagagaccctttactcaagatatcgatttgaaatttcattgaaaaaagagtgaattgttttaaatggggcttatgacaattactgtctta

SEQ ID NO: 17603 - DNA, 120 bp, synthetic construct
  source 1..120: mol_type = other DNA
ttatgggtatattatttaatatacacaccataatgtatatgaaaccatttgctcaggtctatactttggaagaggcaaggattaacattgaaaatacaaaactagataaccaaaacagtt

SEQ ID NO: 17604 - DNA, 120 bp, synthetic construct; identical to SEQ ID NO: 5521
  source 1..120: mol_type = other DNA

SEQ ID NO: 17605 - DNA, 120 bp, synthetic construct
  source 1..120: mol_type = other DNA
tgtagatttgtggtgaaatctcatcagtttcttcagggcatccttcatgtccttatttcttaaggtgtaaatgagcgggttgagacttggagtgatgacggtgtaaaagagggtgaggaa

SEQ ID NO: 17606 - DNA, 120 bp, synthetic construct
  source 1..120: mol_type = other DNA
tgcttttgacttcgttctcagcacagctttggcaatgtagccataggatataagaataaggatgagaggtgtgaggacaattataatgcctaaagcgaaaacagacatttcaactgttgt

SEQ ID NO: 17607 - DNA, 120 bp, synthetic construct
  source 1..120: mol_type = other DNA
actaatactccagatcatgataatcatctttagacatagatgtgggttcatgactacaaaataatgcaagggcttacatatagctgtaaaacgatcataggacataacagccaggagaag

SEQ ID NO: 17608 - DNA, 120 bp, synthetic construct; identical to SEQ ID NO: 5522
  source 1..120: mol_type = other DNA

SEQ ID NO: 17609 - DNA, 120 bp, synthetic construct
  source 1..120: mol_type = other DNA
agtgagaaaaggaggaggaggaggtagatgatgatacaaggataaggagaaggaagaagaaggaagaagaggtagaggaggagaaggaggagggagaggaagaagaaaaggaaaagagga

SEQ ID NO: 17610 - DNA, 120 bp, synthetic construct
  source 1..120: mol_type = other DNA
agaaatctgctatttgtcatagattcttttatggcaatgagtttaatattagattttttaaaaaaaatccaggtgaccttggggagttcacttttaaacttgaggtctgaattatctaac

SEQ ID NO: 17611 - DNA, 120 bp, synthetic construct
  source 1..120: mol_type = other DNA
tgaacatattcttttatttgatcagtaaattcacctataaaatttaagtactgggctaatggtaggatgaggaaaagatgtgataacctggaggatgaacctggggacatcatgctaact

SEQ ID NO: 17612 - DNA, 120 bp, synthetic construct; identical to SEQ ID NO: 5523
  source 1..120: mol_type = other DNA

SEQ ID NO: 17613 - DNA, 120 bp, synthetic construct
  source 1..120: mol_type = other DNA
tgcttaattaaaaataaaccttaaaaaagagtgaggaaagattgttcttcttttttcatatcttagtgactaagcacctttgatctcctagtttgttatgtaggacatctggtgtttacc

SEQ ID NO: 17614 - DNA, 120 bp, synthetic construct
  source 1..120: mol_type = other DNA
tcaaatcactatgatttcttttctggattctggcaatagtcttgcatccagtccttgcatccagtcttatgcctttacattgttacaacatttgatgaaatcatgtcatccatctcctta

SEQ ID NO: 17615 - DNA, 120 bp, synthetic construct
  source 1..120: mol_type = other DNA
ataaagaaggtgggaggaaactgttggaggtgatggatgtatatatgggatagattgtgttgatggtttcacaggtatatactcaccttcaaactcatcaagttgtatacattaaatctg

SEQ ID NO: 17616 - DNA, 120 bp, synthetic construct; identical to SEQ ID NO: 5524
  source 1..120: mol_type = other DNA

SEQ ID NO: 17617 - DNA, 120 bp, synthetic construct
  source 1..120: mol_type = other DNA
gaaattacttccaactgtggccatgattcaaaagtggatacatttgtgagactaaccggagatggtggttgaaatagccgttttgagaaaatcattttgtgatttctttagcattagctt

SEQ ID NO: 17618 - DNA, 120 bp, synthetic construct
  source 1..120: mol_type = other DNA
caagctgtcacaccccattaaagttccataatgtctgagcaggggcatcaataattaatgcttatttattttaacagactcgttgatgtgtataattgtgcctaacttctgaataaaata

SEQ ID NO: 17619 - DNA, 120 bp, synthetic construct
  source 1..120: mol_type = other DNA
gaataaaaatcctccttctgcctattaaaaagtgacatagaaaaatcttcaaataaattttcatgcacagtatgagatttagaaatggatacataaaatctgagtcctttatggctccac

SEQ ID NO: 17620 - DNA, 120 bp, synthetic construct
  source 1..120: mol_type = other DNA
cttttgtttctgctggatcaatatttattctcagacttctgaaataaaaccagcccatacagatctaagttctttttcttctactttctacaaattgttttaccaatccaggcatactgt

SEQ ID NO: 17621 - DNA, 120 bp, synthetic construct; identical to SEQ ID NO: 5525
  source 1..120: mol_type = other DNA

SEQ ID NO: 17622 - DNA, 120 bp, synthetic construct
  source 1..120: mol_type = other DNA
attctcaacaggactcctccttctcgaatatatgacttcaagtaagaggatgaaacctgtcacaaattcttacttcttgttctgagtttaaatcaacctgcaagtaggtcttgaccatag

SEQ ID NO: 17623 - DNA, 120 bp, synthetic construct
  source 1..120: mol_type = other DNA
aactttactagagtacagtgtcatagaaaatgccagcctagaattagaccataccctaatatttcactagggcaggtttagtagatgtaaaagttatttaatatgaaggaaaactatagg

SEQ ID NO: 17624 - DNA, 120 bp, synthetic construct
  source 1..120: mol_type = other DNA
cttaccattcaaagcacaaatattgattgtggaactaaacttgctctgagcagatatcatttaaatgaggtacctctagtggttatctctgatacccatggtcagaacagttgtatttga

SEQ ID NO: 17625 - DNA, 120 bp, synthetic construct; identical to SEQ ID NO: 5526
  source 1..120: mol_type = other DNA

SEQ ID NO: 17626 - DNA, 120 bp, synthetic construct
  source 1..120: mol_type = other DNA
tctgtacgataatcaatatattttacacttgagatatagtatagtgtaatggttagatggatagattgtggagccagactttctgggctgaaatcctggtggctacagttaccagatgtg

SEQ ID NO: 17627 - DNA, 120 bp, synthetic construct
  source 1..120: mol_type = other DNA
actacagtactggttggcacacagcatccaaataagtattaactgttacaatttcaatcagttcagggtgtctgtgtgctgcagaaatatttggggaaagtttatgctgatatttgataa

SEQ ID NO: 17628 - DNA, 120 bp, synthetic construct
  source 1..120: mol_type = other DNA
tataaatgctataataatgatgataaaaagaaacataacatctactaatggtacatttttgtctatcaagattctaaacatctgaatacttgaaactgttcactttgactggagatctca

SEQ ID NO: 17629 - DNA, 120 bp, synthetic construct; identical to SEQ ID NO: 5527
  source 1..120: mol_type = other DNA

SEQ ID NO: 17630 - DNA, 120 bp, synthetic construct
  source 1..120: mol_type = other DNA
atgcccttgccttaaactttaatataagacctttccatacccctttgaataaatcaagacatgttttcctgtttcctttttatttaacaattttttcccttgcttactttagcccttaac

SEQ ID NO: 17631 - DNA, 120 bp, synthetic construct
  source 1..120: mol_type = other DNA
tgcccttgccaaaggctcaattcttttctgtttatactgtgtccctagatagaatcttagagttttaaggatttgaatcccatctacatattgatggctttcaagtgtctatttccagtc

SEQ ID NO: 17632 - DNA, 120 bp, synthetic construct
  source 1..120: mol_type = other DNA
gatctcttgattgcactgaatctgctctcattccagtcttcctcattgtagtaaatgatataaacatgtacctatttctggccagaaaccagtaattaaggagttatccttaattactag

SEQ ID NO: 17633 - DNA, 120 bp, synthetic construct; identical to SEQ ID NO: 5528
  source 1..120: mol_type = other DNA

SEQ ID NO: 17634 - DNA, 120 bp, synthetic construct
  source 1..120: mol_type = other DNA
aaaatcaacaatacaacaatacaaaattagccgggtatggtggcgcatgcctggaatcccagctactctggaggctgagacaggagaatcgcttgaacccgggagacagaggttgctgtg

SEQ ID NO: 17635 - DNA, 120 bp, synthetic construct
  source 1..120: mol_type = other DNA
tgaaatctttttagacttcctatgcacttaactataaaattcagactccttaccaagaactaccagatgcaccttgcctggctccttttcatccctccctccttctcccattcgtctcat

SEQ ID NO: 17636 - DNA, 120 bp, synthetic construct
  source 1..120: mol_type = other DNA
tgaactccttgtttgtaatcgtttttcagatataatctattcaacgagatcttccttgactacttaatctaaattaaaatccctcctccccagctaatctctatcacatttccatgtgtt

SEQ ID NO: 17637 - DNA, 120 bp, synthetic construct; identical to SEQ ID NO: 5529
  source 1..120: mol_type = other DNA

SEQ ID NO: 17638 - DNA, 120 bp, synthetic construct
  source 1..120: mol_type = other DNA
ctttaggaatagtgttccgtgtagatgttgatttcttactatgcaattttacggacattgtcttccaatatttccgtagactaattggtcaggacctgatagccctgtgataatgctgca

SEQ ID NO: 17639 - DNA, 120 bp, synthetic construct
  source 1..120: mol_type = other DNA
ctgatgtgtatattaaatatcccattcagtcaaggttatctagggtgatatattcaagaaatataatgctaactcatttatgtggtgatggagatccgtgtttaatgatattgatcatca

SEQ ID NO: 17640 - DNA, 120 bp, synthetic construct
  source 1..120: mol_type = other DNA
ctctgtcacccaggctgaagtatagtggtgtgatcatggctcattttggcctcaaactcttgggctcaagcaatcctcccatttcagtctttccagtcactgggattaatggtgtgtgcc

SEQ ID NO: 17641 - DNA, 120 bp, synthetic construct; identical to SEQ ID NO: 5530
  source 1..120: mol_type = other DNA

SEQ ID NO: 17642 - DNA, 120 bp, synthetic construct
  source 1..120: mol_type = other DNA
taggtaaaagctggaagcattccctttaagaactggaataagacaagaattctgacactactcttattcaacgtagtactgaaaatcctagccaaataaatcaggcaagagagagaaata

SEQ ID NO: 17643 - DNA, 120 bp, synthetic construct
  source 1..120: mol_type = other DNA
atacaaaatcaatgtaaaaaatcaatagcatttctatacaccaataatgttcaagctgagagccaaatcaagaatgtaattccctttaaaatacacacacacacacacacacacacacac

SEQ ID NO: 17644 - DNA, 120 bp, synthetic construct
  source 1..120: mol_type = other DNA
catgcttatggattggaagaatcaacaacataaacaaaatgtctaaattttaccgcctaaagcaatctacagattcaacactattcctattaaattaccaacgtcattttacacagaact

SEQ ID NO: 17645 - DNA, 120 bp, synthetic construct; identical to SEQ ID NO: 5531
  source 1..120: mol_type = other DNA

SEQ ID NO: 17646 - DNA, 120 bp, synthetic construct
  source 1..120: mol_type = other DNA
tcaagaaagattaaagacttaaatgtaaagccccaaactataaaaatcctggggaaaaaactcagaaatacccttttggacattggccttggcaaagaacttatgaccaagtcctcaaaa

SEQ ID NO: 17647 - DNA, 120 bp, synthetic construct
  source 1..120: mol_type = other DNA
caaactatgcatctgacaaaggactaatatccagaatctataaggaacctaaacaaatcaacaagagaaaaacaaataaccccattaaagaatgggcaaagaacatgaatggacaattct

SEQ ID NO: 17648 - DNA, 120 bp, synthetic construct
  source 1..120: mol_type = other DNA
ctaaaaagtaaaataatgacagatattgatgaggctgcagagaaaatggaacacttttatactgctggtgggaatgtagattagttcagccactatggaaagtagtttgggaatttctca

SEQ ID NO: 17649 - DNA, 120 bp, synthetic construct; identical to SEQ ID NO: 5532
  source 1..120: mol_type = other DNA

SEQ ID NO: 17650 - DNA, 120 bp, synthetic construct
  source 1..120: mol_type = other DNA
tacatacagacataaagatggaaacagtagacactagggattccaaaaggaaggagaggaggagaggagcaaggactgaaaaatttcctattgtatactatattcactgtctgggtgaca

SEQ ID NO: 17651 - DNA, 120 bp, synthetic construct
  source 1..120: mol_type = other DNA
cataaaatatacacttatgcaatttatgaaaataatatagttttacctctgttcttttcactgcagctttgtgaaggtataattaacaagtaaaaattgcatacacttactatgtgtatg

SEQ ID NO: 17652 - DNA, 120 bp, synthetic construct
  source 1..120: mol_type = other DNA
caaatttcaaatattaaatactgtattgttaactatattcaccatgctgcatattaaatccccagaacttgttcgccttataactgaaagcttgtaccttctgaccaacatctccctatt

SEQ ID NO: 17653 - DNA, 120 bp, synthetic construct; identical to SEQ ID NO: 5533
  source 1..120: mol_type = other DNA

SEQ ID NO: 17654 - DNA, 120 bp, synthetic construct
  source 1..120: mol_type = other DNA
ccatactgttttctaaaatggctgttccaatttacattcccaccagtagtgcataaggattccctttctttctgaatccttgccaatacttgttatctcgtctcgataatagccatccta

SEQ ID NO: 17655 - DNA, 120 bp, synthetic construct
  source 1..120: mol_type = other DNA
agctcaggtcctttggccgtttaaaaatcaatttattgtattatttttgctatggagttgtttgaattccttgtattttttggatattaactccttatcagatttgtgagttacgtaaga

SEQ ID NO: 17656 - DNA, 120 bp, synthetic construct
  source 1..120: mol_type = other DNA
catatatgtgaggatttatttttggggacttgattctgttccattggtttgtgtgtctgcttttatgccagtatcatacagttttgattcttatggttctgtaatatggtttcaagtcag

SEQ ID NO: 17657 - DNA, 120 bp, synthetic construct; identical to SEQ ID NO: 5534
  source 1..120: mol_type = other DNA

SEQ ID NO: 17658 - DNA, 120 bp, synthetic construct
  source 1..120: mol_type = other DNA
agataattcagtgttactgtacagaaacacaattattttatggcacatgtatacatatgtaactaacctgcacaatgtgcacatgtaccctaaaacttaaagtataataaaaaaaaaaga

SEQ ID NO: 17659 - DNA, 120 bp, synthetic construct
  source 1..120: mol_type = other DNA
cctccttttttgtgatgagaatatttaaaatataatattttggcaatttttaagaatacaatatattgttattaagtatggccatcatgatgtacaatagatcacttgaatttattcctc

SEQ ID NO: 17660 - DNA, 120 bp, synthetic construct
  source 1..120: mol_type = other DNA
tctgtgtctcacttatttcacttaatgtcctccaggaaatacatgttataattaatggcaagctttctttcttttttaaaattactgaatagtattctatagtgtatataaaccacatct

SEQ ID NO: 17661 - DNA, 120 bp, synthetic construct; identical to SEQ ID NO: 5535
  source 1..120: mol_type = other DNA

SEQ ID NO: 17662 - DNA, 120 bp, synthetic construct
  source 1..120: mol_type = other DNA
aatttgcatttttctaatgattggtgatgttgagcattttttatatacctggccatgtctttgagaaatgtctattcaatcatttgtccaatttttcattgggctgttagttttcttact

SEQ ID NO: 17663 - DNA, 120 bp, synthetic construct
  source 1..120: mol_type = other DNA
tctgtgcagaagctttttagtttgatgtaattctatttgtctatctttatttttgttgcgtgtgctttgaggatcacctaaaaaaaccattgctcaggccaatgtcatggaggttttccc

SEQ ID NO: 17664 - DNA, 120 bp, synthetic construct
  source 1..120: mol_type = other DNA
acatccagttttccaaacaccattcattaaagagactgttcttttctcattatgtgtttttggcacttttgttgaaaatcagttggctgtaaatacttggatttatttctaggttcctta

SEQ ID NO: 17665 - DNA, 120 bp, synthetic construct; identical to SEQ ID NO: 5536
  source 1..120: mol_type = other DNA

SEQ ID NO: 17666 - DNA, 120 bp, synthetic construct
  source 1..120: mol_type = other DNA
ctttcacctctttggtttaatttatgcctgagcattttcatgttttgaaaataggattgttttattgattcttttaaaaatagtttgttgttagtgtaacactacttttttaaaaaaata

SEQ ID NO: 17667 - DNA, 120 bp, synthetic construct; identical to SEQ ID NO: 5537
  source 1..120: mol_type = other DNA

SEQ ID NO: 17668 - DNA, 120 bp, synthetic construct
  source 1..120: mol_type = other DNA
attttctttatccagtttatcattgttgggcatttgggttggttccaagtctttgctattgtgaacagtgctgcaatagacaaacgtgtgcatgtgtctttatagtagcatgatttataa

SEQ ID NO: 17669 - DNA, 120 bp, synthetic construct
  source 1..120: mol_type = other DNA
cactgtcttctacaatggttgaactaatttacactcccaccaacatcgtaaaagtgttcctatttctccacatcttctccagcatctgttgtttcctgactttttaatgatcaccattct

SEQ ID NO: 17670 - DNA, 120 bp, synthetic construct
  source 1..120: mol_type = other DNA
gtttatatcctttgcccactttttgatagggttgtttgatttttttcttgtaaatttaagatacttgtagattctggatattagccctttgtcagatggatagattgcaaaaattttctc

SEQ ID NO: 17671 - DNA, 120 bp, synthetic construct; identical to SEQ ID NO: 5538
  source 1..120: mol_type = other DNA

SEQ ID NO: 17672 - DNA, 120 bp, synthetic construct
  source 1..120: mol_type = other DNA
cagatggttgcagatgtgtggtgttatttctgaggcctctcttctgttccattgctctatatatttgttttggtaccagtaccatgctgttttggttactgtagccttgtagtatagttt

SEQ ID NO: 17673 - DNA, 120 bp, synthetic construct; identical to SEQ ID NO: 5539
  source 1..120: mol_type = other DNA

SEQ ID NO: 17674 - DNA, 120 bp, synthetic construct
  source 1..120: mol_type = other DNA
ctcatgatttggctatttgtttgtctattactggtgtataagaatgcttgtgatttttgcatgttgattttgtatcctgagagtttgctgaagttgcttatcagcttaaggagattttgg

SEQ ID NO: 17675 - DNA, 120 bp, synthetic construct
  source 1..120: mol_type = other DNA
agaacttccaatactatgttgagtaggcgtggtgagaaagggcatctttgtcttgtgctggttttccaagaaaatgcttccagctcttgcctattcagaatgatactggctgtgggtttg

SEQ ID NO: 17676 - DNA, 120 bp, synthetic construct
  source 1..120: mol_type = other DNA
atgtggtttttgtcgttggttctgtttatctgatggattacgtttattgatttgtgtatgttgaaccagccttacatcccagggatgaagctgactagctcatggtgaataagctttttg

SEQ ID NO: 17677 - DNA, 120 bp, synthetic construct; identical to SEQ ID NO: 5540
  source 1..120: mol_type = other DNA

SEQ ID NO: 17678 - DNA, 120 bp, synthetic construct
  source 1..120: mol_type = other DNA
tatgtgtccagaagtttatcaatttcttctagattttctggtttatttgcgtagtggtgtttataatattctctgatggtagtttgtatttctgtgagatcagtggtgatatctctttat

SEQ ID NO: 17679 - DNA, 120 bp, synthetic construct
  source 1..120: mol_type = other DNA
agttatttcttgtcttctgctagcttttgaatttgtttgctcttgcttctctagttcttctaattgtgatgttaaggtgtcagttttagatcttttcctctttctgatgttggcattcag

SEQ ID NO: 17680 - DNA, 120 bp, synthetic construct
  source 1..120: mol_type = other DNA
ccagtagtcattcaggagcaggttgttcagtttccatgtagttgtgtagttttgagtgagtttcttaatcttgagttctaatttgattgcactgtggtctgagagactgttttgtatgat

SEQ ID NO: 17681 - DNA, 120 bp, synthetic construct
  source 1..120: mol_type = other DNA
gatgtctattaggtctgcttggtccagagctgagttcaagttctgaatatccttattaattttctgtctcactgatctgtctaatattgacagtggggtgttaaagtctcccactattat

SEQ ID NO: 17682 - DNA, 120 bp, synthetic construct; identical to SEQ ID NO: 5541
  source 1..120: mol_type = other DNA

SEQ ID NO: 17683 - DNA, 120 bp, synthetic construct
  source 1..120: mol_type = other DNA
atttagcccatttatatttaaggttaatattgttatgtgtgaatttgatcatgtcattatgatgctagctggttattttgcctgttagttgatgcagtttcttcataatgtcaatagtct

SEQ ID NO: 17684 - DNA, 120 bp, synthetic construct
  source 1..120: mol_type = other DNA
agtatacaaagaccatttctttccttcctccctccctccctttctctctctctttctttctctctctcttttgttcattccgatttgtatgcttttaatttctttctcttgcctaattgc

SEQ ID NO: 17685 - DNA, 120 bp, synthetic construct
  source 1..120: mol_type = other DNA
catggtctttattgtgttgtcatacattccttataaccaatttgttgagacatttcttatgaagaaatgttgaatgtttttcaaattcttttccaatctcaaagtaccagaattcttcct

SEQ ID NO: 17686 - DNA, 120 bp, synthetic construct; identical to SEQ ID NO: 5542
  source 1..120: mol_type = other DNA

SEQ ID NO: 17687 - DNA, 120 bp, synthetic construct
  source 1..120: mol_type = other DNA
aattcaattctccaatgcctactctcataatctaaagaaagcaaggcagaagtgttttcctgaaaggaagaatctttgtttttagttttttaaagattaggtttactggatgtcagaaaa

SEQ ID NO: 17688 - DNA, 120 bp, synthetic construct
  source 1..120: mol_type = other DNA
ctttggggttgttgtgtgaggcctaggaggagcacactagcagtggccagtcttctttaatcaagaacagccttatacattccatgttatgtgtgctatgatgtgaaaatatttggaaaa

SEQ ID NO: 17689 - DNA, 120 bp, synthetic construct
  source 1..120: mol_type = other DNA
gagggtgcacttgctgatatgaagttttattttatacaaatcctggagaagctaagtgaggccatgtcagtgttgccagaagacatgagaatcatgccagatctctgtggcttaacattg

SEQ ID NO: 17690 - DNA, 120 bp, synthetic construct; identical to SEQ ID NO: 5543
  source 1..120: mol_type = other DNA

SEQ ID NO: 17691 - DNA, 120 bp, synthetic construct
  source 1..120: mol_type = other DNA
caaaaggtggatgcgaaataaccataaatatatgtcagaagagtaaaaaaagccagcaagttaagatagcaacaaaatatggctaaaatgagcattgcaatgtccaggaaagcataaact

SEQ ID NO: 17692 - DNA, 120 bp, synthetic construct
  source 1..120: mol_type = other DNA
tgatgaatattttctactgcacttggagaagttaaattgatgtcagggactcagggacttagaattggggagaatgaagcaatcagaaagtaagtaccagtcaatcatcagtcaaaaggg

SEQ ID NO: 17693 - DNA, 120 bp, synthetic construct
  source 1..120: mol_type = other DNA
attgtttaagatgatgtaaaaattttccaagttcgtttacaatttaaagagtttgtattgtttagaagtctgtaaaggatgtgagagaaacactgggtaattcttcttcatgtattttta

SEQ ID NO: 17694 - DNA, 120 bp, synthetic construct; identical to SEQ ID NO: 5544
  source 1..120: mol_type = other DNA

SEQ ID NO: 17695 - DNA, 120 bp, synthetic construct
  source 1..120: mol_type = other DNA
agaacattttaaaggcaactaaaaagatcagccatgctcattaagtaacagatacctacagaaaatgtctgtctttgtcttgcatttaaaaattgatatatcatagttatacataggcca

SEQ ID NO: 17696 - DNA, 120 bp, synthetic construct
  source 1..120: mol_type = other DNA
cattagatataactcctaacgctatccctcccccctccccccaccccacaacaggccctggcacgtgatgttccccttcctgtgaccatgtgttctcattgttcaattcccacctatgag

SEQ ID NO: 17697 - DNA, 120 bp, synthetic construct
  source 1..120: mol_type = other DNA
ttccatggtgtatatgtgccatattttcttaatccagtctatcattgttggacatttgggttggttccaagtctttgctattgtgaatagtactgcaataaacatgcatgtgcatgtgtc

SEQ ID NO: 17698 - DNA, 120 bp, synthetic construct; identical to SEQ ID NO: 5545
  source 1..120: mol_type = other DNA

SEQ ID NO: 17699 - DNA, 120 bp, synthetic construct
  source 1..120: mol_type = other DNA
cgctaccacgcccggctaattttttgtatttttagtagagacggggtctcgatctcctgacctcgtgatccgcccgcctcggcctcccaaagtgctgggattacaggcgtgagccaccgc

SEQ ID NO: 17700 - DNA, 120 bp, synthetic construct; identical to SEQ ID NO: 5546
  source 1..120: mol_type = other DNA

SEQ ID NO: 17701 - DNA, 120 bp, synthetic construct
  source 1..120: mol_type = other DNA
tttgtcaattttggcttttgttgccattgcttttggtgttttagacatgaagtccttgcccatgcctatgtcctgaatggtattgcctaggttttgttctagggtttttctggttttagg

SEQ ID NO: 17702 - DNA, 120 bp, synthetic construct
  source 1..120: mol_type = other DNA
ggaatcctttccccattgcttatttttgtcagatttgtcaaagattagatagctgtagatatgtggcgttatttctgagggctctgttctgttccattggtctatatctctgttttggta

SEQ ID NO: 17703 - DNA, 120 bp, synthetic construct
  source 1..120: mol_type = other DNA
gttccatatgaactttaaagtacttttttccaattctgtgaagaaagtcattggtagcttgatggggatggcgctgaatctataaattacctttggcagtatggccattttcacaatatt

SEQ ID NO: 17704 - DNA, 120 bp, synthetic construct
  source 1..120: mol_type = other DNA
aggtattttattctctttgaagcaattgtgaatgggagttcactcatgatttggctctctgtttgtctgttattggtgtataagaatacttgtgatttttgcacattgattttgtatcct

SEQ ID NO: 17705 - DNA, 120 bp, synthetic construct; identical to SEQ ID NO: 5547
  source 1..120: mol_type = other DNA

SEQ ID NO: 17706 - DNA, 120 bp, synthetic construct
  source 1..120: mol_type = other DNA
aatccatatgaaagaccagagatcagctaattttccccacaagagccagatggaaaatagttcaggttttgcaggccaggaagcaaaatttaaatattatgaaataattaaatattaaat

SEQ ID NO: 17707 - DNA, 120 bp, synthetic construct
  source 1..120: mol_type = other DNA
atagtgaatgctagaaaaaaaatgcagaacaaggggaactcttatttattactgatgagaatgcaaaatgttaaaatcactttgaggaaccacttggcagtttcttataaagcttaaaat

SEQ ID NO: 17708 - DNA, 120 bp, synthetic construct
  source 1..120: mol_type = other DNA
atctggaggcatcacattacctgatttgaaactatactataaggccatagtcaccaaaacagcatggtatgggtataaaagtaggcacatagacccatggaacagaagagagaaccaaga

SEQ ID NO: 17709 - DNA, 120 bp, synthetic construct; identical to SEQ ID NO: 5548
  source 1..120: mol_type = other DNA

SEQ ID NO: 17710 - DNA, 120 bp, synthetic construct
  source 1..120: mol_type = other DNA
aggcaggagaatggcgtgaacccaggcagcagagcttgcagtgagctggtattgagccactgcactctagcctgggggacagagcaagactctgtctaaaaaaaaaaaaaaaaagatgga

SEQ ID NO: 17711 - DNA, 120 bp, synthetic construct
  source 1..120: mol_type = other DNA
atgcaacaaaatccaagataaataggtggggtttaatgaaactaaagagctttggcacagcaaaagaacagtcagcagagtagattactcacaaagtgggagaaaatttttcacaatcta

SEQ ID NO: 17712 - DNA, 120 bp, synthetic construct
  source 1..120: mol_type = other DNA
tctcaaaagaagatatacaaatggccagcaaacatatgaataaatgctcaacatcactaatgatcagagaaatgcaaatcaaaactgccatgagataccaaccttactcctgcaagaatg

SEQ ID NO: 17713 - DNA, 120 bp, synthetic construct
  source 1..120: mol_type = other DNA
ccttaaagaactaaaagtggaactaccatttgatccagcaatccccttactgggtatctactcagaggaaaagaagtcattatacgaaaaatatacttgcacatgcatgtttatagcagc

SEQ ID NO: 17714 - DNA, 120 bp, synthetic construct; identical to SEQ ID NO: 5549
  source 1..120: mol_type = other DNA

SEQ ID NO: 17715 - DNA, 120 bp, synthetic construct
  source 1..120: mol_type = other DNA
tgctcaggtggtgggtgcaccaaaatctcacaaatcaccactaaagaacttatgtaaccaaataccacctgttacctaaaaacctatggagataaaaaatttaaaaaaacattcagctac

SEQ ID NO: 17716 - DNA, 120 bp, synthetic construct
  source 1..120: mol_type = other DNA
taaaaaatacttatttagagcccattctctcaatacaggtcagtactatgaaggagaggtacacagtgaaatcaggcctagtccttacagacatgttggtatgccagggagtcaactttc

SEQ ID NO: 17717 - DNA, 120 bp, synthetic construct
  source 1..120: mol_type = other DNA
acagtggaaatacatgaaggatgggcagatgtgtgaaggcctcaaatgaatgtatgtagttgttagaaaaacaaatgtttttcttaaacacaagttgaaagacaggggagcagaggaagt

SEQ ID NO: 17718 - DNA, 120 bp, synthetic construct; identical to SEQ ID NO: 5550
  source 1..120: mol_type = other DNA

SEQ ID NO: 17719 - DNA, 120 bp, synthetic construct
  source 1..120: mol_type = other DNA
tcccattgaagggtgagtggctctcaatattaagagacaacatagaaatttctgaagattttaacttctccatctgataacctagaaataattacttcagtcaaatacctcagaaggaag

SEQ ID NO: 17720 - DNA, 120 bp, synthetic construct
  source 1..120: mol_type = other DNA
tgatcttgctggcaatccataaaaagttaatttgcaaataaaagattagcctttaaatcacattcataataacaagaaggtaaactgcagtctatattactcatatatatttttcaaagt

SEQ ID NO: 17721 - DNA, 120 bp, synthetic construct
  source 1..120: mol_type = other DNA
aaggacatagttctcactaccatgcaaattgcagacaatctgaggattaggattcacacttgaaatgatatccaacaaaccccattgtgtggtacaaaagcatatatgtagacagggtgg

SEQ ID NO: 17722 - DNA, 120 bp, synthetic construct; identical to SEQ ID NO: 5551
  source 1..120: mol_type = other DNA

SEQ ID NO: 17723 - DNA, 120 bp, synthetic construct
  source 1..120: mol_type = other DNA
gaatcctcagcacagtagctacaatgaatccacagtaagcaaagataattgattagagaacgagggactaaaatatcctcacaatggagagcatagatacattgaatgtggtgtcaaaac

SEQ ID NO: 17724 - DNA, 120 bp, synthetic construct
  source 1..120: mol_type = other DNA
atggccactaggaggacacagagttgctgatgcatgatagctgggtacctcaagtgtttgcagatggcaatgtaaggatccaaagacgtcacagctaaaatgatgcatttggtgctcccc

SEQ ID NO: 17725 - DNA, 120 bp, synthetic construct
  source 1..120: mol_type = other DNA
gaatgaagatctttcgagcaattgcattgcccagattcctgtcattgctcttgttggtggatttgagggaaaggaaaggctactttagtattgaatttttctgatactccacttattcag

SEQ ID NO: 17726 - DNA, 120 bp, synthetic construct
  source 1..120: mol_type = other DNA
gatgtaactaaactgatgtgatttgacacttgtaagcatgaaaaattttatctaaaggccaaaatgttacctttctagtgcctctaaaaggaagatcaacaaatctctgtatcttaccca

SEQ ID NO: 17727 - DNA, 120 bp, synthetic construct; identical to SEQ ID NO: 5552
  source 1..120: mol_type = other DNA

SEQ ID NO: 17728 - DNA, 120 bp, synthetic construct
  source 1..120: mol_type = other DNA
ttacctcttcttcccaaatcctggaatgacgatcgccaacataaaacttttgtcataaaaggaagcacacagctgaaaggaaatggttccttgcaacacgttcagtacttacaagacaag

SEQ ID NO: 17729 - DNA, 120 bp, synthetic construct
  source 1..120: mol_type = other DNA
ttattgatttattttacttattctcatcactcattttatatatgtgtttgtatgacctggattctgatgtacaatatattccttactataggtaatggtaaaaaatttggacaatactgg

SEQ ID NO: 17730 - DNA, 120 bp, synthetic construct
  source 1..120: mol_type = other DNA
ggtcttgcttaaatattcagaaacttctttatctatcttgctccgttgtggagattaattagcaccatatgtgtgaacacgctttattaagtccaatactcaatgttgggttggttattt

SEQ ID NO: 17731 - DNA, 120 bp, synthetic construct; identical to SEQ ID NO: 5553
  source 1..120: mol_type = other DNA

SEQ ID NO: 17732 - DNA, 120 bp, synthetic construct
  source 1..120: mol_type = other DNA
ggctatcctataggcagtgtgcccacagtagccttttttaaaatagtttttttagtatgcaaattttcataaggagatcacaacatgcatgtggttgtataaaaagattaaatcaatcaa

SEQ ID NO: 17733 - DNA, 120 bp, synthetic construct
  source 1..120: mol_type = other DNA
caaaaaagaacattaatctttttcttccatcagaattcagtgttaattggggataaagattgaatgttctttctgtattcagtggttttatgtcatatcagaggtctttaatagttattt

SEQ ID NO: 17734 - DNA, 120 bp, synthetic construct
  source 1..120: mol_type = other DNA
ttttctgaaataggacatacatgcactctgataaaacagaatgaaacatcttaattcatgagaattcctgtacaaggcgctgatcctgtgtttagagctgagctcctcacagcagctgcc

SEQ ID NO: 17735 - DNA, 120 bp, synthetic construct; identical to SEQ ID NO: 5554
  source 1..120: mol_type = other DNA

SEQ ID NO: 17736 - DNA, 120 bp, synthetic construct
  source 1..120: mol_type = other DNA
cattcagtacctggcagtgaaaaagtatgtttcccgaacaagtcagtactgaagactgagaactccaactaaataactatactctctccccaataatatgttatccacattttccctacc

SEQ ID NO: 17737 - DNA, 120 bp, synthetic construct
  source 1..120: mol_type = other DNA
accaatttcacatgtgacactaagaaaatggaatgctataaaatcaatcctcatcaccgtggtagggatgctgttgcttttatcctgagtctttactgccaataagtgatgctgcttcca

SEQ ID NO: 17738 - DNA, 120 bp, synthetic construct
  source 1..120: mol_type = other DNA
gttaacctttactttaaacacagcaacgtagatatctaaggagataagatgtaagacaaagagctcaggaaaaatccaatagagaccaaattctgcaaatggaaattttaaagcccagtg

SEQ ID NO: 17739 - DNA, 120 bp, synthetic construct; identical to SEQ ID NO: 5555
  source 1..120: mol_type = other DNA

SEQ ID NO: 17740 - DNA, 120 bp, synthetic construct
  source 1..120: mol_type = other DNA
taacttacactataattaactgctcaatagtgaatgatctgctacacattccttgagaaggaatgaccctagcttaccacagtggaaacctgccgcaattacaaggccaggattctgccc

SEQ ID NO: 17741 - DNA, 120 bp, synthetic construct
  source 1..120: mol_type = other DNA
ctcaccaacctgctaactcagcaggagtgagtttacccaaatgagctctggcctccaatgtgtatctgttcataattttatgaagtatctaaatgtcattcattagtttaaaaaagaata

SEQ ID NO: 17742 - DNA, 120 bp, synthetic construct
  source 1..120: mol_type = other DNA
tagaatcactttcttttgaaatcaaccagagtggtgagatgtgtttttcttttcaggtgccccataatggcacacagctttactcagcaacccctgccagcttccaagccccaggatact

SEQ ID NO: 17743 - DNA, 120 bp, synthetic construct
  source 1..120: mol_type = other DNA
agacctttcattgttctattagaaaagtccatgaagaagctgtgaacaggatcagtccagaggagaaaaactcttattttctctgtccaaacatcagtcaatacattgggagagccagca

SEQ ID NO: 17744 - DNA, 120 bp, synthetic construct; identical to SEQ ID NO: 5556
  source 1..120: mol_type = other DNA

SEQ ID NO: 17745 - DNA, 120 bp, synthetic construct
  source 1..120: mol_type = other DNA
acatgcttgcttgtgtccaccaagatcaagagttgtaaaagtcattccagcaattaatagcttttctgatgtcggatgtagtgttggaacatgttgacccaatctgtcatctttgagcat

SEQ ID NO: 17746 - DNA, 120 bp, synthetic construct
  source 1..120: mol_type = other DNA
gaaagacattattcatgcttattatggcctgaagggctcctccagcaaaggtgggtggcccaggccctccctcagagcacaccccaaatattttcaaatatgaaaacctacttactcttt

SEQ ID NO: 17747 - DNA, 120 bp, synthetic construct
  source 1..120: mol_type = other DNA
tcaacccatcacgtatgtattaagcccagcatgcattagctatttttcctgatgttctccctcccctctccacccccagacaggccccactgtgtgttgttctcctccctgtatccatgt

SEQ ID NO: 17748 - DNA, 120 bp, synthetic construct; identical to SEQ ID NO: 5557
  source 1..120: mol_type = other DNA

SEQ ID NO: 17749 - DNA, 120 bp, synthetic construct
  source 1..120: mol_type = other DNA
aattccttagtgggtatgcttccctctaacttccttgccataataaaatgaaatgataaattttggcacctgttatttataatggactcaggtctgagagaagccaaggaaactgaatct

SEQ ID NO: 17750 - DNA, 120 bp, synthetic construct
  source 1..120: mol_type = other DNA
atttctgctaccatagagccatcataatcctagttccacatacagacaaaagaagtcttcaataatttcttccacaataacccaacacagtatagactttttaccttccattgactacat

SEQ ID NO: 17751 - DNA, 120 bp, synthetic construct
  source 1..120: mol_type = other DNA
tgaaaacttttggccatgggcttgtttttaaagtaattgcttttttcacccatggttcacaattagcagcagatctagcaatctggaatccttctagccaagttcacactgatcatctca

SEQ ID NO: 17752 - DNA, 120 bp, synthetic construct
  source 1..120: mol_type = other DNA
taaaacaatatttaattgacaataaagattgtatatattcaaggtgtgcagtgtgatgatttgatatacgtataccctttgtttttatttcttttctgtctgaatccactcccacccaat

SEQ ID NO: 17753 - DNA, 120 bp, synthetic construct; identical to SEQ ID NO: 5558
  source 1..120: mol_type = other DNA

SEQ ID NO: 17754 - DNA, 120 bp, synthetic construct
  source 1..120: mol_type = other DNA
ggaacatcccacactggggcctgtcagggatggaggactgggggagggatagcattaggagaaatacctaatgtagatgacaggttggtgggtgcagcaaaccaccatggcacatgtata

SEQ ID NO: 17755 - DNA, 120 bp, synthetic construct
  source 1..120: mol_type = other DNA
atgaatacatgaagggggaaaagggaaaactcttaatggcacatcagttaataaatatagagggcatactaggattggagaattattaatagatgttaaaattagtgggtgaaagtttaa

SEQ ID NO: 17756 - DNA, 120 bp, synthetic construct
  source 1..120: mol_type = other DNA
ccatgttagtcaagtgactaaagttaacagcatcgattttaagacaaactatccttatacacttttctgaaatgttgcatcattattggctcctgaatgggagaaaatataaagaacatt

SEQ ID NO: 17757 - DNA, 120 bp, synthetic construct; identical to SEQ ID NO: 5559
  source 1..120: mol_type = other DNA

SEQ ID NO: 17758 - DNA, 120 bp, synthetic construct
  source 1..120: mol_type = other DNA
acttgtggttatgatacttcctgccagatcaaggccttagcatctactgttttgtctactctgaagaatttactacctcacttatagatctgagcctaaatgacacttccctagaagagc

SEQ ID NO: 17759 - DNA, 120 bp, synthetic construct
  source 1..120: mol_type = other DNA
ttttctttctcccactagactataaagtttgtgagggaaggaattgtgtctgtcttattcactaacaaatactcggcaaatagcaaaatctgtatgtatagtaagcgattgaaaaacatt

SEQ ID NO: 17760 - DNA, 120 bp, synthetic construct
  source 1..120: mol_type = other DNA
gtgataataatgtagatacaagtaatataaaaatattttagaacattgatggtgattcaaattttagagctcaacccatcttatttttgttatttaagttactaatgccccccaaagtat

SEQ ID NO: 17761 - DNA, 120 bp, synthetic construct; identical to SEQ ID NO: 5560
  source 1..120: mol_type = other DNA

SEQ ID NO: 17762 - DNA, 120 bp, synthetic construct
  source 1..120: mol_type = other DNA
ctcaccacagttagcttggtgaacttatttctagtgttttcttacacatataggtatacataaaattagggtcatgttctaagtgtagaatcgtttcttgagttttctccaccacttaac

SEQ ID NO: 17763 - DNA, 120 bp, synthetic construct
  source 1..120: mol_type = other DNA
tgtttattgaatgttgctagggacttgtccatgtcattgtgcattagggatccaaactgatgaagtagacactatccaaagttctctagattgttgtgatagagggaaataaaagttgca

SEQ ID NO: 17764 - DNA, 120 bp, synthetic construct
  source 1..120: mol_type = other DNA
aaagtagctcctccatccattgttcttcataaccctcgggttccactcagttgttaggttcattatctgccttctaagttattgcaggtgatagtttatgaaatgtttccttattgtata

SEQ ID NO: 17765 - DNA, 120 bp, synthetic construct; identical to SEQ ID NO: 5561
  source 1..120: mol_type = other DNA

SEQ ID NO: 17766 - DNA, 120 bp, synthetic construct
  source 1..120: mol_type = other DNA
aggctcaggtgatccttctgcctcagcatcccctagtagctgggactacaagtgtttgctcctacacccaatgaatttttgtatttttttagagatgagttttcactactttgctcaggc

SEQ ID NO: 17767 - DNA, 120 bp, synthetic construct
  source 1..120: mol_type = other DNA
cttttactttaggttcaggggtacatgtgcaggtttgttacgtaggtaaatcgtatttcatagggtttgttgtatagactatttcaccacccaggtgataagcatagtatatgataggta

SEQ ID NO: 17768 - DNA, 120 bp, synthetic construct
  source 1..120: mol_type = other DNA
tttggttttctgtgcctacgttactttgcttaagaaaatggtcttcagctccatccatgttcctgcaaaaggcatcatctaattctttttctgtggctgcttagtattccatggtgtata

SEQ ID NO: 17769 - DNA, 120 bp, synthetic construct; identical to SEQ ID NO: 5562
  source 1..120: mol_type = other DNA

SEQ ID NO: 17770 - DNA, 120 bp, synthetic construct
  source 1..120: mol_type = other DNA
caacggacctcttccccaggagtcactgcgggccaagaacatgggccagaaacgagtccgggtactctgcaactccgtgcaaagttccgaggtttctcaccctccagcccaggttctatg

SEQ ID NO: 17771 - DNA, 120 bp, synthetic construct
  source 1..120: mol_type = other DNA
ggcccctctcagtttcaagctttactatcatatccctcatcatctgccatgtgatccttttgccagtgcctcatattttaatttcctaacatttgtttcaggctgattgagaacctacct

SEQ ID NO: 17772 - DNA, 120 bp, synthetic construct
  source 1..120: mol_type = other DNA
acatcatttctcttcacattttattggcaaatcatattaaacagccaggtctgcattcgataggacagggatgtgcaattttaccatctgcctagaaggggagaaaaaataaaatattta

SEQ ID NO: 17773 - DNA, 120 bp, synthetic construct; identical to SEQ ID NO: 5563
  source 1..120: mol_type = other DNA

SEQ ID NO: 17774 - DNA, 120 bp, synthetic construct
  source 1..120: mol_type = other DNA
attcatattgaattattggcagtagtagtaacaataatcaaaacaaggagtgtaaatatgctcaacaataggaaagtggttaaatagattttaatacacttccttggtgaaattaaattt

SEQ ID NO: 17775 - DNA, 120 bp, synthetic construct
  source 1..120: mol_type = other DNA
cctgcctcagcctcccgagtagctgggactacaggcgcctgccaccatgcccggctatttttttgtatttttagtagagacggggtttcaccgtgttatccaggatgatctcgatctcct

SEQ ID NO: 17776 - DNA, 120 bp, synthetic construct
  source 1..120: mol_type = other DNA
attttctgatataatgcacacgaaaaaacgcaaactccgctggtagtgagttgggagaagtgcataaaggtagattgggtaacaacagagatccaggtaaaaggtggatccctttgtgtt

SEQ ID NO: 17777 - DNA, 120 bp, synthetic construct; identical to SEQ ID NO: 5564
  source 1..120: mol_type = other DNA

SEQ ID NO: 17778 - DNA, 120 bp, synthetic construct
  source 1..120: mol_type = other DNA
ttatataatataattatatataatataataatatataatataataatatataatataattatatataatatatcattatcataattatatgtgatatagaactatatataatatataatt

SEQ ID NO: 17779 - DNA, 120 bp, synthetic construct
  source 1..120: mol_type = other DNA
gtgtccttacattactaactgtaaaccatcatttaaatgtctcagtttaagaatcattgccttctggaactagcacatttcttcagcagaggaactgtgatatttctcctctggactact

SEQ ID NO: 17780 - DNA, 120 bp, synthetic construct
  source 1..120: mol_type = other DNA
agaaaagatgccacatacctgaggtagaacttgggacaaataaggaatttaacaaaagggaagaaaggataaatgctatccggaggaataaagagatgaattgaaaatagaatttgaaat

SEQ ID NO: 17781 - DNA, 120 bp, synthetic construct; identical to SEQ ID NO: 5565
  source 1..120: mol_type = other DNA

SEQ ID NO: 17782 - DNA, 120 bp, synthetic construct
  source 1..120: mol_type = other DNA
aaacaaaaacaaagccagctagattgaagccaaattacataccaaaaacagttctgaaaaggtgcatatgatgaattttatcaagagatcagagggttcaaagtgtttgaagactttgat

SEQ ID NO: 17783 - DNA, 120 bp, synthetic construct
  source 1..120: mol_type = other DNA
ccatcaaagtctcctgactaccctgaagttgataggaaattgacatgacttgtctcaaggaacagagtacattgggggaacttctgaaaagaaaggagtttctaactttgaagacatgtc

SEQ ID NO: 17784 - DNA, 120 bp, synthetic construct
  source 1..120: mol_type = other DNA
ggcgcgatctgggctaactgcaacttctgactcctgggttcaagcgattctcttgccccagcctcctgagtatctgggattacaggcgtgtaccaccatgccctgctaatttttttgtac

SEQ ID NO: 17785 - DNA, 120 bp, synthetic construct; identical to SEQ ID NO: 5566
  source 1..120: mol_type = other DNA

SEQ ID NO: 17786 - DNA, 120 bp, synthetic construct
  source 1..120: mol_type = other DNA
tatctttatttctaaggctgtagatgagggagttcaacatggatgtgatgattccatagaagagggaaaccatctttccccagtccttagaggtggatgaaggtggttgaagatacatat

SEQ ID NO: 17787 - DNA, 120 bp, synthetic construct
  source 1..120: mol_type = other DNA
gacctgatttttaatactgcttgagctatgaagccataggagatgaggatcaatgtcactggaattagaagaattagtacactaaagaagaagagctcagcctcaataggctttgtgtca

SEQ ID NO: 17788 - DNA, 120 bp, synthetic construct
  source 1..120: mol_type = other DNA
agccatgagaaggctgccatccttaggcagaaccaataattcatgatgactacatagtggaggggtctgcaaacagccacatatctgtcaaaggacataacagccagaaggagacactct

SEQ ID NO: 17789 - DNA, 120 bp, synthetic construct
  source 1..120: mol_type = other DNA
taccaacatatgagggactgtagttgtggtatagcagagatctaagatggagagattagtgagaaagaaatacatgggagtatgaagtttgggatccagaatgcacaccatcatgatgga

SEQ ID NO: 17790 - DNA, 120 bp, synthetic construct; identical to SEQ ID NO: 5567
  source 1..120: mol_type = other DNA

SEQ ID NO: 17791 - DNA, 120 bp, synthetic construct
  source 1..120: mol_type = other DNA
tacatttaaatgacataaagtatgtaacatatgcataacacatggaaaattgtgagttctcaatgcattttatgttctctcctcttcttacctcctaacctatcttaataaacagtttag

SEQ ID NO: 17792 - DNA, 120 bp, synthetic construct
  source 1..120: mol_type = other DNA
gtaacatctttacgtgtttttttgagttgtgtctgtctcctaaatgccatgcatgtaggtccatttccacaaagaactaccgtgggtattagtaataaaattatggctacttgtgatata

SEQ ID NO: 17793 - DNA, 120 bp, synthetic construct
  source 1..120: mol_type = other DNA
attctttgtaattctcatcaaacccctcacagtcatggtttgcattttattgcttctgtgattcagtaagaataaataatttgcacactcattattggtgaggtcaagactaacacctag

SEQ ID NO: 17794 - DNA, 120 bp, synthetic construct; identical to SEQ ID NO: 5568
  source 1..120: mol_type = other DNA

SEQ ID NO: 17795 - DNA, 120 bp, synthetic construct
  source 1..120: mol_type = other DNA
tttaccacagaataagataacttttccagagtaaaaacactgatatataaagtataatttgataatggaatgaataaatgaaaatgaacagagatgaccttgagatttttaacttcttcc

SEQ ID NO: 17796 - DNA, 120 bp, synthetic construct
  source 1..120: mol_type = other DNA
atttacaaaatgataaatatgtaaggtaatacatacattagataacttgatttagccactttataatgtacacatatatcaaaacatcatgttgtacactataaatatatacaattttta

SEQ ID NO: 17797 - DNA, 120 bp, synthetic construct
  source 1..120: mol_type = other DNA
attattacataataaatagaaaaagatcaaaagtccaatggaaaaaaatgagcaatggacataaataagcagtttggggaagaaaacaacataaaatgacagtgaaagtataaaagatta

SEQ ID NO: 17798 - DNA, 120 bp, synthetic construct; identical to SEQ ID NO: 5569
  source 1..120: mol_type = other DNA

SEQ ID NO: 17799 - DNA, 120 bp, synthetic construct
  source 1..120: mol_type = other DNA
atcaatagcagtatcattaatactaatcactaataagtcattaatagtaatactatatcattatctcagcttgtcttgtatatgagaaaacagaaaatttactattggtggttcaagtga

SEQ ID NO: 17800 - DNA, 120 bp, synthetic construct
  source 1..120: mol_type = other DNA
gtagtaggtgatatctggttatctaaagggcatggaataaaagaggaccctattcagtagctgttattttctactcctattttttcacgtcctcttctcttcacattttatatggcactg

SEQ ID NO: 17801 - DNA, 120 bp, synthetic construct
  source 1..120: mol_type = other DNA
caagaacatgttgattccactgtcacgttgactttttgtcctatttctattttctacatgaatcaaaagaaatcttaaatcccactgaccgtttttatgtacggagatataatgagcaaa

SEQ ID NO: 17802 - DNA, 120 bp, synthetic construct; identical to SEQ ID NO: 5570
  source 1..120: mol_type = other DNA

SEQ ID NO: 17803 - DNA, 120 bp, synthetic construct
  source 1..120: mol_type = other DNA
gaaattagcatgaaacctggactgcatcaagaacatgtgagaaaaatacttatgaggagaggaaaatgtgtatagttagtgtgtcttcagtcattggggcatttttgactgacatgggct

SEQ ID NO: 17804 - DNA, 120 bp, synthetic construct
  source 1..120: mol_type = other DNA
aagggagtaccactcacacaattctgtgtcctctttttagccctagagattctagagtccctcaagtttaattggtcattatgtccagagagtcaataagtcaactctattcctaactgg

SEQ ID NO: 17805 - DNA, 120 bp, synthetic construct
  source 1..120: mol_type = other DNA
tgaaaaataaatttaaagttgtttaattaggaaagcacaaggtttaatgaacttatagccccaaattccttttaaatagttgcaaggtcaaatagggagtcctatgatggcgtataggga

SEQ ID NO: 17806 - DNA, 120 bp, synthetic construct
  source 1..120: mol_type = other DNA
tatgtcatacaaagtcacttaacatattaatatacacattgaaatttaaggttagcattaattcactgggtcagaacacacagaaattacatgaaattgcaatagggggaatagtttttg

SEQ ID NO: 17807 - DNA, 120 bp, synthetic construct; identical to SEQ ID NO: 5571
  source 1..120: mol_type = other DNA

SEQ ID NO: 17808 - DNA, 120 bp, synthetic construct
  source 1..120: mol_type = other DNA
catctccaaaaaaaaaaagctgatttatgcaagttatgacttaatatgtgacttaataagtgcttatcctaagatcttagtaaaataaagaagttgtaattgaattgagcatcagcctag

SEQ ID NO: 17809 - DNA, 120 bp, synthetic construct
  source 1..120: mol_type = other DNA
gtaactatatgacatctgttgtagctaataatttatatataagtttaatagacatatatacatactttctatatgtaatatatatttgtaattagttttcaaatacaatttgttgtgctt

SEQ ID NO: 17810 - DNA, 120 bp, synthetic construct
  source 1..120: mol_type = other DNA
atggtggtttgctgcacctatcaacctgtcatttaggttttaagcccctcatgcattaggtatttgtcctaacgctctcctccctgtgccgccacccttcaacaggccccagtgtgtgat

SEQ ID NO: 17811 - DNA, 120 bp, synthetic construct; identical to SEQ ID NO: 5572
  source 1..120: mol_type = other DNA

SEQ ID NO: 17812 - DNA, 120 bp, synthetic construct
  source 1..120: mol_type = other DNA
gatctttgagaaatcgccacactgtcttccacaatggctgaactaatttacatttccactaacagtgtaaaagtgttcctatttctccccagcattgccaacatctgttgtttcctgact

SEQ ID NO: 17813 - DNA, 120 bp, synthetic construct
  source 1..120: mol_type = other DNA
atcaaatatcccgaatctctagaattttattgttgaatatgccttagttattacaagtggtctttattcttggtgacttagggattcccaagaaatgtgcaatcactcctggcaactcaa

SEQ ID NO: 17814 - DNA, 120 bp, synthetic construct
  source 1..120: mol_type = other DNA
aggtttgttacataggtatacatgtgccataatggtttgctgcacctatcaacctgtcatctttaagccctgcatgcattaggtatttgtcctaatgctctccctccccttgccccccac

SEQ ID NO: 17815 - DNA, 120 bp, synthetic construct; identical to SEQ ID NO: 5573
  source 1..120: mol_type = other DNA

SEQ ID NO: 17816 - DNA, 120 bp, synthetic construct
  source 1..120: mol_type = other DNA
acctgcctatgtgtctggttggaacatgaacatggaaacaaaccatttaatcatttactcaataaatctttatgtcatggtgataagtgtcaggcactgtcatgtgcacaggagatatat

SEQ ID NO: 17817 - DNA, 120 bp, synthetic construct
  source 1..120: mol_type = other DNA
aagaaaaagaaagcagggtaagagaatcaaaattagctgaggctgttactttagacagcatggtcagtcagtttctgtgagggggcaacatttgacctgaacagagttaggggttctcat

SEQ ID NO: 17818 - DNA, 120 bp, synthetic construct
  source 1..120: mol_type = other DNA
actaagcactaaactatttaaagatcttcgtctttacaaaggtactacaaaggaaactacaaagactgtagtttctgaagttaagaaatgcagaccgatcctttgtttctgcattcatcc

SEQ ID NO: 17819 - DNA, 120 bp, synthetic construct; identical to SEQ ID NO: 5574
  source 1..120: mol_type = other DNA

SEQ ID NO: 17820 - DNA, 120 bp, synthetic construct
  source 1..120: mol_type = other DNA
tgctaaatttattgtacttgatgaatgaatgtatttaggctagtcatggttactttggtttaaatgtctaaataacatctttagttttaaaaatgtgtttgtaatttgtactattgacag

SEQ ID NO: 17821 - DNA, 120 bp, synthetic construct
  source 1..120: mol_type = other DNA
tgtatatttgacaacctactaaaatgatttgctttgggaaaaaactgaaaaacaatactcaaacataggctgcctgtaagaggctaactttaacttaaagaacacacattgactgaaaaa

SEQ ID NO: 17822 - DNA, 120 bp, synthetic construct
  source 1..120: mol_type = other DNA
ttcatcaaaaggacgtaacaattgtaaatatatatacacctaatactagatcatctaaatgtataaagaaagtattaatagacctaaaaagaaacagactgcaatacagtaatagcaggg

SEQ ID NO: 17823 - DNA, 120 bp, synthetic construct; identical to SEQ ID NO: 5575
  source 1..120: mol_type = other DNA

SEQ ID NO: 17824 - DNA, 120 bp, synthetic construct
  source 1..120: mol_type = other DNA
aaagcaaaattaaaaaaaatcttaagacagatgaaaatgaaaacacaacataccacaacttatggcatgtagcaaaagaagatattagcaagaggaatgtttgtagtaataaatgcctat

SEQ ID NO: 17825 - DNA, 120 bp, synthetic construct
  source 1..120: mol_type = other DNA
aataaataagaagctagaaaacaatagaatgcattcacaaaactaagacttgaatttttgaaaagataaaaacaattggcaaaacttgagtagaccaactaagaagaaaagaagactcta

SEQ ID NO: 17826 - DNA, 120 bp, synthetic construct
  source 1..120: mol_type = other DNA
aatttctagaaacataacaaaaatgaatcatgaaaaaaacagaaaatctgaacagactaataatgagtaaggaggttgaatcagtaataaaagtcttctaccaaacaaaaacccagaata

SEQ ID NO: 17827 - DNA, 120 bp, synthetic construct; identical to SEQ ID NO: 5576
  source 1..120: mol_type = other DNA

SEQ ID NO: 17828 - DNA, 120 bp, synthetic construct
  source 1..120: mol_type = other DNA
gagataaactcatgcatttgtggttaactgatttttgccaaagatgccaagaatgaacacactatggagaaagggcagtatctttaataaatgatgctgggaaaatcaaatacccaaata

SEQ ID NO: 17829 - DNA, 120 bp, synthetic construct
  source 1..120: mol_type = other DNA
tgttcttgaaattaatcttggcaataatttattggtgatgatctcaatagcacaggaaaccaaagcagaaatagacaaatgggattacctcaaaccaaaaaccttctgtataacaaagta

SEQ ID NO: 17830 - DNA, 120 bp, synthetic construct
  source 1..120: mol_type = other DNA
gaaatgcaaacaacttaaatttgttagcaagaaaacaaagaaccccttttaaaactgagcaaaacacttaatggacatctttcaaaagatgacataaaagactaacagatacataacaaa

SEQ ID NO: 17831 - DNA, 120 bp, synthetic construct; identical to SEQ ID NO: 5577
  source 1..120: mol_type = other DNA

SEQ ID NO: 17832 - DNA, 120 bp, synthetic construct
  source 1..120: mol_type = other DNA
gtggaggtggttgtggttgtggatgttttcagtgtttttttcgtggaatacttctatatcctgatggagagctaatgcctaattgtcctatttatgaccaggtgtccctctcactggaaa

SEQ ID NO: 17833 - DNA, 120 bp, synthetic construct
  source 1..120: mol_type = other DNA
gtcagtcacgcgagacgcaagtaaaaaaaaacacgtaatagaagtagttttattacttaaagatccagagagaagaaggaaactttcctcacaggcctaacgggagaaggggcagccctc

SEQ ID NO: 17834 - DNA, 120 bp, synthetic construct
  source 1..120: mol_type = other DNA
tttaaagcaagcaggcatgagttcttgggagttatgttgtattgagaggtgttcactactgcaagtctgcagtccatgtggggtgtggggatcagtgggataagtcaaacaggttgtatc

SEQ ID NO: 17835 - DNA, 120 bp, synthetic construct; identical to SEQ ID NO: 5578
  source 1..120: mol_type = other DNA

SEQ ID NO: 17836 - DNA, 120 bp, synthetic construct
  source 1..120: mol_type = other DNA
aattctgtcttttcaacaacattcatgaacctgcaggacattatgcaaagtgaaagaagccagacacagaaagacaaataccacgtgatctcactcatatgtggaatctaaaaaagataa

SEQ ID NO: 17837 - DNA, 120 bp, synthetic construct
  source 1..120: mol_type = other DNA
aagacaactgggatggcataaataatataggtcagtctcaaagagcacgtcattagtaaggaatagatatacagtttagtctttatgtattctagtttttcagttgaatggctctgaaat

SEQ ID NO: 17838 - DNA, 120 bp, synthetic construct
  source 1..120: mol_type = other DNA
tcccatatttgtaagtgataaattcactgtcatcacagtaagactataacatcatactgaagatatttctgtgaagagttttgtactgagaacaccacaccaggacaacttgaagggcat

SEQ ID NO: 17839 - DNA, 120 bp, synthetic construct; identical to SEQ ID NO: 5579
  source 1..120: mol_type = other DNA

SEQ ID NO: 17840 - DNA, 120 bp, synthetic construct
  source 1..120: mol_type = other DNA
agagtgacagggaacagggacaaacacaggaaggtcagtactgaaagaagttggcgcacttcttaaggggtgtacagcttctgtatttcaaaattgcaggaagtgtagattttaaatgtt

SEQ ID NO: 17841 - DNA, 120 bp, synthetic construct
  source 1..120: mol_type = other DNA
ttactagtcaatgaaaaagtaagaaaacaaaccagatatagtataaaggaatgaatatgacacgaattgggaaaatgtctcttagtaataattggggaaagaagagacactcagccatcc

SEQ ID NO: 17842 - DNA, 120 bp, synthetic construct
  source 1..120: mol_type = other DNA
cttcatttccctcttttcctccaagaagaaaatcgaagctgcaaacttttctctacgtgagttctgggtttttttttttttttgtcccttatttcctatcctttttatcgactctggaag

SEQ ID NO: 17843 - DNA, 120 bp, synthetic construct
  source 1..120: mol_type = other DNA
tttgtcccttatttcctatcctttttatcgactctggaagaatgctgaaagatggtttatacaacagaaaaatatcagatttcaccttttaattactgtagtaaggaagtcaggcagctg

SEQ ID NO: 17844 - DNA, 120 bp, synthetic construct; identical to SEQ ID NO: 5580
  source 1..120: mol_type = other DNA

SEQ ID NO: 17845 - DNA, 120 bp, synthetic construct
  source 1..120: mol_type = other DNA
gtttttcaaaacactgaaggtgagttgggtgtaaataaatttgtcttttgtcatattttatcagagagtatgagaggaagagttggctgtggcaggaggggagcagaagggggatggcaa

SEQ ID NO: 17846 - DNA, 120 bp, synthetic construct
  source 1..120: mol_type = other DNA
aagcatataaaattttttagaaaccacatttaagtcttcttgtccctgtctaacaatcctgtgttatacattctttcaatttcaaatgccacattctgacctcctcttcactgttgtgcc

SEQ ID NO: 17847 - DNA, 120 bp, synthetic construct
  source 1..120: mol_type = other DNA
tatacccccatgtaactttggaagcactctatcactgatatctctactctatttcactttattaatcagctttgcttatattgtgaatttttataagttggtgtgtgtgtgcatgtctgt

SEQ ID NO: 17848 - DNA, 120 bp, synthetic construct
  source 1..120: mol_type = other DNA
tattttaaagtgactacctaattgctctttaacatgggaagttcctatctataagtaagattattatggctgcagttattcctttctctgtaactgcaaaattggaaatagtctgaaaat

SEQ ID NO: 17849 - DNA, 120 bp, synthetic construct; identical to SEQ ID NO: 5581
  source 1..120: mol_type = other DNA

SEQ ID NO: 17850 - DNA, 120 bp, synthetic construct
  source 1..120: mol_type = other DNA
tgcaagttttgaagacttctttcttctacttggattttctaactggcctcatctggaagtagttctctttgtggttatcttgatcttctacttgataacactgataggaaacctgttcat

SEQ ID NO: 17851 - DNA, 120 bp, synthetic construct
  source 1..120: mol_type = other DNA
ctggggcccggaaaagaccatctcttatgctggttgtacggttcaactttactttgttctcgcactgggaaccgcagagtgtgtcctactggtggtgatgtcctatgatcgttatgcagc

SEQ ID NO: 17852 - DNA, 120 bp, synthetic construct
  source 1..120: mol_type = other DNA
gttttacaacctcagcacttcattcctcctttactttctggatacccctatgtagacatcgcctagtggatcacttcttctgtgaagttccagcacttctgcgattatcatgtgttgata

SEQ ID NO: 17853 - DNA, 120 bp, synthetic construct; identical to SEQ ID NO: 5582
  source 1..120: mol_type = other DNA

SEQ ID NO: 17854 - DNA, 120 bp, synthetic construct
  source 1..120: mol_type = other DNA
gacagggaaatcatgttggctgttgtttttcctagggtcttatccattttgaaaggttgtttccctgcttctttgtgatttgtgtttcatctaacagctcacaaaacatggaatagttca

SEQ ID NO: 17855 - DNA, 120 bp, synthetic construct
  source 1..120: mol_type = other DNA
actgtggtttcaacataaataaatgtgtgtgtgaataattatgaggagattatttaaaaaatattggcaatatttctgacaatgtgctaaattatgaactgaccattgatatgtatagga

SEQ ID NO: 17856 - DNA, 120 bp, synthetic construct
  source 1..120: mol_type = other DNA
ttattatatggtaaaggatatgtcataattttttggttgaagttcactttttaaagacactaaattatataatttatcctgtaggtctgcattcttgtcacattgaacagtaaactaata

SEQ ID NO: 17857 - DNA, 120 bp, synthetic construct; identical to SEQ ID NO: 5583
  source 1..120: mol_type = other DNA

SEQ ID NO: 17858 - DNA, 120 bp, synthetic construct
  source 1..120: mol_type = other DNA
ttcatagctcctgtaggaagacagtgctattaaatgaaacaaagcagaatatgtgcttaatttgctttagttggcctagttaatgacatattaaagatagcttaaaactcttaacatcct

SEQ ID NO: 17859 - DNA, 120 bp, synthetic construct
  source 1..120: mol_type = other DNA
atcaaaccaaattgtgaaattattaccacagtcaaattaacacatccatcatctcacatcgttactgtgtgtagggggagcggggagggtcaggacacttaagatctaatctctaagcaa

SEQ ID NO: 17860 - DNA, 120 bp, synthetic construct
  source 1..120: mol_type = other DNA
cagaaagtttgtaccatttggctgtctctccacttcccaccctccagcccatggcaaccaccattctattctctgcttctatgggttcagttttttaatttttttgatacacggtctcac

SEQ ID NO: 17861 - DNA, 120 bp, synthetic construct
  source 1..120: mol_type = other DNA
ccacgcccagctaatttttgtattttagtagaaactagttctcaccatgttggccaggctggtcttgaacccctgacctgaaatgatccacctgccttggcctcccaaagtgctgggatg

SEQ ID NO: 17862 - DNA, 120 bp, synthetic construct; identical to SEQ ID NO: 5584
  source 1..120: mol_type = other DNA

SEQ ID NO: 17863 - DNA, 120 bp, synthetic construct
  source 1..120: mol_type = other DNA
attattgggatcacatcacatctcacacagacttcacaaaatatgagaacatagattcctcctgcctccgtggaaatcttaccatttgtaatatgtcatgtgtcactccagcttctcaag

SEQ ID NO: 17864 - DNA, 120 bp, synthetic construct
  source 1..120: mol_type = other DNA
ttagacatcaaatattggatttaataagctatcggaaaaagtgtataattataatcctttatactgtaacagtactacacaacttataaagcacattaatatattttgtttcattagaat

SEQ ID NO: 17865 - DNA, 120 bp, synthetic construct
  source 1..120: mol_type = other DNA
ttaagtagtcttgtctaaatgcacgcactaataaatggcaaatttgagtctcaaagacaggtttctcaatatcaaattgaaagaatagttcagtgagtttgacaaatgtataattgtgta

SEQ ID NO: 17866 - DNA, 120 bp, synthetic construct; identical to SEQ ID NO: 5585
  source 1..120: mol_type = other DNA

SEQ ID NO: 17867 - DNA, 120 bp, synthetic construct
  source 1..120: mol_type = other DNA
ttgggagtatttaaaatttttggctattatgaataatgctgctatgaaaatttgtatacaagtgtttgtgtggatgcatgttttcacttaatttgggtaaataccttttatttgtacctc

SEQ ID NO: 17868 - DNA, 120 bp, synthetic construct
  source 1..120: mol_type = other DNA
ttctttctaatacttggtattgtcagtttttatacttttcacctctcaagttaggttacctgtggctataatttgcattgaggggtgttgacattgaccatcctcttgtgtgcttttcat

SEQ ID NO: 17869 - DNA, 120 bp, synthetic construct
  source 1..120: mol_type = other DNA
cttggtcaaacaaatcttttgcaaatagaatactgtcatatctttcaaagagaaaaattttaactttaataaaatacagtgtgtcatttccacagaaaaagcctggtggcattttgattg

SEQ ID NO: 17870 - DNA, 120 bp, synthetic construct; identical to SEQ ID NO: 5586
  source 1..120: mol_type = other DNA

SEQ ID NO: 17871 - DNA, 120 bp, synthetic construct
  source 1..120: mol_type = other DNA
cattaggtatttctcctaatgctatccctcccgcatcccccccaccgcccccacaggccctggtgtatgatgtttccccccaggtccaactgttctcattgttcaatgcccacctatgcg

SEQ ID NO: 17872 - DNA, 120 bp, synthetic construct
  source 1..120: mol_type = other DNA
ctccatgttgtatatgtgaattttctaggccttaactccaactgagcttcccatctacaatgctttaatagtttgtgatctactctaattcacattcctcccatacaaagcactcaaatt

SEQ ID NO: 17873 - DNA, 120 bp, synthetic construct
  source 1..120: mol_type = other DNA
ccttagaaatactttgctgtaattaaatcatgttatgccagctgtattttcacaagttactaacatcacacctaaaaatgttaacatttgctggcacccagtagattggcaggggccaaa

SEQ ID NO: 17874 - DNA, 120 bp, synthetic construct; identical to SEQ ID NO: 5587
  source 1..120: mol_type = other DNA

SEQ ID NO: 17875 - DNA, 120 bp, synthetic construct
  source 1..120: mol_type = other DNA
ctggatttagtgttgggtcagagagtgacagttgaaggggatatgaactttatctgtgatactttatgtgctaaaaattctgaaaataaaaatgacaaaagttatggttgatgattctga

SEQ ID NO: 17876 - DNA, 120 bp, synthetic construct
  source 1..120: mol_type = other DNA
agcagctaacatgtattgaatgattatgcactaggcatcgaggataatgtttacgtatttttcacatggagttttcacaacaatcaagactactgaagccaagactgttttcagttgctt

SEQ ID NO: 17877 - DNA, 120 bp, synthetic construct
  source 1..120: mol_type = other DNA
tgattttcataccaagactttgtctggtacacatggaatatatcacctagacacaatgtaacaattgaaaaatcttcattagtttataaactcacgatgtgcttttttttttaaacatgg

SEQ ID NO: 17878 - DNA, 120 bp, synthetic construct
  source 1..120: mol_type = other DNA
aagttttctgagtttggtagtgaccttctgagtatagtttgaatggtcttcaaaggtaatttttaacacttttgcagggctgaacttggccttgaattttagagatgttagacacaatta

SEQ ID NO: 17879 - DNA, 120 bp, synthetic construct; identical to SEQ ID NO: 5588
  source 1..120: mol_type = other DNA

SEQ ID NO: 17880 - DNA, 120 bp, synthetic construct
  source 1..120: mol_type = other DNA
cattaattgctactttgggatttaccctcccagtggcccaagtcaaggaaagcaagtcacattcttttgtttccaaaaagggcccattgactctaagataaagacccatcccttgataca

SEQ ID NO: 17881 - DNA, 120 bp, synthetic construct
  source 1..120: mol_type = other DNA
atagtcatagctacattcagactgttttcctaattgatgtagtagatgagggaagtgtaggcatttatgttggtgatttcaaggtgatcaaaatcagagatcagatcagtctgtgcatga

SEQ ID NO: 17882 - DNA, 120 bp, synthetic construct
  source 1..120: mol_type = other DNA
taagaataaaaaaacttggccagtgacatggggatggggaaaagagattattttctccctccgttatacctgatttccaaaactagagaggatcacttattcctagtccatgaaagcaac

SEQ ID NO: 17883 - DNA, 120 bp, synthetic construct; identical to SEQ ID NO: 5589
  source 1..120: mol_type = other DNA

SEQ ID NO: 17884 - DNA, 120 bp, synthetic construct
  source 1..120: mol_type = other DNA
ttttgatatggcttttgataaggcttttaacttttgataaggcttttattttctgctccaccaggaagaagaaaattaacccagaaaaattcctaccttttccttgcttgcatctggtaa

SEQ ID NO: 17885 - DNA, 120 bp, synthetic construct
  source 1..120: mol_type = other DNA
ggcaaaggtatctcacagctaaatgttgttttagttaatgtaataaattatcgaggcaactgtacaagaaagaagaaaattttatctgcatgagagaaggtaactataacatttgtgttc

SEQ ID NO: 17886 - DNA, 120 bp, synthetic construct
  source 1..120: mol_type = other DNA
ctgtgacctctaagtcaagtaatcttcatgatttactctttgactattgctgctttttgattcagctatagcttttaaaattttcttttaaaacaatgtgcagactgattttcctggatg

SEQ ID NO: 17887 - DNA, 120 bp, synthetic construct
  source 1..120: mol_type = other DNA
gtctgaggtcaatcttttaatcttgggaccaaactgaatgttccaaacttttctgctgaaactcaaccaattagctactcctgacatttctttcaggcattgaatttataaaacatgagc

SEQ ID NO: 17888 - DNA, 120 bp, synthetic construct; identical to SEQ ID NO: 5590
  source 1..120: mol_type = other DNA

SEQ ID NO: 17889 - DNA, 120 bp, synthetic construct
  source 1..120: mol_type = other DNA
aagtaacatgagattcactgggcacaatgtattaaatgatgaacagccacttaatgattcattaaatattcagaactctctaacttggagaataaatatgtactaattatagctcatgct

SEQ ID NO: 17890 - DNA, 120 bp, synthetic construct
  source 1..120: mol_type = other DNA
actacactcaggttctcctccattttcctgcccctcccacttttccttccttctctgttctctcactgaatttttatcttcctttcctttctgtaaagtttgaatcttttcaaattcagt

SEQ ID NO: 17891 - DNA, 120 bp, synthetic construct
  source 1..120: mol_type = other DNA
atattgatgagcaagtgtctgtgtcttctctacttgtattcaatttttcagtttagaaatacattttgagtccaagtaaacaaatcacaagataagattcttatctaattgaagctaaac

SEQ ID NO: 17892 - DNA, 120 bp, synthetic construct; identical to SEQ ID NO: 5591
  source 1..120: mol_type = other DNA

SEQ ID NO: 17893 - DNA, 120 bp, synthetic construct
  source 1..120: mol_type = other DNA
ggtaaaatttcaaacttagagaagagttgcaaaaaagtagtacaaaagactaacatttacccttttaccagattgagtattagtttacattttcccccaaagctttgttatatcatctat

SEQ ID NO: 17894 - DNA, 120 bp, synthetic construct
  source 1..120: mol_type = other DNA
ctagttgagagtaagttggagatgacacgttcctttatgccaaatactttattcagtgttttttgtctaaggaaaaggatgttactttacataagtccagcacagtacccaaatcagcaa

SEQ ID NO: 17895 - DNA, 120 bp, synthetic construct
  source 1..120: mol_type = other DNA
agctagtttttgaaaaaatccaggattgtacactgagaaatcacatctcactagtctcttttcatctggaccagttcctcaccctttgtttttctacttaaacttgatacttttctgaat

SEQ ID NO: 17896 - DNA, 120 bp, synthetic construct; identical to SEQ ID NO: 5592
  source 1..120: mol_type = other DNA

SEQ ID NO: 17897 - DNA, 120 bp, synthetic construct
  source 1..120: mol_type = other DNA
tcttaacaccgtcaccccttctatatttgttaattagggatctactgtaaggaatagctttatcttcaccattcatttatttattcttttactttttatatcagtatgagctttataatt

SEQ ID NO: 17898 - DNA, 120 bp, synthetic construct
  source 1..120: mol_type = other DNA
ttactcgttttttgagtttacctttcttttttttctctcaggtaataggaaatgaatgatgatggaaaagtcaatgctagctctgaggggtactttattttagttggattttctaattgg

SEQ ID NO: 17899 - DNA, 120 bp, synthetic construct
  source 1..120: mol_type = other DNA
ttcttcctttcaaacctctcatttctggatctctgctacaccaccagctctatccctcagttgctggtcaatctctggggcccggaaaagaccatctcttatgctggttgcatgattcaa

SEQ ID NO: 17900 - DNA, 120 bp, synthetic construct; identical to SEQ ID NO: 5593
  source 1..120: mol_type = other DNA

SEQ ID NO: 17901 - DNA, 120 bp, synthetic construct
  source 1..120: mol_type = other DNA
atcgtccgagctatactgaggatgcagtcaaccactgggcttcagaaagtgtttggaacatgtggagctcatcttatggctgtatctctctttttcattccggccatgtgcatgtatctc

SEQ ID NO: 17902 - DNA, 120 bp, synthetic construct
  source 1..120: mol_type = other DNA
tctaatctacaccctcagaaacaaagttgtaagaggggcagtgaagagactaatggggtgggaatgagcctgtgtatgtgtcatattaacaatataacagagtctcccctcacaatgatt

SEQ ID NO: 17903 - DNA, 120 bp, synthetic construct
  source 1..120: mol_type = other DNA
gtggagttcctggtaacaggtaggaataaaacacagtcagcctaaataccattcacttgtggagaaaacagctatgtaaaatcaagataaaacatctatagtgatgtttttccatggtac

SEQ ID NO: 17904 - DNA, 120 bp, synthetic construct; identical to SEQ ID NO: 5594
  source 1..120: mol_type = other DNA

SEQ ID NO: 17905 - DNA, 120 bp, synthetic construct
  source 1..120: mol_type = other DNA
agtcagcatctgagatccctcttttttgcaaggcagtgagaaatatataggaagtaaaaggagctggtaaagctgagctatggagcttataaacaaatggtcatcataggctaggtatac

SEQ ID NO: 17906 - DNA, 120 bp, synthetic construct
  source 1..120: mol_type = other DNA
aaaatatattggaaaaattttatgatagaaactgtcatatggaaaatgatagcttatttttattttaaagcttgatctaatttgagtatttatggttaataagtatattatgtatgtcaa

SEQ ID NO: 17907 - DNA, 120 bp, synthetic construct
  source 1..120: mol_type = other DNA
tcatagtcaaatgaagcggaaaaatggctaaaggagaattcagtataaagtaacgtacttgcaatgcctgagttttctctataactcaaatgtcagctgtagcttttgaggcctgtgaga

SEQ ID NO: 17908 - DNA, 120 bp, synthetic construct; identical to SEQ ID NO: 5595
  source 1..120: mol_type = other DNA

SEQ ID NO: 17909 - DNA, 120 bp, synthetic construct
  source 1..120: mol_type = other DNA
cataaaaacacatttttaaaaacttaaagaacataacttcgccctttgaactgttttctactatggaaatcttacgatttggagcacttacggtagcatcctggtttctcacctactcaa

SEQ ID NO: 17910 - DNA, 120 bp, synthetic construct
  source 1..120: mol_type = other DNA
atatgcataattatgcaattattactcaagctaattaacagatcattaactcacatacttacctgttttgtggtgagaacatttaggatctattatcttagcagttttcaactatgcagt

SEQ ID NO: 17911 - DNA, 120 bp, synthetic construct
  source 1..120: mol_type = other DNA
tgaccaatatctccccattttccctatttctctccactgctaacccctgacaagcatctttctgctactctgtgcttctatgattcattttatgtcgatttcacatatgagatcatgcag

SEQ ID NO: 17912 - DNA, 120 bp, synthetic construct; identical to SEQ ID NO: 5596
  source 1..120: mol_type = other DNA

SEQ ID NO: 17913 - DNA, 120 bp, synthetic construct
  source 1..120: mol_type = other DNA
tttatttttattatactttaagttttagggtacatgtgcacattgtgcaggttagttacatatgtatacatgtgccatgctggtgcgctgcacccactaactcgtcatctagcattaggt

SEQ ID NO: 17914 - DNA, 120 bp, synthetic construct
  source 1..120: mol_type = other DNA
cacagtgtttggttttttgttcttgcgttagtttactgagaatgatgatttccaatttcatccatgtccctacaaaggacatgaactcatcattttttatggctgcatagtattccatgg

SEQ ID NO: 17915 - DNA, 120 bp, synthetic construct
  source 1..120: mol_type = other DNA
agcatgatttatagtcctttgggtatatacccagtaatgggatggctgggtcaaatggtatttctagttctagatccctgaggaatcgccacactgacttccacaatggttgaactagtt

SEQ ID NO: 17916 - DNA, 120 bp, synthetic construct; identical to SEQ ID NO: 5597
  source 1..120: mol_type = other DNA

SEQ ID NO: 17917 - DNA, 120 bp, synthetic construct
  source 1..120: mol_type = other DNA
tgcggtttcaccatgttggccaggctggtctcaaactcctgacctcggatgatctgcccgcctcggcttccaaagtgctgggattacagttgtgagccaccctgtttggcaatattttta

SEQ ID NO: 17918 - DNA, 120 bp, synthetic construct
  source 1..120: mol_type = other DNA
tttttcataatagacattctaactgatgtaaggtatgaggtgatatctactggtgtgggcctggactttaggtccactggagcctagagcagtggggaccatccccctgaagcctggagc

SEQ ID NO: 17919 - DNA, 120 bp, synthetic construct
  source 1..120: mol_type = other DNA
ggtctggaggctagatccttgggtactggcatgggtcttggggctacagagtctgacctggggggccaactggcactggaaagtcctattttgccattttattgataccacttctcacta

SEQ ID NO: 17920 - DNA, 120 bp, synthetic construct
  source 1..120: mol_type = other DNA
tatgtatagacttttcattttcttttgggaggttataattatagtatatctaatgttgaatcctagccatattagcctgtgctgtgtaatttgtaatctgagaaatagatcagttaccaa

SEQ ID NO: 17921 - DNA, 120 bp, synthetic construct; identical to SEQ ID NO: 5598
  source 1..120: mol_type = other DNA

SEQ ID NO: 17922 - DNA, 120 bp, synthetic construct
  source 1..120: mol_type = other DNA
cagccctaaaccttatgaaaacatttgtgaactgggatttccaaagcacacatgaatttgtatggcaagcaactttactgaagaactaacagtgaagccagctttttcccagataggaat

SEQ ID NO: 17923 - DNA, 120 bp, synthetic construct
  source 1..120: mol_type = other DNA
cttatatacatgctcaattatcttttcttattttaactctgcagtacagaattgttggcacaaatatgtcatccaggtaatcacagaaagtagctctggcttccagcctaggtacactcc

SEQ ID NO: 17924 - DNA, 120 bp, synthetic construct
  source 1..120: mol_type = other DNA
tacaagtgattatataccaagtatcatccaacaatcacaaaaaaactcatggaaaagttataaaaatagtagaaagacttaccattgagcttcaccagatttaaaaaatcttagcatttc

SEQ ID NO: 17925 - DNA, 120 bp, synthetic construct
  source 1..120: mol_type = other DNA
tgcacatgttcccctaggttgtcacaagaatatttcctaaaaaagtatctaatccaggatcataaggtggcagtgtgatgtctcttttttctctttaattgggaaccattcctcagtctg

SEQ ID NO: 17926 - DNA, 120 bp, synthetic construct; identical to SEQ ID NO: 5599
  source 1..120: mol_type = other DNA

SEQ ID NO: 17927 - DNA, 120 bp, synthetic construct
  source 1..120: mol_type = other DNA
ttcacattcaagaggttgaatatcatcctataatcaatgaacaaaaatggctctttatacagagcttcatactgacgcataagttgtctgcacattcctggcaacatgtttgggacaagg

SEQ ID NO: 17928 - DNA, 120 bp, synthetic construct
  source 1..120: mol_type = other DNA
aagccatctctcaaatgcacaaagagcagataaatcaaagaaggaggcagacaaatctagcttgttggtttggggtgatttactaaaggaatttacagacatatatgttgtcttgggtgg

SEQ ID NO: 17929 - DNA, 120 bp, synthetic construct
  source 1..120: mol_type = other DNA
tacaacagcgtcaagggttgttttggaggaaacttacagtgaatacatgttcctacataaagagtaatatatcaacttaacatcttatagggactcagggttattcagaagttacacggc

SEQ ID NO: 17930 - DNA, 120 bp, synthetic construct; identical to SEQ ID NO: 5600
  source 1..120: mol_type = other DNA

SEQ ID NO: 17931 - DNA, 120 bp, synthetic construct
  source 1..120: mol_type = other DNA
acacctaatatttgaaccacactgaatttatcttactctcttactgtcctgaggatgttcacaagaacttttccttcaaggttaaaatgtgtcactcatacctcaaccaaacatttcata

SEQ ID NO: 17932 - DNA, 120 bp, synthetic construct
  source 1..120: mol_type = other DNA
gacaatgtcattctcctagaccactgggcagtatctgccatatgtaggccagtcgttattttttattaccattattactaatttttactattattactatagtggtttccaaataatgat

SEQ ID NO: 17933 - DNA, 120 bp, synthetic construct
  source 1..120: mol_type = other DNA
catggcaaaaggatttttatagatgtgattaaattcagaaccttgagttgggattattatcctgaattagccaggtgggctgacatagtcatatgtgttcatataagagggaggccagag

SEQ ID NO: 17934 - DNA, 120 bp, synthetic construct; identical to SEQ ID NO: 5601
  source 1..120: mol_type = other DNA

SEQ ID NO: 17935 - DNA, 120 bp, synthetic construct
  source 1..120: mol_type = other DNA
atttatctatgtgtctacctatatatcataatatggtcttatgcattattatttcattctgtcattattttgatgctgaaatggtcactgttttggctagagaggaccccttccagttgg

SEQ ID NO: 17936 - DNA, 120 bp, synthetic construct
  source 1..120: mol_type = other DNA
ctggctaacacggtgaaaccccatctctattaaaaatacaaaaaaattagctgggcgtgttggcgggcgcctgtagtcccagctactcgggaggctaaggcaggagaatggtgtgaaccc

SEQ ID NO: 17937 - DNA, 120 bp, synthetic construct
  source 1..120: mol_type = other DNA
cttactgttggcaaactgagacgatcttaacatatctgacacttttctttgggaggaatagataactttgtttatcttaggtcaaatgacaaaaactttgaataaagtactggggtttcc

SEQ ID NO: 17938 - DNA, 120 bp, synthetic construct; identical to SEQ ID NO: 5602
  source 1..120: mol_type = other DNA

SEQ ID NO: 17939 - DNA, 120 bp, synthetic construct
  source 1..120: mol_type = other DNA
tggctcatggcccattcctctatatttaaagtcagcagcggagtatcttccctttgacttctggcctccctcttatatggacacgtgtgattgtgtcagctcacttgcctaatccaggat

SEQ ID NO: 17940 - DNA, 120 bp, synthetic construct
  source 1..120: mol_type = other DNA
agcctaccatgatcccttgtgtcccagggataaagcccacgatgatcaagtaggctttatccctgataggaaaggttggttcaacatatgcaaatcaatacatgtgattcatcacataaa

SEQ ID NO: 17941 - DNA, 120 bp, synthetic construct
  source 1..120: mol_type = other DNA
caaaacaataagagcaatctgtaaaaaacccacagccaacatcatactgaatgggcaaaagctggaagcattccccttgaaaactggcacaagacatggatgccctctctcaccactcct

SEQ ID NO: 17942 - DNA, 120 bp, synthetic construct; identical to SEQ ID NO: 5603
  source 1..120: mol_type = other DNA

SEQ ID NO: 17943 - DNA, 120 bp, synthetic construct
  source 1..120: mol_type = other DNA
tgctaaaagaaatcagaagtgacacaaggaaatggaaaaaacatcccatgctgatggatactaagaatcagtatcattacaatgaccataccgtccaaagcaatttatagattcaatgca

SEQ ID NO: 17944 - DNA, 120 bp, synthetic construct
  source 1..120: mol_type = other DNA
ttagaggcatcaccttactcaaatgataccagagggctacagtatccagaacagcatgataccggtacaaaaacagatatatacaccaatggaatagaatagagaacccagaaataatgc

SEQ ID NO: 17945 - DNA, 120 bp, synthetic construct
  source 1..120: mol_type = other DNA
tggatgccaaacttgcaccacatacaaaaatcaattcaagatgaattaaagacttaaatgtaaaaatgaaaactgttaatataaaaactctgaagataacctaggaaatatcattctgga

SEQ ID NO: 17946 - DNA, 120 bp, synthetic construct; identical to SEQ ID NO: 5604
  source 1..120: mol_type = other DNA

SEQ ID NO: 17947 - DNA, 120 bp, synthetic construct
  source 1..120: mol_type = other DNA
tgagataccatctcgtaccaggtggaatggctattatcaaaaagtcaaattattaataacagatacatcaaggttatggagaaaagggaatgcttatacactgctggtgggaatgtaaat

SEQ ID NO: 17948 - DNA, 120 bp, synthetic construct
  source 1..120: mol_type = other DNA
ataaagacatatgcacgagtatgttcattgcagcactgttcacaacagcaaatacatgaaatcaacctaaatgcccatcaacagtagattgggtaaagaaaatgtggtacatagacccca

SEQ ID NO: 17949 - DNA, 120 bp, synthetic construct
  source 1..120: mol_type = other DNA
cttataagtgggagctaaacataagaacacatggatactagaaggtgaaccacatgcactggggtctacttgacggtggagggtgggaggaggaagaagatcagaaaaaatacctattga

SEQ ID NO: 17950 - DNA, 120 bp, synthetic construct; identical to SEQ ID NO: 5605
  source 1..120: mol_type = other DNA

SEQ ID NO: 17951 - DNA, 120 bp, synthetic construct
  source 1..120: mol_type = other DNA
ctttactgccacgttcctagtaattcctgaattgcacatgtatgaaatgacattaattctctcatactttagggttgcttgtcagtgcctagaaggaatacagtctctgtggccagtctt

SEQ ID NO: 17952 - DNA, 120 bp, synthetic construct
  source 1..120: mol_type = other DNA
ccacattggcatcccactgatgtgctgtcctggttgctaggtgcagatttaggttccaagcagaacactgctagtgttctctgcagtttgttgtagaatcatagtgtcttggcaaccaaa

SEQ ID NO: 17953 - DNA, 120 bp, synthetic construct
  source 1..120: mol_type = other DNA
cacgtcaatgttgcaaggagacatgagactcacatcagagttctatggcttaacatgggggatggtggtaagtgcggctctatttggattttgtaattataaaagcccactttatgtaga

SEQ ID NO: 17954 - DNA, 120 bp, synthetic construct
  source 1..120: mol_type = other DNA
cccagaactttgggaggcagaggcgggtggatcacctgaggtcaggagtttgagaccagcctggccaacacggtgaaaccccatctttactaaaaatacaaaaaattagccgggcttggg

SEQ ID NO: 17955 - DNA, 120 bp, synthetic construct; identical to SEQ ID NO: 5606
  source 1..120: mol_type = other DNA

SEQ ID NO: 17956 - DNA, 120 bp, synthetic construct
  source 1..120: mol_type = other DNA
tgttccatggatatatttacatagtgaagtctgagatttcagtgtatccatcatccaaataggatacattgtcctcaataggtagtctttcatccctcaaccctttcccaacttcccacc

SEQ ID NO: 17957 - DNA, 120 bp, synthetic construct
  source 1..120: mol_type = other DNA
ccaatggcctccagttccatccaagttgttataaaagacatgacttcagtctttttatggggaagtagtatcacattttagaaatccaatagtccattgatggacactcaggttgattct

SEQ ID NO: 17958 - DNA, 120 bp, synthetic construct
  source 1..120: mol_type = other DNA
catttttagttctttgaaaagtctccatactgttttccacagggcttgtactaatttacattcccaccaacagtgtatgtattctttttttctctatacccttggcaaaatttgtttttt

SEQ ID NO: 17959 - DNA, 120 bp, synthetic construct; identical to SEQ ID NO: 5607
  source 1..120: mol_type = other DNA

SEQ ID NO: 17960 - DNA, 120 bp, synthetic construct
  source 1..120: mol_type = other DNA
gaatcgcttgaacctgggaggcagaggttgcagtgagccgagattgcatcactgcactccagcctgggtgacagagcgagactccgtctaaaaaaacaaaacaaaacaaaacaaaacaaa

SEQ ID NO: 17961 - DNA, 120 bp, synthetic construct
  source 1..120: mol_type = other DNA
tgtcaaaagagaaaaaccccacttaagacagcaataaaatagggtttggatgagcatttcaatcttgaggaaaacctaacctgtttgcaaaataagcctaaggattggatgacaagttta

SEQ ID NO: 17962 - DNA, 120 bp, synthetic construct
  source 1..120: mol_type = other DNA
tgatgaatattcactactatacttggagaagataaaatggatgttgggacttagaactagatcaaatcagaatgagtatcgatcaatgttcagtcaaagggggttggaggaaatttgttt

SEQ ID NO: 17963 - DNA, 120 bp, synthetic construct; identical to SEQ ID NO: 5608
  source 1..120: mol_type = other DNA

SEQ ID NO: 17964 - DNA, 120 bp, synthetic construct
  source 1..120: mol_type = other DNA
tatatgaaaaacattgaatcgtgaagcctttaaaaatcacactgaacatattcagcatgaattaagcatttttctagcacgaaaatgtagcttgaaagtaagtaaggttcagaacattta

SEQ ID NO: 17965 - DNA, 120 bp, synthetic construct
  source 1..120: mol_type = other DNA
aaaaaaaacaaaattcttagagaaaaaatgaaaaaactgacctgttcttatcaaagacatgatttcccatatttaaaaaagcttgtaataattgatttacaattaagttgactgaagaaa

SEQ ID NO: 17966 - DNA, 120 bp, synthetic construct
  source 1..120: mol_type = other DNA
agtactcatgtaacaagattgaaagtaaattctcacaaattcctttgtcactaaaacaaaagcactgaaaatttatgctagcaagaatgcaaagtgagggaaactctctttgattgctgg

SEQ ID NO: 17967 - DNA, 120 bp, synthetic construct; identical to SEQ ID NO: 5609
  source 1..120: mol_type = other DNA

SEQ ID NO: 17968 - DNA, 120 bp, synthetic construct
  source 1..120: mol_type = other DNA
aagccagacttcaaagtctgaatattgtatgagttcattcataagacatctggaaaaagaaaacctgttgggatggaaacacaccagtgttatccagggcttagtgtaggggagattagt

SEQ ID NO: 17969 - DNA, 120 bp, synthetic construct
  source 1..120: mol_type = other DNA
actcaaatgcatgcaaataaacaagcaaaagtttcaccaagatgcaggaagatcctagaatggtatgcagacagtgacaaatcaatctcacgttatataaatgtgtaagctaacgaccct

SEQ ID NO: 17970 - DNA, 120 bp, synthetic construct
  source 1..120: mol_type = other DNA
atttttttctcatgtgggtacagctaattttgtaattgcttcacaagcatactagtgttgaacaaaaatgttaaaagatgaacagtggcatccaggtttctcactgttggtatgagaagt

SEQ ID NO: 17971 - DNA, 120 bp, synthetic construct; identical to SEQ ID NO: 5610
  source 1..120: mol_type = other DNA

SEQ ID NO: 17972 - DNA, 120 bp, synthetic construct
  source 1..120: mol_type = other DNA
aaatatataagataagcctggaggagaaggaccagtaataccagaaatcaaggaggggccttgaagagaaaaggatagcaaaaggatgaagacctgtccaagacccagcagccagcatga

SEQ ID NO: 17973 - DNA, 120 bp, synthetic construct
  source 1..120: mol_type = other DNA
ataaatggagaagaagagagaaatcttccttactgatctattaatagtctccacttttgggggtggagctcgtgatctccttcattaagtataggctggattcagtgactgttttccaag

SEQ ID NO: 17974 - DNA, 120 bp, synthetic construct
  source 1..120: mol_type = other DNA
agcaccatcagtaatgccatgtagatattatgtaacccctgctctgatgggataaaaagggcactttacctctgtggtcacctcttcaaaaattcaaaggcccagtgtaattgatggcag

SEQ ID NO: 17975 - DNA, 120 bp, synthetic construct
  source 1..120: mol_type = other DNA
gcccgaaggagctgggaacaggcaaaagcccccaccccttatgagttggcaggcaggtgccttgtgctccccaggctcagttgcagctgcccagctgtggctgcagacccgggtatccct

SEQ ID NO: 17976 - DNA, 120 bp, synthetic construct; identical to SEQ ID NO: 5611
  source 1..120: mol_type = other DNA

SEQ ID NO: 17977 - DNA, 120 bp, synthetic construct
  source 1..120: mol_type = other DNA
cctgctgcctgagccccgctctggactttgggcaccagtaagcaaggaagggaggctggggaggtgctgaaggcagcttggccctggcctgcaggtgaccctcggcaggaacagcctggg

SEQ ID NO: 17978 - DNA, 120 bp, synthetic construct
  source 1..120: mol_type = other DNA
agactggagtgggaatttatgatgctttttctgggcctgcacatggttgcccaagggccaatcagcacctacttcctctcctctgaagcccataaaaactcccggactcagccagattga

SEQ ID NO: 17979 - DNA, 120 bp, synthetic construct
  source 1..120: mol_type = other DNA
tcctctctgctgagagttgaacactggtcaggacaccctggctgtggagaggagctaccctctatgtgtctcctctgagctgttctgttgctcagaaaagctccttttcacctaactcac

SEQ ID NO: 17980 - DNA, 120 bp, synthetic construct; identical to SEQ ID NO: 5612
  source 1..120: mol_type = other DNA

SEQ ID NO: 17981 - DNA, 120 bp, synthetic construct
  source 1..120: mol_type = other DNA
ctgccacagcaagcatgcctggctgtgtgcagtaggtggaccccacactttctcgctcatacacgcctcgctgctctgcttgcccttggcaggtatgggatccaggctggtattgtgagc

SEQ ID NO: 17982 - DNA, 120 bp, synthetic construct
  source 1..120: mol_type = other DNA
atgagaaaacatcggacaaaccatgattgaagtgcattttataacatacctgagcagtactcaaaattatcaatatcaagaaaaacaaggaaacagattcaggaaactgaaacatgacaa

SEQ ID NO: 17983 - DNA, 120 bp, synthetic construct
  source 1..120: mol_type = other DNA
agtctggagtttcagtgatagtaacataccaatgttagtttcctaattttgaaaaataaaccagagaaatgtaacattaagggaaagtgaaactgggtaaggggtatttgggaattctcc

SEQ ID NO: 17984 - DNA, 120 bp, synthetic construct; identical to SEQ ID NO: 4549
  source 1..120: mol_type = other DNA

SEQ ID NO: 17985 - DNA, 120 bp, synthetic construct
  source 1..120: mol_type = other DNA
ggtgttagctgacagggggatctccctggcgaaggttaacaccgcttcctcaaccccttcacacacagacacttacagatcatgtaaatggaaactcttcaggggatgagggagaatgca

SEQ ID NO: 17986 - DNA, 120 bp, synthetic construct
  source 1..120: mol_type = other DNA
tgggatcaagtggtacttcagttttccccttagccaaaatacatcccagaactttctaaatcaactagtgcaatgaactatactgaatttttattcatgacttcattacactactaaaag

SEQ ID NO: 17987 - DNA, 120 bp, synthetic construct
  source 1..120: mol_type = other DNA
agaggagctggatagggtagggtgaagaggggaatgaggagagtatgatcaataggtacaaagttagagttagcatgaataagttgtagtgtttcactgtaccatagcgtgactgttgtt

SEQ ID NO: 17988 - DNA, 120 bp, synthetic construct; identical to SEQ ID NO: 5614
  source 1..120: mol_type = other DNA

SEQ ID NO: 17989 - DNA, 120 bp, synthetic construct
  source 1..120: mol_type = other DNA
ccaatagaaccattttggaataggatcataaaaaatcaggttataaattactgctaataatagctgacaattgactacagccaaataatgagttcaaaagcattttatcatgttccattt

SEQ ID NO: 17990 - DNA, 120 bp, synthetic construct
  source 1..120: mol_type = other DNA
tcagtcctttattataaatattttaaaaggaatgcatctcaaattttttccttcagccataaaatctttgtttcaagtgagatgtttgttaaagtacttggtataccgactgtcatttaa

SEQ ID NO: 17991 - DNA, 120 bp, synthetic construct
  source 1..120: mol_type = other DNA
aagaattgtgctcatgcaaattgaacgtattaatcagaaaataatttatgttaacatattccttagttcatatagaaaagccacataatacctatatactaacaaagctattgatgtaca

SEQ ID NO: 17992 - DNA, 120 bp, synthetic construct; identical to SEQ ID NO: 5615
  source 1..120: mol_type = other DNA

SEQ ID NO: 17993 - DNA, 120 bp, synthetic construct
  source 1..120: mol_type = other DNA
ctctgcaaaaacatttgaatcctctctattgcccactgagccctgcctcctcactatcctaatgcagacagcatatcacatatcacatatattaaaacaaccttaagttggacacttatc

SEQ ID NO: 17994 - DNA, 120 bp, synthetic construct
  source 1..120: mol_type = other DNA
tcttgttaaaatgtatattatatatcatactaagtatggtatgcataaaccctttatcttaatataacatcatgttaaattgttggatatctttaatgtctccaaaaaagaaatgctaaa

SEQ ID NO: 17995 - DNA, 120 bp, synthetic construct
  source 1..120: mol_type = other DNA
aggctggagtgcagtggcacaatctccactcactttaacctgtgcctcccaggttgaaaccattcttgtgccttagcctctcaagtagctgggaccacaggcacatgccaacacacctgg

SEQ ID NO: 17996 - DNA, 120 bp, synthetic construct; identical to SEQ ID NO: 5616
  source 1..120: mol_type = other DNA

SEQ ID NO: 17997 - DNA, 120 bp, synthetic construct
  source 1..120: mol_type = other DNA
gctcatctctttcccagaggacacacatttaacaaaatttccaagttaacctcctatgttaatctctcacacttcccccatctttttcatttttacttctcttatcctactagagagcct

SEQ ID NO: 17998 - DNA, 120 bp, synthetic construct
  source 1..120: mol_type = other DNA
gtttaaaatccttcaagttctcatctcctatagaaacacacattctttaatatcagccttggttctggttcctggttctcattcaacatagatcctcctttcagtctcccatattgcccc

SEQ ID NO: 17999 - DNA, 120 bp, synthetic construct
  source 1..120: mol_type = other DNA
aagctttcaaattctagttctgacgtacactatgcaagctcaagaattagtgaaccacattttcattatctatcaaatgtggctaatacataccttaaagggttattgaaagattaaata

SEQ ID NO: 18000 - DNA, 120 bp, synthetic construct; identical to SEQ ID NO: 5617
  source 1..120: mol_type = other DNA

SEQ ID NO: 18001 - DNA, 120 bp, synthetic construct
  source 1..120: mol_type = other DNA
tgttgcacccattaactcatcatttacattaggtatttctcctagtgttatccctccccctgccccccaacccatgacaggcacccgtgtgtgatgttcctcgccctgtgtccaagtgtt

SEQ ID NO: 18002 - DNA, 120 bp, synthetic construct
  source 1..120: mol_type = other DNA
tcatcccaaaggcacattcttgaaggtgcatgttagcacttcttgccttgcagttattatgctatgcagatcttaggacatctctaatatggagaaagccactgttaaaccttcttgagt

SEQ ID NO: 18003 - DNA, 120 bp, synthetic construct
  source 1..120: mol_type = other DNA
agatcactttccttgaaaggcaatctcagaattgctcatgctttacacaaaaggtagagcacgctttctctttcaagtataatgcgtcccttctcttctacagaatttttcaaaagttga

SEQ ID NO: 18004 - DNA, 120 bp, synthetic construct; identical to SEQ ID NO: 5618
  source 1..120: mol_type = other DNA

SEQ ID NO: 18005 - DNA, 120 bp, synthetic construct
  source 1..120: mol_type = other DNA
taagttagacaaactataccttaactaataaaaatgatcaaagctattgtctaacaccacagaattaggtcatgtgtttgtgtgtgcatgtgtataaaatttgaaaacatttttctggca

SEQ ID NO: 18006 - DNA, 120 bp, synthetic construct
  source 1..120: mol_type = other DNA
tgtatctggtttgcagttgattcttgtttgaactaacatgaggttttccttccaattattggcttagatcttgatcataccagaagttatgccagaaaagtccaaatgaccttttgtttt

SEQ ID NO: 18007 - DNA, 120 bp, synthetic construct
  source 1..120: mol_type = other DNA
acaaagttttaagttttggggtgtgagtcctagaactaagttttagcacttccaacttttaatgatacaggttttgtacatcatttgcatttaacatttacatcagtaaaaagacatatt

SEQ ID NO: 18008 - DNA, 120 bp, synthetic construct; identical to SEQ ID NO: 5619
  source 1..120: mol_type = other DNA

SEQ ID NO: 18009 - DNA, 120 bp, synthetic construct
  source 1..120: mol_type = other DNA
tacataaattggggttgataagcttatgagactcatgattattccaaagtataatgtgcttcacattgaatgcccagtgtagccacactgcccatttagacttgggacaacatgcagaga

SEQ ID NO: 18010 - DNA, 120 bp, synthetic construct
  source 1..120: mol_type = other DNA
cagttactatctctgtatgtaccaaccagtatagaactattttaatatatttccataatataatgtgcctactagccaagtataatccttgctgaacatgtttacaaagagtctcggaga

SEQ ID NO: 18011 - DNA, 120 bp, synthetic construct
  source 1..120: mol_type = other DNA
ctctaactgttcaataacttcattttatgtctacccactatcacttaaagctgaaaatgctcctcaccaagttgcgtaatgccccctttacattcttattccgcagggtgtagataaaag

SEQ ID NO: 18012 - DNA, 120 bp, synthetic construct
  source 1..120: mol_type = other DNA
aggtacatgctgatggctgggccataaaataagaaaactacaataagatgggaggagcatgtcccaaaggcctttttccttcccttggaagatttgatcttaaatacagcacttccaata

SEQ ID NO: 18013 - DNA, 120 bp, synthetic construct; identical to SEQ ID NO: 5620
  source 1..120: mol_type = other DNA

SEQ ID NO: 18014 - DNA, 120 bp, synthetic construct
  source 1..120: mol_type = other DNA
aacattctgttccccccattatgtgaaagaaataaagctgaaccgcacaccccatatagctgatggtcttcttagagcttcccaggttaaacagcatctgagggacaatgcttgtggtat

SEQ ID NO: 18015 - DNA, 120 bp, synthetic construct
  source 1..120: mol_type = other DNA
taagaagactagtgaacagaggaagctctagccaagggcggtctgcaaagcctagcagaataaattcttcagggtggctttcattagttagtggcattatcttcaatttgtttcacctgt

SEQ ID NO: 18016 - DNA, 120 bp, synthetic construct
  source 1..120: mol_type = other DNA
agggtgcagtaacctggggtcagaataacataaaacatctggtatcaggtgatcttattttcctatgggacactacaaattaaaggcagatatcttaatccagtaacccaaccattctga

SEQ ID NO: 18017 - DNA, 120 bp, synthetic construct
  source 1..120: mol_type = other DNA
agtgaccgtatagttttcaaactttgagttgcataaaaatcagctgagaaggttgctagaatgaaatttattgtttcctatctttaggtgtctgatagagtaaatgtggcctggggctga

SEQ ID NO: 18018 - DNA, 120 bp, synthetic construct; identical to SEQ ID NO: 5621
  source 1..120: mol_type = other DNA

SEQ ID NO: 18019 - DNA, 120 bp, synthetic construct
  source 1..120: mol_type = other DNA
tgagagagttaacctacaatgacaaagtttccctatgctcaggaattcgattttgcattcttgggcttttattcattacgatttagttcaacctttgggcatttgatattttatgttaaa

SEQ ID NO: 18020 - DNA, 120 bp, synthetic construct
  source 1..120: mol_type = other DNA
ttgtcatgacccactgattgcacataactacaaatatgtcttttagttctgagtgactgcagtcaggacaaaagttgatgtcccaatttaggcttagagacagtcaaatctgaaattatt

SEQ ID NO: 18021 - DNA, 120 bp, synthetic construct
  source 1..120: mol_type = other DNA
ttagtggtgacatgtgttttatgaatatcacaattttctgcaggatgagaaatattcggttgaaaagttaagatagcatctcagtgacaacattctgagtaactctgccagtcaattagt

SEQ ID NO: 18022 - DNA, 120 bp, synthetic construct; identical to SEQ ID NO: 5622
  source 1..120: mol_type = other DNA

SEQ ID NO: 18023 - DNA, 120 bp, synthetic construct
  source 1..120: mol_type = other DNA
aaagattgaaaagtaattgctgctttaaatgaggtaataaaatattgagactataaactcagagtttcaagagccccagaaagcatctgtactcgagggttgttcctgaatgagtgtgac

SEQ ID NO: 18024 - DNA, 120 bp, synthetic construct
  source 1..120: mol_type = other DNA
aataaaggcatgatataaactaatttgatgtcaaaataaatacagtcatacatagcttaacaagaggaatatagtctgagaaatgtattgttaagtgattttgtcattgtgtgaatagag

SEQ ID NO: 18025 - DNA, 120 bp, synthetic construct
  source 1..120: mol_type = other DNA
ataattcaatggtaagtatttatgtattaagcatatataaaaatagaaaaggtacaataaaatatggtataaaagataaaaaatggtatacctatattgggcacttaccataaatggatc

SEQ ID NO: 18026 - DNA, 120 bp, synthetic construct; identical to SEQ ID NO: 5623
  source 1..120: mol_type = other DNA

SEQ ID NO: 18027 - DNA, 120 bp, synthetic construct
  source 1..120: mol_type = other DNA
ccaggcctacacagggtcaggatcatcaatatcattgtcttccagctccttgtcccactggaaggttttcaggggcaataacatgcatggagctgtcatctcctatgattataataacaa

SEQ ID NO: 18028 - DNA, 120 bp, synthetic construct
  source 1..120: mol_type = other DNA
gtaacatatttatttatcatcatcaagtattatgtactgcacacaattttatgtgttattcttttatatgactggcagtgcaggtttgattataccgtcatcactgcaaacacttgagta

SEQ ID NO: 18029 - DNA, 120 bp, synthetic construct
  source 1..120: mol_type = other DNA
tgtcattatgtggtgcatgcctgtattctgagaattgcaaattacattattaaataatttcactattagatacctgctatctttatttaacattgttatgttcaccttttatattttttc

SEQ ID NO: 18030 - DNA, 120 bp, synthetic construct; identical to SEQ ID NO: 5624
  source 1..120: mol_type = other DNA

SEQ ID NO: 18031 - DNA, 120 bp, synthetic construct
  source 1..120: mol_type = other DNA
ctttgggattttatctgtcttttggatcttatacttcaagaaatgtttcatcactattttactacatggggatttacttaatcacaaatgtttaaagccactttattaaagtgccagacc

SEQ ID NO: 18032 - DNA, 120 bp, synthetic construct
  source 1..120: mol_type = other DNA
ggcaaggtagaaggtcagttccccaaggggtttttattggctctataagtcaagtttcattccttaaaggaaaacacaccattccagtcaaagccttggtaaaataaccaatttctccaa

SEQ ID NO: 18033 - DNA, 120 bp, synthetic construct
  source 1..120: mol_type = other DNA
gaaacaaatatggtccattttttttttccacagaagtatactttactcaattgctaaaggctgtaaatagctcaaagtaaaagttttcttaactctggaaaacaaaacaaagggttagca

SEQ ID NO: 18034 - DNA, 120 bp, synthetic construct; identical to SEQ ID NO: 5625
  source 1..120: mol_type = other DNA

SEQ ID NO: 18035 - DNA, 120 bp, synthetic construct
  source 1..120: mol_type = other DNA
aataaagtaaatcagtcttatcataatttgtcttcagtaaaaatgagaaactgaagtgagaaaaattatgtttcaagaagtatggtacacttgttattaaattctagtctcatgagttgt

SEQ ID NO: 18036 - DNA, 120 bp, synthetic construct
  source 1..120: mol_type = other DNA
ttctaatcatgggcacatattggaatcatctggcaaccctgtatcagcttggttttaacagttgctcagttcatgggaagcctttaaatttagtttacctggaataattttacttatttt

SEQ ID NO: 18037 - DNA, 120 bp, synthetic construct
  source 1..120: mol_type = other DNA
actcagagttatgaatggctctcatcataccaatgctttttgacgagctcctctctaccccaaatacgagagactctaattgttaggcaggaatatcattgctcctcttaagcctgaaga

SEQ ID NO: 18038 - DNA, 120 bp, synthetic construct
  source 1..120: mol_type = other DNA
agctgggtaaaatgaggttgaaacctactgggctgcattcccagatggttaaggcattctaagtcacaggatgagacagaaagtcagtacaagatacaggtcataaagaccttgctgata

SEQ ID NO: 18039 - DNA, 120 bp, synthetic construct; identical to SEQ ID NO: 5626
  source 1..120: mol_type = other DNA

SEQ ID NO: 18040 - DNA, 120 bp, synthetic construct
  source 1..120: mol_type = other DNA
gtaccagaccctattcctgttgatgtctcctgttttatctccacttccatcttcattctagtgtagcttatacttcatttttaccatacacaatattttctttatatgtactgcacttgt

SEQ ID NO: 18041 - DNA, 120 bp, synthetic construct
  source 1..120: mol_type = other DNA
aatccacctgattgaaagaaggcttcatatttgttttgggcatttaatatttctcagatatagtgtataaatctccctctcagtctctcactgaaaccaaatttaaaatcataatgattt

SEQ ID NO: 18042 - DNA, 120 bp, synthetic construct
  source 1..120: mol_type = other DNA
ggctccctgaaatgaaatgctctctgcctttcagatgtatattaggcagtggcagtatgatctacacatatttcaatttccctaagaatgcatggacttgaaaacgtgcctttttactca

SEQ ID NO: 18043 - DNA, 120 bp, synthetic construct; identical to SEQ ID NO: 5627
  source 1..120: mol_type = other DNA

SEQ ID NO: 18044 - DNA, 120 bp, synthetic construct
  source 1..120: mol_type = other DNA
tgaggagttagcagagaaaattccttgggacagagatctctatggaaatgctacttatgtacaattagtttcctactgaactgaggttggtaggaagtctcttctgttgtcagatgtgtt

SEQ ID NO: 18045 - DNA, 120 bp, synthetic construct
  source 1..120: mol_type = other DNA
ccttacctcattaacttctagactacctcacataaaatttaatcatttctagttgtaagaataaaggggcacaaaaatgagttgaaaaggaagaaagataataaaaagatatttccaatg

SEQ ID NO: 18046 - DNA, 120 bp, synthetic construct
  source 1..120: mol_type = other DNA
acagataactttgagattttaaaaattacatacaaaatgcataaatacattatgttgaaaaacaaattcaagtgcatgggatagcaaatacaaatttaaagggttttttttttaagatgg

SEQ ID NO: 18047 - DNA, 120 bp, synthetic construct
  source 1..120: mol_type = other DNA
ttccctttgatgacctactgtcatggtctgttgtccctctcctttctttaaaggtaaccgttagtgtcataagggtgtgcatctttccacattacatatgtgctggatattttccactcc

SEQ ID NO: 18048 - DNA, 120 bp, synthetic construct; identical to SEQ ID NO: 5628
  source 1..120: mol_type = other DNA

SEQ ID NO: 18049 - DNA, 120 bp, synthetic construct
  source 1..120: mol_type = other DNA
ctttgtaatagtactttctccctttgctacttcaggccttgtgttggttgctaagcctcccaactgttgctagattcagagtagtccatatataatacatatacagaaatcccttgttga

SEQ ID NO: 18050 - DNA, 120 bp, synthetic construct
  source 1..120: mol_type = other DNA
aaacaaaggtcatttcctgctttaggacttttgaattagatgtttttaggtctaaaatgctctttctttgattttatcacgactggctcctttctgtgtttcaggttgatctcaaatgtc

SEQ ID NO: 18051 - DNA, 120 bp, synthetic construct
  source 1..120: mol_type = other DNA
ctagtatgcatagtttttgacaatagcaacttaaataatacaattaaatcatcttgaacatattgttacttgatttttacatacatatgtacacgcacacacacgcacacacactttttg

SEQ ID NO: 18052 - DNA, 120 bp, synthetic construct; identical to SEQ ID NO: 5629
  source 1..120: mol_type = other DNA

SEQ ID NO: 18053 - DNA, 120 bp, synthetic construct
  source 1..120: mol_type = other DNA
gtattctactactattgggtggagttttctgtagaggtcaattagctgtagttagtttataatgctgttcacatcttctatttccttgtggacctttatctaattgttctattgttattg

SEQ ID NO: 18054 - DNA, 120 bp, synthetic construct
  source 1..120: mol_type = other DNA
gatgtatcttcttgatggaccagcgattttatcatcataaattgtccttctttgtttccagtaataattcttgtctttttgttgatattgtgtaatatcagtatagccatccattagcac

SEQ ID NO: 18055 - DNA, 120 bp, synthetic construct
  source 1..120: mol_type = other DNA
ataaaccttgtcaatctcttccattttttaaatgaatagactatttttcagaagctttaggtttacaaaaaattgaatggaaggtgtagagaactcacatgtaaccccttttactccctc

SEQ ID NO: 18056 - DNA, 120 bp, synthetic construct; identical to SEQ ID NO: 5630
  source 1..120: mol_type = other DNA

SEQ ID NO: 18057 - DNA, 120 bp, synthetic construct
  source 1..120: mol_type = other DNA
ttctttgacttagtaatatgcatttaaatttcttccaggtctgggctttacaactcattttttataattgaataatattccattctatgaatgtaccacagtctgcttattcattcattt

SEQ ID NO: 18058 - DNA, 120 bp, synthetic construct
  source 1..120: mol_type = other DNA
caggacacgtgagtgctggattctatggttaagatgtttagtgttgtatgaaactgtccagttgtcctctagagtggttgtacacttttggatttctgtaatcagtgaatgagagttcct

SEQ ID NO: 18059 - DNA, 120 bp, synthetic construct
  source 1..120: mol_type = other DNA
agataatctcaattgacctatcttgtagtttgttgattcttccttctgcttgttaaaatctggtgttcaggtcttctgctgcattttttatttccatcactgtactttttcatctctaga

SEQ ID NO: 18060 - DNA, 120 bp, synthetic construct; identical to SEQ ID NO: 5631
  source 1..120: mol_type = other DNA

SEQ ID NO: 18061 - DNA, 120 bp, synthetic construct
  source 1..120: mol_type = other DNA
tttcatcacccaggtattaagcatagcatccattagttatttttcctgatcctctctgtcctcccatcctccaccctccaccaggccacagtatgtattgtttccctctatgtgtccata

SEQ ID NO: 18062 - DNA, 120 bp, synthetic construct
  source 1..120: mol_type = other DNA
gatctcgttcttttttatggctgcatagtattccacggtgtgtatgtaccacattttctttatcgagtctatcattgatgggcatttaggttgattccatgtctttgctattgtgagtag

SEQ ID NO: 18063 - DNA, 120 bp, synthetic construct
  source 1..120: mol_type = other DNA
gaattgccacaatgccttccacaatggttgaactaatttacactcccaccaacagtgtatacatgtttgtttttctccataaccttcccagcatctgttcttctctgactttttaataat

SEQ ID NO: 18064 - DNA, 120 bp, synthetic construct; identical to SEQ ID NO: 5632
  source 1..120: mol_type = other DNA

SEQ ID NO: 18065 - DNA, 120 bp, synthetic construct
  source 1..120: mol_type = other DNA
aatactcccaaataattctctaaagtctgccttctttgtggtgtagggccattaaaatctgtactcaggtagtctagtggccagcaaataattggacagaaatttctttcaatgcctggg

SEQ ID NO: 18066 - DNA, 120 bp, synthetic construct
  source 1..120: mol_type = other DNA
tgaaggtcagccagagacaagagtttagaatcttctcagttcttgcttgagcatttatagagtcctgaatctgaacacagccatatgcatatacatgaaattcctggcatatggcaaaga

SEQ ID NO: 18067 - DNA, 120 bp, synthetic construct
  source 1..120: mol_type = other DNA
aaattattttcaacaaatacctgctgagaaaatgctttttgcattggtcgaggtctgagtcatggtcaaatacagacagactcatgaatgaagtcttccaaaaagccccagccaggtaaa

SEQ ID NO: 18068 - DNA, 120 bp, synthetic construct; identical to SEQ ID NO: 5633
  source 1..120: mol_type = other DNA

SEQ ID NO: 18069 - DNA, 120 bp, synthetic construct
  source 1..120: mol_type = other DNA
gttgtgaaaattacaatttttttctagctattttgaaatatacaatatatgttatgctaatattaataaatgttagttgtattttctctactgtattatcaaatactaaaaattattcct

SEQ ID NO: 18070 - DNA, 120 bp, synthetic construct
  source 1..120: mol_type = other DNA
ttagctcctgcataccagtgagaacatgatatatttgtatttctgttcatggtttatttcacttaacataatgacttccaattttatccatgttgctactaatgaaaggatttcattatt

SEQ ID NO: 18071 - DNA, 120 bp, synthetic construct
  source 1..120: mol_type = other DNA
ttttctttccaattttttttttgcttttttttatttttaatttttttattatactttaagttttagggtacatgtgcacaacgtatttcaggttcaagtggtacatgtgcaggtttgtta

SEQ ID NO: 18072 - DNA, 120 bp, synthetic construct; identical to SEQ ID NO: 5634
  source 1..120: mol_type = other DNA

SEQ ID NO: 18073 - DNA, 120 bp, synthetic construct
  source 1..120: mol_type = other DNA
taggatgatagcttccagctccatccctattactgcaaagaccaaagtctcgttttttatagctgcatagtattctgtggtatatatgttttctgtatccagtccaccactgatggacaa

SEQ ID NO: 18074 - DNA, 120 bp, synthetic construct
  source 1..120: mol_type = other DNA
ggatcaagtggtagttctattttaagttatttgagaaatctccagacttctttctacagtggctgaactagttttcatttccaccagtggtatataaatgttcccttttctccaccacct

SEQ ID NO: 18075 - DNA, 120 bp, synthetic construct
  source 1..120: mol_type = other DNA
ttgcatttctctggtgattagtgatattgaactttttaatatacttgttagatgtgtatatcttcttttgagaagtgtctgttcatgccatttgctcgttttaaaaatagagttgtttgt

SEQ ID NO: 18076 - DNA, 120 bp, synthetic construct; identical to SEQ ID NO: 5635
  source 1..120: mol_type = other DNA

SEQ ID NO: 18077 - DNA, 120 bp, synthetic construct
  source 1..120: mol_type = other DNA
acatatggctagcctgctatgccagcactatttattgaagagtttctggcaggcagcaggcagcatataatttggtcttgtttttaattcatttaaccattgtatgtcttttaaatagaa

SEQ ID NO: 18078 - DNA, 120 bp, synthetic construct
  source 1..120: mol_type = other DNA
ttcctgccttcctctctttctctctttccccctctccctccccttccccttccccttccttccttccttccttctttccttttttccttgttattttcctctggtagtatgttttaattt

SEQ ID NO: 18079 - DNA, 120 bp, synthetic construct
  source 1..120: mol_type = other DNA
ctcaaaaataaaaacaaacttccaactaaaaacttatacacattaactccattcttcacccatattttgaattttgatgttgcaatttacattttttatattgcctatctcttaaaaatt

SEQ ID NO: 18080 - DNA, 120 bp, synthetic construct; identical to SEQ ID NO: 5636
  source 1..120: mol_type = other DNA

SEQ ID NO: 18081 - DNA, 120 bp, synthetic construct
  source 1..120: mol_type = other DNA
tggaatgttgttatcctcctctagatagaatttatttttgcttttgggaagtaattaaagtaggaaaacatccctaattttgaatggggtggatagaattgggtcatacattgctggtag

SEQ ID NO: 18082 - DNA, 120 bp, synthetic construct
  source 1..120: mol_type = other DNA
gctcaaatgaagacctgtgctgaatatttatagccacttttttcaaaatactgtggcgaaaacctagaattactgtaagtatctgtcaacggatgtaatgaataaattatactatatcct

SEQ ID NO: 18083 - DNA, 120 bp, synthetic construct
  source 1..120: mol_type = other DNA
gctgaatgcagaaagcaagactcaaaataatacacactatgtagatctatcactaagaattcaagaacatgcaaacttatctatgagggcataaattagagtagtagttgactaagtctg

SEQ ID NO: 18084 - DNA, 120 bp, synthetic construct; identical to SEQ ID NO: 5637
  source 1..120: mol_type = other DNA

SEQ ID NO: 18085 - DNA, 120 bp, synthetic construct
  source 1..120: mol_type = other DNA
atagctggtgcaaaaaacaaatatctttttaaaaatatttttattatactttaagttctaaggtacatgtgcacaatgtgcaggtttgttacataggtatacatgtgccatgttggtttg

SEQ ID NO: 18086 - DNA, 120 bp, synthetic construct; identical to SEQ ID NO: 5638
  source 1..120: mol_type = other DNA

SEQ ID NO: 18087 - DNA, 120 bp, synthetic construct
  source 1..120: mol_type = other DNA
tgtgtccatgtgtctttataatagcatgatttataatcctttgggtatatacccagtaatgggatcactgggtcaaatggtatttctagttctagatctttgaggaatcaccacactgtc

SEQ ID NO: 18088 - DNA, 120 bp, synthetic construct
  source 1..120: mol_type = other DNA
atgagatggtatctcattgtggttttgatttgcatttctctgatgaccagtgatgatgagcattttttatgtgtctgttggctgcataaatgtcttctttcaagaagtgtttgttcatat

SEQ ID NO: 18089 - DNA, 120 bp, synthetic construct
  source 1..120: mol_type = other DNA
ctgtacattgcttgttcactctgatggtagtttcttttgctgtgcagaagctctttagtttaattagatcccatgcatctattttggcttttgttgccattgcttttggtgttttagtca

SEQ ID NO: 18090 - DNA, 120 bp, synthetic construct; identical to SEQ ID NO: 5639
  source 1..120: mol_type = other DNA

SEQ ID NO: 18091 - DNA, 120 bp, synthetic construct
  source 1..120: mol_type = other DNA
agatggattcacagccgaattctaccagaggtacaaggaggagctggtaccattccttctgaaactattccaatcaatagaaaaagagagaatcctccctaactcattttatgatgccag

SEQ ID NO: 18092 - DNA, 120 bp, synthetic construct
  source 1..120: mol_type = other DNA
ttttcttcattattagtcttgctagcagtccatcaattttgtggatcttttcaaaatccacctcctggattaactgattcagattttctattttttcatgattcattgttgttatgtttc

SEQ ID NO: 18093 - DNA, 120 bp, synthetic construct
  source 1..120: mol_type = other DNA
tattttgttagagtcttcttttttttcttagttggtctgctaaagttttgtcaattgtttttatcttttcaaaaactgaactgttagttttgcaaatgtgttcttttgttttctagtctc

SEQ ID NO: 18094 - DNA, 120 bp, synthetic construct; identical to SEQ ID NO: 5640
  source 1..120: mol_type = other DNA

SEQ ID NO: 18095 - DNA, 120 bp, synthetic construct
  source 1..120: mol_type = other DNA
tcatacttttgtggtcagaaaagatacttgatatgatttcagtcttcttaaaactgttgagtcttattttgttaccttatttggataatgtcccatttgcacttgagaagaatgaatatt

SEQ ID NO: 18096 - DNA, 120 bp, synthetic construct
  source 1..120: mol_type = other DNA
taaagtattgaaatcctctgctattattgtattgcagtctatctcttttcaggtctactaatgctttctttatatgtataggtgatcttatattaggtgcatatatatttacaattgtta

SEQ ID NO: 18097 - DNA, 120 bp, synthetic construct
  source 1..120: mol_type = other DNA
cttgcatgaaataattttttcaatcaatgtgtgttcttcaagttaaagtgaacctcttacaggcagcctacgtctgcatattgtttttcagtttctttccaatgcaaagcattttagtag

SEQ ID NO: 18098 - DNA, 120 bp, synthetic construct; identical to SEQ ID NO: 5641
  source 1..120: mol_type = other DNA

SEQ ID NO: 18099 - DNA, 120 bp, synthetic construct
  source 1..120: mol_type = other DNA
taatttatatgcgggtgcatcatatatcagacttaagactatttcacttcataattaaattgttcatacatatatattgaaagtgaacacccggccaaaatttaatcccaatgatgacaa

SEQ ID NO: 18100 - DNA, 120 bp, synthetic construct
  source 1..120: mol_type = other DNA
aaagatgaagccttcaaccttcctacaatagtaacaagcattttaaataacaatacaaggagtctgtaagctaaaaagtaacttcatattcattgcaaaacttaaaataccagtgaattg

SEQ ID NO: 18101 - DNA, 120 bp, synthetic construct
  source 1..120: mol_type = other DNA
cactttaaatggtcactctaagcaaacataaccttactagcaagaaaagcgaaaaattaaggctttcatgctatctatatctactacacaaagtcaaaagtcaaatagagcttacaatgt

SEQ ID NO: 18102 - DNA, 120 bp, synthetic construct; identical to SEQ ID NO: 5642
  source 1..120: mol_type = other DNA

SEQ ID NO: 18103 - DNA, 120 bp, synthetic construct
  source 1..120: mol_type = other DNA
tactaatcatcagagaaacggaaatcaaaaccacaatgagattccatctcacaccagtcagaatggctgctatttaaaagtcaaaaaacaacagatattgcggaggctgcagagaaactc

SEQ ID NO: 18104 - DNA, 120 bp, synthetic construct
  source 1..120: mol_type = other DNA
gcgtatttagtcaaaggaaaatatatcattataccaaaaggacacacgcactcatgttcatggcagcactattcacaatagcagagacatagaaccaacctaggtgcccatcagtggtgg

SEQ ID NO: 18105 - DNA, 120 bp, synthetic construct
  source 1..120: mol_type = other DNA
ccctcgctgtggctcccctcgcgggcccaggcctgaagaagccgcgaacctctcttccctaccccacctcggtgacagatggcagctcctctctcagcccagaccccgccggcctccatg

SEQ ID NO: 18106 - DNA, 120 bp, synthetic construct; identical to SEQ ID NO: 5643
  source 1..120: mol_type = other DNA

SEQ ID NO: 18107 - DNA, 120 bp, synthetic construct
  source 1..120: mol_type = other DNA
acaggccacatttggcgcattggagatgaaattcttggttgaaaattcttttctttaagaatgttgaatattggcccccactctcttctggcttgtagggtttctgcagagagatatgct

SEQ ID NO: 18108 - DNA, 120 bp, synthetic construct
  source 1..120: mol_type = other DNA
ctcgagcagtatcttagtggtgttctcgtatttcctgaatttgaatgttggcctgtattgctaccttgtggaagttctcctggataatatcctgaagctgttttccagcttggttccatt

SEQ ID NO: 18109 - DNA, 120 bp, synthetic construct
  source 1..120: mol_type = other DNA
ccttatttcagtaagttggtcttcagtctctaatatcctttcttctgcttgatcgatttggctattgatccttgtgtatatcttacaaagttctcgtgctgtgtttttcagctcctcagg

SEQ ID NO: 18110 - DNA, 120 bp, synthetic construct; identical to SEQ ID NO: 5644
  source 1..120: mol_type = other DNA

SEQ ID NO: 18111 - DNA, 120 bp, synthetic construct
  source 1..120: mol_type = other DNA
tttctgtttgttagttttccttataacagtcaggcccctcttctgcgggtctgctgcagtttgctggaagtgtactccagaccctgtttgcctgggtatcaccagcagaggctgtagaac

SEQ ID NO: 18112 - DNA, 120 bp, synthetic construct
  source 1..120: mol_type = other DNA
gtcaggaggcatgggggttagggacccacttgaggagggagtgtgtcccttaagagaactggtgtgctgtgctgggagaatccctcttgtcaggatcagctgctgtcttcagagcaggca

SEQ ID NO: 18113 - DNA, 120 bp, synthetic construct
  source 1..120: mol_type = other DNA
agagatgccctgcccagtgagggggaatctagagaagcagtctggccacagctgctttgctgcactgtgatgaatttgccagtccatacctccgagactccttggaactgtcagggaaaa

SEQ ID NO: 18114 - DNA, 120 bp, synthetic construct; identical to SEQ ID NO: 5645
  source 1..120: mol_type = other DNA

SEQ ID NO: 18115 - DNA, 120 bp, synthetic construct
  source 1..120: mol_type = other DNA
ccatgggaaaagtgtagtaacaagctaggcagcactgtccctcatggctcccctggctcggggaaagaggtcccctggcctcttgaacttcctgggtaagcaactccccacccttcttct

SEQ ID NO: 18116 - DNA, 120 bp, synthetic construct
  source 1..120: mol_type = other DNA
cagaactgctcctatttggccgtcttcggcttcatccttttgtgtttttaagaacagtcttccctatgaattttaccaaaaagtgtactcagtacagtagtttactaactctacttttgt

SEQ ID NO: 18117 - DNA, 120 bp, synthetic construct
  source 1..120: mol_type = other DNA
tggtaaagtgtgcctcaccataaacacactggtatttgaattaccttttgccctttctgctcctctttcctccctgagccaacacacatatagtaatgtgtactgctcagataagtggtt

SEQ ID NO: 18118 - DNA, 120 bp, synthetic construct
  source 1..120: mol_type = other DNA
ttaccttttgccctttctgctcctctttcctccctgagccaacacacatatagtaatgtgtactgctcagataagtggtttgatccatttcccaaagacaatatttcatatgaatcaaaa

SEQ ID NO: 18119 - DNA, 120 bp, synthetic construct; identical to SEQ ID NO: 5646
  source 1..120: mol_type = other DNA

SEQ ID NO: 18120 - DNA, 120 bp, synthetic construct
  source 1..120: mol_type = other DNA
aatatctagagactagactagatattataaaattaagactacttcatccagtatacacacaatatatacagtatagcaaagttaaatgcaatgcatgtaacatataggtaatggattaag

SEQ ID NO: 18121 - DNA, 120 bp, synthetic construct
  source 1..120: mol_type = other DNA
cacgctggtgcgctgcacccactaactcgcatctagcattaggtatatctcccaacgctatccctcccccctccccccaccccacaacagtccccagagtgtgatattccccttcctgtg

SEQ ID NO: 18122 - DNA, 120 bp, synthetic construct
  source 1..120: mol_type = other DNA
tatcttccttccaatctccctcaacccaatgaacatgtacagagaggacgctgttcacagaggtggttcaacaatgccagttccaaaaagtatttctcattacttttaaaagatatttac

SEQ ID NO: 18123 - DNA, 120 bp, synthetic construct; identical to SEQ ID NO: 5647
  source 1..120: mol_type = other DNA

SEQ ID NO: 18124 - DNA, 120 bp, synthetic construct
  source 1..120: mol_type = other DNA
actgccagcctctttaacatctagagactagatgttgcaaaattaggactcatttgttcattatatgcgctatatacagagcaaaacacaatgcacaaaacatacagaaaaatggtgcct

SEQ ID NO: 18125 - DNA, 120 bp, synthetic construct
  source 1..120: mol_type = other DNA
gtatagacagtactataccactcacaaagatggcttaataattcaatttccaaaacacagtatttcctatgaatttcagcaaaaagacatttacaaagtgaaattttgctacctctacat

SEQ ID NO: 18126 - DNA, 120 bp, synthetic construct
  source 1..120: mol_type = other DNA
aatttgaaggagtcttccaaatgtgaacattctggcctaaaaatctttccatctccatcaacccagtgggcaagaatgctcaagttttcagaagacaatcttccctaggaatttaaaaac

SEQ ID NO: 18127 - DNA, 120 bp, synthetic construct; identical to SEQ ID NO: 5648
  source 1..120: mol_type = other DNA

SEQ ID NO: 18128 - DNA, 120 bp, synthetic construct
  source 1..120: mol_type = other DNA
acatatatcaggcacctcagaacatctagaaacactagacatttcaaaaaagtgtagcattgtcaatgatctatacagtagtagggaataaaatgcacacaaaacaatggaaagaatatg

SEQ ID NO: 18129 - DNA, 120 bp, synthetic construct
  source 1..120: mol_type = other DNA
cccactgaacaaatgtggttgtgtctgtcgttcctggtatggcttccagaagtggtccaacaattccattgcgaaaagccatttccagaagacatctattttctatcatttctttttgaa

SEQ ID NO: 18130 - DNA, 120 bp, synthetic construct
  source 1..120: mol_type = other DNA
gagagccgctttctcactttacacacgcagggccttctataaacggtggtaattaaatcttcccaaagggtagtgggcatctccaatacgccaaatgtggcctgttccaccacttctctc

SEQ ID NO: 18131 - DNA, 120 bp, synthetic construct; identical to SEQ ID NO: 5649
  source 1..120: mol_type = other DNA

SEQ ID NO: 18132 - DNA, 120 bp, synthetic construct
  source 1..120: mol_type = other DNA
ctgggctgagagaggagctgccatcagtcacggaggtggggtagggaagagaggttcgcggcttcttcaggcctgggcccgcgaggggagccacagcgagggcacctggagcctgcaggg

SEQ ID NO: 18133 - DNA, 120 bp, synthetic construct
  source 1..120: mol_type = other DNA
cctatgtctctgctgttgtgaatagtgctgccatgaacatgagtgcgtgtgttcttttggtataatgatatattttcctttgactaaatacgcaggaatggtattgctgggtccaatggt

SEQ ID NO: 18134 - DNA, 120 bp, synthetic construct
  source 1..120: mol_type = other DNA
gttgttttttgacttttaaatagcagccattctgactggtgttagatgatatctcattgtggttttgatttgcatttctctgatgattagtaatgatgaacaattttttcatctagacag

SEQ ID NO: 18135 - DNA, 120 bp, synthetic construct; identical to SEQ ID NO: 5650
  source 1..120: mol_type = other DNA

SEQ ID NO: 18136 - DNA, 120 bp, synthetic construct
  source 1..120: mol_type = other DNA
gaaaatgcaacgtaccacaacttatgggatgtaacaaaagaagttcttagcaggaggaaagtttatagtaataaatgccgatattgaaaaagaagaaagatctcaaacaacctaatgtta

SEQ ID NO: 18137 - DNA, 120 bp, synthetic construct
  source 1..120: mol_type = other DNA
aaaactaacagttcagtttttgaaaagataaaaacaattgacaaaactttagcagaccaactaagaaaaaaaagaagactctaataaaataagaaatgaaagaggagacattaaaattga

SEQ ID NO: 18138 - DNA, 120 bp, synthetic construct
  source 1..120: mol_type = other DNA
atagaaaatctgaacagactaatgagtaagggggttgaatcagtgataaaagtctcctaccaaagaaaagcccagaacctgatggttcatggattggaggaattaatattattaaaatgt

SEQ ID NO: 18139 - DNA, 120 bp, synthetic construct; identical to SEQ ID NO: 5651
  source 1..120: mol_type = other DNA

SEQ ID NO: 18140 - DNA, 120 bp, synthetic construct
  source 1..120: mol_type = other DNA
aatgatgcaggggaaatcaaatacccacatacagaagaatgaaattgaacccttatctcacaccatgtgtaaaaagcccactaaaaatggtttaaagatttaaatgcgagacctgaaaat

SEQ ID NO: 18141 - DNA, 120 bp, synthetic construct
  source 1..120: mol_type = other DNA
ctgaaaccaaaagcttctctacaacaaagtaaataacagattgaagagacaacccatggactgggagaaaatatttacaaaccatacatggctaatatccaaaatatgtaagaaatgcaa

SEQ ID NO: 18142 - DNA, 120 bp, synthetic construct
  source 1..120: mol_type = other DNA
cagggaaatgcaaattaaaacaaaacaaagagatatcacctcatacctgttagaatgactattatcagtaaactaaaaggtaataagtactgacaaggatgtggggaatccttatatact

SEQ ID NO: 18143 - DNA, 120 bp, synthetic construct; identical to SEQ ID NO: 5652
  source 1..120: mol_type = other DNA

SEQ ID NO: 18144 - DNA, 120 bp, synthetic construct
  source 1..120: mol_type = other DNA
aaaaaaagggtagattttcctctaatttggttttaacgtctctctttgaagagtggctagaaactctagcctggctctgatgggctccagtggaggtggttgtggttgtggatgttttcg

SEQ ID NO: 18145 - DNA, 120 bp, synthetic construct
  source 1..120: mol_type = other DNA
tttgtctgactagtgtgtccagttcattcctaccaagattgccactctctaagggagccttgtccagaaaaaaaaattaatttcaggtgtgtcaggtgagacgccaagaagacacataaa

SEQ ID NO: 18146 - DNA, 120 bp, synthetic construct
  source 1..120: mol_type = other DNA
ggtagcgagagagagtgagtgacagaccagaaagccaaagcccttattggagtacacagcattatccaagcagggagtaactggttgctgggtttagagcaagcaggcatgatttcttgg

SEQ ID NO: 18147 - DNA, 120 bp, synthetic construct; identical to SEQ ID NO: 5653
  source 1..120: mol_type = other DNA

SEQ ID NO: 18148 - DNA, 120 bp, synthetic construct
  source 1..120: mol_type = other DNA
acagataaatatataaaagggatataatgtgatatatatgaaccacattatctatataaaatggaatactattcagccttaaagaaaaaagggaaattctgtctttacaacaacattcat

SEQ ID NO: 18149 - DNA, 120 bp, synthetic construct
  source 1..120: mol_type = other DNA
tagctacctggggggcaggggatggagaaaggggggattttaaacaagtagatttaaatgttctcactataagaaaaataagtatgtgaggtgatgactgtgttagctggacttaatcat

SEQ ID NO: 18150 - DNA, 120 bp, synthetic construct
  source 1..120: mol_type = other DNA
caggaaaaatcttggaattgaatttaaaagacaactgggaaggcataaataatataggtcagtctcaaagagcccctcattaataaggaacagatatgcagtttagtctttatgtattct

SEQ ID NO: 18151 - DNA, 120 bp, synthetic construct
  source 1..120: mol_type = other DNA
agtttttctgttgaatgactctcaaatctctcctttttttccagttgtcttgtacatttgagccttagccccacgggaaactgaaaaaaaaaatcggacggctcagtaaaacctcttcct

SEQ ID NO: 18152 - DNA, 120 bp, synthetic construct; identical to SEQ ID NO: 5654
  source 1..120: mol_type = other DNA

SEQ ID NO: 18153 - DNA, 120 bp, synthetic construct
  source 1..120: mol_type = other DNA
tgccctaaagtattcccacattctgctaaaaagcagatcttttggacaaactcaggctctcttttctgtagcaatgacaatcacagttatttccagactctgttcttcatagttagattt

SEQ ID NO: 18154 - DNA, 120 bp, synthetic construct
  source 1..120: mol_type = other DNA
cagggaacagggacaaacacaggaaggtcagtactgaaagaagttggtgcacttcttaaggggtagacagcttccatatttcaaaattgcagaaagtgtagattttaaatgttcttacta

SEQ ID NO: 18155 - DNA, 120 bp, synthetic construct
  source 1..120: mol_type = other DNA
tcaatgaaaaattaagaaaacaaaccagatatagtataaaggaatggatgtgacacaaattggcataatgtctcttaataataattggggaaggaagagacactcagccatccattttcc

SEQ ID NO: 18156 - DNA, 120 bp, synthetic construct
  source 1..120: mol_type = other DNA
tccctcttttccaccaagaagaaaattgaagctgagacttttctctacatgagttctgggggtttttttgtcccttatttcctatcccttttatcaactccggaggaatgctgaaagatg

SEQ ID NO: 18157 - DNA, 120 bp, synthetic construct; identical to SEQ ID NO: 5655
  source 1..120: mol_type = other DNA

SEQ ID NO: 18158 - DNA, 120 bp, synthetic construct
  source 1..120: mol_type = other DNA
ggcccaagttcaatgttcctagctctccagctgtaactcaaccagttaggcaactccttacatctttttcaagagtcaagattacaatacttgagttattaaaagtttttcaaaacactg

SEQ ID NO: 18159 - DNA, 120 bp, synthetic construct
  source 1..120: mol_type = other DNA
ctcctgcctcagcctccagagtagctggtattacaggtgcccactaccatgcctgcctggctaatttttgtattttttagtagagatggtgtttcaccacgttggtcaggctggtctcaa

SEQ ID NO: 18160 - DNA, 120 bp, synthetic construct
  source 1..120: mol_type = other DNA
ctgtggcaggaggggagcagaagggggatggcaaaactatgtaggaatattgaaatgctgggttcctgtattttattgcaaaaactatatcataaaagagtgtttatctttctcatgcaa

SEQ ID NO: 18161 - DNA, 120 bp, synthetic construct; identical to SEQ ID NO: 5656
  source 1..120: mol_type = other DNA

SEQ ID NO: 18162 - DNA, 120 bp, synthetic construct
  source 1..120: mol_type = other DNA
cttcttgtccttgtctaacaaacttgttatacattctttcaacttcgcataccacattcagacctctcttcactgttgtgcatccaaacactctccatttctctcttaccaacctatgtt

SEQ ID NO: 18163 - DNA, 120 bp, synthetic construct
  source 1..120: mol_type = other DNA
gtctcatttacctttggaagcattctatcaccgatcactctattttgctgtattaatcagctttgtgtatattgtgaatttttataagttggtgtgtgcgtgcatattctctttaaactt

SEQ ID NO: 18164 - DNA, 120 bp, synthetic construct
  source 1..120: mol_type = other DNA
tgctttttaatatgggaaattcctatctataagtaagatcagtaagactgctgttattcctttctctgtaattgcaaaattggaaatagcctgaaaatataaaaataatttgacttttta

SEQ ID NO: 18165 - DNA, 120 bp, synthetic construct
  source 1..120: mol_type = other DNA
cttgtatctgtagctggataaatatctcaatgaagcatataaagggaactgtataaaaattctactaccattatggtgcacactctctggaagtgggatacttttgtcttcaatctgttt

SEQ ID NO: 18166 - DNA, 120 bp, synthetic construct; identical to SEQ ID NO: 5657
  source 1..120: mol_type = other DNA

SEQ ID NO: 18167 - DNA, 120 bp, synthetic construct
  source 1..120: mol_type = other DNA
tgctggttgcatggttcaactttactttgttcttgcactgggaatcacagagtgtgtcctactggtggtgatgtcatatgatcgttatgtagctgtgtgtagacctttgcattacactgt

SEQ ID NO: 18168 - DNA, 120 bp, synthetic construct
  source 1..120: mol_type = other DNA
ggatcacttcttctgtgaagttccagcacttctgcgtttatcatgtgttgacacccatgcaaatgagctgaccctcatggtcatgagctccatttttgttctcatacctctcattctcat

SEQ ID NO: 18169 - DNA, 120 bp, synthetic construct
  source 1..120: mol_type = other DNA
agtcatgtgcatgtatctccagccaccatcagaaaattctcctgatcagggcaagttcattgccctcttttatactgttgtcacaccgagtcttaatcctctaatctacactctcagaaa

SEQ ID NO: 18170 - DNA, 120 bp, synthetic construct; identical to SEQ ID NO: 5658
  source 1..120: mol_type = other DNA

SEQ ID NO: 18171 - DNA, 120 bp, synthetic construct
  source 1..120: mol_type = other DNA
tgtgcatgcgaatagttatgaggagattatttcaaaaatgttgggaatatttctaacaatgtgctaaattatgaactgatgatatatacagaaagagaagggcaatattgcaaagactta

SEQ ID NO: 18172 - DNA, 120 bp, synthetic construct
  source 1..120: mol_type = other DNA
agtatttggttgaaagacactttttaaagacactaaattatctaatttatcctgtaggtctacatacttgtcacattgaacagtaaactaatatctctttaaaatggctctttcgttcat

SEQ ID NO: 18173 - DNA, 120 bp, synthetic construct
  source 1..120: mol_type = other DNA
cacactctctgtcaggaaaaatggcaacataaaagatgaagtatctgtgcatggcttaatttgtcactgggggtaatgctaatacattaagacagcttttaaaagtcagaaacaataaac

SEQ ID NO: 18174 - DNA, 120 bp, synthetic construct; identical to SEQ ID NO: 5659
  source 1..120: mol_type = other DNA

SEQ ID NO: 18175 - DNA, 120 bp, synthetic construct
  source 1..120: mol_type = other DNA
ttgaaaataacctgaaaatgctgaaaagaaaagttccttattcattaacaaagaaaaattttgtgttttatggaaattatcttccttagctaggttagaaatttctttcaattaccattt

SEQ ID NO: 18176 - DNA, 120 bp, synthetic construct
  source 1..120: mol_type = other DNA
ggtaaaatttcaaacttagagaagaattgcaaaaaagtagtacaaagactgacatttaccctataaccagattaagcattagtttacattttcccccaaagctttgttatatcatctatc

SEQ ID NO: 18177 - DNA, 120 bp, synthetic construct
  source 1..120: mol_type = other DNA
atctatctctttttctgcactagctgagagtaagttggagatgccacgtacctttacaccaagtacttttttttttaattattaggtcatttttattccttttaaattttttattttgtg

SEQ ID NO: 18178 - DNA, 120 bp, synthetic construct; identical to SEQ ID NO: 5660
  source 1..120: mol_type = other DNA

SEQ ID NO: 18179 - DNA, 120 bp, synthetic construct
  source 1..120: mol_type = other DNA
acattaggtatatctcctcatgctatccctccccccaccacacaacaggccccggtgtgtgatgttccccttcctgtgtccaaatgttctcattgctcaattcccactcatgagtgagaa

SEQ ID NO: 18180 - DNA, 120 bp, synthetic construct
  source 1..120: mol_type = other DNA
gtgtatatgtgccacattttcttaatccactctatcattgttggacatttgggttggttccaagtctttgctgttgtgaatagtgccgtaataaacatacgtgtgcatgtgtctttctag

SEQ ID NO: 18181 - DNA, 120 bp, synthetic construct; identical to SEQ ID NO: 5661
  source 1..120: mol_type = other DNA

SEQ ID NO: 18182 - DNA, 120 bp, synthetic construct
  source 1..120: mol_type = other DNA
gggctgtttgttcttttcttgtaaatttgtttgagttcattgtagattctggatattagccctttgtcagatgagtagcttgcaaaaattttctcccattctgtaggttgcctattcact

SEQ ID NO: 18183 - DNA, 120 bp, synthetic construct
  source 1..120: mol_type = other DNA
atgtcctgaatggtattgcctaggttttgttctagggtttttatggttttaggtctaacattgaagtctttaatccatcttgaattaatttttgtataaggtgtaaggaagggatccagt

SEQ ID NO: 18184 - DNA, 120 bp, synthetic construct
  source 1..120: mol_type = other DNA
attatttctgagggctgtattctgttcctttgctctatatctctgttttggtaccagtaccatgctgttttggttactgtagccttgtagtatagtttgaagtcaggtagcgtgatgcct

SEQ ID NO: 18185 - DNA, 120 bp, synthetic construct; identical to SEQ ID NO: 5662
  source 1..120: mol_type = other DNA

SEQ ID NO: 18186 - DNA, 120 bp, synthetic construct
  source 1..120: mol_type = other DNA
tgcctgttattggtgtataagaatgtttgtgattttcgcacattgattttgtatcctgagcctttgctgaagttgcttatcaacttaaggagattttgggctgagatgatggggttttct

SEQ ID NO: 18187 - DNA, 120 bp, synthetic construct
  source 1..120: mol_type = other DNA
aataggagtggtgagagagggcatccctgtcttgtgccagttatcaaagggaatgtttccagtttttgcccattcagtatgatattggctgtggttttgtcataaatagctcttattatt

SEQ ID NO: 18188 - DNA, 120 bp, synthetic construct
  source 1..120: mol_type = other DNA
tgcatctattgagataatcatgtggtttttgtcttttgttctgctggattacgtttattgatttgcgtacgttgaaccagccttgcatcccagggatgaagcccacttgatcatggtgga

SEQ ID NO: 18189 - DNA, 120 bp, synthetic construct
  source 1..120: mol_type = other DNA
ggtctaaaattctttttttgttgtgtctctgccaggctttggtatcaggatgatgctggcctcataaaatgagttagggaggattccctctttttctattgattggagtagtttcagaac

SEQ ID NO: 18190 - DNA, 120 bp, synthetic construct; identical to SEQ ID NO: 5663
  source 1..120: mol_type = other DNA

SEQ ID NO: 18191 - DNA, 120 bp, synthetic construct
  source 1..120: mol_type = other DNA
ttgttgatctttcaaaaaaccagctcctggattcattgattttttgaagggttttttgtgtgtctatctccttcagttctgctctgatcttagttatttcttgccttctgctagcttttg

SEQ ID NO: 18192 - DNA, 120 bp, synthetic construct
  source 1..120: mol_type = other DNA
taaatgtgtcccagagattctggtatgttgtatctttgttctcgctggtttcaaagaacatctttatttctgccttcatttcgttatgtaccagtagtcattcaggagcaggttgttcag

SEQ ID NO: 18193 - DNA, 120 bp, synthetic construct
  source 1..120: mol_type = other DNA
ttttcttccagctatgtggtcaattttggaataagtgtgatgtggtactgagaagaatgtatattctgttgatttggggtggagagttctgtagatgtctattagcactgcttggtgcag

SEQ ID NO: 18194 - DNA, 120 bp, synthetic construct
  source 1..120: mol_type = other DNA
gtctctaaggacttgttgtatgaatctgggtgctcttgtattgggtgcatgtatatttaggatagttagctcttcttgttgaattgatccctttaccattatgtaatggccttctttgtc

SEQ ID NO: 18195 - DNA, 120 bp, synthetic construct; identical to SEQ ID NO: 5664
  source 1..120: mol_type = other DNA

SEQ ID NO: 18196 - DNA, 120 bp, synthetic construct
  source 1..120: mol_type = other DNA
ccacagtgagatttcttaaatagtcccaataattttgttaatagccactttttaaaaaaatcccagatgatacactgagaaatcacatctcactagtctccttccatctggaccagtgcc

SEQ ID NO: 18197 - DNA, 120 bp, synthetic construct
  source 1..120: mol_type = other DNA
taaatatcactgaggtgacatcatgtcctgttcagagcagcatctcagcagtctcatgatgttggtttgtacaaatacaggtgatcttaagatcaataaaatcacttggttatgttggtg

SEQ ID NO: 18198 - DNA, 120 bp, synthetic construct
  source 1..120: mol_type = other DNA
tatgtacatgtcctgttccccatcaaatttttatccactagttttgcaatcatttatgtttttcttaacaccattatcccttctatgtttattaattagggatctactgttaggaatggc

SEQ ID NO: 18199 - DNA, 120 bp, synthetic construct
  source 1..120: mol_type = other DNA
actactaatggttaaattgtcctacaattaaatgatggcaagcccttcaaactggattttattttttttacgtatcctgatgttttttggagcatttgtttactgctttttgagtttacc

SEQ ID NO: 18200 - DNA, 120 bp, synthetic construct; identical to SEQ ID NO: 5665
  source 1..120: mol_type = other DNA

SEQ ID NO: 18201 - DNA, 120 bp, synthetic construct
  source 1..120: mol_type = other DNA
tgctggttgcatggttcaactttactttgttctcacactgggaaccacagagtgtttcctactggtggcgatgtcctatgaccgttatgcagctgtgtgtagacctttgcattacactgt

SEQ ID NO: 18202 - DNA, 120 bp, synthetic construct
  source 1..120: mol_type = other DNA
agatcactttttctgtgaagttccggcacttttatgattatcatttgtcaatacccgtgaaaataaactgaccctcatgatcacaagctccatttttgttctgctacttctcaccctcat

SEQ ID NO: 18203 - DNA, 120 bp, synthetic construct
  source 1..120: mol_type = other DNA
ggccatgtgcatgtatctccagccaccatcagggaattctcaagatcaaggcaagttcattgctctcttttatactgttgttacacctagtcttaaccctctaatctacaccctcagaaa

SEQ ID NO: 18204 - DNA, 120 bp, synthetic construct; identical to SEQ ID NO: 5666
  source 1..120: mol_type = other DNA

SEQ ID NO: 18205 - DNA, 120 bp, synthetic construct
  source 1..120: mol_type = other DNA
aatattgataaaagtgaagttataattcctatgaaaagatgatactctcaattttaaaatatctagaatatgtcttttaattttttgctgtttaggcagaatacttttgtcttctatctt

SEQ ID NO: 18206 - DNA, 120 bp, synthetic construct
  source 1..120: mol_type = other DNA
agtaagacaataagttttataaattgtagcaagagagatgttgaagcagtgtagcagaagtcggcgtccaagatccctcttttttacaaggcagtgagaaggatattggaggtgaaagga

SEQ ID NO: 18207 - DNA, 120 bp, synthetic construct
  source 1..120: mol_type = other DNA
caaatagagaggctctgaaaatgacttgaagtcaatgggtgtataaaagaattatgtttaaatatactggaaaatttttatgataaaagctgttatatggaaaatgttagtttattttta

SEQ ID NO: 18208 - DNA, 120 bp, synthetic construct; identical to SEQ ID NO: 5667
  source 1..120: mol_type = other DNA

SEQ ID NO: 18209 - DNA, 120 bp, synthetic construct
  source 1..120: mol_type = other DNA
ctccaatttctagtgtgacttgcaattgcattgattctgctgactttatcttctttctgcatctgtgactcttcctttatttctaactaggcatgaaaaatatgagtcatttgcccttgt

SEQ ID NO: 18210 - DNA, 120 bp, synthetic construct
  source 1..120: mol_type = other DNA
aacatagcttagctctttgaactatttcctactatggaaatcttacgatttgtaacacttcctgtagcatcctggtttctcacctactcaaatatcctctccatctttattaagtgaaaa

SEQ ID NO: 18211 - DNA, 120 bp, synthetic construct
  source 1..120: mol_type = other DNA
ttaggatctgttatcttagcaattttcaagtatgcagtacagttttattaactatagtcaccatactatagaatagatctcttgaatttattccttctaactgaaactttgtaccctttg

SEQ ID NO: 18212 - DNA, 120 bp, synthetic construct; identical to SEQ ID NO: 5668
  source 1..120: mol_type = other DNA

SEQ ID NO: 18213 - DNA, 120 bp, synthetic construct
  source 1..120: mol_type = other DNA
cttttggatataaacccagaagtgtgattgatggatcatatggcagttctatttttatttattattaattaattaattaattaattttttgagacagagtctcgctctgtcgcccaggct

SEQ ID NO: 18214 - DNA, 120 bp, synthetic construct
  source 1..120: mol_type = other DNA
ttctgtatttttagtagagacaggatttcttgtgtgtgtgtgtgtgtgtgtgtgtgtgtgtgtgtgtgtcctagcaaatctttaattaccctaaggctgatgtagtttctcgtataagtt

SEQ ID NO: 18215 - DNA, 120 bp, synthetic construct; identical to SEQ ID NO: 5669
  source 1..120: mol_type = other DNA

SEQ ID NO: 18216 - DNA, 120 bp, synthetic construct
  source 1..120: mol_type = other DNA
aggacatgaactcattcttttttatggctgcatagtattccaaggtgtatatgtgccacattttcttcatccagtctattattgatgggcatttgggttggttccaagtctttcctattg

SEQ ID NO: 18217 - DNA, 120 bp, synthetic construct
  source 1..120: mol_type = other DNA
ccttgaggaatcgccacactgtcttccacaatggatgaactaatttactctcccaccaacagtgtaaaagcattcctatttctccacagactcgccagcatctgttgtctcctgacattt

SEQ ID NO: 18218 - DNA, 120 bp, synthetic construct
  source 1..120: mol_type = other DNA
ttgagaagtttctatttatatcctttgctcactttttgatggggttgtttgttttattttcataaatttgtttaagttcctcatatattctggatattagacttttgtcagatgcataga

SEQ ID NO: 18219 - DNA, 120 bp, synthetic construct
  source 1..120: mol_type = other DNA
ttgcttttggtgttttagtcatgaagtctttgcccatgcctatatcctgaatggtattgcctaggttcttttctagggtttatatggttttgggttctacatttaagtctttaagctatc

SEQ ID NO: 18220 - DNA, 120 bp, synthetic construct; identical to SEQ ID NO: 5670
  source 1..120: mol_type = other DNA

SEQ ID NO: 18221 - DNA, 120 bp, synthetic construct
  source 1..120: mol_type = other DNA
acctgttgtcctttgtgtttttcataatagatctaactggtgtgaggtatgaggtgatagctactggtgtgggcctgaactttaggtccagtggaacctagagtggtggggatcaacctg

SEQ ID NO: 18222 - DNA, 120 bp, synthetic construct
  source 1..120: mol_type = other DNA
catggatcttgggactacagagtctgacctagggggccaactggcactggaaagtcctattttgccgttttattgatatcacttctcactctctaaattttttttggctttttaattttc

SEQ ID NO: 18223 - DNA, 120 bp, synthetic construct
  source 1..120: mol_type = other DNA
gttatgttgggaacaggcccccaaatctggccataaactggccccaaaactggccataaacaaaatctctgcagccctgtgacatgtttgtgatggccatgatgcccatgccgaaggttg

SEQ ID NO: 18224 - DNA, 120 bp, synthetic construct; identical to SEQ ID NO: 5671
  source 1..120: mol_type = other DNA

SEQ ID NO: 18225 - DNA, 120 bp, synthetic construct
  source 1..120: mol_type = other DNA
ggttagcatctccatgatcgaggtggtcttggcaaggttataattataggatatctaatattgaatcctagtcatattaacctgtgctatttaatttgtaatctgaaagtgatcagttac

SEQ ID NO: 18226 - DNA, 120 bp, synthetic construct
  source 1..120: mol_type = other DNA
ctgaagggaggagataggtgcttgcataagctctggcaacttgtatatgaaaaaatcagggtaaggacaatacatttttagctctgacgacctgttcctatgtcaacaacactgaaggca

SEQ ID NO: 18227 - DNA, 120 bp, synthetic construct
  source 1..120: mol_type = other DNA
gtgaagccagctttttcccagataggaatgatgactaactgcactgaagcatcagcttctttttccctgtaaacttctgtcaggaataccacaaaagtgtgattgtgttctccttagtgc

SEQ ID NO: 18228 - DNA, 120 bp, synthetic construct; identical to SEQ ID NO: 5672
  source 1..120: mol_type = other DNA

SEQ ID NO: 18229 - DNA, 120 bp, synthetic construct
  source 1..120: mol_type = other DNA
ggataagttattatatattaccttacgtggcaaaattaattttattttttatattttaagtcctggaagacatgtgcggaatgtgcaggtttgttacataggcatacatgtgccatgctg

SEQ ID NO: 18230 - DNA, 120 bp, synthetic construct
  source 1..120: mol_type = other DNA
gttctcactgttcaactcccacttatgagtgagaacatgcagtgtttggttttctgttcctgttttagtttgctgagaatgatggtttccagtttcatccatgtccctacaaaggacata

SEQ ID NO: 18231 - DNA, 120 bp, synthetic construct
  source 1..120: mol_type = other DNA
gctgcaataaacatacatgtgcatgtgtctttatagtagaatgatttataatcctttgggtatatacctagtaatgggattgctgagtcaaatggtattgctggttctagatccttgagg

SEQ ID NO: 18232 - DNA, 120 bp, synthetic construct
  source 1..120: mol_type = other DNA
accattctaactggtgtgagatggtatctcattgtggttttgatttacatttctctaatgaccagagataatgagctttttttcatatgtttgttggctgcatcaatgtcttttttagag

SEQ ID NO: 18233 - DNA, 120 bp, synthetic construct; identical to SEQ ID NO: 5673
  source 1..120: mol_type = other DNA

SEQ ID NO: 18234 - DNA, 120 bp, synthetic construct
  source 1..120: mol_type = other DNA
taaggtgtaaggaaggggtccagtttcagttttctgcatatggctagccagttttcctaacaccatttattaaataaggaatcctttccccattgcttgtttttgtctggtttgtcaaag

SEQ ID NO: 18235 - DNA, 120 bp, synthetic construct; identical to SEQ ID NO: 5674
  source 1..120: mol_type = other DNA

SEQ ID NO: 18236 - DNA, 120 bp, synthetic construct
  source 1..120: mol_type = other DNA
ttttccatatttagtacttccttcaggaactcccgtaaggcaggactggtggtgacgaaatctctcagcatttgcttgtctgtaaaggattttgtttctccttcacttatgaagcttagt

SEQ ID NO: 18237 - DNA, 120 bp, synthetic construct
  source 1..120: mol_type = other DNA
ttccctttgtgggtaacgcgacctttctctctggctgcccttaacattttttttctttcatttcaaccttggtgaatattatgattatgtgtcttggggttgctgttcttgaggaatatc

SEQ ID NO: 18238 - DNA, 120 bp, synthetic construct
  source 1..120: mol_type = other DNA
tttcaggtacaccaatcaaacgtaggtttggtcttttcacatagtcccatatttcttggaggctttgttcattcattttcattcttttttctctaattttgtcttcacgctttatttcat

SEQ ID NO: 18239 - DNA, 120 bp, synthetic construct; identical to SEQ ID NO: 5675
  source 1..120: mol_type = other DNA

SEQ ID NO: 18240 - DNA, 120 bp, synthetic construct
  source 1..120: mol_type = other DNA
tgcaaaagggtttttatagatgtgattaaattctcaaccttgagttgggattattatcctgtattagccaggagggctgacataatcacacatatccatataagagagagggcatgtaag

SEQ ID NO: 18241 - DNA, 120 bp, synthetic construct
  source 1..120: mol_type = other DNA
acatgttctgtcctagagcctgcggaagatgtgcagccctgtagatccaatttagtctttctttctccagatatataagatatttttgttattttaaacaccaaatttgtagtaatttgt

SEQ ID NO: 18242 - DNA, 120 bp, synthetic construct
  source 1..120: mol_type = other DNA
ccatatatcttaatatggtcttatgcattcttatttcattctatcattattttgatgctgaaatggtcagtgttttggctagagaggatcccttctgggtggcttatatgtcttttttat

SEQ ID NO: 18243 - DNA, 120 bp, synthetic construct; identical to SEQ ID NO: 5676
  source 1..120: mol_type = other DNA

SEQ ID NO: 18244 - DNA, 120 bp, synthetic construct
  source 1..120: mol_type = other DNA
tgagagtggggcaatggtgaagaacagtgactggctatgggtttggggagtcatttggcaggagtgtaaatccttgaaatttgaagatctttcaaattaccttgattctcctcaacaaaa

SEQ ID NO: 18245 - DNA, 120 bp, synthetic construct
  source 1..120: mol_type = other DNA
attcttctatctttaaagtcagcagcagagtatcttttctctgacctccagcctccctcttatatggacacaggtgattatattagcctacctgcctaatccaggataatatccccatct

SEQ ID NO: 18246 - DNA, 120 bp, synthetic construct
  source 1..120: mol_type = other DNA
ccccttgcgtcccagggataaagcctaccatgatcaagtaggctttatccctgagaggaaaggttggttcaacatatgcaaatcaatacatgtgattcatcacataaacagaaatgaaaa

SEQ ID NO: 18247 - DNA, 120 bp, synthetic construct
  source 1..120: mol_type = other DNA
agcaatctataaaaaacccacagccaacatcatactgaatggaaaaagctggaagcattccccttgaaaaccggcataagacatggatgccctctctcaccacacctattcaacatagta

SEQ ID NO: 18248 - DNA, 120 bp, synthetic construct; identical to SEQ ID NO: 5677
  source 1..120: mol_type = other DNA

SEQ ID NO: 18249 - DNA, 120 bp, synthetic construct
  source 1..120: mol_type = other DNA
agaggtgccacaaacaaatggaaaaacatcccatgctcatggatactaagattcagtatcattaaaatggccacactggtccaaagcaatttatagattcagtgcaattcctatcaaact

SEQ ID NO: 18250 - DNA, 120 bp, synthetic construct
  source 1..120: mol_type = other DNA
tacccaacttatactagagggctacagtatccaaaacagcacggtactggaaaaaaaaaaaaaaaaacagatatatagaccaatagaataaatagagaacccagaaatagtgcaacacac

SEQ ID NO: 18251 - DNA, 120 bp, synthetic construct
  source 1..120: mol_type = other DNA
gccaactttgcaccacatacaaaaatcaactcaagatggattaaacacttaaatgttaaaatgaaaactattaatataaaaactctggaagataacctaggaaataccattctggacata

SEQ ID NO: 18252 - DNA, 120 bp, synthetic construct; identical to SEQ ID NO: 5678
  source 1..120: mol_type = other DNA

SEQ ID NO: 18253 - DNA, 120 bp, synthetic construct
  source 1..120: mol_type = other DNA
ataccatctcgtaccaggtggaatggctattatcaaaaagtcaaattattaataacagatacatcaaggttatggagaaaagggaatgcttatacactgctggtgggaatgtaaattacc

SEQ ID NO: 18254 - DNA, 120 bp, synthetic construct
  source 1..120: mol_type = other DNA
agacatatgcacgagtatgttcattgcagcactgttcacaacagcaaatacatgaaatcaacctaaatgcccatcaacagtagattgggtaaagaaaatgtggtacatagaccccatgga

SEQ ID NO: 18255 - DNA, 120 bp, synthetic construct
  source 1..120: mol_type = other DNA
taagtgggagctaaacataagaacacatggatactagaaggtgaaccacatgcactggggtctacttgacggtggagggtgggaggaggaagaagatcagaaaaaatacctattgagtac

SEQ ID NO: 18256 - DNA, 120 bp, synthetic construct; identical to SEQ ID NO: 5679
  source 1..120: mol_type = other DNA

SEQ ID NO: 18257 - DNA, 120 bp, synthetic construct
  source 1..120: mol_type = other DNA
actgccacgttcctagtaattcctgaattgcacatgtatgaaatgacattaattctctcatactttagggttgcttgttagtgcctagaaggaatacagtctctgtggccagtctccttg

SEQ ID NO: 18258 - DNA, 120 bp, synthetic construct
  source 1..120: mol_type = other DNA
attggcatcccactgatgtgctgtcctggttgctaggtgcagatttaggttccaagcagaacactgctagtgttctctgcagtttgttgtagaatcatagtgtcttggcaaccaaaggca

SEQ ID NO: 18259 - DNA, 120 bp, synthetic construct
  source 1..120: mol_type = other DNA
tcaatgttgcaaggagacatgagactcacatcagagttctatggcttaacatgggggatggtggtaagtgcggctctatttggattttgtaattataaaagcccactttatgtagagaga

SEQ ID NO: 18260 - DNA, 120 bp, synthetic construct
  source 1..120: mol_type = other DNA
gcgctttgggaggctgaggcgggtggatcacctgaggtcaggagtttgagaccagcccggccaacatggtgaaattccgtctctactaaaaatacaaaaaattagccaggcatggtggca

SEQ ID NO: 18261 - DNA, 120 bp, synthetic construct; identical to SEQ ID NO: 5680
  source 1..120: mol_type = other DNA

SEQ ID NO: 18262 - DNA, 120 bp, synthetic construct
  source 1..120: mol_type = other DNA
tcatccaaataaaatacattgtcctcagtaggtagtctttcatccctcaaccctttcccagcctcccaccttttggagtctccaatgcctatatttcactctatatccacatgtacccat

SEQ ID NO: 18263 - DNA, 120 bp, synthetic construct
  source 1..120: mol_type = other DNA
ttatggccaagtagtattctaaagtgtgtatatatgtataccacattttagaaatccaatagtccactgatggacactcaggctgattttattactttgctattgtggatagtgctgcga

SEQ ID NO: 18264 - DNA, 120 bp, synthetic construct
  source 1..120: mol_type = other DNA
atactgttttccacagaggttgtactaatttacattcccaccaatagtgtatgtaatccttttctctataccctcggcaaaattttttttttctgaatttaataatggccattttgactg

SEQ ID NO: 18265 - DNA, 120 bp, synthetic construct; identical to SEQ ID NO: 5681
  source 1..120: mol_type = other DNA

SEQ ID NO: 18266 - DNA, 120 bp, synthetic construct
  source 1..120: mol_type = other DNA
ccactgggcaaaaggatatttatatccttggattaagtgttaagtgataagaaatcaaatcaaataactgagtaaacagttgatgaatattccctactatacttggagaagataaaatgg

SEQ ID NO: 18267 - DNA, 120 bp, synthetic construct
  source 1..120: mol_type = other DNA
gctctgtcgcccaggctggagtgcagtggtgcaatctcagctcattgcaacctccatctcccggtttcaagtgattctcctacctcagcgtcccgagtagctgggattacaagcatgcac

SEQ ID NO: 18268 - DNA, 120 bp, synthetic construct; identical to SEQ ID NO: 5682
  source 1..120: mol_type = other DNA

SEQ ID NO: 18269 - DNA, 120 bp, synthetic construct
  source 1..120: mol_type = other DNA
caactcgtcatttacattaggtatttctcctaatgctatccctcccccagtgccccccaccccccgacaggccctggtgtgtgatgttccccaccctgtgtccaagtgttctcattgttc

SEQ ID NO: 18270 - DNA, 120 bp, synthetic construct
  source 1..120: mol_type = other DNA
ctatggctgcatagcattccactgtgtatatgtgccacattttctttatccagtgtattattgatggacatttgggttggttccaagtctttgctattgtgagtgccacaataaacatac

SEQ ID NO: 18271 - DNA, 120 bp, synthetic construct
  source 1..120: mol_type = other DNA
aagcatttgtctagtaagaaaatgtaatttgaaagtaaggttcagaacatttaaccaaatgttcaagtaatttctaaactgtattgagaaaatggaataaagtttcatagattatttgta

SEQ ID NO: 18272 - DNA, 120 bp, synthetic construct; identical to SEQ ID NO: 5683
  source 1..120: mol_type = other DNA

SEQ ID NO: 18273 - DNA, 120 bp, synthetic construct
  source 1..120: mol_type = other DNA
aaaataaattctcacaatttttttttgttgctgaaacaaaagcactgaaaataataaatactagcaagaatgcaaagtgagggaaactctctttgattgctggtagaaatgcaaagtggt

SEQ ID NO: 18274 - DNA, 120 bp, synthetic construct
  source 1..120: mol_type = other DNA
ctgcatgcaaatgtttatatcagtttcattcataattactccaaactgtaagcaacccatgcccttcaacaggggaaagataatcttgggtatttccacacaatgatctatgattttgtg

SEQ ID NO: 18275 - DNA, 120 bp, synthetic construct
  source 1..120: mol_type = other DNA
ctgaatattgtatgatttcattcataagacatctggggaaaaaaaacccactgggatggaaacacatcagtggtatccagggcttagtgtaagggagattagtttattacaaagaagaca

SEQ ID NO: 18276 - DNA, 120 bp, synthetic construct; identical to SEQ ID NO: 5684
  source 1..120: mol_type = other DNA

SEQ ID NO: 18277 - DNA, 120 bp, synthetic construct
  source 1..120: mol_type = other DNA
tcagctaattctgtaattgcttcacatgcataccagttgaacaaaaatattaaaatatgaacagtggcatccaggtttctccctgttggtaagagaagttacagagaagcaagaaaggaa

SEQ ID NO: 18278 - DNA, 120 bp, synthetic construct
  source 1..120: mol_type = other DNA
atatgtgtgtattcagggcttactgtgtagacacacattacctagccctttctgctgaaatagcctagaaacaatgttaccctcatagcaatgtgcacatgtcacactcagataatgttt

SEQ ID NO: 18279 - DNA, 120 bp, synthetic construct
  source 1..120: mol_type = other DNA
gaaatatataagagaagcctggagaagaaccagtaataccagaaatcagggaggggccctgaagagaaaaggataacaaaaggatgaagacctgtccaagggacccagcagctaacttga

SEQ ID NO: 18280 - DNA, 120 bp, synthetic construct; identical to SEQ ID NO: 5685
  source 1..120: mol_type = other DNA

SEQ ID NO: 18281 - DNA, 120 bp, synthetic construct
  source 1..120: mol_type = other DNA
cccctgctctgatgggataaaaagggcactttacctctgtggtctcctctgcaaaaattcaaaggcccagtgtaattgatggcagctgaaacccatctggactgtgatgccggctgtagt

SEQ ID NO: 18282 - DNA, 120 bp, synthetic construct
  source 1..120: mol_type = other DNA
gttgcccagcagcggctgtggacaggacatccctgtgcgcttggggttcaggagcaggcagaagccccaccctccctggtgcagctgcagctgctcaagctgtgtctacaaacctgggca

SEQ ID NO: 18283 - DNA, 120 bp, synthetic construct
  source 1..120: mol_type = other DNA
tttgcccccgcaggcttggaggtgcctgctcctggtgtctgatctctccctgctcctggtgcgtgctctgatctcggagcgtggttgaggccaggcccaggtgctattgcaacctggcct

SEQ ID NO: 18284 - DNA, 120 bp, synthetic construct; identical to SEQ ID NO: 5686
  source 1..120: mol_type = other DNA

SEQ ID NO: 18285 - DNA, 120 bp, synthetic construct
  source 1..120: mol_type = other DNA
tcctctgaagtccataaaaattcccagactcagccagacacaaaaagatgtcaggacaaccagctgcagagaggaattacctaccctagggtctcttttctgctgagacctgaacactct

SEQ ID NO: 18286 - DNA, 120 bp, synthetic construct
  source 1..120: mol_type = other DNA
attgttcaataaagctcctcttcaccttactcaccctccacttatccacatacctcgtgagtgtgggacaagaacttgggacccactgaatggcatggctgaaagagctgtcacacaaac

SEQ ID NO: 18287 - DNA, 120 bp, synthetic construct
  source 1..120: mol_type = other DNA
ggtggttctgtggttcctggtgcggaagctgcttgcagtacacctggtccagccgcagacttgcagggagatggcacccctgtcagtgcctggaactgcctgccctgctgcagcaagcat

SEQ ID NO: 18288 - DNA, 120 bp, synthetic construct; identical to SEQ ID NO: 5687
  source 1..120: mol_type = other DNA

SEQ ID NO: 18289 - DNA, 120 bp, synthetic construct
  source 1..120: mol_type = other DNA
ttaagctaactcacctaacttagtgtgggtcacatatcttggcttgataatcccaagctgtgcttagaaacccaggtagcaccaggacatcctgcagctcagggttgggctctggctgca

SEQ ID NO: 18290 - DNA, 120 bp, synthetic construct
  source 1..120: mol_type = other DNA
acaatgcacctgcttctccagggcagctaggcataggacctgagaggagcctgcaggcaggagggcttgcagaacagatgtgtcttagtcccatagggaagccagccctgctctcctttg

SEQ ID NO: 18291 - DNA, 120 bp, synthetic construct
  source 1..120: mol_type = other DNA
ccaaagctgcccagcacacaaaagctcccaggctctgcactgtctgaagtactgtctctgcctgttccccagggagatacccctgccagctaacacatttatgggggatatggggtctct

SEQ ID NO: 18292 - DNA, 120 bp, synthetic construct
  source 1..120: mol_type = other DNA
tggggctgggaactagccctggcattcaggtaccacttcagggtttccagatttctgactctacagcctcagcttcagctttgcttctccatacactcagtgttttctctcctaagatca

SEQ ID NO: 18293 - DNA, 120 bp, synthetic construct; identical to SEQ ID NO: 5688
  source 1..120: mol_type = other DNA

SEQ ID NO: 18294 - DNA, 120 bp, synthetic construct
  source 1..120: mol_type = other DNA
ttcagaaactaacattggtatgttactactaccaaaactctagactatctttggatttcagcaagattttctttaacatcctttttttgttgcagaatcccatccaggacactccattgc

SEQ ID NO: 18295 - DNA, 120 bp, synthetic construct
  source 1..120: mol_type = other DNA
ggtatcttacagaatgcacttcaatcatggtttgtccaatgttttctaatggttatgttacgggatccttgggttatcacttcaccagctgaaaacctctgtggctagtggcacttatgc

SEQ ID NO: 18296 - DNA, 120 bp, synthetic construct; identical to SEQ ID NO: 5689
  source 1..120: mol_type = other DNA

SEQ ID NO: 18297 - DNA, 120 bp, synthetic construct
  source 1..120: mol_type = other DNA
tcctctccagcatctgttgtttcctgactttttaatggtcaccattctaactggcgtatgatggaatctcattgtggttttgatttgcgtttctctaatgatgagtgatgatgagctttt

SEQ ID NO: 18298 - DNA, 120 bp, synthetic construct
  source 1..120: mol_type = other DNA
gatattagccctttgtcggatggattgcaaaaattttctcccattctgtaggttgcctgttcactctgatgatagtttcttttgctgtgcagaagctctttagtttaattagatcccatt

SEQ ID NO: 18299 - DNA, 120 bp, synthetic construct
  source 1..120: mol_type = other DNA
ttatgtttaagtctttaatccatcttgagttaatttttgtataaagtgtaaggaagtggtccagtttctgttttctgcatgtggctagccagttttcccaacaccatttattaaataggg

SEQ ID NO: 18300 - DNA, 120 bp, synthetic construct; identical to SEQ ID NO: 5690
  source 1..120: mol_type = other DNA

SEQ ID NO: 18301 - DNA, 120 bp, synthetic construct
  source 1..120: mol_type = other DNA
ttcagcttgtcatgtgtatgaaaaagcagagatataatttattattggtaatcccagtgcttattgtaattttataatattatgatatgaaatgattaaatgtatatgtcacttctttgt

SEQ ID NO: 18302 - DNA, 120 bp, synthetic construct
  source 1..120: mol_type = other DNA
gcatagctgataacagtaattgactcagcagctcttccttcttattctattattttcacagcctctactcctcttcaccttttatatggcactggtgccagttcatttatcaattctttt

SEQ ID NO: 18303 - DNA, 120 bp, synthetic construct
  source 1..120: mol_type = other DNA
aaataccactgattctttttcaattaaaaaattcccactgacttttttatgtgtggagatataataagcaaattttcattcaaaagtttcaaaggataagaaggatttttggaatcacta

SEQ ID NO: 18304 - DNA, 120 bp, synthetic construct; identical to SEQ ID NO: 5691
  source 1..120: mol_type = other DNA

SEQ ID NO: 18305 - DNA, 120 bp, synthetic construct
  source 1..120: mol_type = other DNA
aagatgaggtaaaagtgtgttacagataatgtcttcagtcaccgggatatttttgactgacatgggctgtccttgccaggttcctaatggatttccacaatgagaagctgattttataga

SEQ ID NO: 18306 - DNA, 120 bp, synthetic construct
  source 1..120: mol_type = other DNA
ctgagtccctcaagtttaattggtcattgtgtccccagaggcaataagttaactctattcccaattgcactggtggcataatactgacacataggtagttcacaaattctaaaactaggg

SEQ ID NO: 18307 - DNA, 120 bp, synthetic construct
  source 1..120: mol_type = other DNA
tatagctgtattgagatataatttatttacaatacagttcacccatttaaagtgtacaagtcaatgatttttggtatatttcattactaatttataacattgtggtaatatataacataa

SEQ ID NO: 18308 - DNA, 120 bp, synthetic construct; identical to SEQ ID NO: 5692
  source 1..120: mol_type = other DNA

SEQ ID NO: 18309 - DNA, 120 bp, synthetic construct
  source 1..120: mol_type = other DNA
tgggtggaattttgcaaaccatacttaggagtttggattctgttttgtaggacttggtctcagggtcaaatagggagtcttttgatggtgtatataggaaaatggtatttctattgttta

SEQ ID NO: 18310 - DNA, 120 bp, synthetic construct
  source 1..120: mol_type = other DNA
ttaattcactggagcagaacaagtagaaataatgagattgcaactggaatagtttttgaaaataagaagatttatgcaatgtataacttaataagtgctcaccaaagattttcagtgaaa

SEQ ID NO: 18311 - DNA, 120 bp, synthetic construct
  source 1..120: mol_type = other DNA
tgttttgttttgtttttaagacaggatctcactcccatggcccaggctggagtgcagtggtgcgatcacaggtcactgcagcctcgacttcccaggctgaggtcatcctcccgcctcagc

SEQ ID NO: 18312 - DNA, 120 bp, synthetic construct
  source 1..120: mol_type = other DNA
acattgcccaggctggtctccagctcctgggttcaggccatccacctgccttggcctctcaaagtgctgggattacaggtgtgagccatggcacctggccacatgctcgtattttaatgt

SEQ ID NO: 18313 - DNA, 120 bp, synthetic construct; identical to SEQ ID NO: 5693
  source 1..120: mol_type = other DNA

SEQ ID NO: 18314 - DNA, 120 bp, synthetic construct
  source 1..120: mol_type = other DNA
gcctcccaaagtgctgggacctcacctgtagtgtgagccacctcccggccatatcatgtatttttataaattgtaaactgacatatgtaaaacaatcattttctaatttataaaattttc

SEQ ID NO: 18315 - DNA, 120 bp, synthetic construct
  source 1..120: mol_type = other DNA
ttgtcaccttatactatagatcattcagaataaagtgctttccatatgtgatctcttttagactgtttatcagaaatgacgtcagtgaattaaaagtattagtataggctgggtgaggtg

SEQ ID NO: 18316 - DNA, 120 bp, synthetic construct
  source 1..120: mol_type = other DNA
gacatgatgaactcctgtttctactaaaaatgcaaaaaaaaaaaattagccaggcatggtggtgcatacctatagtgtcagctactctgaagactgaggtgggaggattgcttgagcctg

SEQ ID NO: 18317 - DNA, 120 bp, synthetic construct; identical to SEQ ID NO: 5694
  source 1..120: mol_type = other DNA

SEQ ID NO: 18318 - DNA, 120 bp, synthetic construct
  source 1..120: mol_type = other DNA
cctttaaatcctaaggtatacaatagtggtacttcctgtcatatcttcatttgcattagcagtcagacccctgaaataaatcagacagatattgggatgacagtagcaaattaccacaga

SEQ ID NO: 18319 - DNA, 120 bp, synthetic construct
  source 1..120: mol_type = other DNA
taccctgtatgcatacattgatctggtaaatgttttctttttcatccttatcaggaaacatgatcagggagtttgcactcacttggagctgacaatactataccatgtcccagagctatg

SEQ ID NO: 18320 - DNA, 120 bp, synthetic construct
  source 1..120: mol_type = other DNA
gaagtggtcaatacattaaaagccttgataagacacatgtgatccagagagtgagtgttgcactccataaagattcagggacctaaagcataaaagttttaagtgtttattggtctgggg

SEQ ID NO: 18321 - DNA, 120 bp, synthetic construct; identical to SEQ ID NO: 5695
  source 1..120: mol_type = other DNA

SEQ ID NO: 18322 - DNA, 120 bp, synthetic construct
  source 1..120: mol_type = other DNA
ataaagccctggtgttttactgaattctgggtagagaaataacatctgaccatggaacaacaaataaccatgcaggcaaaactacccatatgagctggggactgtctgaaccatcaagtt

SEQ ID NO: 18323 - DNA, 120 bp, synthetic construct
  source 1..120: mol_type = other DNA
tattcaccacttttgcatcaatatctcttcttcagaccacacttacgcctccaagagagaacacttccaactctaatggaggagaaaaatgtcaagcttggttcattaatgggtcagctt

SEQ ID NO: 18324 - DNA, 120 bp, synthetic construct
  source 1..120: mol_type = other DNA
aacgcctcccaatggacagagtttcagatggtacccagtcattcactttgtgtggaaagagaagtagtttgaagttagaatatgtataactcataggtagtgataaatggcttaggaggc

SEQ ID NO: 18325 - DNA, 120 bp, synthetic construct
  source 1..120: mol_type = other DNA
ctaaaactacaagatggaatccatcatagaaaatgaattaagcaactaggtagaaaatgtgacttggcgagcagttattgtcaagagcttctgacatttgccctcattatcctacctgca

SEQ ID NO: 18326 - DNA, 120 bp, synthetic construct; identical to SEQ ID NO: 5696
  source 1..120: mol_type = other DNA

SEQ ID NO: 18327 - DNA, 120 bp, synthetic construct
  source 1..120: mol_type = other DNA
gtttgacgcagcagcaggagatcccacataccattgtatcagaaaaaagggccgacttaatggcaaagaaagtgtaggagtggacttatgaccatggaatccattggccatatcacatat

SEQ ID NO: 18328 - DNA, 120 bp, synthetic construct
  source 1..120: mol_type = other DNA
catccttcaagacccagtactttaaatcaattatctttctatggtgctctgtcctcactaggaagaatgcatggtttagaaaccaaaaggtgaaagcccttcttagaatccctaccagta

SEQ ID NO: 18329 - DNA, 120 bp, synthetic construct
  source 1..120: mol_type = other DNA
tatactttgtttaattatgatggtaaatgaccaaaggcaatgagattaactaaaaaaagccatagtgatcaggggctcagacacttccggatcatgacaccaggtaaaccactgagagca

SEQ ID NO: 18330 - DNA, 120 bp, synthetic construct; identical to SEQ ID NO: 5697
  source 1..120: mol_type = other DNA

SEQ ID NO: 18331 - DNA, 120 bp, synthetic construct
  source 1..120: mol_type = other DNA
ctgccccctcccccaccccacaccagatcttatacaaaggagtagatctgaaattaaaggaatagacagtgttggaagttataatgctttactcagataacactttcagaatgaaggcat

SEQ ID NO: 18332 - DNA, 120 bp, synthetic construct
  source 1..120: mol_type = other DNA
gagttgcttcatctaaacatatggcccttttccatgtaatctgcattcaacactgaccaacaaggagatttaaggcttgccgttggcctcagctcagaacatcaatgaattgtcatctca

SEQ ID NO: 18333 - DNA, 120 bp, synthetic construct
  source 1..120: mol_type = other DNA
tcctttcctcaatcatgctacccaccctttcctttgaaagatgttgatccaaaaaatgttccctagtaaactttctaaatgctgatctccatccctgagtcggcttccagggaaactcca

SEQ ID NO: 18334 - DNA, 120 bp, synthetic construct
  source 1..120: mol_type = other DNA
gagtgaaacatttaagaaagaaagttaatttagggatgcattagccaggttgtgtgtaatgagagctcagttctctaaaggccttctgaaaagcacacaggatgtttttgcctgaaggga

SEQ ID NO: 18335 - DNA, 120 bp, synthetic construct; identical to SEQ ID NO: 5698
  source 1..120: mol_type = other DNA

SEQ ID NO: 18336 - DNA, 120 bp, synthetic construct
  source 1..120: mol_type = other DNA
ttagagctgggctgaagagatgtgatacactggtactagaggcatctactttagaaggtgagatagaaatgctgtattttacatttacaaccataggaatggaggtgtgctggcttttac

SEQ ID NO: 18337 - DNA, 120 bp, synthetic construct
  source 1..120: mol_type = other DNA
ttgaattttgcatagtaaaaaccatctagtctaagactgtctcccctaaccaaggaccttttacaaatagttgatccagggggaaaaaaaaaaagcatctacttcaatgattagtaattt

SEQ ID NO: 18338 - DNA, 120 bp, synthetic construct
  source 1..120: mol_type = other DNA
acaaaaaacgaaaccagtagttagtggttatgaagtggatgaaaatcgaagggtggggtaagaggcaggttgattctgaacatggaaaaatctacaagactgagattctttaaaacatca

SEQ ID NO: 18339 - DNA, 120 bp, synthetic construct; identical to SEQ ID NO: 5699
  source 1..120: mol_type = other DNA

SEQ ID NO: 18340 - DNA, 120 bp, synthetic construct
  source 1..120: mol_type = other DNA
tggttggtagataggagacaacagggctaggatattcagaaaataacctccagcaagctttgtaaaagcaaaagcatatattgatgtaaaaactttacatatgtaattgcatgatatacc

SEQ ID NO: 18341 - DNA, 120 bp, synthetic construct
  source 1..120: mol_type = other DNA
ttgacacagttattattgttaatgattttaaatattttcatctaatttcaagcttttggttttctttaatgtactttatcattcttcatcaaagaaggtcatgtagaaatataatgtttc

SEQ ID NO: 18342 - DNA, 120 bp, synthetic construct
  source 1..120: mol_type = other DNA
agttactttgtgccaagaacactttttagtatttcccacatttgcacatttaatctctccaacaagcatatgtaggtttttaattttgctcgttttccaaatacaaaatctaaggaaaga

SEQ ID NO: 18343 - DNA, 120 bp, synthetic construct; identical to SEQ ID NO: 5700
  source 1..120: mol_type = other DNA

SEQ ID NO: 18344 - DNA, 120 bp, synthetic construct
  source 1..120: mol_type = other DNA
gcaaagtgattttcactagcaggtgcttacatgtattttatataatatttataatgaacaattttaatcagagacaaaatatgaggaagatgtaaaagaggaagagagagagtgaatgat

SEQ ID NO: 18345 - DNA, 120 bp, synthetic construct
  source 1..120: mol_type = other DNA
ctgtactggaaccatcacaggcttttgaggaactacttttgaaccgttccccagagaggcatttgccccagtagctatgattataatttgcaatgacagccacagtgatttcatccttct

SEQ ID NO: 18346 - DNA, 120 bp, synthetic construct
  source 1..120: mol_type = other DNA
tatggtcatagttcttgtgtccttgaaggatccaaaactccacatccctatgtatttctttctttccaacctttccttggtagacctctgtttgaccagcagctgtgttccacagatgtt

SEQ ID NO: 18347 - DNA, 120 bp, synthetic construct; identical to SEQ ID NO: 5701
  source 1..120: mol_type = other DNA

SEQ ID NO: 18348 - DNA, 120 bp, synthetic construct
  source 1..120: mol_type = other DNA
gtactgatactacctacagtgaaattcagatgtctatcgccagtgttgtcctcctggtgatgcccttgatcattatcctttcctcttctggtgctattgctaaggctgtgctgagaatta

SEQ ID NO: 18349 - DNA, 120 bp, synthetic construct
  source 1..120: mol_type = other DNA
acaggtgtctaccttcaaccaaaaaatcactatcctcatgaatggggcaaatttctcactcttttctacactgtagtaaccccaactcttaatcccctcatctacactctaaggaacaag

SEQ ID NO: 18350 - DNA, 120 bp, synthetic construct
  source 1..120: mol_type = other DNA
aagctggagatacacctcctaagccaaaagtaggagagaaagagctgcattctgttcaggttgagatttcagtttccttcatcaatcaattgggcccttaaattcttcatattgtggatt

SEQ ID NO: 18351 - DNA, 120 bp, synthetic construct; identical to SEQ ID NO: 5702
  source 1..120: mol_type = other DNA

SEQ ID NO: 18352 - DNA, 120 bp, synthetic construct
  source 1..120: mol_type = other DNA
actgttgacctgtaatgtgactttcactatccaatgcaaagtgtttgccatgccaaagtccacatttactgctctctggtgctgatactatgatgagtgtgtgtgcaagtttctcagttt

SEQ ID NO: 18353 - DNA, 120 bp, synthetic construct
  source 1..120: mol_type = other DNA
tagatatttatggctttcctattatatacctattatgtttcagatggtagttatgtaatagtagataaaacatataaaataatcaacatcgtggaacttataacaatatcatctcttgct

SEQ ID NO: 18354 - DNA, 120 bp, synthetic construct
  source 1..120: mol_type = other DNA
tattatttgtcttctccatttacaaccaaactttttcaattttggaaggaatattaggttcagccactgtgttgcttcagattgcagctaacaacactggtctagcaagtgcttccccct

SEQ ID NO: 18355 - DNA, 120 bp, synthetic construct; identical to SEQ ID NO: 5703
  source 1..120: mol_type = other DNA

SEQ ID NO: 18356 - DNA, 120 bp, synthetic construct
  source 1..120: mol_type = other DNA
ttccacatggtgttggtcctgtgggtgtgcagaagacaagaactgagctttgagaacctccgcctagatttcagaggatgtattgatgtgcctggatgtccaggaagaagtttgctgggt

SEQ ID NO: 18357 - DNA, 120 bp, synthetic construct
  source 1..120: mol_type = other DNA
ccatcctccagactccagaatgatagacccactgacagcttgcactgtgtgcctggaaaagctggagacactcaatgccagcctgtgaaagcagccaggaggggagcaaagccacaagga

SEQ ID NO: 18358 - DNA, 120 bp, synthetic construct
  source 1..120: mol_type = other DNA
catgcatgggtcctgcaacacctttgttttggccaatttctcccatctggaatgggtgtatttacccaatgctgtactcccattgtatctaggaagtaactaacttgcttttgattttac

SEQ ID NO: 18359 - DNA, 120 bp, synthetic construct; identical to SEQ ID NO: 5704
  source 1..120: mol_type = other DNA

SEQ ID NO: 18360 - DNA, 120 bp, synthetic construct
  source 1..120: mol_type = other DNA
ctgatgattttataaagagtttttccccttttgccctttttctctcttctgctgccatctgaagaaggatatgtttgcttccctttctgccataattgtaagtttcctgaagcctcccca

SEQ ID NO: 18361 - DNA, 120 bp, synthetic construct
  source 1..120: mol_type = other DNA
ttggatcagacgttgtagagataatttatcttgttcccaacataatttttctcttgaggggtggttttgaggttagtggtctgagttcacactcatcaaaatctgagcttattctagcat

SEQ ID NO: 18362 - DNA, 120 bp, synthetic construct
  source 1..120: mol_type = other DNA
cagctctctgggggttggatttgtatctaaattatagaaaatttgaatgatcctgggaagacaggaggcttttctctccagcaatttgcagagttgggtctgtagttaagatcaagagca

SEQ ID NO: 18363 - DNA, 120 bp, synthetic construct
  source 1..120: mol_type = other DNA
gagtgcagtggtgccatctcagctcactgtaacctctgctgcctgggttcaagcaattctcctgcctcagcctcctgagtagctgggattagaggtgcctgccactgcacctggctaatt

SEQ ID NO: 18364 - DNA, 120 bp, synthetic construct; identical to SEQ ID NO: 5705
  source 1..120: mol_type = other DNA

SEQ ID NO: 18365 - DNA, 120 bp, synthetic construct
  source 1..120: mol_type = other DNA
attgttcagctcccacttataagtgagaacatgcagtgtttggtcttctgttcgtgtgttagtttgctgagaatgatggcttccagctccatccatgtctctgcaaaggatgtgatcttg

SEQ ID NO: 18366 - DNA, 120 bp, synthetic construct
  source 1..120: mol_type = other DNA
gggttgattccatgcctttgctattgtgaatagtgctgcaaagtacatatgtgtgcatgtatctttataataaaatgatttatattcctttgggtataaacccagtaatgggattgctgg

SEQ ID NO: 18367 - DNA, 120 bp, synthetic construct
  source 1..120: mol_type = other DNA
aaatgggagaaaatttttgcaatctatccatctgacaaaggtctaatatccagaatctataaggagcatcactgattattagagaaatgcaaatcaaaaccagaatgagataacatctca

SEQ ID NO: 18368 - DNA, 120 bp, synthetic construct
  source 1..120: mol_type = other DNA
actaatttattaatagacaggaaactaatttctaatttcttagcagatacatactggcttctcagccaggctactgacctttaccccttacatacacaccttaacttctgtatgaacatg

SEQ ID NO: 18369 - DNA, 120 bp, synthetic construct; identical to SEQ ID NO: 5706
  source 1..120: mol_type = other DNA

SEQ ID NO: 18370 - DNA, 120 bp, synthetic construct
  source 1..120: mol_type = other DNA
attgatctcttagtgtatgcaagaaaatatgtggaaggcagtggtgacttagagactctaagaaactggtttgactatagggtggcaatcgggggaacagtattattaacagcctagaga

SEQ ID NO: 18371 - DNA, 120 bp, synthetic construct
  source 1..120: mol_type = other DNA
ctgtttctctgcagagaaacagattttatccatatgctctttatccatacagcctttatctataagctcttcatctgtttctctttgtttctctgcttctctgtctctttttgtctctct

SEQ ID NO: 18372 - DNA, 120 bp, synthetic construct
  source 1..120: mol_type = other DNA
ctgaagcagtatcttttgtttcttaccctctactagatcttgctgtctgcccttgtctctgcgtattagtgagcgtcctctcctgactcaacaaagaaagtaagagaatgaagtgtatag

SEQ ID NO: 18373 - DNA, 120 bp, synthetic construct; identical to SEQ ID NO: 5707
  source 1..120: mol_type = other DNA

SEQ ID NO: 18374 - DNA, 120 bp, synthetic construct
  source 1..120: mol_type = other DNA
tgtaaaaaacagaaaatacctctggccatcttaaaaaaaataaattttggttcaaccattgtggaagtcagtgtggcgattcctcagggatctagaactagaaataccatttgacccagc

SEQ ID NO: 18375 - DNA, 120 bp, synthetic construct
  source 1..120: mol_type = other DNA
tccaacaatgatagactggattaagaaaatgtggcacatatacaccatgggatactatgcagccataaaaaatgatgagttcatgtcctttgtagggacatggatgaaactggaaaccat

SEQ ID NO: 18376 - DNA, 120 bp, synthetic construct
  source 1..120: mol_type = other DNA
gttgtgaggtggggggagaagggagggatagcattagtagatatacctaatgctaaatgacagttaatgggtgcagcacaccaacatggcacatgtatacatatgtaacaaacctgcaca

SEQ ID NO: 18377 - DNA, 120 bp, synthetic construct; identical to SEQ ID NO: 5708
  source 1..120: mol_type = other DNA

SEQ ID NO: 18378 - DNA, 120 bp, synthetic construct
  source 1..120: mol_type = other DNA
ctcatgaatgttcacaaatagagaagaacaagggatggcaacttctgttatagcaactcattattaactgcctgtttgattatggtattctattcctctctctgccagggaatagaaagt

SEQ ID NO: 18379 - DNA, 120 bp, synthetic construct
  source 1..120: mol_type = other DNA
attccttgagttgttacatttgaaattcaaggtggtaagttgattatgagacccttcattctccttcttctacacttgagatctgaccaaacacaaaaagggataggttgccaaaaggag

SEQ ID NO: 18380 - DNA, 120 bp, synthetic construct
  source 1..120: mol_type = other DNA
ggagagcatgtaaactctgtaaaacaatgaaaacaaacaagacagaagtttccagtttccccattgctttctacctttgtcctcttttcttattctttcctattcttttattcttttttc

SEQ ID NO: 18381 - DNA, 120 bp, synthetic construct; identical to SEQ ID NO: 5709
  source 1..120: mol_type = other DNA

SEQ ID NO: 18382 - DNA, 120 bp, synthetic construct
  source 1..120: mol_type = other DNA
tttagcctttgagtcacatcattttcatttgacagtctttgtcagtgattcccgaatagcacatgtgtaaaaatccatctatcctcccagattttgggattgatggatgtggccttggat

SEQ ID NO: 18383 - DNA, 120 bp, synthetic construct
  source 1..120: mol_type = other DNA
tgttttggaagcactgcctgttctcccctatcgccacgcacactgctggtctctcttggttgccaggcactggtttaggttctgagcagaatactccacagtgttctctacagtgtgttg

SEQ ID NO: 18384 - DNA, 120 bp, synthetic construct
  source 1..120: mol_type = other DNA
aggagacatgagactcacagcagatctctctggcttaacatgggagatggcggtaagtgcagctatatctgaatttttttaatagttaaaagctgactttatccaaatagggattaatgt

SEQ ID NO: 18385 - DNA, 120 bp, synthetic construct; identical to SEQ ID NO: 5710
  source 1..120: mol_type = other DNA

SEQ ID NO: 18386 - DNA, 120 bp, synthetic construct
  source 1..120: mol_type = other DNA
agacttgccatagcaataaagtagagtttggatgaagacgtccatcttcgggaaaacccaaaatagcttttacaaaaaactgaaggatgaaataaaagattaagccaacagaaataaaca

SEQ ID NO: 18387 - DNA, 120 bp, synthetic construct
  source 1..120: mol_type = other DNA
acagatgcaggtatgttagagtggatgtaataaacaaatcagaacatgtatattacttagatagctctcaataatctgatttatgcttttgtaaaacctttggagaggacacaaacaaaa

SEQ ID NO: 18388 - DNA, 120 bp, synthetic construct
  source 1..120: mol_type = other DNA
caggacagagattaagtaattactgatatatatcaagaaaatgaaataaaacttcagatcatttacatatttatacatcttaaagtagaagaagataaccttcctcattgattctacctt

SEQ ID NO: 18389 - DNA, 120 bp, synthetic construct; identical to SEQ ID NO: 5711
  source 1..120: mol_type = other DNA

SEQ ID NO: 18390 - DNA, 120 bp, synthetic construct
  source 1..120: mol_type = other DNA
tctagatagtacatgtacaatattctgttttttaaataagttatagtgggagatttataaaggcagttgaacaatcaaagacatttggaactaaatttctgtatatcaagtgctgtattt

SEQ ID NO: 18391 - DNA, 120 bp, synthetic construct
  source 1..120: mol_type = other DNA
atagtgggaaaaaaagagacccacggggaaacaccatgatagactgagccaaatgtagagctcagctcttcctcccccaggatcataacatatcaccagataaacctttgaaaaaaaacg

SEQ ID NO: 18392 - DNA, 120 bp, synthetic construct
  source 1..120: mol_type = other DNA
gcacatcctttccttttcttcactcccaactgatgcctctgcttttcaaaacttcagagaaaattggagaaatcagaaaggaatttctatcagatttcaatactacctcaacacacccac

SEQ ID NO: 18393 - DNA, 120 bp, synthetic construct; identical to SEQ ID NO: 5712
  source 1..120: mol_type = other DNA

SEQ ID NO: 18394 - DNA, 120 bp, synthetic construct
  source 1..120: mol_type = other DNA
gcttccattccagtgtggctgttgccttctttttctctagcaaaactcctcccttagtgtcacagatgacttccttattgctaaatccaatggtcagttcttaatcttcatctcacttga

SEQ ID NO: 18395 - DNA, 120 bp, synthetic construct
  source 1..120: mol_type = other DNA
cgagagcagattaaagcatccgtgaggcagccttctaaaatttctcaggaagtggtagccagtgtgaaaatgtatcacctcaccttgcttcatatttcccttctctcagttccctttttt

SEQ ID NO: 18396 - DNA, 120 bp, synthetic construct
  source 1..120: mol_type = other DNA
agaatctaggctaagaaactcactaaggtcttaaggtaaaaggcccagcaaacacactgttattttgctcaatcacagaacgctctagctattcaaaaactgttttctctttctccttct

SEQ ID NO: 18397 - DNA, 120 bp, synthetic construct; identical to SEQ ID NO: 5713
  source 1..120: mol_type = other DNA

SEQ ID NO: 18398 - DNA, 120 bp, synthetic construct
  source 1..120: mol_type = other DNA
agggaagacattgctattgttttcaacagagaaataggaggattaggcagaggaagggaattaggagaaatttcaccgaaaaagcccatgaagctttgggtaaggcagacgaggctggat

SEQ ID NO: 18399 - DNA, 120 bp, synthetic construct
  source 1..120: mol_type = other DNA
actgagggtcttgttcaagtgacatcgggatctcgtaacagaacaaatggctgtcaaagtagctggaaaagccctaggctatatctccttagggctccttccttccccaactttccagat

SEQ ID NO: 18400 - DNA, 120 bp, synthetic construct
  source 1..120: mol_type = other DNA
gataaccccgcctccctaaacagcagatgccatgttggagaggtgaatgcaattggaatcactgagcatttacttcacgttctcatttccaccgattttacctcatgcctcactatttaa

SEQ ID NO: 18401 - DNA, 120 bp, synthetic construct; identical to SEQ ID NO: 5714
  source 1..120: mol_type = other DNA

SEQ ID NO: 18402 - DNA, 120 bp, synthetic construct
  source 1..120: mol_type = other DNA
gtttctatgtgcacacctatgctttgtgcactagaatgactgctgctagtctcactctgaccctgtaggcttactcccatgtaataaaacatgcctcttgatatagcaatatgccctgat

SEQ ID NO: 18403 - DNA, 120 bp, synthetic construct
  source 1..120: mol_type = other DNA
acagaggccaaagatactgctgagcatcctaaaatgcagaagagagaccctgacaacagaaaattatctgttccaaaatgtccagagggctaagggtgagaaattttgatttataaaaca

SEQ ID NO: 18404 - DNA, 120 bp, synthetic construct
  source 1..120: mol_type = other DNA
tcattaattactaactgctggtgaatgtcccttcttgtgaataactgaaataaaaaatcatgttatcaagtgttagaatgagtgatttggcctgttcccccagtttgccacagcctgctc

SEQ ID NO: 18405 - DNA, 120 bp, synthetic construct
  source 1..120: mol_type = other DNA
aaaacaatgactattatataataaacaagaccttgtataccaaaattgtgtttgagggcttatatgtctttttttaatgaataaataaaaggtggaaacggaaggaagggaaggaaaaaa

SEQ ID NO: 18406 - DNA, 120 bp, synthetic construct; identical to SEQ ID NO: 5715
  source 1..120: mol_type = other DNA

SEQ ID NO: 18407 - DNA, 120 bp, synthetic construct
  source 1..120: mol_type = other DNA
tctctgttaaataatcgcagtgctcctttcacgtcattattcctcagtgtgtagatgagaggattgagggtcggggtcacaactgtatagaagagggagatgaacttcccatgagcatgg

SEQ ID NO: 18408 - DNA, 120 bp, synthetic construct
  source 1..120: mol_type = other DNA
cttatgaccaccttggctatatgtccataggacagcagtattagcactaagggcaagaggagcaagaccagtgaagcaacaaagagctgaacctcattatcatggatgtccacacatgca

SEQ ID NO: 18409 - DNA, 120 bp, synthetic construct
  source 1..120: mol_type = other DNA
ccctggataagagtgtttcccactccactcagccacgcaacccctgccagagcctggcacagctgagggttcattacggcggtatagtggagaggtttgcaaactgcagcatagcgatca

SEQ ID NO: 18410 - DNA, 120 bp, synthetic construct
  source 1..120: mol_type = other DNA
tgtgattgttttgtcaggtccttttaggttccacagcagctgggggacaatactggtggtaaaacagatatcaactaaggagaggtgagtaagaaaaaatacatgggtgtcttgagttta

SEQ ID NO: 18411 - DNA, 120 bp, synthetic construct; identical to SEQ ID NO: 5716
  source 1..120: mol_type = other DNA

SEQ ID NO: 18412 - DNA, 120 bp, synthetic construct
  source 1..120: mol_type = other DNA
aatcacaaaagaagaccttaaagaaaatacataatacagagagatacatgaaggctattgtggaagcagtattttcctgactgataactattagaagctgagataaagtgtatcacagaa

SEQ ID NO: 18413 - DNA, 120 bp, synthetic construct
  source 1..120: mol_type = other DNA
aattaatataaatagcatttccattcttcaattgtaaattctgagttgggcattttttaaggtttttctttatatgaatggtagctcgcttctggagattatagaggttatttttcctat

SEQ ID NO: 18414 - DNA, 120 bp, synthetic construct
  source 1..120: mol_type = other DNA
tccaccagcatactgatgacgtaaactcatgcagtttattcagcaaagatattcttatgcaagcattatgcagcacacctcatgtttagtcatctagtttaccttctggcctataagctg

SEQ ID NO: 18415 - DNA, 120 bp, synthetic construct; identical to SEQ ID NO: 5717
  source 1..120: mol_type = other DNA

SEQ ID NO: 18416 - DNA, 120 bp, synthetic construct
  source 1..120: mol_type = other DNA
tcatatataggacaaataggcactttccacgtggcatcaggaaaaattactccagcctaaaattcttcccctacaataactgtatatcctgaaattgcattaatatttgttctgaaaatt

SEQ ID NO: 18417 - DNA, 120 bp, synthetic construct
  source 1..120: mol_type = other DNA
tcagaggaggcatgggtaccccataaaaggatgaagacactgagtgatccctcaaaatagggggaggagagcacaatagtaaaaagagaacatgaaaggacccttaaggaataaaccagt

SEQ ID NO: 18418 - DNA, 120 bp, synthetic construct
  source 1..120: mol_type = other DNA
cttccgattctctcatttatgttaattcccacccatttagctacactaaattgtactcgttttacttgtatcaaaggaataaaataaagccagacacacatcactcttgttctaatctgt

SEQ ID NO: 18419 - DNA, 120 bp, synthetic construct; identical to SEQ ID NO: 5718
  source 1..120: mol_type = other DNA

SEQ ID NO: 18420 - DNA, 120 bp, synthetic construct
  source 1..120: mol_type = other DNA
cactaataatcatattttaatacagaaaggaagcttaagccatagagttcaaaccattattaccttcaagtgacaactcagtgtctaaggctcatgtattggttgtcggggctgttattt

SEQ ID NO: 18421 - DNA, 120 bp, synthetic construct
  source 1..120: mol_type = other DNA
gacacagttctcccaacatgcaattaatatcaggctctgtagtatccaaagatgaaatgtcccaggagtttattctgaaagaaataattttgactctctgatctttcaatattgtgtaaa

SEQ ID NO: 18422 - DNA, 120 bp, synthetic construct
  source 1..120: mol_type = other DNA
taattaatttatcctgttgactcataactttaaattctcttcttaataactttaaattttggggcaccttgcctttacctcacctctactgagacaaaaacggcaggcctgcagccttcc

SEQ ID NO: 18423 - DNA, 120 bp, synthetic construct; identical to SEQ ID NO: 5719
  source 1..120: mol_type = other DNA

SEQ ID NO: 18424 - DNA, 120 bp, synthetic construct
  source 1..120: mol_type = other DNA
gaggaagtgaacctctatttgtttaaggcaaattctataaatattttagggtccaagaaaaatctaatgcatattcaagtacaagcaggtgatatgaatgactgagtggataaggtataa

SEQ ID NO: 18425 - DNA, 120 bp, synthetic construct
  source 1..120: mol_type = other DNA
aacattttgctgcacatgccacatctgaagaaaacaacaactgctgagcgctagttgaccaattttctatgcattgagccccaggattgcaaaatattctgaattctcaatggaatctag

SEQ ID NO: 18426 - DNA, 120 bp, synthetic construct
  source 1..120: mol_type = other DNA
agtataataaaaaaaagaaaaaaagaaaaaaaaatgtttgctgaaggcaaaaaaaaaaaagtttatataaaatagttcatgaaggtgcaacttaattattacaaagtgaacaaattttga

SEQ ID NO: 18427 - DNA, 120 bp, synthetic construct; identical to SEQ ID NO: 5720
  source 1..120: mol_type = other DNA

SEQ ID NO: 18428 - DNA, 120 bp, synthetic construct
  source 1..120: mol_type = other DNA
gaaatgtaagcattttggcagggacgatactgtggagaaattgcttaggtttgaggtatgcatatattcagctttggtagataccaccaattctggaagttggttgcacaaacttaaact

SEQ ID NO: 18429 - DNA, 120 bp, synthetic construct
  source 1..120: mol_type = other DNA
cacctactaactaatgaagttgaccagtttctcttatatttatagtcattgagaaatcttttgtgtagtatccattcaagtccttgactttttccaaattcatttgtaggaaatttttat

SEQ ID NO: 18430 - DNA, 120 bp, synthetic construct
  source 1..120: mol_type = other DNA
gaaaatattaccaattaattcaattatttaaaatattctacacactgctgaaagtaaatttattccagaaaaaaatgaaattcattttttcattgtgttagcaaaataacacaataaaga

SEQ ID NO: 18431 - DNA, 120 bp, synthetic construct; identical to SEQ ID NO: 5721
  source 1..120: mol_type = other DNA

SEQ ID NO: 18432 - DNA, 120 bp, synthetic construct
  source 1..120: mol_type = other DNA
tattcatagatgattcaaaattgtatagatattaattatatctttgatctctatattcagtgctaactcaatcaaaattcagactatttgtaaaattttctaagattattctaaaatgta

SEQ ID NO: 18433 - DNA, 120 bp, synthetic construct
  source 1..120: mol_type = other DNA
agccaaatgtgagtaattgacggcctgaggcgcagtctcaagacatcctgagaacaagtgcccaaggtgattgaattacaacttgatttacattttaggagcatgtaaaaaatcagtcaa

SEQ ID NO: 18434 - DNA, 120 bp, synthetic construct
  source 1..120: mol_type = other DNA
atttaaatgcctagaatcaatagaaaggagtgtctggattaaaataagggattgtagagaacaaggttcttattatgtagatgaagtctcataagtggtcacccttacaagcaatagatg

SEQ ID NO: 18435 - DNA, 120 bp, synthetic construct; identical to SEQ ID NO: 5722
  source 1..120: mol_type = other DNA

SEQ ID NO: 18436 - DNA, 120 bp, synthetic construct
  source 1..120: mol_type = other DNA
aaagctgttgaagtggcatcgttgtctggggtaaatacccagggttcatcgtcttgcactaagaagattaaggacacggacacatgtgggtgtgttaaggagcagagagtttaacaggca

SEQ ID NO: 18437 - DNA, 120 bp, synthetic construct
  source 1..120: mol_type = other DNA
ggagccggtgtctgatttacacagggtcacagattggttctaccaggtgtgacatttacatagcccgcagggaagtctggttgacccaccttaatcttatggccagcaccatcttgtctg

SEQ ID NO: 18438 - DNA, 120 bp, synthetic construct
  source 1..120: mol_type = other DNA
tcctgtttgcttgtctatgtctgcagctagattctatacaggctgctctttgttagaaaaaatgatttgggggctgctttttattaaaaggaaaaccttacccaggaaggatttccttac

SEQ ID NO: 18439 - DNA, 120 bp, synthetic construct; identical to SEQ ID NO: 5723
  source 1..120: mol_type = other DNA

SEQ ID NO: 18440 - DNA, 120 bp, synthetic construct
  source 1..120: mol_type = other DNA
ggtttgttgtacagattatttcatcacccatgtattatgctcagtatccaatagttatctttttcccctcctaccccttctcccaccttccaccctcaagaaaatctgtttctgtttttt

SEQ ID NO: 18441 - DNA, 120 bp, synthetic construct
  source 1..120: mol_type = other DNA
gctcccacaaaatacatgatcttttttttatagctgtatataccacatttttaaaatctaatttgtcattggtaggcatttaggttgattccatgtcttgcttttctggatagtgctgtg

SEQ ID NO: 18442 - DNA, 120 bp, synthetic construct
  source 1..120: mol_type = other DNA
cccagtctcgggtgatcctcccatctcagcttccctggtagctgggaccacaggcatgcaccaccacacccggctaatttttgtatttttggtagaaatgcggtttggccatgttgccca

SEQ ID NO: 18443 - DNA, 120 bp, synthetic construct; identical to SEQ ID NO: 5724
  source 1..120: mol_type = other DNA

SEQ ID NO: 18444 - DNA, 120 bp, synthetic construct
  source 1..120: mol_type = other DNA
atgcttactggccacatgtatgtgttctttggaaaagtgtctgttcatgtcctttgcccactttttaatggggttgtttgtttttctctcataaatttgtttaagttcctcatagaagct

SEQ ID NO: 18445 - DNA, 120 bp, synthetic construct
  source 1..120: mol_type = other DNA
attctgttccattggtctatgtacctgtttttgtaccagtacaatgctgtttggttaccatagttctgtagtgtagtttaaagttgggtgatgcctctagctttgttctttttgctttgg

SEQ ID NO: 18446 - DNA, 120 bp, synthetic construct
  source 1..120: mol_type = other DNA
ttgggcagtatggccattttaataatattgattcttcctatccacgagcatgggatgttattccatttgtttgtgtcttctctgatttctttaagcacggatctgatttctttgtaattc

SEQ ID NO: 18447 - DNA, 120 bp, synthetic construct; identical to SEQ ID NO: 5725
  source 1..120: mol_type = other DNA

SEQ ID NO: 18448 - DNA, 120 bp, synthetic construct
  source 1..120: mol_type = other DNA
gtgtgtatatacacactttatatatatatactttatatatgtatatactttatatatgtatatactttatatatactttatatatgtatatatactttatatatactttatatatatata

SEQ ID NO: 18449 - DNA, 120 bp, synthetic construct
  source 1..120: mol_type = other DNA
atcaacctgtcatctacattaggtatttctcctaatgctatccctcccctggccccccaccccctaaaagaccacagtgtgtgatgctcccctccctgtgtccatatgtttttatttttc

SEQ ID NO: 18450 - DNA, 120 bp, synthetic construct
  source 1..120: mol_type = other DNA
ttttatggctgcataatattccatgggttatatgtgccacattttctttatccagactatcattgatgggcatttgggttggttccaagtctttgctattgtaaacagtgctgcaataaa

SEQ ID NO: 18451 - DNA, 120 bp, synthetic construct
  source 1..120: mol_type = other DNA
tgtcttctacaatggttgaactaattttcactcccaagaacagtataaaagcattcctatttctccatatcctctccagtatctgtagtttcctaactttttaatgatcgccattctaac

SEQ ID NO: 18452 - DNA, 120 bp, synthetic construct; identical to SEQ ID NO: 5726
  source 1..120: mol_type = other DNA

SEQ ID NO: 18453 - DNA, 120 bp, synthetic construct
  source 1..120: mol_type = other DNA
catgaagtctttgcccatcctgaatggtattgcctaggttttcttctagggtttttatgtttttaggtcttacatttaagtctttaattcatcttgagttagtttttgtataaggtgtaa

SEQ ID NO: 18454 - DNA, 120 bp, synthetic construct; identical to SEQ ID NO: 5727
  source 1..120: mol_type = other DNA

SEQ ID NO: 18455 - DNA, 120 bp, synthetic construct
  source 1..120: mol_type = other DNA
tcagtggtagcttgatggggatagcattgaatctataaattactttgggcagtatggcctttttcactatattgattctttctatccatgatcatggaatgattttccatttgtttatgt

SEQ ID NO: 18456 - DNA, 120 bp, synthetic construct
  source 1..120: mol_type = other DNA
tcatgatttggctttctgtttgtctattattggtgtatagaaatgcctgtgatttttgcacattgattatgtatcctaagactttgctgaagttgcttatcagcttaaggagattttggg

SEQ ID NO: 18457 - DNA, 120 bp, synthetic construct
  source 1..120: mol_type = other DNA
gaacttccaatactgtgttgaataggagttgtgagagagggcatccttgtctcgtgctggttttcaaagggaatgcttccagcttttgcccattcggtatgatattagctgtgggtttgt

SEQ ID NO: 18458 - DNA, 120 bp, synthetic construct; identical to SEQ ID NO: 5728
  source 1..120: mol_type = other DNA

SEQ ID NO: 18459 - DNA, 120 bp, synthetic construct
  source 1..120: mol_type = other DNA
tgatgctggcctcataaaatgagttagggaagagtccctctttttctattgtttagaatagtttcagaaggaatgatagcagctcttctttgtgcctctggtacaattcggctgtttatc

SEQ ID NO: 18460 - DNA, 120 bp, synthetic construct
  source 1..120: mol_type = other DNA
gtccaggaatttatccctttcttctagattttctaatttatttgcatagaggtgtttacagtattctctggtggtaatttgtatttctgtgggatcagtggtaatatctcctttatcatt

SEQ ID NO: 18461 - DNA, 120 bp, synthetic construct
  source 1..120: mol_type = other DNA
tttcatgtctctatctccttcagttctgctctgttcttagttatttcttatcttctgctagcttttgactttgtttactcttgcttctctggttcttttaattgtgatggtagggcgttg

SEQ ID NO: 18462 - DNA, 120 bp, synthetic construct; identical to SEQ ID NO: 5729
  source 1..120: mol_type = other DNA

SEQ ID NO: 18463 - DNA, 120 bp, synthetic construct
  source 1..120: mol_type = other DNA
aataatgtatgttctgttgatttggggtggagagttctatagatgtctattaggtccacttggtccagagctgagttcaagtccttaatattcttgttaatcttctgtctaattgatctg

SEQ ID NO: 18464 - DNA, 120 bp, synthetic construct; identical to SEQ ID NO: 5730
  source 1..120: mol_type = other DNA

SEQ ID NO: 18465 - DNA, 120 bp, synthetic construct
  source 1..120: mol_type = other DNA
agttggccagtctgtgtctcttaattggggcatttagctcatttacatttaaggttagtattgttatgtgtgaattttatcctgtcattatgatgctaactggttattttgcccattagt

SEQ ID NO: 18466 - DNA, 120 bp, synthetic construct
  source 1..120: mol_type = other DNA
tgggggtgacaaaatctctcattatttgctgtctgtaaagagttttatttctcctttgcttatgaagcttagtttggctgggtatagaattctgggttgagaattcttttcttttagaat

SEQ ID NO: 18467 - DNA, 120 bp, synthetic construct
  source 1..120: mol_type = other DNA
tttttccttcatttcaaccttggtgaatctgacaattacatgtttttgggttgctcttcttgaggagtatctttgtggtgttctctctatctcctgaatttgaatgttggcctgtcttgc

SEQ ID NO: 18468 - DNA, 120 bp, synthetic construct; identical to SEQ ID NO: 5731
  source 1..120: mol_type = other DNA

SEQ ID NO: 18469 - DNA, 120 bp, synthetic construct
  source 1..120: mol_type = other DNA
aggtttttagcttccttgcattgggttagaacatgctcttttagctcagaggagtttgttattacccaccttctgaagcctacttctgtcaatttgtcaaattcattctcgatccagttt

SEQ ID NO: 18470 - DNA, 120 bp, synthetic construct
  source 1..120: mol_type = other DNA
gcttttgatgttggtgaccttcagatgggatcctgagtagacatttttctcttgatgttgatactattcctttctgtttgttagtatttcttctaaccatcaggcctctctgctgcaggt

SEQ ID NO: 18471 - DNA, 120 bp, synthetic construct
  source 1..120: mol_type = other DNA
cacctgctggatgccagctggagctctcctgtatgaggtgtctgtcgatccctgctgggaggtgtttttcagtcaggaggcatgggggtcagcgacccacttgaggaggcagtctgttcc

SEQ ID NO: 18472 - DNA, 120 bp, synthetic construct; identical to SEQ ID NO: 5732
  source 1..120: mol_type = other DNA

SEQ ID NO: 18473 - DNA, 120 bp, synthetic construct
  source 1..120: mol_type = other DNA
tagaagaaagacttagcatgttcccgacacaaataaatgctatatttcttttttcccccactaaatattatgtttaatgttttactggttcatgtaaaaatgtatttattttcacttctg

SEQ ID NO: 18474 - DNA, 120 bp, synthetic construct
  source 1..120: mol_type = other DNA
accctacttttgagataagaataaatggaaaacatgaatcctacaaactggttatgacaatcaatggtagcagtacattttaaagaaatatcactgaccccaaaaatccatcagagacta

SEQ ID NO: 18475 - DNA, 120 bp, synthetic construct
  source 1..120: mol_type = other DNA
gagttctgaaattgaatcagtaatttaaaaacttacaaatcagaaaaagccctgtaccaggcaaattcacagctgaattccactagacatataaagaagtgctggtaccaattctactga

SEQ ID NO: 18476 - DNA, 120 bp, synthetic construct; identical to SEQ ID NO: 5733
  source 1..120: mol_type = other DNA

SEQ ID NO: 18477 - DNA, 120 bp, synthetic construct
  source 1..120: mol_type = other DNA
caggaactggctattttcacttcttttatggttcttcagttgcttcaggccatctggatgtatatgtgcaggtcacaggggatatgatggcttagcttgggctcagaggcctgacattac

SEQ ID NO: 18478 - DNA, 120 bp, synthetic construct
  source 1..120: mol_type = other DNA
gcaggattaggggtggcatgggaacctagagtgggagagattaaattgaagaaacattttgtggtaaggggtgatatcgtggggttgttggaaggagcatttgttgtatagaatgattgg

SEQ ID NO: 18479 - DNA, 120 bp, synthetic construct
  source 1..120: mol_type = other DNA
aattagagagtgagtgcccaagggggttcagtgtaattatttgcttggttggtgagtttttgggctctatccgtgagtttttttaggttgtcgtataccaggccagattgatttaggtaa

SEQ ID NO: 18480 - DNA, 120 bp, synthetic construct; identical to SEQ ID NO: 5734
  source 1..120: mol_type = other DNA

SEQ ID NO: 18481 - DNA, 120 bp, synthetic construct
  source 1..120: mol_type = other DNA
gagatatcagctgtgatggtttggaggaaaagtggaaactggcagtgtaaacaagagcagggcatttatgagtaggtgagaatggtgaattggaaaatagcagggatgaaaaagcttgtg

SEQ ID NO: 18482 - DNA, 120 bp, synthetic construct
  source 1..120: mol_type = other DNA
ctgttctttagaaatgcgaatgagttttaagggaagtaggggagagtactcgcaacttccaggaggaagaggagagatctggctggctgtccaatggacacagctttattctgtaatggt

SEQ ID NO: 18483 - DNA, 120 bp, synthetic construct
  source 1..120: mol_type = other DNA
atccagctagggtgtcttcatatggctgggaatctggagtaggcaagagaagattagcagcctggcgaatttcctgtctagcctgctggaggactggaagatagttgcccagagggctgg

SEQ ID NO: 18484 - DNA, 120 bp, synthetic construct; identical to SEQ ID NO: 5735
  source 1..120: mol_type = other DNA

SEQ ID NO: 18485 - DNA, 120 bp, synthetic construct
  source 1..120: mol_type = other DNA
ctgcaataggctttttggaactagtgggaaagtcctcgagccatccggtgaaggtgtcgatccaaaccaggagatacttaaatttacggacatggggcatatgagtaaagtctaactgcc

SEQ ID NO: 18486 - DNA, 120 bp, synthetic construct
  source 1..120: mol_type = other DNA
tggcagacagaggattgagaggttatggtcttaaggatggacttccatgaagagaaggagatgaggagctgcaggaatcaagccacaggcttgtatcccacatggaagtggtcatgaagg

SEQ ID NO: 18487 - DNA, 120 bp, synthetic construct
  source 1..120: mol_type = other DNA
tgttggaggagaaggagaaatactggacctctggagtgagggctggaatattagtggatgtggaggcatcagctatttcttttgccgtcctgttggcataggcatttccttttgcaataa

SEQ ID NO: 18488 - DNA, 120 bp, synthetic construct; identical to SEQ ID NO: 5736
  source 1..120: mol_type = other DNA

SEQ ID NO: 18489 - DNA, 120 bp, synthetic construct
  source 1..120: mol_type = other DNA
tcaataaaccaagtgtggtctgtgtttggaattggcagaataggaatatgaggacgggggaggatgctatgtttattagggaaatacagtcaggtggttcaggacttgtgctgggtgcta

SEQ ID NO: 18490 - DNA, 120 bp, synthetic construct
  source 1..120: mol_type = other DNA
atattaatgcttgaaggttgtgagaactgtaaagggtaagtggagcatagcctgtgattttgaaggcctctagaagtattaaagcagtgcctgccgccccatgcagagccagcccagaac

SEQ ID NO: 18491 - DNA, 120 bp, synthetic construct
  source 1..120: mol_type = other DNA
ggggagtgcaagtgtaggagctgtctccaggacctttttgagaaagtgaaaggaagaatggggaaaagacttaggatctatgggattagttaagttatcctttgtgagcttgtaaagtgg

SEQ ID NO: 18492 - DNA, 120 bp, synthetic construct; identical to SEQ ID NO: 5737
  source 1..120: mol_type = other DNA

SEQ ID NO: 18493 - DNA, 120 bp, synthetic construct
  source 1..120: mol_type = other DNA
agtagtgtgggctgtccctgaagccttggggcagaacagtccaggtgagttgttgggattagtgggtgtcagggtcagtccaagtaaaggcaaaaagaggctgggaggagggatgcaagg

SEQ ID NO: 18494 - DNA, 120 bp, synthetic construct
  source 1..120: mol_type = other DNA
taacaaggtgaagatcctgaaccaacctgtaagacttgtccagtttctggaggggtaggataggggagttgtaaggagaatttgtaggctttaagaggccatgttgtaacaggtgagtta

SEQ ID NO: 18495 - DNA, 120 bp, synthetic construct
  source 1..120: mol_type = other DNA
tagaggtatcccatacgtgtggattaaggtagggagacataaggggaggatgtgaaggagactttgaactggggaaaagggtggcaatgaggtgtggctgtagcccaggaatagtcagag

SEQ ID NO: 18496 - DNA, 120 bp, synthetic construct; identical to SEQ ID NO: 5738
  source 1..120: mol_type = other DNA

SEQ ID NO: 18497 - DNA, 120 bp, synthetic construct
  source 1..120: mol_type = other DNA
gggcagagttccaggggctctgggagtggcttttgggcaagctggacagtccgatttcgagtggggacctgcacagataggacacggcttaggaggaatcctgggctgcgggcattcctt

SEQ ID NO: 18498 - DNA, 120 bp, synthetic construct
  source 1..120: mol_type = other DNA
ggtttctctcagagcggaggcaagtaattgcaatccagaaatacattgccgcttggctgcctcttctctattattgtacaccttgaaggcaaggttaattaagtcctgttgtggggtttg

SEQ ID NO: 18499 - DNA, 120 bp, synthetic construct
  source 1..120: mol_type = other DNA
gggttgttgccaaaccagccacggactgggctgggtttttatatttgatgaaaaagagcctaaacgctaaccaatttgggagaggtcagataaagaaaaaaggagcattaatcttgacta

SEQ ID NO: 18500 - DNA, 120 bp, synthetic construct; identical to SEQ ID NO: 5739
  source 1..120: mol_type = other DNA

SEQ ID NO: 18501 - DNA, 120 bp, synthetic construct
  source 1..120: mol_type = other DNA
cctcagaccatttgcccattttacaacaaaaattatctagatcttgtaggatagacaaatcaaaagtgccattctctggccacttgaaactattgttgagtgtgtattggggccaagtgg

SEQ ID NO: 18502 - DNA, 120 bp, synthetic construct
  source 1..120: mol_type = other DNA
tagtgaaggaggtaagtttaaagagaaaagtagagacacagagaaggtgggggtgagtagccgtgggctgtaatgtgggtgagcagccaaagcaggtgtccccacaactgacttgtcacc

SEQ ID NO: 18503 - DNA, 120 bp, synthetic construct
  source 1..120: mol_type = other DNA
atgtgggtgaatgatcaaggcaggcatccctgtggtgatcagacaccaatggaatgtagatgaatgatcaaggcaggcatccccgctatgatcagacaccgagggaagaccatcttccca

SEQ ID NO: 18504 - DNA, 120 bp, synthetic construct; identical to SEQ ID NO: 5740
  source 1..120: mol_type = other DNA

SEQ ID NO: 18505 - DNA, 120 bp, synthetic construct
  source 1..120: mol_type = other DNA
cataggcagaatgagtccaaaacagaagtcagcaaagggagataggggtggggcagttttataggatttgggtaggtagtggaaaattatagttaaagggggttgttctcttgcatgcag

SEQ ID NO: 18506 - DNA, 120 bp, synthetic construct
  source 1..120: mol_type = other DNA
tcataagttaaggcagcaactggctattttcacttcttttgtagttcttcagttgcttcaggccatctggatgtatatgtgcaggtcacaggggatatgatggcttagcttggtctcaga

SEQ ID NO: 18507 - DNA, 120 bp, synthetic construct
  source 1..120: mol_type = other DNA
cctcagcaaaatgctagcaaactggatccagcagcatatcaaaaacttaatccaccacaatcaagtaggctttatttctgggatgcgaggttggttcatcacccacacatcaataaatgt

SEQ ID NO: 18508 - DNA, 120 bp, synthetic construct; identical to SEQ ID NO: 5741
  source 1..120: mol_type = other DNA

SEQ ID NO: 18509 - DNA, 120 bp, synthetic construct
  source 1..120: mol_type = other DNA
gatctctcttcagagatgatatgattatatacctagaaaactccactctctgccaaaaggctcctagatctgataaacgatttcagaaaagtttcagaatacacaatgaatgtgcaacta

SEQ ID NO: 18510 - DNA, 120 bp, synthetic construct
  source 1..120: mol_type = other DNA
agatctctgcaatgagaattaaaaaacactgctgaaaaccagagataacataaacatatggaacagcttttcatgctcatggataggaagaatcagtattgttaaatgggcatactgccc

SEQ ID NO: 18511 - DNA, 120 bp, synthetic construct
  source 1..120: mol_type = other DNA
tcaaagtcaaccctctgctcagtgagagagaatcatatctaattacctcctttggaaaggctaatcagaaactcaaaagaatgtaatcgtttgtgtatcacctagtgtaacctgggagct

SEQ ID NO: 18512 - DNA, 120 bp, synthetic construct; identical to SEQ ID NO: 5742
  source 1..120: mol_type = other DNA

SEQ ID NO: 18513 - DNA, 120 bp, synthetic construct
  source 1..120: mol_type = other DNA
aaaacaaacaaacaaaaaacacaaaaccaaacacacacacacacacacacacacacaaaacaaagctggaggcatcacattacctgacttcaagctatactgcaaggctaccataattaa

SEQ ID NO: 18514 - DNA, 120 bp, synthetic construct
  source 1..120: mol_type = other DNA
atggggaatgactctgtattcagtaaatggcgctgaaaaaactggacggccataatcagaatatcgaagctggacaactacttttcactatatacaaaaatcaactcaagatgggttaaa

SEQ ID NO: 18515 - DNA, 120 bp, synthetic construct
  source 1..120: mol_type = other DNA
caaaaattcacaagtatgacctaattaaactaaagagcttctgcacagcaaaagaaactatcaacaggatatgcagacaacctataggatgggagaaaatatttgcaaagtatatctgac

SEQ ID NO: 18516 - DNA, 120 bp, synthetic construct; identical to SEQ ID NO: 5743
  source 1..120: mol_type = other DNA

SEQ ID NO: 18517 - DNA, 120 bp, synthetic construct
  source 1..120: mol_type = other DNA
cgaggcgggcagatcaggaggtcaagagatcgagaccatcctgggcaacataatgaaacccaactactaaaaattaaaaaattagctgggagtggtggtgcgcacctgtagtcccagcta

SEQ ID NO: 18518 - DNA, 120 bp, synthetic construct
  source 1..120: mol_type = other DNA
taaatgtggttcatttttgagggatagttttcctggatataagactcttggttcaacgttcttttagaactttggctgtcatccccactgccttctagtctccagtatttctgatgagaa

SEQ ID NO: 18519 - DNA, 120 bp, synthetic construct
  source 1..120: mol_type = other DNA
ctctagcttttagtgttcctattatgatgcaactgaatgtgaatatttttacattaatcctatttagagaaaggagctttttagatatataatttttttcatcaactttaatgtttcagc

SEQ ID NO: 18520 - DNA, 120 bp, synthetic construct; identical to SEQ ID NO: 5744
  source 1..120: mol_type = other DNA

SEQ ID NO: 18521 - DNA, 120 bp, synthetic construct
  source 1..120: mol_type = other DNA
ccttgaacatatttatattggttgttttgatctatgataaatctgacatttggggcctctcactggcagtttctattgtctgctcgtttacttgtgtatcagtcatgctttcctattttt

SEQ ID NO: 18522 - DNA, 120 bp, synthetic construct
  source 1..120: mol_type = other DNA
taactttgtatactgactccccgtcctgggtcttgttttattttttgtttgttagtgacttggccaggctattttagtaaatttcctccacagtgtgaagcctctggtgttacccttcag

SEQ ID NO: 18523 - DNA, 120 bp, synthetic construct
  source 1..120: mol_type = other DNA
atgtcatttgctgatttttgttaaccagtcttcgtcatttggtattatactcagctgggaggatccattaattgctggctgggtgctctattggttttgataatgccctggggacataaa

SEQ ID NO: 18524 - DNA, 120 bp, synthetic construct
  source 1..120: mol_type = other DNA
ctttccctggttgtcactggtaaactcactgttttatggcctagcttgttgtctcatagagtctcagccttgtcttaactccttagcaccaaatattcattgttttttaatgtaccctta

SEQ ID NO: 18525 - DNA, 120 bp, synthetic construct; identical to SEQ ID NO: 5745
  source 1..120: mol_type = other DNA

SEQ ID NO: 18526 - DNA, 120 bp, synthetic construct
  source 1..120: mol_type = other DNA
gacaactcagaagtgaaagtgataagaaatgctggcattctgcccctctcagtgagatactatattccttgactgggagctgaggggaaaggaatccttttcttcttggccacacctgtc

SEQ ID NO: 18527 - DNA, 120 bp, synthetic construct
  source 1..120: mol_type = other DNA
tgttgttttctcttaagacaattttcagagacttggaattaaaaaaattgtatcagtcatggttgttttacagggcaatgagccacaccaccattatggaagtgccattataatttatga

SEQ ID NO: 18528 - DNA, 120 bp, synthetic construct
  source 1..120: mol_type = other DNA
tagaaaattcaatgatggataaaccacgtggttcgataggacccaaacgaaaccattaatatacatagcagaaaaatactgcttttcttaataaaaatagcttttgactttttatttccc

SEQ ID NO: 18529 - DNA, 120 bp, synthetic construct; identical to SEQ ID NO: 5746
  source 1..120: mol_type = other DNA

SEQ ID NO: 18530 - DNA, 120 bp, synthetic construct
  source 1..120: mol_type = other DNA
atttctaggagtttattctgcatgcatcctaaaatatttgtgaaacattactttcatgtaaaaaattggaaacagcacacatgatcatcaagaacgagctagttaactgaatattatata

SEQ ID NO: 18531 - DNA, 120 bp, synthetic construct
  source 1..120: mol_type = other DNA
cataatttgtcttactgcgacattattggtttttggagggtgatgtgcctcatgttagaagagttacatatttaattttcactttatactctaataaatatattctttatatatgtaaca

SEQ ID NO: 18532 - DNA, 120 bp, synthetic construct
  source 1..120: mol_type = other DNA
agcattaatgtgattaaaggatgtgtgttttatcatatacagtgtctaccattgtctgaggtgctttgattctacaacttaaaactttccagctgctgcagtttctgactgcacaatatt

SEQ ID NO: 18533 - DNA, 120 bp, synthetic construct; identical to SEQ ID NO: 5747
  source 1..120: mol_type = other DNA

SEQ ID NO: 18534 - DNA, 120 bp, synthetic construct
  source 1..120: mol_type = other DNA
aaaagatgagaagttttcttttctcagatgtttggttattcttcttgaaagcagacaattcactataaattactttcaagggctttggtttcctatatttttactgcatttctcctcaac

SEQ ID NO: 18535 - DNA, 120 bp, synthetic construct
  source 1..120: mol_type = other DNA
tgtgagaaaggaaaaatggagcacacattgggaatgttgacgctggattgtgcttttatctgtagttattcatgtttcaggcagttcattcctactttctgagaaattgatgagttgttg

SEQ ID NO: 18536 - DNA, 120 bp, synthetic construct
  source 1..120: mol_type = other DNA
ttatttaccagagggaagggcagggcccaagggatctcattatgaagtgaatggaattactggcattgatgatctcactttgttcctatcccaaaagattctgttactttagattttaac

SEQ ID NO: 18537 - DNA, 120 bp, synthetic construct; identical to SEQ ID NO: 5748
  source 1..120: mol_type = other DNA

SEQ ID NO: 18538 - DNA, 120 bp, synthetic construct
  source 1..120: mol_type = other DNA
ctcagatgagaaaatctgaatctgcaaactggcttaatatggaaactgggtaaaaagccatgaatccctattatattgtttcaagttatgtttctgtctccacacctagaattttttctg

SEQ ID NO: 18539 - DNA, 120 bp, synthetic construct
  source 1..120: mol_type = other DNA
taggaagtctgacattaaggttctggcagattggtgtctggtgaaggcccctttatggttcacagatggtgtcttctcactgtgtcttcacatggtggaagagacaaagcagctctctga

SEQ ID NO: 18540 - DNA, 120 bp, synthetic construct
  source 1..120: mol_type = other DNA
ggggacacagacattcacaatacagtggtaggttacccaaatattgtgtttttaagtaccgtttgataaactgtgtatcactacaggtccctgtaggtcacaataccctagtcaatgtga

SEQ ID NO: 18541 - DNA, 120 bp, synthetic construct; identical to SEQ ID NO: 5749
  source 1..120: mol_type = other DNA

SEQ ID NO: 18542 - DNA, 120 bp, synthetic construct
  source 1..120: mol_type = other DNA
ggctatctctgagttcaagcttcagtgagctaatgtgaaagaagatcaataacactttcaggagtttgagccaatgcttgtatcctgtgctctgggtgatagcactcatgtcattaaatt

SEQ ID NO: 18543 - DNA, 120 bp, synthetic construct
  source 1..120: mol_type = other DNA
tggagcagtatttgtgtttaaccgtatctctttgttgttataattttccctgatgattggtgaagttgggcacattttcatgtgttggccatatggctatcctcttttgtgaagtgattg

SEQ ID NO: 18544 - DNA, 120 bp, synthetic construct
  source 1..120: mol_type = other DNA
ttgttaatatttagggatgtttgcaactgtgtttatgaaagatactgataaacattttttatttttttgtaaatccttgtaatgtttttaagtctagcttatgctggccttataaaaaga

SEQ ID NO: 18545 - DNA, 120 bp, synthetic construct; identical to SEQ ID NO: 5750
  source 1..120: mol_type = other DNA

SEQ ID NO: 18546 - DNA, 120 bp, synthetic construct
  source 1..120: mol_type = other DNA
tttgttatagtataatagtttaattatatttaaaattattaaataatataaattataatctgaatttaatctttataaaatgctcccccgtaccccagttgacataacccttagacttta

SEQ ID NO: 18547 - DNA, 120 bp, synthetic construct
  source 1..120: mol_type = other DNA
ttaaagaatgaacccttgacaatgagggacattgatactaaaatacaagcaaaatttttaggtattttctttttcagatgatgactactactaaaataagttgactataatttaaaggtt

SEQ ID NO: 18548 - DNA, 120 bp, synthetic construct
  source 1..120: mol_type = other DNA
caagctccgcctcccgggttcacgccattctcctgcctcagcctccagagtagctgggacttcaggtgcgaattttttgtatttttagtagagatggggtttcaccatgttagccaggag

SEQ ID NO: 18549 - DNA, 120 bp, synthetic construct; identical to SEQ ID NO: 5751
  source 1..120: mol_type = other DNA

SEQ ID NO: 18550 - DNA, 120 bp, synthetic construct
  source 1..120: mol_type = other DNA
gatgggagaaacaggtcccaaatgctttttgtcttcctgctgcagacttgatcttgagtacagccatagcaatgaagccatatgacacaagaatgagaagaagtgatgcaaggaaaatga

SEQ ID NO: 18551 - DNA, 120 bp, synthetic construct
  source 1..120: mol_type = other DNA
tagttcattttaataaaaaaccacctaatccaaagggcctcagcctaatggctaaggtcagcacgaccataaaccacaaataacatcccaaccagaaaccttccaaactcctccccgacc

SEQ ID NO: 18552 - DNA, 120 bp, synthetic construct
  source 1..120: mol_type = other DNA
ttccaaccccgccataaacttctccacacacataaacattccaagcttgtaataagccccctcaccctaaaaccaatatatgttcttagccccctcaccctaaaaccaatatatggaatc

SEQ ID NO: 18553 - DNA, 120 bp, synthetic construct; identical to SEQ ID NO: 5752
  source 1..120: mol_type = other DNA

SEQ ID NO: 18554 - DNA, 120 bp, synthetic construct
  source 1..120: mol_type = other DNA
gtgcatagcgtcacattagtgaaaagttgaaaagcacagccaccaaaagtgattttcttgtctttaccccaggcattgaccaacatctgtgggactatatttgtggtgtaacaaagatcc

SEQ ID NO: 18555 - DNA, 120 bp, synthetic construct
  source 1..120: mol_type = other DNA
ccagagatgatcatctccagctgaggcttcccagggaacccaaggagcataagccaaccaaagtaactatcattgatcatttttgctattttctgaatatcagctgtgaaaatttaaaaa

SEQ ID NO: 18556 - DNA, 120 bp, synthetic construct
  source 1..120: mol_type = other DNA
gggattgaaagaaaatataagtattttatatttcaccattgttctaatgttttatctgtttatccaactaagtgtaaaatttatacccagggcaatttgccttacaaggtctatattctc

SEQ ID NO: 18557 - DNA, 120 bp, synthetic construct; identical to SEQ ID NO: 5753
  source 1..120: mol_type = other DNA

SEQ ID NO: 18558 - DNA, 120 bp, synthetic construct
  source 1..120: mol_type = other DNA
aaacttgtatttccaaatattatttgcctttcctttccaactcccttgagacagccaggtgggaggtgttccctggagaaactccaaccagcctgcccactgaggtggagcctccagaag

SEQ ID NO: 18559 - DNA, 120 bp, synthetic construct
  source 1..120: mol_type = other DNA
tccccctttacacccaataaaatcctgtcttactcaccatttaagttgtgagtctgaattttcatggccatgggacaaagaaccccctttttagctgaactaaggaaaagtcctgcaata

SEQ ID NO: 18560 - DNA, 120 bp, synthetic construct
  source 1..120: mol_type = other DNA
ttacatggcatcaggcaagaagagtgtgcagggaaaattccctttataaaaccatcagatcttgtgagacttatttactatcacgacaacagcatgggaaagacccattcccatgattca

SEQ ID NO: 18561 - DNA, 120 bp, synthetic construct; identical to SEQ ID NO: 5754
  source 1..120: mol_type = other DNA

SEQ ID NO: 18562 - DNA, 120 bp, synthetic construct
  source 1..120: mol_type = other DNA
gccagatagtaaatattttaggcattgtgtgtcatcaggtctcggtcacaactactcaactctgtagttgtagtgctaaagcagccatagacaaaagtaagtaactgggtgtggctgtgt

SEQ ID NO: 18563 - DNA, 120 bp, synthetic construct
  source 1..120: mol_type = other DNA
gaattatttctgtaactggtcttaaaaatcactgacaggtaaaaaatgatgaatacacttcaatcattgaaactacaaaattctgttcatcaggtgacaccattaggagtcaaaagacaa

SEQ ID NO: 18564 - DNA, 120 bp, synthetic construct
  source 1..120: mol_type = other DNA
aatctcaaagggtaaacataagtggccaatgcatttgtgaaatggatggtgctcgtttgcttcaataatcataaaagcaaaaattatacccatcatgcactcacatcagattgactaaaa

SEQ ID NO: 18565 - DNA, 120 bp, synthetic construct; identical to SEQ ID NO: 5755
  source 1..120: mol_type = other DNA

SEQ ID NO: 18566 - DNA, 120 bp, synthetic construct
  source 1..120: mol_type = other DNA
tatgaagtatttacagctgtggaaataagtgaagtacagaaatgcttaatgcatagatgaatcttaaaaatataatgttatttgaaagaattcaagtacaacagaatccatgtatataaa

SEQ ID NO: 18567 - DNA, 120 bp, synthetic construct
  source 1..120: mol_type = other DNA
tagggattataaccatgaagcggcactttggccacctctgagtacatttttctaaaacttgacttgggtgggcttttgggtgttccatcacagtgtattgtacaataattctttaaggtg

SEQ ID NO: 18568 - DNA, 120 bp, synthetic construct
  source 1..120: mol_type = other DNA
cttaatagtcataaaagtactaaatatatactgcaaaatgctaggtgtgtctctgagatttaggacaacttctgaaagtactgtcattaacggagaagctggaataaaaagaaaagtcac

SEQ ID NO: 18569 - DNA, 120 bp, synthetic construct; identical to SEQ ID NO: 5756
  source 1..120: mol_type = other DNA

SEQ ID NO: 18570 - DNA, 120 bp, synthetic construct
  source 1..120: mol_type = other DNA
aaaggaagttttcaaaaattctttttcaagttacaagttggtaacatagctctgaactatcccatgaatcaacatttatcttcaagacaaaaatcaaatttatcttcagtcaaaatatgg

SEQ ID NO: 18571 - DNA, 120 bp, synthetic construct
  source 1..120: mol_type = other DNA
agcactcagagaaaaaatgtagaacatctaaaaccaggtgacatggcaatacctccatgctcatccccaaaataagtagtaaaaacttggaaggccaagtgggaaagaaaaaagcattat

SEQ ID NO: 18572 - DNA, 120 bp, synthetic construct
  source 1..120: mol_type = other DNA
tgagatcttttcaaagatgattgataactagaactcttggtcttcttggttaacgactagctttgctgctgtcatcttcaggctggagatttgcctgtgtaaaaatattcctgggactgg

SEQ ID NO: 18573 - DNA, 120 bp, synthetic construct; identical to SEQ ID NO: 5757
  source 1..120: mol_type = other DNA

SEQ ID NO: 18574 - DNA, 120 bp, synthetic construct
  source 1..120: mol_type = other DNA
aattgtctacattttagattgggaagatcaattgccatattagaaattgctgggaggaagaatcaatgtcctcttttttccatgcaatctttttcttttccagttagcctcttcatggcc

SEQ ID NO: 18575 - DNA, 120 bp, synthetic construct
  source 1..120: mol_type = other DNA
tacatgtatgtaactgtcccacagaagatggataccacaacgagatgggaggaacaggtcccaaatgctttttgtcttcctgctgcagacttgatcttgagtacagccacagcaatgaaa

SEQ ID NO: 18576 - DNA, 120 bp, synthetic construct
  source 1..120: mol_type = other DNA
catttcacacacacaaaaaagtggtctaggtggtggttcctacatcgaggaagactcgtggcatagggggaaggtatgatgcaattaatcacaccaactacccaggagatgaccacaagg

SEQ ID NO: 18577 - DNA, 120 bp, synthetic construct; identical to SEQ ID NO: 5758
  source 1..120: mol_type = other DNA

SEQ ID NO: 18578 - DNA, 120 bp, synthetic construct
  source 1..120: mol_type = other DNA
agctgaggctgccctgtgaatccaaggagtataaaaccactgaagtggctatcattgatcattctgttttttcttaagggaaatccatgtcatcattttggtaaagggcaacggtgtgat

SEQ ID NO: 18579 - DNA, 120 bp, synthetic construct
  source 1..120: mol_type = other DNA
tattctggagctccaagtactcatgtgtcagaggagataatattatcctacataacttggatgctttttcttttttctctttgggttgaagtttggataatttcaattgacttgtatttc

SEQ ID NO: 18580 - DNA, 120 bp, synthetic construct
  source 1..120: mol_type = other DNA
ttctgtacaatgctaatctctttgttgagatctcccctttgttcataaatcttgtctgcctttaccagcgaaatgttaaaacatatttaaaaaattcttatctgatgattctaatgtctg

SEQ ID NO: 18581 - DNA, 120 bp, synthetic construct
  source 1..120: mol_type = other DNA
ggagtcttactctgttacccaggctggagtgcctgggtgatctctgctcactgcaacctctgcctcccaggttcaagtgattctcctgccccagcctcgctagtagctggaattacaggc

SEQ ID NO: 18582 - DNA, 120 bp, synthetic construct; identical to SEQ ID NO: 5759
  source 1..120: mol_type = other DNA

SEQ ID NO: 18583 - DNA, 120 bp, synthetic construct
  source 1..120: mol_type = other DNA
ctaattactttccaaaggccccatctccaaataccatcacatggagggttagggcttcaacatatgaattttgggggtacacagacattgaatccatagcattctgccttttgtctccca

SEQ ID NO: 18584 - DNA, 120 bp, synthetic construct
  source 1..120: mol_type = other DNA
aatcagatataggtgaggctcaagatacgattaatcctgaggaaaaattcatccccagttataagtctgtgaaaccagataaattacacacttccaaaatacaatgatagattagacata

SEQ ID NO: 18585 - DNA, 120 bp, synthetic construct
  source 1..120: mol_type = other DNA
ataccattagatcttaaagctcaaggataatctttggtttcataatttgccttctgggtctactgggatgacagtcccactttctggacaaactgggatagtagatagtcggacctctgt

SEQ ID NO: 18586 - DNA, 120 bp, synthetic construct; identical to SEQ ID NO: 5760
  source 1..120: mol_type = other DNA

SEQ ID NO: 18587 - DNA, 120 bp, synthetic construct
  source 1..120: mol_type = other DNA
taatctctttatcgagtgagggtccagccacacctttggtggttttttttttttctcagcatgctttctcatcttttgcagtgtggataggctgagaactttccaattttttaagttcca

SEQ ID NO: 18588 - DNA, 120 bp, synthetic construct
  source 1..120: mol_type = other DNA
gtcagctatgttcactgttaatttcatcacttactagttttacattccacaaaacaataaaacatgaacataattcagccaagttctttaccactttataaaaagaatcactttttctca

SEQ ID NO: 18589 - DNA, 120 bp, synthetic construct
  source 1..120: mol_type = other DNA
ttttctccagcagtcttatattctgtataagccctaaacagaatagctattattgtgcatatttatagcatgcatccccaaattccttaacttctaccccttttccagttttaaagccac

SEQ ID NO: 18590 - DNA, 120 bp, synthetic construct; identical to SEQ ID NO: 5761
  source 1..120: mol_type = other DNA

SEQ ID NO: 18591 - DNA, 120 bp, synthetic construct
  source 1..120: mol_type = other DNA
catataaatttggagtgacacaaacagtccataacaatttgtaaaaaatacttgtagggacagaaataaatagtaagtagtatttatcctcaggataggacatattccttatttatcagg

SEQ ID NO: 18592 - DNA, 120 bp, synthetic construct
  source 1..120: mol_type = other DNA
actgtcttcaactattttgaaggaagggtgggcctgaattctggtgagagtccagataagtcttgatgttttatagtgaggctaccagccttttggactacgggagatttctctttgctt

SEQ ID NO: 18593 - DNA, 120 bp, synthetic construct
  source 1..120: mol_type = other DNA
tatgaaagcttgtagtgcattggagtgaattatcttagcttttctgctgcacttgtggcaaaatacccatccaagtttgctcctgtagtgttgagaatatctagatagtttcaagtaaat

SEQ ID NO: 18594 - DNA, 120 bp, synthetic construct
  source 1..120: mol_type = other DNA
caatacctttaaagagggtatcagttatcatgattaatcacaacacaactaggtaggatgtttctgtctccctggagcatgctgagagatgacacttgttgtgtgcccatcagactaaca

SEQ ID NO: 18595 - DNA, 120 bp, synthetic construct; identical to SEQ ID NO: 5762
  source 1..120: mol_type = other DNA

SEQ ID NO: 18596 - DNA, 120 bp, synthetic construct
  source 1..120: mol_type = other DNA
cactggggagtgccggatagtgggtgcaagacagtgggtgcagtgcaccatgtgtgagccgaagcagggcgaggcatcgcctcacctgggaatcacaaggggtcagggaattccctttcc

SEQ ID NO: 18597 - DNA, 120 bp, synthetic construct
  source 1..120: mol_type = other DNA
cggagggtcctacgcccaaggagccttgctcattgctagcacagcagtctgagatcaaactacaaggcagcaacaaggctgggggagggcacccaccattgccaaggcttgagtaggtaa

SEQ ID NO: 18598 - DNA, 120 bp, synthetic construct
  source 1..120: mol_type = other DNA
ctgcagacttaaatgtccctgtctgacagctttgaagagagtagtggttctcccagcacgcagcttgagaactgagaacgggcagactgcctcctcaagtgggtccctgacccccaagta

SEQ ID NO: 18599 - DNA, 120 bp, synthetic construct
  source 1..120: mol_type = other DNA
tgctgttctgcaaccactgctgctgatacccaggaaaacagggtctggagtggacctccagcaaactccaacagacctgcagctgagggtcctgactgttagaaggaaaactaacaaaca

SEQ ID NO: 18600 - DNA, 120 bp, synthetic construct; identical to SEQ ID NO: 5763
  source 1..120: mol_type = other DNA

SEQ ID NO: 18601 - DNA, 120 bp, synthetic construct
  source 1..120: mol_type = other DNA
catggcacgagaactacgtgatgaatgcacaagcctcagtagccgatgcaatcaactggaagaaagggtatcagttatggaagacgaaatgaatgaaatgaagcgagaagagaagtttag

SEQ ID NO: 18602 - DNA, 120 bp, synthetic construct
  source 1..120: mol_type = other DNA
aaacactctgcagggtattatccaggagaacttccccaatctagcaaggcaggccaacattcaaattcaggaaatacagagaatgccacaaagatactcctcgaggagagcaactccaag

SEQ ID NO: 18603 - DNA, 120 bp, synthetic construct; identical to SEQ ID NO: 5764
  source 1..120: mol_type = other DNA

SEQ ID NO: 18604 - DNA, 120 bp, synthetic construct
  source 1..120: mol_type = other DNA
tgccaaattgtaaagaccttcaaggctaggaagaaactgcatcaactaacaagcaaaataaccagctaacatcataatgacaggatcaaattcacacataacaatattaaccttaaatgt

SEQ ID NO: 18605 - DNA, 120 bp, synthetic construct
  source 1..120: mol_type = other DNA
aataaagcgatggaggaagatctaccaagcaaatgaaagacaaaaaaaggcaggggttgcaatcctagtctctgaaaaaccagactttaaaccaacaaagatcaaaagagacaaagaagg

SEQ ID NO: 18606 - DNA, 120 bp, synthetic construct
  source 1..120: mol_type = other DNA
cttagactcccacacaatgataatgggagactttaacaccccactgtcaacattagacagatcaacgagacagaaagttaacaaggatacctgggaattgaactcagctctgcaccaagc

SEQ ID NO: 18607 - DNA, 120 bp, synthetic construct; identical to SEQ ID NO: 5765
  source 1..120: mol_type = other DNA

SEQ ID NO: 18608 - DNA, 120 bp, synthetic construct
  source 1..120: mol_type = other DNA
tagagggaaatttatagcactaaatgcccacaagagaaagcaggaaagatctaaaactgacaccagaacatcacaattaaaacatctagagaatcaagagcaaacacattcaaaagctag

SEQ ID NO: 18609 - DNA, 120 bp, synthetic construct
  source 1..120: mol_type = other DNA
accactagcaagactaataaagaagaaaagagagaagaatcaaatagacgcaataaaaaatgataaaggggatatcaccaccaatcccacagaaatacaaactaccatcagagaatacta

SEQ ID NO: 18610 - DNA, 120 bp, synthetic construct
  source 1..120: mol_type = other DNA
ctctgaaattgaggcaataattagcagcttaccaaccaaaaaaagtccaggaccagatggattcacagccgaattctaccagaagtacaaagaggagctgctaccattccttctgaaact

SEQ ID NO: 18611 - DNA, 120 bp, synthetic construct; identical to SEQ ID NO: 5766
  source 1..120: mol_type = other DNA

SEQ ID NO: 18612 - DNA, 120 bp, synthetic construct
  source 1..120: mol_type = other DNA
aactctcaataaattaggtattgatgggacatatcttaaaataataagagctatctatgacaaacccacagccaatattatactgaatggacaaaactggaagcattccctttgaaaact

SEQ ID NO: 18613 - DNA, 120 bp, synthetic construct
  source 1..120: mol_type = other DNA
aaattgtccctgtttgcagatgacatgattgtatatctagaaaaccccatcgtctcagcccaaaatctccttaagctgataaggaacttcagcaaagtctcaggatacaaaatcagtgtg

SEQ ID NO: 18614 - DNA, 120 bp, synthetic construct
  source 1..120: mol_type = other DNA
gatgtgaaggacctcttcaaggagaactacaaaccactgctcaatgaaataatagaggatacaaacaaatggaagaacattacctgctcatgtgtaggaagaatcaatatcgtgaaaatg

SEQ ID NO: 18615 - DNA, 120 bp, synthetic construct; identical to SEQ ID NO: 5767
  source 1..120: mol_type = other DNA

SEQ ID NO: 18616 - DNA, 120 bp, synthetic construct
  source 1..120: mol_type = other DNA
tgctgggaaaactggctagccatatgtagaaagctgaaactggatcccctccttacaccttatacaaaaattaattcaagatggattaaagacttcaatgttagacctaaaaccagaaaa

SEQ ID NO: 18617 - DNA, 120 bp, synthetic construct
  source 1..120: mol_type = other DNA
ctaaagaacttctgcacaacaaaagaaactaccatcagagtgaataggcaacctacagaatgggagaaaatttttgcaacctacccatctgacaaagggctaatatccagaatctacagt

SEQ ID NO: 18618 - DNA, 120 bp, synthetic construct
  source 1..120: mol_type = other DNA
tcatcatcactggccatcagagaaatgcaaatcaaaaccacaatgagataccatctcacaccagttagaatggtgatcattaaaaagtcaggaaacaacaggtgctggacaggatgtgga

SEQ ID NO: 18619 - DNA, 120 bp, synthetic construct; identical to SEQ ID NO: 5768
  source 1..120: mol_type = other DNA

SEQ ID NO: 18620 - DNA, 120 bp, synthetic construct
  source 1..120: mol_type = other DNA
agcaaactatcacaaggacaaaaaaccaaacaccgcatgttctcactcataggtgggaattgaacaatgagaacacgtggtgacaggaaggggaacatcacacacgggggactgttgtgg

SEQ ID NO: 18621 - DNA, 120 bp, synthetic construct
  source 1..120: mol_type = other DNA
acatgtactctaaaacttaaagtataataataataaaattttaaaaaagtaatgttcaagtttatttgggtatgaaattctaataccatccagagagagttcatgctgcttcaaaataat

SEQ ID NO: 18622 - DNA, 120 bp, synthetic construct
  source 1..120: mol_type = other DNA
atttcatttcatactctaagcacatttttttcataatggaattatgctctacatgccctcctcaggaaacttcccaggaaggtcatcataatgctgttgttttgtgctcattattgttac

SEQ ID NO: 18623 - DNA, 120 bp, synthetic construct; identical to SEQ ID NO: 5769
  source 1..120: mol_type = other DNA

SEQ ID NO: 18624 - DNA, 120 bp, synthetic construct
  source 1..120: mol_type = other DNA
aacttcaggactggtagtcatttatgagatgtgtagctttttgctaatgcaaacaacactgcaacaaaggtctttgtacacccacttctgaatgaatatgtgcaaatttgtgtcaagtga

SEQ ID NO: 18625 - DNA, 120 bp, synthetic construct
  source 1..120: mol_type = other DNA
tttttttcctgattttaaatcagttagcacacacacactccattgaaacgttctgcctttacgtaatgatatgaaattactccttcatgataaagtaaatctccatacacatttgggttc

SEQ ID NO: 18626 - DNA, 120 bp, synthetic construct
  source 1..120: mol_type = other DNA
gtatttaagcttatctgtccaagaagacgattaagtatttatacacagtcttagcattttcatgtctattatttttcctactattccagaaagattgtaacagaaaaaaaaggctaatat

SEQ ID NO: 18627 - DNA, 120 bp, synthetic construct; identical to SEQ ID NO: 4715
  source 1..120: mol_type = other DNA

SEQ ID NO: 18628 - DNA, 120 bp, synthetic construct
  source 1..120: mol_type = other DNA
taggaagaaataggaaaaaaaaatcatattttaaacttacattattttaacgagtgcatgaagttgtcatatctttatcagaataataagtacatgtgaaggaaaaatttacctatttca

SEQ ID NO: 18629 - DNA, 120 bp, synthetic construct
  source 1..120: mol_type = other DNA
ggataagctttttgatgtgctgctggattcggtttgccagtattttattgaggattttcacatcgatgtcatcagggatattggcctgaaattttctttttttgttgtgtctctgccagg

SEQ ID NO: 18630 - DNA, 120 bp, synthetic construct
  source 1..120: mol_type = other DNA
ttcggctgtgaatctgtctgatcctgggcttcttttttggttggtaggctattaattactgcctgaatttcagaacttgttattggtctattcagggattagatttcttcctggtttagt

SEQ ID NO: 18631 - DNA, 120 bp, synthetic construct; identical to SEQ ID NO: 5771
  source 1..120: mol_type = other DNA

SEQ ID NO: 18632 - DNA, 120 bp, synthetic construct
  source 1..120: mol_type = other DNA
gtcaggttgtttattttaaaggccttcaataaaattcaacacctcttcatgctaaaaactctcaataaactaggtattgacggaacgtgtctcaaaataataagagctatttatgacaaa

SEQ ID NO: 18633 - DNA, 120 bp, synthetic construct; identical to SEQ ID NO: 5772
  source 1..120: mol_type = other DNA

SEQ ID NO: 18634 - DNA, 120 bp, synthetic construct
  source 1..120: mol_type = other DNA
cattcacaattgttacaaagagaataaaatacctaggaatacaacttacaaggaatgtgaaggacctcttcaaggagaactccaaaccacggctcaaggaaataagagaggacacaaaca

SEQ ID NO: 18635 - DNA, 120 bp, synthetic construct
  source 1..120: mol_type = other DNA
cagaattagaaaaaaactactttaaatttcatatgaaaccaaaaaagagcccgtatagccaagacaatcataagcaaaaataacaaagctggaggcatcatgttacctgacttcaaacta

SEQ ID NO: 18636 - DNA, 120 bp, synthetic construct
  source 1..120: mol_type = other DNA
gacaaacctgacaaaaacaagcaatggggaagggatttcatatttaataaatggttttgggaaaactggctagccatatgcagaaaacggaaactggaccccttccttacaccttataaa

SEQ ID NO: 18637 - DNA, 120 bp, synthetic construct
  source 1..120: mol_type = other DNA
caccaaaagcaatggcaacaaaagccaaaatagacaaataggatctaattaaactaaagagcttctgcacaacaaaagaaactatcatcagagtgaacagttaacctacggaatggaaga

SEQ ID NO: 18638 - DNA, 120 bp, synthetic construct; identical to SEQ ID NO: 5773
  source 1..120: mol_type = other DNA

SEQ ID NO: 18639 - DNA, 120 bp, synthetic construct
  source 1..120: mol_type = other DNA
agtgtggtgatttctgaaggatctagaaccagaaataccatttgacctagaaatcccattactggatatatacccaaaggattataaaacattccactataaagacacacgcacatatat

SEQ ID NO: 18640 - DNA, 120 bp, synthetic construct
  source 1..120: mol_type = other DNA
aatgagtttatgttctttgcagggacatggattatgctggaagccatgagtctcattaactaacacaggaacagcaaaccaaacactccttattctcactcataaatgggagttgaacaa

SEQ ID NO: 18641 - DNA, 120 bp, synthetic construct
  source 1..120: mol_type = other DNA
catgtgtgtacctatgtaacaaacctgcatgttctgcacatgtatcccagaacttaaagtataatgaaaaaaatcatcttggcaaccatgagatttagtcttgcttgaattaattttctt

SEQ ID NO: 18642 - DNA, 120 bp, synthetic construct; identical to SEQ ID NO: 5774
  source 1..120: mol_type = other DNA

SEQ ID NO: 18643 - DNA, 120 bp, synthetic construct
  source 1..120: mol_type = other DNA
ggtcagtcttccaggactccgtatctccatgtcacattccagacaaactgatggattacaacccagcatcaggtaaatgttgaagggatttggagagggaatattaattaaagttgtcat

SEQ ID NO: 18644 - DNA, 120 bp, synthetic construct
  source 1..120: mol_type = other DNA
cttatgaaaagtatactgatgtaggattcaaaatattgtattattcaaatcttttcttctgaatttactagatctataaacttgagcaagtcctacaacctcttggtgcctgcgtttcct

SEQ ID NO: 18645 - DNA, 120 bp, synthetic construct
  source 1..120: mol_type = other DNA
aactatctggtgtttgccaatctttgttaaacactattctattattaggagactgatggaaaaatatgtgttaccaatcatgttatttacctttgaaactttatattttcatttaagtat

SEQ ID NO: 18646 - DNA, 120 bp, synthetic construct; identical to SEQ ID NO: 5775
  source 1..120: mol_type = other DNA

SEQ ID NO: 18647 - DNA, 120 bp, synthetic construct
  source 1..120: mol_type = other DNA
tggaattaaaactatagcaaaagttcttacaaagtaacatgaagaggaagtatataaaataagtcaggtagaatgaaaatctaaatattgtttcagttttgtttattaacatattatatt

SEQ ID NO: 18648 - DNA, 120 bp, synthetic construct
  source 1..120: mol_type = other DNA
ttgtgcactccatttgccagagatctatagattcttctgtctcccagctccagtttttcaccctcaaggggattatcagcctgtttttaacttttgatttaggcgaattccgtattattc

SEQ ID NO: 18649 - DNA, 120 bp, synthetic construct
  source 1..120: mol_type = other DNA
tcatatatttgacagctacttatgtgactattactatgtatcagacaaaaatttaccatctttatgtacttcttttttctgtcttatttttttctttccatttttcttctctctttactt

SEQ ID NO: 18650 - DNA, 120 bp, synthetic construct; identical to SEQ ID NO: 5776
  source 1..120: mol_type = other DNA

SEQ ID NO: 18651 - DNA, 120 bp, synthetic construct
  source 1..120: mol_type = other DNA
acacagctttcttcagatttagaacattatctgagttctaactaaatgagattctgaaagagactctagcaagaaaacaatccagacagaatgaaggtagcattccaaaattgtcttttt

SEQ ID NO: 18652 - DNA, 120 bp, synthetic construct
  source 1..120: mol_type = other DNA
agaaatatatatgtaaagataaaattgtttctcagtattgaatcaaaatatattcatataataatcttctaatcaactggcagagatatgtgttccatttctttggggatacaatacaaa

SEQ ID NO: 18653 - DNA, 120 bp, synthetic construct
  source 1..120: mol_type = other DNA
aagctccgccccctccgggttcacgccattctgctgcctcagcctcccgagtagctgggactacaggtggctgccaccacacccggctaatttttttttttattttgagtagagacgggg

SEQ ID NO: 18654 - DNA, 120 bp, synthetic construct; identical to SEQ ID NO: 5777
  source 1..120: mol_type = other DNA

SEQ ID NO: 18655 - DNA, 120 bp, synthetic construct
  source 1..120: mol_type = other DNA
ttacaaaggaaatatacatttaattgtcattaaagtactatggagtttatatgcaagtattttaattctcttgatctggttgaacaaaccaggtcacaagggtatgaagtgacatattta

SEQ ID NO: 18656 - DNA, 120 bp, synthetic construct
  source 1..120: mol_type = other DNA
ccctaaaactgccaatggggcatattttaactctgctttgacctcttgggctctgaattagtaaatgatgtatatgggtttggttgtgatgaaatatcagtgaaactgattgaggtcata

SEQ ID NO: 18657 - DNA, 120 bp, synthetic construct
  source 1..120: mol_type = other DNA
atatctattatatttaacatatactcttatgtctaaaagtcacgtgctgactcttttcaaagagtatgtaatcgatatagtcaggaaaacatatcgagtacaaaaaagacagaaaaaaat

SEQ ID NO: 18658 - DNA, 120 bp, synthetic construct; identical to SEQ ID NO: 5778
  source 1..120: mol_type = other DNA

SEQ ID NO: 18659 - DNA, 120 bp, synthetic construct
  source 1..120: mol_type = other DNA
tgcattttaatataatgtgtcagaatatggagagccactgaataattttgaattgaaatgtacatggccacattttaacgatgaaaagactgttctccaaaccagctaggttgttttgaa

SEQ ID NO: 18660 - DNA, 120 bp, synthetic construct
  source 1..120: mol_type = other DNA
ttgagagacaatggtgaagaagaaattactccagctgacatcttacgtgacatgtatgcaattataattcaaagagaatgatgacctctgcataccaaaagaattgttattctataagca

SEQ ID NO: 18661 - DNA, 120 bp, synthetic construct
  source 1..120: mol_type = other DNA
ttcacacggataccgtaactcagatgacacgatttgaaatatagagctggccaactaagtacatgaaccctactaagtcaggatcacaagaagaatatgacatagggcaactgagaggat

SEQ ID NO: 18662 - DNA, 120 bp, synthetic construct; identical to SEQ ID NO: 5779
  source 1..120: mol_type = other DNA

SEQ ID NO: 18663 - DNA, 120 bp, synthetic construct
  source 1..120: mol_type = other DNA
tgactgggatttggaggaaatcccagtcttttataaatgtcttttataaaacaactagagaaaaacacaagacaaatttactaaaagataagagtcaaacaaaaaaagaaatttgggatt

SEQ ID NO: 18664 - DNA, 120 bp, synthetic construct
  source 1..120: mol_type = other DNA
agtaattagaaaatatgagaataaagaagggagagagagggaaaatgattaagtttatatgtgctgagaatgatgctgagagattacaaattcatatacatcctcaaatttcaaggattc

SEQ ID NO: 18665 - DNA, 120 bp, synthetic construct
  source 1..120: mol_type = other DNA
tgtgtgtgtaattttgtttgtttttttggcttttttctccctatttttaaatgttctgagtaggactagcattaaagcttggaaggggtaaaacgagtcatggcactccatccttttatc

SEQ ID NO: 18666 - DNA, 120 bp, synthetic construct; identical to SEQ ID NO: 5780
  source 1..120: mol_type = other DNA

SEQ ID NO: 18667 - DNA, 120 bp, synthetic construct
  source 1..120: mol_type = other DNA
actatgttgctggtgtggtatttattctgttctcagtaatctttcaatattacattgatgatgttgtctccacatttcatcataatcaggatgtagatgcaaatgatattttactgtaat

SEQ ID NO: 18668 - DNA, 120 bp, synthetic construct
  source 1..120: mol_type = other DNA
tactgttgatgtctatccctaactgtgggtatttagaggtctcagctggaatttcacctcccagtgctaacatgtggatcaacaatcaaagctcgctagatgattttatcctattgggat

SEQ ID NO: 18669 - DNA, 120 bp, synthetic construct
  source 1..120: mol_type = other DNA
cattatcctagtttcccatctggatccccagcttgacagtcccatgtacttttttgtctctaatctatcctttctggacctctgctataccaccagcactgtcccacagatgctggtcaa

SEQ ID NO: 18670 - DNA, 120 bp, synthetic construct
  source 1..120: mol_type = other DNA
tgccatttgcaagccccttcactacccagtcatcatgaaccatagacgctgtatccacatggctgctggcacttggatcagtggctttgctaactcccttgtccagtccactctcacagt

SEQ ID NO: 18671 - DNA, 120 bp, synthetic construct; identical to SEQ ID NO: 5781
  source 1..120: mol_type = other DNA

SEQ ID NO: 18672 - DNA, 120 bp, synthetic construct
  source 1..120: mol_type = other DNA
cctcaacccattcatctacacattgagaaacaaggatgtgaaagctgccctgagaaggtcactgactaaagagttttggattaagacaagatgatatctgaaaagaagtcctaagaagcg

SEQ ID NO: 18673 - DNA, 120 bp, synthetic construct
  source 1..120: mol_type = other DNA
aaaatctacatagcattttttcacttacgagactatctgctttacaatattggattccatcaagtcagtcttttttctccctattcctaatgactagctaatctagttaaagtaagggaa

SEQ ID NO: 18674 - DNA, 120 bp, synthetic construct
  source 1..120: mol_type = other DNA
cagtactatcgtgaggtaattttgatcaacatgtattgccaccatttagccatcttctaacattcgatgtccaattatatcaccctcaaatgcttttgtaaggtctcacaggcaagtaaa

SEQ ID NO: 18675 - DNA, 120 bp, synthetic construct; identical to SEQ ID NO: 5782
  source 1..120: mol_type = other DNA

SEQ ID NO: 18676 - DNA, 120 bp, synthetic construct
  source 1..120: mol_type = other DNA
tgttttgacaaggcagctttcttcaccacttgactgggtaatttagtcctatttcagtgtgggggtttgagaataccatgtggaattcaaaactttggttgatctattatctttatttag

SEQ ID NO: 18677 - DNA, 120 bp, synthetic construct
  source 1..120: mol_type = other DNA
agttcaccaaaaaatccacatcattaaaagaacagtgcaaagctctatttcctgtactgtgagcatgtccactttctgtggctcccggtggtgagacagatgagaagctggaacacagat

SEQ ID NO: 18678 - DNA, 120 bp, synthetic construct
  source 1..120: mol_type = other DNA
gtatttttcccaacccatggttcatttatacatggagtctgctattggcatgaaataaaatacatcctaatatgtattatgaaaaaaacgcttattgtatttatttattctattaaagca

SEQ ID NO: 18679 - DNA, 120 bp, synthetic construct; identical to SEQ ID NO: 5783
  source 1..120: mol_type = other DNA

SEQ ID NO: 18680 - DNA, 120 bp, synthetic construct
  source 1..120: mol_type = other DNA
ttctgcatgtatgctgcctgagattttggaaggctatatatttaaatatatcattaaataaattatagtacctgtactatcaagcaagcaaatcaaaataaggcaatgttgaacaagttt

SEQ ID NO: 18681 - DNA, 120 bp, synthetic construct
  source 1..120: mol_type = other DNA
aaataggccctgtgctataggagcagtaggaaaacatattcaataaggtaaaaatatttatatcagaacaaagtctactatcatatttattctaggagaagtggataattcccaacactt

SEQ ID NO: 18682 - DNA, 120 bp, synthetic construct
  source 1..120: mol_type = other DNA
atatcttataaaacaacataaacagcaacatttaaatgagctgttgctatgatgaggtttatcttatgatgaaaatgcattcctttatttggtaaatatttattgatggcaactatgtac

SEQ ID NO: 18683 - DNA, 120 bp, synthetic construct; identical to SEQ ID NO: 5784
  source 1..120: mol_type = other DNA

SEQ ID NO: 18684 - DNA, 120 bp, synthetic construct
  source 1..120: mol_type = other DNA
tcctgccaccatgtgaagaaggtcagtgcttcctcttcaccttccaccatgattgtaagtttcttgaggcctccccagccatgtggaactgtgagtcaattaaacctcttttctttacaa

SEQ ID NO: 18685 - DNA, 120 bp, synthetic construct
  source 1..120: mol_type = other DNA
atgaggaaagaaccacttaatggattaaggtaaatagtgcccaatgcttatgcaaaggctgggaattttgtgggttctcaagctatttatgtgccagaatgaaaacctaagaattcctga

SEQ ID NO: 18686 - DNA, 120 bp, synthetic construct
  source 1..120: mol_type = other DNA
tgtatccaagtaacttagtaacactccagaataaactcaagggtatttataggattacagatatacccagtaaaagaaaattttccaatgaaaatttactaagcatgaaaaaaagcagga

SEQ ID NO: 18687 - DNA, 120 bp, synthetic construct; identical to SEQ ID NO: 5785
  source 1..120: mol_type = other DNA

SEQ ID NO: 18688 - DNA, 120 bp, synthetic construct
  source 1..120: mol_type = other DNA
cctcggagcctgccactcccgacagccagacccagggcctgcgttctgctctatccagggcctccctgaaagcccctgcccgactaggcacagctgcagccgccaaagtcggtgcagtat

SEQ ID NO: 18689 - DNA, 120 bp, synthetic construct
  source 1..120: mol_type = other DNA
gcaggagccccacacccccaagcacagctgcagctgtccaaatggagacagtagatgtgggcctccgtgtgctcttgagagccagggaaggccccctttgccattgcaggctcagaggtg

SEQ ID NO: 18690 - DNA, 120 bp, synthetic construct
  source 1..120: mol_type = other DNA
cctcagccccctctggatgttgggccagacaagagtggatgcgggcaaagcgttggcctgcaggtgccccttggcaccatgaaaggcgtcaggaggcagacgggctcctaggtggaaggg

SEQ ID NO: 18691 - DNA, 120 bp, synthetic construct; identical to SEQ ID NO: 5786
  source 1..120: mol_type = other DNA

SEQ ID NO: 18692 - DNA, 120 bp, synthetic construct
  source 1..120: mol_type = other DNA
tcactttattgcacctgaaggtttgtggcaaccttgcaagagcaaatctatcagtatcatttttccaacggcatgtgctcccttcatatctctatgtgacgttttggtaattctcacaat

SEQ ID NO: 18693 - DNA, 120 bp, synthetic construct
  source 1..120: mol_type = other DNA
cacaaaataagtgaaaatggcctgttcctgccttaactgatgacattccaccacaaaagaagtgaaaatggccggtccttgccttaactgatgacattaccttgtgaaattccttttcct

SEQ ID NO: 18694 - DNA, 120 bp, synthetic construct
  source 1..120: mol_type = other DNA
ccccacccctatctcccttagctgactctcttttcggactcagcccgcctgcacccaggtgattaaaaagctttattgctcacacaaagcctgtttggtgatctcttcacacggacgcag

SEQ ID NO: 18695 - DNA, 120 bp, synthetic construct; identical to SEQ ID NO: 5787
  source 1..120: mol_type = other DNA

SEQ ID NO: 18696 - DNA, 120 bp, synthetic construct
  source 1..120: mol_type = other DNA
ccaagttgtgaatgtaaagaaaagttattgaaaaaaattaaaatgcgctactccagtaaacacataaataagatagcaaaacagtcttattgctgatatggagaaaattttttgtggtct

SEQ ID NO: 18697 - DNA, 120 bp, synthetic construct
  source 1..120: mol_type = other DNA
aattaatttttgtattttttgtagagacagggtctcaccatgttgcccaggctggtcttgaactcatgtgctctagtgatctgcctgccttggcctcccaaagtgttgggattgcaggca

SEQ ID NO: 18698 - DNA, 120 bp, synthetic construct
  source 1..120: mol_type = other DNA
ttatcctagaggagttgtggaaaaacatcctcatggcatgaattatgagtcagaatattaaaggcatagacacaggagttggaaattgaaagtgtagatgaaaaaaaaagaaaaagaatt

SEQ ID NO: 18699 - DNA, 120 bp, synthetic construct; identical to SEQ ID NO: 5788
  source 1..120: mol_type = other DNA

SEQ ID NO: 18700 - DNA, 120 bp, synthetic construct
  source 1..120: mol_type = other DNA
tttcttaatgtatttaattctgaaatgattcattcagtttcggtctgatgaagagagtaaagtgaaaatattactcatcaattgaaatattactatagggtctttttgtaactgatttct

SEQ ID NO: 18701 - DNA, 120 bp, synthetic construct
  source 1..120: mol_type = other DNA
tcctatttgaactatcccacagttttctctaaattatccattattgttgtatgttgaaatttttggattatttgtctactaaccaccatgtataatattgaatccacctaccatctgtat

SEQ ID NO: 18702 - DNA, 120 bp, synthetic construct
  source 1..120: mol_type = other DNA
ttgttcataaacagccttatgaaaacgtgtgatccttactgagacaccatattgtggtacttaatgtggtactatatttgtcactggagatcaaaataaagtttattggtctgcaacatt

SEQ ID NO: 18703 - DNA, 120 bp, synthetic construct; identical to SEQ ID NO: 5789
  source 1..120: mol_type = other DNA

SEQ ID NO: 18704 - DNA, 120 bp, synthetic construct
  source 1..120: mol_type = other DNA
gcaacttcagcaaagtctgaggataaaaaatcaatgtgcaaaaatcacaagcattcttatacaccgataacagacagagagccaaatcatgagtgaactcccattcacaattgcttctaa

SEQ ID NO: 18705 - DNA, 120 bp, synthetic construct
  source 1..120: mol_type = other DNA
tcatgggtaggaagaatcaatatcgtgaaaatggccatactgcccaaggtaatttatagattcaatgccatccccatcaagctaccaatgactttcttcacagagttggaaaaaactact

SEQ ID NO: 18706 - DNA, 120 bp, synthetic construct; identical to SEQ ID NO: 5790
  source 1..120: mol_type = other DNA

SEQ ID NO: 18707 - DNA, 120 bp, synthetic construct
  source 1..120: mol_type = other DNA
agacttcaatgttagacctaaaaccagaaaaaccctagaacaaaacctaggcaataccattcaggacataggcatgggcaaggacttcatgtctaaaacaccaaaagcaatggcaacaaa

SEQ ID NO: 18708 - DNA, 120 bp, synthetic construct
  source 1..120: mol_type = other DNA
tgacaaagggctaatatccagaatctacaatgaactcaaacaaatttacaagaaaaaaacaaccccatcaaaaagtgggcaaaggatatgaacagacacttctcaaaagaagacatttat

SEQ ID NO: 18709 - DNA, 120 bp, synthetic construct; identical to SEQ ID NO: 5791
  source 1..120: mol_type = other DNA

SEQ ID NO: 18710 - DNA, 120 bp, synthetic construct
  source 1..120: mol_type = other DNA
agttggaaccaacccaaatgtccaacaatgatagactggattaagaaaatgtggcacatatacaccatggaatactatgcagccataaaaaaatgatgagttcatgtcctttgtagggac

SEQ ID NO: 18711 - DNA, 120 bp, synthetic construct
  source 1..120: mol_type = other DNA
ggaacatcacactctggggcctgttgtggggtggggggagtggggagggatagcattaggagatatacctaatgctaaatgactagttaatgggtgcagcacaccaacatggcacatgta

SEQ ID NO: 18712 - DNA, 120 bp, synthetic construct; identical to SEQ ID NO: 5792
  source 1..120: mol_type = other DNA

SEQ ID NO: 18713 - DNA, 120 bp, synthetic construct
  source 1..120: mol_type = other DNA
ctgttaattaatgaaaaaaatcctttttactagaaaaacctgtgaacctgtgttacagaaaacgagttatgtataatattcatttttttaacctgaaatgcatcgactacaagagttagc

SEQ ID NO: 18714 - DNA, 120 bp, synthetic construct
  source 1..120: mol_type = other DNA
catagtttttatctgaaacaccaactttcctgcacaggatttttgtccccagtgcctggacagcactggcttcatttcaaataccccttagttaataggaaatttaaatgtccctgggca

SEQ ID NO: 18715 - DNA, 120 bp, synthetic construct
  source 1..120: mol_type = other DNA
atttgtttctaccgagagatccactctggtgagtaaaacttcttcaaattttatggaatttatccaacatttatgtagcacctgcttagtgccagcgactatgcgagtcttcaaagttat

SEQ ID NO: 18716 - DNA, 120 bp, synthetic construct; identical to SEQ ID NO: 5793
  source 1..120: mol_type = other DNA

SEQ ID NO: 18717 - DNA, 120 bp, synthetic construct
  source 1..120: mol_type = other DNA
gcgaccttggctcactgtaacctccgcctcctgggttcaaacaattctcctgcctcagcctccctagtagctgggattacaggtgcccaccaccgtgcccggctaatttttgtattttta

SEQ ID NO: 18718 - DNA, 120 bp, synthetic construct
  source 1..120: mol_type = other DNA
tgaggggcaattctaatgggaggacttccagacaggagggatagtgtgatttaagaaaagaaacacagcatggtgatacaacctgattgatttattaagagtaattaagtcagtcgccat

SEQ ID NO: 18719 - DNA, 120 bp, synthetic construct
  source 1..120: mol_type = other DNA
aagatattgtttgccatcctaagctttttgggcatcattgcataatcaagtcaataaagagctaaaagctaaattaatgttacaagatgtgatctgcatcaccatttgtcctggcaacag

SEQ ID NO: 18720 - DNA, 120 bp, synthetic construct
  source 1..120: mol_type = other DNA
gtgtgacagcaagatgtaataactacaacagatagtaagcaaataaaattttggtgtttgattggatatacagattaaagcaaagttgtgccattctttgaaataggtcacagtgacagg

SEQ ID NO: 18721 - DNA, 120 bp, synthetic construct; identical to SEQ ID NO: 5794
  source 1..120: mol_type = other DNA

SEQ ID NO: 18722 - DNA, 120 bp, synthetic construct
  source 1..120: mol_type = other DNA
aaaagaagacccagataacgagactaagaaaaaatattcagagaggaaatagaaaaccagaactaagtggcatagagccaatggaagtcagctgttttagaagaaagaactgtataatag

SEQ ID NO: 18723 - DNA, 120 bp, synthetic construct
  source 1..120: mol_type = other DNA
agaatgattaacatggttcaagaattgaaccaaatgtgccagggcacagaatgataccctattctgctcataaagcatggctgtaaagagaagggacattataagtaagtcctaagtgtg

SEQ ID NO: 18724 - DNA, 120 bp, synthetic construct
  source 1..120: mol_type = other DNA
tatcaacagagcatagtgaaacaatctggttcattaagagtaatctcagtaaatcaacattattagaatttttagacatggagtttgtgttgattttatacacacacatatacagacaca

SEQ ID NO: 18725 - DNA, 120 bp, synthetic construct; identical to SEQ ID NO: 5795
  source 1..120: mol_type = other DNA

SEQ ID NO: 18726 - DNA, 120 bp, synthetic construct
  source 1..120: mol_type = other DNA
ataacatatttgcacatgtaccactgaacctaaaagagaactactttcaaaaaaattgagggtttcaacatatgagaggtaaaaaacggaaaagtttagaaatgttttgtaggataaaat

SEQ ID NO: 18727 - DNA, 120 bp, synthetic construct
  source 1..120: mol_type = other DNA
gcaggtatgacttggaaggattgaacacaggttttatatgttctcgcagtatcatccttaatcctaagagtatctccacacgtatatgattcccttccttcttatttgataagtgatgaa

SEQ ID NO: 18728 - DNA, 120 bp, synthetic construct
  source 1..120: mol_type = other DNA
agttgttgagaggagaatatggtgtgtgcattcaagttttttcttacgatttttctcctccttccctctatggagaaaccttaatggggaggctaaatgatagaggtttttcttagatta

SEQ ID NO: 18729 - DNA, 120 bp, synthetic construct; identical to SEQ ID NO: 5796
  source 1..120: mol_type = other DNA

SEQ ID NO: 18730 - DNA, 120 bp, synthetic construct
  source 1..120: mol_type = other DNA
aatttcctaaaaattagtttcagtcagttctcaaaataaattacagcaaaatcaaaaagatcttggtttaagtgatttttaaccttttcctacagcttagggattaataaatgaaacaaa

SEQ ID NO: 18731 - DNA, 120 bp, synthetic construct
  source 1..120: mol_type = other DNA
tacttagaacctatatgttagatgcctttggtcaagggtgaagaaatggacagaaatgatgaaggaatagtctttgtgcagaagaaactcagtgaaaatgatactgattgacctttcaac

SEQ ID NO: 18732 - DNA, 120 bp, synthetic construct
  source 1..120: mol_type = other DNA
aggaaaagttacatcatttaatcctcctaacaattgttacatctggtatagattttttttttgtttggttggttattttaagaaatgggctcccactatctaatatatttcaagtcctag

SEQ ID NO: 18733 - DNA, 120 bp, synthetic construct; identical to SEQ ID NO: 5797
  source 1..120: mol_type = other DNA

SEQ ID NO: 18734 - DNA, 120 bp, synthetic construct
  source 1..120: mol_type = other DNA
tcaaaggaaaaaatatgactgttctttgagctaacctctcttctagattagcttctgagctgtttctagatctgcctctgagctgtttctagatccatttgcaaggtggtatcaataact

SEQ ID NO: 18735 - DNA, 120 bp, synthetic construct
  source 1..120: mol_type = other DNA
tggtatgctagaatcattttcattgactttattgaaggtaaagactttatcatttccatcaatttctccctctttgacaatgcaaactctgctccagaaaatgtttatgacttgttgatc

SEQ ID NO: 18736 - DNA, 120 bp, synthetic construct
  source 1..120: mol_type = other DNA
atctcatttcagtacctccttgctgaggaattgagttacttgacacacaaatatattagatgtcatgcattttcttcctactgtctttggcttcctaaacagagtcacacttggtatctt

SEQ ID NO: 18737 - DNA, 120 bp, synthetic construct
  source 1..120: mol_type = other DNA
tacatgcattggtatttctggtgacatacctgctggccttgacaggcaacctcctcattatcaccatcattaccgtggaccgtcgtctccattcccccatgtattactttttaaagcacc

SEQ ID NO: 18738 - DNA, 120 bp, synthetic construct; identical to SEQ ID NO: 5798
  source 1..120: mol_type = other DNA

SEQ ID NO: 18739 - DNA, 120 bp, synthetic construct
  source 1..120: mol_type = other DNA
gtcattcaccaattcttctgtgatgttcctcagatgctgaaactagcctgttcttatgaattcattaatgagattgcactggctgcattcacaacgtctgcagcatttatctgtttgatc

SEQ ID NO: 18740 - DNA, 120 bp, synthetic construct
  source 1..120: mol_type = other DNA
tcagctgcaggctttgagtttctcagactgccttctgattcctcatcgactgtggaccttgtattctccgtattctatactgtgatacctccaacactcaatccagtcatttatagctta

SEQ ID NO: 18741 - DNA, 120 bp, synthetic construct
  source 1..120: mol_type = other DNA
catgtttaaactctgaagaaccatacaaatgaaaggcattgttattatgtttcagattggaagagaggtgaatcttatttctacccagaatgctcttccaagctgtctattgtatatatt

SEQ ID NO: 18742 - DNA, 120 bp, synthetic construct; identical to SEQ ID NO: 5799
  source 1..120: mol_type = other DNA

SEQ ID NO: 18743 - DNA, 120 bp, synthetic construct
  source 1..120: mol_type = other DNA
tattcagcccctagtaagtatcaagtgctttatatatatacatttttttgactcaagaaaacaactcttctagctataacatattgtccccattttgccaataggaacaataaatttagg

SEQ ID NO: 18744 - DNA, 120 bp, synthetic construct
  source 1..120: mol_type = other DNA
acaataaggtcatttatgttccttactgatggcaaatgcattattacccaaatgtgagtgtgtatgtttatgtgtgtgtgtgatgtgtataatctataaatataagcatatactactata

SEQ ID NO: 18745 - DNA, 120 bp, synthetic construct
  source 1..120: mol_type = other DNA
ggggatgctccctagttccatgaaacagaatatagataaactgcaaatgaagagttccaacttatgaatgtgtgagataaggaggcacaaatcttgtgaatctgaatatctgattcaatt

SEQ ID NO: 18746 - DNA, 120 bp, synthetic construct; identical to SEQ ID NO: 5800
  source 1..120: mol_type = other DNA

SEQ ID NO: 18747 - DNA, 120 bp, synthetic construct
  source 1..120: mol_type = other DNA
tctcctaatgctatccctcccttaccccctcacccccaaacaggccccagtgtgtgatgttcccctacctgtgtccatgtgttctcattgttcagctcctacttatgagtgagaacatgc

SEQ ID NO: 18748 - DNA, 120 bp, synthetic construct
  source 1..120: mol_type = other DNA
ccatgggtgtatatgtgccaccttttctttatccagtgtattattgatgggcatttgggttggtttcaagtctttgctattgtgaacagtgccacaataaacatacgtgtgcatgtgtct

SEQ ID NO: 18749 - DNA, 120 bp, synthetic construct
  source 1..120: mol_type = other DNA
ctagtttacagtcccaccaacagtgtaaaagtgttcctgtttctccacgtcctctctagcatctgttgtttcctgcctttttaatgatagccattctaactggcatgagatggtatctca

SEQ ID NO: 18750 - DNA, 120 bp, synthetic construct; identical to SEQ ID NO: 5801
  source 1..120: mol_type = other DNA

SEQ ID NO: 18751 - DNA, 120 bp, synthetic construct
  source 1..120: mol_type = other DNA
tttgtttttttcttgtaaatttgtttaaattctttgtagattctggatattagccctttgtcagatggatagattacaaaaattttctcccattctgtaggttgcctattcactctgctg

SEQ ID NO: 18752 - DNA, 120 bp, synthetic construct
  source 1..120: mol_type = other DNA
tgaatggtattgcctaggttttcttcttgggtttttatggttttaggtcttacgtttaagtctttaatccatcttgagttaatttttgtataaggtataaggaaggagtccagtttcagt

SEQ ID NO: 18753 - DNA, 120 bp, synthetic construct
  source 1..120: mol_type = other DNA
tctgaggcctctgttctgttctgttggtctatatatctgttttggcaccagtaacatgctgttttggttactgtagctttgtagtatactttgaagtcaggtagcatgatgcttccagct

SEQ ID NO: 18754 - DNA, 120 bp, synthetic construct; identical to SEQ ID NO: 5802
  source 1..120: mol_type = other DNA

SEQ ID NO: 18755 - DNA, 120 bp, synthetic construct
  source 1..120: mol_type = other DNA
ttggtgtataggaatgcttgtggtttttgcacattgattttgtatcctgagactttgctgaaattgcttataagcttaaggagattttgggctgagacgatggggttttctaagtataga

SEQ ID NO: 18756 - DNA, 120 bp, synthetic construct
  source 1..120: mol_type = other DNA
ggtgagagagggcatccttgtcttgtgacagttttctcagggaatgcttccaggttttgcccattcagtatgatattggctgtgagtttgtcatagatagcttttattattttgagatac

SEQ ID NO: 18757 - DNA, 120 bp, synthetic construct; identical to SEQ ID NO: 5803
  source 1..120: mol_type = other DNA

SEQ ID NO: 18758 - DNA, 120 bp, synthetic construct
  source 1..120: mol_type = other DNA
ggattccctctttttctattgtttggaatattttcagaaggaatggtaccagctcctttttgtacttgcggtagaattcgtctgtgaatctgtctggttctgggcttttcttggttggta

SEQ ID NO: 18759 - DNA, 120 bp, synthetic construct
  source 1..120: mol_type = other DNA
tttctagtttatttgcatagagatgtttatagtattccctgatggtagtttctatttctgtgggatcagcagtgatatgccatttatcatttttatagtgtctattgatttttctctctt

SEQ ID NO: 18760 - DNA, 120 bp, synthetic construct
  source 1..120: mol_type = other DNA
tgatcttagttatttcttgtcttctgctagcttttgaatttgttttctcttgcttctctagttgttttaattgcgatattagagtgtcgattttagatctttcctgctttctcctgtggg

SEQ ID NO: 18761 - DNA, 120 bp, synthetic construct; identical to SEQ ID NO: 5804
  source 1..120: mol_type = other DNA

SEQ ID NO: 18762 - DNA, 120 bp, synthetic construct
  source 1..120: mol_type = other DNA
ttagaaatgcagaaatcatctggcttctgcattgatctcagtgggagctgcagaccgaagctgtttctattccaccatctttccagccacccacactgatttctaaagtagttgttccat

SEQ ID NO: 18763 - DNA, 120 bp, synthetic construct
  source 1..120: mol_type = other DNA
atcttggctaccttgtcaggtattttgaaaaacttttagctttttaaacacattcatggtgatatatatcgatgagtttattttgtattgccctgttcaacaaggttgaacatcttttca

SEQ ID NO: 18764 - DNA, 120 bp, synthetic construct
  source 1..120: mol_type = other DNA
tgtatatatactggataaaaatcttttgtcagatacacgtattacagatgttttttctaatctcctgtgattgtcttttttttccatcaggttcttttggagagtaaaactttaaaaatt

SEQ ID NO: 18765 - DNA, 120 bp, synthetic construct; identical to SEQ ID NO: 5805
  source 1..120: mol_type = other DNA

SEQ ID NO: 18766 - DNA, 120 bp, synthetic construct
  source 1..120: mol_type = other DNA
cttggcctcctaatatgctgggattacaggcatgagccaccgcgcccggcctaaaattataaaggtatttttctatgtgaccatttagaaaatgaatagttttagcttctatattaatta

SEQ ID NO: 18767 - DNA, 120 bp, synthetic construct
  source 1..120: mol_type = other DNA
cccattgatttgccttagcaccttgtcaatatatgggcttactattctttttcattgatctatgtgtttatttttaactaataccataccatactgatttcagcaactttataacgattt

SEQ ID NO: 18768 - DNA, 120 bp, synthetic construct
  source 1..120: mol_type = other DNA
tgggactataggcgcccaccaccatgcctggctaatttttttgtatttttagtagagacggggtttcaccgtggtagccaggatggtctcgatctcctgacctcgtgatccgcccacctc

SEQ ID NO: 18769 - DNA, 120 bp, synthetic construct; identical to SEQ ID NO: 5806
  source 1..120: mol_type = other DNA

SEQ ID NO: 18770 - DNA, 120 bp, synthetic construct
  source 1..120: mol_type = other DNA
ttattactaattattcacattttaagttttgaatacaaaaattacacttcatgctccttaaattgtttcaaatgttgtagaaataacattaaaataagaatttcctctttaatagtgatt

SEQ ID NO: 18771 - DNA, 120 bp, synthetic construct
  source 1..120: mol_type = other DNA
tttatcagttcatggcaccctgtcctcattaatatgtgcacgatctctctcatcttactttatttaaaacatttctttcctgtctgtttctactaccattccccctaaggaaaacaatta

SEQ ID NO: 18772 - DNA, 120 bp, synthetic construct
  source 1..120: mol_type = other DNA
tcactcagcacactacttttaagagctatcacgttacaatgtctacatctagcccactttttctaaaaactgcatttttttgatgttgtacatcctcaaccttcgcaaatctgctctccc

SEQ ID NO: 18773 - DNA, 120 bp, synthetic construct; identical to SEQ ID NO: 5807
  source 1..120: mol_type = other DNA

SEQ ID NO: 18774 - DNA, 120 bp, synthetic construct
  source 1..120: mol_type = other DNA
aaatagaatacaatgttacctcacttttaaactttggagaaattttaaacctgtaaaaaatttgtaaaaacaatacagaggcttctctttttatccctcaccttgtttccctaatgttac

SEQ ID NO: 18775 - DNA, 120 bp, synthetic construct
  source 1..120: mol_type = other DNA
gcttttaactttttggaacactttttgctcatatctctcgatctgctttcttatgcctgtgctagcgtataataaaactataataataataatgacatgtaataagtactacttatgcca

SEQ ID NO: 18776 - DNA, 120 bp, synthetic construct
  source 1..120: mol_type = other DNA
tattttaaagataaggaaattaaggcacaggtcactaatcaacttatctacagtcactagcaaactactagctaacctgggactcaaactcaaggcagtttggcccccaagttttcattc

SEQ ID NO: 18777 - DNA, 120 bp, synthetic construct
  source 1..120: mol_type = other DNA
agacctaacgcatctgatatatcaaaatatatcagtcaaccattatgcagaaaagggttaacttttcatgtctgtgttgcagaaccctgtatattcccaagaaaggcctatattcaggac

SEQ ID NO: 18778 - DNA, 120 bp, synthetic construct; identical to SEQ ID NO: 5808
  source 1..120: mol_type = other DNA

SEQ ID NO: 18779 - DNA, 120 bp, synthetic construct
  source 1..120: mol_type = other DNA
aatgtaactcactggaagaaaacacctggaagcttattcctggtttctcctagactcccggcacctcatgcactttttccctttgttcatttttaatatgataacttttcaatactaaca

SEQ ID NO: 18780 - DNA, 120 bp, synthetic construct
  source 1..120: mol_type = other DNA
tcaatgctgtccatgttgttaaattatagcagctttctattttgatttataaatggacaggaatatatcagtaagacactaccagagtagtgcagtgaatatgcatgcattcttacatgt

SEQ ID NO: 18781 - DNA, 120 bp, synthetic construct
  source 1..120: mol_type = other DNA
aaatgaaagaataagaaaggaaagggaaggaatgccagcctttccctaaagacacatgacacaacttgagaccaaaagtcatagcattataaacagaatccctacgtttataactctttc

SEQ ID NO: 18782 - DNA, 120 bp, synthetic construct
  source 1..120: mol_type = other DNA
ataaccattaatagttcataagatttgagtccaataacttttaaaggcataattctttatgagcgtattttatttccctttatgcgcagctctaggctccttttcctacttccctgtttc

SEQ ID NO: 18783 - DNA, 120 bp, synthetic construct; identical to SEQ ID NO: 5809
  source 1..120: mol_type = other DNA

SEQ ID NO: 18784 - DNA, 120 bp, synthetic construct
  source 1..120: mol_type = other DNA
taagggaattatgtgtctctttagaatactaaactgtgccacttaatagaagtggcagatatccctttcccttctgtagcctgatttttcattcattctgtggtttcctttgatgtgaag

SEQ ID NO: 18785 - DNA, 120 bp, synthetic construct
  source 1..120: mol_type = other DNA
gaatgttttccactcccaaggacataaagataatcactttataggtactttaaaaagttttaaagttttgactttaatatttcaatctttaatccacctgaaactcatttttagatacac

SEQ ID NO: 18786 - DNA, 120 bp, synthetic construct
  source 1..120: mol_type = other DNA
tacacacacagatctctttggtgtcctctctttttgtccactcatctacctgtctgttcctgtgctaacactgtactgtcttatttcctatacattgtaaatcttgctattagaacaaat

SEQ ID NO: 18787 - DNA, 120 bp, synthetic construct; identical to SEQ ID NO: 5810
  source 1..120: mol_type = other DNA

SEQ ID NO: 18788 - DNA, 120 bp, synthetic construct
  source 1..120: mol_type = other DNA
tagaaatataccaatttgatacctgggccaagggatttgctaaattatctcatttttctaatgttttatctgcagattcttagggatttttttttttttcttgagacggagtctcgctct

SEQ ID NO: 18789 - DNA, 120 bp, synthetic construct
  source 1..120: mol_type = other DNA
cgcccggctaatttttttgtatttttagtagagacgaggtttcactgtgttagccaggatggtctcgatctcctgacctcgtaatccacccgcctcggcctcccaaagtgctgggattac

SEQ ID NO: 18790 - DNA, 120 bp, synthetic construct
  source 1..120: mol_type = other DNA
ccagctaaaacaatcaaaacagtgtggaattaaagtgataacaagtggcagtcatgtcttgttctcactgagtacatgttttgacctaggttttagatggacaactgtttcatttatcta

SEQ ID NO: 18791 - DNA, 120 bp, synthetic construct; identical to SEQ ID NO: 5811
  source 1..120: mol_type = other DNA

SEQ ID NO: 18792 - DNA, 120 bp, synthetic construct
  source 1..120: mol_type = other DNA
aacgtgagtactgggggcatggttccttgagcccactaaagtactgatctaccccaggagcctttattaaattgacaaagtcccttcttatttcaggtctgctaaacttttcatcataaa

SEQ ID NO: 18793 - DNA, 120 bp, synthetic construct
  source 1..120: mol_type = other DNA
agtagtgatgaattagacaaagttttcatattcatgaagtgcaatctatagtggtagagaaaccactaacaaataaacatgtaagcatgaaccgggttagatggcaacacacattacaga

SEQ ID NO: 18794 - DNA, 120 bp, synthetic construct
  source 1..120: mol_type = other DNA
tgaggaaaaacattccaagcagagaaaccaatgcaaagtccagagataggagcattcttagaatgtataattaatagcaaggaagccagtatattttttaaattgttcttcatcattact

SEQ ID NO: 18795 - DNA, 120 bp, synthetic construct; identical to SEQ ID NO: 5812
  source 1..120: mol_type = other DNA

SEQ ID NO: 18796 - DNA, 120 bp, synthetic construct
  source 1..120: mol_type = other DNA
tttttcacattagagacttagctagttaacatttatttttttcttttttaatgtaagtatttatggctaaaattatcattaaaatcagtttagcatatttgtcataaatttggtgatgtt

SEQ ID NO: 18797 - DNA, 120 bp, synthetic construct
  source 1..120: mol_type = other DNA
agtggtgtgacttctccaacttggtttttcttcatgtcattgtggcttttggttgcatgcatttagatattaatagaatcattttgtgaatttccataaagccaaaaacctgcttgcatt

SEQ ID NO: 18798 - DNA, 120 bp, synthetic construct
  source 1..120: mol_type = other DNA
ttttagtaatcgtttgtagttttcaatgtagagattttgccaatatttaattaaatttgttcctaaatattgggaggcttttgatgctactaaaattttatggcctttgtattttattta

SEQ ID NO: 18799 - DNA, 120 bp, synthetic construct; identical to SEQ ID NO: 5813
  source 1..120: mol_type = other DNA

SEQ ID NO: 18800 - DNA, 120 bp, synthetic construct
  source 1..120: mol_type = other DNA
ctgtgtgtatgtctgtgtgtgtgtgtgtataatgtcttcgtttaattttgttatcaagttgatactggcctcataagacaaattggaagtgtttcttcttccctatttcctggacaattt

SEQ ID NO: 18801 - DNA, 120 bp, synthetic construct
  source 1..120: mol_type = other DNA
cccagattcacaaattattaacatttttgccctagttgctttatcatttactcttttaataaacatttttttaaccttttgaacaatgtgtatttcctaagaacagacattctcttgcat

SEQ ID NO: 18802 - DNA, 120 bp, synthetic construct; identical to SEQ ID NO: 4760
  source 1..120: mol_type = other DNA

SEQ ID NO: 18803 - DNA, 120 bp, synthetic construct; identical to SEQ ID NO: 5814
  source 1..120: mol_type = other DNA

SEQ ID NO: 18804 - DNA, 120 bp, synthetic construct
  source 1..120: mol_type = other DNA
atttttgcttaaatttttgcttataatttttattataattgtagcaaaatggtgattttctaagtctaccatctctttcacatttattagttgatgtgctacttaaagatattaaatccc

SEQ ID NO: 18805 - DNA, 120 bp, synthetic construct
  source 1..120: mol_type = other DNA
cacccaagcagtgtacactgtacccaatatgtagtcttttatccctcaccctgctcccaccctttcccctgagtcctcaaaatccattctgtcattcttaggcctttgcatcctcatagc

SEQ ID NO: 18806 - DNA, 120 bp, synthetic construct
  source 1..120: mol_type = other DNA
tttaatggctgaatagtactccatggtgtatacgtatacatctcccatatgttctttatccactcattgattgatgggcatttggactggttacatatttttgcagttgcaaattgtgct

SEQ ID NO: 18807 - DNA, 120 bp, synthetic construct
  source 1..120: mol_type = other DNA
tctccacattgttttccataatggttatactagtttacattcccaccaacagtgtaaaagtgttcccttttcaccacatccacgccaacatctattattttttgaatttttgattatggc

SEQ ID NO: 18808 - DNA, 120 bp, synthetic construct; identical to SEQ ID NO: 5815
  source 1..120: mol_type = other DNA

SEQ ID NO: 18809 - DNA, 120 bp, synthetic construct
  source 1..120: mol_type = other DNA
gtcatgaaatcgttgcctaagccaatatctagaagggtttttctgatgtcatgagtttttatggtttcaggtcttagatttaagtatttgactcattttcagttgatttttgtataaggt

SEQ ID NO: 18810 - DNA, 120 bp, synthetic construct
  source 1..120: mol_type = other DNA
tggctgttaagtatttggttttatttttgggttatttattctgttccattagtctatgtgcctatttttagaccagtactgtgctgttttggtgactatggccttacagtatagtttgaa

SEQ ID NO: 18811 - DNA, 120 bp, synthetic construct
  source 1..120: mol_type = other DNA
gggggtattttgatgggaattgcattgaatctgtagattgcttttggcagtatggtcattttcaaaatattgattctacccatccatgagcataggatgtgttcccatttgtttgtcttg

SEQ ID NO: 18812 - DNA, 120 bp, synthetic construct; identical to SEQ ID NO: 5816
  source 1..120: mol_type = other DNA

SEQ ID NO: 18813 - DNA, 120 bp, synthetic construct
  source 1..120: mol_type = other DNA
tttatcaatatttaaatgcatacagttttagaaataaacttaaactgaataatcttatattctttaattttaaggaaaaaaccaactgcagaaaatgcaatatttataaatacgcttatg

SEQ ID NO: 18814 - DNA, 120 bp, synthetic construct
  source 1..120: mol_type = other DNA
gaaaaactggaaaagtgactggtatacaataggcaatcaataaatatttgttaaataaataaagaaaatttttctgcaaattgtgaattgttatctgagcagaatgctatgtagccttta

SEQ ID NO: 18815 - DNA, 120 bp, synthetic construct
  source 1..120: mol_type = other DNA
tggacttacctttatttctaagtacttacaaagttgttgcaaaaattttaatatacatattaatggatttagctatcatatgagatttgcagatattgttgctagatttgtttttgaata

SEQ ID NO: 18816 - DNA, 120 bp, synthetic construct; identical to SEQ ID NO: 5817
  source 1..120: mol_type = other DNA

SEQ ID NO: 18817 - DNA, 120 bp, synthetic construct
  source 1..120: mol_type = other DNA
atcttcaggcaactcaaatgtctgctaaaatttgagaaccaatgctaaggatgacaaaaccccataacttactaaactatttcccttctatatgaaaattttaagggctccaaattccag

SEQ ID NO: 18818 - DNA, 120 bp, synthetic construct
  source 1..120: mol_type = other DNA
agagtagatttgagagttttaaaaaaaactgtttttaaagacgtaaagtagagctatgagctcaccaaagtccactgaagttcgccaaagagctgagttacttcagctctcatgagacca

SEQ ID NO: 18819 - DNA, 120 bp, synthetic construct
  source 1..120: mol_type = other DNA
cttatttcatctcttttgttactaatctagaaggtcaggagtgtggtaaaggcagtgtctgataaggttatgagcttccaaagagtttctacatttttagtgcagacactctccctttgg

SEQ ID NO: 18820 - DNA, 120 bp, synthetic construct; identical to SEQ ID NO: 5818
  source 1..120: mol_type = other DNA

SEQ ID NO: 18821 - DNA, 120 bp, synthetic construct
  source 1..120: mol_type = other DNA
ttagaataactttattcctttcctaagggaaagacaaaaaagtttccatcccgtcagaacatacggggagagaaaacacacaggcccagaggtgggaaggtgtgtgacagtccataaccc

SEQ ID NO: 18822 - DNA, 120 bp, synthetic construct
  source 1..120: mol_type = other DNA
atacattccaatattggaaataatctgaaaacactttccagtagtaacaatcctccttaatatgagggacaaaaaaaaagaccaggctttgaccaagtccttagagcatatttccatttc

SEQ ID NO: 18823 - DNA, 120 bp, synthetic construct
  source 1..120: mol_type = other DNA
tttaagtgccactcgtcattagatgttatacttcagcaatacttccaattttaagtctgtactttaagagggacccacaggaactcagcaccaggcagagcagtgtaagactggaaaaga

SEQ ID NO: 18824 - DNA, 120 bp, synthetic construct; identical to SEQ ID NO: 5819
  source 1..120: mol_type = other DNA

SEQ ID NO: 18825 - DNA, 120 bp, synthetic construct
  source 1..120: mol_type = other DNA
gtgcagctcttgccacagttgttgaagagttagggctgtgtctgatcaggaggcatctgtaggattttgatctccaaggaattgtgggtgagtcacatacacctggtgtattacaggtgg

SEQ ID NO: 18826 - DNA, 120 bp, synthetic construct
  source 1..120: mol_type = other DNA
actctgtcttgggaaaaaaaatagaagtgggcagagtcaaaaaagcaacttcaaataattaatccctttgtccatatgagttaaatacaaacgtgtatattttaggtttttaaaaatcaa

SEQ ID NO: 18827 - DNA, 120 bp, synthetic construct
  source 1..120: mol_type = other DNA
cactggttttgattcatctcagtcttttggcctggagattaggccaaacatcaagcatgttgggagggcaacaatttaaagcaacattattgactgtaaagcatttgccaggaatttaca

SEQ ID NO: 18828 - DNA, 120 bp, synthetic construct; identical to SEQ ID NO: 5820
  source 1..120: mol_type = other DNA

SEQ ID NO: 18829 - DNA, 120 bp, synthetic construct
  source 1..120: mol_type = other DNA
aagggtgaagaagcaaaataaaagagcttctcaaaaaaaaaaaatcttgaattatcaatttttgacgcttcgttgctctctctggtaagcctcctccaggggtactagatgagacagcgt

SEQ ID NO: 18830 - DNA, 120 bp, synthetic construct
  source 1..120: mol_type = other DNA
ggccaaagtgctttctagaatttagtgctgagtaaactgagccccttcatctttagctgctcccataatcactctaatccccttaatcccatcaacctttatcatatatatgtatatata

SEQ ID NO: 18831 - DNA, 120 bp, synthetic construct
  source 1..120: mol_type = other DNA
gttactggagacgtatgtaaaccagtctttagtgtttgctatagagcacaaaggcttgtcataaggctcctccaatgatagactgcttttcctttgggagcattgatgttttatctactc

SEQ ID NO: 18832 - DNA, 120 bp, synthetic construct
  source 1..120: mol_type = other DNA
aagcaattctcttgccccagcctcccaagtagctgggattacaggcacctgccaccacgcctggctaatttttttgtattcttagtaaagacagggtttcactgtgttggtcaggctggt

SEQ ID NO: 18833 - DNA, 120 bp, synthetic construct; identical to SEQ ID NO: 5821
  source 1..120: mol_type = other DNA

SEQ ID NO: 18834 - DNA, 120 bp, synthetic construct
  source 1..120: mol_type = other DNA
gtgtctaaaagatgatattctgaataactcagagcatacagcacttcacacaaatgagtaataagctcctcaggcttaaaaaaaaaatggatgactagggagaagttgaaatgtcctcga

SEQ ID NO: 18835 - DNA, 120 bp, synthetic construct
  source 1..120: mol_type = other DNA
cttctttcttttcctttcctgtcccctttccccagaaaacatttttttaaaaccagcagttagtgcaactaatgttcacttagcatacagtgcaaacagatggaacaaaaaaaaaggaat

SEQ ID NO: 18836 - DNA, 120 bp, synthetic construct
  source 1..120: mol_type = other DNA
tcctctctaaaaaatggtatgtcatagatccaaacaaggcttccacagtttgtcaaagagtgcttattaaggcttctcattttctacagccttgctgtggaattctgccacatgcaggct

SEQ ID NO: 18837 - DNA, 120 bp, synthetic construct
  source 1..120: mol_type = other DNA
atgtgatcaagttgatggctaagccaaaatggccaaagtgacctggtcttccaatatgacggagataggtctcttctagctttgaaaagtcaaagtttattaccacattcacagcttgta

SEQ ID NO: 18838 - DNA, 120 bp, synthetic construct; identical to SEQ ID NO: 5822
  source 1..120: mol_type = other DNA

SEQ ID NO: 18839 - DNA, 120 bp, synthetic construct
  source 1..120: mol_type = other DNA
ttttccatcaggttagtctcagggtttctgcaaatgggaattcatgaacttctgtatactaagagggaaagtagcagaatgtagtaaaatctgcctgtcttcaggtagcatgagaataat

SEQ ID NO: 18840 - DNA, 120 bp, synthetic construct
  source 1..120: mol_type = other DNA
ttgctactcctttcttaataagattcaggattctcccaggggcagcaatcaccatgtgcactgtatcatccagcctcagtacgtcatctcctgaattggttcctcctgtggtcatcacca

SEQ ID NO: 18841 - DNA, 120 bp, synthetic construct
  source 1..120: mol_type = other DNA
actattgtttgtatagtgtccttcttcaggtctagccttttaagtaggggaatgtcatgggcactgctcttgcctgttccattttttgctctagctaagatatccctaccagataaagca

SEQ ID NO: 18842 - DNA, 120 bp, synthetic construct
  source 1..120: mol_type = other DNA
tccaacattttgattcttagatcctttggaaggagttttaaagtcttcttccaattatcaccaggcttaatagtggtggtcatactctgcgcttgtggttgagtgctattattgtgttgg

SEQ ID NO: 18843 - DNA, 120 bp, synthetic construct; identical to SEQ ID NO: 5823
  source 1..120: mol_type = other DNA

SEQ ID NO: 18844 - DNA, 120 bp, synthetic construct
  source 1..120: mol_type = other DNA
ttaaaaggccctcttaccagcttcaattatagctgaattcacttacttcaatcactgaggccactcctgtgctggacactcttggtcctttattgttgactggaaactcccaaaatattg

SEQ ID NO: 18845 - DNA, 120 bp, synthetic construct
  source 1..120: mol_type = other DNA
ggctgtttgatatagtggtttttcctacttctttctagaactcacagatgaaaaagaaaaatgcagaaatatgagactcattaccaagtgactcgtcaacactcatatactgatgtgtat

SEQ ID NO: 18846 - DNA, 120 bp, synthetic construct
  source 1..120: mol_type = other DNA
agcatactgaggagctaggactgctggcatgtgccatcatacccagttaaattatatgtattttaattagggtagaacccttagttatttccaaagctatttcttatactgtatttaaaa

SEQ ID NO: 18847 - DNA, 120 bp, synthetic construct
  source 1..120: mol_type = other DNA
ctgcctcccgggttcaagtgattctcctgcctcagcctcctgagtagctgggactacaggaccgcgcaccaccacacccagctaatttttgaatttttagtagagatgtgtttcaccatg

SEQ ID NO: 18848 - DNA, 120 bp, synthetic construct; identical to SEQ ID NO: 5824
  source 1..120: mol_type = other DNA

SEQ ID NO: 18849 - DNA, 120 bp, synthetic construct
  source 1..120: mol_type = other DNA
gcctgcacctgtcattgagatattcgtgggaaagccacgtttccagctctgcccaggtatatcccaccaccctcacaaattaggaagctcagaacactggacacccaccccactgtccag

SEQ ID NO: 18850 - DNA, 120 bp, synthetic construct
  source 1..120: mol_type = other DNA
cacacagcccaacacaaaacctgctgacagaagtgcataggactatagaaacaaccccaaagaccctacctagtacaacactctccagatgagaaggaaccagcacaagaattctgccac

SEQ ID NO: 18851 - DNA, 120 bp, synthetic construct
  source 1..120: mol_type = other DNA
gaaactcaatgagatccaaaataaggttaaaaatcagtacaaagaaacctgtaaagcaatccaggaaataaaagaagatgcaaacatcttaaaaagaaatcattcagagcaatgaaaact

SEQ ID NO: 18852 - DNA, 120 bp, synthetic construct; identical to SEQ ID NO: 5825
  source 1..120: mol_type = other DNA

SEQ ID NO: 18853 - DNA, 120 bp, synthetic construct
  source 1..120: mol_type = other DNA
aaaataaacatcaccaaggtatatagtgaccagaatgcccaaggtcaatgctaaagaaaaaactttaaaggcagctagaaaaaaaggttagatcccatacaaagggaatcccatcaggct

SEQ ID NO: 18854 - DNA, 120 bp, synthetic construct
  source 1..120: mol_type = other DNA
caaaccaagcttcataagttaacaagaactaaaatatttttcagataagcaatagctaagggaagtcattaccactaaaccagccttacaagagatccataatggatttctaaacatgga

SEQ ID NO: 18855 - DNA, 120 bp, synthetic construct
  source 1..120: mol_type = other DNA
ctcacatattaatattaaccttgaatgtgaatggtcttaacaccctacttcaaaggcacagagtggcaagttggataaaaaacaagactcacccatctgctgtcttcaagagacccatct

SEQ ID NO: 18856 - DNA, 120 bp, synthetic construct; identical to SEQ ID NO: 5826
  source 1..120: mol_type = other DNA

SEQ ID NO: 18857 - DNA, 120 bp, synthetic construct
  source 1..120: mol_type = other DNA
aattcgacatttgaccaattggacataatagacatctacagaacactccacccagcaaccataggatatacattcttctcatttgcatatggaacatatgctaagattgaccacatgctt

SEQ ID NO: 18858 - DNA, 120 bp, synthetic construct
  source 1..120: mol_type = other DNA
catggaaattaaataactttattctgagtaacttttgggtaaacaataaaattaaggcaaaaatttagaaaattatttaaaataaataaaaacagagatacaatattttattttttattt

SEQ ID NO: 18859 - DNA, 120 bp, synthetic construct
  source 1..120: mol_type = other DNA
atttacattaggtatatctcctaatgctatccctgcctcctccgcccaccccacgacaggccccggtgtgtgatgttccccttgctgtgtccaagtgttctcattgttcaattcccacct

SEQ ID NO: 18860 - DNA, 120 bp, synthetic construct
  source 1..120: mol_type = other DNA
atagtattcctttgtatataaatgccacattttcttaatccagtctatcactgatggacatttgggttggttccaagtctttgctattgtgagtagtgctgctataaacatacgtgtgca

SEQ ID NO: 18861 - DNA, 120 bp, synthetic construct; identical to SEQ ID NO: 5827
  source 1..120: mol_type = other DNA

SEQ ID NO: 18862 - DNA, 120 bp, synthetic construct
  source 1..120: mol_type = other DNA
taaaaaatcctcagagactattatgaacaccactatgcacacaaactagaaactctagaggaaatgaataaattcctggaaggtcacaacaccccaagattgagccaggaagaaatcaaa

SEQ ID NO: 18863 - DNA, 120 bp, synthetic construct
  source 1..120: mol_type = other DNA
caatcctactgaaatattttttaaaaatggggaagaggactcctccctaactcattctacgaagccagcatcactctgataccaaaatctagtaaagacacaacaacaaaagagaaaatt

SEQ ID NO: 18864 - DNA, 120 bp, synthetic construct
  source 1..120: mol_type = other DNA
cgcaaggttggttcaacatatgcaaatcaataaacatgacttgccgcataaacaattaaaaacaaaaccatttaatcatctcaatgaatgcagaaaaaatgttttgataaaatccaacat

SEQ ID NO: 18865 - DNA, 120 bp, synthetic construct; identical to SEQ ID NO: 5828
  source 1..120: mol_type = other DNA

SEQ ID NO: 18866 - DNA, 120 bp, synthetic construct
  source 1..120: mol_type = other DNA
aaaatcaatgtacaaatcagtagtatttctatataccaataacattgaagctgaatgccaaatcaataatacaatccgattcacaatagccacaaaaagaataaagtatgttggaatcca

SEQ ID NO: 18867 - DNA, 120 bp, synthetic construct
  source 1..120: mol_type = other DNA
ttgttaaaatgaccatactctccaaagcaatctacacgttcaatgctattcctatcaaactaccaatattgtttttcacagaattagaaaaaatattctaaacttcatttgaaatcaaga

SEQ ID NO: 18868 - DNA, 120 bp, synthetic construct
  source 1..120: mol_type = other DNA
aaacagacacataggccaaatgggagtctcttagcaactactttactaatattaatttgcttatattttgaaaaagagtatggaccatgtcactaagctgttatgagttacataactggc

SEQ ID NO: 18869 - DNA, 120 bp, synthetic construct; identical to SEQ ID NO: 5829
  source 1..120: mol_type = other DNA

SEQ ID NO: 18870 - DNA, 120 bp, synthetic construct
  source 1..120: mol_type = other DNA
aattatgcagcccaaaatgtcaattgttcttctgttgagaaaccctgaactaggtgcactgtgacttaagaaaactactccaacgcaaagacagataaatgtgttcatataatttttaac

SEQ ID NO: 18871 - DNA, 120 bp, synthetic construct
  source 1..120: mol_type = other DNA
tatattagatgtaaagaaatgaaaaataaggagtgggaaaggctacccattcactctgcctattgaaatcaggcttccacctgtatctctgtaccagaacttttctggtcaggggcaata

SEQ ID NO: 18872 - DNA, 120 bp, synthetic construct
  source 1..120: mol_type = other DNA
gactgaagtaagatagaagagtggttggaaatacagagaatggcattagatgaacttatctaatgctttatgtttcttctgtggaacagaaggtgagactgtctgccaagcatgaaggga

SEQ ID NO: 18873 - DNA, 120 bp, synthetic construct
  source 1..120: mol_type = other DNA
aacatcagagtgtgtgagtgtggagttttctccagattttctgaaccgtatgtatagaaaatactggatgctgttttggagtattccctggagatgtggctagaggataaatgtgttatg

SEQ ID NO: 18874 - DNA, 120 bp, synthetic construct; identical to SEQ ID NO: 5830
  source 1..120: mol_type = other DNA

SEQ ID NO: 18875 - DNA, 120 bp, synthetic construct
  source 1..120: mol_type = other DNA
agaagctggagtccgtgatgtgttgtttataaaaaggaatgggaggatttgggaggtgacagaattgttttatatcttgcctgtgtctatagttgcatgattatatgtgtttgcaaaaag

SEQ ID NO: 18876 - DNA, 120 bp, synthetic construct
  source 1..120: mol_type = other DNA
taatgggagaatggcaaagagcatactccaataccaaacaaaagactatgaaggtgggatatagtcttagagtagacatgtaggtaatcttcatgatgtgatcataacatctgcactacc

SEQ ID NO: 18877 - DNA, 120 bp, synthetic construct
  source 1..120: mol_type = other DNA
cacaattgaatttttgatatctggattatgccacaatgtcttgtattaggttgatgatcaacaataattttaaaaagaataaaaaaggagtggaggtcaaggaggtctgaggttagtgtg

SEQ ID NO: 18878 - DNA, 120 bp, synthetic construct; identical to SEQ ID NO: 5831
  source 1..120: mol_type = other DNA

SEQ ID NO: 18879 - DNA, 120 bp, synthetic construct
  source 1..120: mol_type = other DNA
agcttttgggagaagaaccaaatgtcaatgacaacacagaaatatcaggagtaggtagtggtattggagagctttttcatagtagtgctagggttctaaggaattttattagtgagcaaa

SEQ ID NO: 18880 - DNA, 120 bp, synthetic construct
  source 1..120: mol_type = other DNA
cgagaccatcccggctaaaacggtgaaaccccgtctctactaaaaatacaaaaaattagccgggcgtaatggcgggcgcctgtagtcccagctacctgggaggctgaggcaggagaatgg

SEQ ID NO: 18881 - DNA, 120 bp, synthetic construct
  source 1..120: mol_type = other DNA
gaaaaggtgggatgacctaagttaaagaaaagaaattaacaatatgttgcttgaatttatttttctagcgatagaacttttgcaaatgaaaacacttcttcaccatgcacttatgtacct

SEQ ID NO: 18882 - DNA, 120 bp, synthetic construct; identical to SEQ ID NO: 5832
  source 1..120: mol_type = other DNA

SEQ ID NO: 18883 - DNA, 120 bp, synthetic construct
  source 1..120: mol_type = other DNA
gtgtttgacatgtgataaaggtaattctcacataagaaatattgtagagtgcttacaaagaatatataaatcataagaataaatcaaacacaagtcactagaacttgtattgccatatta

SEQ ID NO: 18884 - DNA, 120 bp, synthetic construct
  source 1..120: mol_type = other DNA
gttctgtttccccacccacatcttacaactcgaattgtaatccccaagtgtcgagggacggaggtgattggatcatgggggtggtttcccccatgctgttctcatgatagtgagtgagtt

SEQ ID NO: 18885 - DNA, 120 bp, synthetic construct
  source 1..120: mol_type = other DNA
ctgaggcatccccagccatgcagaactgtgagtcaattaagcctctttcttttataattacccactctcaggtagtattctttatagcaatgtgaaaacggactaatacaaatgtcttac

SEQ ID NO: 18886 - DNA, 120 bp, synthetic construct; identical to SEQ ID NO: 5833
  source 1..120: mol_type = other DNA

SEQ ID NO: 18887 - DNA, 120 bp, synthetic construct
  source 1..120: mol_type = other DNA
tttcccccatcccctacccttggcaataactttcattctctacttctagaggctaaatgttacaggtcctcacataagtggactcatggagtattagtctttctgagaggcttatttcac

SEQ ID NO: 18888 - DNA, 120 bp, synthetic construct
  source 1..120: mol_type = other DNA
gaaaataggcaggatacataggtccacaatcatgctcactgtactcataaccccacctttttaccagctatctattgtcgtttgatttcaattaacagttagatttgagtgaggcttgaa

SEQ ID NO: 18889 - DNA, 120 bp, synthetic construct
  source 1..120: mol_type = other DNA
aaatacataaataaaaatcaatgagacttatttcatggagtttttttttttttttttttttgctgtagaatagtaatatatttgtttatgtcatgaagtacacaccaggagattggtaat

SEQ ID NO: 18890 - DNA, 120 bp, synthetic construct; identical to SEQ ID NO: 5834
  source 1..120: mol_type = other DNA

SEQ ID NO: 18891 - DNA, 120 bp, synthetic construct
  source 1..120: mol_type = other DNA
acatttatttaccacatcaattcatttcctccaaataaaaactgatactagtttcttgatacagaaaaagcagaggacttggatagagggaataacagtcactaatttgactgtacctgt

SEQ ID NO: 18892 - DNA, 120 bp, synthetic construct
  source 1..120: mol_type = other DNA
cgtggcagaaggtgagggagaagcaaagacacgtcttacagggtggcaggcaagagagcttgtgcaagtgtagaaaaaactaccagtcataaaaacatcagatcttgtgagaatccactc

SEQ ID NO: 18893 - DNA, 120 bp, synthetic construct
  source 1..120: mol_type = other DNA
acaatattagtaccaaatgcaatcctagatgaactcctagagcaggaaattttaaatataagttttgaatggaaagacagctgtagaggaagaatatgatttcttaaagaactattataa

SEQ ID NO: 18894 - DNA, 120 bp, synthetic construct; identical to SEQ ID NO: 5835
  source 1..120: mol_type = other DNA

SEQ ID NO: 18895 - DNA, 120 bp, synthetic construct
  source 1..120: mol_type = other DNA
ttataaaactgaacaaaattaattttaaatgctacaacataaatatcaagtggaaaaaagcttccgttttacaagatgaggcacattctttacagttgtatgttacttggattagtattt

SEQ ID NO: 18896 - DNA, 120 bp, synthetic construct
  source 1..120: mol_type = other DNA
aaaacaagagaataagtgaatgggtggctatgtgaatatatactgtacatacatagtccccagggtgaatgagaactggaactttgctaataccaactctctcccttgcctctctctctg

SEQ ID NO: 18897 - DNA, 120 bp, synthetic construct
  source 1..120: mol_type = other DNA
taatagtaatgaccctttctcctttacagttgagtgtggtgctttgcatgaagtcacccatctctttccctaaggaggccaactttgaaggatagactttgaagaaagtttatctcagtg

SEQ ID NO: 18898 - DNA, 120 bp, synthetic construct; identical to SEQ ID NO: 5836
  source 1..120: mol_type = other DNA

SEQ ID NO: 18899 - DNA, 120 bp, synthetic construct
  source 1..120: mol_type = other DNA
tgatggtgttaagaagctgctgttagctctgtgtaaactgtgtggactctttgccagtacagccctcagtgaacacacatctttaatagaaattagcaattgctataacctgtagtctta

SEQ ID NO: 18900 - DNA, 120 bp, synthetic construct
  source 1..120: mol_type = other DNA
agaataatctaataaaatactcccaataaacaaatcaatcctgcattctttttaaatgttctgtgaaagcaataaaccttgtagctaattttcagtatggcatatacaccagttaacaat

SEQ ID NO: 18901 - DNA, 120 bp, synthetic construct
  source 1..120: mol_type = other DNA
ctcacatgtggcatgttaaatgggttaatatatattaactacattaaataacatcacatataagcgtggaagagatgttagtgctcatcattcagccaccctagtaacgatgtattattt

SEQ ID NO: 18902 - DNA, 120 bp, synthetic construct; identical to SEQ ID NO: 5837
  source 1..120: mol_type = other DNA

SEQ ID NO: 18903 - DNA, 120 bp, synthetic construct
  source 1..120: mol_type = other DNA
aatgcacattctttttcccattacggtggtataagtaactcattctgtctcttcccctgagaaagttaaaattgtccctgattgcatgtggtatattattgtacataaaagctataaaga

SEQ ID NO: 18904 - DNA, 120 bp, synthetic construct
  source 1..120: mol_type = other DNA
ccccacttacaatagctacaaaaaaaagaaaaataacatacttaagaattaacataaccaaggaggttaaagatttgtacacaaaaaaactataaagcattgattaaagtaattgaaaaa

SEQ ID NO: 18905 - DNA, 120 bp, synthetic construct
  source 1..120: mol_type = other DNA
tcgatgacatgtttcacagaaatgggaaaaaatcctataattctatggaactaaaaaaataacccaagtagccaaagcaatcttgcaaaaaatgaacaaagctgcaggtattatactacc

SEQ ID NO: 18906 - DNA, 120 bp, synthetic construct; identical to SEQ ID NO: 5838
  source 1..120: mol_type = other DNA

SEQ ID NO: 18907 - DNA, 120 bp, synthetic construct
  source 1..120: mol_type = other DNA
tgggaaagactttttggatatgaccttgaaagtactggcaataaagccaaaaagagacaattttgactacatcaaacaaaaatgcttcagcacagccaagcgaacaatcaactgagtgaa

SEQ ID NO: 18908 - DNA, 120 bp, synthetic construct
  source 1..120: mol_type = other DNA
agacatttctcagaagaagacatgcaaatggccaacaggtatatgaaaaaatactaaattaatagtcagcagagaaaggcaaatgaaaaccacaatgagatataaccttatatctgttag

SEQ ID NO: 18909 - DNA, 120 bp, synthetic construct
  source 1..120: mol_type = other DNA
aaagttctttaaaaaattaaaaataaaaccaccatatgatcaaggaatcccattacttggtatatatccaaggaaatgaaatcagcatatcaaagaaatatgtgcactccaatgtttatt

SEQ ID NO: 18910 - DNA, 120 bp, synthetic construct; identical to SEQ ID NO: 5839
  source 1..120: mol_type = other DNA

SEQ ID NO: 18911 - DNA, 120 bp, synthetic construct
  source 1..120: mol_type = other DNA
ctattgtacaacatggtgactgtagttaataacgttttgtattcttgaaaattgccaaaagaatagatgagttttctcaccacaaaaaagtatgtgaggtattgcatacgttgattagcc

SEQ ID NO: 18912 - DNA, 120 bp, synthetic construct
  source 1..120: mol_type = other DNA
aattattttcttatattacaaagaaaaacaaacctttgattcctttgatttaaaacctcatcagtttttaacttccaaatccacaggtgtacctaccatttctgccttcatttctctaac

SEQ ID NO: 18913 - DNA, 120 bp, synthetic construct
  source 1..120: mol_type = other DNA
cccttttctgtttctttatcctcacttcgcacagttcttactgtccttccttttctgttttgagaaaacagggctcaaattgtctgtgaacctctctagtggtattgaaatgggaaaagt

SEQ ID NO: 18914 - DNA, 120 bp, synthetic construct; identical to SEQ ID NO: 5840
  source 1..120: mol_type = other DNA

SEQ ID NO: 18915 - DNA, 120 bp, synthetic construct
  source 1..120: mol_type = other DNA
tagtgtaaagctttattgagtggaagtagctctcaactgatgggggagccagaagggaaatggtcttcccctggagttgggccactcggccttgctctcctctgccgcggccaaactcca

SEQ ID NO: 18916 - DNA, 120 bp, synthetic construct
  source 1..120: mol_type = other DNA
tactcctctggacatctggccacctgtgtgtctgcctgctggggcctcgggtttttataggccaaggatgggggcatggtgggtcagggtggacttttgaaatgcaacatttgggcgaaa

SEQ ID NO: 18917 - DNA, 120 bp, synthetic construct
  source 1..120: mol_type = other DNA
cccttcccagcactcccttatcagtatgctagcatattgcttttgggattcacttctctaggttttattgtgtgtattttactttttttgtttttaatgtttctttacttattttcttta

SEQ ID NO: 18918 - DNA, 120 bp, synthetic construct; identical to SEQ ID NO: 5841
  source 1..120: mol_type = other DNA

SEQ ID NO: 18919 - DNA, 120 bp, synthetic construct
  source 1..120: mol_type = other DNA
acagaagagcatgttgtcaaagtatgaggcttggatgtttcccactttggaaatatttgatgagaaatacgtgttgaccaaaaaaaattttttatcatctaataagcaaatgtgtcagaa

SEQ ID NO: 18920 - DNA, 120 bp, synthetic construct
  source 1..120: mol_type = other DNA
tatgggatgtgagaaatactaaaacgtatacttcctgtaagatgtgtgttaactgggagcataaaaagtagtaagaaagcaaaaactttcatgcacaaaccctctaggatgttcaatgtc

SEQ ID NO: 18921 - DNA, 120 bp, synthetic construct
  source 1..120: mol_type = other DNA
gtttgttacataggtaaacgtgtgccatggtgatttgctgcacctaaccacccatcacctaggtattaagccctgcatgcattagccatttgtcctgatgctctcccaccctccacccgc

SEQ ID NO: 18922 - DNA, 120 bp, synthetic construct; identical to SEQ ID NO: 5842
  source 1..120: mol_type = other DNA

SEQ ID NO: 18923 - DNA, 120 bp, synthetic construct
  source 1..120: mol_type = other DNA
gctaaatggtatttctggttctagatccttgaggaattgccacactgtcttccacaatggttgaactaatttacattccctccaacagtgtaaaagtgttcctatttctccacagccttg

SEQ ID NO: 18924 - DNA, 120 bp, synthetic construct
  source 1..120: mol_type = other DNA
aatttgttggctgtgtaagtatcttctgagaagtgtctgttcatatcctttgcccactttttgatggggttatttgttttattattgtaaatttgtttaagtgccttgtaaattctggat

SEQ ID NO: 18925 - DNA, 120 bp, synthetic construct
  source 1..120: mol_type = other DNA
tgtcaatttttgcttttgttgcaattgcttttgacaatttcatcataaaatttttgcccatgcctattctctgaatggtattacctacattttcttctaggatttttatcgttttaggtt

SEQ ID NO: 18926 - DNA, 120 bp, synthetic construct; identical to SEQ ID NO: 5843
  source 1..120: mol_type = other DNA

SEQ ID NO: 18927 - DNA, 120 bp, synthetic construct
  source 1..120: mol_type = other DNA
aaagtagccttttttttttaattctctgaagaatgtcaatggtagtttgatgggaatagcactgaatctataaattactttggacagtatggctattttcacaatattggttcctcgtat

SEQ ID NO: 18928 - DNA, 120 bp, synthetic construct
  source 1..120: mol_type = other DNA
tctctttgtagcaattatgaatgaaggttcattcatgatttggttctctgtttgtctattgttggtgtatagaaatgcttgtgatttttgcacattgattttgtatcctgagactttgct

SEQ ID NO: 18929 - DNA, 120 bp, synthetic construct
  source 1..120: mol_type = other DNA
ttctttctcttgcctgattgccctggccagaacatccaatactatgttgaataggaatggtgaaagaggatttccctgtcttgtgatagttttcaaagggaatgcttccagcttttgcct

SEQ ID NO: 18930 - DNA, 120 bp, synthetic construct
  source 1..120: mol_type = other DNA
ggccttttctgcatctatttagataatcatgtggtttttgtcattggttctgtttatgtgatgaattgcatttattgatttgtgtctgttgaaccagccttcatcccagggatgaagccg

SEQ ID NO: 18931 - DNA, 120 bp, synthetic construct; identical to SEQ ID NO: 5844
  source 1..120: mol_type = other DNA

SEQ ID NO: 18932 - DNA, 120 bp, synthetic construct
  source 1..120: mol_type = other DNA
tcctggtgtagtcttgggagggtgtatgcatccaggaatttattcatttcttctagattttctagtttgtttgcatgagatatttatagtattctctgatggtagtttgtatttttatgg

SEQ ID NO: 18933 - DNA, 120 bp, synthetic construct
  source 1..120: mol_type = other DNA
ctggatttattgatttgctgaagcattttcttgtgtctgtctcttcttcagttcttctccgatcttagttatttcttgttttctgctaaattttggatttatttgcccttgctcctctag

SEQ ID NO: 18934 - DNA, 120 bp, synthetic construct
  source 1..120: mol_type = other DNA
gtttcaagaatggtttagtttctgccttaatttcattatttacctagaagtcagtcaggagcaggttgttcaatttccatgtcattgttggttttgagtgaggttcttaatcctgagttc

SEQ ID NO: 18935 - DNA, 120 bp, synthetic construct; identical to SEQ ID NO: 5845
  source 1..120: mol_type = other DNA

SEQ ID NO: 18936 - DNA, 120 bp, synthetic construct
  source 1..120: mol_type = other DNA
gagcttgcttcatgaatctgggtgctcctgtattgggtgcatatacatttaggatagttagctctccttgttgaagtgacccctttaccattatgttatcccctcctttgtgttttttat

SEQ ID NO: 18937 - DNA, 120 bp, synthetic construct
  source 1..120: mol_type = other DNA
cacatgtcaaggatctcctgaatacagcacactgaggggtcttgactctttatccaatttgccagtctgtgtcttttaattgggtcatttagcccatttacatttaaggttaatattgtt

SEQ ID NO: 18938 - DNA, 120 bp, synthetic construct
  source 1..120: mol_type = other DNA
tggtttttcctttctgccccccatgttcatatatttattcaggagtatttaccacctatgataggccaggaattattctcttcttggccctaaagataaagaggtgaacaggatacataa

SEQ ID NO: 18939 - DNA, 120 bp, synthetic construct; identical to SEQ ID NO: 5846
  source 1..120: mol_type = other DNA

SEQ ID NO: 18940 - DNA, 120 bp, synthetic construct
  source 1..120: mol_type = other DNA
tcaagccatacctggagaagaattatttagggttcctgcaggagatgagttacaaagtaggtagtacttagattttatagacagtggttacaaatatatttagttaaatgaagagtgtgc

SEQ ID NO: 18941 - DNA, 120 bp, synthetic construct
  source 1..120: mol_type = other DNA
caaggcactccactagaacactatgacaacattacacaaaagaggggctgggaagtcaagacttaatcaagggaggcatcagtaggtatgggaagaaaaagaagacggtcctgagagaat

SEQ ID NO: 18942 - DNA, 120 bp, synthetic construct
  source 1..120: mol_type = other DNA
agtctctttatcttttaaattttctctccagtgtctgtatttatttctctcttccaccacttagtcttccttcccatttgtcttgacttcataactgtactttacatggtaataacacat

SEQ ID NO: 18943 - DNA, 120 bp, synthetic construct; identical to SEQ ID NO: 5847
  source 1..120: mol_type = other DNA

SEQ ID NO: 18944 - DNA, 120 bp, synthetic construct
  source 1..120: mol_type = other DNA
agctaccaacagatctggaggtaaaacatcactttactgtgtttacatttcttaatctattggtgatgatgttttattaagaagggcctactaaagaaagaaaggtcaaaagcatggctt

SEQ ID NO: 18945 - DNA, 120 bp, synthetic construct
  source 1..120: mol_type = other DNA
attaaacaaatatctcatgaaagagggaaacagtctttgaatgcaaaattcaggaatggaaaaataaataagaagataatatctaaagagagcaacattgatatctctcatagaactaac

SEQ ID NO: 18946 - DNA, 120 bp, synthetic construct
  source 1..120: mol_type = other DNA
tgtagtataagattattgaacctgtgaggttcaataagtgagtttactatccaaagaggaaattggtggctgccacttgctccctatagttttgacagcttctttgatgtccttattcct

SEQ ID NO: 18947 - DNA, 120 bp, synthetic construct; identical to SEQ ID NO: 5848
  source 1..120: mol_type = other DNA

SEQ ID NO: 18948 - DNA, 120 bp, synthetic construct
  source 1..120: mol_type = other DNA
attgttgccacagaagggcaggcagaatgtcaacactgtatgcaccactgagttaaggaaaccagcagcccagcatgaggctgctaattgattgcatagaaccttgctcagaataactga

SEQ ID NO: 18949 - DNA, 120 bp, synthetic construct
  source 1..120: mol_type = other DNA
aaacaaatgcaaaaagttgaaccacacaccccacataagaaatgctttttttctttgagaggaggtgcaccatcatctgggggacattgctggtggtgtagcagatgtcaataaaggcca

SEQ ID NO: 18950 - DNA, 120 bp, synthetic construct
  source 1..120: mol_type = other DNA
aaaactgcaattcatttaggttggagaatcccaagatgatgaattcagttatagctgtttgattctttctttccatgatgtcgcctggtttcctttcaggaattgggcaaagagaagacc

SEQ ID NO: 18951 - DNA, 120 bp, synthetic construct; identical to SEQ ID NO: 5849
  source 1..120: mol_type = other DNA

SEQ ID NO: 18952 - DNA, 120 bp, synthetic construct
  source 1..120: mol_type = other DNA
aatgcgatttctagaagaatctctggtattcatttgcttctttgaagccatccctgctctcctttttcatacttcaacgttaatataaattttgttttatattcttttccgattaaaatt

SEQ ID NO: 18953 - DNA, 120 bp, synthetic construct
  source 1..120: mol_type = other DNA
attttccatatagaaatgttgaatagaggatcaaaagtacctattttaatctgatttttccttaattttccgtggcaatacattttatgctaaaacatgatctttgagttgtattcaagt

SEQ ID NO: 18954 - DNA, 120 bp, synthetic construct
  source 1..120: mol_type = other DNA
cctgaatttggggttaggttatctgaatttttataaactttccaagagacttatcctaatgaattagaaacctattgctatagatcatcaatctggaaaattcaagagctatttggctgg

SEQ ID NO: 18955 - DNA, 120 bp, synthetic construct; identical to SEQ ID NO: 5850
  source 1..120: mol_type = other DNA

SEQ ID NO: 18956 - DNA, 120 bp, synthetic construct
  source 1..120: mol_type = other DNA
tttaactggttacaaattgttatgacttctatttctgactgttaatggcaatgtgctatgcctgcagtgttttgatggttaaatccaattgtttctaaatacctggtttttatttgaata

SEQ ID NO: 18957 - DNA, 120 bp, synthetic construct
  source 1..120: mol_type = other DNA
gttaataaaaatgtttaataaaattaaaacagttgtagggagaatcccctaatttaaaatgctcagggcctaattcaagtgagaaaaattaatctgcagtttgatgtttgaagcaaatta

SEQ ID NO: 18958 - DNA, 120 bp, synthetic construct
  source 1..120: mol_type = other DNA
tcaagtttgagaggtggcttaattgtgcttttgttgtaattgctgtcttctttcctcgtgaactactgtggatatttttaatgaagggagaggataagttgaaaaaattcacataatata

SEQ ID NO: 18959 - DNA, 120 bp, synthetic construct; identical to SEQ ID NO: 5851
  source 1..120: mol_type = other DNA

SEQ ID NO: 18960 - DNA, 120 bp, synthetic construct
  source 1..120: mol_type = other DNA
aatcagtatctcaaagagatatctgcactcccatggtctttgcagcattattcacagtagccatggaaacaacctaaatcttcaccaatagatgaatgactaaagaaatgttatatatac

SEQ ID NO: 18961 - DNA, 120 bp, synthetic construct
  source 1..120: mol_type = other DNA
tctcccttatatgtggaatctaaaaaggtcaaatctattgaggtagaaaatagaatggtggttaccagagtttgaggtaggagtggacaggggtggactggtcaaagggtacaaagtttc

SEQ ID NO: 18962 - DNA, 120 bp, synthetic construct
  source 1..120: mol_type = other DNA
aatgataagtatgtgaggtggcagatatgttatttagcctgctgtactcattccaaaatatatacatgcattataacatcacgttatatatatactgcagactagagtggtgacaatttg

SEQ ID NO: 18963 - DNA, 120 bp, synthetic construct; identical to SEQ ID NO: 5852
  source 1..120: mol_type = other DNA

SEQ ID NO: 18964 - DNA, 120 bp, synthetic construct
  source 1..120: mol_type = other DNA
ttactcagacttgcagtggtgttattgggttttacatttcactttgtggcctaaacgagtgcactgtgctgatctagattcctggattgaacaagcagatggctgggggtgtcattctct

SEQ ID NO: 18965 - DNA, 120 bp, synthetic construct
  source 1..120: mol_type = other DNA
agtgagaccaatgcagaaggcaggtgatttctgcatttccaactgaggtaccagttaggtaactggttaggaagcaggtgcagcacctggagggcaggcagaagcatggtgtggcatcgc

SEQ ID NO: 18966 - DNA, 120 bp, synthetic construct
  source 1..120: mol_type = other DNA
atgtgcctacaccaccaggggcctgggtttcaagcacaaaactgggtggctgtttgggcagacactgagccagctgcaggagtttttttcataccccagtggcacctggaacatcaacag

SEQ ID NO: 18967 - DNA, 120 bp, synthetic construct; identical to SEQ ID NO: 5853
  source 1..120: mol_type = other DNA

SEQ ID NO: 18968 - DNA, 120 bp, synthetic construct
  source 1..120: mol_type = other DNA
ctgaaagaaaggcagcagtcccagtcaggggcttagagataaaactcccatcttcctgggacagagcacctgggggaaggggcagctgtgggcgcagcttcatcagacttaagcattcct

SEQ ID NO: 18969 - DNA, 120 bp, synthetic construct
  source 1..120: mol_type = other DNA
gactgagagagactccccaacaggggttgacagacacctcatagaggagagtccagctggcactgggcttccctttgggatgaagcttccagaggaagaagcaggcagtaatagttgccg

SEQ ID NO: 18970 - DNA, 120 bp, synthetic construct
  source 1..120: mol_type = other DNA
caataacatcaacatcaacaaaaaggacccccacacaaaatcccatccaaaggtcatcaacctcaaagatcaaaggtagataaatccacgaagatgaggaaaaaccagcacaaaaatgct

SEQ ID NO: 18971 - DNA, 120 bp, synthetic construct; identical to SEQ ID NO: 5854
  source 1..120: mol_type = other DNA

SEQ ID NO: 18972 - DNA, 120 bp, synthetic construct
  source 1..120: mol_type = other DNA
actaaaataaggtgtgaagacaatattagagaaaaaagagggaaaaggaaggaaaaaagtctccaagaaatatgggactatgtgaaaagaccaaacatgtgattgggtggtatacttgaa

SEQ ID NO: 18973 - DNA, 120 bp, synthetic construct
  source 1..120: mol_type = other DNA
agatactcctcgagaagggcaaccccaagacacataatcatcagattatccaaggtcgaaatgaaagaaaaaatgttaaggacagtcagagagaaaggtcaggttacctacaaagggaag

SEQ ID NO: 18974 - DNA, 120 bp, synthetic construct
  source 1..120: mol_type = other DNA
actaagcttcataagtgcaggagaaataaaatcatttacagacaagcaaatgctgagggattatgtcaccaccaggcctgctttacaagagctcctaaaggaagcactaaacagggaaag

SEQ ID NO: 18975 - DNA, 120 bp, synthetic construct; identical to SEQ ID NO: 5855
  source 1..120: mol_type = other DNA

SEQ ID NO: 18976 - DNA, 120 bp, synthetic construct
  source 1..120: mol_type = other DNA
ttaaaccgacagagatcaaaaaagacaaagaaaggcattacacaatggtaaagggatcaatgcaacaagaagagctaactatcctaaatacatatgcacccaataaaggagcacccagat

SEQ ID NO: 18977 - DNA, 120 bp, synthetic construct
  source 1..120: mol_type = other DNA
tattcaggacttgaattcagctctggaccaagcagacctaatagacatctactgaactctccaccccaaatcaacagaatatacattcttctcagcaccacatagcaattattctaaaat

SEQ ID NO: 18978 - DNA, 120 bp, synthetic construct; identical to SEQ ID NO: 5856
  source 1..120: mol_type = other DNA

SEQ ID NO: 18979 - DNA, 120 bp, synthetic construct
  source 1..120: mol_type = other DNA
ttaaaagagctaaagaagcaagagcaaacacattcaaaagctagcagaagacaagaaataactaagatcagagcagaactgaaggagatagagacacgaaaaacccttcaaaacatcagt

SEQ ID NO: 18980 - DNA, 120 bp, synthetic construct
  source 1..120: mol_type = other DNA
accactgatcccacagtaatagaaactaccatgagagaatactataaatatctctatgcaaataaactagaaaatctagaagaaatggataaattcctggacacatacacccttccaagc

SEQ ID NO: 18981 - DNA, 120 bp, synthetic construct
  source 1..120: mol_type = other DNA
acaaaaaatctccaggatctgatggattcatggctgaattctaccagaggtacaaagaggagctggtaccattcgttttgaaactattccaaacaataaaaaagagggactcctctctag

SEQ ID NO: 18982 - DNA, 120 bp, synthetic construct
  source 1..120: mol_type = other DNA
ggcaaaccaaatccagcagcacatcaaaaatcttatccactacaatcaagtcggcttcatacctgggataaaaggctggttcaacatacacaaatcaataaacataatctatcacataaa

SEQ ID NO: 18983 - DNA, 120 bp, synthetic construct; identical to SEQ ID NO: 5857
  source 1..120: mol_type = other DNA

SEQ ID NO: 18984 - DNA, 120 bp, synthetic construct
  source 1..120: mol_type = other DNA
gaaaaccccatcatctcagcccaaaactccttaggctgatgagccacttcagcaaagtctcaggatacaaaatcaatgtgcaaaaattacaagcattcctatacaccaataatagacaag

SEQ ID NO: 18985 - DNA, 120 bp, synthetic construct
  source 1..120: mol_type = other DNA
caaggaaataagagaggacacaaatgaagagaaaaaaattccatggtcatggatacgaagaatcaatactgtgtaaatggccatactgcccaaagtaatttatagattcaatgctattcc

SEQ ID NO: 18986 - DNA, 120 bp, synthetic construct
  source 1..120: mol_type = other DNA
cgggcgcggtggctcacgcctgtaatcccagcactttgggaggccgaggcgggcggatcacgaggtcaggagatcgagaccatcccggctaaaacggtgaaaccccgtctctactaaaaa

SEQ ID NO: 18987 - DNA, 120 bp, synthetic construct; identical to SEQ ID NO: 5858
  source 1..120: mol_type = other DNA

SEQ ID NO: 18988 - DNA, 120 bp, synthetic construct
  source 1..120: mol_type = other DNA
gacaaacctgaaaaaacctgacaaacctgacaaaaacaagcaatggggaaaggattctttgttgaataattggtgctgggaaaattggctagccacatgcagaaaacagaaactggaccc

SEQ ID NO: 18989 - DNA, 120 bp, synthetic construct; identical to SEQ ID NO: 5859
  source 1..120: mol_type = other DNA

SEQ ID NO: 18990 - DNA, 120 bp, synthetic construct
  source 1..120: mol_type = other DNA
aaaagtgggtgatggatatgaacagacacttctcaaaagaagacatttatgtggccaacaaacatatgaaaaaaagctcatcatcatgggtcattatagaaatgcaaatcaaaaccacaa

SEQ ID NO: 18991 - DNA, 120 bp, synthetic construct
  source 1..120: mol_type = other DNA
ttcaaccattgtggaaggcagtgtggcaattacccaaggatctataaccagaaatactatttaacccagcaatcccattactgggtatatacccaaaggattataaatcattctactata

SEQ ID NO: 18992 - DNA, 120 bp, synthetic construct
  source 1..120: mol_type = other DNA
aatactatgcagccataaaaaagaatgagatcatgtcctttgtagggacatggatgaagctgggaaccatcatcctcagcaaactatcacaggaacagaaaaccagacactacatgttct

SEQ ID NO: 18993 - DNA, 120 bp, synthetic construct; identical to SEQ ID NO: 5860
  source 1..120: mol_type = other DNA

SEQ ID NO: 18994 - DNA, 120 bp, synthetic construct
  source 1..120: mol_type = other DNA
tatgtggcctcagaggagaggtatgtactagagatacgaatttgtaacacatcagcatatagaggatagttgaaactactcctatggatgggagagtgtgaagtaggaaaaaagagaaca

SEQ ID NO: 18995 - DNA, 120 bp, synthetic construct
  source 1..120: mol_type = other DNA
agtgctgttattaaaagaactgtttgtgaaaataaggggccccatttttcttgccagaccattcctcatgagaaaagctatcctgcagagaactgccctccaacacaaacataggtcatt

SEQ ID NO: 18996 - DNA, 120 bp, synthetic construct
  source 1..120: mol_type = other DNA
gatctcctgatgcttttgttttgttacccaagtcctctatgttctgtgatcattgccctttacttcaaaacatgcctttcccatgtccctatttgtggggaagctgttgtgataaaacga

SEQ ID NO: 18997 - DNA, 120 bp, synthetic construct; identical to SEQ ID NO: 5861
  source 1..120: mol_type = other DNA

SEQ ID NO: 18998 - DNA, 120 bp, synthetic construct
  source 1..120: mol_type = other DNA
aattaatacgtaactggggacacagtggtcttacattcagtaatggattactactgttggaatataaggcagtatagcaaaattttccaagaaaacaattgtatttcctcccttttttac

SEQ ID NO: 18999 - DNA, 120 bp, synthetic construct
  source 1..120: mol_type = other DNA
gatcaaatagttaacaagtagtgaactaagagtagaaaaaaattcttctatttccaaatctagaacaacatcctgcagctggtactcaaattgtgctacatgggtcattgttgcctctca

SEQ ID NO: 19000 - DNA, 120 bp, synthetic construct
  source 1..120: mol_type = other DNA
gaaccgaaacttgatataatacaaggacaactgagaaaatgttttcagaatttcatatcatagtaaagagctcaagaatggcctctaagaacccacaaggagaggcccccagaaaattca

SEQ ID NO: 19001 - DNA, 120 bp, synthetic construct; identical to SEQ ID NO: 5862
  source 1..120: mol_type = other DNA

SEQ ID NO: 19002 - DNA, 120 bp, synthetic construct
  source 1..120: mol_type = other DNA
ataaaaaatcggcaaaccagcagagggctattctgaatgacataaaaattacccaaaatgaaagaagcttcctgattcacatactcagtaggctgattgtcacccaaagcatgggacaga

SEQ ID NO: 19003 - DNA, 120 bp, synthetic construct
  source 1..120: mol_type = other DNA
agttaagcaattaaaaatacttactcactcacctgtgattggagatattgagcagagattaccattcagactctgagagactgatatggggctgtttttaagaatacaacgaagtaacac

SEQ ID NO: 19004 - DNA, 120 bp, synthetic construct
  source 1..120: mol_type = other DNA
aaatgccctttggattaagaagatccccacatcttatgggaatatttcaagagcctcggagacacacgttggggatcttcaagcacaagtcctgagactcactacttctggttcctgctt

SEQ ID NO: 19005 - DNA, 120 bp, synthetic construct; identical to SEQ ID NO: 5863
  source 1..120: mol_type = other DNA

SEQ ID NO: 19006 - DNA, 120 bp, synthetic construct
  source 1..120: mol_type = other DNA
tacattgcacactacttcgcactgaagaaatattcttcagccaccgaagactgattagtcctccaaatatctattcctttgcatgttatgtgttcttgaagatgtatcaaaaactcacta

SEQ ID NO: 19007 - DNA, 120 bp, synthetic construct
  source 1..120: mol_type = other DNA
cagctaagtatgccactatcacataaaaacagaatttctgaatcctttgacctctaatgattatattgcctgccctttaaaattaagaatttggattaaagaagagttatttctcccaga

SEQ ID NO: 19008 - DNA, 120 bp, synthetic construct
  source 1..120: mol_type = other DNA
gtacacacagcaagagagttatcatctgaagatatctatgagtggttatttcactccaaaaacagacgataataaattttgcattattcatttattgtatctaacattcattaccaataa

SEQ ID NO: 19009 - DNA, 120 bp, synthetic construct; identical to SEQ ID NO: 5864
  source 1..120: mol_type = other DNA

SEQ ID NO: 19010 - DNA, 120 bp, synthetic construct
  source 1..120: mol_type = other DNA
catccatgttgctgcaaaggacattattttattctgtttttatggctgcatagtattccatggtgcatatgtaacacattttctttatccagtctgtcattccacatctttgctattgtg

SEQ ID NO: 19011 - DNA, 120 bp, synthetic construct
  source 1..120: mol_type = other DNA
tgagaaatctccagactgcttttcacagttgctggactaatccacattcccaccaacagcatataagcattcccttttctctgcagctttgatagcatctgttgttttttgactttttaa

SEQ ID NO: 19012 - DNA, 120 bp, synthetic construct
  source 1..120: mol_type = other DNA
gagagtgttttttcatgtcctttgcccatttattaatgggattattggctttctgcttgttgacttgtttaagttccctatagattctggatattaggcctttgtcagatgcattgtttg

SEQ ID NO: 19013 - DNA, 120 bp, synthetic construct; identical to SEQ ID NO: 5865
  source 1..120: mol_type = other DNA

SEQ ID NO: 19014 - DNA, 120 bp, synthetic construct
  source 1..120: mol_type = other DNA
cttataaatctaggagtttggggtgtctttgctttttatgatgtataataagggatttaccaataatgtgtgctctctaacattaaatcagctgtttttttccagtgaataaattgagat

SEQ ID NO: 19015 - DNA, 120 bp, synthetic construct
  source 1..120: mol_type = other DNA
aggtgaaaataggaaaatattattaagagcaaaataatagtagaatcaactcttttatagagatatactcatagaacagagtaggaaaacagggacatcatacactgaaatatttgctct

SEQ ID NO: 19016 - DNA, 120 bp, synthetic construct
  source 1..120: mol_type = other DNA
gtaggaaaacagggacatcatacactgaaatatttgctctgtttgtttctacaaaaaaaggagaaaaaaagttaacaaagtgtgaatttaagataaggcctggagtgctggctcacacct

SEQ ID NO: 19017 - DNA, 120 bp, synthetic construct
  source 1..120: mol_type = other DNA
aaccctgaacagtattgccagctacatatgttgtacctcgatcaggagtgactacattagtgcctgtgatttagattatatcacactaatgttattgatactagaaagtagtcgtgtgta

SEQ ID NO: 19018 - DNA, 120 bp, synthetic construct; identical to SEQ ID NO: 5866
  source 1..120: mol_type = other DNA

SEQ ID NO: 19019 - DNA, 120 bp, synthetic construct
  source 1..120: mol_type = other DNA
acataaaaagagagagatttttttaaagacccacatagaacttgtttaaataaaaaatacaaaatataaagtgaaaaatgcagtgcatggaataaacagtagattaattactgcagaaga

SEQ ID NO: 19020 - DNA, 120 bp, synthetic construct
  source 1..120: mol_type = other DNA
aagtatcaatgacctatgtcataatttcaagcagtctaacatatgtgcaagtggagtactaaagaagtgtttgattaaaaacattgaagaagtaatgactgagtttttccaaatttgata

SEQ ID NO: 19021 - DNA, 120 bp, synthetic construct
  source 1..120: mol_type = other DNA
tcagcaagagaaaaatcaacacagttattacaaaggaataaagataagaatggcagcatgcatcccaccagaaattatgtgagacaggtaatggagcaacagctttaaagcacataaaca

SEQ ID NO: 19022 - DNA, 120 bp, synthetic construct; identical to SEQ ID NO: 5867
  source 1..120: mol_type = other DNA

SEQ ID NO: 19023 - DNA, 120 bp, synthetic construct
  source 1..120: mol_type = other DNA
aacataagtaaaagtaaaatgtgtgacattaaaatcacaaagcatgagcagggagatggaagtacagtatggcatgactctagcaatacatcttaaatggtgtaatattatgtgaagaaa

SEQ ID NO: 19024 - DNA, 120 bp, synthetic construct
  source 1..120: mol_type = other DNA
aaaaaacagtaaatgaaagaagaagcaataacggacaaataggacaaatgaaaggcaaacagttggaggacaaatttaaatttaattctatcaaaaatttagttggaggataaatttaaa

SEQ ID NO: 19025 - DNA, 120 bp, synthetic construct
  source 1..120: mol_type = other DNA
gtattcaacagtaaactaatgcagggacagtaatgtaggtttagcttgattgtggtagtctcttcacaatgtatacatatactaaagcatcatgttgtgaagcctaaatatatgcaattt

SEQ ID NO: 19026 - DNA, 120 bp, synthetic construct; identical to SEQ ID NO: 5868
  source 1..120: mol_type = other DNA

SEQ ID NO: 19027 - DNA, 120 bp, synthetic construct
  source 1..120: mol_type = other DNA
tccttgccaccgaattatcctgacatatgtacttacgcgtttggttatttggggcctccatcacattaaactttatgtttgatgacattatggaatttgttttgcttgctcctgtgtttc

SEQ ID NO: 19028 - DNA, 120 bp, synthetic construct
  source 1..120: mol_type = other DNA
gatatccctcattagtcctagtggtgttgctgccagtctttaaacaacttcctaccaaagattttcttcagagccatcatcacttctttgttcctaagggtgtagattagtggattcagt

SEQ ID NO: 19029 - DNA, 120 bp, synthetic construct
  source 1..120: mol_type = other DNA
gaagcccacaggtccatagaaaagacataccaccataaaatgggaggcacaagtggacagagccttgtggagtattctgcaggacctgttcttaaacagaaggaagccaattacatagaa

SEQ ID NO: 19030 - DNA, 120 bp, synthetic construct; identical to SEQ ID NO: 5869
  source 1..120: mol_type = other DNA

SEQ ID NO: 19031 - DNA, 120 bp, synthetic construct
  source 1..120: mol_type = other DNA
gatacagcctagaaaagatatagccctgcgactgcacacgaggtttacgagcagcttgggcagtgtcactgaagaataagaaatatccagacaagaaaggtttcccagaaaaaaatacat

SEQ ID NO: 19032 - DNA, 120 bp, synthetic construct
  source 1..120: mol_type = other DNA
agaaaatcccaaagaagaaaggctgcagctcctgaacaccagtcaggccaagtagaagaaactcattcattgtagtgacattctccattgctctgggaagcaaatttaacaataacagaa

SEQ ID NO: 19033 - DNA, 120 bp, synthetic construct
  source 1..120: mol_type = other DNA
tatgtacaacaaaattgaggaagactaatatacctgataaattctgagctgttaaaatggcactagactaataaaagcattatattatgaacaaatcagatatagataaagggcatttgt

SEQ ID NO: 19034 - DNA, 120 bp, synthetic construct; identical to SEQ ID NO: 5870
  source 1..120: mol_type = other DNA

SEQ ID NO: 19035 - DNA, 120 bp, synthetic construct
  source 1..120: mol_type = other DNA
aaaacttgaaatagttagaggtcccattagtagaagaacttcgaaaacacccccaatttttcaatccaaaaggggagtacctcccagggagtgagaatttctgtggggcaggggatagaa

SEQ ID NO: 19036 - DNA, 120 bp, synthetic construct
  source 1..120: mol_type = other DNA
aatcaccaccttatcaacagaagagggagcccttgcactgaggaattggaaaggctaactaggatactcctcccacccatgcctactaagattcttctgctaataattggtccacaatat

SEQ ID NO: 19037 - DNA, 120 bp, synthetic construct
  source 1..120: mol_type = other DNA
caatgagaagatttaacaagtttctctctatacctgacagaagaatcagccaaaaagtcagtaaggatataaacatctgaacaacataatttacaaatttgattaacatataaagaacac

SEQ ID NO: 19038 - DNA, 120 bp, synthetic construct
  source 1..120: mol_type = other DNA
taccaaaaggcttcaaaaggtttcaaaaggttgagctattcaaagaatgtcccttgaccacactggaattaaaaaacaataagaaaaatgcatctagaaactcaccaattgcttcatatt

SEQ ID NO: 19039 - DNA, 120 bp, synthetic construct; identical to SEQ ID NO: 5871
  source 1..120: mol_type = other DNA

SEQ ID NO: 19040 - DNA, 120 bp, synthetic construct
  source 1..120: mol_type = other DNA
gttcaataaagaaaagtcaacaaagtcaaaatttagtcatttgaaaagattaatgaaagttatcaactcagtaaaattgttaaaagagagagagaatacaaattttaagctagtatcact

SEQ ID NO: 19041 - DNA, 120 bp, synthetic construct
  source 1..120: mol_type = other DNA
acagtagaagaaagacaatttcaatagtttgatatttatataggaaagtgtagttcttattcaaaatttttccagaaaggaaacaccaagtccagattttactggtgaattctaccaaat

SEQ ID NO: 19042 - DNA, 120 bp, synthetic construct
  source 1..120: mol_type = other DNA
agaggccaggcgcggtggctcacggctgtaatcccagcactttgggaggccgaggagggcggatcacgaggtcaggagatctagaccatcctggctaacatggtgaaacaccgtctctac

SEQ ID NO: 19043 - DNA, 120 bp, synthetic construct; identical to SEQ ID NO: 5872
  source 1..120: mol_type = other DNA

SEQ ID NO: 19044 - DNA, 120 bp, synthetic construct
  source 1..120: mol_type = other DNA
agaaaacaagaaacaccacagatgcagtaaaagcatttgattatatttagcacccactcatgatttaataaaataatccttagcaaactagggatacaagggaaattagtttatttgata

SEQ ID NO: 19045 - DNA, 120 bp, synthetic construct
  source 1..120: mol_type = other DNA
atttctcctatcatcacttttttgaacattgtcctagaggttctagccagtgtcataaagcaagaaaaaaataaataaaatactttagaattagaaaggaaaaaataaaactcattttca

SEQ ID NO: 19046 - DNA, 120 bp, synthetic construct
  source 1..120: mol_type = other DNA
ccacaatcaaatgaaaataaaatgtccaatgatattttcaatagcatcagaaacaataaatgtatagaaataaaactaaacaaaaatatgtaagatctctatcctaaaaactacaaaaca

SEQ ID NO: 19047 - DNA, 120 bp, synthetic construct; identical to SEQ ID NO: 5873
  source 1..120: mol_type = other DNA

SEQ ID NO: 19048 - DNA, 120 bp, synthetic construct
  source 1..120: mol_type = other DNA
accctgagcactcatatactcctccagggagtttaatcagcatagtgattttggaaaacaatctggcagtatcctcaagctaaacatacgcatatatgaataagccagaaattccattcc

SEQ ID NO: 19049 - DNA, 120 bp, synthetic construct
  source 1..120: mol_type = other DNA
aaggagtcaaaatgaactacagctatattaagtaatatggatgaagctgtttcttcatgtgggtgtgttggttatacagatatgtcattttgtgaaaatttattgagactcaggatttat

SEQ ID NO: 19050 - DNA, 120 bp, synthetic construct
  source 1..120: mol_type = other DNA
acctgaagcaataaaagattaccaaatttgactacataggcatcgaaaatgtctgcatgacaaaaatcctacaaataaaagatcaaaacgcatccaggaataaaatcacaaagcaaattg

SEQ ID NO: 19051 - DNA, 120 bp, synthetic construct; identical to SEQ ID NO: 5874
  source 1..120: mol_type = other DNA

SEQ ID NO: 19052 - DNA, 120 bp, synthetic construct
  source 1..120: mol_type = other DNA
ccatctgctcaaggcatgttctgccgctgcccagctcaggtctaagcacccagcaagtttgagatttttcgaaataaaataacttaaaaacagtgattttgacttccggataagatggta

SEQ ID NO: 19053 - DNA, 120 bp, synthetic construct
  source 1..120: mol_type = other DNA
attctcaaatgtgggaaggtgaactgctttgggattccagaactgtaggaaccacacagcagcagggctgtcccttcacccaactaaagaaggcaattagtttatttgacaaaaaatgtt

SEQ ID NO: 19054 - DNA, 120 bp, synthetic construct
  source 1..120: mol_type = other DNA
ccaacaacacagcacttgagtaaggggggcccatcaggaattctactaacccagagaagtactctactcagctcctctctccctgctgtctggcattctcttcccctaaagagagacaac

SEQ ID NO: 19055 - DNA, 120 bp, synthetic construct
  source 1..120: mol_type = other DNA
gagggcaccagcaagaaatattccaatttgacaatcatccagcaagtagcagtctctgtccggcacaagcaggcaatcccgccacaagcaccccgacagggaagcctctttgtcctcata

SEQ ID NO: 19056 - DNA, 120 bp, synthetic construct; identical to SEQ ID NO: 5875
  source 1..120: mol_type = other DNA

SEQ ID NO: 19057 - DNA, 120 bp, synthetic construct
  source 1..120: mol_type = other DNA
aaataaaatctcactgaatgggctcattagttaagtggagatgaccaaggatgaaatcaatgagcatgaggacagatcaacaaaatgtagcctatctgaacaatgggagaaaacagactg

SEQ ID NO: 19058 - DNA, 120 bp, synthetic construct
  source 1..120: mol_type = other DNA
taatagtttaaaacttcccaaatctgttgaaaacataagcatatacaggttgaagaagctgaataaaccccttgcaggattaatctaaagaaatccaagccaagaaacatcataatttga

SEQ ID NO: 19059 - DNA, 120 bp, synthetic construct
  source 1..120: mol_type = other DNA
caatatctctcatgaatatagacaaaatatcctcaatcaattattagaaaatagaatgcaatatgtagaaagaatttacataggccaagtggatttatttcaggtgtacaagactacata

SEQ ID NO: 19060 - DNA, 120 bp, synthetic construct; identical to SEQ ID NO: 5876
  source 1..120: mol_type = other DNA

SEQ ID NO: 19061 - DNA, 120 bp, synthetic construct
  source 1..120: mol_type = other DNA
catatattgaaaagtaataaatacaaatgtacttattttcagatgtcattatctatgtagaaaactccctggattccacataaaaattcctatagctaatacatgagttcagcaaagtga

SEQ ID NO: 19062 - DNA, 120 bp, synthetic construct
  source 1..120: mol_type = other DNA
atctaaaaaaaatgtttaggagttgtatgctaaaaacttcaagcacagatgaaagaaataacaaaagatttacataaagttagagacatattatattcatggattgtaagatttaacata

SEQ ID NO: 19063 - DNA, 120 bp, synthetic construct
  source 1..120: mol_type = other DNA
aggaaattgaatagctaacacaatttggaaaaagaagaataaaagtggaaaaatcaaattactcaatgttaaagcttattatttaactatagttatcaggttttgtatggtattaacaca

SEQ ID NO: 19064 - DNA, 120 bp, synthetic construct
  source 1..120: mol_type = other DNA
tgaatgtgcagagtaactcaatggaagcaagactgtcttttcaacaactagttctgaaataattggacatccataatagaaaagaaaaaacaaactaaattcaaatttcacctcatatac

SEQ ID NO: 19065 - DNA, 120 bp, synthetic construct; identical to SEQ ID NO: 5877
  source 1..120: mol_type = other DNA

SEQ ID NO: 19066 - DNA, 120 bp, synthetic construct
  source 1..120: mol_type = other DNA
cttaatagtattcttaaaagtccaaaaacatgggcaaaaactaggaaaagacatacaaacataaacagaaaatgatatataaatggcaaattaacacaggaaaaggtgttcaaaatcatt

SEQ ID NO: 19067 - DNA, 120 bp, synthetic construct
  source 1..120: mol_type = other DNA
caccaaatgctagggaggatacagaaagactggatcatgaatataaaactggtcaggatataaaatggtacaactgcgctggagagagtatagtcgtttcttacaaaattaaacatacac

SEQ ID NO: 19068 - DNA, 120 bp, synthetic construct
  source 1..120: mol_type = other DNA
taccccaaatgtcctgcaatggagaaatgcttacacaaactgtggtatatccataccatggaatgctacttagcaataaaaagaaaacaacaatttggtaaactctccaggaaattacgc

SEQ ID NO: 19069 - DNA, 120 bp, synthetic construct
  source 1..120: mol_type = other DNA
gttggagaaggagcagaagagaggtgtgtgtggttatgaaaggataccaagaaagatccttgtggtggaggaactattctgtattttgactatgatggcagatacaggaacatgagataa

SEQ ID NO: 19070 - DNA, 120 bp, synthetic construct; identical to SEQ ID NO: 5878
  source 1..120: mol_type = other DNA

SEQ ID NO: 19071 - DNA, 120 bp, synthetic construct
  source 1..120: mol_type = other DNA
gctgggtaattttttcaatagctctcaaagttgaaaattgtgaatcacatactttgtgttataatttacctgtagatattattcaatgtgtggaaatcattattatataccataatattt

SEQ ID NO: 19072 - DNA, 120 bp, synthetic construct
  source 1..120: mol_type = other DNA
atatatacacacacaaagaaaatagccaggtggatagatacggaaaggtgcacaaatcatatatatgcaaatttttacatatgtacctatatacatataaattatatatgttatgaatgc

SEQ ID NO: 19073 - DNA, 120 bp, synthetic construct
  source 1..120: mol_type = other DNA
gataactgttgtagtctctaggaagagaaactggctgtcaaggaaacaaaggcagaagaaatactctttttagtatattttgaattttgtaccatgttcatatattatgtactcaaaaaa

SEQ ID NO: 19074 - DNA, 120 bp, synthetic construct; identical to SEQ ID NO: 5879
  source 1..120: mol_type = other DNA

SEQ ID NO: 19075 - DNA, 120 bp, synthetic construct
  source 1..120: mol_type = other DNA
tgtctcctgggttcaagcaattctcaggcttcaacctcccagatagctgggattacaggtacgcatcaccacactgtgctaatttttgtattttagtagagacaaggttttaccacgttg

SEQ ID NO: 19076 - DNA, 120 bp, synthetic construct
  source 1..120: mol_type = other DNA
tgcatgtctgtctactcattggaatatcagattattagaggtgaaaaaaactgaaagtatcttattcttcatattcttacagttcctataccatgtagaaaaacagaacaatggtgtaga

SEQ ID NO: 19077 - DNA, 120 bp, synthetic construct
  source 1..120: mol_type = other DNA
taatattgaaagaaagacaaatagtaatatctttaagtgactttgaactagtgactttgatatcataactacatgtcttccaagtataaaatttattctggctatatagcttctaagagg

SEQ ID NO: 19078 - DNA, 120 bp, synthetic construct; identical to SEQ ID NO: 5880
  source 1..120: mol_type = other DNA

SEQ ID NO: 19079 - DNA, 120 bp, synthetic construct
  source 1..120: mol_type = other DNA
acatccctcaaattcacgtctctttatccacactgccgcaatcctggcccaagtcatgattgcctttaaacttaactacttcaaagcagccctacagttcttttcttcccctactctcaa

SEQ ID NO: 19080 - DNA, 120 bp, synthetic construct
  source 1..120: mol_type = other DNA
gtggcttatctcttcagtctcaccttttatattacttggatgtgatcctactggatatcttccaattcctcaaatatatcaaggtgtcccttgacagggacttcattcatgcttgtcctc

SEQ ID NO: 19081 - DNA, 120 bp, synthetic construct
  source 1..120: mol_type = other DNA
tcccggttcacgccattctcctgcctcagcctcctgagtagctgggactacaggcgcccaccaccacgcccggctaattttttgtgtttttagtagagacggggtttcaccatgttagcc

SEQ ID NO: 19082 - DNA, 120 bp, synthetic construct; identical to SEQ ID NO: 5881
  source 1..120: mol_type = other DNA

SEQ ID NO: 19083 - DNA, 120 bp, synthetic construct
  source 1..120: mol_type = other DNA
tctctccaataccacaaatcctataatctttatcccctaaattatagttattctatttcatgttctttactactctcatgtactcacactcctccttactcatcttaagttccatatgca

SEQ ID NO: 19084 - DNA, 120 bp, synthetic construct
  source 1..120: mol_type = other DNA
ctgaacacgattggaggaaaatgcacctgtgctcacttgcctagatctaaattcattaatactcaactgcattgaaatcttgggaatgccattgactcagccaccaggcccacccacctg

SEQ ID NO: 19085 - DNA, 120 bp, synthetic construct
  source 1..120: mol_type = other DNA
aaacagtctgtaaagactggaatatatgcctatttcttcagatgcacagacaccaacgcatgaccacaaggatcatgagcaataaaaaaaacccctgaaatcttagagatgccaatcaat

SEQ ID NO: 19086 - DNA, 120 bp, synthetic construct; identical to SEQ ID NO: 5882
  source 1..120: mol_type = other DNA

SEQ ID NO: 19087 - DNA, 120 bp, synthetic construct
  source 1..120: mol_type = other DNA
tgtgttcccctttacaattaaattctgtaaacatttgcctataccagctgtttgcaatcctctttccattccctcctacacctataccaattaaaattttaccctcactcttctaccaaa

SEQ ID NO: 19088 - DNA, 120 bp, synthetic construct
  source 1..120: mol_type = other DNA
taatggtttttagccaataggtacaggtttttccacaattcatttttggcatgacctgctctcaatggcattaataattcttattgattaattagcatcagtaagtagtattgaatattt

SEQ ID NO: 19089 - DNA, 120 bp, synthetic construct
  source 1..120: mol_type = other DNA
tcataaacatagctgaaggacattgtaacggatgcatataattaagggtttgggatgtacgcttgtgaaactacataagtaaatactttatacaacagtttcgaaattattttttcctaa

SEQ ID NO: 19090 - DNA, 120 bp, synthetic construct; identical to SEQ ID NO: 5883
  source 1..120: mol_type = other DNA

SEQ ID NO: 19091 - DNA, 120 bp, synthetic construct
  source 1..120: mol_type = other DNA
atttgaagcttccctcataaatgttttatgtaatgagcccacctgttgcatcctgtaatcttcatagcctatattcaaagaggttcctccgtcactctaacccactcattccagtgatct

SEQ ID NO: 19092 - DNA, 120 bp, synthetic construct
  source 1..120: mol_type = other DNA
caaaagagttatccaaatatcatagatcagatgtatttattgtgtccttgaataaagttatcagagaaagttctgactgctcaaaacctattataaacacccttattgaaaacaacttac

SEQ ID NO: 19093 - DNA, 120 bp, synthetic construct
  source 1..120: mol_type = other DNA
cttattctctttatatttctcttcccctgtgtatcagtttattccttctttgatgtgcttatgagatcactacattgatttaagtaataataataaatttttggcagagcccttcattag

SEQ ID NO: 19094 - DNA, 120 bp, synthetic construct; identical to SEQ ID NO: 5884
  source 1..120: mol_type = other DNA

SEQ ID NO: 19095 - DNA, 120 bp, synthetic construct
  source 1..120: mol_type = other DNA
gtgaataaagaaatggtaaatttcctgagccctatgttaattcatgaacaaccaataaaatcaattttatgatttactagaaatatctccaaagttttaatttcaactatcgctgttact

SEQ ID NO: 19096 - DNA, 120 bp, synthetic construct
  source 1..120: mol_type = other DNA
ttccccttcaaagtcccatacaatggagagttatgctgccaatatggccatgaaagctccttagaggaataaaatgcaaaataaataaaacaaaaactaaacatcctagagaatgattaa

SEQ ID NO: 19097 - DNA, 120 bp, synthetic construct
  source 1..120: mol_type = other DNA
cctgatttctttgtataatttttaaatactgtctggtatctcactgagctgttttagtatcaaaattttgaatactctgcctgggattgttgacatttcttttttattgggatctgttgc

SEQ ID NO: 19098 - DNA, 120 bp, synthetic construct; identical to SEQ ID NO: 5885
  source 1..120: mol_type = other DNA

SEQ ID NO: 19099 - DNA, 120 bp, synthetic construct
  source 1..120: mol_type = other DNA
gcatacactggcaccaatgttagcgggtttaggcaagacagttcttgtgcttccaagtggcttgcttggcttctgggaatggcatcagtagttcaggtatgaagttgaattcttgagccc

SEQ ID NO: 19100 - DNA, 120 bp, synthetic construct
  source 1..120: mol_type = other DNA
atccacaggaggcacatgagtgtggatgtcagctgtggtgccaggggaaggttgagtggggctgacctcagatcccaggaggggtgctgaggagctaccagtgatggactgggctaagtg

SEQ ID NO: 19101 - DNA, 120 bp, synthetic construct
  source 1..120: mol_type = other DNA
gggatccccaggccacagatggaatgctcagataggagtggtagtggctgttttgtggtcatggactggggaggactgggttgcttttcctgggaacaaccataggcaagaaactgggga

SEQ ID NO: 19102 - DNA, 120 bp, synthetic construct; identical to SEQ ID NO: 5886
  source 1..120: mol_type = other DNA

SEQ ID NO: 19103 - DNA, 120 bp, synthetic construct
  source 1..120: mol_type = other DNA
tatctgtggtgaaatgtgggctgctgggagtctccccctttcccttttcccacattggagagccgctcgagactcatatccgatcttggttgaacaggcggtctcatttccttctccttt

SEQ ID NO: 19104 - DNA, 120 bp, synthetic construct
  source 1..120: mol_type = other DNA
agatgtatcaagtcagccatgttggagcctctccagctccattcaaggggcctgttttgagttggccctaggcctttccccgtaagcaaactttctataacattgaaattacttgggaaa

SEQ ID NO: 19105 - DNA, 120 bp, synthetic construct
  source 1..120: mol_type = other DNA
aggttcaagcaattctcctgcctcagcctcctgagtagctgggattacaggcgtacacccccatgcccagctaatttatgtatttttagtagagatggagtttcaccatgctggccaggc

SEQ ID NO: 19106 - DNA, 120 bp, synthetic construct; identical to SEQ ID NO: 5887
  source 1..120: mol_type = other DNA

SEQ ID NO: 19107 - DNA, 120 bp, synthetic construct
  source 1..120: mol_type = other DNA
gaatggttagtcggtctacatagagacaaccagaaccaagactagctgattatctcacaggatatgtaaatataacctctagaagactagagtcctaaatgacaaatataaaactctaaa

SEQ ID NO: 19108 - DNA, 120 bp, synthetic construct
  source 1..120: mol_type = other DNA
aagagccttattttgaatcctagtttcacaatccattgcaaggaaaaggaaactttacttaaatcctttgagccttggttttcttgtagtaaaggaataattttaatacttttacattgg

SEQ ID NO: 19109 - DNA, 120 bp, synthetic construct
  source 1..120: mol_type = other DNA
attatttgtatgtggaatggctcatacctataatcccaaaattttggggggatgatattggtggattgcttgagaccaggaattagaggctgcagtgagttatgattgcatcactgcact

SEQ ID NO: 19110 - DNA, 120 bp, synthetic construct; identical to SEQ ID NO: 5888
  source 1..120: mol_type = other DNA

SEQ ID NO: 19111 - DNA, 120 bp, synthetic construct
  source 1..120: mol_type = other DNA
gagaaaaatgtgagcttttggaccccaaaattaattatttaaaataatttagtattattagcaacagtgaagagtaagatgtagaaggtacaaaagtaatactatttctctttatgtctc

SEQ ID NO: 19112 - DNA, 120 bp, synthetic construct
  source 1..120: mol_type = other DNA
atatttattaatttttattgccaattttctttcactttatataccaaaatattttccaagggagccctcaagaagagaaagtgaatctgaacctctaccataggaaatgaaaggaaattt

SEQ ID NO: 19113 - DNA, 120 bp, synthetic construct
  source 1..120: mol_type = other DNA
tgaaaactgtcttgtccatggttatgaaaccaaggaacaaacatattaagaaaaaaagataagaagaacgacaacaacagaaaagtggaattctacagagaaattccatatggctatccc

SEQ ID NO: 19114 - DNA, 120 bp, synthetic construct
  source 1..120: mol_type = other DNA
gtttttatgtctagagatctgcagctcattggaaggcaggcagattttcagagaggaaaagatttttgaagataatttatgctgcaatcccaacatcaaccatcacttcaaatatttttc

SEQ ID NO: 19115 - DNA, 120 bp, synthetic construct; identical to SEQ ID NO: 5889
  source 1..120: mol_type = other DNA

SEQ ID NO: 19116 - DNA, 120 bp, synthetic construct
  source 1..120: mol_type = other DNA
gcctggctctctagatattcgctaaagcaaatctgaaatccctaaatattgaaattgcagtgaaagaaatattttcgtacagagaagttggctaaacaacattctttaaacgttaggaaa

SEQ ID NO: 19117 - DNA, 120 bp, synthetic construct
  source 1..120: mol_type = other DNA
aaagacatggtaaaagttttgaaaaatatgcaacatacatggctatcaaataaagctactttaaattgtttggaggcagtccttcatggaggtgtggtaaaggttagataatctctcaaa

SEQ ID NO: 19118 - DNA, 120 bp, synthetic construct
  source 1..120: mol_type = other DNA
cctcgaattattccccatttataggaaacactctaatgtctgcatctttcttctgatttcctattggttcttattcttttctaagtgcctgccatttctatggatttcccacacattctt

SEQ ID NO: 19119 - DNA, 120 bp, synthetic construct; identical to SEQ ID NO: 5890
  source 1..120: mol_type = other DNA

SEQ ID NO: 19120 - DNA, 120 bp, synthetic construct
  source 1..120: mol_type = other DNA
gaaaacacattttacaaatgaaaaaggctagaaatgtgtggcaactttggagagaactggtatgaagccaacagacctctgggttgatggaggagaacctgactgtcagtgtcacattga

SEQ ID NO: 19121 - DNA, 120 bp, synthetic construct
  source 1..120: mol_type = other DNA
aactttcagtggtctaaattcttagatactttagaagaagacactattgggtaaaatgaaggaagaattgttgagtctattggaagagtttttcttattcagagattcaggggtgtgaaa

SEQ ID NO: 19122 - DNA, 120 bp, synthetic construct
  source 1..120: mol_type = other DNA
atctgatatagcagtgataaaacttcaaatatacctcaggctaatatttgattgatgtattattttttcctttcccagtagagctccatgacattgccagagatgtgggttagaaagaga

SEQ ID NO: 19123 - DNA, 120 bp, synthetic construct
  source 1..120: mol_type = other DNA
tatcttcctctctttttttttttttttttttttttttgagacggagtctcgctctgtcgcccaggctggagtgcagtggcgggatctcggctcactgcaagctccgcctcccgggttcac

SEQ ID NO: 19124 - DNA, 120 bp, synthetic construct; identical to SEQ ID NO: 5891
  source 1..120: mol_type = other DNA

SEQ ID NO: 19125 - DNA, 120 bp, synthetic construct
  source 1..120: mol_type = other DNA
ctccttccaagtatctttggcttggtgagaaaattctgagccggaaggattctgattgcgattagtgttccatagattattttgtcttttgtctgaagtgatgctgaatacaacctcagt

SEQ ID NO: 19126 - DNA, 120 bp, synthetic construct
  source 1..120: mol_type = other DNA
catctccgatcctagactccattcccttatgtatttcttcctgggaaacctgtcctacctggatatctgttactctacggtgacactgccaaaaatgctgcagaactttctctctacaca

SEQ ID NO: 19127 - DNA, 120 bp, synthetic construct
  source 1..120: mol_type = other DNA
acttcgctacactgtcatcatgaaccctcagctctgtacccagatggccatcacaatctgggtcattggttttttccatgccctgctgcactccgtaatgacttctcgcttgaacttctg

SEQ ID NO: 19128 - DNA, 120 bp, synthetic construct; identical to SEQ ID NO: 5892
  source 1..120: mol_type = other DNA

SEQ ID NO: 19129 - DNA, 120 bp, synthetic construct
  source 1..120: mol_type = other DNA
gatctatactttgaggaacaaggaagtgaagggggccttgggtagagtgatcagaaggctttgatttgaataaaccagagaactctactgaggcataaataaccagcaatgaaaaagtag

SEQ ID NO: 19130 - DNA, 120 bp, synthetic construct
  source 1..120: mol_type = other DNA
ctagttgtagtaaacaatacatttctaagtaatatgaggaatacttgaaaatgcaagacactagccatggaaccctaatgctgaaaattttttggaatatcagttgatgtaattgactta

SEQ ID NO: 19131 - DNA, 120 bp, synthetic construct
  source 1..120: mol_type = other DNA
tatttaggactgtttgtctgtgagatccttttagtttaacacattttagtctgatcaataaaattattatgcttttttattttaaggattgtcatgtagggctatgtttattcaattgga

SEQ ID NO: 19132 - DNA, 120 bp, synthetic construct; identical to SEQ ID NO: 5893
  source 1..120: mol_type = other DNA

SEQ ID NO: 19133 - DNA, 120 bp, synthetic construct
  source 1..120: mol_type = other DNA
tttaacatgcatggtatatgccactttgttcatgtattatatttgatagatcagtctcctatcattggacatctatgttatttccaatcatatgttgcagtgtataatcttgtgtacacg

SEQ ID NO: 19134 - DNA, 120 bp, synthetic construct
  source 1..120: mol_type = other DNA
aattcagatagatactgccaaattgccctccccagaggttataaaaaatttcatcaccacttgcaatgtaaaagtgtttagattttacactacattgaatatgaataatgccaatgactt

SEQ ID NO: 19135 - DNA, 120 bp, synthetic construct
  source 1..120: mol_type = other DNA
gttttcagactatttgaagcccaagcaagatggcaactgggagaaaggaaaagctaagattacagcaattcttgtcattgttagctggcacacaggcaacatgaagtgttttcccctact

SEQ ID NO: 19136 - DNA, 120 bp, synthetic construct; identical to SEQ ID NO: 5894
  source 1..120: mol_type = other DNA

SEQ ID NO: 19137 - DNA, 120 bp, synthetic construct
  source 1..120: mol_type = other DNA
tggtccagagaggctaataagtaattaaattgaatgacattgcaaccactaattaagagataaaacaaccaattgttcagctaagagttctggtacctatatcttcagagatgttttaga

SEQ ID NO: 19138 - DNA, 120 bp, synthetic construct
  source 1..120: mol_type = other DNA
acacctcaagaatcactttgtatctcattagagtgttataaccactcgtatctctccacccttggtcatgaaagatgatgactttaaacactctattattttggtttcgttttcctttat

SEQ ID NO: 19139 - DNA, 120 bp, synthetic construct
  source 1..120: mol_type = other DNA
aatgaaatcataactgtggaagtatttctggagctaatagacaagaataggtatgatgtttcttagtttctaagtacttagaaatggattctggctctgaaaagatgtggtatgccaaca

SEQ ID NO: 19140 - DNA, 120 bp, synthetic construct; identical to SEQ ID NO: 5895
  source 1..120: mol_type = other DNA

SEQ ID NO: 19141 - DNA, 120 bp, synthetic construct
  source 1..120: mol_type = other DNA
gctgcataacaaatagtagcctaaatctaaatggcttaatttatttaatcaaatcccaggattctgtgggtcagaaattggggagggcacagcaggaaagggttgactatgctcagtgat

SEQ ID NO: 19142 - DNA, 120 bp, synthetic construct
  source 1..120: mol_type = other DNA
gtgcttctttaacagggaagcctcgggacagactttttcatgggggacagcaaaccaagacaaaaattgttagttgtctcaaagacaaaaaccaagaaccagcattaacataacttctat

SEQ ID NO: 19143 - DNA, 120 bp, synthetic construct
  source 1..120: mol_type = other DNA
aattcatgttgttcccatatgcaaggtacacttactcctcttcctaataatcttaaaatctcatccctttatagcatcagctcaaagtctaggtttttaaaatccaaatcatgacaaagt

SEQ ID NO: 19144 - DNA, 120 bp, synthetic construct; identical to SEQ ID NO: 5896
  source 1..120: mol_type = other DNA

SEQ ID NO: 19145 - DNA, 120 bp, synthetic construct
  source 1..120: mol_type = other DNA
gtacagtgggacggtgcaatctcggctcactgcaacctccacctcccaggttcaagtgattctctcaactgagcctcctaagtagttgggattacaggcatgtgccaccatgcccggcta

SEQ ID NO: 19146 - DNA, 120 bp, synthetic construct
  source 1..120: mol_type = other DNA
tcactgtgcctggcccaccaataatattccttttaaaatattttaggttcttaggattcttatttgggtttagtcaattagataagtaccacactcatacatctccttaggacaggcctt

SEQ ID NO: 19147 - DNA, 120 bp, synthetic construct
  source 1..120: mol_type = other DNA
atactgttttatttactgtacctttgcaacatcttgggaagtcaagaagagtgataccatctgctttgctattctttctgaagatcacttgggctatttgaggtctttcttgaatagttt

SEQ ID NO: 19148 - DNA, 120 bp, synthetic construct; identical to SEQ ID NO: 5897
  source 1..120: mol_type = other DNA

SEQ ID NO: 19149 - DNA, 120 bp, synthetic construct
  source 1..120: mol_type = other DNA
ccatttaattaaaatagtatagtactgagataaagacagacatacaagccaatagaacagaatggagagtccagaaataaatgcacatatatatagtaaactgatcttggacaagattgc

SEQ ID NO: 19150 - DNA, 120 bp, synthetic construct
  source 1..120: mol_type = other DNA
cctatctcatactatatacaaaatcaactcaaaatggattaaagatttaaatgtaaaactcctagaagaaaaagaataaggagataacttcttgatgttggtcttgacaatgattttcta

SEQ ID NO: 19151 - DNA, 120 bp, synthetic construct
  source 1..120: mol_type = other DNA
aacagagtgaaaagtcatcctatgaagcgggagaaaatatttcaaaccatctatctgataggggttaatatctaaaatacataataatcttctcaactcaataatatatacacacacaca

SEQ ID NO: 19152 - DNA, 120 bp, synthetic construct
  source 1..120: mol_type = other DNA
gtactcaataccactaaccatcagaaaaaggcaaccatagtcagatatcacttaacatattttaggatggttattataaaaaaaaaaagtgttggtgtgaatgtggagaaactggatccc

SEQ ID NO: 19153 - DNA, 120 bp, synthetic construct; identical to SEQ ID NO: 5898
  source 1..120: mol_type = other DNA

SEQ ID NO: 19154 - DNA, 120 bp, synthetic construct
  source 1..120: mol_type = other DNA
tgttgcatggccatgcttaagtcaacctcatagaaatacaaaatagaatggtgattgtaaaggaatgtgtagagggggagatggggaattgtttatcagtgggtatggtataaagttcct

SEQ ID NO: 19155 - DNA, 120 bp, synthetic construct
  source 1..120: mol_type = other DNA
aatatgttaacaagactatagatctcatgataagtgcttttacagaaacaaaaacaacacaaaagagcatgaggacatttttggaggtggtggatatgcttactaccctggttgtggtga

SEQ ID NO: 19156 - DNA, 120 bp, synthetic construct
  source 1..120: mol_type = other DNA
caataaagctaaaataagatttctggaaacatttttgcctctagctggaaatgttgacaaggcatgtccataagactcgtagtgacctctgtgtctaacatagagggcttaagaggcctg

SEQ ID NO: 19157 - DNA, 120 bp, synthetic construct
  source 1..120: mol_type = other DNA
tgggatctttacctaaaaaccatacttcactaacagcaccttggaatatgatctttgccctgaagccatttcttactttgagaaacttctaccatctagactatttagcactaatataca

SEQ ID NO: 19158 - DNA, 120 bp, synthetic construct; identical to SEQ ID NO: 5899
  source 1..120: mol_type = other DNA

SEQ ID NO: 19159 - DNA, 120 bp, synthetic construct
  source 1..120: mol_type = other DNA
ttcttcctagtaagcaccttagcaacatctgggttcaatagatatcctttctatcttctttgttactgtggatagtacatgtctactgtactacatattactatagatagtggatgtctc

SEQ ID NO: 19160 - DNA, 120 bp, synthetic construct
  source 1..120: mol_type = other DNA
ccagcaggagtaccatgggattgaattttgagtgtgcatgatcaagggactagaacactaaactggataaatgagaatatattaactaggggacattgagttcttagacacggaatctgg

SEQ ID NO: 19161 - DNA, 120 bp, synthetic construct
  source 1..120: mol_type = other DNA
actcaggaaagtgggggtattggaagaatatactatatgtaggtcagaaaagccaccagaatattatgttccacaagagtactcagaggagacacaccattcacaattcagaatgctctg

SEQ ID NO: 19162 - DNA, 120 bp, synthetic construct; identical to SEQ ID NO: 5900
  source 1..120: mol_type = other DNA

SEQ ID NO: 19163 - DNA, 120 bp, synthetic construct
  source 1..120: mol_type = other DNA
gcctaatttcctgctcagttcacagacgcaagctaatatttaggtgcataacttattacctgaacatttagtcatgtcctccagaaagaagtgaacttcaacattgtggtaagcatttac

SEQ ID NO: 19164 - DNA, 120 bp, synthetic construct
  source 1..120: mol_type = other DNA
actccaagagccaaagcatcaccatggcccaaatgttacaatgagcatacagaagccagattacgaatggagtcatgttaaagtttagcttacagtacgtcacccagtactgtaggcaca

SEQ ID NO: 19165 - DNA, 120 bp, synthetic construct
  source 1..120: mol_type = other DNA
aactggaagctttgaaactgccccatctggcaaggatattaaactaacaacaatatcacatcctgggaaggatagccaagattagtgcccccttaaatatctaaagactgaaagatcact

SEQ ID NO: 19166 - DNA, 120 bp, synthetic construct; identical to SEQ ID NO: 5901
  source 1..120: mol_type = other DNA

SEQ ID NO: 19167 - DNA, 120 bp, synthetic construct
  source 1..120: mol_type = other DNA
aggcatggttcacttggcatccatgtgtctagactagctaccacattgacttgagactcattttgatagtcccgtctgaagattaatgtatttgtttttacctagcaaaaacatacatgg

SEQ ID NO: 19168 - DNA, 120 bp, synthetic construct
  source 1..120: mol_type = other DNA
atttgcccaaagtttttccgacagtgattagcaatgatagatgtaagcccaagcagaatggctacagtcattttcttgaaaattacactgtgctttctcagctgttacatctttaaatac

SEQ ID NO: 19169 - DNA, 120 bp, synthetic construct; identical to SEQ ID NO: 5902
  source 1..120: mol_type = other DNA

SEQ ID NO: 19170 - DNA, 120 bp, synthetic construct
  source 1..120: mol_type = other DNA
taagctgataagcaacttcagcaaagtctcaggatacaaaatcaatttgcaaaaatcgcaagcattcctatacaccaacaacagacaaacagagagccacatcatgagtgaacgctcatt

SEQ ID NO: 19171 - DNA, 120 bp, synthetic construct
  source 1..120: mol_type = other DNA
gaaaaacattccatgctcatgcataggaataatcaatatcgtgaaaatggccacactgcccaaagtaatttatagattcaatgctatccccatcaagctaccattgactttcttcacaga

SEQ ID NO: 19172 - DNA, 120 bp, synthetic construct
  source 1..120: mol_type = other DNA
caaggctacagtaaccaaaacagcatgatactggtaccaaaacagatatatagaccaacggaacagaacagaggcctcagaaataacaccacacatctacaaccaactgatctttgacaa

SEQ ID NO: 19173 - DNA, 120 bp, synthetic construct
  source 1..120: mol_type = other DNA
taactcaagatggattaaagacttaaacataagacctaaaaccatagaaaccctagaagaaaacctaggcaataccattcaggtcataggcttgggcaaagacttcatgactaaaacacc

SEQ ID NO: 19174 - DNA, 120 bp, synthetic construct; identical to SEQ ID NO: 5903
  source 1..120: mol_type = other DNA

SEQ ID NO: 19175 - DNA, 120 bp, synthetic construct
  source 1..120: mol_type = other DNA
gatcattaaaaagtcaggaaacaacagatgctggaaaggacatggagaaataggaacacttttacactgttggtgggagcgtaaattagttcaaccattgtggaaaacagtgtggcgatt

SEQ ID NO: 19176 - DNA, 120 bp, synthetic construct
  source 1..120: mol_type = other DNA
tgttcacaatagcattgacttggaacctacccaaatgcccatcaatgataaactggataaagaaaatatggcacgtatacaccatggaatactatgcagccataaaaagggatgagttca

SEQ ID NO: 19177 - DNA, 120 bp, synthetic construct
  source 1..120: mol_type = other DNA
gaacacatgcacacagggaggggaacatcacaccccagggcctgtcagggggtgggagggtagggaaggggtagcattaggagaaatacctaatgtagatgacgggttgatgggtgcagc

SEQ ID NO: 19178 - DNA, 120 bp, synthetic construct; identical to SEQ ID NO: 5904
  source 1..120: mol_type = other DNA

SEQ ID NO: 19179 - DNA, 120 bp, synthetic construct
  source 1..120: mol_type = other DNA
ttgaaagagcacaatacagtgatcactagaactaaggagcctcagtttgagtcctggtttcacaatatatcacaagaagaaaaatttacttaaatcctttgagcctcagttttcttgtga

SEQ ID NO: 19180 - DNA, 120 bp, synthetic construct
  source 1..120: mol_type = other DNA
catttgtattatattcacagtgtataaaataacaagaagttgagggctggccaagatggccaacgagaagcacctattgtgcaccgctgtcacagagcaaaatagaagaggcaagtaaat

SEQ ID NO: 19181 - DNA, 120 bp, synthetic construct
  source 1..120: mol_type = other DNA
gggtagcctcccctgcccagagaagtggtgagtgagtgagcgaccttgggaacccatacttttcccacagaactttgcaaccctcaggtcaggagatccctcatgaactcactccaccag

SEQ ID NO: 19182 - DNA, 120 bp, synthetic construct; identical to SEQ ID NO: 5905
  source 1..120: mol_type = other DNA

SEQ ID NO: 19183 - DNA, 120 bp, synthetic construct
  source 1..120: mol_type = other DNA
caggctctggggaatctgaggtgactagggactggagtggtaccccagcacaacatagcagctctacaaagagatggccagaccactttttcatgtgggtctcagatcccatttctgttt

SEQ ID NO: 19184 - DNA, 120 bp, synthetic construct
  source 1..120: mol_type = other DNA
gcagagctcccagaggaggggtaggcctccatctttactgttttgcaggcttagccattgtcacttttgggctttggagagctggaagcaactgggggctggagtagaccccaaagacag

SEQ ID NO: 19185 - DNA, 120 bp, synthetic construct
  source 1..120: mol_type = other DNA
gtaacaggtccattccttcctggagcagagctcccagagggaggcgcaggccgccatctttgctgtttgacaaacttcactgttgataccatcaggtactggaaaatctgaagtgactag

SEQ ID NO: 19186 - DNA, 120 bp, synthetic construct; identical to SEQ ID NO: 5906
  source 1..120: mol_type = other DNA

SEQ ID NO: 19187 - DNA, 120 bp, synthetic construct
  source 1..120: mol_type = other DNA
ctgggcaaggccacatgacctgggactccagcacaatcacccagctgccacctgaccacttcaatcagaggcagttctgcagttaaaggaacactcacacacagagatgagaaaaaaaaa

SEQ ID NO: 19188 - DNA, 120 bp, synthetic construct
  source 1..120: mol_type = other DNA
atatggataggaatgaagataattgagattcaggagaatggcaaaacccaatcccaggaagctaagaatcacaataaaacgatacaagaggtgacagacaaaacagccagtataaaaaca

SEQ ID NO: 19189 - DNA, 120 bp, synthetic construct
  source 1..120: mol_type = other DNA
ctgaaataagagagtcagacaaaaataaagaataaaaggaaaaggaatgaacaaaacctctgtgaaatatgagattatgtaaagaggccaaatctacaaatcactggtatccctgcaaga

SEQ ID NO: 19190 - DNA, 120 bp, synthetic construct; identical to SEQ ID NO: 5907
  source 1..120: mol_type = other DNA

SEQ ID NO: 19191 - DNA, 120 bp, synthetic construct
  source 1..120: mol_type = other DNA
agctttctctgtgaaggagaaataagatcttttcagacaagtaaacattgagggattgtattactagacccaccttacaagagatcttgaaaggagtactaaatatgaaaagaaaacacc

SEQ ID NO: 19192 - DNA, 120 bp, synthetic construct
  source 1..120: mol_type = other DNA
tatcaatacaaacattgaaagtaaacaggctaaatgtcccaattagaaggcacagagtggcaagctgggtaaagaagcaaaatccaattgtatgctgtcttcaggaaacccatctcacat

SEQ ID NO: 19193 - DNA, 120 bp, synthetic construct
  source 1..120: mol_type = other DNA
aaacgaaaaaagacaaggaagggcattatctaatgataaaggattcaattcaacaggaagatctagatatcctaaatatatatgcacccacagcaggagaatccagattcataaagcaag

SEQ ID NO: 19194 - DNA, 120 bp, synthetic construct; identical to SEQ ID NO: 5908
  source 1..120: mol_type = other DNA

SEQ ID NO: 19195 - DNA, 120 bp, synthetic construct
  source 1..120: mol_type = other DNA
tgcaattacatggaaattaaacaacttactctttaatgaatttgaggtaagtactgaaattagtgcagaaatcaaaatgttctttgaaactattgagaatgaagatacaacataccagaa

SEQ ID NO: 19196 - DNA, 120 bp, synthetic construct
  source 1..120: mol_type = other DNA
agaagacaaaaccaacccaaaagctagcagaagacaagaaataaccaaaattagagctgatctgaaagaaattgagatgagaaaaaccatacaaaagataaacgaatccaggagtttgtt

SEQ ID NO: 19197 - DNA, 120 bp, synthetic construct
  source 1..120: mol_type = other DNA
tcagaaatgacaaatgggatgctaccattgaccccacaacaatacaaataatcatcagagacatgatgaatcatgaacacatatgcacatgaactagaaaacctcgatgagatggataaa

SEQ ID NO: 19198 - DNA, 120 bp, synthetic construct; identical to SEQ ID NO: 5909
  source 1..120: mol_type = other DNA

SEQ ID NO: 19199 - DNA, 120 bp, synthetic construct
  source 1..120: mol_type = other DNA
ttcatcacataaacagaactaaaaacaaaactcacatgattatctcaatagataacagaagaggcttccaattaagttcaacattgcttcatattaaaaattctcaataaactaggtatt

SEQ ID NO: 19200 - DNA, 120 bp, synthetic construct
  source 1..120: mol_type = other DNA
tctcagcactcctattcaacatagcattggaagtcctggctagagcaattaggcaagagaaagaaataatgggcattataggaagagagtaagtaaaactattcctgtttgcagatgaca

SEQ ID NO: 19201 - DNA, 120 bp, synthetic construct
  source 1..120: mol_type = other DNA
gcaacaacagtcaagctgagagacaaatcaggaacacaatcccattcacaattgccaaagaaagaatataataccaagaaatgcagctaacaaggcaggtgaaaggtctctacaataaga

SEQ ID NO: 19202 - DNA, 120 bp, synthetic construct; identical to SEQ ID NO: 5910
  source 1..120: mol_type = other DNA

SEQ ID NO: 19203 - DNA, 120 bp, synthetic construct
  source 1..120: mol_type = other DNA
accagggtattctttcaggaaagtcccaaaaatgggaaagtaaatccatatctctgtcctaggaaataaaaagaaatttgactaagaaaacatattaagccattgagacctgtgttggcc

SEQ ID NO: 19204 - DNA, 120 bp, synthetic construct
  source 1..120: mol_type = other DNA
aggcatcctgctaattcctaaaatctttctcaacaccaggggacactctccctttggatttctatgtctagagacctgtggctcattaaaaggcagactgatttttcagaaagagagaaa

SEQ ID NO: 19205 - DNA, 120 bp, synthetic construct
  source 1..120: mol_type = other DNA
acactcaatcaggtaagagaatgaactaggagacaggctgtgaagttacacataatctcaatatgttaatgaatgatctatctacttgctagtattaaacacccagtatctagatctcat

SEQ ID NO: 19206 - DNA, 120 bp, synthetic construct; identical to SEQ ID NO: 5911
  source 1..120: mol_type = other DNA

SEQ ID NO: 19207 - DNA, 120 bp, synthetic construct
  source 1..120: mol_type = other DNA
ttgtgaattatttgaaggcagtccttcatggaggtatagtaaaagttagattgtttttcaaaacttcttcccagctatgaagccaaaaaacccatgggctctctagaagtgttcccttgt

SEQ ID NO: 19208 - DNA, 120 bp, synthetic construct
  source 1..120: mol_type = other DNA
ttctttacagttctactagctctctcagtgcctctcacttctgtaagttccccacacatcctgacttcttccctcccaatatacaagagctaatccattacagcctaatgaaaagaacaa

SEQ ID NO: 19209 - DNA, 120 bp, synthetic construct
  source 1..120: mol_type = other DNA
gagaaaaaatttttctagaaaatgtaatggatctagaagagaagaaggtgaatttcacttgaggtagaatattccttaatatctgatgagtgagtttatttcaggcaaaataaaaacaga

SEQ ID NO: 19210 - DNA, 120 bp, synthetic construct; identical to SEQ ID NO: 5912
  source 1..120: mol_type = other DNA

SEQ ID NO: 19211 - DNA, 120 bp, synthetic construct
  source 1..120: mol_type = other DNA
tgtgattaatgtggtcatgtttcttaccccagtaggtcactgcgacatttcagggatgtgggtcaggaagagatcagtaagagaatatctctaattcatttacattctaaaatgaggaaa

SEQ ID NO: 19212 - DNA, 120 bp, synthetic construct
  source 1..120: mol_type = other DNA
aacatcctactggtggtttcttactaggccaagagatagctatgtggtatgcttaaaaattgccccctgtgagagctgcttgggaagatgaaaggaaagctgtgaccgaatgaagatatt

SEQ ID NO: 19213 - DNA, 120 bp, synthetic construct
  source 1..120: mol_type = other DNA
attcaagaccagcctggcatacacggtgaaaccccatctctattaaaaatacaaaaattagccaggtgtggtggtggactcctgtaatcccagttacttgggaagctgaggcgagagact

SEQ ID NO: 19214 - DNA, 120 bp, synthetic construct
  source 1..120: mol_type = other DNA
tcaaaaaaaaagaatgaaaatattcacagccagagaagactgtaggctagcaacgttttctgattcctgggagaaagaaatatattaatgaaaaacataataaaaaaatagttgtgtcag

SEQ ID NO: 19215 - DNA, 120 bp, synthetic construct; identical to SEQ ID NO: 5913
  source 1..120: mol_type = other DNA

SEQ ID NO: 19216 - DNA, 120 bp, synthetic construct
  source 1..120: mol_type = other DNA
attcccctatgtatttcttcttgggaaacctgtcctgcctggacatctgctactccagcgtaacactgccaaaaatgctgcagaacttcctctctgcacacaaagcaatttctttcttgg

SEQ ID NO: 19217 - DNA, 120 bp, synthetic construct
  source 1..120: mol_type = other DNA
tgaaccctcagctctgtacccagatggccatcacaatctggatgattggttttttccatgccctgctgcactccctaatgacctctcgcttgaacttctgtggttctaaccgtatctatc

SEQ ID NO: 19218 - DNA, 120 bp, synthetic construct
  source 1..120: mol_type = other DNA
tatcacccatctcttcttcaagactcattcttttagcatgctccgcaaagcactgtccacttgtgcctcccacttgatggtagttattcttttgtatgcacctgttctcttcacctatat

SEQ ID NO: 19219 - DNA, 120 bp, synthetic construct; identical to SEQ ID NO: 5914
  source 1..120: mol_type = other DNA

SEQ ID NO: 19220 - DNA, 120 bp, synthetic construct
  source 1..120: mol_type = other DNA
gattatataagggacatttgaatgaatgggatactagccatggaactctactgctgactatgttttgaagatatcagttgataaaattgatgttaggttttttatatgttcttatgatga

SEQ ID NO: 19221 - DNA, 120 bp, synthetic construct
  source 1..120: mol_type = other DNA
atgctttgatattttgaggattttactttagggccatagttactcaactggaaaagaatatgctaactgacgtatgagttaaggagaatttttaaggggtgggtcttgatttcttattct

SEQ ID NO: 19222 - DNA, 120 bp, synthetic construct
  source 1..120: mol_type = other DNA
tctaaatagttttggcacctctgtctccagatatctcttattagtcaactgtccacaccctcaatgattacttaaaatattaaaaatcggagataatttaacaaagctcttaagactctt

SEQ ID NO: 19223 - DNA, 120 bp, synthetic construct
  source 1..120: mol_type = other DNA
tcttacttggcaccaaactcatactaagcaaaggcatagaagtcataattattgaagtatttctagacatgaactgctatgttcctcactttttaagttcctataaatggcttctgtccc

SEQ ID NO: 19224 - DNA, 120 bp, synthetic construct; identical to SEQ ID NO: 5915
  source 1..120: mol_type = other DNA

SEQ ID NO: 19225 - DNA, 120 bp, synthetic construct
  source 1..120: mol_type = other DNA
tttctggtggtgagaatctgccacataattcaaacttcagagagtttgtgaactgtagaagagcacatggggttctggttaactattagtgcataacacattaggaccccaaaattcaat

SEQ ID NO: 19226 - DNA, 120 bp, synthetic construct
  source 1..120: mol_type = other DNA
taatgtctctgacctttgctggaatgacttcagtctggtcacggaatagctgagagctgagtaagtctctctctctatttctttttctcctcccttaattgctccttgtgactatcatat

SEQ ID NO: 19227 - DNA, 120 bp, synthetic construct
  source 1..120: mol_type = other DNA
ggatctgatggctttattgatgtatactaccaaacatttataggataattaatgccaatcttcttaaactcactcaaaaatatgaaaaggaagaaatactttcaaactcactttatgagg

SEQ ID NO: 19228 - DNA, 120 bp, synthetic construct; identical to SEQ ID NO: 5916
  source 1..120: mol_type = other DNA

SEQ ID NO: 19229 - DNA, 120 bp, synthetic construct
  source 1..120: mol_type = other DNA
tgtatatcaagtccactgctattctcattatcagtgttggaaagctaaaagcttttcttccgatatcaggagcaagtcaaggaggcccactttcacaatttctcttcaatataattctga

SEQ ID NO: 19230 - DNA, 120 bp, synthetic construct
  source 1..120: mol_type = other DNA
tgcagatgactggatcttacatctagaaaaccctaatgactacaccaaaaactgtgagaactaataaatttagttaagttcacaggatacaaaattaacttacaaaagccagttgcattt

SEQ ID NO: 19231 - DNA, 120 bp, synthetic construct
  source 1..120: mol_type = other DNA
gggataaatctaaccaagaaggtgaaagatctgtaccttgaaaactataaggcatggatgacagaaattgaaaaagatacaaataaatggaaagatattctttattcatggattggaaga

SEQ ID NO: 19232 - DNA, 120 bp, synthetic construct; identical to SEQ ID NO: 5917
  source 1..120: mol_type = other DNA

SEQ ID NO: 19233 - DNA, 120 bp, synthetic construct; identical to SEQ ID NO: 4871
  source 1..120: mol_type = other DNA

SEQ ID NO: 19234 - DNA, 120 bp, synthetic construct
  source 1..120: mol_type = other DNA
gtaaagcacaggaaacaaaatcaaaaataaatacgattctaccaaactaaatagttcctatttaacaaaagaaaacatcaacagaatgaagagataacctatgaaatgggaaaacaatat

SEQ ID NO: 19235 - DNA, 120 bp, synthetic construct
  source 1..120: mol_type = other DNA
ggaaagaatctaaatagacattttttcaatgaaatagatatttccacacaaatggccaagtgtattttttaatgttcaacatcattaaatcaaaggaaatacaaactacaaccacgagat

SEQ ID NO: 19236 - DNA, 120 bp, synthetic construct; identical to SEQ ID NO: 5918
  source 1..120: mol_type = other DNA

SEQ ID NO: 19237 - DNA, 120 bp, synthetic construct
  source 1..120: mol_type = other DNA
caaatacggtgcagtgtatactgcttgggtgatgagtgcaccaaaatctcacaaatcaccactaaagaacttactcatgtaaccaaatactacttgtaccccaataacctatggaaaaat

SEQ ID NO: 19238 - DNA, 120 bp, synthetic construct
  source 1..120: mol_type = other DNA
aaatgtgacctatataatgtgcatatagcgtggtgattatagttaacaatactgtattatatacttgaaattttctaaactagaagatcataaatgttctcaccacacacatacaaaagg

SEQ ID NO: 19239 - DNA, 120 bp, synthetic construct
  source 1..120: mol_type = other DNA
gtcataccttaataaagttaagaggaagaaaacgaccaccaaaccctctaggcaggggaatatatcaataggaactttaaaaactgaaaagcgaagaaaacaaagacttattaaagcaga

SEQ ID NO: 19240 - DNA, 120 bp, synthetic construct; identical to SEQ ID NO: 5919
  source 1..120: mol_type = other DNA

SEQ ID NO: 19241 - DNA, 120 bp, synthetic construct
  source 1..120: mol_type = other DNA
gatgacatctgagttcgcagaagctacaaaagttagaagaaaatagagtgaaatatttaaaatttttgatagaagaaaaaccaatctagaattctgcactacatgaaattatccttcaaa

SEQ ID NO: 19242 - DNA, 120 bp, synthetic construct
  source 1..120: mol_type = other DNA
agacatttcaatccacctttaagaacagaagagcattgaagaagaaataagtgaaagtaaaataaaagaaaaaatatctaattacgtatgcttatgtaagtgtgtgtgtgtgtgtgtatg

SEQ ID NO: 19243 - DNA, 120 bp, synthetic construct
  source 1..120: mol_type = other DNA
ttgtaccatgatttattttcctttgggtagatatctagtattgggattgctgaatcaaagggtagttctaattttagccctttaagaaatcttcatactgttttccatagaggttgtact

SEQ ID NO: 19244 - DNA, 120 bp, synthetic construct; identical to SEQ ID NO: 5920
  source 1..120: mol_type = other DNA

SEQ ID NO: 19245 - DNA, 120 bp, synthetic construct
  source 1..120: mol_type = other DNA
aaggcttctgcacagtgaagggaataatcaacagagtaaacaaacaacctacagaatgggaaaacatatttgcaaattatgcacctaatacgggactggtatccagaacttacaaggaac

SEQ ID NO: 19246 - DNA, 120 bp, synthetic construct
  source 1..120: mol_type = other DNA
tagtacctaacattatcctttcgcactgtgccaagagtagacattcattatagtgcttttacatctgtgaacacccccactacattgtgatcatttcctagattccttaacagctggtaa

SEQ ID NO: 19247 - DNA, 120 bp, synthetic construct
  source 1..120: mol_type = other DNA
tggtccttctggagcatcagtgatggatctagaagtactctagggttgagtaatgatggcagtgatatttacgccaacaagagaccctctgtgtttctgcatctcattcctggcagaata

SEQ ID NO: 19248 - DNA, 120 bp, synthetic construct; identical to SEQ ID NO: 5921
  source 1..120: mol_type = other DNA

SEQ ID NO: 19249 - DNA, 120 bp, synthetic construct
  source 1..120: mol_type = other DNA
catatacactaagtaaacagagctctggtctatataaccctgggaaccaaccacatcctctctgtactacttacctccagacttcttttacttgagagaaaaattaacttttacttacat

SEQ ID NO: 19250 - DNA, 120 bp, synthetic construct
  source 1..120: mol_type = other DNA
ctagagagccatttattaaaatggtgaattttggaattgaaaaaggaacataaaaacatttggaataaaagttaatcatcacctttccacaatggatgattaaagtattagggaaaacgt

SEQ ID NO: 19251 - DNA, 120 bp, synthetic construct
  source 1..120: mol_type = other DNA
agtgggacaactaaatatcatgtgtctcaggatatgatgcaataaaaataacatagcaacttaagtcaatggcatgacaaaaaagtggggtctgctatgttataaagggactggaaagac

SEQ ID NO: 19252 - DNA, 120 bp, synthetic construct
  source 1..120: mol_type = other DNA
ttgtgctaagtatcataatggtattgtgggcatggttttttaaaatgtctttattagtcacagattatactaaatacatatgtggaatatgtacatacataacttacacaacataatagt

SEQ ID NO: 19253 - DNA, 120 bp, synthetic construct; identical to SEQ ID NO: 5922
  source 1..120: mol_type = other DNA

SEQ ID NO: 19254 - DNA, 120 bp, synthetic construct
  source 1..120: mol_type = other DNA
aattcccaaaatagaataacaaatcatgtttagccatacgatgaagcccagaagaataaagaaatagatgcttgttaatagaaaaagttgttcgtgacacagtgttcagtggaaaaccag

SEQ ID NO: 19255 - DNA, 120 bp, synthetic construct
  source 1..120: mol_type = other DNA
gtattatttttaaatatttatgacatatttaataaagaactaatcaaagtttaaataattttgattatttgacatggatggaattggaggctactatccttcgcaaactaacacaggaac

SEQ ID NO: 19256 - DNA, 120 bp, synthetic construct
  source 1..120: mol_type = other DNA
gaagatcaggaaaaatgattaatgagtactaggcttaatacctgggtgatgaaataatctgtacagtaaacccccatgacacaagtttacctatgtaacaaacctgcacatgtacccttg

SEQ ID NO: 19257 - DNA, 120 bp, synthetic construct; identical to SEQ ID NO: 5923
  source 1..120: mol_type = other DNA

SEQ ID NO: 19258 - DNA, 120 bp, synthetic construct
  source 1..120: mol_type = other DNA
tccatagaatgtggtcactacagctaggtgggaggagcatgtggagaaagcccttctcctgcttgccccagcaggaactctcagcactgccaccacaattctggcataagatgtcagaat

SEQ ID NO: 19259 - DNA, 120 bp, synthetic construct
  source 1..120: mol_type = other DNA
gtggttggggccacagaacctcagctgggccaccagggccacaaccagtccatctaccacaaatccagagagccaggttgtgaccaccagccccatgtaccgtctgggccccatcaggag

SEQ ID NO: 19260 - DNA, 120 bp, synthetic construct
  source 1..120: mol_type = other DNA
agagatagttgcttcttgcaggaagccctccagcatttttggcatcactgcggaggtgtagagaatatccaggaaggacagattcgccaagaaaatatacatgggtttgtggagcctctg

SEQ ID NO: 19261 - DNA, 120 bp, synthetic construct; identical to SEQ ID NO: 5924
  source 1..120: mol_type = other DNA

SEQ ID NO: 19262 - DNA, 120 bp, synthetic construct
  source 1..120: mol_type = other DNA
caactatcccccttcttagttgtcattccttcctcaactctcatccttccctgccttccttaattgtgcatattctttaacgctcagaagagtttatccaaactcataattttagtcttt

SEQ ID NO: 19263 - DNA, 120 bp, synthetic construct
  source 1..120: mol_type = other DNA
atagcctccttcttgtgcaccagtataatattctccaaatgtgtgctatatagacatggcccacaactgcaaactcttctatctttctcaatcacaaccaattcctctatgagtggtttg

SEQ ID NO: 19264 - DNA, 120 bp, synthetic construct
  source 1..120: mol_type = other DNA
tattcttcacttattgccttccttaaatagtagtttcatcaagtcattcaggagttggtagtgaaaatgtggtaaatggtaatagggaaggaagtaggtgccatgggagcagagaaggac

SEQ ID NO: 19265 - DNA, 120 bp, synthetic construct
  source 1..120: mol_type = other DNA
gcttggtggctcacgcctgtaatcccagcactttgggaggctgaggcgggtggatcacgaggtcaggagatcgagaccatcctgactaacacagtgaaactccgtctctactaaaaatac

SEQ ID NO: 19266 - DNA, 120 bp, synthetic construct; identical to SEQ ID NO: 5925
  source 1..120: mol_type = other DNA

SEQ ID NO: 19267 - DNA, 120 bp, synthetic construct
  source 1..120: mol_type = other DNA
acttctaaatatctgaaaatggctctgtcatacctgctggaaggttttcatatgctattcaaagcaatatgtgtttattaactgaagacaatgagagagaatacagggaatgattagaaa

SEQ ID NO: 19268 - DNA, 120 bp, synthetic construct
  source 1..120: mol_type = other DNA
aaaaatgtaagttatctttaatacaaatagtctagaacatcagtttcctaagaggtgaaaaactggatgcctcagggaccacagtgctgggagccttcacggcacactgttttgtagttt

SEQ ID NO: 19269 - DNA, 120 bp, synthetic construct
  source 1..120: mol_type = other DNA
ctaatagagccctttatttctctcccaatcatgtactaaggatctagtgtatagaagatattacatctgtttctgaggatagtgggccaaacaaaactggtccatactcttaaggagttt

SEQ ID NO: 19270 - DNA, 120 bp, synthetic construct; identical to SEQ ID NO: 5926
  source 1..120: mol_type = other DNA

SEQ ID NO: 19271 - DNA, 120 bp, synthetic construct
  source 1..120: mol_type = other DNA
gtcacaagaaggaactagagcttcattctataggcagcaaggcacagctgaaggcttttaaacagtacagtggcatgtttcaacctaaatttaaatagtattatggaagctacatccaag

SEQ ID NO: 19272 - DNA, 120 bp, synthetic construct
  source 1..120: mol_type = other DNA
caacctaaatttaaatagtattatggaagctacatccaaggtaacaagagtgaaagaagggatggccccactcatctgatacctgatgtgcaaatacatgctgccttgagttcatcatta

SEQ ID NO: 19273 - DNA, 120 bp, synthetic construct
  source 1..120: mol_type = other DNA
tacttaatgtttaacaccatgtcttccttaacctaaacccatatgaattgatcagagaagaatgctgttcttcatagactacaaaattccacaggttctgttattgccctccaactcccg

SEQ ID NO: 19274 - DNA, 120 bp, synthetic construct
  source 1..120: mol_type = other DNA
tttaactctagattattttatctggtccaaactcattctgaggcttggagtctttctataggattcctgccaggagagaggtgagcatgtaaatcaggcaagaatacctctaataataaa

SEQ ID NO: 19275 - DNA, 120 bp, synthetic construct; identical to SEQ ID NO: 5927
  source 1..120: mol_type = other DNA

SEQ ID NO: 19276 - DNA, 120 bp, synthetic construct
  source 1..120: mol_type = other DNA
aaaacacagaaacagtaggatatatgagaggctgttattcccttaaagacagaggggaatcagggaatagaggaagttgatgaatttagagttgaaaactccaaggaatagagctgaatt

SEQ ID NO: 19277 - DNA, 120 bp, synthetic construct
  source 1..120: mol_type = other DNA
gaatagtgcaaaatgcctgtttgttgtctaacgaacaatcagccacacactcaattctaagtaaaaaccataaccctcattcaacccagactctgagatagcatagagtccttaattaaa

SEQ ID NO: 19278 - DNA, 120 bp, synthetic construct
  source 1..120: mol_type = other DNA
taaacaaacatgttatgtttgtaagcagaaaaccaaaaagttaattcagtttgatttttttaatctgttaattctcctcaagtctcttcagtaattactccataataaaacattaaaata

SEQ ID NO: 19279 - DNA, 120 bp, synthetic construct
  source 1..120: mol_type = other DNA
actttccaccatgaaaacattagtatgagggtgtctcgcttcttcctactctgtaacatatcaactgaagcttggggagcatgaatatctactgttccccatctccaaaagagaagagag

SEQ ID NO: 19280 - DNA, 120 bp, synthetic construct; identical to SEQ ID NO: 5928
  source 1..120: mol_type = other DNA

SEQ ID NO: 19281 - DNA, 120 bp, synthetic construct
  source 1..120: mol_type = other DNA
aagatttgctgaagacttcagaatgttggaatttcctaccttcagctccctccctgcttgagctcaacctgaagtaacgtagaacattgattacaaatgtcacccttgttaccctccact

SEQ ID NO: 19282 - DNA, 120 bp, synthetic construct
  source 1..120: mol_type = other DNA
ggcccctgagaaccaattacagatttactggagagcagcctgaaatgagcaagacatagcaggcccctaaggaaattgtattttttcaaaggcggtttcctgaactgttggcttgaccat

SEQ ID NO: 19283 - DNA, 120 bp, synthetic construct
  source 1..120: mol_type = other DNA
aaattctgatttctctgcaacatccctaaattccccattaccaacagtggtcctcccaggagcctgccctcaactttcattctccaatctacagcctccaaatcgccctcttaccatccc

SEQ ID NO: 19284 - DNA, 120 bp, synthetic construct; identical to SEQ ID NO: 5929
  source 1..120: mol_type = other DNA

SEQ ID NO: 19285 - DNA, 120 bp, synthetic construct
  source 1..120: mol_type = other DNA
atctgtagttcacagtaaatgccaccctattttttcttggcagcaggaggggttctcttaatcgtttatttttttcatcaaacagcagcatatgctaaaaggtaagtatatgtgtcttga

SEQ ID NO: 19286 - DNA, 120 bp, synthetic construct
  source 1..120: mol_type = other DNA
acatcatggaatgacaaaatcaagctaatttacatgaaccattacctcacatacttatcatgtttttgtgatgagaacactcagatctactcttttagcaattttcacatatacaattca

SEQ ID NO: 19287 - DNA, 120 bp, synthetic construct
  source 1..120: mol_type = other DNA
aaccaccattctattctctgtttctgtgagtttgactttgtagatttcatgtagaagggagaccatgaggtatttgtccttctgtgcctgacttatttcagttaatataaggtcctccag

SEQ ID NO: 19288 - DNA, 120 bp, synthetic construct; identical to SEQ ID NO: 5930
  source 1..120: mol_type = other DNA

SEQ ID NO: 19289 - DNA, 120 bp, synthetic construct
  source 1..120: mol_type = other DNA
ttatcttttctgtagtaggcattctaacaagtgtgaggtgatatcttattgtgaatttaatttgtatttccctgatgactagtgatgttgagcattttttcttgtacctgtttgtcattt

SEQ ID NO: 19290 - DNA, 120 bp, synthetic construct
  source 1..120: mol_type = other DNA
atgtatcatttacaaatattttctctcaacctgtgggttgtcttttcactctattgtttcctttgctgcggagaaatgttttaatttgatgcaatcccatttgtttacttttggttttgc

SEQ ID NO: 19291 - DNA, 120 bp, synthetic construct
  source 1..120: mol_type = other DNA
cattttgagttaattctcatatattgagtgtcataaggatccaatttcattcttctgcatgtggatattcagttttccaacatcatttattaaaaagacttttctttcaccgtttcatgt

SEQ ID NO: 19292 - DNA, 120 bp, synthetic construct; identical to SEQ ID NO: 5931
  source 1..120: mol_type = other DNA

SEQ ID NO: 19293 - DNA, 120 bp, synthetic construct
  source 1..120: mol_type = other DNA
ttaatcctggggtataaatgaagtctccaaaagtaggtgatatattagcatgaaaaatacatttctaccttcccttgtgtcctggggtcaatttggcctaaactgcaagacgtgaaaaga

SEQ ID NO: 19294 - DNA, 120 bp, synthetic construct
  source 1..120: mol_type = other DNA
ctaagttagaactacagtaaattattctataagctacaacttgatatatgttgtactaggagaattctaagagggcctgtggccttgcttagaaaaagcaggtacaggggacagtggttg

SEQ ID NO: 19295 - DNA, 120 bp, synthetic construct
  source 1..120: mol_type = other DNA
gaaggaccagaggagacattcctgaacacatcttgcaaactctcagaagtgactatgggatgcttcacgggggctaacttcaagctcaagtttgacaaccatttatgttgtttggctttg

SEQ ID NO: 19296 - DNA, 120 bp, synthetic construct; identical to SEQ ID NO: 5932
  source 1..120: mol_type = other DNA

SEQ ID NO: 19297 - DNA, 120 bp, synthetic construct
  source 1..120: mol_type = other DNA
tttgtggtttctgttagagatttacatagtcttaccatttagatttcttcttcactagactacgaattagaagtaaatattatccagggcagatggtgtatcctattcatctttgtatcc

SEQ ID NO: 19298 - DNA, 120 bp, synthetic construct
  source 1..120: mol_type = other DNA
tcacttgattcataatccctggccttctaaaaatatattaacacaatgtccggttgaaaagaaagttccaaacattccaccagtagacatgactagcaatagagttgaccttcattattt

SEQ ID NO: 19299 - DNA, 120 bp, synthetic construct
  source 1..120: mol_type = other DNA
gtcgttcatggacaagtgcatgaacacagtgacaaaaagtttgagacacactgtatgcatccccacctgatgctgagcaaggaaacgctctgtcctcttgtttcagctattatactgtaa

SEQ ID NO: 19300 - DNA, 120 bp, synthetic construct
  source 1..120: mol_type = other DNA
catgctcctgagcacaaaaatgttgcaatggatcttacggagaaaatgcatttgctagataagctctgttcaggcatgtgttatagggctgttggctgtgggttcaacgttaatgatcaa

SEQ ID NO: 19301 - DNA, 120 bp, synthetic construct; identical to SEQ ID NO: 5933
  source 1..120: mol_type = other DNA

SEQ ID NO: 19302 - DNA, 120 bp, synthetic construct
  source 1..120: mol_type = other DNA
tctgtcagctgtatcttcagttctgaaaatgcaataagaaaagataaaatacggaattcagtcggccagtggcccgcaatcctcttctctcggttcctctttcctcgctcaagatggcgc

SEQ ID NO: 19303 - DNA, 120 bp, synthetic construct
  source 1..120: mol_type = other DNA
aggtgctggagaggatgtggagaaataggaacacttttacgctgttggtgggactgtaaactagttcaaccattgtggaagtcagtgtggcgattcctcagggatctagaactagaaata

SEQ ID NO: 19304 - DNA, 120 bp, synthetic construct
  source 1..120: mol_type = other DNA
aaccaacacaaatgtccaacaatgatagactggattaagaaaatgtggcacatacacaccatggaatactatgcagccattctgcatctttctaatgacaagaatattctccagcataac

SEQ ID NO: 19305 - DNA, 120 bp, synthetic construct; identical to SEQ ID NO: 5934
  source 1..120: mol_type = other DNA

SEQ ID NO: 19306 - DNA, 120 bp, synthetic construct
  source 1..120: mol_type = other DNA
aatagcaatccaaattattctactccattctgttccctgtaacattaatggcatcatcttcagccataacagggctacactctgggagtagatgactgatgagctgagagaaaacagatt

SEQ ID NO: 19307 - DNA, 120 bp, synthetic construct
  source 1..120: mol_type = other DNA
ttctctttgagccattggcatttccattactttcagccaaatctaataaataaatgaaatgataaaatataaaggagtcagaagaaaactaagtacgaaatccagtttatgtaaaccctg

SEQ ID NO: 19308 - DNA, 120 bp, synthetic construct
  source 1..120: mol_type = other DNA
ctatgaaaatgtataaaaacacagaagaaacaaatcaaataatagataccaatgataaaaatgcaaagaaagatttgtataataaatgaaaaagaaatcaaagcaagaaaaattagtgac

SEQ ID NO: 19309 - DNA, 120 bp, synthetic construct; identical to SEQ ID NO: 5935
  source 1..120: mol_type = other DNA

SEQ ID NO: 19310 - DNA, 120 bp, synthetic construct
  source 1..120: mol_type = other DNA
tcaaaataacagattaattggttttgtgaagcattctccccattggaaagccaagaatgcttggagactcagatcctcagagagcttaaagagagacaacaaacctaagagaggcttcct

SEQ ID NO: 19311 - DNA, 120 bp, synthetic construct
  source 1..120: mol_type = other DNA
aaaacactgaaagagcccccagaggagaatgaaccaagggctcttcaactgcaaaaggatatcagtgtgtggacttgtatttctaatacacaaccttgaatatggctggaatattgaatt

SEQ ID NO: 19312 - DNA, 120 bp, synthetic construct
  source 1..120: mol_type = other DNA
ggcatctgggaatattaggctattcttctgtgcctgtattttgaaatataatttgacagtgtgtgaatttgtggagtttatgtgtgtagtttggggattttcatgtttacaatgtaagag

SEQ ID NO: 19313 - DNA, 120 bp, synthetic construct; identical to SEQ ID NO: 5936
  source 1..120: mol_type = other DNA

SEQ ID NO: 19314 - DNA, 120 bp, synthetic construct
  source 1..120: mol_type = other DNA
atggagaaaaagatctgctatgagggaaaattctgtctccagccctgcaggaagaattggaaaatcagaaaagagtgaaaagggagctagactgacttaatcttcagcccaggtaaaact

SEQ ID NO: 19315 - DNA, 120 bp, synthetic construct
  source 1..120: mol_type = other DNA
atatggactccaggcaaggctgcctaatttcaaagtccatgatattctaatagaaagggagatctagtgctgcgatcagatgcagagagaggtcatctttgcccatttcacgattccata

SEQ ID NO: 19316 - DNA, 120 bp, synthetic construct
  source 1..120: mol_type = other DNA
tccagggcttgctcttctctgtctttctcactatctacctgctgaccgtggcaggcaatttcctcattgtggtgctggtctccactgatgctgccctccagtcccctatgtacttcttcc

SEQ ID NO: 19317 - DNA, 120 bp, synthetic construct; identical to SEQ ID NO: 5937
  source 1..120: mol_type = other DNA

SEQ ID NO: 19318 - DNA, 120 bp, synthetic construct
  source 1..120: mol_type = other DNA
ggccccaataccatcccgcagttcttctgtgagatccagcctgtcctgcagctggtatgtggagacacctcgcttaatgaactgcagattatcctggcaacagccctcctcatcctctgc

SEQ ID NO: 19319 - DNA, 120 bp, synthetic construct
  source 1..120: mol_type = other DNA
ctcttctatggcaccgcactctttatctatattcgccctaaggccagctacgatccggccactgaccctctggtgtccctcttctatgctgtggtcacccccatcctcaaccccatcatc

SEQ ID NO: 19320 - DNA, 120 bp, synthetic construct
  source 1..120: mol_type = other DNA
aaatacctaaggatcaaagagtctcccttaaggtctttcttcacattaggggagggccagcctgtcagaaagacaaacttatctttgaaaagctaccgtagtcaaatgcgctcctcagac

SEQ ID NO: 19321 - DNA, 120 bp, synthetic construct; identical to SEQ ID NO: 5938
  source 1..120: mol_type = other DNA

SEQ ID NO: 19322 - DNA, 120 bp, synthetic construct
  source 1..120: mol_type = other DNA
gcagaggttaagagaacagattctgatgtcagacagacttaaagtcaagtcttattttttccagctagttagctaagtgatcacaggtgaatgatataatctctctgagccttaattttt

SEQ ID NO: 19323 - DNA, 120 bp, synthetic construct
  source 1..120: mol_type = other DNA
atcctcacccttcttctatcctccaccctcaattatgtcctggtatctgttgttcctttctttgtgttcatgtgtactcagtgttaggtcccacttttaagtgagaatatatggtatttg

SEQ ID NO: 19324 - DNA, 120 bp, synthetic construct
  source 1..120: mol_type = other DNA
attttcttatctataaagttgcggtaacaacagagtctaattcattgggtttttgtgaggatttgtagacttgcaaacaatcaagcttaatatctggcacaaaatagtatcttgatagat

SEQ ID NO: 19325 - DNA, 120 bp, synthetic construct; identical to SEQ ID NO: 5939
  source 1..120: mol_type = other DNA

SEQ ID NO: 19326 - DNA, 120 bp, synthetic construct
  source 1..120: mol_type = other DNA
tatcattccaacactttattcaaatgcaacagtatttattgcaaactttctatgtgcctattgctctttggcactgtggagaatatcaagtacatacagggtggtgattctgtccagaga

SEQ ID NO: 19327 - DNA, 120 bp, synthetic construct
  source 1..120: mol_type = other DNA
ccccccaaaaggggttgtgtggccttcctcaaactcattttatcaatgtggaaaacctcacaactactgctcttcaattgaacaaaactgcaatagcgaggaacagcatttaagaagggt

SEQ ID NO: 19328 - DNA, 120 bp, synthetic construct
  source 1..120: mol_type = other DNA
tacatatctccatcaactcatctttcctagaactggtcttgctaaagagtgttttggcattaagccattggtttacattgagaaagattacaagaagcaacattatgaaactctcagagg

SEQ ID NO: 19329 - DNA, 120 bp, synthetic construct; identical to SEQ ID NO: 5940
  source 1..120: mol_type = other DNA

SEQ ID NO: 19330 - DNA, 120 bp, synthetic construct
  source 1..120: mol_type = other DNA
aaatgaaattataaaatatgtactctttttagtctgacttatatttggagatttggccatgttgtggtgtgtacagcagccattccttttcatttctgagtgatactccattgtatagat

SEQ ID NO: 19331 - DNA, 120 bp, synthetic construct
  source 1..120: mol_type = other DNA
ttgggttgttttcacaattttttatttattcacctgctaaaggaagttcaggttgtttccagtttttggttcatagaatgaaggttctatgaacatttgtgtacaaagtctttgtatgct

SEQ ID NO: 19332 - DNA, 120 bp, synthetic construct
  source 1..120: mol_type = other DNA
agtaatcacttttcctcttaacatgacagctagcaagtttccacctgaatttgtaactcatctccaggaaatgtgcaattcctcacgatatatttttgagatatctagtttctggtctca

SEQ ID NO: 19333 - DNA, 120 bp, synthetic construct
  source 1..120: mol_type = other DNA
acccagcacattagtctttctggagcaagacttagagccaccaatcagtaattaaaaaaaaaaaaatagacaggggaaagtattgaatggaaaatccctggttatatggtttggctctat

SEQ ID NO: 19334 - DNA, 120 bp, synthetic construct; identical to SEQ ID NO: 5941
  source 1..120: mol_type = other DNA

SEQ ID NO: 19335 - DNA, 120 bp, synthetic construct
  source 1..120: mol_type = other DNA
tgaagacatgggttgtgatctctactccgttactaaaactttacaggacctagagcaaactctttgcatcatctttttggttttcaatttcatcatcaataaacataaaggctaaatcaa

SEQ ID NO: 19336 - DNA, 120 bp, synthetic construct
  source 1..120: mol_type = other DNA
tctccaccatagatagctaccaagggaccttgaactacattaatcctgggcaatataagcacagtcattggttttcaagacaaacaccactcaaaagctagggagagtccatcagtgatc

SEQ ID NO: 19337 - DNA, 120 bp, synthetic construct
  source 1..120: mol_type = other DNA
cctaatatttcctcctaccaacctttctccctgacactcccttcctcaacttccctaatcccatgggacccactcactatagtgcaccccagctcctgatggtatctgctaccagaagta

SEQ ID NO: 19338 - DNA, 120 bp, synthetic construct
  source 1..120: mol_type = other DNA
cctcagcctcctgagtagctgggattacaggagcctaccaccatgcccagctaatttatgtatttttagtagagacggggtttcaccatgttggccaggctggtctcgaacttctgacct

SEQ ID NO: 19339 - DNA, 120 bp, synthetic construct; identical to SEQ ID NO: 5942
  source 1..120: mol_type = other DNA

SEQ ID NO: 19340 - DNA, 120 bp, synthetic construct
  source 1..120: mol_type = other DNA
ctcctcctgtggcagcatggtccccctgcgtttctgctccccactgagctctctgggattcacaaatcagtgccctagggagggcttggagagcctagcacgtggggatcttacacaggg

SEQ ID NO: 19341 - DNA, 120 bp, synthetic construct
  source 1..120: mol_type = other DNA
tcactggccttaactctttccagtcagggaagactaggaaagagttggaagaggaaatattgtagaagaaagaagagaactcaggtacatcagggccaccaagaaacaggggctctgggt

SEQ ID NO: 19342 - DNA, 120 bp, synthetic construct
  source 1..120: mol_type = other DNA
cttcaaagatgccacccatcatctattcaactttttttttcttttggctaaccctttacacttctttcaagtctgcgaataattatcaagttcccacagtgtgccttattctacatagtg

SEQ ID NO: 19343 - DNA, 120 bp, synthetic construct; identical to SEQ ID NO: 5943
  source 1..120: mol_type = other DNA

SEQ ID NO: 19344 - DNA, 120 bp, synthetic construct
  source 1..120: mol_type = other DNA
aagaatgatagatatatttattcaccacatatgtatggatatagttagagaaacaagcctcaaggcacaacgattgactgaggttagacattcggccacttgagagaatgaggaggtgga

SEQ ID NO: 19345 - DNA, 120 bp, synthetic construct
  source 1..120: mol_type = other DNA
tactgacttctcaggaggctgatttagagccaaagtaactgctgagttctgaataagcagcacacctggtctgcataataagatccattttgcaatcaccctcttcagaaagccaaataa

SEQ ID NO: 19346 - DNA, 120 bp, synthetic construct
  source 1..120: mol_type = other DNA
taataactggaacttatcatccagaacaatgttttctgcctctttgtttttcagttcatgatattcctgtggactggctttactcctaatttccgaccccaataagatcctggtctagtt

SEQ ID NO: 19347 - DNA, 120 bp, synthetic construct; identical to SEQ ID NO: 5944
  source 1..120: mol_type = other DNA

SEQ ID NO: 19348 - DNA, 120 bp, synthetic construct
  source 1..120: mol_type = other DNA
atatttatttgttgaatgaatttgaacgagtggtagaagactcttctggctggagcacttttaagtcttgcactagcatgggtctggaaatgaactgaaggaggactagagataagtaca

SEQ ID NO: 19349 - DNA, 120 bp, synthetic construct
  source 1..120: mol_type = other DNA
gagaggacctaaaacaaattagtgaaataaatactgtaggatttctgctagatgatgaggcttttaattcttcctgtttctgggatggcctggctgggcctccttaggaactcagctcat

SEQ ID NO: 19350 - DNA, 120 bp, synthetic construct
  source 1..120: mol_type = other DNA
tccttggctttctctctggtgttctatagaaagtaaatgagtcacagttccttcagttctttcttttagccagtctatagcactctactggtcatcaaaaaagatccaaaagtgatcaac

SEQ ID NO: 19351 - DNA, 120 bp, synthetic construct
  source 1..120: mol_type = other DNA
gattctcctgcctcagcctcccaagtagttggaactacaggtgtgcgccaccacacccagctaatttttgtatttttagtaaagatggggtttcaccaagttggccaggatggtctcgat

SEQ ID NO: 19352 - DNA, 120 bp, synthetic construct; identical to SEQ ID NO: 5945
  source 1..120: mol_type = other DNA

SEQ ID NO: 19353 - DNA, 120 bp, synthetic construct
  source 1..120: mol_type = other DNA
caaaagccccattttcgagttggccagttctggcaattttctgtgtccattctgcatgccactcaactcctctaatgaattcttattccttttcaagccttctgtattccttcttatcat

SEQ ID NO: 19354 - DNA, 120 bp, synthetic construct
  source 1..120: mol_type = other DNA
tttccctttgaagtactcatgttttttatgatcccttctcccaacacttttcttgccttcaatgtatttttaatgactggtgacctcttacctctccttcttttactttaacctctaact

SEQ ID NO: 19355 - DNA, 120 bp, synthetic construct
  source 1..120: mol_type = other DNA
gttacagcaggagtatggggtcagagaaggaatgatgaatagaaagcacagagaaccttggggcagtcacactattctgtatgtactaggattcacttgtccaaacacatagaatatata

SEQ ID NO: 19356 - DNA, 120 bp, synthetic construct; identical to SEQ ID NO: 5946
  source 1..120: mol_type = other DNA

SEQ ID NO: 19357 - DNA, 120 bp, synthetic construct
  source 1..120: mol_type = other DNA
tctcacaaaaaagtatctttctttcccagttatgatttttcttccttcttctgatatcctcacaactgaacatttccttcgaatacacccacccacccataaatgaccaatctttctctt

SEQ ID NO: 19358 - DNA, 120 bp, synthetic construct
  source 1..120: mol_type = other DNA
tccacctcccaggtttaagcaattctcctgcctcagcctccagagtagctgggactacaggcatgcaccaccacgtccagccaatttttgtatctttagtagagatggggtttttccatg

SEQ ID NO: 19359 - DNA, 120 bp, synthetic construct
  source 1..120: mol_type = other DNA
tcatccacaaagctcacaaaacgagaagctgctcaaaacactgagatgcccctctaggctggtaacagcgtgacttagaataagtcctccaacttttctagctttctcaccgaaaaatgg

SEQ ID NO: 19360 - DNA, 120 bp, synthetic construct
  source 1..120: mol_type = other DNA
gcctgtggcagcacagttttatgagtaactaagatatgggatgtagaaagaccctagaagaggaaaaaaaacacaacaatggtcattgttaaaacaggggactacatttgtccttggttc

SEQ ID NO: 19361 - DNA, 120 bp, synthetic construct; identical to SEQ ID NO: 5947
  source 1..120: mol_type = other DNA

SEQ ID NO: 19362 - DNA, 120 bp, synthetic construct
  source 1..120: mol_type = other DNA
atgtccaagctgagagacaaatcaacagtgcaattacattcacaatagccacacacacacacacaatacctaggaaagcagctagacagagagatgaaagacctctacaacaagcaagca

SEQ ID NO: 19363 - DNA, 120 bp, synthetic construct
  source 1..120: mol_type = other DNA
acagattcaatgctattcctattaaactacccatgacatttttcacagaactagaaacaactattctaaaattcatatgtaaccaaaaaagagcacaaatagccaaagcaatcctaagca

SEQ ID NO: 19364 - DNA, 120 bp, synthetic construct
  source 1..120: mol_type = other DNA
agaacccagaaataatgccgcacacctacaaccatcttatcttcaacaaagtcaacaaaaataagcactcactattcaataaatggtgctgggctaactggctagccgtattaggaagat

SEQ ID NO: 19365 - DNA, 120 bp, synthetic construct; identical to SEQ ID NO: 5948
  source 1..120: mol_type = other DNA

SEQ ID NO: 19366 - DNA, 120 bp, synthetic construct
  source 1..120: mol_type = other DNA
gcaaaggacatgaacagacacgtctcaaaagaagacatacatgtagccaagaagcacatgaaaaaaatgcccaatatcactattcattagagaaatgcaagtgaaaaccacagtgagata

SEQ ID NO: 19367 - DNA, 120 bp, synthetic construct
  source 1..120: mol_type = other DNA
atgtatgttgaaagtggtttggagatttctcaaagaacttaaaactgaactgccatttgacccagcaatctcattactggaaatatacacgaaggaatataaattattctaccataaaga

SEQ ID NO: 19368 - DNA, 120 bp, synthetic construct
  source 1..120: mol_type = other DNA
tgaaaaatgaaatcatggcctttgcagcaacatggatcctgatggagaccattatcctaaacaaattaaagcaggattggaaaaccaaatgctgcatgttctcacttgtaagtgggagca

SEQ ID NO: 19369 - DNA, 120 bp, synthetic construct; identical to SEQ ID NO: 5949
  source 1..120: mol_type = other DNA

SEQ ID NO: 19370 - DNA, 120 bp, synthetic construct
  source 1..120: mol_type = other DNA
aaagatttaaaaagaaaaatctgaaaacccgctgaagtggtagagacatattgcataataaggaataacaataaaaatgactgccaacatctcaacagaaacaaagggagtcagaaggct

SEQ ID NO: 19371 - DNA, 120 bp, synthetic construct
  source 1..120: mol_type = other DNA
gagaaaatttgttgccagaagatactcactaaaagaataaaaaaggataaaggaagtttttcaggctatagagaaattataatatttggagtttcaaatctatgagaaggaacgaaaaac

SEQ ID NO: 19372 - DNA, 120 bp, synthetic construct
  source 1..120: mol_type = other DNA
cacggcaatagctgcacaaagaatgggaggaattataactaattttattattatcagatttttatattctatgttaaaggtattgtattaagtcagagtagactcttataagttcaggat

SEQ ID NO: 19373 - DNA, 120 bp, synthetic construct; identical to SEQ ID NO: 5950
  source 1..120: mol_type = other DNA

SEQ ID NO: 19374 - DNA, 120 bp, synthetic construct
  source 1..120: mol_type = other DNA
aggtaagaatcataggtaactgtgcctgtcctgtgaaaagtgctccagtactactccaacttagttgatggtagttttgccagtcaggaatggccatgaaaatcaacaattacactatta

SEQ ID NO: 19375 - DNA, 120 bp, synthetic construct
  source 1..120: mol_type = other DNA
gcgaacagtgaacctatcagaaatgtaatgggaagatgctgggaattagatagctatagaagaattagataagatctctacacattcctggctgactgggaaactacaggtatgtacaga

SEQ ID NO: 19376 - DNA, 120 bp, synthetic construct
  source 1..120: mol_type = other DNA
aaaggcagatgcattagcagagaatggaagccttttgaaatcaaaagtatttgaccaaaaccttcacccaatcattgactgaacactaagctgtgcaagaacaagggaaacttctgggat

SEQ ID NO: 19377 - DNA, 120 bp, synthetic construct; identical to SEQ ID NO: 5951
  source 1..120: mol_type = other DNA

SEQ ID NO: 19378 - DNA, 120 bp, synthetic construct
  source 1..120: mol_type = other DNA
tatagatgggtatcatccaatcagctggggcccagatggaaaaaaaaggcatgaaaggatgctctttatcattggttattaagaacatgaaattaaacacaatacttacaagtctactag

SEQ ID NO: 19379 - DNA, 120 bp, synthetic construct
  source 1..120: mol_type = other DNA
ttttataaaaaaaatttactatacaacccaataattccactgtcaggtaatatccaagacaatttaaatcatatgccttcaatgactcttcataagaacattattagtaacacccaaaaa

SEQ ID NO: 19380 - DNA, 120 bp, synthetic construct
  source 1..120: mol_type = other DNA
acaggaaacgatattctttgcaacaaatggtactggaggaaccagatataggtataaaaactgtaccattatgatttgtttaaaaaagcagccattttttttatcgcttctcggcctttt

SEQ ID NO: 19381 - DNA, 120 bp, synthetic construct; identical to SEQ ID NO: 5952
  source 1..120: mol_type = other DNA

SEQ ID NO: 19382 - DNA, 120 bp, synthetic construct
  source 1..120: mol_type = other DNA
cagaatatatgaagaactcatatacttttatcataaaaggaaacactataaaatatggacaaatgacttgaacagacacctcacaaaagaatatataaatgaccaatgaaaagatgctca

SEQ ID NO: 19383 - DNA, 120 bp, synthetic construct
  source 1..120: mol_type = other DNA
taagagaatagattttaagtactcttaccacaagaaaagtaactgtgagttgatagatatgttaattggcttgaccatagtaatcatttaactatgtatatcaaaacatcatttgggagg

SEQ ID NO: 19384 - DNA, 120 bp, synthetic construct
  source 1..120: mol_type = other DNA
cagctacttgggaggctggggcaggagtatcgcttgaacccaggaggcggaggttttagtgagccgagatcgtgccattgcactccagcctaggagacagaatgagacttgtctcaaaaa

SEQ ID NO: 19385 - DNA, 120 bp, synthetic construct; identical to SEQ ID NO: 5953
  source 1..120: mol_type = other DNA

SEQ ID NO: 19386 - DNA, 120 bp, synthetic construct
  source 1..120: mol_type = other DNA
aagccgggcacggtggctcacgcctgtaatcccagcactttgggaggccgaggtgggcggatcacgaggtcaggagatcgagaccatggtgaaaccccgtctctactaaaaatacaaaaa

SEQ ID NO: 19387 - DNA, 120 bp, synthetic construct
  source 1..120: mol_type = other DNA
gcagagttttcagtgagccgagatcgcgccactgcactccagcctgggcaacagagcaagactccgtctcaaaaaaaaaaaaattaaattaaaaagctataaaagctataatgagatatc

SEQ ID NO: 19388 - DNA, 120 bp, synthetic construct
  source 1..120: mol_type = other DNA
gattcacaacagcaaaaactggaaaccaccccacactgtttctctattacagcataaaaagttatcccaaaacttaatggcttcaaacaacaaatatttattatctcacagtttctatgg

SEQ ID NO: 19389 - DNA, 120 bp, synthetic construct; identical to SEQ ID NO: 5954
  source 1..120: mol_type = other DNA

SEQ ID NO: 19390 - DNA, 120 bp, synthetic construct
  source 1..120: mol_type = other DNA
gattctatttgttaaaactgagtcactcagtacagctcccatgcaaaggtaagggaagtaggctctactttgtgaaggggatataagaaaattgggggccatattttaaaacaaccacaa

SEQ ID NO: 19391 - DNA, 120 bp, synthetic construct
  source 1..120: mol_type = other DNA
tgattctccaaactgtggtacagagcataacacaccaaacacaaagagtatgtgctgaatgaatcttttatgtgaagttctggaaaaagcaaaacaaaatgatagaaatcagagcagtgg

SEQ ID NO: 19392 - DNA, 120 bp, synthetic construct
  source 1..120: mol_type = other DNA
agtgaattgtccattaaaatatgtgcacttcattatgtaaattataccttaattttaaaaagagaaaggaaataaaccaaagtcaggggggattgaatgagcacattcgaggcttgagag

SEQ ID NO: 19393 - DNA, 120 bp, synthetic construct; identical to SEQ ID NO: 5955
  source 1..120: mol_type = other DNA

SEQ ID NO: 19394 - DNA, 120 bp, synthetic construct
  source 1..120: mol_type = other DNA
tatgcctttttttctgcctttaatgtcactaaaagagaggttaacttactggattgaggaaaagaagtcgttagcaagagttccatagtaaagcgctaactctagctcatgtgtctggca

SEQ ID NO: 19395 - DNA, 120 bp, synthetic construct
  source 1..120: mol_type = other DNA
ttcaattattgatctgtaagggaaggtaataatagtacccaccttttgaagttataaggagccgtaaatatgaagcgcttttttgagtgcccatggaagtaagcactagcaatcaatact

SEQ ID NO: 19396 - DNA, 120 bp, synthetic construct
  source 1..120: mol_type = other DNA
tggggaagctgtggcagcaaggccgtgaagagagtctgacttaattgcaagtaagtcacaagtttattcccctacagcccatcaatttccacatgttcttaagacagttctgaatcaaac

SEQ ID NO: 19397 - DNA, 120 bp, synthetic construct; identical to SEQ ID NO: 5956
  source 1..120: mol_type = other DNA

SEQ ID NO: 19398 - DNA, 120 bp, synthetic construct
  source 1..120: mol_type = other DNA
gggatgtagggaaagtagtgcttgcctattattggtgtcagagaaaaggaccagaagaaacagggtaaggaaaaggcatgttattaaagatagaaaataggagagtgcagagggtcaaag

SEQ ID NO: 19399 - DNA, 120 bp, synthetic construct
  source 1..120: mol_type = other DNA
caaaagatatgaggctgcaaagtttaaaaaggaacgatacatttaaaataatcagaatagtgtttacttcttcagtgggagagaaggagatgtgatcagggaggagaacacagaagactt

SEQ ID NO: 19400 - DNA, 120 bp, synthetic construct
  source 1..120: mol_type = other DNA
taaaaaattaagggaacaaatcttatcctcaaggagagacgtaatgatggaggaaggaatatagaaggagacaaaaaggagggagtcttgatgaaaagggagatgggaggcagcttttaa

SEQ ID NO: 19401 - DNA, 120 bp, synthetic construct; identical to SEQ ID NO: 5957
  source 1..120: mol_type = other DNA

SEQ ID NO: 19402 - DNA, 120 bp, synthetic construct
  source 1..120: mol_type = other DNA
taacccacacctcatcttaatttatttgccttcaattctgggcggcggtgttggggagggtctcaattttcccatgtatttcccagtgtttattgaatacatgaggccatactcttctag

SEQ ID NO: 19403 - DNA, 120 bp, synthetic construct
  source 1..120: mol_type = other DNA
acttaagagggcaagctcagacatacataatctggagtggatcttccatgggaaaacacgtatataacagaaattattggcaaaactataagtatggtctacagagtaagtaataatatt

SEQ ID NO: 19404 - DNA, 120 bp, synthetic construct
  source 1..120: mol_type = other DNA
ttcagcctcctgagtagctgggattacagacacccaccaccacaccccgctaatttttttttttttttttttttttttttgtagagacgaggtttcaccatgttgaccaggctgatctca

SEQ ID NO: 19405 - DNA, 120 bp, synthetic construct; identical to SEQ ID NO: 5958
  source 1..120: mol_type = other DNA

SEQ ID NO: 19406 - DNA, 120 bp, synthetic construct
  source 1..120: mol_type = other DNA
taaatcttaaatagtgaatagaattaagaaagtaacaaattctaattccttcctttttttctttaaattcttctagatcctgaataatttctacttaaacgtcccaatatcaactctcta

SEQ ID NO: 19407 - DNA, 120 bp, synthetic construct
  source 1..120: mol_type = other DNA
caagacaattggcagcatttttttcatgtcattttgctacattctacataatgttaagttgaggttagggattttcatttgtggaggaagctcttacatttagtttaatgaatcataatt

SEQ ID NO: 19408 - DNA, 120 bp, synthetic construct
  source 1..120: mol_type = other DNA
ttaattctacactctgcctctgattgacacctctgcaaacaaagataaagtagataaaacatgaataattccaggaaacttatgccccagaatacagaataattttgcatacatatgaat

SEQ ID NO: 19409 - DNA, 120 bp, synthetic construct; identical to SEQ ID NO: 5959
  source 1..120: mol_type = other DNA

SEQ ID NO: 19410 - DNA, 120 bp, synthetic construct
  source 1..120: mol_type = other DNA
tcacaaacacccaggctgagttttgataagacaggttgaatcacactggggtgacagcctcatccctccaggtacaaacaagaacaggccatggttaaccaaagctcccccatgggcttc

SEQ ID NO: 19411 - DNA, 120 bp, synthetic construct
  source 1..120: mol_type = other DNA
cccaggctccactctccaatgtactttttcctctctgacctctccttcttggacctctgctttaccacaagttgtgtcccccagatgctggtcaacctctggggcccaaagaagaccatc

SEQ ID NO: 19412 - DNA, 120 bp, synthetic construct
  source 1..120: mol_type = other DNA
gccaccatcatccacccccgcctgtgctggcagctggcatctgtggcctgggttatgagtctggttcaatcgatagtccagacaccatccaccctccacttgcccttctgtccccaccag

SEQ ID NO: 19413 - DNA, 120 bp, synthetic construct; identical to SEQ ID NO: 5960
  source 1..120: mol_type = other DNA

SEQ ID NO: 19414 - DNA, 120 bp, synthetic construct
  source 1..120: mol_type = other DNA
aggaacaaggagataaagcgagcactcaggaggttactagggaaggaaagagactccagggaaagctggagagctgcttaatatactttcgaaagtaagaagagtttcttcaagatttat

SEQ ID NO: 19415 - DNA, 120 bp, synthetic construct
  source 1..120: mol_type = other DNA
tctatgagagggagaatgagaaagagagggacagagagataaaagaaattgggtgagaggagataggtagctccataaggcacacaaattcaaatattatcattcctatcactgtccatt

SEQ ID NO: 19416 - DNA, 120 bp, synthetic construct
  source 1..120: mol_type = other DNA
gaactactccatcatagcattctggacaccttgcatgtatctacgtaggtcatgtaagcaaaggcttgaagaacagctaatctgagatttagaagaatgctttttgatcctcctggaata

SEQ ID NO: 19417 - DNA, 120 bp, synthetic construct; identical to SEQ ID NO: 5961
  source 1..120: mol_type = other DNA

SEQ ID NO: 19418 - DNA, 120 bp, synthetic construct
  source 1..120: mol_type = other DNA
tatatgtaaataataagccatctaagtgtaaaagtggctcatatcttctccagccaaatcagctaggccatggccttgccttgcttctcatgagtgtgcttgacagtcatcaccgtcact

SEQ ID NO: 19419 - DNA, 120 bp, synthetic construct
  source 1..120: mol_type = other DNA
ggaaactccaagattaaggcagatttcatgcctattgagggcctgctttctgattatagaaggtgacttcttgctgtgcccacacatggtgaaagggactaccaactctctggagtctct

SEQ ID NO: 19420 - DNA, 120 bp, synthetic construct
  source 1..120: mol_type = other DNA
gaaggacataagcattcaaccccctgcacatgtcttctttcctacttcctcaaggttctttctgtccagttgctccttcttctattgacccttttttgccttctctttctccttcactgc

SEQ ID NO: 19421 - DNA, 120 bp, synthetic construct; identical to SEQ ID NO: 5962
  source 1..120: mol_type = other DNA

SEQ ID NO: 19422 - DNA, 120 bp, synthetic construct
  source 1..120: mol_type = other DNA
ttgttgctatcaagtaaccatatagtataggttacacagaactcctatcttctggattaagactccgtcttcaaagtatttgggcaccctggttactgaacatgagccagaagaaaatga

SEQ ID NO: 19423 - DNA, 120 bp, synthetic construct
  source 1..120: mol_type = other DNA
tgatgccataatctaccatatttttttaaattaagtcatgccaggaggagatttctctgctcctcatcacatgtttccaccagaaacatgggcagctccgcatcttgggcttcaccacct

SEQ ID NO: 19424 - DNA, 120 bp, synthetic construct
  source 1..120: mol_type = other DNA
agcagaaaaaccaagtcctgcatgggaaccttggtcttagaccagagctgttcacctaccttcttcactccattttagcagccaatgtcattaattcccattcctcacaattgacactca

SEQ ID NO: 19425 - DNA, 120 bp, synthetic construct
  source 1..120: mol_type = other DNA
accaactcatctgatttaaaagaaatgcttttaagcatggattgcactgcttcaggcagagaggaaataaaaccagagggaaaatcagaatatcatgaatgaaaaaggaacaacagaaag

SEQ ID NO: 19426 - DNA, 120 bp, synthetic construct; identical to SEQ ID NO: 5963
  source 1..120: mol_type = other DNA

SEQ ID NO: 19427 - DNA, 120 bp, synthetic construct
  source 1..120: mol_type = other DNA
agataggaggttggcataagatataggtcacaaagatcctgctgataaaacaggatgctgtaaggaagccggccaaaaccaagatggcaatgaaagtgacctctggtcctcctcactgtt

SEQ ID NO: 19428 - DNA, 120 bp, synthetic construct
  source 1..120: mol_type = other DNA
actttcagttctgagaattgcccaccgtcttcccagaaaacttatgaataatccactccgtgtttagtatataatcaagaaataactgtaagtatactcagttgagcagcccatgccact

SEQ ID NO: 19429 - DNA, 120 bp, synthetic construct
  source 1..120: mol_type = other DNA
ggattggggcccctttccagtaacacagtgacatcaacaaaaataacagagtaatgacttccaaaaatgacctacttcctaagagtaaaatgaactatggaagaattgtcagaattaata

SEQ ID NO: 19430 - DNA, 120 bp, synthetic construct; identical to SEQ ID NO: 5964
  source 1..120: mol_type = other DNA

SEQ ID NO: 19431 - DNA, 120 bp, synthetic construct
  source 1..120: mol_type = other DNA
tcccagagagaacaatgtatttcctggggaaatgagtaaaaagaatcataggcagttgttgaacatcatggttgccgacggtcataaataacagttggaacaaacaatagcctaaccaag

SEQ ID NO: 19432 - DNA, 120 bp, synthetic construct
  source 1..120: mol_type = other DNA
atatatgctttgaacagacctgagcaggctctaagctctaaccctgaataagtttgaggcactgcacagacaggaaatgaaggctaggacacagtgtaaactgcttggttgggctttgaa

SEQ ID NO: 19433 - DNA, 120 bp, synthetic construct
  source 1..120: mol_type = other DNA
cagtctttacctggccactaagctaaccaagcagagacttcagtggccacgttgaacaacaacaacaacaaaaacaaaacaaaacaaaaaaacaaaaaagaacagacttgacagatagtt

SEQ ID NO: 19434 - DNA, 120 bp, synthetic construct; identical to SEQ ID NO: 5965
  source 1..120: mol_type = other DNA

SEQ ID NO: 19435 - DNA, 120 bp, synthetic construct
  source 1..120: mol_type = other DNA
ccctaatccagtaggactagtgtccttataagaagacgagattaggatacaaacaccacaagggacaacgatgtgaggacacagggagaagatatccatctaggagccagggaaagagtc

SEQ ID NO: 19436 - DNA, 120 bp, synthetic construct
  source 1..120: mol_type = other DNA
agctgatgatcacagttgtgatgagaactttacaaattgaatcatgggaagtcttgcaatagtgagatctacgacctggtagatcctataatcctataatctgagatgctgattctacaa

SEQ ID NO: 19437 - DNA, 120 bp, synthetic construct
  source 1..120: mol_type = other DNA
gatttttctagaaatatgccacaggcaaccctggcatctgcagtcacatgtcagtatatcagtggggtttcaggagaagtttagggatcagctccaagtgaacctagtgtttcaatcttc

SEQ ID NO: 19438 - DNA, 120 bp, synthetic construct; identical to SEQ ID NO: 5966
  source 1..120: mol_type = other DNA

SEQ ID NO: 19439 - DNA, 120 bp, synthetic construct
  source 1..120: mol_type = other DNA
tgagacctggcagaacagggtaactggtccaacaaacatccctcctttcctctggctccacagctcaggattagatctagatagcatgtccagtaggtgccagactacctcattatatcc

SEQ ID NO: 19440 - DNA, 120 bp, synthetic construct
  source 1..120: mol_type = other DNA
ccagggcctggcctgagggtgtggatgtggggagaggagggtctgtgggcccaggagggggcatttgtaggggacattgagtactgcagctcagaagacatgaatgacagggtgggaggt

SEQ ID NO: 19441 - DNA, 120 bp, synthetic construct
  source 1..120: mol_type = other DNA
gatcctacatatgagtccttcatcagatgtgagattgaaaccacttcctccagcctggaacttgccttttcattctccccacagggtctttcaaagtgcacacatcttatattttgatga

SEQ ID NO: 19442 - DNA, 120 bp, synthetic construct; identical to SEQ ID NO: 5967
  source 1..120: mol_type = other DNA

SEQ ID NO: 19443 - DNA, 120 bp, synthetic construct
  source 1..120: mol_type = other DNA
ttctggaccctcttctgttctgttgacctatttgtccatcctgttaccaatatcacaccatctggatttctgaacctttataataagccttgaagtcgggtattataaactgtctcactt

SEQ ID NO: 19444 - DNA, 120 bp, synthetic construct
  source 1..120: mol_type = other DNA
tcatgaacatacatacatgtgcaccagaaatataaatatatgcacatcaagaccaagtgaaatttatcccagggatactaggcaggtttaacatgaaaaatgagccaatataattcacca

SEQ ID NO: 19445 - DNA, 120 bp, synthetic construct
  source 1..120: mol_type = other DNA
tgataaaaggcagctaccaaaaaaaaaatcctatggttgatatttagtgggtattacccttaataatgaaagactggatgctttcaccccagatgaggaacaagccaagaatgttggctc

SEQ ID NO: 19446 - DNA, 120 bp, synthetic construct; identical to SEQ ID NO: 5968
  source 1..120: mol_type = other DNA

SEQ ID NO: 19447 - DNA, 120 bp, synthetic construct
  source 1..120: mol_type = other DNA
tcttatctttgattttctgtacatatatgtcttgttcttctctggctgtttgtaggaggactcagtttcctgggcatagatatgcacgggaaagatgcagtaactacatcaagtgtggtg

SEQ ID NO: 19448 - DNA, 120 bp, synthetic construct
  source 1..120: mol_type = other DNA
tataaatgtgctgggaccattggataacaatcagctaagtgggccaagcagccttttggcttaggctgaagcaggataataatgttacctattaatagagtgtgaaaactggcttcatgt

SEQ ID NO: 19449 - DNA, 120 bp, synthetic construct
  source 1..120: mol_type = other DNA
caagtgcctcctggtgaggccgaaactccacaagacactctggtcagtcctggggtacagtttcttccaggtggcagaggctcagtcctggtcacccgctgatcccttctcaggatgtgc

SEQ ID NO: 19450 - DNA, 120 bp, synthetic construct; identical to SEQ ID NO: 5969
  source 1..120: mol_type = other DNA

SEQ ID NO: 19451 - DNA, 120 bp, synthetic construct
  source 1..120: mol_type = other DNA
caatgcagaagcagctgtgaatgtccagcttgctgctgggcctctaagaggtctgcaaaatacaaaaccatcttgctcttctcaataacataactttttaaagaaaacatagttattttt

SEQ ID NO: 19452 - DNA, 120 bp, synthetic construct
  source 1..120: mol_type = other DNA
caaccctgatccacaaaagttctttgagctgctcaatactatttaagactgagaatctcaggtctattttaagctctgggctctctctctttccccgcactttttccctcccggggagaa

SEQ ID NO: 19453 - DNA, 120 bp, synthetic construct
  source 1..120: mol_type = other DNA
aggagggatgggatcctctggagtaggtaccatttaaggggcacttttgaaagtcagttttttagacatccaagcccctttctccagttcaattttaggagcaatagaagtaatgcattg

SEQ ID NO: 19454 - DNA, 120 bp, synthetic construct
  source 1..120: mol_type = other DNA
tctccagttcaattttaggagcaatagaagtaatgcattgttctccatctgacactgtcctcattccttcattcactttcatcagtagttctcaattccagagggaaggaaggggattac

SEQ ID NO: 19455 - DNA, 120 bp, synthetic construct; identical to SEQ ID NO: 5970
  source 1..120: mol_type = other DNA

SEQ ID NO: 19456 - DNA, 120 bp, synthetic construct
  source 1..120: mol_type = other DNA
ggctaaggagctcataagactgaggtcctaatcctaaagaattaaaatcctcataagaatagaaagtgtccccagggatgtgggtacacagaaaaaggccatgtcatgacacagggagaa

SEQ ID NO: 19457 - DNA, 120 bp, synthetic construct
  source 1..120: mol_type = other DNA
tctatggcattttgttagaacaaaacacgctgactaaagacaggcagcccggatcagcccttctgtgctctagggccagggtttctgccattcacttatcaaaggacaacatcaaattat

SEQ ID NO: 19458 - DNA, 120 bp, synthetic construct
  source 1..120: mol_type = other DNA
gcatttaaagaattgctgtaatctaaacatctcagaattgctttagaatgtatcacattgaatatctaaaataagagaatgtacattgcttaccagtatcactggcacatttacaaacct

SEQ ID NO: 19459 - DNA, 120 bp, synthetic construct; identical to SEQ ID NO: 5971
  source 1..120: mol_type = other DNA

SEQ ID NO: 19460 - DNA, 120 bp, synthetic construct
  source 1..120: mol_type = other DNA
gaaggtgtggcctctgccctactggggcttcaagtgcaaatgaggcaggagtacaataaactgataacaacacacaacacagaatacatagaaaataattatagacaattatcttcacat

SEQ ID NO: 19461 - DNA, 120 bp, synthetic construct
  source 1..120: mol_type = other DNA
agggagtgctctaagcagggaagggagaaagggaccttgcaaggttgggcgcgagtctggtgcaaacaagggagagagtgaatcctgtgtgaggatgtcatgggacaaggtcaaatggtg

SEQ ID NO: 19462 - DNA, 120 bp, synthetic construct
  source 1..120: mol_type = other DNA
gggatggagctggggctggtcaggggctctcattaaggttctgaccatggtgggtgccgggcaacaccctggtcagggtggggaagaatgcatgacattctgcagggtgggattcctgtg

SEQ ID NO: 19463 - DNA, 120 bp, synthetic construct; identical to SEQ ID NO: 5972
  source 1..120: mol_type = other DNA

SEQ ID NO: 19464 - DNA, 120 bp, synthetic construct
  source 1..120: mol_type = other DNA
ctctcagaaatatggagcttgcagaagccaggaaggttgaactagtttacagtcccaccaacagtgtaaagatgttcctatttctccacatcctctccagcacctgttgtttcctgactt

SEQ ID NO: 19465 - DNA, 120 bp, synthetic construct
  source 1..120: mol_type = other DNA
cctcagggatctagaactagaaataccatttgacccagccatcccattactgggtatataccgaaaggattgtaaatcatgctgctataaagacacatgcacacgtatgtttattatgac

SEQ ID NO: 19466 - DNA, 120 bp, synthetic construct
  source 1..120: mol_type = other DNA
catgtcctttgtagggacatggatgaagctggaaaccatcattctcagcaaactagtgcaaggacaaaaaaaccaaacaccgcatgttctcactcataggtgggaattgaacaatgagaa

SEQ ID NO: 19467 - DNA, 120 bp, synthetic construct; identical to SEQ ID NO: 5973
  source 1..120: mol_type = other DNA

SEQ ID NO: 19468 - DNA, 120 bp, synthetic construct
  source 1..120: mol_type = other DNA
aattcagtcagaaatctggttactctgaaaatacacaaaggtaataaataatctcaagaacattcaccctgctccttggaggatccagcatgttttccagacatgatcccttttacagcc

SEQ ID NO: 19469 - DNA, 120 bp, synthetic construct
  source 1..120: mol_type = other DNA
catgcctccatctcactcaacaaagccctctgaaaaacagcctttagggactccctgtgcctcttcctgtagagttactcagccaagaagtagatgactaggtgaggcatgctgaccaca

SEQ ID NO: 19470 - DNA, 120 bp, synthetic construct
  source 1..120: mol_type = other DNA
taggtcctgatgggggaacaccactggggacagcacagaccccagatgatcaggatcagcttggacatgcccattacaaagcaaataagtacatgacatgtcataaagcctcatgaaatt

SEQ ID NO: 19471 - DNA, 120 bp, synthetic construct; identical to SEQ ID NO: 5974
  source 1..120: mol_type = other DNA

SEQ ID NO: 19472 - DNA, 120 bp, synthetic construct
  source 1..120: mol_type = other DNA
gccagcagatcacatcattgcctaccagtccacagagggccaccagcactgtcagggagaagaccacctgcctgtccaccaaccactcacctcccgtatggctcatgttcacatgtcctg

SEQ ID NO: 19473 - DNA, 120 bp, synthetic construct
  source 1..120: mol_type = other DNA
ggtctggagaggagagtcagggttgccctctgtcctcagaggttcctgctgagcctcatgagattggcagggattctgcagagcagagtggaggaaaggagcaagcttcttgtgggagac

SEQ ID NO: 19474 - DNA, 120 bp, synthetic construct
  source 1..120: mol_type = other DNA
tcccgtgcacccagattatctataaggctgcataaaaaaatacatttgtttacattagcccatagggatggttctccaactttcccactggtacaggctgtttttgtgacatcgttttgg

SEQ ID NO: 19475 - DNA, 120 bp, synthetic construct; identical to SEQ ID NO: 5975
  source 1..120: mol_type = other DNA

SEQ ID NO: 19476 - DNA, 120 bp, synthetic construct
  source 1..120: mol_type = other DNA
tactttgtctttaaaattctgttcactgccttttctccagcccctggaacagggtttgacactgaggagctacttggggagggtgcctgcagaggacttaagttgctctgttacatgtag

SEQ ID NO: 19477 - DNA, 120 bp, synthetic construct
  source 1..120: mol_type = other DNA
caggtctttgtgtgaagaattgtgcagggagggcaaaggtaccactttgccttagaatttcctagtttgtattcctgaaaattccttgtcctgaatatcccgatagccctgggaaaacca

SEQ ID NO: 19478 - DNA, 120 bp, synthetic construct
  source 1..120: mol_type = other DNA
tatgtgggcaaatcacagctatctttgataagcagtggatccttttctgcctcagtattcccagctatctaagggttgctgttattagctgaattgtgaccttctaaattcatatgttaa

SEQ ID NO: 19479 - DNA, 120 bp, synthetic construct; identical to SEQ ID NO: 5976
  source 1..120: mol_type = other DNA

SEQ ID NO: 19480 - DNA, 120 bp, synthetic construct
  source 1..120: mol_type = other DNA
gacttctatcatttaagtcactcagtctgtggtcttagtcatgggagtccaagctgatgatcacagtagtgaagagaactttatacatggaatcatgggaagtctcagaatggtgagacg

SEQ ID NO: 19481 - DNA, 120 bp, synthetic construct
  source 1..120: mol_type = other DNA
ttgatgaaagcctaagatatgccaggaaatatctcacacgtgaccctgtgatctgcagtcacatattggtgcatcagtggggtttcaggagagtgctagggaccagctccaagtgagccc

SEQ ID NO: 19482 - DNA, 120 bp, synthetic construct
  source 1..120: mol_type = other DNA
ttatctgaggccaggagaggaaagcagatccagcttatatctaatctggtcataagacgaggcttggggcttagtaacattggtgtccatggaaacatcaggctgatgtgcggttctgtg

SEQ ID NO: 19483 - DNA, 120 bp, synthetic construct; identical to SEQ ID NO: 5977
  source 1..120: mol_type = other DNA

SEQ ID NO: 19484 - DNA, 120 bp, synthetic construct
  source 1..120: mol_type = other DNA
cggcatctggtgtggccccagcactgggcatagagacatcctggtacttggaaatgtcatttgtggtcttgggaatgtcatttccaagttgggtcatgagccaggctccccaaggagtag

SEQ ID NO: 19485 - DNA, 120 bp, synthetic construct
  source 1..120: mol_type = other DNA
ggcgagagcccaccctccccacttaatttttatctgaggtgaaattcacataacagaaattaaccaatttagagtgcacagttctgcctcactttgcctcttcacaatattgcgcaaccc

SEQ ID NO: 19486 - DNA, 120 bp, synthetic construct
  source 1..120: mol_type = other DNA
ccattctggacacgtcctattagtggaatcaaaccttccgtgacattttgtttctgtttctttcactcagcctcatgttttcatggcttgttcatggtgcagcatgtgccagaacttcat

SEQ ID NO: 19487 - DNA, 120 bp, synthetic construct; identical to SEQ ID NO: 5978
  source 1..120: mol_type = other DNA

SEQ ID NO: 19488 - DNA, 120 bp, synthetic construct
  source 1..120: mol_type = other DNA
taaaaaatgagtctttgagttaaaatgctttgaaaatgaaaaaaaaggtagagaccttttttctcatacctgggaggacttggacggacttggtatcacagaggccaacctcctgagaga

SEQ ID NO: 19489 - DNA, 120 bp, synthetic construct
  source 1..120: mol_type = other DNA
tatcagagcccaggcctttaactgaagcatctttatctcaacatctcacgatatcccccaatcctgtctgactctattactctgtccttaagaactgtcccctgaaacaaagaagaatct

SEQ ID NO: 19490 - DNA, 120 bp, synthetic construct
  source 1..120: mol_type = other DNA
agaggaaagtcaggtcagcattttcccaatgaactcaggaattccagtagctcaaacgtgctccttggattttgtcatgaattgaattgcatgttttgtaaagtaaaattaatgtaagaa

SEQ ID NO: 19491 - DNA, 120 bp, synthetic construct
  source 1..120: mol_type = other DNA
agtcatgaatgatccataaacataatgtaaagaagtcttgggaatgtttttgtgctgtgccacttaccaagcaggttctgacacaacatattggcaaattcttactgaaagccagatcaa

SEQ ID NO: 19492 - DNA, 120 bp, synthetic construct; identical to SEQ ID NO: 5979
  source 1..120: mol_type = other DNA

SEQ ID NO: 19493 - DNA, 120 bp, synthetic construct
  source 1..120: mol_type = other DNA
aatacactatgatcaaagggtgacaagatgttaaaatacacccctccttgtccttcggtgctgactggctgtttacctcactgcagagatagaatctgagaagacctcaaggtcacatag

SEQ ID NO: 19494 - DNA, 120 bp, synthetic construct; identical to SEQ ID NO: 5980
  source 1..120: mol_type = other DNA

SEQ ID NO: 19495 - DNA, 120 bp, synthetic construct
  source 1..120: mol_type = other DNA
cctgccctgtgtccatgtgttctcatttttcaattcccacctatgagtgagaacatgccgtgtttggttttctgtccttgcgatagtttgctgagaatgatggtttccagcttcatccat

SEQ ID NO: 19496 - DNA, 120 bp, synthetic construct
  source 1..120: mol_type = other DNA
ttgctattgtgaatagtgccgcaataaacatacgtgtgcatgtgtcttcatagtagcatgatttataatccttcgggtatatacccagtaatgggatcactgggtcaaatggtatttcta

SEQ ID NO: 19497 - DNA, 120 bp, synthetic construct
  source 1..120: mol_type = other DNA
gactttttaatgactaccattttaactggcatgagatggtatctcattgtggttttgatttgcatttctctaatgaccagtgatgataagcccttttcatatgtttgtttgccacataaa

SEQ ID NO: 19498 - DNA, 120 bp, synthetic construct; identical to SEQ ID NO: 5981
  source 1..120: mol_type = other DNA

SEQ ID NO: 19499 - DNA, 120 bp, synthetic construct
  source 1..120: mol_type = other DNA
tttgcccatgcctatgttctgaatgatattgcctagttctagggtttttatggttttaggtctcatgtttaaatctttaatccatcttgagttaatttttgtataagctgtataaaaggg

SEQ ID NO: 19500 - DNA, 120 bp, synthetic construct
  source 1..120: mol_type = other DNA
gtgtggtgctatttctgaggtctctgttctgtttcattggtctatatatctgttttggtaccagtaccatgctgttttggttactgtagccttgtagtatattttgaagtcaggtatcgt

SEQ ID NO: 19501 - DNA, 120 bp, synthetic construct
  source 1..120: mol_type = other DNA
gatggggatagcattaaatctatcaattactttgggcagtatggcttttttcacgatattgattcttcctatccacaagcatggaatgttttcccatttgtttgtgtcctcttttgtttc

SEQ ID NO: 19502 - DNA, 120 bp, synthetic construct; identical to SEQ ID NO: 5982
  source 1..120: mol_type = other DNA

SEQ ID NO: 19503 - DNA, 120 bp, synthetic construct
  source 1..120: mol_type = other DNA
aagccacactcagataattttataaacataaatctaggccctggtttaacaacaatgggcatcaatgtatgaggcaagcttatctagtactaggattccagtttgctgtgtagcattccc

SEQ ID NO: 19504 - DNA, 120 bp, synthetic construct
  source 1..120: mol_type = other DNA
attgaagcacaagacacctgtagatagggctgctgcaagatgttcaagtcagtggcacaatgtcttgaaaaaattagaattatccacttttacttctggcatcttcagaatattgtcctc

SEQ ID NO: 19505 - DNA, 120 bp, synthetic construct
  source 1..120: mol_type = other DNA
gaacttcctttccttccatctctttttatatctgtgaaaactcttcttagagtcataccacatagaatgtcctgcgatatctcattggaatgccctcaccataaccaacacttaggcctt

SEQ ID NO: 19506 - DNA, 120 bp, synthetic construct; identical to SEQ ID NO: 5983
  source 1..120: mol_type = other DNA

SEQ ID NO: 19507 - DNA, 120 bp, synthetic construct
  source 1..120: mol_type = other DNA
agtgaattgtccatagacactggaacttccctctgggagattttccttatttggtttattccgtggccacacctgggtgtttgaggtgaaacacctttctaatgtttgttcatatttcac

SEQ ID NO: 19508 - DNA, 120 bp, synthetic construct
  source 1..120: mol_type = other DNA
cttttattttaagaggtggggagtagtaatttcattaaaaacttttgtcttacaaattccctggaaacaatctcatgaaaatatttatcaatgtaatttgtgtgtgtgtgtgtgcgtgtg

SEQ ID NO: 19509 - DNA, 120 bp, synthetic construct
  source 1..120: mol_type = other DNA
agatgcatctctgcagtagggacagtgggattttctgccttgggagcaggtaaaaccagtattgttgcaataaacaccctgtcacggatatcacttggtaacactattttgtctctgtaa

SEQ ID NO: 19510 - DNA, 120 bp, synthetic construct; identical to SEQ ID NO: 5984
  source 1..120: mol_type = other DNA

SEQ ID NO: 19511 - DNA, 120 bp, synthetic construct
  source 1..120: mol_type = other DNA
gcatagattcattttatattatctcatgtaggtaagacttctttaatcataactcaatacataagccataaaagactgacaaattcaaatttataaaaacggtgtgcttgacaataacat

SEQ ID NO: 19512 - DNA, 120 bp, synthetic construct
  source 1..120: mol_type = other DNA
acaaagacctgtccacgagaagtctcatgccccttccttcactctgacacctccttaacatgctcctgaaatgtcagcatcatgagacatgagctacacaatgatgcagtatgggaatta

SEQ ID NO: 19513 - DNA, 120 bp, synthetic construct
  source 1..120: mol_type = other DNA
acatatagaaatcattaaaaaaagttatttgacaaattacaccttaaaaggagactatacattattttaaacaccatggtggacaaaactgaccatgtcttcagccacagagtaaatctg

SEQ ID NO: 19514 - DNA, 120 bp, synthetic construct; identical to SEQ ID NO: 5985
  source 1..120: mol_type = other DNA

SEQ ID NO: 19515 - DNA, 120 bp, synthetic construct
  source 1..120: mol_type = other DNA
tggaaccattacaaattacaataatgttgtaagaaataaaagatcaataagaccagccagagaatgtgatcatagaaatgctcttaaagttgacctttttaactagagataaaacatgga

SEQ ID NO: 19516 - DNA, 120 bp, synthetic construct
  source 1..120: mol_type = other DNA
aagcaagatgaagaattaaatggtattaagttggagagaggatgaggtaaatttgctttcttcaaagtaaaaggtttgggtgtaaattctaacctagtgaggagggattatattatccaa

SEQ ID NO: 19517 - DNA, 120 bp, synthetic construct
  source 1..120: mol_type = other DNA
tcctcacaccaaccatgcatattaaataccaactttatcctcctcttgcataagatgaaacagagttacagagagttatttgcccacaataacatgctttgaatgggagagccaaagttt

SEQ ID NO: 19518 - DNA, 120 bp, synthetic construct; identical to SEQ ID NO: 5986
  source 1..120: mol_type = other DNA

SEQ ID NO: 19519 - DNA, 120 bp, synthetic construct
  source 1..120: mol_type = other DNA
taaagcattgatttgatgcagcagccttatgatgcagaacaggctgggttactatgtgtacaattccccagctcagatgtgggaaattatgtttccacatcgaccctgtgctccctggga

SEQ ID NO: 19520 - DNA, 120 bp, synthetic construct
  source 1..120: mol_type = other DNA
gattccttcagccttttctttctgaggctccccacaaagaaataaatgatagggttggcgctgctgtttataatgaggaacaaggaaattaaataggaggtggtgacaaacattttgaaa

SEQ ID NO: 19521 - DNA, 120 bp, synthetic construct
  source 1..120: mol_type = other DNA
atgagtagagtcagactcgacacacacatcacaagtgaaaggatagcatggaagagcccagaaagctttagaaatatgacacatgcctttacatgtttccagtaagttaggaaaagtgat

SEQ ID NO: 19522 - DNA, 120 bp, synthetic construct; identical to SEQ ID NO: 5987
  source 1..120: mol_type = other DNA

SEQ ID NO: 19523 - DNA, 120 bp, synthetic construct
  source 1..120: mol_type = other DNA
cagagggagaccagcacagccttgggggcaatgatattcaagggcagggcctgctgtcccactgccatgctcatctgcatatgtatggtttcattcgtctcattttgaagaaagacgcca

SEQ ID NO: 19524 - DNA, 120 bp, synthetic construct
  source 1..120: mol_type = other DNA
cagcaaattttcccccagaccatggggtgctgggacctgagtgggccacaacatcacagtcaggagcagtggtccatctagtggtgtcctctggcctcagaccccttgcctctacatttt

SEQ ID NO: 19525 - DNA, 120 bp, synthetic construct
  source 1..120: mol_type = other DNA
ctgttctccctcccctaacacatctcctgttgtacaggatgccccaggcctacccacatagacccaatatcttgttgttgggcactaatgaggcactaaacattgggaatggagatttgt

SEQ ID NO: 19526 - DNA, 120 bp, synthetic construct; identical to SEQ ID NO: 5988
  source 1..120: mol_type = other DNA

SEQ ID NO: 19527 - DNA, 120 bp, synthetic construct
  source 1..120: mol_type = other DNA
aacccagtcctgggcatccttgggtagccatacaggatgcagcagtgccacagtatggcatttccctgggctcagacaggtacaagggagcactgagatttccaaggcaggcatttcaca

SEQ ID NO: 19528 - DNA, 120 bp, synthetic construct
  source 1..120: mol_type = other DNA
cgtgagtctcaggcagtgtctgtgtgggcatcatcgactgctatgctccaaatgtcagctgaggagaaggaaatgaacagacttagggtgcaacaaatacaaaagaggcctaagaatatt

SEQ ID NO: 19529 - DNA, 120 bp, synthetic construct
  source 1..120: mol_type = other DNA
tgtaaatatttatatattaataaattatattaatataacattgctatattaacatgttattaatattgatgttaatatattcacattatatatttatgttaatatattaattatattaat

SEQ ID NO: 19530 - DNA, 120 bp, synthetic construct
  source 1..120: mol_type = other DNA
attgctgttgtcccaggtttattgaaaataaaatccagtgactgctgtatattacagcattggagaaagagtcaaacagctccacgaggcattttgaaattcatcccaactgtaggccga

SEQ ID NO: 19531 - DNA, 120 bp, synthetic construct; identical to SEQ ID NO: 5989
  source 1..120: mol_type = other DNA

SEQ ID NO: 19532 - DNA, 120 bp, synthetic construct
  source 1..120: mol_type = other DNA
ttgcccaggcacatgtagtacttttctacgatgacctaggccaccttcgtcacagtcttgatgccaacacgacccatgttggtgggtctttggtcattaatattaattgatattaacatt

SEQ ID NO: 19533 - DNA, 120 bp, synthetic construct
  source 1..120: mol_type = other DNA
atgtgaatatattagcatattaacagtatatattaatatatttggtatactatattaatattatttatatgatatgaatatgctattagtggcatattaataacaatatattaataatat

SEQ ID NO: 19534 - DNA, 120 bp, synthetic construct
  source 1..120: mol_type = other DNA
taattgttatttttatagaatctggaattgtggagcagacttcgcaaggcttctctgacctctgcctcccgctctgggatctgtgaaacacactgggctcttcttctagacctccctttt

SEQ ID NO: 19535 - DNA, 120 bp, synthetic construct; identical to SEQ ID NO: 5990
  source 1..120: mol_type = other DNA

SEQ ID NO: 19536 - DNA, 120 bp, synthetic construct
  source 1..120: mol_type = other DNA
cttcatctgctttgttaatctttgatgctcctgtccagagagggcctcttaagcaacttgagtgcaataactatttttctattattgcgttaataaaccccaagaaggtccctgcaactc

SEQ ID NO: 19537 - DNA, 120 bp, synthetic construct
  source 1..120: mol_type = other DNA
gtggtggggcctgaccacagcttcctctttcaaccatggaatccttatcactattttgcaaacaccaaagatgtagcctcagatgtgaatctactcacatgctggaagtttgtccatgat

SEQ ID NO: 19538 - DNA, 120 bp, synthetic construct
  source 1..120: mol_type = other DNA
tcaagactctgagacagaggccaagagcctagcatgcaaaacacctcagacaatgcatccagggtaggggagaactgatatgaaccattcacccttagccaaaaacctgctcaccttggg

SEQ ID NO: 19539 - DNA, 120 bp, synthetic construct; identical to SEQ ID NO: 5991
  source 1..120: mol_type = other DNA

SEQ ID NO: 19540 - DNA, 120 bp, synthetic construct
  source 1..120: mol_type = other DNA
ttggcagagaagctgagctcactaaagcaggatgtatctgtaacaagaaaaaaatccttaaatgagttgctatagctgatccatgggaatgcccaaaaagatgttacagatttcactagg

SEQ ID NO: 19541 - DNA, 120 bp, synthetic construct
  source 1..120: mol_type = other DNA
gcttccaaaatgtgtctccagtcaaggacaggccaagatgactcatcaaagaaatgcaaatcaaaaccacaactagatagcaccttacgcctgttaggatggccattctggaaaaacaaa

SEQ ID NO: 19542 - DNA, 120 bp, synthetic construct
  source 1..120: mol_type = other DNA
gaactgcaccgtatggtccagaaatcccacttctgagtatttgtccaaaagaattgaaatcaggttttcaaagaaatattagcactcttatgtttgctgcaatactattcacaatagcca

SEQ ID NO: 19543 - DNA, 120 bp, synthetic construct
  source 1..120: mol_type = other DNA
ctcacgcctataatcccagcactttgggaggccaaggtgaatggatcacgaggtcaggagttcaagagcaacttgaccaacatggtgaaaccccgtctctactaaaaatacaaaaattag

SEQ ID NO: 19544 - DNA, 120 bp, synthetic construct; identical to SEQ ID NO: 5992
  source 1..120: mol_type = other DNA

SEQ ID NO: 19545 - DNA, 120 bp, synthetic construct
  source 1..120: mol_type = other DNA
aggacaggaagtagggagctagtagtcagtgggcataaagtttcagtttaacaaaatagataagcactagagctctactgcacaaaagtagtagttgcctatagttaacaacagtgtact

SEQ ID NO: 19546 - DNA, 120 bp, synthetic construct
  source 1..120: mol_type = other DNA
ctacttgtgggtttgaaaattaaatgggtggatagcatgtaagtgcatggaacagtgatgagcatatagtgagagatgaatgaataaatactgtcctgttgggacagatgaatgtcaata

SEQ ID NO: 19547 - DNA, 120 bp, synthetic construct
  source 1..120: mol_type = other DNA
tcttaaggaaaacgggaaagacagtgagccacttaggttggtcctttctgagctgacaatattttctggctttttcaggaagccaatcctgggaatatctagaggaatagtgctgcaggt

SEQ ID NO: 19548 - DNA, 120 bp, synthetic construct
  source 1..120: mol_type = other DNA
agagaggtaggcaggtgtggaatcatataggccaagataagaagtttgaattttaagtgcaatgtccaggtgttggaaagttttaagctcagataataatattatctggatttatttatt

SEQ ID NO: 19549 - DNA, 120 bp, synthetic construct; identical to SEQ ID NO: 5993
  source 1..120: mol_type = other DNA

SEQ ID NO: 19550 - DNA, 120 bp, synthetic construct
  source 1..120: mol_type = other DNA
gataatagatctcgtgtcaagaattcttaccaaaatgaagcaaaattcgcacacaaaaaaagaataagcaaggatggattccagtccccagtcctcaaatgaagggttgcactgtcctga

SEQ ID NO: 19551 - DNA, 120 bp, synthetic construct
  source 1..120: mol_type = other DNA
taatgttctttcccttggggaaaacacatctaaaatccttgcaaaaactcctccgaattagagagatgagaaagagagtcagatgaagagagaacacagttctcatcttacctgtgacat

SEQ ID NO: 19552 - DNA, 120 bp, synthetic construct
  source 1..120: mol_type = other DNA
tctcttgggcttccagaagttactggaccttgagcaactttgatcaagattcccatgtgctccttgtttttcttctggccaatgagtggcttctatctgtggggacagatagctgagcat

SEQ ID NO: 19553 - DNA, 120 bp, synthetic construct
  source 1..120: mol_type = other DNA
cccctgactccctcatcctagggacagggaatagggccttgcaaggagtagacccagttccaagttggatatgttgagtcagtttctagtgagctgaacttcatggcattgctcttgata

SEQ ID NO: 19554 - DNA, 120 bp, synthetic construct; identical to SEQ ID NO: 5994
  source 1..120: mol_type = other DNA

SEQ ID NO: 19555 - DNA, 120 bp, synthetic construct
  source 1..120: mol_type = other DNA
tgagctcactgtcattttaccttctcagtacttttcccttgctctgatctcacctgccacattcactttaagaatgcacatttctagattattgattttccaactgagttgtcccgaggg

SEQ ID NO: 19556 - DNA, 120 bp, synthetic construct
  source 1..120: mol_type = other DNA
ctgatgttctgtaaacagttatttcattttctctgttcaaagatggtttgtacccaccatcttcatgtaacagtttcttggtcacttaccatgtgaatatgcagtctctgggcatggagt

SEQ ID NO: 19557 - DNA, 120 bp, synthetic construct
  source 1..120: mol_type = other DNA
cgtattgttaccctgagagaaaatgtcttgcttaagtgtagaataacattttctgttgtctcttgtcacccctcctagccttttccccacaatcccacagtcatgttgatgcatgctgaa

SEQ ID NO: 19558 - DNA, 120 bp, synthetic construct
  source 1..120: mol_type = other DNA
cccagtttccacagtgccctttcatggcctttctcctggacatacgaagtgtgcttctcagaggagttttacttagtggaattatctgtctcttaaagtgtaatctgtatcttttgaatg

SEQ ID NO: 19559 - DNA, 120 bp, synthetic construct; identical to SEQ ID NO: 5995
  source 1..120: mol_type = other DNA

SEQ ID NO: 19560 - DNA, 120 bp, synthetic construct
  source 1..120: mol_type = other DNA
aattaacttgtcaagagaaggaagaaaagaaagaaatgaaatggtcaggtatcccttgaagattctgatggtcacacagagggaaagagccttgtgtgtgggaccttgagtgtcaggcca

SEQ ID NO: 19561 - DNA, 120 bp, synthetic construct
  source 1..120: mol_type = other DNA
tctattgattcttcattgctggggtttccaacctacagggatgaggactgatgcatctgtgaatgagcatgccattccctggcagacacctgagttcattgcttgctaagaacttggttc

SEQ ID NO: 19562 - DNA, 120 bp, synthetic construct
  source 1..120: mol_type = other DNA
ggaaattcagcataagcaaggttcacattcaggtgtatgcttaaattctaggtattcatctcattcatgaactcaatcagtagccagagtttccaggatgcctagggattgcccccaagg

SEQ ID NO: 19563 - DNA, 120 bp, synthetic construct; identical to SEQ ID NO: 5996
  source 1..120: mol_type = other DNA

SEQ ID NO: 19564 - DNA, 120 bp, synthetic construct
  source 1..120: mol_type = other DNA
caaggggcatgaaaaaaattactggatgacaaaaaaaatacatcaccaaagatcaataaaacatttgtagaacaccccacggagatgtgatctgcccactgtacagatcagaagagcttc

SEQ ID NO: 19565 - DNA, 120 bp, synthetic construct
  source 1..120: mol_type = other DNA
tcattggtgatgccatttctctttgctttctcttcttttcttgggaagacttctctgtctacatttgtatatttatttggctgactttccctgaatttgctgcctgactgagtaatttat

SEQ ID NO: 19566 - DNA, 120 bp, synthetic construct
  source 1..120: mol_type = other DNA
aaagacgtcaccatccacaggaagtgtttgtcattgtacccaatctggtctcagtagcaccatttacataccaatagtgtaaatctctgtgtttcttatagacacatgatatggtttgga

SEQ ID NO: 19567 - DNA, 120 bp, synthetic construct; identical to SEQ ID NO: 5997
  source 1..120: mol_type = other DNA

SEQ ID NO: 19568 - DNA, 120 bp, synthetic construct
  source 1..120: mol_type = other DNA
ctatcttgttctctggtatctttattaaagcattttcagtgtctgctcatgctctcttctttaacaataatgtgctttctgtgtttattcctgtgacatgcagcagccagcactgccagc

SEQ ID NO: 19569 - DNA, 120 bp, synthetic construct
  source 1..120: mol_type = other DNA
ttaaaatcctccagtaccaaaagttgtttaagacaaaaacaaatagttaatttccagttagcaaagctttctctttgtattaagtatgctttaatcacatattcaaaaacatgtggtttc

SEQ ID NO: 19570 - DNA, 120 bp, synthetic construct
  source 1..120: mol_type = other DNA
atgaatgcaggcattcctttggagcatatatccaacgaaaaggagtgaaattactgggtcagcaacttctttttttttttaatatttgattaaatgaaatgttttacatctctctgttcc

SEQ ID NO: 19571 - DNA, 120 bp, synthetic construct; identical to SEQ ID NO: 5998
  source 1..120: mol_type = other DNA

SEQ ID NO: 19572 - DNA, 120 bp, synthetic construct
  source 1..120: mol_type = other DNA
ctgttactaacttttaatttattaccatggtggtcagaaaacagacttgatatgattttaatcttcttaaatttgttaagatttgttttgtggcttaatatatgatctatcttagagaat

SEQ ID NO: 19573 - DNA, 120 bp, synthetic construct
  source 1..120: mol_type = other DNA
ttgtgtctggacaatctatccgttgttgaaagtggggtataaaagtttcctgctaatgttgtgttgctgtctgtttctcccttcattgtgttcatattttcgttacatatttaggtgctc

SEQ ID NO: 19574 - DNA, 120 bp, synthetic construct
  source 1..120: mol_type = other DNA
tctgatgtgtgtatagccacccctcttctctactagctaccatctgcatggaacatcttcttccatcccttcacttttagcctatgtgtgtccttaaagatatattgaatccctcagatg

SEQ ID NO: 19575 - DNA, 120 bp, synthetic construct; identical to SEQ ID NO: 5999
  source 1..120: mol_type = other DNA

SEQ ID NO: 19576 - DNA, 120 bp, synthetic construct
  source 1..120: mol_type = other DNA
ccctacactttaacttcttctctctacacatttttatgttattcatgtcacaatttacatcttttcatactctgtatccaccaacaaattattatggctataattgttttattttatctt

SEQ ID NO: 19577 - DNA, 120 bp, synthetic construct
  source 1..120: mol_type = other DNA
gttcccctcgcggggcacgtgatgggggtgtggcttgcttcttcagtgccccactgctcaaacctctaggggagcatacagatgggcagattgtggggctccgaccccacggtggcatct

SEQ ID NO: 19578 - DNA, 120 bp, synthetic construct
  source 1..120: mol_type = other DNA
cacaataccacccaacacaaattcaatgcaattgattccccagcagttgaactcaatcacaatgccactggccttgttctaaaaattaaagaactgctgcaggaagggccctataaattt

SEQ ID NO: 19579 - DNA, 120 bp, synthetic construct; identical to SEQ ID NO: 6000
  source 1..120: mol_type = other DNA

SEQ ID NO: 19580 - DNA, 120 bp, synthetic construct
  source 1..120: mol_type = other DNA
ctctctctgggcaacttcagactgtttccccactgtgctgtcctagaaggggctgatgcagtgaacagagcccttggggcaggtggggcctgggctcagctgcagagaccaggggacggg

SEQ ID NO: 19581 - DNA, 120 bp, synthetic construct
  source 1..120: mol_type = other DNA
tgacagttaaacctggcattactcgtaattgcttacatttactacacattcatacagaggccatgctgtggctaggcgtctctgggctaagaatgtcttattcatttagaactagtacct

SEQ ID NO: 19582 - DNA, 120 bp, synthetic construct
  source 1..120: mol_type = other DNA
acgtaatatttgggttatagaagcagggcagtgctaactggatgtcctgaaaggaatggacctggcataagaagggatggagagcagaatttgaaaagcatccaatcctgaaattgggct

SEQ ID NO: 19583 - DNA, 120 bp, synthetic construct
  source 1..120: mol_type = other DNA
gatgtcctgaaaggaatggacctggcataagaagggatggagagcagaatttgaaaagcatccaatcctgaaattgggctggagggagcatgtcccaagcctgttagggactgcaggaaa

SEQ ID NO: 19584 - DNA, 120 bp, synthetic construct; identical to SEQ ID NO: 6001
  source 1..120: mol_type = other DNA

SEQ ID NO: 19585 - DNA, 120 bp, synthetic construct
  source 1..120: mol_type = other DNA
gtttccacaaagttgcatctttgagcacctcacagagaatctggagcctctcaaccaggacaacgtgagaaaaaaatctgaagaaaaaggcccaggtgcttggggtaagaacagccaagc

SEQ ID NO: 19586 - DNA, 120 bp, synthetic construct
  source 1..120: mol_type = other DNA
tcattttccgcaagaaagtaagagatttcccagttttgtgctcatggggagcattcacctgagatataaaactttggctgcttaactcattttaagggaataataacatatttgcataca

SEQ ID NO: 19587 - DNA, 120 bp, synthetic construct
  source 1..120: mol_type = other DNA
ttgagaaattaaccatttgaaaacagatatgtgcccttagtctgccttccaatatctctcatacgatccatgatttttaaagaaatacaactccattgcatgaccaaagggaggaggggg

SEQ ID NO: 19588 - DNA, 120 bp, synthetic construct; identical to SEQ ID NO: 6002
  source 1..120: mol_type = other DNA

SEQ ID NO: 19589 - DNA, 120 bp, synthetic construct
  source 1..120: mol_type = other DNA
gtctcctaagtgcttctttgtgcccaggagggagagggagcaaagggcatgggaacctcctgggctgtgaccagtcatcacctgggatcccactgccacagctcagagctaaagacagaa

SEQ ID NO: 19590 - DNA, 120 bp, synthetic construct
  source 1..120: mol_type = other DNA
gggttgcacagagagttccagcactccgcttccctggggaaactgacaatgactggcccttgattgactcacccagtgagttggtttcctggggccatggtaacaaactaccacaaacca

SEQ ID NO: 19591 - DNA, 120 bp, synthetic construct
  source 1..120: mol_type = other DNA
ctcccagctctggtgtatcctggcagtccttggctctccttggttgcagctgcatccctcccacctctgcctccgtttttgtgtgacattctctctgccagcatctgcctgtttctcttg

SEQ ID NO: 19592 - DNA, 120 bp, synthetic construct; identical to SEQ ID NO: 6003
  source 1..120: mol_type = other DNA

SEQ ID NO: 19593 - DNA, 120 bp, synthetic construct
  source 1..120: mol_type = other DNA
ggatggagcagggcacagacaactgatatgctacctagcaatgtctctgtggagagcaaagatgcaggaatggaacttgttttgagggcaatcagccaggagtgagagaaggcctggcag

SEQ ID NO: 19594 - DNA, 120 bp, synthetic construct
  source 1..120: mol_type = other DNA
acaatagcatgtgtagcctcaacagggacactataagaataaaagagtgtgctattactatttatgccatgatcacaggaatacccaggactgtccctgacacactggacatagggtcac

SEQ ID NO: 19595 - DNA, 120 bp, synthetic construct
  source 1..120: mol_type = other DNA
gtctatggggccagcaggaccagtggggtcagtagagcatatactgagcttgaagaggtggcatggagcacttagaagctctatctgctgcttgtcatctcttggcatgtggaaggcctt

SEQ ID NO: 19596 - DNA, 120 bp, synthetic construct; identical to SEQ ID NO: 6004
  source 1..120: mol_type = other DNA

SEQ ID NO: 19597 - DNA, 120 bp, synthetic construct
  source 1..120: mol_type = other DNA
ataccatcgcattggaggttaggtatttagcacatgaaatctgggggcaacagacattcaggccacagcaagaagcttcaggagaaagctttcagtcttgtgaaatgtgaatgaggcttt

SEQ ID NO: 19598 - DNA, 120 bp, synthetic construct
  source 1..120: mol_type = other DNA
agtcacaaacctccctgttccctctctatctggctattttcttggtaggaccagaaaaacttttttttatagtcttgccaccatgccatgtagttttcgtacattgcagctatttcaaat

SEQ ID NO: 19599 - DNA, 120 bp, synthetic construct
  source 1..120: mol_type = other DNA
tcttccctttatttgggccccctttttcttctgtccttaactctgactctggtagagcccatggaactgacagttcaaagcccgcgtggcttttctctccccaccacaacatcttcatct

SEQ ID NO: 19600 - DNA, 120 bp, synthetic construct; identical to SEQ ID NO: 6005
  source 1..120: mol_type = other DNA

SEQ ID NO: 19601 - DNA, 120 bp, synthetic construct
  source 1..120: mol_type = other DNA
gtttatcatttctggattgctgtctgtcattttgggaagaaaatcaaacaagcatctggtgagtataggaacaacagtgcctcacttactaaaaagagactttagcggaacctcatccag

SEQ ID NO: 19602 - DNA, 120 bp, synthetic construct
  source 1..120: mol_type = other DNA
cctcattttgaagagagtcctgtaccctctccaggctctgggtggctttatgggaaaattctgcctcatcatgacaccctttggtgttcactgaccaccggggttcaggtccttggtgag

SEQ ID NO: 19603 - DNA, 120 bp, synthetic construct
  source 1..120: mol_type = other DNA
aaaagggggtgttcagtgatgggtgcacatctgattgacaaacttttgcagaatcatttccaggcctttcttaggaggctaagaggcatgggttgggggacagagatgggtatggtggag

SEQ ID NO: 19604 - DNA, 120 bp, synthetic construct; identical to SEQ ID NO: 6006
  source 1..120: mol_type = other DNA

SEQ ID NO: 19605 - DNA, 120 bp, synthetic construct
  source 1..120: mol_type = other DNA
ttctcagaacattctgacaacacgagttgtgaatccctggggctgtatggagaaatggcccacgacctttttccatctcttcccccatcactgcccagctctgagattgagcccctggga

SEQ ID NO: 19606 - DNA, 120 bp, synthetic construct
  source 1..120: mol_type = other DNA
tattcctcccctggtgttggtctttgaaaagtgagtctggacaccgcaaaactggaatccaggtttcctactttcgaggggaggtagccccccatggcgcagctgtgattctcagccctc

SEQ ID NO: 19607 - DNA, 120 bp, synthetic construct
  source 1..120: mol_type = other DNA
aaagtggagtggatgaaaagaacaggaaagagcaccaaccctgctgctgtccccatatgacagaggctgctgtgggggcatctgttgtacttgggtgagcaggccccttggcctcgagct

SEQ ID NO: 19608 - DNA, 120 bp, synthetic construct; identical to SEQ ID NO: 6007
  source 1..120: mol_type = other DNA

SEQ ID NO: 19609 - DNA, 120 bp, synthetic construct
  source 1..120: mol_type = other DNA
cattcacgctttcatgtgtcgtgcatcaagcaagcatttgcctgtaggcttggggagctctgagaggggttgagagtgaacaaaattaatcaaatcgtataacagaagaggaagtcccat

SEQ ID NO: 19610 - DNA, 120 bp, synthetic construct
  source 1..120: mol_type = other DNA
gatcagcagcctcctaagccccatggctgccacagtgggcctcattgtccttccctatcacctagccggggtgttcccagctgccagacagtgccaactggtggtgcctgcccatcagtg

SEQ ID NO: 19611 - DNA, 120 bp, synthetic construct
  source 1..120: mol_type = other DNA
taggtagaatgttccagactagtgaagtctttgagattttctgcttcttgttcactgcttccttctgatgtggaccatgcggaaagaggcagaacacaggaacccacacatgggagaata

SEQ ID NO: 19612 - DNA, 120 bp, synthetic construct; identical to SEQ ID NO: 6008
  source 1..120: mol_type = other DNA

SEQ ID NO: 19613 - DNA, 120 bp, synthetic construct
  source 1..120: mol_type = other DNA
ttccaccacatgcacaaaaatggatgggatggccaaaaatgaccccaaaaaatcaggaaacaaatacggaatgggctttttaattgttgtttgcaatcagaactttatgaaaatgacaga

SEQ ID NO: 19614 - DNA, 120 bp, synthetic construct
  source 1..120: mol_type = other DNA
caagagaacatgtgtgtggaacactgagaaaagaaggcagaggaaatttgcattcctgcagccatagagggggatattctaggggtggagaggcagcaggcagggggaatgtgtgcacag

SEQ ID NO: 19615 - DNA, 120 bp, synthetic construct
  source 1..120: mol_type = other DNA
gtttgtgtagtgggttaggatgagctcctcagaaaccagcctgagctctctggctcaggagcttctcaggaagagctgagaagcggcaacccctgcctgaggggtccttgtgttcatttc

SEQ ID NO: 19616 - DNA, 120 bp, synthetic construct; identical to SEQ ID NO: 6009
  source 1..120: mol_type = other DNA

SEQ ID NO: 19617 - DNA, 120 bp, synthetic construct
  source 1..120: mol_type = other DNA
ttccagataaggtcatattctcaggttctatgtagacatgaatttgaggggggacactaacccactatagtcacagtctgtacaaataaattctagattctgcccacctgtggccttacc

SEQ ID NO: 19618 - DNA, 120 bp, synthetic construct
  source 1..120: mol_type = other DNA
ctttgattggtcaaggtgccccttgctgcctcccagccaagccaagcaggcccaccccagggagcataggtgggtagcaggtgctggcgctcagtttacaaaggaaggccttctgcctca

SEQ ID NO: 19619 - DNA, 120 bp, synthetic construct
  source 1..120: mol_type = other DNA
caggaggctcagctcaaccttgggtgtcacctgccacctgtactgctgtccctggagtggcccaggatactaggatatgacactgtctcccagatcatgagcaggttgagtcaggtacga

SEQ ID NO: 19620 - DNA, 120 bp, synthetic construct; identical to SEQ ID NO: 6010
  source 1..120: mol_type = other DNA

SEQ ID NO: 19621 - DNA, 120 bp, synthetic construct
  source 1..120: mol_type = other DNA
tcgacaggttttgttgagtgaggcagcagccggcagaacaggatgacagcaagtgcccagggtggaggaatcacaataggaagcgatgggaccaaagagagcacatcacacatctgctca

SEQ ID NO: 19622 - DNA, 120 bp, synthetic construct
  source 1..120: mol_type = other DNA
gattttttggagataaaaggccttccactcagcgtacaaggcctgttcacttgctttgtcctctccagaatgtgtttcctgacccaaagtgacacagtgatcaccagcatgccccaggca

SEQ ID NO: 19623 - DNA, 120 bp, synthetic construct
  source 1..120: mol_type = other DNA
ggctcttccattttatcacaattattccgcctgttcacgtgcagagagaacacttggggcagattttaagaccttagagagtaacttgtttacaaataaaatatctctttgatgatgtat

SEQ ID NO: 19624 - DNA, 120 bp, synthetic construct; identical to SEQ ID NO: 6011
  source 1..120: mol_type = other DNA

SEQ ID NO: 19625 - DNA, 120 bp, synthetic construct
  source 1..120: mol_type = other DNA
ttcttgttcccctctgcccatttctctttttatctgaatccccagatgcccctgcacaatctgagtgtgcagagtggcccagccctccctaggaagggaaagcactggccccttgcttgg

SEQ ID NO: 19626 - DNA, 120 bp, synthetic construct
  source 1..120: mol_type = other DNA
gggaccttatgacttaataggggaagagccacagaatatagccacatatatgggcagaagtcctgagatatccatggggctggatactaaagggtctccatttccaagtagaacctaagg

SEQ ID NO: 19627 - DNA, 120 bp, synthetic construct
  source 1..120: mol_type = other DNA
ggaaaaagtgacaactccccacgaaagacagaggtgagaaggctcagagaagtggatatgctggggtggatacactctgtaaatccagaaaaatctacctgctgcctatttttcaattgt

SEQ ID NO: 19628 - DNA, 120 bp, synthetic construct; identical to SEQ ID NO: 6012
  source 1..120: mol_type = other DNA

SEQ ID NO: 19629 - DNA, 120 bp, synthetic construct
  source 1..120: mol_type = other DNA
aaagaggtttaattgactcccaggtctgcagggctggagtggccccagaaaacttacaatgccagcagaaggggaagcaaacaccttcttctttacatggtgtcagcaaggagaagggca

SEQ ID NO: 19630 - DNA, 120 bp, synthetic construct
  source 1..120: mol_type = other DNA
cctcccacaacatgtggggattatgggaacaacaattcaggatgagatttgggtgggacacagccaaaccatatcacatgtcttcaatttctgcctcctaaaaatgacatctttgccagg

SEQ ID NO: 19631 - DNA, 120 bp, synthetic construct
  source 1..120: mol_type = other DNA
gcctgaccaacatggtgaaaccccatctctactaaaaacacaaaaaacttagcctggtatggtggtgtgcacctgtagtcccagctactcaggaggctgaggcaggagaattgcttgaac

SEQ ID NO: 19632 - DNA, 120 bp, synthetic construct; identical to SEQ ID NO: 6013
  source 1..120: mol_type = other DNA

SEQ ID NO: 19633 - DNA, 120 bp, synthetic construct
  source 1..120: mol_type = other DNA
tgtgtgaagacacagggagaagacagttatctacaaaccaacaagagaggcctcagaagaaatcaacactgcggacaccttaatgtcagaattttggcctccaggactatgagaaaataa

SEQ ID NO: 19634 - DNA, 120 bp, synthetic construct
  source 1..120: mol_type = other DNA
tttgctttcaccattttgtttaaggtcctcactcttcccatcactcaaactctgaaagttcttttcccatagtgaaaaggcctaatgaaggtgtttccccatggattctttccttttagt

SEQ ID NO: 19635 - DNA, 120 bp, synthetic construct
  source 1..120: mol_type = other DNA
tgtgatctggaagacgtattctataacagtagcgtttcacagcagaagccagacttgcaacattgcaaagatcatgggatttggaagcagaaaacctgagtttctatttggactctgcca

SEQ ID NO: 19636 - DNA, 120 bp, synthetic construct; identical to SEQ ID NO: 6014
  source 1..120: mol_type = other DNA

SEQ ID NO: 19637 - DNA, 120 bp, synthetic construct
  source 1..120: mol_type = other DNA
aatagcagcattgcagatgtcattagttaagacaaagttatactagagtagagcaggccctaatccaatacggcaggtgtctttacgaaaagatagcatgtgaagacacaaacatacaaa

SEQ ID NO: 19638 - DNA, 120 bp, synthetic construct
  source 1..120: mol_type = other DNA
ctttacgaaaagatagcatgtgaagacacaaacatacaaagagaaggcaaccatgtggtgacaagaggagagactggagtgatgctcctgcaagccaagattgctggcaaaccaccagaa

SEQ ID NO: 19639 - DNA, 120 bp, synthetic construct
  source 1..120: mol_type = other DNA
cagtttgtggtacattgttacagcagccctaggaaactgatacatctacacaatgcaatgtccttcagccataaaaaggaatgaaacactggcattggctatcatgtggatgaaatgtga

SEQ ID NO: 19640 - DNA, 120 bp, synthetic construct
  source 1..120: mol_type = other DNA
ggggctgcaggaggggagaataggaactgacagctaatgagtataagctttctcttaagggtgatataagtgatctggaattagatagcaatgatagttccaaatcttgtgaatatattt

SEQ ID NO: 19641 - DNA, 120 bp, synthetic construct; identical to SEQ ID NO: 6015
  source 1..120: mol_type = other DNA

SEQ ID NO: 19642 - DNA, 120 bp, synthetic construct
  source 1..120: mol_type = other DNA
cacttgcacatcatatgtttctgagggcagaaatgttggcccataattacagttgtctggttatgtctctgtctccctcactaacatgcaagccctacagaagcaggagctgtgtccagc

SEQ ID NO: 19643 - DNA, 120 bp, synthetic construct
  source 1..120: mol_type = other DNA
ttttacaggtgagaacattcaagttgaaagaaatgaagagaatatttgatgtcccgcaatacaggggaaagccgttactgcatcccaggaatgtttgaccataaagcccttccttgccca

SEQ ID NO: 19644 - DNA, 120 bp, synthetic construct
  source 1..120: mol_type = other DNA
atctatggaagacattgggaagcttgggaataaacccacacaattatagctaattattgacaaaggaacagcagcaattcaacagagaaaggaaggtcttttcaacagtgttaaaacaat

SEQ ID NO: 19645 - DNA, 120 bp, synthetic construct
  source 1..120: mol_type = other DNA
caagcaattctctgcctcagcgtcccaagtagctgggattacaggcgcctgccaccaggcccggctaattttttggatttttagtagagatggggtttcaccatcttggccagtctggtc

SEQ ID NO: 19646 - DNA, 120 bp, synthetic construct; identical to SEQ ID NO: 6016
  source 1..120: mol_type = other DNA

SEQ ID NO: 19647 - DNA, 120 bp, synthetic construct
  source 1..120: mol_type = other DNA
aaaatacattgttaagtgaatgaaaagatgagctgtagatttggagaaaatattttaaaaaatcacacgtctgacaaggactcatattcagaacacttaagaatgctcaagccaacccaa

SEQ ID NO: 19648 - DNA, 120 bp, synthetic construct
  source 1..120: mol_type = other DNA
tactcaatactatgactcactaggggactacaaatcaaaaccacagtgagatcctgttacacacccattagaatgtctaaaataaaaaccacagacactagtagtgccggcgaggatgtg

SEQ ID NO: 19649 - DNA, 120 bp, synthetic construct
  source 1..120: mol_type = other DNA
ggtatttctcctaaagacataaaagcttatgtccacacagacacccgtacacaaactgttataaaagctccagtcataataggcaaaacccagaagcaaactaaatgtcctttaacaggt

SEQ ID NO: 19650 - DNA, 120 bp, synthetic construct; identical to SEQ ID NO: 6017
  source 1..120: mol_type = other DNA

SEQ ID NO: 19651 - DNA, 120 bp, synthetic construct
  source 1..120: mol_type = other DNA
cacttagcacagcgtcttccaggttcatccatgttgcaaatggcaggatttccttcttttgcatggctggataatattccattgtgaggatagcctccatttcctttcatctctcaatgg

SEQ ID NO: 19652 - DNA, 120 bp, synthetic construct
  source 1..120: mol_type = other DNA
catctgatagggtctccaggccactatggccccatgcctgggtgaggttaagagttaaagagtagaaaacaggaggccagtgagggggcatttttgggcccatgggaaggtttctgagga

SEQ ID NO: 19653 - DNA, 120 bp, synthetic construct
  source 1..120: mol_type = other DNA
acagaagctgacatccaagaggtgattccacccacctccctcctgagcttcctccttcctcaggtccagttaggcaggggacctggtcagtggtgcctagtcacctgccactgtgtgacc

SEQ ID NO: 19654 - DNA, 120 bp, synthetic construct; identical to SEQ ID NO: 6018
  source 1..120: mol_type = other DNA

SEQ ID NO: 19655 - DNA, 120 bp, synthetic construct
  source 1..120: mol_type = other DNA
ctcatgcacacacgtgttcacaacatacacattcacactcacacacaaacacattgaatgcatgcgtgttgacagttcaaggagtagaggacactggacctgggccctgctgacccaggc

SEQ ID NO: 19656 - DNA, 120 bp, synthetic construct
  source 1..120: mol_type = other DNA
ggacccttttctaagtgagaggcacatctcagcacagctgactgatcattctcgggtaagtgtgacctgctgtctccccttcctgctgacatgggggcagatgctaccagatggcatcac

SEQ ID NO: 19657 - DNA, 120 bp, synthetic construct
  source 1..120: mol_type = other DNA
aatgtacccatttgaagatgagatgcctgaggtcagaggggaggcaactgacccagggacccagatgtgactctggactgtgatctcagccctgccttgtgctgtcctgcactcaactcc

SEQ ID NO: 19658 - DNA, 120 bp, synthetic construct; identical to SEQ ID NO: 6019
  source 1..120: mol_type = other DNA

SEQ ID NO: 19659 - DNA, 120 bp, synthetic construct
  source 1..120: mol_type = other DNA
ggggtttaacctgcaaggccctctctctgacctgtcctccagacgtatcaccttccctttgtctcaggtattcccaggagagatggcccctctgggtgttctccagaacctgtccccaag

SEQ ID NO: 19660 - DNA, 120 bp, synthetic construct
  source 1..120: mol_type = other DNA
ccttctccgaaccaaacatcctccttcttgactggtgttattcttcaaatggattcactggccacagtgagtaaagatttgagtggaacagaacactcatgagatttcttctttcctata

SEQ ID NO: 19661 - DNA, 120 bp, synthetic construct
  source 1..120: mol_type = other DNA
tgagcaggtagatgccgttcatcctgctgtggagtgtgtgcccatttcaggacatttagggacaacaagtcttgttgtctaggtctccttgttttaaagtcctcaggaaagggcccacct

SEQ ID NO: 19662 - DNA, 120 bp, synthetic construct; identical to SEQ ID NO: 6020
  source 1..120: mol_type = other DNA

SEQ ID NO: 19663 - DNA, 120 bp, synthetic construct
  source 1..120: mol_type = other DNA
acacgcccatacccaacaacttttattttggcctccctcaccctctctccctctgccttgcaggttgctgatccagggcaccagtggacacaggagatgaagatgtttacatctacaagg

SEQ ID NO: 19664 - DNA, 120 bp, synthetic construct
  source 1..120: mol_type = other DNA
acagaaatagagtgtagagtgggaatcaggggctgatagccttcagagctgagagccatgaatggagttagacccacatattaattgacagtaagccagtgataagcattgcttctatag

SEQ ID NO: 19665 - DNA, 120 bp, synthetic construct
  source 1..120: mol_type = other DNA
tctgcagcaaaagcatgttgttaaggcaaaaaagcatgttgttaaggaatccccctgcagatgtggagtcaggcatggtcactcctgctggacgttaagaaggtgaaggctgaaaaccca

SEQ ID NO: 19666 - DNA, 120 bp, synthetic construct
  source 1..120: mol_type = other DNA
agctagaggaaaagtcaagcctgagtgatggtcagtcccatatcctaggcacagacgatggcatgggaaccacaagtgaactgggctctggtgaccctcagtggctttggaaataagata

SEQ ID NO: 19667 - DNA, 120 bp, synthetic construct; identical to SEQ ID NO: 6021
  source 1..120: mol_type = other DNA

SEQ ID NO: 19668 - DNA, 120 bp, synthetic construct
  source 1..120: mol_type = other DNA
ggatttgggagcagagggagcagaaaataaagcagcagggcaagatgtcctcagcgaaaataaaccagattgacctggacatgaagtgcaccttcagacaccatgtcatgttttgggagc

SEQ ID NO: 19669 - DNA, 120 bp, synthetic construct
  source 1..120: mol_type = other DNA
ctctcttggccagggagcagccagcatcacagagcatctactgagctccaaaccatgggccgagctggggcatgtgggtccagaacccaagtggctactgaggaaacaagcggtagcaaa

SEQ ID NO: 19670 - DNA, 120 bp, synthetic construct
  source 1..120: mol_type = other DNA
gtggagccacaagaactctgtgcattgctgctgcaaaatgctgctgctgctgaatgcaaaatggtacagccgccttggaagacagttgggaattgctcacaaagctaaatgtacttgtac

SEQ ID NO: 19671 - DNA, 120 bp, synthetic construct; identical to SEQ ID NO: 6022
  source 1..120: mol_type = other DNA

SEQ ID NO: 19672 - DNA, 120 bp, synthetic construct
  source 1..120: mol_type = other DNA
ttttggacttaaggggacctaatatcaaaaaaattaatgagtcaaaaggactgaatttagaatttaattttgaaaaaatcaaatatcaaaactttaaaacacctgctatcacaaaatagg

SEQ ID NO: 19673 - DNA, 120 bp, synthetic construct
  source 1..120: mol_type = other DNA
ttttccaaacaataagccctaataaagatagcatgaggccaatgaaatctgtttctcaaatcttataaacaaatctattaaattttaatgatcttcaccatactatataatttccaaaaa

SEQ ID NO: 19674 - DNA, 120 bp, synthetic construct
  source 1..120: mol_type = other DNA
atctttacagagaaactgtaaccaagataaaaccaattttatctttcaaaataggctcttacaatcgcatgtacccacatcttccacaatagcccctggactttgaggggtaagatagtt

SEQ ID NO: 19675 - DNA, 120 bp, synthetic construct; identical to SEQ ID NO: 6023
  source 1..120: mol_type = other DNA

SEQ ID NO: 19676 - DNA, 120 bp, synthetic construct
  source 1..120: mol_type = other DNA
ataaaagacctgcagcaattgcttttccctagacttcaagtcaaaactaatgaaaatggtacttgaattagttagatataggaagggtgtgtcttgcatcataagtgaaaattttcagtt

SEQ ID NO: 19677 - DNA, 120 bp, synthetic construct
  source 1..120: mol_type = other DNA
ttttagcatcatgtcacagtagcagttagaacctgaggaaaaaaaattatagaaactgacaagaaagttggagagagcgattatctcaggacttatgaaggggagagaaaggtgaaaaca

SEQ ID NO: 19678 - DNA, 120 bp, synthetic construct
  source 1..120: mol_type = other DNA
catatttttaatatacactaagtgcaaaagcacagtctctagaaagactaatttccttttaattatagccaacttgatcaaataaattcttttctcataaagtctctttttacaaacctt

SEQ ID NO: 19679 - DNA, 120 bp, synthetic construct; identical to SEQ ID NO: 6024
  source 1..120: mol_type = other DNA

SEQ ID NO: 19680 - DNA, 120 bp, synthetic construct
  source 1..120: mol_type = other DNA
gaactcccaggctcaagcaatctgctcacctcagccttacaaagtgctaggattacatgcatgagctatttgcatccagccattttattttagaacaaacatttaccatgcaagattttt

SEQ ID NO: 19681 - DNA, 120 bp, synthetic construct
  source 1..120: mol_type = other DNA
acctttgaattcaacaaaaattattttcctttaaataagaacatattcttagcaaaatgtttttctgtaatttttttaattgtgaatgacccagacatttaataaatgcctgttatgtaa

SEQ ID NO: 19682 - DNA, 120 bp, synthetic construct
  source 1..120: mol_type = other DNA
taaaggtattttcctgttaatcatttatatagcctgtgaatttcaggtgtttacctaagtaagaagcttaaggttaaacaaatgagtttttcgccaataactcaggataaatgacttatt

SEQ ID NO: 19683 - DNA, 120 bp, synthetic construct; identical to SEQ ID NO: 6025
  source 1..120: mol_type = other DNA

SEQ ID NO: 19684 - DNA, 120 bp, synthetic construct
  source 1..120: mol_type = other DNA
tttataaaccaatcatgcccactgtggaactctcactctttaggaggttgtctcaagagataacagcctgcccatgaaggtgccagcagtcacaagctgattgccccgtagataaggcac

SEQ ID NO: 19685 - DNA, 120 bp, synthetic construct
  source 1..120: mol_type = other DNA
ctttctttataccagacttcacttttgttaattggactctgcaagcaacaagcgactaacctgcattttggttacattaccatgttttaggtgggacaaacttctaatatttcaaatgta

SEQ ID NO: 19686 - DNA, 120 bp, synthetic construct
  source 1..120: mol_type = other DNA
tactgaactacagcatggggcaaccactattgctatttcagtttggcttggctagcaaagggttgttttgttatgtaaataaagcccttcaggtaattgaaatctttcttgcttcgatgg

SEQ ID NO: 19687 - DNA, 120 bp, synthetic construct
  source 1..120: mol_type = other DNA
aactttccttcaggtttgaccaagtcaactagagtggtcaaacccaacggaaaaaagactaaaacaacaaaaacagaaccaaacaaataaacaacaacaaaaaagtaaagcaaaacaaat

SEQ ID NO: 19688 - DNA, 120 bp, synthetic construct; identical to SEQ ID NO: 6026
  source 1..120: mol_type = other DNA

SEQ ID NO: 19689 - DNA, 120 bp, synthetic construct
  source 1..120: mol_type = other DNA
agatctcaacaacattttgagaaatcagggattctctggagatgatacctcccaggcctcagcaaatcgtcctgttggttttgttactggcagcaaatccatatgggtctgcagcaatct

SEQ ID NO: 19690 - DNA, 120 bp, synthetic construct
  source 1..120: mol_type = other DNA
agaaagtaaagtccacttgaaagagggccgagtgggtgacttgagagatcaagttcatggtttgatctttgacttggggtttcatacattggcatgcctcttggggcgggggagtggttt

SEQ ID NO: 19691 - DNA, 120 bp, synthetic construct
  source 1..120: mol_type = other DNA
aaggcattcttcccttaccagccgagtgttcctggagaaaggttatatactggttcaactctgccattttgcctgttagtgcacatgcttaagtccactagcccacctcctgagatctta

SEQ ID NO: 19692 - DNA, 120 bp, synthetic construct; identical to SEQ ID NO: 6027
  source 1..120: mol_type = other DNA

SEQ ID NO: 19693 - DNA, 120 bp, synthetic construct
  source 1..120: mol_type = other DNA
caaggcaaaaccctgtctctatgaaaattacaaaaattagcccggtgtggtggcacaagcctgtagtcccagctactcaggaggctgaggtggaaggatcacctgagcccgggaggtgga

SEQ ID NO: 19694 - DNA, 120 bp, synthetic construct
  source 1..120: mol_type = other DNA
gatttgtcaaaggtcagggccaccttcactcagagtctcttccgttggttgccaacttgtaaacgaaaaagtatgtcagataggtctcaatcagtttagaattttcattttgccaaggtt

SEQ ID NO: 19695 - DNA, 120 bp, synthetic construct
  source 1..120: mol_type = other DNA
agagaaaaggagtaggcaggaaaacagtcaattatggattcatctcacactcagtaataggccctttacataaggtgaacataagactagctacttgaggagctatttaaccttctatct

SEQ ID NO: 19696 - DNA, 120 bp, synthetic construct; identical to SEQ ID NO: 6028
  source 1..120: mol_type = other DNA

SEQ ID NO: 19697 - DNA, 120 bp, synthetic construct
  source 1..120: mol_type = other DNA
ttcctggcaggaagagctgctgagcagactccatgggctgcccacacagggtctggacctagctgtcttcctgtgcccagcagcctgtgagccatcccagtcccctatgtgcagtggtca

SEQ ID NO: 19698 - DNA, 120 bp, synthetic construct
  source 1..120: mol_type = other DNA
atctgcagttcgggtcagggtgttcttaacggccctcacctatgccttttctggccacacatgagtttggatgaagcaggagtctcttccatagctccttttcatctgagatgtccatga

SEQ ID NO: 19699 - DNA, 120 bp, synthetic construct
  source 1..120: mol_type = other DNA
ggtgacattagttctcccctctcaagtgatctgtgccctcctaggttacctcagctctcccaggtgacctctgcctttccagatgacttcagtcttttcaggtgacctcagccctcctaa

SEQ ID NO: 19700 - DNA, 120 bp, synthetic construct; identical to SEQ ID NO: 6029
  source 1..120: mol_type = other DNA

SEQ ID NO: 19701 - DNA, 120 bp, synthetic construct
  source 1..120: mol_type = other DNA
ggcttttgccagaggtaggctactgcgggggcataagccatatcatgccatgagccactatcctgctcatgttccagaatgaggagacatctgggtgctggcccagctgctggccaatga

SEQ ID NO: 19702 - DNA, 120 bp, synthetic construct
  source 1..120: mol_type = other DNA
ggggacggccacactggctgggtaattgtgacttacagacaaggcaccttctgtcccctgctcattttgagcctccagggtatcccctgctgagagtcccacaggagcctgtgactggcc

SEQ ID NO: 19703 - DNA, 120 bp, synthetic construct
  source 1..120: mol_type = other DNA
ggactcttacaaccctgctggtccttccacctcccagctggccaccctcccaaccaccctccctgcccatggctagaccaagcccagatgacagcttctctctgtcctgtgtcccctgcc

SEQ ID NO: 19704 - DNA, 120 bp, synthetic construct; identical to SEQ ID NO: 6030
  source 1..120: mol_type = other DNA

SEQ ID NO: 19705 - DNA, 120 bp, synthetic construct
  source 1..120: mol_type = other DNA
agcctctcaggagtctacatcccaagatgttctaacttccagagtctccaagcccatcaagagcaagttttgctaaaagtgttctgagagcttatgaagcacatggtgagtggtcagtcc

SEQ ID NO: 19706 - DNA, 120 bp, synthetic construct
  source 1..120: mol_type = other DNA
tggcctccttttccttacctggaggggacagaggcactgggaccaggccaagctctggctgagccagggctaggggaagtacatccactgggggcccatgccatggggaggtgttggggc

SEQ ID NO: 19707 - DNA, 120 bp, synthetic construct
  source 1..120: mol_type = other DNA
gttgtgcatccggctttccaccttaaactggtttctatggtgcttcatcgatgagataaggatgcataggagaccccaggccaggtacctcctttccccacagtgctcagctcccccagc

SEQ ID NO: 19708 - DNA, 120 bp, synthetic construct; identical to SEQ ID NO: 6031
  source 1..120: mol_type = other DNA

SEQ ID NO: 19709 - DNA, 120 bp, synthetic construct
  source 1..120: mol_type = other DNA
agccaccagccccgaggttggaaaggccaggtcctcccacacctgctgttcccacagacttccttcatgctcatcctgtggctctgggatgtctacctactgggaggtgagtgtgtggtg

SEQ ID NO: 19710 - DNA, 120 bp, synthetic construct
  source 1..120: mol_type = other DNA
ctggtgtgtgatgacctgagagcagcatccacactgtccagatggctctctgctccagcctggaggtagggccagaccaggcctggtgggctgggcagggagtggacccaggtaccaaac

SEQ ID NO: 19711 - DNA, 120 bp, synthetic construct
  source 1..120: mol_type = other DNA
cagcaccgcccagtggtgggtgcctggggcaggaacaaggtgcagacactgactctcccacagacccctcccagcctcatagtcaccctgtccctagaacaccccctgaagctgttcctg

SEQ ID NO: 19712 - DNA, 120 bp, synthetic construct; identical to SEQ ID NO: 6032
  source 1..120: mol_type = other DNA

SEQ ID NO: 19713 - DNA, 120 bp, synthetic construct
  source 1..120: mol_type = other DNA
ctcccctgtaccctcctgctctcactcctgaaagccccagaaggacactggaggggtcagatccatctgtgcaagcccacaaccacacctgtgagtaccagcagccctggagagcagcag

SEQ ID NO: 19714 - DNA, 120 bp, synthetic construct
  source 1..120: mol_type = other DNA
gagtgtgggaacagtccagccctggcatggagatcccccagaggagtggagggtgtctcatccactgtggagataagcccccatattgcgtggcaaaggggctaggtaacagttaaggcc

SEQ ID NO: 19715 - DNA, 120 bp, synthetic construct
  source 1..120: mol_type = other DNA
cttccctgacagcttccccactctaggctgcacacacacctcgctctgggagtagcagcctgcaggagtgtcctcagcattagaccagggggaccacacggggaccctgaggactgcagg

SEQ ID NO: 19716 - DNA, 120 bp, synthetic construct; identical to SEQ ID NO: 6033
  source 1..120: mol_type = other DNA

SEQ ID NO: 19717 - DNA, 120 bp, synthetic construct
  source 1..120: mol_type = other DNA
ccccagctcaggatagaccacagagtgcttggtgattcctgcattggaactccctctctaagctccccatggacctggacctcagaggcctgtggttttcacagtagagcttggagcaga

SEQ ID NO: 19718 - DNA, 120 bp, synthetic construct
  source 1..120: mol_type = other DNA
caactctcctgcatgtgatgcctacagctgatcactcttggcagacagtgaacatcacggcccagaaggagccagggcagcacttggcaagctgccccaaagccccagagagctccttag

SEQ ID NO: 19719 - DNA, 120 bp, synthetic construct
  source 1..120: mol_type = other DNA
cctgtagggcagaacccccctctcaacgcacaattcctagacccagagggccctagcccagactcaacctgagccctgaaagggaaggggcaccaggggtgccttggggcctccagcagc

SEQ ID NO: 19720 - DNA, 120 bp, synthetic construct; identical to SEQ ID NO: 6034
  source 1..120: mol_type = other DNA

SEQ ID NO: 19721 - DNA, 120 bp, synthetic construct
  source 1..120: mol_type = other DNA
gaaaactaagcaaatgagagtccaggaggctggatccctcatctgccattcttggcagttgcattttgtggtcagaaaaagtcaggaaacttggctctactcactgcaggaggctccaag

SEQ ID NO: 19722 - DNA, 120 bp, synthetic construct
  source 1..120: mol_type = other DNA
ttgttgttatgtcctgcctgtttttgagttgcccagagctctctgcaggaagccctggacatactggggtggatgggaaatgaagatggcacagcccagaccctgaccagcctctcacag

SEQ ID NO: 19723 - DNA, 120 bp, synthetic construct
  source 1..120: mol_type = other DNA
tccagtaatttcctgtaattcaaactgcacctgatagggacccccagagggctgggaagggagcaaaagttggagttccagtgacattgctcattcatgacagtctgtacaaagcatccc

SEQ ID NO: 19724 - DNA, 120 bp, synthetic construct; identical to SEQ ID NO: 6035
  source 1..120: mol_type = other DNA

SEQ ID NO: 19725 - DNA, 120 bp, synthetic construct
  source 1..120: mol_type = other DNA
cacgtgtatgtgtatgtgtgtgcgtgcctgtgcacacctgtttactcagttctgctctaagtccatgtccacgaccccagaagatcccaggtatgtcctcactgacgtctgctgaaatca

SEQ ID NO: 19726 - DNA, 120 bp, synthetic construct
  source 1..120: mol_type = other DNA
gacagaagttatatcctgttttctttccattgattcttttaccacctttctcctcttactgattttgaatgaagggggtttttcatgagggtaaggtaactggcaagaaatgaaataaca

SEQ ID NO: 19727 - DNA, 120 bp, synthetic construct
  source 1..120: mol_type = other DNA
aaacaaaaaaattagccaggtgtggtggcacgcgcctgtagttccagctactggtggggctgaggtgggagaatggcttaagcctggaagtcagagagtggagattgcagtgagctgaga

SEQ ID NO: 19728 - DNA, 120 bp, synthetic construct; identical to SEQ ID NO: 6036
  source 1..120: mol_type = other DNA

SEQ ID NO: 19729 - DNA, 120 bp, synthetic construct
  source 1..120: mol_type = other DNA
gctgggcacccagagcctgagaccaactgtccctccctgtgccctggaggaggggcctggcctgtcagtgtagatgtggggagagaagggtctgtggacccaggaagggacattggtagg

SEQ ID NO: 19730 - DNA, 120 bp, synthetic construct
  source 1..120: mol_type = other DNA
ctttttgtagaacctgcatatgagtccatcagaggtgagatttgcaaatacttcctccagcctgggacttgtcttttcattctcctcacagggtctttcagagtgcacacatcattttga

SEQ ID NO: 19731 - DNA, 120 bp, synthetic construct
  source 1..120: mol_type = other DNA
aagttttaggccttacattttggtttatgatacattttgaataatggtgccatgtatggactgaagtttttaatatgcatatctaattgttctaatagtatttgttgctaagattgtctt

SEQ ID NO: 19732 - DNA, 120 bp, synthetic construct; identical to SEQ ID NO: 6037
  source 1..120: mol_type = other DNA

SEQ ID NO: 19733 - DNA, 120 bp, synthetic construct
  source 1..120: mol_type = other DNA
atcccaagaatgcaaggctgcttcaacgttaaaaatgggccagtataactcaccatattaacagatgaaaagacaacagcacatcattatttcagtatatttggaaaaagcattagacaa

SEQ ID NO: 19734 - DNA, 120 bp, synthetic construct
  source 1..120: mol_type = other DNA
aaaaggcacctacaaaaaccctgtagttgatgtttactggacgttattcttaatgatgaaagactggatggtttcaccccagaggaagaactaggtgaggatgtcagctctcactacttg

SEQ ID NO: 19735 - DNA, 120 bp, synthetic construct
  source 1..120: mol_type = other DNA
ttctcctgctagatggatgtcctttaccatttctcaatctgtacatctcctggtgatgatttctttcatcttttgtcaatctgaaaacctctttattctgcctttttattggaaaacaaa

SEQ ID NO: 19736 - DNA, 120 bp, synthetic construct
  source 1..120: mol_type = other DNA
gtctttttcttctctatctagctgcttgtaggaggactcagcttctcgcagatagacatgtatgataaagatgcagtaactacatcaagtgtggtattgtccatggatggataaatagac

SEQ ID NO: 19737 - DNA, 120 bp, synthetic construct; identical to SEQ ID NO: 6038
  source 1..120: mol_type = other DNA

SEQ ID NO: 19738 - DNA, 120 bp, synthetic construct
  source 1..120: mol_type = other DNA
tagtcatagttttttccaccacttgacttcctgccctattcagagtcttatgtttgccaggactcaagcacctccttatggggcagactccacagggcatgatatggtttggatctatgt

SEQ ID NO: 19739 - DNA, 120 bp, synthetic construct
  source 1..120: mol_type = other DNA
cagattttcccctctgtgctgctctcattatagtgagtgagtgctcaccagatctgattgtttcaaagtgtatagcacctctcccattgctctattcctgctgttcctgccatgtgaaga

SEQ ID NO: 19740 - DNA, 120 bp, synthetic construct
  source 1..120: mol_type = other DNA
caaactgtcagccaattaatcctcttttctttataaattacccagtctcagatatttctttatagcagtgtgagaatggaccaatacagggcatcatggtcagtcctggggaacagcttc

SEQ ID NO: 19741 - DNA, 120 bp, synthetic construct
  source 1..120: mol_type = other DNA
tgcctcttccttcaaaggtagccagccaagaagtagatggctggttgagccatactgactaccatggacagcagcaacagaaggtcaaaggcaaaggtcaggtattcttttcctggcagg

SEQ ID NO: 19742 - DNA, 120 bp, synthetic construct; identical to SEQ ID NO: 6039
  source 1..120: mol_type = other DNA

SEQ ID NO: 19743 - DNA, 120 bp, synthetic construct
  source 1..120: mol_type = other DNA
agacagagactcactgtgtcagagaaataggacacaggctccagaaacatggccacctgcaatgtcacctggtgatacagcatgaggattttctccaacaggatcacagttacacaggag

SEQ ID NO: 19744 - DNA, 120 bp, synthetic construct
  source 1..120: mol_type = other DNA
agcactgtcaggatgaaaaccacctgtttgcccaccaaccactcgcctcccgtatgactcatgttcacttgtcctggggtctctgtcctgttgtcccaatccagcttcccagagaacact

SEQ ID NO: 19745 - DNA, 120 bp, synthetic construct
  source 1..120: mol_type = other DNA
tcccaagagggtcctgctgggcctcccaagattggtgggaatctcacagagcaaagtcaaggagaggaatgagtctcctgcaagtgatccatccatcccatatcctccactgcagggtac

SEQ ID NO: 19746 - DNA, 120 bp, synthetic construct; identical to SEQ ID NO: 6040
  source 1..120: mol_type = other DNA

SEQ ID NO: 19747 - DNA, 120 bp, synthetic construct
  source 1..120: mol_type = other DNA
agggcctctgcacatctgtaagctttgtatcctctttccaatctttgccccagtatcaacttccagagaagcttctgcttcctattaacattgcattcatcacatgctgagtgtctatgc

SEQ ID NO: 19748 - DNA, 120 bp, synthetic construct
  source 1..120: mol_type = other DNA
actcacttgggtacggcacctatggagagctttatgcagctcagttacacttggggaagtgctggtgacctcttcataaaagcaaactttgcttctgaatcacagaagcttctggaacaa

SEQ ID NO: 19749 - DNA, 120 bp, synthetic construct
  source 1..120: mol_type = other DNA
caggtctttctttgtagaatcatgaggggagggtgaccaacttatcctgctttgcctaggactttcccagtttaagctctgaacatctcttgtcctgaaaatcctcatagccctaggaaa

SEQ ID NO: 19750 - DNA, 120 bp, synthetic construct; identical to SEQ ID NO: 6041
  source 1..120: mol_type = other DNA

SEQ ID NO: 19751 - DNA, 120 bp, synthetic construct
  source 1..120: mol_type = other DNA
cattagggtaggccctaatccaataggggtagtgtcttcataagtaaaggagattaggacacagacacccacagggggatgaccatgagaagacacagggagaaggcagccatctacaag

SEQ ID NO: 19752 - DNA, 120 bp, synthetic construct
  source 1..120: mol_type = other DNA
catgggagcctgaactgatgatcacatttatgatgaaaagtttacagacggaattatggaaagtctcagaacagtgagatctacctggttctacaaccctgagctgctgaagctttgctt

SEQ ID NO: 19753 - DNA, 120 bp, synthetic construct
  source 1..120: mol_type = other DNA
ctgaatcacagaagcttctagaacagagcttgttccacaaactaactgataaatgcctgcgatatgcctggaaatattccacaggtgaccttgtggcctgcagtcacatattggtgcatc

SEQ ID NO: 19754 - DNA, 120 bp, synthetic construct
  source 1..120: mol_type = other DNA
agccccagcccctcccctccctgcacttgttacctagacactcttacctgaggccagggaggaccgcagatctggctcagatctaatctggtcataggatgagtcttggggcttggtaac

SEQ ID NO: 19755 - DNA, 120 bp, synthetic construct; identical to SEQ ID NO: 6042
  source 1..120: mol_type = other DNA

SEQ ID NO: 19756 - DNA, 120 bp, synthetic construct
  source 1..120: mol_type = other DNA
actactgaggccagtgactaagcagcacattcttcctcatcacacaagaggaggacacagccctcctggggtgggaaggcttcagtgcctggtgcagccccagcactgggcacagagaga

SEQ ID NO: 19757 - DNA, 120 bp, synthetic construct
  source 1..120: mol_type = other DNA
gttgatgcagccaaaatagccaagtaacctttgcattgggattgaagtacttgctctggttctgagttgagagcccaccctccccacttaatctttatttgaggtgaaatttacataaca

SEQ ID NO: 19758 - DNA, 120 bp, synthetic construct
  source 1..120: mol_type = other DNA
tccaaaatatttacatacccccataagaaagccttttacctgttagcagttactccccttgtcttcctcctcccagctcttggcaaccccatctaccttccatttctgcacattcaccta

SEQ ID NO: 19759 - DNA, 120 bp, synthetic construct; identical to SEQ ID NO: 6043
  source 1..120: mol_type = other DNA

SEQ ID NO: 19760 - DNA, 120 bp, synthetic construct
  source 1..120: mol_type = other DNA
cctggtttctgtcctgtccccattttcctgagaaatgcaccttccccagtaaaaaatcatgaggtttcaaattccaggaaaatatgtctctgagttaaaatggtttgaaaatgaaagaag

SEQ ID NO: 19761 - DNA, 120 bp, synthetic construct
  source 1..120: mol_type = other DNA
aatatgtctctgagttaaaatggtttgaaaatgaaagaaggaagagagatcttttctcatacctgggaagtcttggatagaattggtaccacagaggccaatgtcctgagagatgaaagt

SEQ ID NO: 19762 - DNA, 120 bp, synthetic construct
  source 1..120: mol_type = other DNA
gcccaggcctttatctgaaacattgtatctcagcatctcctgatatcccccatcccactgacacttttgattactccatcctgaacaataacttccctcaaaaaagaaggatctttaaga

SEQ ID NO: 19763 - DNA, 120 bp, synthetic construct
  source 1..120: mol_type = other DNA
ccaggaactcaaatgtgctcctttcattttgctgtcaattgaattgcatttttttttttttgcaaaagatgtggaagttcttgtaaatctgtgtcagaaacttacattggattcaccaag

SEQ ID NO: 19764 - DNA, 120 bp, synthetic construct; identical to SEQ ID NO: 6044
  source 1..120: mol_type = other DNA

SEQ ID NO: 19765 - DNA, 120 bp, synthetic construct
  source 1..120: mol_type = other DNA
tgtacccggccttgacttgcttttatgaggcaagaaaagacatgtctccttgttgcactaatttcgatcaatcaataagtcaattagttcattttcattacatctctctgaatcaattga

SEQ ID NO: 19766 - DNA, 120 bp, synthetic construct
  source 1..120: mol_type = other DNA
ggaattgaatttactcctcaaagtaataggcacaggcacccatggtcaacacctgtctcctgaagcttatcacttaatggagggaacccaggagtatgattcctccatgcagacagtcag

SEQ ID NO: 19767 - DNA, 120 bp, synthetic construct
  source 1..120: mol_type = other DNA
acatgggtgtaggaaatatgtgcttctcacactcccaaaggatcacaaatggggccctgtgtctcttaacttccttatgtacaaaagtacatactcactagaatatgattttacaacatt

SEQ ID NO: 19768 - DNA, 120 bp, synthetic construct; identical to SEQ ID NO: 6045
  source 1..120: mol_type = other DNA

SEQ ID NO: 19769 - DNA, 120 bp, synthetic construct
  source 1..120: mol_type = other DNA
tttctataaagttggtaatgatgtgcccaatttcatttctgattttaggaatttgaggccatttttttttcttggtaagtctagctaaaggtttgtcaattgtgttgttattttccatga

SEQ ID NO: 19770 - DNA, 120 bp, synthetic construct
  source 1..120: mol_type = other DNA
cctttcttctgcttgctttggggttagttttctcttcttttccttgcttcttaccatagaaagttgaattactgattagaggtatttttcttttccaatgtaggcatttacagctacaga

SEQ ID NO: 19771 - DNA, 120 bp, synthetic construct
  source 1..120: mol_type = other DNA
gtggattcctgaagtttccaactgttggtgattactcattcaattccattgtggttggaatacatatattgtattagttcaatttttttttaatttatagataatttgtgccctcccatc

SEQ ID NO: 19772 - DNA, 120 bp, synthetic construct; identical to SEQ ID NO: 6046
  source 1..120: mol_type = other DNA

SEQ ID NO: 19773 - DNA, 120 bp, synthetic construct
  source 1..120: mol_type = other DNA
tattagtagagctgtctcagctctttcatcatagttttctacatggtatacttttttccaccctctttttttaacctattcattttaaaatcaaaactgcctctggtagactgcatatac

SEQ ID NO: 19774 - DNA, 120 bp, synthetic construct
  source 1..120: mol_type = other DNA
caaaacatcaataatgagatggaatgttaaaaaagaaacaaggctgggcgcggtggctcacgcctgtaatcccagcactttgggaggccgaggcgggcggatcacgagctcaggagatcg

SEQ ID NO: 19775 - DNA, 120 bp, synthetic construct
  source 1..120: mol_type = other DNA
tgaacccgggaggcggagcttgcagtgagccgagatcccgccactgcactccagcctgggcgacagagcgagactctgtctcaaaaaaaaaaaaaaaagaaaagaaaagaaacaaataaa

SEQ ID NO: 19776 - DNA, 120 bp, synthetic construct; identical to SEQ ID NO: 6047
  source 1..120: mol_type = other DNA

SEQ ID NO: 19777 - DNA, 120 bp, synthetic construct
  source 1..120: mol_type = other DNA
atagaaacattataatcaaactgccaagaaacaaagaaagaatcttgagggcaaaaagagggaagcaacttatcatgtacaagagattctcagtaagaataagaactaatttctcatgaa

SEQ ID NO: 19778 - DNA, 120 bp, synthetic construct
  source 1..120: mol_type = other DNA
ttctcagattttgaaaactgagagaagctgtaattaccagacctgtcttatgggaaattataaaagcagtcttgcaggttgacatgaaaggacactacatagcaactcgaatccacatga

SEQ ID NO: 19779 - DNA, 120 bp, synthetic construct
  source 1..120: mol_type = other DNA
aatttgtacggcaataaaaacacaaagaagcagaagagaatggagctgtatggaagcaaaggttttgtgtgctattgaaattaaattgctattaatctgactaaattgttataaattatt

SEQ ID NO: 19780 - DNA, 120 bp, synthetic construct; identical to SEQ ID NO: 6048
  source 1..120: mol_type = other DNA

SEQ ID NO: 19781 - DNA, 120 bp, synthetic construct
  source 1..120: mol_type = other DNA
atggaagctaaaaaatgttgagctcattagaaatagagagtggaattttgattattagagcacaggaaggatcgaagggaggagagagggaaggataggaagagattggttcatggatac

SEQ ID NO: 19782 - DNA, 120 bp, synthetic construct
  source 1..120: mol_type = other DNA
ggtacccagttcatcttattgggactggttggacagcgggtgcagcccatggagggtgtgccaaagcagggtggggcatcgcctcacccggggagcacaagaggtcaaggaactccctct

SEQ ID NO: 19783 - DNA, 120 bp, synthetic construct
  source 1..120: mol_type = other DNA
cctatgccaccagggccctgggtttcaagcacaaaactaggaggctgtttaggcagacaccaagctagctgcaggaggtttattttttctgattaagtcaagcagcagttctcaccgtgg

SEQ ID NO: 19784 - DNA, 120 bp, synthetic construct; identical to SEQ ID NO: 6049
  source 1..120: mol_type = other DNA

SEQ ID NO: 19785 - DNA, 120 bp, synthetic construct
  source 1..120: mol_type = other DNA
caatcatccaagcaagagatgttgacaaggacagaccagagtggtggtcctaacagtgataacgatttgtcagtttcacaacatatttttgcaggtagagccaatagaatttgtgggtag

SEQ ID NO: 19786 - DNA, 120 bp, synthetic construct
  source 1..120: mol_type = other DNA
gagggtgggtagtaaggagctcagtttatggcatgttaaatctgagatgtgtattagataccaaaagctgctggtgggtagacaattggacataggaatctggaggttaggagaaaaatc

SEQ ID NO: 19787 - DNA, 120 bp, synthetic construct
  source 1..120: mol_type = other DNA
taaaaaaggaaagaggactgaaccctaggcacagcagggaggaggagaaaccaataaaggagattaagaaggagcagctgggagactttggtgatttgaagctgtcagtcagctcagact

SEQ ID NO: 19788 - DNA, 120 bp, synthetic construct; identical to SEQ ID NO: 6050
  source 1..120: mol_type = other DNA

SEQ ID NO: 19789 - DNA, 120 bp, synthetic construct
  source 1..120: mol_type = other DNA
aagtccactctattgaaaagcttctaacaggtcaagtaacatgaggactgaaaactactatatcaatgtggaggtcagtttgtgaccttcgatgaaaggtttccagtgcagaaaccttgt

SEQ ID NO: 19790 - DNA, 120 bp, synthetic construct
  source 1..120: mol_type = other DNA
ccactggaaggacaaattatattacaggaaagaggggaaagattagagtaatgtccctgaataagtggaaagggatggaatatagtgggcaagtgggggtactggcatcagacagatgca

SEQ ID NO: 19791 - DNA, 120 bp, synthetic construct
  source 1..120: mol_type = other DNA
agtaaaaaatgaagtaaaatttttatctgagaaagatgatattatttgagagagaggagtactggggatttgaggggagaccagaaagtatgcatgagttacgtaggagaggggaaagtg

SEQ ID NO: 19792 - DNA, 120 bp, synthetic construct; identical to SEQ ID NO: 6051
  source 1..120: mol_type = other DNA

SEQ ID NO: 19793 - DNA, 120 bp, synthetic construct
  source 1..120: mol_type = other DNA
ctgaggaagaaactgagaggaaagtatagaaagataatctatgaggatactgaattcaccaagaatcatcacagtactggagagagtgagaggggatcagggacaaaaatcttcaaggac

SEQ ID NO: 19794 - DNA, 120 bp, synthetic construct
  source 1..120: mol_type = other DNA
ctacaaaattcctgacagaaagggttattttccttgttttacagatgatgacattgagagtcactgaagttaaacaattagcttaaggtcactccatcagagaatgaaattctaaaccag

SEQ ID NO: 19795 - DNA, 120 bp, synthetic construct
  source 1..120: mol_type = other DNA
ttggggactcctctccggacaccttcatgcaaagtactaatgataggagtgggacatctattccccagagctccatcctctcttctaaataacagggaacgttgagtcccctgttttttc

SEQ ID NO: 19796 - DNA, 120 bp, synthetic construct; identical to SEQ ID NO: 6052
  source 1..120: mol_type = other DNA

SEQ ID NO: 19797 - DNA, 120 bp, synthetic construct
  source 1..120: mol_type = other DNA
acagctatgcaattgcatcttttattaaatactcccaactccatttcaaatccagagaatccagagcaggagcaagagaccaacctatcatctggaaactcaaggtgtaaacattagtgc

SEQ ID NO: 19798 - DNA, 120 bp, synthetic construct
  source 1..120: mol_type = other DNA
cacaacagatttgtcttctagatgtgtgagggagatgatgggtttatgtgtacaggtgcacacatgcctatgttttggggaatttgtgcatacatgtaacaagaatgttatctgtgcagt

SEQ ID NO: 19799 - DNA, 120 bp, synthetic construct
  source 1..120: mol_type = other DNA
tgtccgtgtaatcaccgcattaaagaatttgaccttttgtaactcaacatctctagccaccattggtctgtaagcctgaatgtcacctctcctactttattcatctctgatatgacccca

SEQ ID NO: 19800 - DNA, 120 bp, synthetic construct
  source 1..120: mol_type = other DNA
gttgatcaaacaggaaggacctcgaagttagtcaaatataagtggaaaacctattaagcatttacaaataatgtggccttgggcaagtaatttaacttcagttactctcctaacatactc

SEQ ID NO: 19801 - DNA, 120 bp, synthetic construct; identical to SEQ ID NO: 6053
  source 1..120: mol_type = other DNA

SEQ ID NO: 19802 - DNA, 120 bp, synthetic construct
  source 1..120: mol_type = other DNA
ggttcttaattatgacattaatgcttattctgcccagtgaggataaaatgagtgaaacataaaatcaaacaggatgttttggtagggagcagtgttttttccctctgaaaaatgaaaaat

SEQ ID NO: 19803 - DNA, 120 bp, synthetic construct
  source 1..120: mol_type = other DNA
catccattacataacccatatgtttctgtaccattaagacacttggttcaacaagacccttggagaatgaggttccttttgttccctggggttctctttttattttatttttggattaat

SEQ ID NO: 19804 - DNA, 120 bp, synthetic construct
  source 1..120: mol_type = other DNA
actggctaaagggagctatgtaggtaaaaccaagatgtcctgatattctagtctaccagaaagtgttctttttttctacccaacttattcctgatttaaaggctagtatacgtgtgctga

SEQ ID NO: 19805 - DNA, 120 bp, synthetic construct; identical to SEQ ID NO: 6054
  source 1..120: mol_type = other DNA

SEQ ID NO: 19806 - DNA, 120 bp, synthetic construct
  source 1..120: mol_type = other DNA
taacataggcatttacaagaaataccacaaataaagtttcagacatgcttgcaaatcaagcaaggttaaggtcacttaggaggcccaactggctctgtctgctcaaggattcttctggcc

SEQ ID NO: 19807 - DNA, 120 bp, synthetic construct
  source 1..120: mol_type = other DNA
agggagtttatttttaagtaatctcatctgtaaatgggattacaatccacaaactgaccttgtatatgattccattccttctcccagcccagccccacactccaaggttttccctttgct

SEQ ID NO: 19808 - DNA, 120 bp, synthetic construct
  source 1..120: mol_type = other DNA
ccctgcagccggtcctcttcgcccttgtcctcctgtgctacctcctgaccttgacgggcaactcggcgctggtgctgctggcggtgcgcgacccgcgcctgcacacgcccatgtactact

SEQ ID NO: 19809 - DNA, 120 bp, synthetic construct; identical to SEQ ID NO: 6055
  source 1..120: mol_type = other DNA

SEQ ID NO: 19810 - DNA, 120 bp, synthetic construct
  source 1..120: mol_type = other DNA
cggcgttgctcaagctggcctgcggaggcgacggagacactaccgagaaccagatgttcgccgcccgcgtggtcatcctgctgctgccgtttgccgtcatcctggcctcctacggtgccg

SEQ ID NO: 19811 - DNA, 120 bp, synthetic construct
  source 1..120: mol_type = other DNA
agcccgcgcagcgctacaaccaggcacggggcaagttcgtatcgctcttctacaccgtggtcacacctgctctcaacccgctcatctacaccctcaggaataagaaagtgaagggggcag

SEQ ID NO: 19812 - DNA, 120 bp, synthetic construct
  source 1..120: mol_type = other DNA
ttcaggctgttcatttttgtatgataatctgcaagatttgtcctaaggagtccaatgggggatatgttttcctcccgtgaggaaatgtttagttcttgagggaaaatccctaaatcctct

SEQ ID NO: 19813 - DNA, 120 bp, synthetic construct; identical to SEQ ID NO: 6056
  source 1..120: mol_type = other DNA

SEQ ID NO: 19814 - DNA, 120 bp, synthetic construct
  source 1..120: mol_type = other DNA
caggagttggttcttgagcaagttttaaagaaacaaggaactaggatgagtgtggaagaaggcgggcacgtctcagcccgtgaaaaaaactcacaggtgatcagtagtgagtcatgagag

SEQ ID NO: 19815 - DNA, 120 bp, synthetic construct
  source 1..120: mol_type = other DNA
ctcaatcagcagaacctgagcagaatattgaggtcaacccagaagccagctcctcacccaccctcacccagactggcgccctcatcctggagaagacctgctagaccctaaggcaggtag

SEQ ID NO: 19816 - DNA, 120 bp, synthetic construct
  source 1..120: mol_type = other DNA
ccttgcccaccatcatccccagaaataataactattttagttgggtgtgagacatagagaataaaagggggcatggtgccagacttcatttcatacaaatagctttaaaggagaagaggg

SEQ ID NO: 19817 - DNA, 120 bp, synthetic construct; identical to SEQ ID NO: 6057
  source 1..120: mol_type = other DNA

SEQ ID NO: 19818 - DNA, 120 bp, synthetic construct
  source 1..120: mol_type = other DNA
atgtcacttaattaattgtgttagaatcaaagaaacatagagttgggcaatatacttcatcctacccatcccacccaaatcttactctactcatctcattctcattaattttgggaaatc

SEQ ID NO: 19819 - DNA, 120 bp, synthetic construct
  source 1..120: mol_type = other DNA
ccctttctgatgccgtaatctgccatcatcttcccatcttccagtctctttccattgcaagtcacaatctgggtctcagggattatacccgtcttagtctcgatcattgctttcacttgt

SEQ ID NO: 19820 - DNA, 120 bp, synthetic construct
  source 1..120: mol_type = other DNA
gtcttctctttgtcaatgccataagatgagaggcttctccgtggctttaagatcttggagcccagcaaaagaacctggtcctgcacaggaaccttggtcttagaccggacatgttctttg

SEQ ID NO: 19821 - DNA, 120 bp, synthetic construct; identical to SEQ ID NO: 6058
  source 1..120: mol_type = other DNA

SEQ ID NO: 19822 - DNA, 120 bp, synthetic construct
  source 1..120: mol_type = other DNA
gggaccctagagaaactttaaaaacttagtcattgggccaagggtggtggcttacacctgtaatcccagaactttgggaagctgaggcaggctgatcaattgatgctgggagttcgagac

SEQ ID NO: 19823 - DNA, 120 bp, synthetic construct
  source 1..120: mol_type = other DNA
ccaggaggcagaggttgcagtgagtggagatggcactactgcactccagccagggcaacagagtgagactctgtctcaaaaatataaataaataaaacattcagtcatgatggaacagga

SEQ ID NO: 19824 - DNA, 120 bp, synthetic construct
  source 1..120: mol_type = other DNA
aacaagaccgagggctataacaggcaaaagttaagtcatgcatcccttacacttaaagaataaactatgttctgccacaaagttttttcttttttctctagcagctaaacaagcactggc

SEQ ID NO: 19825 - DNA, 120 bp, synthetic construct; identical to SEQ ID NO: 6059
  source 1..120: mol_type = other DNA

SEQ ID NO: 19826 - DNA, 120 bp, synthetic construct
  source 1..120: mol_type = other DNA
ctattggatatgtatacttagcaaaccccttcagcataaattcctgtgtcacctttcctcctgcaaagtgcttgcttttggttttcaatcagaagcaaaacttcccagcctgtcagaatg

SEQ ID NO: 19827 - DNA, 120 bp, synthetic construct
  source 1..120: mol_type = other DNA
taaaaaacatacctttatccatctcaaaatgtaattagtgattttccaccttatttacctgcctctcctatccagataaagtttgtcaaatgtcaacaagtaaatacgaggcttcaaaag

SEQ ID NO: 19828 - DNA, 120 bp, synthetic construct
  source 1..120: mol_type = other DNA
gataccctctgtcaatacttcagaaggaaatcctgggtaggacacataatcactgaactgttagtttcttttcaaatatcccactgctttataataataactcacatactaccgtgacac

SEQ ID NO: 19829 - DNA, 120 bp, synthetic construct; identical to SEQ ID NO: 6060
  source 1..120: mol_type = other DNA

SEQ ID NO: 19830 - DNA, 120 bp, synthetic construct
  source 1..120: mol_type = other DNA
actaaatcttgcaactgcactcttctggtctatgtttcttacggctcgaggtgagctttcgcttgccatccaccactgccgtttgccaccgtcgcagacccgcggctgacttccatccct

SEQ ID NO: 19831 - DNA, 120 bp, synthetic construct
  source 1..120: mol_type = other DNA
gctgaacactagtcactgggtccacggttctcttccgtgacccatggcttctaatagagctgtaacaaccaccacatgacccaagattccattccttggaatccatgaggccaagaaccc

SEQ ID NO: 19832 - DNA, 120 bp, synthetic construct
  source 1..120: mol_type = other DNA
atgtgatctcctttgataagactagggcctcactcacagaaggtagggactatatctaagtcttacttcaatagctggaaaatcctaaaagatgggaaaactcacccctaatggccactt

SEQ ID NO: 19833 - DNA, 120 bp, synthetic construct; identical to SEQ ID NO: 6061
  source 1..120: mol_type = other DNA

SEQ ID NO: 19834 - DNA, 120 bp, synthetic construct
  source 1..120: mol_type = other DNA
aaagctcacccccactttttcttctaccatttatccctaagagtagctagtccaatgttttatttaaaaaagaacacagaagccagataaccagcttctcttcagacaatccctcttccc

SEQ ID NO: 19835 - DNA, 120 bp, synthetic construct
  source 1..120: mol_type = other DNA
cctttccccatcccctttatcaaatcccaacttacacagaggcaggaagcattgggagccatctctgcagacaaggggccagaaaccagagacagaaaaaggactttgcatgcagcttat

SEQ ID NO: 19836 - DNA, 120 bp, synthetic construct
  source 1..120: mol_type = other DNA
agacaaagaatgctttctgatcacatacttctctcctcaagcaatctatttgcaaacctcattccaaacatgggatggtctttctgtgttgaaaacttttcccttttctcaggaaagatc

SEQ ID NO: 19837 - DNA, 120 bp, synthetic construct; identical to SEQ ID NO: 6062
  source 1..120: mol_type = other DNA

SEQ ID NO: 19838 - DNA, 120 bp, synthetic construct
  source 1..120: mol_type = other DNA
catgtttcttcaacaatagcatcgtctgcttgtctgtaatctttagaaaagagtaggaatcttgggggtcgtgattgtgtcttaattaacttgtatctttagcactgttccagcatgctg

SEQ ID NO: 19839 - DNA, 120 bp, synthetic construct
  source 1..120: mol_type = other DNA
aaaaaaggaaaagtaatatttggtgagtacttaaatttcaagaactgcacaacatattattaaatgttaccttatttactgtttcagcattttaatgaagtaagtacaggtgctccttca

SEQ ID NO: 19840 - DNA, 120 bp, synthetic construct
  source 1..120: mol_type = other DNA
ccaccaaacatcatagcttaacctaacctgccttaaacatgctcagaacacttacattagcatacagttggacaaaattatctaacaaaaagtgtatttactactgaagtgtgaaatatc

SEQ ID NO: 19841 - DNA, 120 bp, synthetic construct
  source 1..120: mol_type = other DNA
tggaatcattgtaaggaaccacctctattagtatccccgttaataagtaagaagctacctcatccacaatcatattagtagtagctggtaagcaagggttcaaacactaatctgtatttc

SEQ ID NO: 19842 - DNA, 120 bp, synthetic construct; identical to SEQ ID NO: 6063
  source 1..120: mol_type = other DNA

SEQ ID NO: 19843 - DNA, 120 bp, synthetic construct
  source 1..120: mol_type = other DNA
ttgctgaccacaggcaggacttcatcttgggacctgacctccttgcttcttacccagtgtcaatctgacttttttctgtctctctctatgtcacaataagttctttcagagacagatctc

SEQ ID NO: 19844 - DNA, 120 bp, synthetic construct
  source 1..120: mol_type = other DNA
accagcatctgcttctggtgaggcctcaagaagcttttactcatggtggaaggtgaaggagagcaggcgtgtcacatggcaagagagggaggtaagagacagtgggaaaaatgccaggct

SEQ ID NO: 19845 - DNA, 120 bp, synthetic construct
  source 1..120: mol_type = other DNA
ccatttccaacactgggggtcacatttcaacatgagatctggagagtacaaacatccaaactacatcatttacccctctgacaaattcagaaaaccaactaaagtgtcagaggtgtttga

SEQ ID NO: 19846 - DNA, 120 bp, synthetic construct; identical to SEQ ID NO: 6064
  source 1..120: mol_type = other DNA

SEQ ID NO: 19847 - DNA, 120 bp, synthetic construct
  source 1..120: mol_type = other DNA
atttcccacttctttcctggaaaacttgtgaataagccaccccttgtttagtatataatcaagaaataaccataaaaatagtcaaccagcagccctcagggctgctctgcctataaagta

SEQ ID NO: 19848 - DNA, 120 bp, synthetic construct
  source 1..120: mol_type = other DNA
cctttccagtaacaaaagtaaaaagatgatggtatgaagatcttgccaagttataaaacaattgtggcggttatctacgagtgtcccaatgtggccctggctgacgggatgctcttgggc

SEQ ID NO: 19849 - DNA, 120 bp, synthetic construct
  source 1..120: mol_type = other DNA
aaagagtttctaaactgctttgagatctagaatattgcttcaaaaatgccaaccaaactcagtcagaaagctagtgtgaattctcatttattggtgattgggaaaaaagtctacactcaa

SEQ ID NO: 19850 - DNA, 120 bp, synthetic construct; identical to SEQ ID NO: 6065
  source 1..120: mol_type = other DNA

SEQ ID NO: 19851 - DNA, 120 bp, synthetic construct
  source 1..120: mol_type = other DNA
ggtagcccctactgctgtgtcgttcccctattggctaggtttggaccacacaatctaagctaattccgattggctattttaaagagagcaggggtatgagccagagcggcagggtgggta

SEQ ID NO: 19852 - DNA, 120 bp, synthetic construct
  source 1..120: mol_type = other DNA
gaactgacaggaaagttgtttactgaaactagaggcaagagggtgaagagaacccggaagctcaactttcaaatggagaatcaaagaataagagagatgaatatgctgacatactgattc

SEQ ID NO: 19853 - DNA, 120 bp, synthetic construct
  source 1..120: mol_type = other DNA
aagaggaactacttgaaattcaggatatgtctgctttttaacaaaaatgaagcccaatctaaattttgatataagctacttgaaggagattttcaacaggaagtaagagggcattagaag

SEQ ID NO: 19854 - DNA, 120 bp, synthetic construct; identical to SEQ ID NO: 6066
  source 1..120: mol_type = other DNA

SEQ ID NO: 19855 - DNA, 120 bp, synthetic construct
  source 1..120: mol_type = other DNA
agattataataaaaatataatttaaaatttttcatgttcatatcctctagctcagcaattctgcttctaggaacttatcctattagtactcttttggtttttttttaaggagtatcactc

SEQ ID NO: 19856 - DNA, 120 bp, synthetic construct
  source 1..120: mol_type = other DNA
ctcagccttctgagcagctgggattgcagtcatgtgccaccatgcctggctattatttatttatttatttatttatttattatttttatttttagtagagatggggtttcagcatgctgg

SEQ ID NO: 19857 - DNA, 120 bp, synthetic construct
  source 1..120: mol_type = other DNA
accatgcctggccctattagtacacttatatatgtgtgaaataagccatgtacaagaatattcatgtgaaataattatttgcaactgaaataaatgggaacaacacttatcaatagacaa

SEQ ID NO: 19858 - DNA, 120 bp, synthetic construct; identical to SEQ ID NO: 6067
  source 1..120: mol_type = other DNA

SEQ ID NO: 19859 - DNA, 120 bp, synthetic construct
  source 1..120: mol_type = other DNA
tcatcactagttgacaggcaaagggccatgaaaagttggtggctatagtaggttaactattgtgattctgtgccttccctactccccaaaatttattttccactaatcttttacatactg

SEQ ID NO: 19860 - DNA, 120 bp, synthetic construct
  source 1..120: mol_type = other DNA
aaacctaatgaaaaaaaaaaagtaattctgagacaattgctgagcctggtacatgggactgatgtcaatgtgcaaaaattgtccaacctgacaaagcaactggaataactaatgcagtca

SEQ ID NO: 19861 - DNA, 120 bp, synthetic construct
  source 1..120: mol_type = other DNA
gtcagctggggatttcggatttcacttaggattaggctctgctaccattaacagacatctgaaaataatgtgcctttaactaaaaccccaaaaggaccagatcttagaagtcaaaatgac

SEQ ID NO: 19862 - DNA, 120 bp, synthetic construct; identical to SEQ ID NO: 6068
  source 1..120: mol_type = other DNA

SEQ ID NO: 19863 - DNA, 120 bp, synthetic construct
  source 1..120: mol_type = other DNA
taaagaatccacagggaaagatttatacaatgggtaaagaaatgatgaattttaggagacagatgtagaaactgccattttaaaaagccaaacagaaatgctggaactgaaaaatacaat

SEQ ID NO: 19864 - DNA, 120 bp, synthetic construct
  source 1..120: mol_type = other DNA
tcatagcttagaaacatcaaaataattaagaaacaattagacatatcataaatgcataaaacatacgtagatactagcatactttatcatttactataaaatatacacaaatctattata

SEQ ID NO: 19865 - DNA, 120 bp, synthetic construct
  source 1..120: mol_type = other DNA
tagccacctcctgttactattgggtgagctcaagtgttgggagtatgggattaaaatgtcatgtaatactaatcattcccacgtaagcagttcgtcttctctttaggaaaaagtgatgtc

SEQ ID NO: 19866 - DNA, 120 bp, synthetic construct; identical to SEQ ID NO: 6069
  source 1..120: mol_type = other DNA

SEQ ID NO: 19867 - DNA, 120 bp, synthetic construct
  source 1..120: mol_type = other DNA
cataaagcctgaataacaccacgagacccatatagtgatgctggaagttttccctggagacagagaaaagccataacattacaggaaaaagttgaattgcttgatatgtgctatagattg

SEQ ID NO: 19868 - DNA, 120 bp, synthetic construct
  source 1..120: mol_type = other DNA
aattttcttaataacattttcttttctctggctcatgttattgtaagaatacagtatataatacatacaacatacaaaatatgtgtcagtcaactgtatatatgatcagtaaggcttctg

SEQ ID NO: 19869 - DNA, 120 bp, synthetic construct
  source 1..120: mol_type = other DNA
gactttctggtaaaaagaaccaggagtccttggagagatggttgatcccagacagaggaaagagaacatacaagataaccctggaatactgtatgatgccagaaactaaagaagtcatta

SEQ ID NO: 19870 - DNA, 120 bp, synthetic construct; identical to SEQ ID NO: 6070
  source 1..120: mol_type = other DNA

SEQ ID NO: 19871 - DNA, 120 bp, synthetic construct
  source 1..120: mol_type = other DNA
ataaatacttattatgttacttatattattataagatatgactacagttttaataagacaacacagttaaaaaaatgaaaaataatttgaataaaagacacgtaaggaccaataaagcac

SEQ ID NO: 19872 - DNA, 120 bp, synthetic construct
  source 1..120: mol_type = other DNA
atgtggaacatctggaactctcatcgctgtagggagtgtaaatggcacaatcactctggaaagcagtttagcagtttcttataaagataaacagacagcaaatgactcagaaattccaat

SEQ ID NO: 19873 - DNA, 120 bp, synthetic construct
  source 1..120: mol_type = other DNA
ctcttcctcttcctcttcttcttcttcttcttcttcttcttcttcttcttcttcttcttcttcttcttcttctttttttcggacccaggctgttgtgcagtggcatgatcatggctcact

SEQ ID NO: 19874 - DNA, 120 bp, synthetic construct; identical to SEQ ID NO: 6071
  source 1..120: mol_type = other DNA

SEQ ID NO: 19875 - DNA, 120 bp, synthetic construct
  source 1..120: mol_type = other DNA
cactatgaatgaatttccataacaagccagataacagaagccagaaataaggcatgaagctaggcatggtggctcatgcctgtaattctagcattttgggagtccaaggtgggtgaatca

SEQ ID NO: 19876 - DNA, 120 bp, synthetic construct
  source 1..120: mol_type = other DNA
gagtccaggaggttgaggctgcagtgaactgtgatcacaccactgcactctagcctgggtgacaaagtaacaccttgtctcaaaaaacataaaaaaagtaaatttcattgaagtacaaat

SEQ ID NO: 19877 - DNA, 120 bp, synthetic construct
  source 1..120: mol_type = other DNA
agttatcctatgccctgtcccagacaaccaatcatctgatttctatcttgctagatttgcttttcctgttgtaggaaagttatgtcaatgaaatcaggtggtatgaatgtatgaatgctt

SEQ ID NO: 19878 - DNA, 120 bp, synthetic construct; identical to SEQ ID NO: 6072
  source 1..120: mol_type = other DNA

SEQ ID NO: 19879 - DNA, 120 bp, synthetic construct
  source 1..120: mol_type = other DNA
gactacagatgaaggccaccacacccggctaagtttttgtacttttcgtagagacaaggtcttgctatgttgcccagactggtctcgaactcctgggctcaggtgatccattcctcttgg

SEQ ID NO: 19880 - DNA, 120 bp, synthetic construct
  source 1..120: mol_type = other DNA
ctagtgaaataattcttactcaaaggagtatatattattccatttgtatgaagtcctagaagaggcaaaactaagtatcaaggaaagaggcaagtggaaggtttgtaggatgatggaaat

SEQ ID NO: 19881 - DNA, 120 bp, synthetic construct
  source 1..120: mol_type = other DNA
atccaaatgtctaccagtagagaagaaacaagaaataacgaagtcttacatgggttcaaatgagacttgagagaaaagaatgggacacactcaggagaggtggcaatgagaaaacatgac

SEQ ID NO: 19882 - DNA, 120 bp, synthetic construct; identical to SEQ ID NO: 6073
  source 1..120: mol_type = other DNA

SEQ ID NO: 19883 - DNA, 120 bp, synthetic construct
  source 1..120: mol_type = other DNA
gccttacaggtccagaagaaggatggtggtggggtatagtttgtgcctgactctagagccaacccacctgggttcaagtctcagctctggctatataattctgagctaattatttaacct

SEQ ID NO: 19884 - DNA, 120 bp, synthetic construct
  source 1..120: mol_type = other DNA
gaaaggtgtggcagcagcattagaagtcaacattactacctgagccctaatccaccaccctttcaaaggtgcccaacactcctgactttgcttgtagatttcattgtgaggattaactag

SEQ ID NO: 19885 - DNA, 120 bp, synthetic construct
  source 1..120: mol_type = other DNA
aaagttataagtttattcttctcctactgtccattaatgtccacatatcgtcaatggtagagctaccccaggagcaccagatttggaatcaaacaggactcagactccaggcctggtctt

SEQ ID NO: 19886 - DNA, 120 bp, synthetic construct; identical to SEQ ID NO: 72
  source 1..120: mol_type = other DNA

SEQ ID NO: 19887 - DNA, 120 bp, synthetic construct
  source 1..120: mol_type = other DNA
cagaagaaagagagtgagaacaaatacacgttgtgaaacacagaacaagagagaacagaaagagagtcaaagaactatgtaaattgaagagactgaaaaatgacatagagtgaagcaatg

SEQ ID NO: 19888 - DNA, 120 bp, synthetic construct
  source 1..120: mol_type = other DNA
gacaatataggaatgattttgtaaaagtaataattgaaatagtcattgcgtcttcaggagtaggtagtaggtatgattagggaagggcacgcagaaggcttttaagatttaaacaatctt

SEQ ID NO: 19889 - DNA, 120 bp, synthetic construct
  source 1..120: mol_type = other DNA
gagacaaatataaacaggttgaacaaataaaaagatgagatggggcttttaaacacacaaaaaagagacactgcaatgggtagatgctgccaacctatagcctctccagccacctcccca

SEQ ID NO: 19890 - DNA, 120 bp, synthetic construct; identical to SEQ ID NO: 6075
  source 1..120: mol_type = other DNA

SEQ ID NO: 19891 - DNA, 120 bp, synthetic construct
  source 1..120: mol_type = other DNA
cttcagtgacttaggataggctactaaagaggataaagtcagacctgacatctaagtacaatatgtgactctcaactggatcctacgtggaaaaaaaaaaatcctacaaagaacattatt

SEQ ID NO: 19892 - DNA, 120 bp, synthetic construct
  source 1..120: mol_type = other DNA
aatactaagacaataaggagaaagaggcatgatgtccacaagttattcccaagtgactcagagtaaaaatgaaaatacataaacatattgagtataatgatagtgaaaatgagtaaaaat

SEQ ID NO: 19893 - DNA, 120 bp, synthetic construct
  source 1..120: mol_type = other DNA
taaccgagcattttcaaaagcaaaattctacttacatgtcccaaactcaacatggtatgtttttactactatattttatcttacatgaaaaggagaggatattgaaatctatttcagctt

SEQ ID NO: 19894 - DNA, 120 bp, synthetic construct; identical to SEQ ID NO: 6076
  source 1..120: mol_type = other DNA

SEQ ID NO: 19895 - DNA, 120 bp, synthetic construct
  source 1..120: mol_type = other DNA
tagtaatgtttacaattaggaaactcactgaacacacatttctttgtatttccttccacacataacaaagggaaaattcagtagtagcatagcgatcagaacataataggtacttaataa

SEQ ID NO: 19896 - DNA, 120 bp, synthetic construct
  source 1..120: mol_type = other DNA
taatggtttcctcactcccactagacaatgtttgatcagaaggaacaggggatgagaaggagctgcttgatggtgatgagactgggaaaggaacgctgggcgagcagagacaaaagagaa

SEQ ID NO: 19897 - DNA, 120 bp, synthetic construct
  source 1..120: mol_type = other DNA
aagctccgcaccaggctttctccttctgggcttctctgaacacccagcactggaaaggactctctttgtagttgtcttcacttcctacctcctaaccccggtggactcatcatcctgctg

SEQ ID NO: 19898 - DNA, 120 bp, synthetic construct; identical to SEQ ID NO: 6077
  source 1..120: mol_type = other DNA

SEQ ID NO: 19899 - DNA, 120 bp, synthetic construct
  source 1..120: mol_type = other DNA
tgcccccatcagcaggtggatgattttgtctgtgaggtcccagctctaattcgactctcctgtgaagacacctcctacaatgagatccagatggctgttgccagtgtcttcatcttggct

SEQ ID NO: 19900 - DNA, 120 bp, synthetic construct
  source 1..120: mol_type = other DNA
tcttctacagctcagtcattgctgtctacctccagcccaaaaatccctatgcccaagagaggggcaagttctttggtctcttctatgcagtgggcactccttcacttaaccctctcatat

SEQ ID NO: 19901 - DNA, 120 bp, synthetic construct
  source 1..120: mol_type = other DNA
agagctgtttaatgtgctttctaaattaagaagaaattatttatccttttgtgaacaagtttgagctcccaagtatactacctttcatacacccatcacagtgtttacaatgggtcacag

SEQ ID NO: 19902 - DNA, 120 bp, synthetic construct; identical to SEQ ID NO: 6078
  source 1..120: mol_type = other DNA

SEQ ID NO: 19903 - DNA, 120 bp, synthetic construct
  source 1..120: mol_type = other DNA
aacctccgcctcctgggttcaagtgattcttctgccccagcttcctgagtagctgggactacaggcacatgccaccatgcccagctaattttttatttttagtagagacggggtttcacc

SEQ ID NO: 19904 - DNA, 120 bp, synthetic construct
  source 1..120: mol_type = other DNA
cttctttcctttgtcatcaggatggttcatctccacttgcttgaggtggactgacaggaagctgacactcagagaatttagtaatttcacccaagaacacacagcaatttgttagaccta

SEQ ID NO: 19905 - DNA, 120 bp, synthetic construct
  source 1..120: mol_type = other DNA
tccagtcctagtaagttttctgatcatccagctttccagggatcacaacactaatctcctgccaaatcctgaaaatgtgctcccattcctggagatgattttcctttacctcttctcaac

SEQ ID NO: 19906 - DNA, 120 bp, synthetic construct; identical to SEQ ID NO: 6079
  source 1..120: mol_type = other DNA

SEQ ID NO: 19907 - DNA, 120 bp, synthetic construct
  source 1..120: mol_type = other DNA
agaggttatgctgtgataacaataccaatcctcagtgacttgaaacagcataggtttatttcttgctgctgctgcatgcccattgtcatccaaccagaggttctgccttgtcatcttcac

SEQ ID NO: 19908 - DNA, 120 bp, synthetic construct
  source 1..120: mol_type = other DNA
aacactttgactcattggtcatttgccaaagcaaatctcatggctacatataacttcaaggtgaggggaaataaaccaatcatgtggcaggaaagggaaccagaaatatttggtggatga

SEQ ID NO: 19909 - DNA, 120 bp, synthetic construct
  source 1..120: mol_type = other DNA
aaataatatatagaatccccctgcaataaaatgtggagcccaaactcctagatcgggttcctgttttccagactttaccatccccacctcctaaggctcaaccacctagaatcctgcaag

SEQ ID NO: 19910 - DNA, 120 bp, synthetic construct; identical to SEQ ID NO: 6080
  source 1..120: mol_type = other DNA

SEQ ID NO: 19911 - DNA, 120 bp, synthetic construct
  source 1..120: mol_type = other DNA
ccaaagttgaccttgcagaactcacaaatacaaaaagtcggttctcacatccatgagtttagcatcctgagaatattgtattttcaattcatgtttgcttgtggatgcagaacctgtggg

SEQ ID NO: 19912 - DNA, 120 bp, synthetic construct
  source 1..120: mol_type = other DNA
ctgtgccagcctcccctagacaagagcgccgtgtcgaggagaagaaatcggctcaagctctgggcccatgatgcctgctccttccaaagactgtggcagattacgccaactgggatccgg

SEQ ID NO: 19913 - DNA, 120 bp, synthetic construct
  source 1..120: mol_type = other DNA
gtgagccctatgacatcatcgacagcagtaacttgaagaagagcagacatggaagagaaatctgcttttcactttatatttttgcctgtcttttaaatgttacagctgtgtgtgctttac

SEQ ID NO: 19914 - DNA, 120 bp, synthetic construct; identical to SEQ ID NO: 6081
  source 1..120: mol_type = other DNA

SEQ ID NO: 19915 - DNA, 120 bp, synthetic construct
  source 1..120: mol_type = other DNA
ttgggagagactcatagcaaaatgacatgtaattctgaggtcatcactgagtatggtacttgagtctatcgccacatgtgaaaagcatctgaatataatccaaaaagctattgcagtcat

SEQ ID NO: 19916 - DNA, 120 bp, synthetic construct
  source 1..120: mol_type = other DNA
gcaataggggtgctaggagagtcttttgttctaatatttggtctttgaccaaatatgtcagttcctaacattgagctctaatcccttggaatttcctgggtaacaggagcatcttttgtt

SEQ ID NO: 19917 - DNA, 120 bp, synthetic construct
  source 1..120: mol_type = other DNA
ttcagctctaccctcatcttccagaaaatcgagagtggctagacattgagttaataatcaactatatctatttgatgaagcctccacaaaaatccctgaactacagagctccgagaactt

SEQ ID NO: 19918 - DNA, 120 bp, synthetic construct; identical to SEQ ID NO: 6082
  source 1..120: mol_type = other DNA

SEQ ID NO: 19919 - DNA, 120 bp, synthetic construct
  source 1..120: mol_type = other DNA
ggatctcactgtatctccaggtgaataatgtcagaagtgaattgaattgaattataggacaccaagttggtgtccactgaagaatgtattggtcagtctggaagaaaaaccaacatgttg

SEQ ID NO: 19920 - DNA, 120 bp, synthetic construct
  source 1..120: mol_type = other DNA
aatacaaaaaatcagccaggcatggtggcagatgcctgtagtcccagctactcgggaggctgaggcaggagaatggcatgaacccaggaggcagagcttgcagtgagccgagatcgcgct

SEQ ID NO: 19921 - DNA, 120 bp, synthetic construct
  source 1..120: mol_type = other DNA
tgagaatatagtaggagaaaatggtcagtttgggggttttctacaaatacacagagccctttcgcattgcgcagcatccaatttgaatcctggacctgcaaactcatgcccaggatatag

SEQ ID NO: 19922 - DNA, 120 bp, synthetic construct; identical to SEQ ID NO: 6083
  source 1..120: mol_type = other DNA

SEQ ID NO: 19923 - DNA, 120 bp, synthetic construct
  source 1..120: mol_type = other DNA
cttcctcaaatttcattgttcttcatcttctaaacctcctccttccaagcacttgaccaaccaaccaagccatttgccactgcccatgtattcacaaatattcttccattaggccattat

SEQ ID NO: 19924 - DNA, 120 bp, synthetic construct
  source 1..120: mol_type = other DNA
cattttcagctcacaccaatgtgttgagcagatacatccatgaaccaaggtcatcttatttttcctccattagccaatcataaagtacccctccccccccatgacagattaaagatggct

SEQ ID NO: 19925 - DNA, 120 bp, synthetic construct
  source 1..120: mol_type = other DNA
tggggccagcctgtaagagaactggctgttcctccttgctatcctggagtcctgaatttccaagtaaaaagtctatcatgctgggcagaccatgtagaaaggccctgagatagcatgaag

SEQ ID NO: 19926 - DNA, 120 bp, synthetic construct; identical to SEQ ID NO: 6084
  source 1..120: mol_type = other DNA

SEQ ID NO: 19927 - DNA, 120 bp, synthetic construct
  source 1..120: mol_type = other DNA
ttaccctccagttctgcccatgactgatgcaggatatacgacttctctcttacaactgatgatgttgcaaccactagacctcatcacttgattgatttgacaggacccagctcatgatgg

SEQ ID NO: 19928 - DNA, 120 bp, synthetic construct
  source 1..120: mol_type = other DNA
tgtttcctaatggggtttactttcctgcagcagacagcatagatttgatgaagaaccccagggatctatgttgtgattttcctttcaaggcttgcccaaaatgccacactgtatcttttc

SEQ ID NO: 19929 - DNA, 120 bp, synthetic construct
  source 1..120: mol_type = other DNA
agtcgctagtaaactgttccatgtggtattcccatgagtgtggaatatgtttcctctagatcctaaataggacaaccaagcattctctaccctggagaagaggaaggagaagaccaagat

SEQ ID NO: 19930 - DNA, 120 bp, synthetic construct; identical to SEQ ID NO: 6085
  source 1..120: mol_type = other DNA

SEQ ID NO: 19931 - DNA, 120 bp, synthetic construct
  source 1..120: mol_type = other DNA
gtgtatttcccactctctggagtgcatttgtcttaccagtgccgccaatatgcttgccctcatggctcattctgtttggttaataagatattgttgatacagtggaacgatgtcatgttt

SEQ ID NO: 19932 - DNA, 120 bp, synthetic construct
  source 1..120: mol_type = other DNA
ttattttaaaataagttattttaaggcataggtaacaaatccctaagctcttcattttctaggtatttaactatcttatcatattttccatactcttctggttatttatatctgttatgt

SEQ ID NO: 19933 - DNA, 120 bp, synthetic construct
  source 1..120: mol_type = other DNA
gctctgagacctgccagccactcccattcctggggtgcggtcctcctggttcagaagtgattttccattaggctatcttttaatttaaacatgaactctgctgtgcccatcactgtctgt

SEQ ID NO: 19934 - DNA, 120 bp, synthetic construct; identical to SEQ ID NO: 6086
  source 1..120: mol_type = other DNA

SEQ ID NO: 19935 - DNA, 120 bp, synthetic construct
  source 1..120: mol_type = other DNA
aaaagctttggtggttcctgctgccctcaagcttgtgtgtctgaagcctacaagaaaatttgtccgcctggacaccgagcttatgaagttagctggaagtaccaggcagtgacagccacc

SEQ ID NO: 19936 - DNA, 120 bp, synthetic construct
  source 1..120: mol_type = other DNA
tcaagatccatggacttctggtctgagcctaataaagactgtttgtttattcctcaaaaacaaacaaacaaaaaaaaaccctctgtattataaattattctgtgtaatggtgtgttacca

SEQ ID NO: 19937 - DNA, 120 bp, synthetic construct
  source 1..120: mol_type = other DNA
ggacttgcagcacatccatgtcccattggaccctattatgacgggagagttttaacatggtactgaagcaaaaatgtaaatgtaaatgtacacttatatccatacctgtaaattcaaact

SEQ ID NO: 19938 - DNA, 120 bp, synthetic construct; identical to SEQ ID NO: 6087
  source 1..120: mol_type = other DNA

SEQ ID NO: 19939 - DNA, 120 bp, synthetic construct
  source 1..120: mol_type = other DNA
tagccatataacatggacctgaaaccgtgctaatcaggcacaacagctgtaattacagctatttcttggttgagtttgtgctagtctggtcatctttcaagttgcatctgatatttgtag

SEQ ID NO: 19940 - DNA, 120 bp, synthetic construct
  source 1..120: mol_type = other DNA
tcccttgaattgtgatattgttcttgattcactgtctttgcggtaagaggtgtagattcagggcttccacttcaatctgtagctcgtactccacagactaaagaactatgtggggattct

SEQ ID NO: 19941 - DNA, 120 bp, synthetic construct
  source 1..120: mol_type = other DNA
atggaagagaagcataacgattcagttatatgaagattggctaaatgttctaagtactctccaaacccagagctttataattctctgttactacagtgtgctccatctcagaataactaa

SEQ ID NO: 19942 - DNA, 120 bp, synthetic construct; identical to SEQ ID NO: 6088
  source 1..120: mol_type = other DNA

SEQ ID NO: 19943 - DNA, 120 bp, synthetic construct
  source 1..120: mol_type = other DNA
cataccatgtcaacatttctacctccaatgccactaaaacagaggcacacctctgcctagactgagggggaaaattgttggcaaagaactcaatggcaaagaactcgatggcaaagaact

SEQ ID NO: 19944 - DNA, 120 bp, synthetic construct
  source 1..120: mol_type = other DNA
aaaccctctacagttagcagatttgggttcaaacatcagctctggtgcttactaactatactgccttgggaaagttatttatatttctttgtttcaacttcttcatattggaaggaagag

SEQ ID NO: 19945 - DNA, 120 bp, synthetic construct
  source 1..120: mol_type = other DNA
aatattcctgccatggctgtctcaagccactgatggtttaataactgtctcacaaaattcctaaaaatttactaatcaagagataatctgagccagctccagctcatcacacacatgtgt

SEQ ID NO: 19946 - DNA, 120 bp, synthetic construct
  source 1..120: mol_type = other DNA
tcctttttatttttttgtttcttcctgatgtacaagtggaggctgggcaccagttaagagctctgtcatggggaattgctggtaccagaagagatttttatttgattgaaggtaagcaga

SEQ ID NO: 19947 - DNA, 120 bp, synthetic construct; identical to SEQ ID NO: 6089
  source 1..120: mol_type = other DNA

SEQ ID NO: 19948 - DNA, 120 bp, synthetic construct
  source 1..120: mol_type = other DNA
aatgaataaatgcgtagaccaatgcatgaatatttcagaaggaaaaggagtaggagaaaaataatgagagtggaaaagacagagaacaaagagggaaagggaaacagtcactaagaaagg

SEQ ID NO: 19949 - DNA, 120 bp, synthetic construct
  source 1..120: mol_type = other DNA
caattggctattgtttaaggttacatgcaaagaattttatattacaaagaaaacaaaggagggggcggcagccaatgagcatgaggtttcttttgggagtaatgaaatattctggaagta

SEQ ID NO: 19950 - DNA, 120 bp, synthetic construct
  source 1..120: mol_type = other DNA
aaatttagaggccaggcacagtgactcatgcctgtaatcccagcactttgggaggccgaggcaggcagatcacctgaggtcaggagtctgagaccagcctggccaacatggcgaaacccc

SEQ ID NO: 19951 - DNA, 120 bp, synthetic construct; identical to SEQ ID NO: 6090
  source 1..120: mol_type = other DNA

SEQ ID NO: 19952 - DNA, 120 bp, synthetic construct
  source 1..120: mol_type = other DNA
gaataatgggaaaaacaggaagaagacagagacaatggcagagagtcctggcaaaaagggagatgtgatagagcttaatacaagatggggaccctgtaagaggaagacattcctgccatc

SEQ ID NO: 19953 - DNA, 120 bp, synthetic construct
  source 1..120: mol_type = other DNA
ctcccacccccagccctcaactgaccttctatgccccaatacatctctattttaaggaaaaagtccagtcacctcctctaggaagctttccctgatatacccaaccaaattggtcagtca

SEQ ID NO: 19954 - DNA, 120 bp, synthetic construct
  source 1..120: mol_type = other DNA
gttactggcctttaaattttggactctctttttggtggtgtctgaaagactacaagatttagggagagtgattcttggagtctttcgataatgttcctgtgaaccctggtgattttaaca

SEQ ID NO: 19955 - DNA, 120 bp, synthetic construct
  source 1..120: mol_type = other DNA
tgaaagtcagttggttcagaaacttaggttgctaaaaaggccagggcaaccaacctgatctctctataagtagggatatcttaaaacaaaacaaaatctctctcatagataaaacactgt

SEQ ID NO: 19956 - DNA, 120 bp, synthetic construct; identical to SEQ ID NO: 6091
  source 1..120: mol_type = other DNA

SEQ ID NO: 19957 - DNA, 120 bp, synthetic construct
  source 1..120: mol_type = other DNA
ggattcctcactctcactagacaatgtttgaccaggaagaacagggaatgagaaggagctgctggatggtgatgagccttggaaagggaggctgggcgagcagagacagaagagaaacac

SEQ ID NO: 19958 - DNA, 120 bp, synthetic construct
  source 1..120: mol_type = other DNA
tccacaccgggcttcctccttctgggcttctctgaacacccagggctggaaaggactctcttcgtggttgtcctcacttcctacctcctaaccctagtgggcaacacactcatcatcctg

SEQ ID NO: 19959 - DNA, 120 bp, synthetic construct
  source 1..120: mol_type = other DNA
ccaaagaagaccatcagcttcctggactgctctgtccagatcttcatcttcctgtccctggggacaactgagtgcatcctcttgacagtgatggcttttgatcgctacgtggctgtctgc

SEQ ID NO: 19960 - DNA, 120 bp, synthetic construct; identical to SEQ ID NO: 6092
  source 1..120: mol_type = other DNA

SEQ ID NO: 19961 - DNA, 120 bp, synthetic construct
  source 1..120: mol_type = other DNA
gtcaccctcttctacagctcagtcattgctgtctacctccagcccaaaaatccctatgcccaagagaggggcaagttctttggtctcttctatgcagtgggcactccttcacttaaccct

SEQ ID NO: 19962 - DNA, 120 bp, synthetic construct
  source 1..120: mol_type = other DNA
ctgagggagagctgcttaatgtgctttaaaagagaggagattctatgtgcttttatcagaaagtttgagttccctgcccctctgccttcttcacacccattacattgtgggaatggatga

SEQ ID NO: 19963 - DNA, 120 bp, synthetic construct
  source 1..120: mol_type = other DNA
ctttaagtcttcgcctccatagtcatgttcctacctttatcacttccatttttaattcccctcccttgccatatccccactattccttcacctccaattctaattcctaccatatcttct

SEQ ID NO: 19964 - DNA, 120 bp, synthetic construct; identical to SEQ ID NO: 6093
  source 1..120: mol_type = other DNA

SEQ ID NO: 19965 - DNA, 120 bp, synthetic construct
  source 1..120: mol_type = other DNA
ggctggcacattgtggaccttggtgtcatctaccggccaaatatggtattgcatgtgacatcccagacttctgctccagggtcatccgaactgtactttgctcaaagacatagatatggt

SEQ ID NO: 19966 - DNA, 120 bp, synthetic construct
  source 1..120: mol_type = other DNA
gtaagttgaatatgcatttcatacacctaacctaccaaacatcatagcttagcctagcctaccttaaacatactcagaacacttacattagcctacagttcagcaaaatcctcaatacaa

SEQ ID NO: 19967 - DNA, 120 bp, synthetic construct
  source 1..120: mol_type = other DNA
tttgcattattataaagtcaaaaaatggtcaaagtcaggaaccccctgcaatttacacatattgacttatttaacccttataacaacactatgaagcagataatattattatcctttttc

SEQ ID NO: 19968 - DNA, 120 bp, synthetic construct; identical to SEQ ID NO: 6094
  source 1..120: mol_type = other DNA

SEQ ID NO: 19969 - DNA, 120 bp, synthetic construct
  source 1..120: mol_type = other DNA
aataaaacttttggaaaaagttgtgttacagttcattgtgtgtgtgtttctggcttagttcacccactagatttcaggctctcagaaggcaaggaccagaattttgcataaaattggcac

SEQ ID NO: 19970 - DNA, 120 bp, synthetic construct
  source 1..120: mol_type = other DNA
gggttccaatcccacatacgctgtctcccagcttttccctggcaagggcagcaataccaaattcccttttgagtacacgccgataaaataagaaaaaggaaaatcttagttttatttcta

SEQ ID NO: 19971 - DNA, 120 bp, synthetic construct
  source 1..120: mol_type = other DNA
aatctttatcctagccatccttgtgttaatcttattgtctccttgacctcgttattagagcatattctaatcttaatgtagagcccccattttatatttaataatcctaatcagtcaggc

SEQ ID NO: 19972 - DNA, 120 bp, synthetic construct
  source 1..120: mol_type = other DNA
tgaccaacatggtgaaaccctgtctctactaaaaatacaaaaaaaaaactagcctggcgtggtggcgtgctcctgtaatcccagctacttaggaggctaaggcaggagaacctgggaggc

SEQ ID NO: 19973 - DNA, 120 bp, synthetic construct; identical to SEQ ID NO: 6095
  source 1..120: mol_type = other DNA

SEQ ID NO: 19974 - DNA, 120 bp, synthetic construct
  source 1..120: mol_type = other DNA
aggacttaggactaacatctcttatcctaaattcattgtttccatgtgacagtcatctattggatactctgtgagaaaatccaatataaagttactcagtcacaacccccacaatgtcca

SEQ ID NO: 19975 - DNA, 120 bp, synthetic construct
  source 1..120: mol_type = other DNA
aggaatacagaattaaagaataatgtgtgtgagtgcttggagcggcagtgatcatggaagcctcttagaggtttgaaccacagaagagtaaacaaaataagaagtatttgctgactgtgt

SEQ ID NO: 19976 - DNA, 120 bp, synthetic construct
  source 1..120: mol_type = other DNA
taagtagcaacttgaaaagcaacaaggtaatagcagcctaagacaatagccaaggaagttaagcgttctgaataggtttgctttcctcatagaaactaaagataacctcttaacatatgt

SEQ ID NO: 19977 - DNA, 120 bp, synthetic construct; identical to SEQ ID NO: 6096
  source 1..120: mol_type = other DNA

SEQ ID NO: 19978 - DNA, 120 bp, synthetic construct
  source 1..120: mol_type = other DNA
gtgtgtgtagatacagagtcttgttatgtttcgcaggctggtctcaaactcttggccttaagggatcctctctccttggcctcccaaagtgctgggattacaagcatgacccacacctgg

SEQ ID NO: 19979 - DNA, 120 bp, synthetic construct
  source 1..120: mol_type = other DNA
tttgggaagcaatgtgggcggatcatgaggtcagatcaagaccatcctggctaacacggtgaaaccccatctctacaaaaaatacaaaaaaaaaaattagccaggcgtggtggtgggtgc

SEQ ID NO: 19980 - DNA, 120 bp, synthetic construct
  source 1..120: mol_type = other DNA
atctcaaaaaaaaatgtggaacctctatgcactgatttccaatgttccttgtagcttctgcttttctgaaatttacccctgcctttttttgtttcctgttttttgagacagggtcttgcc

SEQ ID NO: 19981 - DNA, 120 bp, synthetic construct; identical to SEQ ID NO: 6097
  source 1..120: mol_type = other DNA

SEQ ID NO: 19982 - DNA, 120 bp, synthetic construct
  source 1..120: mol_type = other DNA
catcaggtgataggcggttgttaagctgtctctctaaaataatcattggtcacagcctgtgccagggaaaaacagtctcccaataaatagaaaaacctgaaactaagatctcaggagttg

SEQ ID NO: 19983 - DNA, 120 bp, synthetic construct
  source 1..120: mol_type = other DNA
agtaaacataccgtgcatgcagcccctcccaagcactagcaggccactgtacatgcagacagcccaccccaagggaagattcaggggagaagggaccctggaaccctgccaacatataaa

SEQ ID NO: 19984 - DNA, 120 bp, synthetic construct
  source 1..120: mol_type = other DNA
tgttctaaaatttgcttcggtctcttactctgctttatgcccctcagtcagattctttcttctgaggaggcaaaaattgaggttgctgcagacctgtacagattcgcagctgctaacata

SEQ ID NO: 19985 - DNA, 120 bp, synthetic construct; identical to SEQ ID NO: 6098
  source 1..120: mol_type = other DNA

SEQ ID NO: 19986 - DNA, 120 bp, synthetic construct
  source 1..120: mol_type = other DNA
aaaaaaaaaaaaaggatcccttacagatgtttcaaacctacatgatttaggtctcctgagggcaggcacttaactattcattctaacatgacatgtgagttggaagccttaaaggaacat

SEQ ID NO: 19987 - DNA, 120 bp, synthetic construct
  source 1..120: mol_type = other DNA
aaaccccttgcttgggaagctgaggtaggagaaccacttgaacccaggaggcggaggtttcggtgaaccgagatcacgccactgcattccagcctgggagttagagtgagactccatctc

SEQ ID NO: 19988 - DNA, 120 bp, synthetic construct
  source 1..120: mol_type = other DNA
aaccttctggctcctcctatgcagaattaatcgctcacccttgaagggtaccagtatatgccacctcaaactatctttagcatgtggattattttgagctaacaattgaaaatcatcaga

SEQ ID NO: 19989 - DNA, 120 bp, synthetic construct; identical to SEQ ID NO: 6099
  source 1..120: mol_type = other DNA

SEQ ID NO: 19990 - DNA, 120 bp, synthetic construct
  source 1..120: mol_type = other DNA
accactcacccagaagccccaaactccttttcctttacctagccaagatgttatacagttgctaagaacaacacgatttgaactccatggattcactcacacatgatttttttcagtaag

SEQ ID NO: 19991 - DNA, 120 bp, synthetic construct
  source 1..120: mol_type = other DNA
ttgggaggccaagatggatgcattgcttgagctcaggagttggagaccagcctgggtaacatggggaaaccccatctctgcaaaaaaaaaaaaaattaactgggcatggtggcacgcacc

SEQ ID NO: 19992 - DNA, 120 bp, synthetic construct
  source 1..120: mol_type = other DNA
ctgggcacggtggctcacgcctgtaatcccagcactttgggaggccgaggcaggtgaatcacgaggtcaggcaatcgagaccatcctggctaacacggtgaaaccccgtctctacttaaa

SEQ ID NO: 19993 - DNA, 120 bp, synthetic construct
  source 1..120: mol_type = other DNA
cactgcactccaacctgggcgacaaagactccatctcaaataaataaataaataaataagagaaaagtatgtcatgtgtaaaccaaaaataaaattctaagccccctaactgacaggaag

SEQ ID NO: 19994 - DNA, 120 bp, synthetic construct; identical to SEQ ID NO: 6100
  source 1..120: mol_type = other DNA

SEQ ID NO: 19995 - DNA, 120 bp, synthetic construct
  source 1..120: mol_type = other DNA
ccatctattctttctgaggcctggaagcttcatctacgtaacaagaatctttgcttccacaaacatctcccccaacgccacctccacgcccccttaactcaagcatttctttctgctgac

SEQ ID NO: 19996 - DNA, 120 bp, synthetic construct
  source 1..120: mol_type = other DNA
atataccttacatgtattgatttatgtctttgtcagcaacttctggctccctaaaatgtatgaaaccaagctgtaacccaaccaccttgggcacatgttctcaggaactcctcagaatgg

SEQ ID NO: 19997 - DNA, 120 bp, synthetic construct
  source 1..120: mol_type = other DNA
tttggccaggcacttagggaggctaggtgggcagattgcttgaatccaggagttcatgaccaatccgagcaatatggtaaaaccccatctctactaaaaatacaaaaaatttgtccggca

SEQ ID NO: 19998 - DNA, 120 bp, synthetic construct; identical to SEQ ID NO: 6101
  source 1..120: mol_type = other DNA

SEQ ID NO: 19999 - DNA, 120 bp, synthetic construct
  source 1..120: mol_type = other DNA
taatcatctctgcatgagcagttcatctatccagtaaattgtgtatagcagtaaagagtggtctctcaagattcttgcatatatttcatcatgtctagagcaatactgtgaaccttaaat

SEQ ID NO: 20000 - DNA, 120 bp, synthetic construct
  source 1..120: mol_type = other DNA
tggggttgctgccatttcagacagacgattcatcatgtaaatgatgtaaacttaaggcatcaataaatacagtatagtaccctatatgtattttccttacaattttcttgataacatttc

SEQ ID NO: 20001 - DNA, 120 bp, synthetic construct
  source 1..120: mol_type = other DNA
gctaagtttggagagagtcaacagttatgtgcagattttcgtttgtgtgtggggtcagtaaccctaaaccccaagttgttcaaggggcaactatatgagctccaaattcttttttttttt

SEQ ID NO: 20002 - DNA, 120 bp, synthetic construct; identical to SEQ ID NO: 6102
  source 1..120: mol_type = other DNA

SEQ ID NO: 20003 - DNA, 120 bp, synthetic construct
  source 1..120: mol_type = other DNA
atgttaataaacttctatttgtttttctctcattaatctgtcttatgccactctaatttacacagccacggctggagaacctaagacaggaagaggaaaaggattttctttcctacactc

SEQ ID NO: 20004 - DNA, 120 bp, synthetic construct
  source 1..120: mol_type = other DNA
atcacagctgctgctggtgctgaactcaccttccaggagagtctccagcatatccttccacactccagggagccatgtaagtggatgccatactggttaaatattttgagtagcatccca

SEQ ID NO: 20005 - DNA, 120 bp, synthetic construct
  source 1..120: mol_type = other DNA
tgtcaagtgatagcttccctcaagggcaaagtcacagaattatctgtttcaaaagcctgagtggataaacaaactgttgcctatccagggtgtcctaaaactaccaaggactgtgggagg

SEQ ID NO: 20006 - DNA, 120 bp, synthetic construct; identical to SEQ ID NO: 6103
  source 1..120: mol_type = other DNA

SEQ ID NO: 20007 - DNA, 120 bp, synthetic construct
  source 1..120: mol_type = other DNA
atctcagaagtgatgctacgtgactttcaaggctttgtcagggaaaaaaaaaatacagcttaaacctggctgactctctacaactgcctccacttgcctttggaactgtcattaggtcat

SEQ ID NO: 20008 - DNA, 120 bp, synthetic construct
  source 1..120: mol_type = other DNA
gatgctgtggagcagggtgaaccctccccactgtaccctatctgaatttctagcccacaaaaaccatgatggataataaatgattattgttgtctgaagccatttagggtaacaggtttt

SEQ ID NO: 20009 - DNA, 120 bp, synthetic construct
  source 1..120: mol_type = other DNA
gtggcaatagataataatatatgcagtttgaatactggctttgctccttagttttgtgaccccagaaaatgaacacacagtccccttgcttttagatttgtccttcacaccagagctaat

SEQ ID NO: 20010 - DNA, 120 bp, synthetic construct
  source 1..120: mol_type = other DNA
tcgagaaggtacaacgcttgaaagccatcttactcaccattttgcctcagtgccaaaaaaagcacctgccacagcaactcaccatcaacacttgttgaagatcacctaactaatgtagca

SEQ ID NO: 20011 - DNA, 120 bp, synthetic construct; identical to SEQ ID NO: 6104
  source 1..120: mol_type = other DNA

SEQ ID NO: 20012 - DNA, 120 bp, synthetic construct
  source 1..120: mol_type = other DNA
tataatgtactaataattagtattagtgctaatcaatagcaccattcaccctgaaaagacactttcagaaatgaatacatgaagtctcattgtagataagcattgacagatgaacatttg

SEQ ID NO: 20013 - DNA, 120 bp, synthetic construct
  source 1..120: mol_type = other DNA
aggcctgtatgaaaaatagtgctcagtcatgttttaaatttggccagtaaaaatcttacaagttctcttctaagtacctttttaatattctcaatctcactccttcccacccctttgcac

SEQ ID NO: 20014 - DNA, 120 bp, synthetic construct
  source 1..120: mol_type = other DNA
agtagaacttttcaccctttgtttataatttacagcccacttaagtgcaatgcaagtttgagatgataatttgggtcttttaggttctacccagggctgttctatagctcctgctactgt

SEQ ID NO: 20015 - DNA, 120 bp, synthetic construct
  source 1..120: mol_type = other DNA
ctcactgcaaccttcatctcctgggttcaagcaattatctgcctcagcctcccgagtagctgagattacaggcacccaccatcacgcccagctaatttttgtatttttagtagagacagg

SEQ ID NO: 20016 - DNA, 120 bp, synthetic construct; identical to SEQ ID NO: 6105
  source 1..120: mol_type = other DNA

SEQ ID NO: 20017 - DNA, 120 bp, synthetic construct
  source 1..120: mol_type = other DNA
ttggctcttaacaggtcagtgaatgacagggcccatccaacccttgcagctgtcttacaaaaatctgagaatcactttaaaaatcagtgccaaaataaaagaaaatttgagcttcaaaaa

SEQ ID NO: 20018 - DNA, 120 bp, synthetic construct
  source 1..120: mol_type = other DNA
agtttgatagcaaattatttccaagatgctcagagttcctaaacaaagatgtttaaggttggaagcactcagcagccatctcatccattaccttctagcagtcatcattcttttactctt

SEQ ID NO: 20019 - DNA, 120 bp, synthetic construct
  source 1..120: mol_type = other DNA
cgcaacatataccatggcccaagggccaacctaggcacctgaatgcacaatttataatagtctttgtacccaacctatggaggaatgtattactgttattctcattttcataaatgagga

SEQ ID NO: 20020 - DNA, 120 bp, synthetic construct; identical to SEQ ID NO: 6106
  source 1..120: mol_type = other DNA

SEQ ID NO: 20021 - DNA, 120 bp, synthetic construct
  source 1..120: mol_type = other DNA
cataggtccatctgtctatcccaacagtcaagggtgccttcctttggtcaggattctcatcaactatccactggaagcagctctccaaacctgcccccacttatttttccttaattcccc

SEQ ID NO: 20022 - DNA, 120 bp, synthetic construct
  source 1..120: mol_type = other DNA
gacaaggagagggtgtggatggccccaccaaacatgaattggggaaaagtgcataacaatgtgcagggtagggtacatatggctctgtcagaagaataccatgatttaagggaagaaagt

SEQ ID NO: 20023 - DNA, 120 bp, synthetic construct
  source 1..120: mol_type = other DNA
gggcagacccatgaccatgagaggggcacacgtagctgtgaatgcagggcacccgagagcacatgtgactgaacatgaagaaagcatacgggaaaagcgtgtgtacacatgagcatgttc

SEQ ID NO: 20024 - DNA, 120 bp, synthetic construct; identical to SEQ ID NO: 6107
  source 1..120: mol_type = other DNA

SEQ ID NO: 20025 - DNA, 120 bp, synthetic construct
  source 1..120: mol_type = other DNA
cagcttcaagccaggtacgaactaaattgtgaagaggtgatacaaaattacatgaagcagtaagagagaaaaaggtctgtttcccagaggtatgagagacccaaatcagcccagaactca

SEQ ID NO: 20026 - DNA, 120 bp, synthetic construct
  source 1..120: mol_type = other DNA
gcctgtcctccctcaccctaccctcacttataaagcaaatgcactcgactcccatcacagctaagccggtcggggggctcagggggtcccctgggcaggcccccagagggttctgggggt

SEQ ID NO: 20027 - DNA, 120 bp, synthetic construct
  source 1..120: mol_type = other DNA
gatgaaggagtggggaggagggaaagagaggaagggcacagggaaagagaggaagggcacagaaaaatgtagggggaggacgtagggtaagtggacagaataaattaaaaggagaaatca

SEQ ID NO: 20028 - DNA, 120 bp, synthetic construct; identical to SEQ ID NO: 6108
  source 1..120: mol_type = other DNA

SEQ ID NO: 20029 - DNA, 120 bp, synthetic construct
  source 1..120: mol_type = other DNA
agccaacagccatcctcttgccttaaggaggctgagtcaaccacatagctcccactccagagcccttccacctgccaggccaacactggattttgcctgagatagaatcttgctcagccc

SEQ ID NO: 20030 - DNA, 120 bp, synthetic construct
  source 1..120: mol_type = other DNA
gacgcaagcctcctggaccactccaacaccctaccctgacacccacccccgcacctcagcaatgatcttttccagttcacggttctccttctccaacagccgggacttctcctcctcgtt

SEQ ID NO: 20031 - DNA, 120 bp, synthetic construct
  source 1..120: mol_type = other DNA
gtactagtgactggctgatggaaggttggaggtggaaggaatgctgataagagttgggcccaaaacaaggggaggagtgagaggagggtgaacggaagggcagaggaactcagtaatata

SEQ ID NO: 20032 - DNA, 120 bp, synthetic construct; identical to SEQ ID NO: 6109
  source 1..120: mol_type = other DNA

SEQ ID NO: 20033 - DNA, 120 bp, synthetic construct
  source 1..120: mol_type = other DNA
caggatcatcctcaaatatagattgagaaaaatctcaaactgtcccaaaccagttttcactcttggttaacccctcccctcaaggcaggaactcccaggatctctatgcacagattccgg

SEQ ID NO: 20034 - DNA, 120 bp, synthetic construct
  source 1..120: mol_type = other DNA
ctacttcactgggtagttgcaagattaatgatacaatgtctgtagtgagctttgtaaactgtaaagtgctttatagacctgaagaattaacaaactttttaagacttctaagcaaccgat

SEQ ID NO: 20035 - DNA, 120 bp, synthetic construct
  source 1..120: mol_type = other DNA
cggtgatcattgatcttctcagtggacacactcttggtctcataagcaaggaagattcccagcagcagcagcagccccttgtaaccatagaaaatgcctaggatggcaggagagagtcac

SEQ ID NO: 20036 - DNA, 120 bp, synthetic construct; identical to SEQ ID NO: 6110
  source 1..120: mol_type = other DNA

SEQ ID NO: 20037 - DNA, 120 bp, synthetic construct
  source 1..120: mol_type = other DNA
cccttaccctacaggtgggaaggtggctttccaggcagagggtaggtttgcaatttgtgaccatgaatcgaacaatgctaataaggccaagggggatctaaaagataatgtcaagtctgg

SEQ ID NO: 20038 - DNA, 120 bp, synthetic construct
  source 1..120: mol_type = other DNA
tcatagcaaaagagcaactctcccctattctcagaaaagattagtgcaataacaaagagtagggtgttcaaactgggttgacaagctctctacctcctcttccaaagacccctctccctc

SEQ ID NO: 20039 - DNA, 120 bp, synthetic construct
  source 1..120: mol_type = other DNA
aatagagacgtcaatatcttccttaggttcctccttggcaaatgtctagggcagaaacaaggtcacaagaaagatggttgccagcctcccctcctctcctcaacgcttctcagtctctgg

SEQ ID NO: 20040 - DNA, 120 bp, synthetic construct; identical to SEQ ID NO: 6111
  source 1..120: mol_type = other DNA

SEQ ID NO: 20041 - DNA, 120 bp, synthetic construct
  source 1..120: mol_type = other DNA
ccacgatctgccagatggcgagagtgaggacatccatgcccaccagcaggcccactgtggcatacagcttccagggttccagagtctggataaatatgtggggagaacaggcacgtcagg

SEQ ID NO: 20042 - DNA, 120 bp, synthetic construct
  source 1..120: mol_type = other DNA
ttggtgaacatggaaccgtagcccagactaaagcccaggcccaggagccagaggcgggcctagaaaggaagagagggcacaggcagaacagggtagagtagtagccgggactgcagtaag

SEQ ID NO: 20043 - DNA, 120 bp, synthetic construct
  source 1..120: mol_type = other DNA
ccttgaacaattcctcccatccaccctctacttccacaccaccagggtgatcttgctaaaacctcctggctttagtggccaaaaacctccaaccactccccaatatctataagttatagc

SEQ ID NO: 20044 - DNA, 120 bp, synthetic construct; identical to SEQ ID NO: 6112
  source 1..120: mol_type = other DNA

SEQ ID NO: 20045 - DNA, 120 bp, synthetic construct
  source 1..120: mol_type = other DNA
tgtctgcttctccagctgcactctggcctcactgggaacagaggattcctgatgaactgcatgtgcatgtgcatggaaatgccatgtgcacagatgtatgatcaggacagcacagagcag

SEQ ID NO: 20046 - DNA, 120 bp, synthetic construct
  source 1..120: mol_type = other DNA
aaccttccatgtaccaacagtcccagagcccctcctccctgtgtggcagtggtcccttccccccaactctctgctgtgtttccatctctgcttctatccttccaaacccaacaaaggctc

SEQ ID NO: 20047 - DNA, 120 bp, synthetic construct
  source 1..120: mol_type = other DNA
aaggcctgccatggcaaccttggaactgacaagtaaactacagaatgaaaatggcctgcagacacagaaagaagggacagagccaaacagagaacagaggggtgatgctagaaggaaaga

SEQ ID NO: 20048 - DNA, 120 bp, synthetic construct; identical to SEQ ID NO: 6113
  source 1..120: mol_type = other DNA

SEQ ID NO: 20049 - DNA, 120 bp, synthetic construct
  source 1..120: mol_type = other DNA
ctccaaataccacgcaatggcatgaccctaatttcagggccaggggctaaaggaagacaggattggagaagacagtggagccttgagaggcagagcaatgcagtcatggggctgaagatg

SEQ ID NO: 20050 - DNA, 120 bp, synthetic construct
  source 1..120: mol_type = other DNA
ccgttagctactttggagtaggagtgggggttatatctggtttccctgttttcattctcaacaagtcagaatgaaaaactccatgatacatggccatgggagttacacaggttttattct

SEQ ID NO: 20051 - DNA, 120 bp, synthetic construct
  source 1..120: mol_type = other DNA
acaaggaaaacgtcagaagagaaacttaccggacatgtgagttgtagatgttaaaggacagacagacaacagctaggacaatgcccaggctggagagaactgagacggagataaagagtt

SEQ ID NO: 20052 - DNA, 120 bp, synthetic construct
  source 1..120: mol_type = other DNA
agaggggaagggaaaagagaagggaaggaggacaaaggaatgaagacgggataggagaaaagggcaaagaactagattgctgatggacattcagtcattggctggggacatgaggcccta

SEQ ID NO: 20053 - DNA, 120 bp, synthetic construct; identical to SEQ ID NO: 6114
  source 1..120: mol_type = other DNA

SEQ ID NO: 20054 - DNA, 120 bp, synthetic construct
  source 1..120: mol_type = other DNA
cacctattcttaagacaaacaaaaaaagaaggaaagctaatctgaaattttaatcctggcagggtaatattcccaaatatgttttccagttattattagggggaagttcaaatttgtcag

SEQ ID NO: 20055 - DNA, 120 bp, synthetic construct
  source 1..120: mol_type = other DNA
aaaaagggcaaaactccagcagtgctgggaatgactggatatctgctgggcagggcagacggcagccatcttcaatggttgagcctccccttcattctcaaggaggctttcttttatcag

SEQ ID NO: 20056 - DNA, 120 bp, synthetic construct
  source 1..120: mol_type = other DNA
tcctatcatttagaccaagtacacaaagaataactgcttgctttctctctttaaaaagtatattttgagggatgtaatactacctattaggtacaaggtgcactgttcgggtgacaggca

SEQ ID NO: 20057 - DNA, 120 bp, synthetic construct
  source 1..120: mol_type = other DNA
ttttggcagatgacaattacatgaggttttccctcctcctccatagtttaagcaaccgttttcctgacagagacagacaaagagacagctctgggcttgaagtagctggttcaaatatat

SEQ ID NO: 20058 - DNA, 120 bp, synthetic construct; identical to SEQ ID NO: 6115
  source 1..120: mol_type = other DNA

SEQ ID NO: 20059 - DNA, 120 bp, synthetic construct
  source 1..120: mol_type = other DNA
ctgtcgagaggggctgaaggaaaatacaaacaagatccactcaccaatccatttatctgttttggaccaggaaagatcatccttggtgctgtcatagtagccaatcttcttgtagctgcc

SEQ ID NO: 20060 - DNA, 120 bp, synthetic construct
  source 1..120: mol_type = other DNA
tagagctttgcatggttgtatctgattttattttcacctgaggccctaaggatgcttggaaggacctacgagactcttgaatcagcaacatgacttaaaagcaatataaggtggttccca

SEQ ID NO: 20061 - DNA, 120 bp, synthetic construct
  source 1..120: mol_type = other DNA
attcctcacacctctctcggcgagatgtctctcactttgattttggcttctaaagctttacacatatttctgcttattcttcctctcatgatgggcaggctctattttcccagtggcttt

SEQ ID NO: 20062 - DNA, 120 bp, synthetic construct
  source 1..120: mol_type = other DNA
attgagtaaaatttggtcatttctaagatttctgttctagaactgtttccgttaccataacttttccttcaaaagccaactcacactcctttcaccatggctgaagtccatttcctcttg

SEQ ID NO: 20063 - DNA, 120 bp, synthetic construct; identical to SEQ ID NO: 117
  source 1..120: mol_type = other DNA

SEQ ID NO: 20064 - DNA, 120 bp, synthetic construct
  source 1..120: mol_type = other DNA
gctttcttgagtctaactgacaggtcatcaacctctcaacccaagccactcaaggggaaattcctgaaattaatggaagccactgggaaagagagtagctgtttttaatttgcatgtctc

SEQ ID NO: 20065 - DNA, 120 bp, synthetic construct
  source 1..120: mol_type = other DNA
gcctcccaagtagctgggactacaggcacctgccaccacacccagctaatttttttttttttttttgtatttttggtagagacaggtttcaccatgttggtctggctggtctcaaactcc

SEQ ID NO: 20066 - DNA, 120 bp, synthetic construct
  source 1..120: mol_type = other DNA
tcaatcttcttgtagttaagcttattattattattatttacaagcttgatgaacagagttaaaagagaagggcagaagttgggaggtgccagggcaatcttgtgatgtctctggcattct

SEQ ID NO: 20067 - DNA, 120 bp, synthetic construct; identical to SEQ ID NO: 6117
  source 1..120: mol_type = other DNA

SEQ ID NO: 20068 - DNA, 120 bp, synthetic construct
  source 1..120: mol_type = other DNA
aaaaatccccagacagaacaccagcaggcttctggttgtgtggcctaagcaagtcagcaaatctctctggaaactaatcttttcattttaaaaggaataagaagatgacctttcagactg

SEQ ID NO: 20069 - DNA, 120 bp, synthetic construct
  source 1..120: mol_type = other DNA
taaaaaaatggaatacatcattttttttcctctagtctttgatgggttcttctaatttgaaggtccctacttctctggtcggagactgattctgcaaagaagtaactgagaaaaacagag

SEQ ID NO: 20070 - DNA, 120 bp, synthetic construct
  source 1..120: mol_type = other DNA
tagatttggtcggtaatggtctggttgttgtagttgaagtcctccaggcgcacaccagaacggccgcctcctccagatgtcttgttcagggccagtgccaaggcccagatggcatcatag

SEQ ID NO: 20071 - DNA, 120 bp, synthetic construct; identical to SEQ ID NO: 6118
  source 1..120: mol_type = other DNA

SEQ ID NO: 20072 - DNA, 120 bp, synthetic construct
  source 1..120: mol_type = other DNA
ctctggataattagtggcaaaggatggaaggtagagcagagtaaaggaggagacatggatattccaatgaagagctgtgacactgatgttctctgatccttctgactttcttcatagagt

SEQ ID NO: 20073 - DNA, 120 bp, synthetic construct
  source 1..120: mol_type = other DNA
ttgtgtgcttttggttcactgcctcttagaaggctttcagaagaatgaaaactacagaaatacccttcacatttttgaagtccattatcaatcctacccacacccctcccaacactcaac

SEQ ID NO: 20074 - DNA, 120 bp, synthetic construct
  source 1..120: mol_type = other DNA
aattacttaacctcttggaactgcattctacatactggagaaaatcacatcattccttccttacctcacagaaaccatacaaggaaaagcttagcaactacttcttgggaaaccacaagt

SEQ ID NO: 20075 - DNA, 120 bp, synthetic construct; identical to SEQ ID NO: 6119
  source 1..120: mol_type = other DNA

SEQ ID NO: 20076 - DNA, 120 bp, synthetic construct
  source 1..120: mol_type = other DNA
ccctctcttaatcatcagcatctagcactgtgcccaaccataatgaagtaacaataaatgtccattggattaggccagtgaaaatactctgtaaagtatttaatagtagatacgtctcat

SEQ ID NO: 20077 - DNA, 120 bp, synthetic construct
  source 1..120: mol_type = other DNA
tgtatcaatgtaggttcatcagttgtaacaaatgtaccactctggcggaggatgtcgataatgtagaaggctatgcatgtgggaagcatatgggaagtttctgtaccttcatctcaattc

SEQ ID NO: 20078 - DNA, 120 bp, synthetic construct
  source 1..120: mol_type = other DNA
ctttgggaggccaaggtaagcagactgcctgagctcaggagttaaagaccagctgggcaacatggtgaaaccccatctctactaaaatacaaaaaattagctgggcatggtggtgtgcac

SEQ ID NO: 20079 - DNA, 120 bp, synthetic construct
  source 1..120: mol_type = other DNA
agactccgtctcaaaaaaaaaaaaaaaaggcattataaaaaacaagtcaggctgggcacagtggctcacacttgtaatcccagctctttgggaggccaaggagggtggatcacctgaggt

SEQ ID NO: 20080 - DNA, 120 bp, synthetic construct; identical to SEQ ID NO: 6120
  source 1..120: mol_type = other DNA

SEQ ID NO: 20081 - DNA, 120 bp, synthetic construct
  source 1..120: mol_type = other DNA
agacaagactgggcaaaacagagaggacccaactctacaaaatttttttaaaaattagccagacttggcctgggcacggaggctcacatctgtaatctcaggactttgggaggtcaaggc

SEQ ID NO: 20082 - DNA, 120 bp, synthetic construct
  source 1..120: mol_type = other DNA
gggaggctgaggcgggtggatcacctgaggtccggagttcgagaccagcctgagcaacatggagaaaccctgtctctactaaaaatacaaaattagccgggtgtggtggcgcatgcctgt

SEQ ID NO: 20083 - DNA, 120 bp, synthetic construct
  source 1..120: mol_type = other DNA
tcaaaaaaaaaaatacaaaaattagctgggtgtgatggtgggctcccgtaatcccagctactcaggaggctgaggcaggagaatcggagaatcgcttgaacccaggaggcggaggttgca

SEQ ID NO: 20084 - DNA, 120 bp, synthetic construct; identical to SEQ ID NO: 6121
  source 1..120: mol_type = other DNA

SEQ ID NO: 20085 - DNA, 120 bp, synthetic construct
  source 1..120: mol_type = other DNA
atctcgagaaaaaaaaaaaaagttagccagacttggtggcatatgtctgtgatcccagcttacttgggaggggctgaggtgggtggatgacttgagcccaggaggtcaaggctgcagcga

SEQ ID NO: 20086 - DNA, 120 bp, synthetic construct
  source 1..120: mol_type = other DNA
ggcggatcacgaggtcaggagatcgagaccatcctggctaacacggtgaaaccccgtctctactaaaaaaaaaaaaaaaaaaaaaaaagtctgttggatagataaatggatgaattcata

SEQ ID NO: 20087 - DNA, 120 bp, synthetic construct
  source 1..120: mol_type = other DNA
tataaaaatgctgggtatgaagtaagttacattttctctacgtgaatttccttgactctcaacctcatctttgttattgatactcagatctataatttcagcccaatatttcaagtccat

SEQ ID NO: 20088 - DNA, 120 bp, synthetic construct
  source 1..120: mol_type = other DNA
caagcgattcttgtgtctcagcctcccaagtagctgggattacaggcacacgacaccacacccagctgatttgtgtatttttagcagagacggggtttcaccatgttagccaggctggtc

SEQ ID NO: 20089 - DNA, 120 bp, synthetic construct; identical to SEQ ID NO: 6122
  source 1..120: mol_type = other DNA

SEQ ID NO: 20090 - DNA, 120 bp, synthetic construct
  source 1..120: mol_type = other DNA
cgatgatggtggctaacatgtatacagtccttaggacgtatcgagcattttcctgaggaaactatattaccttatttaatcctcaaacaatccaatgaggtgttattatccccattttag

SEQ ID NO: 20091 - DNA, 120 bp, synthetic construct
  source 1..120: mol_type = other DNA
agactgcctctctctaagagcacctgcacaaatagcagctaggctaatactttgagtagtcttttggcttcaaattgaaagattggtctatccaatcttcagttcaaggtaaatatggca

SEQ ID NO: 20092 - DNA, 120 bp, synthetic construct
  source 1..120: mol_type = other DNA
ggcaccactgctcctgccaccccaagagtaaagaagagtagaatgcttcccccttgagtcagtaaagatacagttatagattgtcaaagagacactctactctgcagcttaaggaaatct

SEQ ID NO: 20093 - DNA, 120 bp, synthetic construct
  source 1..120: mol_type = other DNA
aaccaagtgcaaatttatacctaatttttttaacagccttgtctggctctcaagaatggatgcttgacagtgggctaaaatgtatatcttgaggtagctttttagtttgtactggtccta

SEQ ID NO: 20094 - DNA, 120 bp, synthetic construct; identical to SEQ ID NO: 6123
  source 1..120: mol_type = other DNA

SEQ ID NO: 20095 - DNA, 120 bp, synthetic construct
  source 1..120: mol_type = other DNA
caaaaatgcctccagatagtatagcgtctgagtctagggtagtagttgaaaaccactaccctaactaatagttctcgaggtgtgatccccagaccagtacatctgcatccccagggactt

SEQ ID NO: 20096 - DNA, 120 bp, synthetic construct
  source 1..120: mol_type = other DNA
tgagaactattgatctaaacataaggccatccttagggaataaaagcaactctgcttcttttctaagtctccatggctccggccccctaggtccaacccttgctttgatccacttctatt

SEQ ID NO: 20097 - DNA, 120 bp, synthetic construct
  source 1..120: mol_type = other DNA
tatggcctcaaaagcaggaaccatctttctctagacacaaagtcagaaagggaccttccaagtcttcccaccccaatgctcaggtgtccctctatgtccctaaccatctctctgttctct

SEQ ID NO: 20098 - DNA, 120 bp, synthetic construct; identical to SEQ ID NO: 6124
  source 1..120: mol_type = other DNA

SEQ ID NO: 20099 - DNA, 120 bp, synthetic construct
  source 1..120: mol_type = other DNA
agtccatttagaatgtcccaaaacagtgtgtatcatcagagtccatgtggcagcagatctttcatcacaacacaccaccagagtcaacttcctaaatcttatttctcctttgctcagcaa

SEQ ID NO: 20100 - DNA, 120 bp, synthetic construct
  source 1..120: mol_type = other DNA
agcagagcagtttggagccagatttaactaggattcaattccagctggactgctgagtagctgcatgacctgagacaagtcattaaaccactctgagtctcattttcctggtctacaaaa

SEQ ID NO: 20101 - DNA, 120 bp, synthetic construct
  source 1..120: mol_type = other DNA
gtaaaactttttaaatcaagctattttggggctttacaaccattaactcacccctaacatgctctccaaagcaggtacacacttggtgtaataagcagacacataggtggccgtatcgag

SEQ ID NO: 20102 - DNA, 120 bp, synthetic construct
  source 1..120: mol_type = other DNA
aaatcagagaatgcgcctcctcgctccaagtctgtcattaaccagctgtctggggctaaatgatttcaaaagccccttctccacataaaattctaaaaaaagaatcattaaaaaaagcaa

SEQ ID NO: 20103 - DNA, 120 bp, synthetic construct; identical to SEQ ID NO: 6125
  source 1..120: mol_type = other DNA

SEQ ID NO: 20104 - DNA, 120 bp, synthetic construct
  source 1..120: mol_type = other DNA
aactccatcgtttttttttttttctctctctacccaaggaagtcagagcaaaggtaggatccacaggaaacataatgcagacaagttcagggtgggcacagccccctcttctcctttata

SEQ ID NO: 20105 - DNA, 120 bp, synthetic construct
  source 1..120: mol_type = other DNA
gtattggcaggattcagcatgacaatctcagttgtgatgtggccctccaccgcctcagtcatctcatccactgtgcagttgatagaagggtcgtagatcttgaaccaattgtcagcatac

SEQ ID NO: 20106 - DNA, 120 bp, synthetic construct
  source 1..120: mol_type = other DNA
atactatttagcctcttgggaatcagggaagagcagtagaactaaaaagagaaatctacaagtcttggggatagtaggaaaggctgacaattcttccttctaagtttctccccagcccct

SEQ ID NO: 20107 - DNA, 120 bp, synthetic construct; identical to SEQ ID NO: 6126
  source 1..120: mol_type = other DNA

SEQ ID NO: 20108 - DNA, 120 bp, synthetic construct
  source 1..120: mol_type = other DNA
gattcgggcatcctggcgctacaacagagaaagaaacagctcctgagggatgcccgggaatgcctgaggggctaagccagatgtcttcacagctttgatttcccatcccaaagtgcttag

SEQ ID NO: 20109 - DNA, 120 bp, synthetic construct
  source 1..120: mol_type = other DNA
accagtcactgtcccccagcttggtccctccgtaaacagagcccaccactcccagccatctgaccttcaggtttttgacgggcacagctggatctgagaagaaactctggcggaaagtaa

SEQ ID NO: 20110 - DNA, 120 bp, synthetic construct
  source 1..120: mol_type = other DNA
cggggtgcatgagggaataaagaccagagaggttaactggggatttcagagcaatactcagatagagcaaagaagcagccattctgaaccttccttcaacagcttctgtccctgaagtga

SEQ ID NO: 20111 - DNA, 120 bp, synthetic construct; identical to SEQ ID NO: 6127
  source 1..120: mol_type = other DNA

SEQ ID NO: 20112 - DNA, 120 bp, synthetic construct
  source 1..120: mol_type = other DNA
tatttcctctctacctccccaaatctccctcttccccctcaacctctccttgtctgtcggcttctctctcttagtaccaactaccagatccatgcagctgcctttctgcccctctctctc

SEQ ID NO: 20113 - DNA, 120 bp, synthetic construct
  source 1..120: mol_type = other DNA
tctgctgccttcctggattcctatctcatcttcgctcccatctcttgcccccactttggattgaacctactttaacagaactgagtcattctgggtctatatgtctggggaacagggcat

SEQ ID NO: 20114 - DNA, 120 bp, synthetic construct
  source 1..120: mol_type = other DNA
aaagaactgcacttaatccacatggaatgcgttctctttcaatgaagaatcaagttcttgcccctaaaagtgactctcacgtcacatctcctggtgctggaatttgagcttatgtccctt

SEQ ID NO: 20115 - DNA, 120 bp, synthetic construct; identical to SEQ ID NO: 6128
  source 1..120: mol_type = other DNA

SEQ ID NO: 20116 - DNA, 120 bp, synthetic construct
  source 1..120: mol_type = other DNA
acctctggtctgcctaaggaaaagagattctcaaaggcccacacacccctcacaaccgggatgctctttcactgatctaatttcaattccttctgaagaaggaggtcagctgcagcactg

SEQ ID NO: 20117 - DNA, 120 bp, synthetic construct
  source 1..120: mol_type = other DNA
ttttcaatacaaacccacaatcgccatcgtcccttcagtagagctcaaaagggaatgaccccatcttctgacccccatagccctgcttaccacaatgaggttccacatcctagcagcctc

SEQ ID NO: 20118 - DNA, 120 bp, synthetic construct
  source 1..120: mol_type = other DNA
agatgagggcaagctctcctggggcccctcccctgtctgcaattcctgctcttatctttctcgaacaaattagttcctttctcaattactcactttcatcattaattaccgttttcttct

SEQ ID NO: 20119 - DNA, 120 bp, synthetic construct
  source 1..120: mol_type = other DNA
tctttcattaaacttccttctctgtcttccatctggagccttacccatcacctctcctgcacacccctcctttggtattaatgaacataccaccttacctcctttcagctcaccctcaga

SEQ ID NO: 20120 - DNA, 120 bp, synthetic construct; identical to SEQ ID NO: 6129
  source 1..120: mol_type = other DNA

SEQ ID NO: 20121 - DNA, 120 bp, synthetic construct
  source 1..120: mol_type = other DNA
aacagagagaatgaatagaatggaactctcaagaaaccagacaatttgagaggtgccttaaagagaggcttggagctagggaaagtaaacaagcagaaagctggagaagaaaggaagctt

SEQ ID NO: 20122 - DNA, 120 bp, synthetic construct
  source 1..120: mol_type = other DNA
gcagccagtggggagccagggcagaggggacacagacagggggctcaggggactaaggagggtgaaatgttgccaggaggggaggataagtagaaaggaaataaagaaagcactctggag

SEQ ID NO: 20123 - DNA, 120 bp, synthetic construct
  source 1..120: mol_type = other DNA
accctaccctcactctggccaagggcagtgctcaacaacattggaaggttttctctttatgcctcccactagggcaactttgtaaatctttaccattctcaggacccaccttcctgcact

SEQ ID NO: 20124 - DNA, 120 bp, synthetic construct; identical to SEQ ID NO: 6130
  source 1..120: mol_type = other DNA

SEQ ID NO: 20125 - DNA, 120 bp, synthetic construct
  source 1..120: mol_type = other DNA
gaaaccgactcattccaattgacacattctggttcttctgccttcccatcccaccccgcttgatgcctctgatgttctccagttcccttctcccaggtcccacgtctgctccccgccacc

SEQ ID NO: 20126 - DNA, 120 bp, synthetic construct
  source 1..120: mol_type = other DNA
actccccaaaaccaatgatctctctgactgtcccaagtctgaccctctaccagatctgatcctctacttctcttcctgcctcccgtaccctaatacctaattattttcctgtaccctgct

SEQ ID NO: 20127 - DNA, 120 bp, synthetic construct
  source 1..120: mol_type = other DNA
taaatacttgggattcatccctgaccaaggagctagaatctgtatttttaacaaactcctctggtgattcttatgtacactgaaggctgagaaccacgagaaagtaacagtcaaaaagga

SEQ ID NO: 20128 - DNA, 120 bp, synthetic construct; identical to SEQ ID NO: 6131
  source 1..120: mol_type = other DNA

SEQ ID NO: 20129 - DNA, 120 bp, synthetic construct
  source 1..120: mol_type = other DNA
attattcatgtaggggagaggggtgggaaaaaaaacctcattataagctatcccctaatacccctggacccaaatttgcttaccttctctctctccctcaactcacctccctaatcccta

SEQ ID NO: 20130 - DNA, 120 bp, synthetic construct
  source 1..120: mol_type = other DNA
ctctcccccactgccattcttttctgttctcttctccttgtatgttgactcttcttcatccccatgctattgtgggggttcccatgtggatccccaatccaattcattttcccagtgcct

SEQ ID NO: 20131 - DNA, 120 bp, synthetic construct
  source 1..120: mol_type = other DNA
ggaatagaaggatgagaaggagtcaggtagggctcaccactaccttgctgttttgttaagataaataaactagagctctcaagtctctcaaaattttcctcattctgtccctattccttc

SEQ ID NO: 20132 - DNA, 120 bp, synthetic construct; identical to SEQ ID NO: 6132
  source 1..120: mol_type = other DNA

SEQ ID NO: 20133 - DNA, 120 bp, synthetic construct
  source 1..120: mol_type = other DNA
actcagacagatgggggcgcgtgcagctggctggccccctgccccgcaagcccccacctcccacccacccccatgtccagggctaccttgctgtcgtggtggatgagcttgagctcatag

SEQ ID NO: 20134 - DNA, 120 bp, synthetic construct
  source 1..120: mol_type = other DNA
cgccgttctgaggaggggtgcggggggacccgcgagtgaggccgcgggagatggggggagtgggaggcccacaccggagccacccctgccgccatcacaaccagaagcggcagtggccac

SEQ ID NO: 20135 - DNA, 120 bp, synthetic construct
  source 1..120: mol_type = other DNA
gaggcgcctccatccctgattttgtggggaggagggggcgagggccccggagaagcagggaaggttggcttcctacggcccccgcggctctcgccaccgtcgccgccaccgcggactctc

SEQ ID NO: 20136 - DNA, 120 bp, synthetic construct; identical to SEQ ID NO: 6133
  source 1..120: mol_type = other DNA

SEQ ID NO: 20137 - DNA, 120 bp, synthetic construct
  source 1..120: mol_type = other DNA
gaaggatgcgagtgggacgggagagaaacggggctggcgcctgaggtctgaagtgggagtatgagtcgatacagtgaagcactgaggatgtgggggagaggaaacggttttggagggaac

SEQ ID NO: 20138 - DNA, 120 bp, synthetic construct
  source 1..120: mol_type = other DNA
taagaaagggagacaggacatggaattgagaaaagacgagggaaggggtacacggaaggaaaagatgtggggaagagcgcgagaggcctggccagggttgggatgggtgggacaggctga

SEQ ID NO: 20139 - DNA, 120 bp, synthetic construct
  source 1..120: mol_type = other DNA
cctctgctgggctctgcctgacaccggcgaggctcagtctgggaggaggtggagcccagggaagtgtagccaagcagggacaaggagagaccgcagcctcgtggaaaaccgggactggag

SEQ ID NO: 20140 - DNA, 120 bp, synthetic construct; identical to SEQ ID NO: 6134
  source 1..120: mol_type = other DNA

SEQ ID NO: 20141 - DNA, 120 bp, synthetic construct
  source 1..120: mol_type = other DNA
agggggtcaggacttattttcttcttcgatttttcataggacaacagaatttgagacgggaatgccaatagctaagtttggggcagatcttggttctgtggtgcctgaatattacaaaat

SEQ ID NO: 20142 - DNA, 120 bp, synthetic construct
  source 1..120: mol_type = other DNA
ttaagcaattgctgttaaaatcttatttctgcaatttttacaaaagcctgttaccatatgaacacatatccatcgagccctctatattattagagcacaggaagagggccctgtaggtga

SEQ ID NO: 20143 - DNA, 120 bp, synthetic construct
  source 1..120: mol_type = other DNA
actagaagcagaataactgagttatgtgaggaaagtaaagcccaaggatcttgaaagaatctaccagggtagaggaagtatgaggcatacaaatgggatgactgcatcccaggagagaag

SEQ ID NO: 20144 - DNA, 120 bp, synthetic construct
  source 1..120: mol_type = other DNA
ggaagtacagaaaaggacctgtcttcttcccaccccatccctgagttgttcttcatcttctgataatgctgcctccaattttaagtcttttaccctaatatgtttccacccccagagctc

SEQ ID NO: 20145 - DNA, 120 bp, synthetic construct; identical to SEQ ID NO: 6135
  source 1..120: mol_type = other DNA

SEQ ID NO: 20146 - DNA, 120 bp, synthetic construct
  source 1..120: mol_type = other DNA
ttatagctctccattctttcccattatccattcccaccccactcccatcctcacacaagcgtcctcatcagctgcatgcaggcagctgttcccctcaccctggcagtggggcttgggggt

SEQ ID NO: 20147 - DNA, 120 bp, synthetic construct
  source 1..120: mol_type = other DNA
cttcccattttccagggtcaaataagacttggagcagattcggactgtggagagataggaaaataagaagagaggcgagttgaagaaggctctttccctttaaagagcaggggactcagg

SEQ ID NO: 20148 - DNA, 120 bp, synthetic construct
  source 1..120: mol_type = other DNA
aaaaattaccattttaggaacccaagatggggctataagcacacaaaatgggatctcttcaaagtcagctacagtgggcggttctctggctttgaaatatgtagatgtatataactttgg

SEQ ID NO: 20149 - DNA, 120 bp, synthetic construct; identical to SEQ ID NO: 6136
  source 1..120: mol_type = other DNA

SEQ ID NO: 20150 - DNA, 120 bp, synthetic construct
  source 1..120: mol_type = other DNA
tatttgtgaattttggtatactggatttaaagtgctgacttgcaagcagtaatgctaagtttgcggcaggaaaaggaatagtcttgaagaggggaggggcttccgaggctactcaccaca

SEQ ID NO: 20151 - DNA, 120 bp, synthetic construct
  source 1..120: mol_type = other DNA
gttgatagccttcacctggtcccgagtcaggccccggtacctgatgcccccttcccagggcgggtgtatgatctggcaacctaaggggtgagtcggggaggcatacagagaggaatggtg

SEQ ID NO: 20152 - DNA, 120 bp, synthetic construct
  source 1..120: mol_type = other DNA
cagatcccctggctaaaggacagagagtaaagggccagggttaaagctgatgagagaacccacaagtggggagggaagggtgctgggtggaggtaagaaagaaaagtaattaagaaatca

SEQ ID NO: 20153 - DNA, 120 bp, synthetic construct
  source 1..120: mol_type = other DNA
aaaggctaaatgaggatattcgagttgaattaggataggaggataaagggaggctaataagatcatctggacagcaaagtgggaccaagaaaagggagtaattgaggtagtaatgtgggg

SEQ ID NO: 20154 - DNA, 120 bp, synthetic construct; identical to SEQ ID NO: 6137
  source 1..120: mol_type = other DNA

SEQ ID NO: 20155 - DNA, 120 bp, synthetic construct
  source 1..120: mol_type = other DNA
gccatgaggactggaccgagccccgccggcgcggcccgcacccggagactactcgacctcttgccggttgcctcgcaggctccgaccgggctcagcctggggaccaagagagcgccccgc

SEQ ID NO: 20156 - DNA, 120 bp, synthetic construct
  source 1..120: mol_type = other DNA
tcctctcccccggcccccgcggctcgcagaagcctggcttacccacgctcccggcatcggccgcctcagcgctccccgattccatccccgcggttcctcctctcccccagccccgcttcc

SEQ ID NO: 20157 - DNA, 120 bp, synthetic construct
  source 1..120: mol_type = other DNA
ccccgggcctcaaggccccaggcccggccgctcctccccgctcccccctcccttctcctccacctttctcctcctcccgtccctcctcccctcgaatccaggctccagcctggccagggt

SEQ ID NO: 20158 - DNA, 120 bp, synthetic construct; identical to SEQ ID NO: 6138
  source 1..120: mol_type = other DNA

SEQ ID NO: 20159 - DNA, 120 bp, synthetic construct
  source 1..120: mol_type = other DNA
cactgccgagggacctgcgggccaaacaactggaagctggggtgggggagagggaacccgagccaaaggcagaggagctggcgctgagacagggagtctgggatgaaggtggagaaagac

SEQ ID NO: 20160 - DNA, 120 bp, synthetic construct
  source 1..120: mol_type = other DNA
ggggactgaggaccacctaagcgcaagaagggttgggtgtagaagagatttctgggagactagagcagctccatggtccagcagcattgctactcgcctgctctgcagggaacgcgcaga

SEQ ID NO: 20161 - DNA, 120 bp, synthetic construct
  source 1..120: mol_type = other DNA
gatgtactccagcagagcctagcaaacagtatttcttgaccaagggcaaactggaagctctaaagacagcaggtacagacctttttgacggctccagaagctcttggctataccttgaag

SEQ ID NO: 20162 - DNA, 120 bp, synthetic construct; identical to SEQ ID NO: 6139
  source 1..120: mol_type = other DNA

SEQ ID NO: 20163 - DNA, 120 bp, synthetic construct
  source 1..120: mol_type = other DNA
gaccagcctggcctggccagcatggcgaaaccccatctctactaaaaatagaaaaattagcgtggtgtgatggtgtgcgcctgtaatcccagctgagacaccagaatcgcttgaacccgg

SEQ ID NO: 20164 - DNA, 120 bp, synthetic construct
  source 1..120: mol_type = other DNA
aagaaagggaaggagggagagaaagtcatagatgatataacctacctacatacacaactttaaacagaaagcaaaatgcttccctttctgtaacgtaaaggggaaatgaaagaaaagtaa

SEQ ID NO: 20165 - DNA, 120 bp, synthetic construct
  source 1..120: mol_type = other DNA
tgctaccaacacaggctgatccaggtgctgagttggtgactcaactacctccagcatgttgccatcaatgaagtgatttaacaaaatgttgaacaactcttggtagcaaagttaattttc

SEQ ID NO: 20166 - DNA, 120 bp, synthetic construct; identical to SEQ ID NO: 6140
  source 1..120: mol_type = other DNA

SEQ ID NO: 20167 - DNA, 120 bp, synthetic construct
  source 1..120: mol_type = other DNA
aggcatggtggtgcatgcccgtaatcctagctactcaggaggctgaggcaggagaatcacttgaacccgggaggcggaggttgcagtgagccaagatcatgccatgccattgcacttcag

SEQ ID NO: 20168 - DNA, 120 bp, synthetic construct
  source 1..120: mol_type = other DNA
tttactttttttttttttaaacaagaagtttatttaaacaacaagacgcttgacttgaagggaaaactatctaggattcttttttgttttagagtaatttatccctacttaaagacagat

SEQ ID NO: 20169 - DNA, 120 bp, synthetic construct
  source 1..120: mol_type = other DNA
tgtttttttgttgttgttgttaaaacagtgagagcaaaataacttactggaatataaagataagagctgaatgagcatgccactaatggagaaagggggtattttcacagaatcagtatt

SEQ ID NO: 20170 - DNA, 120 bp, synthetic construct; identical to SEQ ID NO: 6141
  source 1..120: mol_type = other DNA

SEQ ID NO: 20171 - DNA, 120 bp, synthetic construct
  source 1..120: mol_type = other DNA
atcggaatctgatctgcctcattgacaatccctgtcgttcacaataggctttcattagtttactaagtggtgtatgcctcttaatcttaaactgcaccacagaaccatcctgccccgcca

SEQ ID NO: 20172 - DNA, 120 bp, synthetic construct
  source 1..120: mol_type = other DNA
ccaaacgagcacacaagcagcaccaggagcggcagaagaaggaggcggcagcagtggacaaggggagagggtgcgcgcacgtcgtgctctccctccctccaccctcacttttcttttttt

SEQ ID NO: 20173 - DNA, 120 bp, synthetic construct
  source 1..120: mol_type = other DNA
cagcctcccgagtagctgagactacaggtgcacaccaccatggctggctaaattttgtatttttagtagagacagggtttcacaatattggtcaggctggtctcgaactcctgacctcag

SEQ ID NO: 20174 - DNA, 120 bp, synthetic construct; identical to SEQ ID NO: 6142
  source 1..120: mol_type = other DNA

SEQ ID NO: 20175 - DNA, 120 bp, synthetic construct
  source 1..120: mol_type = other DNA
atcttttcatattccaatgtcactgccaggattcctggccatatttttcaggatatttgtagaggtccttccagaaccactacttgagtatcctaatttcatcctccccacaatcaatct

SEQ ID NO: 20176 - DNA, 120 bp, synthetic construct
  source 1..120: mol_type = other DNA
cacttctgtacaatttgtgcctttggcaatgccatctccttttgtagtttttgacggtttttcatagagatagtggagttcctactcagattactggaaaatgacaaatcttattcattt

SEQ ID NO: 20177 - DNA, 120 bp, synthetic construct
  source 1..120: mol_type = other DNA
cagtggcgcgatctcgctcactgcaacctctgcctcctgggttcaagcaattctcttgcctcagcctcctgagtagctgggaattaccggcgccccaccaccacgcccagctaatttttt

SEQ ID NO: 20178 - DNA, 120 bp, synthetic construct; identical to SEQ ID NO: 6143
  source 1..120: mol_type = other DNA

SEQ ID NO: 20179 - DNA, 120 bp, synthetic construct
  source 1..120: mol_type = other DNA
catttaaagaaagtaagaagcaaatcagaggtcacacagctataaagctgacagagccaacatttgaacttaagttcgttaccctattttcaaattctttctactgcattgagaggctta

SEQ ID NO: 20180 - DNA, 120 bp, synthetic construct
  source 1..120: mol_type = other DNA
tctcggctcactgcaacctccgcctcccgggttcacaccattctcctgcctcagcctcccgagtagctgggactacaggcgcccgccaccatgcccggctaatttttttgtatttttagt

SEQ ID NO: 20181 - DNA, 120 bp, synthetic construct
  source 1..120: mol_type = other DNA
gcattttctgtcaagggtcaaactgcagttctattctctcatctaaagtagtggtgatcactgggtgaatggaagatgttcatgtcctcttgggttaggatgaaagacctgtcttctggg

SEQ ID NO: 20182 - DNA, 120 bp, synthetic construct; identical to SEQ ID NO: 6144
  source 1..120: mol_type = other DNA

SEQ ID NO: 20183 - DNA, 120 bp, synthetic construct
  source 1..120: mol_type = other DNA
gccaaggcgggcagatcacgaggttatgagatcaagaccatcctggctaacacggtgaaacaccgtctctactaaaaatacaaaaaaaataattagctgggcgtgatggtgggcgcctgt

SEQ ID NO: 20184 - DNA, 120 bp, synthetic construct
  source 1..120: mol_type = other DNA
aggaaaaaaaaaaaaaaaagagagagagtaagggaacatctttcgttaataaaccctctctattgctccccacacacaatcctagtttggttgctgtcttcgtctgtttgggctgccata

SEQ ID NO: 20185 - DNA, 120 bp, synthetic construct
  source 1..120: mol_type = other DNA
ctcatagactgccatctgccatctgcgatctagctgtgtcttcacatggtggaagggcaaacaagctccctggggcctcttttagaagggcactaatctcatttgcaaaagtccccacca

SEQ ID NO: 20186 - DNA, 120 bp, synthetic construct
  source 1..120: mol_type = other DNA
tacattcttggcagttctggccttggtttattgtgccaataaaagtaagctcatgaagctatttctatcatgtctttacaggcatgtacaggtgagcccagtttgggagtcacaaaactt

SEQ ID NO: 20187 - DNA, 120 bp, synthetic construct; identical to SEQ ID NO: 6145
  source 1..120: mol_type = other DNA

SEQ ID NO: 20188 - DNA, 120 bp, synthetic construct
  source 1..120: mol_type = other DNA
gaggtcatgttaaaagacttagaaaaggttcagttctcctgccgggcgccgtggctcatgcctttaatcccagcactttgggaggcctaggcgggcggatcacctgagatcaggagtttg

SEQ ID NO: 20189 - DNA, 120 bp, synthetic construct
  source 1..120: mol_type = other DNA
aacccaggagctggaggttgcagtgagctgagattgtgccattgcactccagcctgggcaacaggcaaaactgtctccaaaaaaaaaaaaaaaaaggttcagttctcataaacacaaatt

SEQ ID NO: 20190 - DNA, 120 bp, synthetic construct
  source 1..120: mol_type = other DNA
ataatgtgtgtatataattggttgctaggggatttgtttgttcattttgctgcaatagatttctgtctctcgtcatattctgttcaagtacctaaaatgattgctcacttattcgaagca

SEQ ID NO: 20191 - DNA, 120 bp, synthetic construct; identical to SEQ ID NO: 6146
  source 1..120: mol_type = other DNA

SEQ ID NO: 20192 - DNA, 120 bp, synthetic construct
  source 1..120: mol_type = other DNA
ataaacatgagaagatgtttacagatagatgttttagaagtcaaatgaacaaatctgaagcaacagactagaaattctattcatggaaatatgataaaaatgccagtaagagggctgggc

SEQ ID NO: 20193 - DNA, 120 bp, synthetic construct
  source 1..120: mol_type = other DNA
tgggcaacatggcgaaaccccatctctaccaaaaatacaaaaccccgtctctaccaaaaatacaaaaaatcagttgggcatggtggcaggtgcctgtaatcccagctacgggggaggctg

SEQ ID NO: 20194 - DNA, 120 bp, synthetic construct
  source 1..120: mol_type = other DNA
aataaattttaaaatgccagtaaggatctccataaaggctatgtatgaaaacctgaccatgtcacatccatgaccctattacagcaggtcagattaatcttaccctagtccagagaacca

SEQ ID NO: 20195 - DNA, 120 bp, synthetic construct
  source 1..120: mol_type = other DNA
aaacacctgctgagtttactcttccttgcctgtctttctaagccatcactctgaagacctaaaaagcagacatgactcatacacaccttcagatgctttcagtatttgttacacctagat

SEQ ID NO: 20196 - DNA, 120 bp, synthetic construct; identical to SEQ ID NO: 6147
  source 1..120: mol_type = other DNA

SEQ ID NO: 20197 - DNA, 120 bp, synthetic construct
  source 1..120: mol_type = other DNA
gcttaaatggcacctcctcagtaaagcctcccctgaattccccagacttagaacactgtttccccaatcccactagccactctcatatatggcatactgtagtcattgttttgtttgttt

SEQ ID NO: 20198 - DNA, 120 bp, synthetic construct
  source 1..120: mol_type = other DNA
ttgggaggccgaggcaggcagatagctgaggtcaggagttccagaccagcctgaccaatatggtgaaaccccgtctctactaaaaatacaaaaattagctgggggtggtggtgcatgcta

SEQ ID NO: 20199 - DNA, 120 bp, synthetic construct
  source 1..120: mol_type = other DNA
taacatgaggagaccctgtctctaccaaaaattaaaaatattagccgagtgtggtggcatgagcctgtagtcccagctacttgggaggctgaggcaggaggatcgatttagcctaggaag

SEQ ID NO: 20200 - DNA, 120 bp, synthetic construct
  source 1..120: mol_type = other DNA
aaccacaaaacttatctcagtggtaattaaggtaactgtggaatcgtgtatttacatttgccttcctgaccagaccataaactccaggagggcagggattttgactatgtggctcatttt

SEQ ID NO: 20201 - DNA, 120 bp, synthetic construct; identical to SEQ ID NO: 6148
  source 1..120: mol_type = other DNA

SEQ ID NO: 20202 - DNA, 120 bp, synthetic construct
  source 1..120: mol_type = other DNA
agtcttcccatttacaaaatgggaaaactgaaactcaaacatgtttaataatctgcacagtgtctcacatgtaacaagccaacatgagattagtgattccaaagaccctgctcagcccaa

SEQ ID NO: 20203 - DNA, 120 bp, synthetic construct
  source 1..120: mol_type = other DNA
tctgttagtagaagatccagaagattcaccctgccatagagcagggggccttggctgagccataggcagaatcactctccaaaaagacttaccagtgtttatctgaatattttcttttag

SEQ ID NO: 20204 - DNA, 120 bp, synthetic construct
  source 1..120: mol_type = other DNA
gcagggggccttggctgagccataggcagaatcactctccaaaaagacttaccagtgtttatctgaatattttcttttagcaataactttacttacttgcgttatttgtaggtgctgcca

SEQ ID NO: 20205 - DNA, 120 bp, synthetic construct
  source 1..120: mol_type = other DNA
ccaccacccatgagcattttgatagcattgcaagtataatctctggtgcatgcacaaattctgctccacatagcagcgctaatggtggcccacatcgggaataggagtagagcaagatgt

SEQ ID NO: 20206 - DNA, 120 bp, synthetic construct; identical to SEQ ID NO: 6149
  source 1..120: mol_type = other DNA

SEQ ID NO: 20207 - DNA, 120 bp, synthetic construct
  source 1..120: mol_type = other DNA
cgctgctcttaagaaagtacttttccaaagatcattctccttggtcttatcttaagatcctgctatgaaatagggacacgggtggaaaattttcacctgtgcctgcagcaaactttcatt

SEQ ID NO: 20208 - DNA, 120 bp, synthetic construct
  source 1..120: mol_type = other DNA
ggctaggtggggtatcttctttaactctactcctgcattagctgttctaaatcctagaactcatgccctgtttgaaatttctttccctatgcccaactcaagtgatgccatcctattttc

SEQ ID NO: 20209 - DNA, 120 bp, synthetic construct
  source 1..120: mol_type = other DNA
ggagtgcagtggtgcaagcttggctcactgcaatctccacctcctgggcttaagcaattcttgtgcctctgccacctgagtagttgggattataggcatgcaccaccacgcccagctaat

SEQ ID NO: 20210 - DNA, 120 bp, synthetic construct; identical to SEQ ID NO: 6150
  source 1..120: mol_type = other DNA

SEQ ID NO: 20211 - DNA, 120 bp, synthetic construct
  source 1..120: mol_type = other DNA
ggtggagtttcactcttgttgcccaggctggagtgcaatggtgcgatctcggctcactgcaacttccacctcctggattcaagtgagtctcctgcctcagccttctgagtagctgggaat

SEQ ID NO: 20212 - DNA, 120 bp, synthetic construct
  source 1..120: mol_type = other DNA
tttaatagagatggggttttgtcatgttgcccaggctggtcttgagctcctgacctcagatgatccgcccacctcggcctcccaaagtgctgggattacaggtgtgagccaccgcgcctg

SEQ ID NO: 20213 - DNA, 120 bp, synthetic construct
  source 1..120: mol_type = other DNA
aactgtgcctgacccttctcttaattttaactcctgagtgattttcttctctggaccccaaggagtcatgatatctctaaattatatcctgaagttatttcaactttagaaaataaagtt

SEQ ID NO: 20214 - DNA, 120 bp, synthetic construct; identical to SEQ ID NO: 6151
  source 1..120: mol_type = other DNA

SEQ ID NO: 20215 - DNA, 120 bp, synthetic construct
  source 1..120: mol_type = other DNA
cggagaggcagaggttgcagtaagctgagtttgcgccattgctctccagcctgggtgacagagtgagacaccatctcaaataaaaaagaaaagaaaaaaaagatcttggaatgctttttt

SEQ ID NO: 20216 - DNA, 120 bp, synthetic construct
  source 1..120: mol_type = other DNA
ctgcaatatctgcctccagggttcaagcaattcttttgcctcagcctccccagtagctaggatttcaggcatgcaccaccatgcctggctaatttttgtatttgaagtagagacagggtt

SEQ ID NO: 20217 - DNA, 120 bp, synthetic construct
  source 1..120: mol_type = other DNA
gccaccatgcctggcccagaaaatattattgttatttaatatgacctgccataactaccattaaaagtagtacaggtgtgcaaaagaaacttatctggctatggctgggcgcggtgctca

SEQ ID NO: 20218 - DNA, 120 bp, synthetic construct
  source 1..120: mol_type = other DNA
gtgaaaccctgtctctacaaaatatacaagaaaaaattaaccgggcatggtggcgggtgccagctactcgggaggctgaggcaggagaatggcgtgaacctgggaggcggagcttgcagt

SEQ ID NO: 20219 - DNA, 120 bp, synthetic construct; identical to SEQ ID NO: 6152
  source 1..120: mol_type = other DNA

SEQ ID NO: 20220 - DNA, 120 bp, synthetic construct
  source 1..120: mol_type = other DNA
tacttttttgtatttttgatagaaacagggttttgccatgttggccaggctgatctcaaattcctttcctcaagtgatccgcctgccttggcctccaagagtgctgggattacaggcatg

SEQ ID NO: 20221 - DNA, 120 bp, synthetic construct
  source 1..120: mol_type = other DNA
taaaatatccttaaagtttccttaccttggagtggaattatttgcatatgtatacacatgatgctgactttagaagaaaagttacaagttaaaacacgtttgattaataaaagaaaaaga

SEQ ID NO: 20222 - DNA, 120 bp, synthetic construct
  source 1..120: mol_type = other DNA
cagagaaccactacttcacgtttcccaataaagcatcttttatatttataaaagttaagcctgcatatctctgcccccaattgcagcagaaacacctgaaaaagaatgccagtctggtct

SEQ ID NO: 20223 - DNA, 120 bp, synthetic construct; identical to SEQ ID NO: 6153
  source 1..120: mol_type = other DNA

SEQ ID NO: 20224 - DNA, 120 bp, synthetic construct
  source 1..120: mol_type = other DNA
gttctatcaccctattccatagcatacccctgttgaacttcccacatccctgtcttcccttagcttcctgtatccaacctcagcgcaatagctcagtttgaccattagatggtaccagtt

SEQ ID NO: 20225 - DNA, 120 bp, synthetic construct
  source 1..120: mol_type = other DNA
gaaaatatatcaggtggtgtatgaaataataagtaaattatctgccgggcgcggtggctcacgcttgtgatcccagcactttgggaggcctaggcgggcaggcagatcacgaggtcagga

SEQ ID NO: 20226 - DNA, 120 bp, synthetic construct
  source 1..120: mol_type = other DNA
tcacgaggtcaggagatcgagatcatcctggctaacacgacgaaaccccgtctacttaaaaaaaaatacaaaaattagccgagggtggtggcgggcgcctgaaatcccagctactcagga

SEQ ID NO: 20227 - DNA, 120 bp, synthetic construct; identical to SEQ ID NO: 6154
  source 1..120: mol_type = other DNA

SEQ ID NO: 20228 - DNA, 120 bp, synthetic construct
  source 1..120: mol_type = other DNA
ataagacgaagtcctgccctcactggctaacattctaagcacaggtgctgcacaagaggtgttatgttttttgggggagccagacacaggcctaagcactttatgtaccttgtctcattt

SEQ ID NO: 20229 - DNA, 120 bp, synthetic construct
  source 1..120: mol_type = other DNA
ggcgggtggatcacctgaagtcggagttcgagaccagcctgaccaacatggagaaaccccatctctactaaaaatacaaaattagccgggcatagtggcgcatagcctgtaatcccagct

SEQ ID NO: 20230 - DNA, 120 bp, synthetic construct
  source 1..120: mol_type = other DNA
aaaaaaaaaaaagagagatttctttaagctctttgcctagggtcacaggtctttccacaggaccgtagactagagtcagatgtgttcctcaatcaattaggaaagggtggtgctggaatt

SEQ ID NO: 20231 - DNA, 120 bp, synthetic construct; identical to SEQ ID NO: 6155
  source 1..120: mol_type = other DNA

SEQ ID NO: 20232 - DNA, 120 bp, synthetic construct
  source 1..120: mol_type = other DNA
ctgagcaacagccaagcaacattataggcttcaggcctacctagcccaggctgggttaaagcagataaacgaagcggacagcggaggaaaagcacgtaaccaagtgcagtgggtctgaag

SEQ ID NO: 20233 - DNA, 120 bp, synthetic construct
  source 1..120: mol_type = other DNA
caattctcggtggcgaagtcgtgacgtcagctgttgcgggtcagattgggagagcttcctggtccttacctagcaagattctgccgctaggtggcgaaaagcgaaggggccaaagaaatg

SEQ ID NO: 20234 - DNA, 120 bp, synthetic construct
  source 1..120: mol_type = other DNA
gaaaatccaggaatgggaagctcactcccgtagttcccactcattcccaccacggttggacagctctgaaggagggaaaattctttcttttgagctgaaatctgccttcagagtcttgca

SEQ ID NO: 20235 - DNA, 120 bp, synthetic construct; identical to SEQ ID NO: 6156
  source 1..120: mol_type = other DNA

SEQ ID NO: 20236 - DNA, 120 bp, synthetic construct
  source 1..120: mol_type = other DNA
gtaggccaggcgcggtggctcacgcctgtaatcccagcactttgggaggccgaggcgggcggatcacgaggtcaggagatcgagaccatcctggctaatacggtgaaaccccgtctctac

SEQ ID NO: 20237 - DNA, 120 bp, synthetic construct
  source 1..120: mol_type = other DNA
cgtgtcactgcactccagactgggcgacagagcaagactctgtctcaaaaaaaaaaaaaaaaaagaaaaagaaataaaccagtatggccgggcgcggtggctcatgcctgcaatcccagc

SEQ ID NO: 20238 - DNA, 120 bp, synthetic construct
  source 1..120: mol_type = other DNA
ctgtagtcccagctacaaaggagggtgaggcaggagaatcccttgaacccgggaggtggaggttgcagtgagccaagatcgtgccattgcactccagcctgggcaacaagagcgaaactc

SEQ ID NO: 20239 - DNA, 120 bp, synthetic construct; identical to SEQ ID NO: 6157
  source 1..120: mol_type = other DNA

SEQ ID NO: 20240 - DNA, 120 bp, synthetic construct
  source 1..120: mol_type = other DNA
catgtaagggctaatgactgtatttactgagtggttactgtgtaccattcacagttcacagggactcattcatgtcattctcatgataaccctgatgaagtggatgatattattccctca

SEQ ID NO: 20241 - DNA, 120 bp, synthetic construct
  source 1..120: mol_type = other DNA
aagcagagtaaacttcatgggtgagtgaccagggcagtcacacaagggccccatgcttagaagggatactgtgtttgggttctaaagctctgtggttcctgtcttgaaattcttaataat

SEQ ID NO: 20242 - DNA, 120 bp, synthetic construct
  source 1..120: mol_type = other DNA
ctggttttcagctgccggctccaccaccttctgtgcaggctcgctcccagcaggggcctgggaacagtggaaaggaggggagcggtcaggcatacacacctcccttgccaaatggaaggc

SEQ ID NO: 20243 - DNA, 120 bp, synthetic construct
  source 1..120: mol_type = other DNA
tatgggaggccaaggcaggcggatcacgaggtcaggcgatcgagaccatcctggctaacacggtgaaaccccgtctccactaaaaatacaaaaaaattatctgggcatggtggcgagcgc

SEQ ID NO: 20244 - DNA, 120 bp, synthetic construct; identical to SEQ ID NO: 6158
  source 1..120: mol_type = other DNA

SEQ ID NO: 20245 - DNA, 120 bp, synthetic construct
  source 1..120: mol_type = other DNA
gtgagccactgcacctggtcttttcctgctattaaacaaggagctccatagtttcattttgcccctcaaaatatgtagctggccttagtagactgatattcattgccaaattatatgtaa

SEQ ID NO: 20246 - DNA, 120 bp, synthetic construct
  source 1..120: mol_type = other DNA
tacaactagaatataactcataaaggcaagaatcttgtctgccttgctgaaagttttataatcagggcctaatataaagtatgacacatagcacttgcttttaaatatgtattgatttaa

SEQ ID NO: 20247 - DNA, 120 bp, synthetic construct
  source 1..120: mol_type = other DNA
taagctgtttaaaaataacaaggatgttctttaggtactgataaggaaagagcttcaagataaattgttaccatttatgtaaaacaggtgggagaagggagagggagggatgtgtgagcg

SEQ ID NO: 20248 - DNA, 120 bp, synthetic construct; identical to SEQ ID NO: 6159
  source 1..120: mol_type = other DNA

SEQ ID NO: 20249 - DNA, 120 bp, synthetic construct
  source 1..120: mol_type = other DNA
ggtgtctattatcacttctgataacataaataatgtaaagatacatattttacagattatctgtaaaagcttatacagtactgttgctgggtatttatgtaggaaagctaccatttattg

SEQ ID NO: 20250 - DNA, 120 bp, synthetic construct
  source 1..120: mol_type = other DNA
tctgaatatattactgtgtacatggtctgtcattggacatggtgagagatgcagattaagctgaaattactgaggacagcaacactggaagaaaattgagctgggtgtagtggctcagcc

SEQ ID NO: 20251 - DNA, 120 bp, synthetic construct
  source 1..120: mol_type = other DNA
agaagctttcatttagccaggcatgctggcacatacctgtagtttcagctactcaggaggttgaggcataaggttcacttaaacttgagaggtaaaggctgcagtgagccctgatcacgc

SEQ ID NO: 20252 - DNA, 120 bp, synthetic construct; identical to SEQ ID NO: 6160
  source 1..120: mol_type = other DNA

SEQ ID NO: 20253 - DNA, 120 bp, synthetic construct
  source 1..120: mol_type = other DNA
cctgcctcagcctcccgagtagctgggattacaggcgcacgccaccatgcccagctaatttttgtatttttagtagaggcagggtttctccatgttggtcaggctggtcttgaactccca

SEQ ID NO: 20254 - DNA, 120 bp, synthetic construct
  source 1..120: mol_type = other DNA
tttctgcaagtggcaacaccactggcttcattttgctggtggcccctctggccttcccttgtatatatcacctttgcccaaagaccatgtcagccaagggactgctctcacagctccagg

SEQ ID NO: 20255 - DNA, 120 bp, synthetic construct
  source 1..120: mol_type = other DNA
ttgaaatcccagctctgccactccctagtggtgtgactttagcaagttcctttacctcttttgtacctcccttttctcacctgtaagatatgggtgataatagtttaatatttgttttgt

SEQ ID NO: 20256 - DNA, 120 bp, synthetic construct
  source 1..120: mol_type = other DNA
agaaccacagcacatagaatatctcagtaaggtggttagttttttttattgttgttttcagagatgctgtgatttctccaaagtggctgtgatggctcggcaggctcctgaccctctctg

SEQ ID NO: 20257 - DNA, 120 bp, synthetic construct; identical to SEQ ID NO: 6161
  source 1..120: mol_type = other DNA

SEQ ID NO: 20258 - DNA, 120 bp, synthetic construct
  source 1..120: mol_type = other DNA
ccttaatgtccttctagctccttacgcccatctcggacaaaagcagaaatgtatgtctcagttgtgtttctaccccttgctgcccaatataaatttttgtgttgcccaatataatttttt

SEQ ID NO: 20259 - DNA, 120 bp, synthetic construct
  source 1..120: mol_type = other DNA
ttgtaattaattttaagtggccacatgcagggagtgactgctgcattggacagcacggctctaaattgagccttttttccttatttggtgaggcatacttgccttaagattgggaagtct

SEQ ID NO: 20260 - DNA, 120 bp, synthetic construct
  source 1..120: mol_type = other DNA
cattccagatctcactctcccctgtgacactgaggaaactggcaagtgatgtgaaggctggagagcgtgtcctgtatgctggctctgtcccttctgcctgtgttgactgacatagttagt

SEQ ID NO: 20261 - DNA, 120 bp, synthetic construct; identical to SEQ ID NO: 6162
  source 1..120: mol_type = other DNA

SEQ ID NO: 20262 - DNA, 120 bp, synthetic construct
  source 1..120: mol_type = other DNA
ggaagcttacatattccatgaacaagcctcttcctaaggtcctgtaagtgatcctgccccactgattagcccctagaagacccttcaaaggttggatctccaggagggagtgggggagga

SEQ ID NO: 20263 - DNA, 120 bp, synthetic construct
  source 1..120: mol_type = other DNA
gtttctgcgggcacagctgcagcaattaccggagtggaggcagggcccaggcagcactgccctccaagatcttcccttgggcttttcagcagtaaggggacatgcaccccaagggcctcc

SEQ ID NO: 20264 - DNA, 120 bp, synthetic construct
  source 1..120: mol_type = other DNA
tgtcttccagctatgcaggtaagacatgttttttttcctgccctggggagaccctgaaaacagaaaggctagtttcctggggcttagctccttcaaacatcctcaagttgctatattatc

SEQ ID NO: 20265 - DNA, 120 bp, synthetic construct; identical to SEQ ID NO: 6163
  source 1..120: mol_type = other DNA

SEQ ID NO: 20266 - DNA, 120 bp, synthetic construct
  source 1..120: mol_type = other DNA
cagcttcccaaagtactgggattatgggcgtgagccactgcactaggcctaatttttttatttttagtagagatggggtttcaccatgttggccaggctggtctggaacccctgacctca

SEQ ID NO: 20267 - DNA, 120 bp, synthetic construct
  source 1..120: mol_type = other DNA
tttccagctttgtcttttcacctctcaaattgagataaaataataacaacctcttggagttctcatcaggattacatgaaatgagatatgtaacatgcttagcagtgcctgtccatagta

SEQ ID NO: 20268 - DNA, 120 bp, synthetic construct
  source 1..120: mol_type = other DNA
aacagaaagtttcccatcctcagggagccacctgactgacagaggcacagtgcatccactctccaggtctaggggagaaagcagccttatttcttagtagctcagaatctgacttgagaa

SEQ ID NO: 20269 - DNA, 120 bp, synthetic construct; identical to SEQ ID NO: 6164
  source 1..120: mol_type = other DNA

SEQ ID NO: 20270 - DNA, 120 bp, synthetic construct
  source 1..120: mol_type = other DNA
atgggcagatgctgagaggagatgattgctaaaatgttctgtccaggacattcacagtatctctataaccagagtcttttttgtcgttgttgttctcaagaaggaaacttgaggccgggt

SEQ ID NO: 20271 - DNA, 120 bp, synthetic construct
  source 1..120: mol_type = other DNA
aaattagctggatgcggcggtaggtgcctgtaatgccagctactcgggaggctgaggcaggagaatcacttgaacctgggaggcggaggttgcagggaggcggaggttgcagtgagccaa

SEQ ID NO: 20272 - DNA, 120 bp, synthetic construct
  source 1..120: mol_type = other DNA
gtcatttaaaagtcgagtgtcttcttccttccctgttttgaagcagcccttctcatgacaggcttgcttgccaaggttccctctgaccttaaatctcttccttttggtgtcttggacagg

SEQ ID NO: 20273 - DNA, 120 bp, synthetic construct; identical to SEQ ID NO: 6165
  source 1..120: mol_type = other DNA

SEQ ID NO: 20274 - DNA, 120 bp, synthetic construct
  source 1..120: mol_type = other DNA
aggcagcaatggaattgaaagtagaaggtgagtagtgccatataatattaggtattaactgttgggtggccaagaacaattattctctcaactgagatgagatccctcaacccaaacatc

SEQ ID NO: 20275 - DNA, 120 bp, synthetic construct
  source 1..120: mol_type = other DNA
ttgagtaggtaagtgacagaatgaacaatggtagccatactgtgaatattatgcaggcattaaaaagattattttagcactaggccagatggtttggaggccttctataaggtattattg

SEQ ID NO: 20276 - DNA, 120 bp, synthetic construct
  source 1..120: mol_type = other DNA
cagttacagtgagctatgattgcaccactgcactccaacccgggtgacagagcaaagaccttcacccccactccctacccgtctctaaaaaaaacaaaaacaaaaacaaaaaaacccttg

SEQ ID NO: 20277 - DNA, 120 bp, synthetic construct
  source 1..120: mol_type = other DNA
aaatacaaaaaaaaaaaaaaaattagccaggcatggtagcaggcgcctgtagtcccagctactcgggaggctgaggcaggagaatggcgtgaacccggaagcggaggttgcagtgagcca

SEQ ID NO: 20278 - DNA, 120 bp, synthetic construct; identical to SEQ ID NO: 6166
  source 1..120: mol_type = other DNA

SEQ ID NO: 20279 - DNA, 120 bp, synthetic construct
  source 1..120: mol_type = other DNA
ctgagattacaggtgcccaccaccacacccagctaatttttgtatttttagtagagacagggtttcaccaggttgtcaaggttggtctcaaactcctgacctcaggtgatccactcgcct

SEQ ID NO: 20280 - DNA, 120 bp, synthetic construct
  source 1..120: mol_type = other DNA
atgggtgattttggagaatattttttgctctatcgcaggatgattaagatgtggacaaggtgaagccgatggagggggagctttgaaagttacttgctatttaattgaggaactaaactg

SEQ ID NO: 20281 - DNA, 120 bp, synthetic construct
  source 1..120: mol_type = other DNA
cagaagatggcattgtatgtggaacaacaaagcactatttctagagactgcctgcagggatatggaaatagctttatgtgtctcagaatgttcttcatacagctgtttttattggggaaa

SEQ ID NO: 20282 - DNA, 120 bp, synthetic construct; identical to SEQ ID NO: 6167
  source 1..120: mol_type = other DNA

SEQ ID NO: 20283 - DNA, 120 bp, synthetic construct
  source 1..120: mol_type = other DNA
gagccaagatcgtgccattacactccagtctgggcaagaaaagtggaactccatctcaaaaaaaaaaaaaaaaaaaaaacaaggaagacaaaaagaaaagcagctaaagactttgcctca

SEQ ID NO: 20284 - DNA, 120 bp, synthetic construct
  source 1..120: mol_type = other DNA
agccaggaagttgagacaaatttaggaatgagatgaagtaatggtattattgcaagtctcaggtgtaactacctctgctctttctctgaagagtttctaatttctcttgtttacttattt

SEQ ID NO: 20285 - DNA, 120 bp, synthetic construct
  source 1..120: mol_type = other DNA
ttgggaggccgaagcgggcagatcacccgaggtcaggagttcgagaccagcctgatcaacatggagaaaccccgtctctactaaaaaatacaaaattagctaggcgtggtggcacatgcc

SEQ ID NO: 20286 - DNA, 120 bp, synthetic construct; identical to SEQ ID NO: 6168
  source 1..120: mol_type = other DNA

SEQ ID NO: 20287 - DNA, 120 bp, synthetic construct
  source 1..120: mol_type = other DNA
tggcatatctctgctcactgcagcctctgcctcccgggcagaagccatcctcccacctcagcctacatagtagctgggaccacaggcacacaccaccacacactgctaatgttttgtatt

SEQ ID NO: 20288 - DNA, 120 bp, synthetic construct
  source 1..120: mol_type = other DNA
gcgaagaacactttttaaaaaataaataggccgggcgcggtggctcacacctgtaatcccagtactttgggagcccaaggagggcgaatcatgaggtcaagagattgagaccatcctagc

SEQ ID NO: 20289 - DNA, 120 bp, synthetic construct
  source 1..120: mol_type = other DNA
aggcggagcttgcagtgagctgagatcatgccactgcactccagcctggggcaacagagtgagactcaaaaaaaaaaaaaaaaaagccccccctccccacacacaataatataaataaat

SEQ ID NO: 20290 - DNA, 120 bp, synthetic construct; identical to SEQ ID NO: 6169
  source 1..120: mol_type = other DNA

SEQ ID NO: 20291 - DNA, 120 bp, synthetic construct
  source 1..120: mol_type = other DNA
gatactctatacttcttgttgctttacatccggaggctgataatgtctgcttttctctcttttctaattatttgtgaaaggaaaaatgtggggggttgggagaaaaaaacccttaagtac

SEQ ID NO: 20292 - DNA, 120 bp, synthetic construct
  source 1..120: mol_type = other DNA
ttgtaattatacctaagcaaccctcctggaccagtttaatgttattagctgtgatgtatccctacctttgatgtcattatccttactcagctcccttaaagcagagatcaagatgaaaag

SEQ ID NO: 20293 - DNA, 120 bp, synthetic construct
  source 1..120: mol_type = other DNA
aacctactccacatctccaggtctgcacatctgttcagttactgaatcctgtgtaagctaccttctttttcttttttcttttatttatttatttattttttttttgagatggagttttgc

SEQ ID NO: 20294 - DNA, 120 bp, synthetic construct
  source 1..120: mol_type = other DNA
ccatgtctggctaatttttgtattatcagtagagagagggtttcaccatgttggccaagccggtctcgaactcctgacctcaagtgatccacccaccttggcctcccaaaatgctgggat

SEQ ID NO: 20295 - DNA, 120 bp, synthetic construct; identical to SEQ ID NO: 6170
  source 1..120: mol_type = other DNA

SEQ ID NO: 20296 - DNA, 120 bp, synthetic construct
  source 1..120: mol_type = other DNA
ggctcaagcaatcttcctgccttggcctcccaaagtggtgggattacaggggagagccaccacacctagccagaagaatgttttaaatacaccaaataaaacatttataccaaaatacag

SEQ ID NO: 20297 - DNA, 120 bp, synthetic construct
  source 1..120: mol_type = other DNA
atatttgtgatttttctttttcttttttttttttgagatggagtttcgctcttgttgcccaggctggagtgcaatggcaagatctcggctcacctcaacctccgcctcctgggttcaagc

SEQ ID NO: 20298 - DNA, 120 bp, synthetic construct
  source 1..120: mol_type = other DNA
tcccaacctcaggcgatccgcccgcctcggcctcccaaagtgctgggattacaggtgtgagccaccgcacctggccaatatttgtgatttttattgacgacaaagtcaaaggttctcttc

SEQ ID NO: 20299 - DNA, 120 bp, synthetic construct; identical to SEQ ID NO: 6171
  source 1..120: mol_type = other DNA

SEQ ID NO: 20300 - DNA, 120 bp, synthetic construct
  source 1..120: mol_type = other DNA
gtaggcgatacaccacaataatatgaagagaacctttgactttgtcgtcaataaaaagtcccttgagggacttcagatgtaagtcccttagctgctcgttaaaactcccccagcctgacc

SEQ ID NO: 20301 - DNA, 120 bp, synthetic construct
  source 1..120: mol_type = other DNA
atcctgatgatattcacttctttatttgacctgatttattgggccccagacaccatgctgagtgttggggattcagctctggacaatgtcaaatgtcagtcctgcctttcagatcctttc

SEQ ID NO: 20302 - DNA, 120 bp, synthetic construct
  source 1..120: mol_type = other DNA
gtgggtggatcaggatcctttctttaaatgagctggcttcttggagctacaccacttaacatgtatttgtgagtgacttctgggttcagaagttcttctcactattgagtgataaagaaa

SEQ ID NO: 20303 - DNA, 120 bp, synthetic construct; identical to SEQ ID NO: 6172
  source 1..120: mol_type = other DNA

SEQ ID NO: 20304 - DNA, 120 bp, synthetic construct
  source 1..120: mol_type = other DNA
aaaattgtttcctctttctccattcaacactgaggactcaggttcagctgctgatgaagctcctcttttttgcctagagctttcattctgagccttctcctcctaccaagtgtctcccca

SEQ ID NO: 20305 - DNA, 120 bp, synthetic construct
  source 1..120: mol_type = other DNA
cgatcaacaacaaagtcctttctctcaccttgaattcatcccagatgcctgcttgtttacttcttccacacaaaaaaaggccttcagccctcatggctgagcagaaagaatctgaatgtt

SEQ ID NO: 20306 - DNA, 120 bp, synthetic construct
  source 1..120: mol_type = other DNA
tgccttgtctgtcaaatagagaaaacatccttcgtcctaaattgtagggaggattaaagtcatgcaaagtgcctactacaaatccagtcacaaagtagctagctactcactaaatgttca

SEQ ID NO: 20307 - DNA, 120 bp, synthetic construct
  source 1..120: mol_type = other DNA
attggatgcttgtgctggcttggagcattgctcacattctttattcgctattgtatctagactatagctagagaaagagccgcaaccattggctttaaatccagtgctcttcctactctc

SEQ ID NO: 20308 - DNA, 120 bp, synthetic construct; identical to SEQ ID NO: 6173
  source 1..120: mol_type = other DNA

SEQ ID NO: 20309 - DNA, 120 bp, synthetic construct
  source 1..120: mol_type = other DNA
gtcgtgcctagaacaagttttaagtaattaaataacaaagactcaggataaaagatcctttttgagtgccctactaaatccatttccatttgtttctctttcagagaatctccaccggac

SEQ ID NO: 20310 - DNA, 120 bp, synthetic construct
  source 1..120: mol_type = other DNA
ggacccctggctcctggttgagtcccttcctctcttctcttttctttctttaaataagaagtcatttgcatttaggattggtaaaatcataataaaaatactcatgtactgtttttatgt

SEQ ID NO: 20311 - DNA, 120 bp, synthetic construct
  source 1..120: mol_type = other DNA
cctgatgtctggttggggaggtgaaacaaacagaaacaagacacaactgtatcacctgtacttatatttctgctttacaaactcaggatgtttccatgagtacagaacatgactaatcag

SEQ ID NO: 20312 - DNA, 120 bp, synthetic construct
  source 1..120: mol_type = other DNA
tgttcactgcagattgcccaatgcctaaagataatggcaacagaagagcacccaaatatttgttagataaatgttgcagacactagaaggtgtcattagggcacagatggtaccttctct

SEQ ID NO: 20313 - DNA, 120 bp, synthetic construct; identical to SEQ ID NO: 6174
  source 1..120: mol_type = other DNA

SEQ ID NO: 20314 - DNA, 120 bp, synthetic construct
  source 1..120: mol_type = other DNA
taaatgtttctttttttttttttttgaggcagagttttgctcttgtcacccaggctggagtgcaatggcgcgatctaggctcactgaaacctctgcctcccgggttcaagcgattctcag

SEQ ID NO: 20315 - DNA, 120 bp, synthetic construct
  source 1..120: mol_type = other DNA
atccacctgccttggcctcccaaagtgctgggattacgggcatgagccaccgtgcccggccataaatatttctttagccaaagtaatacattaagtaatgtagcagcaagtctaataacc

SEQ ID NO: 20316 - DNA, 120 bp, synthetic construct
  source 1..120: mol_type = other DNA
ggctcactgcaacctccacctcctgggttcaagcgattctcctgcctcagcctcccaagttgctggaactacaggcgcatgccaccatgcccagctaatttttgtatttttagtagagac

SEQ ID NO: 20317 - DNA, 120 bp, synthetic construct; identical to SEQ ID NO: 6175
  source 1..120: mol_type = other DNA

SEQ ID NO: 20318 - DNA, 120 bp, synthetic construct
  source 1..120: mol_type = other DNA
ggctcactgcaacctccgcctcccaggttcaagcgattctcctgcctcagcctcctgagtagctggcattacaggcatgtgccaccacgcccacctaatttttacatttttagtagagat

SEQ ID NO: 20319 - DNA, 120 bp, synthetic construct
  source 1..120: mol_type = other DNA
tttaatgaaagaaaatgttaaatccagttattgaaaataaggaggcagtacttttctcatccaagttcatggactttctgaattttgtccccagagtcctttggtgttctaggaccccag

SEQ ID NO: 20320 - DNA, 120 bp, synthetic construct
  source 1..120: mol_type = other DNA
ggaacacatgttaaccctgtttgttctggtgaacaattcagatccccactttctgagggtgccctgctggaagataaccctgtttgtaattgtgccggttcttggacccttggttgcctt

SEQ ID NO: 20321 - DNA, 120 bp, synthetic construct
  source 1..120: mol_type = other DNA
gaccaagtcagctctgaatgggaagccaaaagagaatagaaccaggactcaagattaggggagctgggatttccttattcctctgtccccatgcccaaccccaggctcttctgagaaact

SEQ ID NO: 20322 - DNA, 120 bp, synthetic construct; identical to SEQ ID NO: 6176
  source 1..120: mol_type = other DNA

SEQ ID NO: 20323 - DNA, 120 bp, synthetic construct
  source 1..120: mol_type = other DNA
agggcaaagaagccagctgttagagacacatttacaggtggcagagaagctggaggcactcctatctgccacctgatccattcctccttcactgcccctaagcaggaatccaaccctagc

SEQ ID NO: 20324 - DNA, 120 bp, synthetic construct
  source 1..120: mol_type = other DNA
tgaccccaagggcttttcttctccctagttcaatggttttatgatacaaactactgacatacgtttttcaagttattttctccttcttctaggaaatcccttctgagtgatgtcacatct

SEQ ID NO: 20325 - DNA, 120 bp, synthetic construct
  source 1..120: mol_type = other DNA
acactctgaattccaagtagaattgatttcccttcttctgtcatctaccttttctcttcattttcccatttttattacccttctttccatttctctctccagtcttccacctggaagccc

SEQ ID NO: 20326 - DNA, 120 bp, synthetic construct; identical to SEQ ID NO: 6177
  source 1..120: mol_type = other DNA

SEQ ID NO: 20327 - DNA, 120 bp, synthetic construct; identical to SEQ ID NO: 183
  source 1..120: mol_type = other DNA

SEQ ID NO: 20328 - DNA, 120 bp, synthetic construct
  source 1..120: mol_type = other DNA
gcactttgggaggccgaggcgggcgaatcacgaggtcaggagttcaagaccagcctggccaacatggtgaaaccccatctctactaaaaatacaaacaattaactgagcatagtggtggg

SEQ ID NO: 20329 - DNA, 120 bp, synthetic construct
  source 1..120: mol_type = other DNA
atcgtgccactgcactctagccggagtgacagagtaagactctgtctcaaaaataaataaataaataaataaataaataaataaataaataaataaaaaataataatacaagttttcata

SEQ ID NO: 20330 - DNA, 120 bp, synthetic construct; identical to SEQ ID NO: 6178
  source 1..120: mol_type = other DNA

SEQ ID NO: 20331 - DNA, 120 bp, synthetic construct
  source 1..120: mol_type = other DNA
cctttatagcccctccagtgatccataaggccctctttctccccaaaggagaggtcacagatagggcaaaggtagctcttctgcttccagtgggtctgctggtgtctgaccagcctggaa

SEQ ID NO: 20332 - DNA, 120 bp, synthetic construct
  source 1..120: mol_type = other DNA
aagacattgagtcttgagggcttcactggatgagagttggatctggcatcctgacagagggttccagtgatgggtgcctgggtcctggtcacaggtgcttggttcttaagtacagatgcc

SEQ ID NO: 20333 - DNA, 120 bp, synthetic construct
  source 1..120: mol_type = other DNA
aattcagcctgggtgcctggaatcctcaaagtacactcctggtttccatccactggctcctggttttggtgtatcttctggtggcgtttgagctcagactggtcccggaagctcttccca

SEQ ID NO: 20334 - DNA, 120 bp, synthetic construct; identical to SEQ ID NO: 6179
  source 1..120: mol_type = other DNA

SEQ ID NO: 20335 - DNA, 120 bp, synthetic construct
  source 1..120: mol_type = other DNA
gcaaggaagaccttgtcatcactagtcccctcatctctcagactgggatgttgttctcgaagctctttcttcttgccttctacagtgaatgaggaagaataacacaaaattcactgtaag

SEQ ID NO: 20336 - DNA, 120 bp, synthetic construct
  source 1..120: mol_type = other DNA
ggttaggagttcgaaaccagcctgaccaacatggtgaaaccctgtctctactacaaatacaaaaattagctgggcgtcatggcatctgcctgtaatctcagctactagggagactgaggc

SEQ ID NO: 20337 - DNA, 120 bp, synthetic construct
  source 1..120: mol_type = other DNA
gtgaaactctgtctcaaaaaaaaaaaaagaaagaaagaaaaagaagaagaagaaggagaaggagaagaaggagaaggagaagagaaggagaagaagaagaagaaggaagaagaagaagaa

SEQ ID NO: 20338 - DNA, 120 bp, synthetic construct
  source 1..120: mol_type = other DNA
cattcagcctaacacacttcttgtctctgcccttgctctcccacccaacacattcatccttacccttgggcctcataggctagaaataagaagaaaaaaagaaaaaattggcttttcaaa

SEQ ID NO: 20339 - DNA, 120 bp, synthetic construct; identical to SEQ ID NO: 6180
  source 1..120: mol_type = other DNA

SEQ ID NO: 20340 - DNA, 120 bp, synthetic construct
  source 1..120: mol_type = other DNA
aagaacattttaatcagagcactatcatggacataagcaactttcatgtcatctctcaatctctagaaactgaagacatctacttctcctgaaagacttagatcttcagccagccaggca

SEQ ID NO: 20341 - DNA, 120 bp, synthetic construct
  source 1..120: mol_type = other DNA
ctggccaacatggtgaaaccctgtctctactaaaaatacaaaaattatctggacacggtggcacatgcctgtagtcccagctactcgagaggctgaggcaggagaatcgcttgaacccgg

SEQ ID NO: 20342 - DNA, 120 bp, synthetic construct
  source 1..120: mol_type = other DNA
tcaacttgaagtcaagggacttgagcctatgatattaagctctctttcaactccaagtctgaccaggctggacagaggtacactaggagagcatctatagagcattcatcctcttcatca

SEQ ID NO: 20343 - DNA, 120 bp, synthetic construct; identical to SEQ ID NO: 6181
  source 1..120: mol_type = other DNA

SEQ ID NO: 20344 - DNA, 120 bp, synthetic construct
  source 1..120: mol_type = other DNA
ttgtttgatgaatggaaaaatttgcatattttgagaacactgtcatcatgttacaagtgttatctttgccttcatgcaggctatcatttcttctctttaccactgagcttagtgactcag

SEQ ID NO: 20345 - DNA, 120 bp, synthetic construct
  source 1..120: mol_type = other DNA
cccagcctcttacccacagatgttagattcttaaaggtttccgacataacatcctggtaaaggaccctctggctggcatctagacagtcccactcttcctgggtgaaattcactgccaca

SEQ ID NO: 20346 - DNA, 120 bp, synthetic construct
  source 1..120: mol_type = other DNA
gtgtgtacaagattaacatccagtctcaagattcagagaattaaaacctaagagaaagataaaaccatggaaggaagagagaaatattaaaagacagacacaaggccagcaactgtgaag

SEQ ID NO: 20347 - DNA, 120 bp, synthetic construct
  source 1..120: mol_type = other DNA
gaggtcgggagttcgagaccagcctgaccaatatggtgaaacctggtctctgctaaaaacacaaaaattagctgggcatggtggcgcatgcctgtaatcccagctactcaggaggctgag

SEQ ID NO: 20348 - DNA, 120 bp, synthetic construct; identical to SEQ ID NO: 6182
  source 1..120: mol_type = other DNA

SEQ ID NO: 20349 - DNA, 120 bp, synthetic construct
  source 1..120: mol_type = other DNA
ctaacaaatttcaggaagtactccatgaaggatgccaggatggtgcgggagatggagaaaggtcttgcagctcctttttctggatgtcgttcagtctggaacaatctgagatttcatttg

SEQ ID NO: 20350 - DNA, 120 bp, synthetic construct
  source 1..120: mol_type = other DNA
ggcttcctgcagggtggcagctacctcgcccacccatgggagcgtcttctgtacaggttcgattggcttcagctgttcaaacatcttctcttctgtggtgtctctttctagctttatcca

SEQ ID NO: 20351 - DNA, 120 bp, synthetic construct
  source 1..120: mol_type = other DNA
cagcaaaggccccagggtttgatgtggcttcctgtgacaaatgtatctgctccaagaggctgtcttccttttttgttctgctgtccaaattctcctcttccacaattgagaacaattttg

SEQ ID NO: 20352 - DNA, 120 bp, synthetic construct
  source 1..120: mol_type = other DNA
tagaaacctgaggtcagagaaaaacaaaacatatcagcaagagggagggtaagaaacagcttccttatttggtcagggaatgccagcagttactaaacccctacagtgtgccactggatg

SEQ ID NO: 20353 - DNA, 120 bp, synthetic construct; identical to SEQ ID NO: 6183
  source 1..120: mol_type = other DNA

SEQ ID NO: 20354 - DNA, 120 bp, synthetic construct
  source 1..120: mol_type = other DNA
tatcatggttttgctttccaatgcttcagttacccatggtcaaccatggttcaaaaatattaaatgaaaaattccggaggacaggcacagtggctcacacctgtaatcccagcattttgg

SEQ ID NO: 20355 - DNA, 120 bp, synthetic construct
  source 1..120: mol_type = other DNA
tgtaatcccagcaactcaggaggctgaggcaggagaatcacttgaaccctggaggtggacgttgccatgagccaagactgcgccactgcactccagcctgggacatagagcgagactccg

SEQ ID NO: 20356 - DNA, 120 bp, synthetic construct
  source 1..120: mol_type = other DNA
tgactagcatatccacactgcagacaatacctgcccattagttccttagtagctagccatctcagttaccaggttgactactgtagtatagcagttgcctgtgctcaagaatgccttatt

SEQ ID NO: 20357 - DNA, 120 bp, synthetic construct; identical to SEQ ID NO: 6184
  source 1..120: mol_type = other DNA

SEQ ID NO: 20358 - DNA, 120 bp, synthetic construct
  source 1..120: mol_type = other DNA
tttggtactattcatggtttcaaagtatccactggggtggggcgcggtggatcacttcagggcaggaatttgagaccagcctggccaacatggtgaaaccccgtctctactgaaaataca

SEQ ID NO: 20359 - DNA, 120 bp, synthetic construct
  source 1..120: mol_type = other DNA
ctgggtgacagagcgagattctgcctcaaacaacaacaaaaacaaagtatccactagagctcttggaacatatcacctgtggataaggggaaccactgtatatacagatctttgtgaaga

SEQ ID NO: 20360 - DNA, 120 bp, synthetic construct
  source 1..120: mol_type = other DNA
ttttcctgctgacagccactcacccacatctcccttactagagatagaaagaaaagaataaagaccaaaaaaccctgttgactattttttcctttcactttttgagaagtgttaatagaa

SEQ ID NO: 20361 - DNA, 120 bp, synthetic construct; identical to SEQ ID NO: 6185
  source 1..120: mol_type = other DNA

SEQ ID NO: 20362 - DNA, 120 bp, synthetic construct
  source 1..120: mol_type = other DNA
actaaaaatacaaaattatcccggcgtggtggcgcatgcctgtaatcgtagctactagggaggctgaggcaggagaatcgcttgaacccgggaggcagaggttgcggtgagcggagatcg

SEQ ID NO: 20363 - DNA, 120 bp, synthetic construct
  source 1..120: mol_type = other DNA
tctctggcagagaagacctactgctgccgctagtcctcaagatggcatttgctggaggcggtaggcagaggccctaagtgtggattctaacccccgtggggactgaatctctgcggctgt

SEQ ID NO: 20364 - DNA, 120 bp, synthetic construct
  source 1..120: mol_type = other DNA
tggaggccgcctgcgggcttatctgtacccgggcctgtccccacccttccagaatgtaaatcctctgagggaatgtgtcgtcgccatctttcagtcctttgagtgcacccagtctctctc

SEQ ID NO: 20365 - DNA, 120 bp, synthetic construct; identical to SEQ ID NO: 6186
  source 1..120: mol_type = other DNA

SEQ ID NO: 20366 - DNA, 120 bp, synthetic construct
  source 1..120: mol_type = other DNA
ttgctcactgtcgcctggcaaagcaggcgcttgttagcacccactgaatgcgcttatgtgctcagaaacggtcccattggttgggactaccttccccgatgcccatccgcccagaatctt

SEQ ID NO: 20367 - DNA, 120 bp, synthetic construct
  source 1..120: mol_type = other DNA
gaggaccccagaggttggaagcccctccaagattaggggcgcagtgctcccctggcctgcggaagagtcagaggagtggggacaacatccaacatcagcctctactaccgctagcgcgac

SEQ ID NO: 20368 - DNA, 120 bp, synthetic construct
  source 1..120: mol_type = other DNA
ccccaccccggccccgccctcttccgctccctcccagtcatcaggccaccgagaatgtgccccttgacccagatgagagggtgagcccgccaaggtcaagcttcccatcctaagaatcac

SEQ ID NO: 20369 - DNA, 120 bp, synthetic construct; identical to SEQ ID NO: 6187
  source 1..120: mol_type = other DNA

SEQ ID NO: 20370 - DNA, 120 bp, synthetic construct
  source 1..120: mol_type = other DNA
cgccactgcactccagcctgggcaaaaagagtgaaactccatctcaaaaaaaaaaaaaaaaaaaaaaaagaggaaagtatttacgaaaaaaaaaaaaaaagaccaaagtattatgattaa

SEQ ID NO: 20371 - DNA, 120 bp, synthetic construct
  source 1..120: mol_type = other DNA
cctattaaaaatacaaaagttagccggtggtggtgacgcacacctgtaatcccagctacttgggagacattgccgttactgggcaagtgttctttcaagagcatcttatctgaattacta

SEQ ID NO: 20372 - DNA, 120 bp, synthetic construct
  source 1..120: mol_type = other DNA
agcaagaccctttctctagaaaaaatgaaaacaacttggccaggtgttgtggtacatgcctttagtcctaggtgcttaggaggttgaggtgggaggattgcttgagctcaggagtttgag

SEQ ID NO: 20373 - DNA, 120 bp, synthetic construct; identical to SEQ ID NO: 6188
  source 1..120: mol_type = other DNA

SEQ ID NO: 20374 - DNA, 120 bp, synthetic construct
  source 1..120: mol_type = other DNA
ctcatgatctgcctgcctcagcctcccaaagtgctgggattacaggcgtgagccaccgcgcccggctagaaaagatttctttcttttttcttttttttttttaattatactgtaagtttt

SEQ ID NO: 20375 - DNA, 120 bp, synthetic construct
  source 1..120: mol_type = other DNA
tccctagaaaagatttcttgtggagtttttaaaaagtcctttgaaacaattcttttcttttccttttttttttttttcgatacagagttttgctcttgttgcccaggctagagtgcaatg

SEQ ID NO: 20376 - DNA, 120 bp, synthetic construct
  source 1..120: mol_type = other DNA
agtagagatggggtttctccatgttggtcaggctgttctcgaactcccaacctcaggtgatccacccacctcggcctcccaaagtgctgggattacaggcatgagctaccacgcccaact

SEQ ID NO: 20377 - DNA, 120 bp, synthetic construct; identical to SEQ ID NO: 6189
  source 1..120: mol_type = other DNA

SEQ ID NO: 20378 - DNA, 120 bp, synthetic construct
  source 1..120: mol_type = other DNA
cctggcctggccctattttatctgggtctgacaaaagttatttcatcctagtatctgcaatttttccgcagaaaattacagagacgcacagtgaatgtgaaaggagggaaattaacaata

SEQ ID NO: 20379 - DNA, 120 bp, synthetic construct
  source 1..120: mol_type = other DNA
catgtcaatgcttgttaagaaagaatggcaacaactgtgctgccttacagatcagcaccttctgcagtctgcgagcccaaccttagatccatttgtaggcaacagtaaaaggtctcatat

SEQ ID NO: 20380 - DNA, 120 bp, synthetic construct
  source 1..120: mol_type = other DNA
aaatcaagtgcatattcagcctcttagtactctgggttggtgttaccgtactgacgaaggcgatccattgatgaaaaacaaactgacctaaagaaatgtaaataaatgcttgcagtcagc

SEQ ID NO: 20381 - DNA, 120 bp, synthetic construct
  source 1..120: mol_type = other DNA
cctgatgagaactttaaaaatgttaacttggtaatggatggaatcctcctcattcaaggttacccctgtgcaagtcaagctcaagtcagcctgaaggtgcaaaccccatggactcagcca

SEQ ID NO: 20382 - DNA, 120 bp, synthetic construct; identical to SEQ ID NO: 6190
  source 1..120: mol_type = other DNA

SEQ ID NO: 20383 - DNA, 120 bp, synthetic construct
  source 1..120: mol_type = other DNA
actaatcaaagtacagatgctcttcaatttaaaatggggttatgtttcaataaaaccattgtaactgaaaaatattttcaagtggaaaatgtatttaatgcacctaacctactgaatata

SEQ ID NO: 20384 - DNA, 120 bp, synthetic construct
  source 1..120: mol_type = other DNA
atacagtacagtatagagtacagtatcagttgttaccatcataattgtgtggctgatgggagctgcagctcactactgctgtccagcaccgtcacagagtatcatactctctaacccagg

SEQ ID NO: 20385 - DNA, 120 bp, synthetic construct
  source 1..120: mol_type = other DNA
ggattatgctgttgtaattgaagtcccaagacaattgaccataaaacaggttatctggttgggcctgatctaaccacatgaactccttaaggggcagaaaaaacaaagatcaaagagaag

SEQ ID NO: 20386 - DNA, 120 bp, synthetic construct; identical to SEQ ID NO: 6191
  source 1..120: mol_type = other DNA

SEQ ID NO: 20387 - DNA, 120 bp, synthetic construct
  source 1..120: mol_type = other DNA
acctgtgagcctctccccaagcagaacccatttatcctacacaggtgtcatcagagctgattcctttctatgcccctttatctctaatgtccctattctgctcctgttttcacttcacca

SEQ ID NO: 20388 - DNA, 120 bp, synthetic construct
  source 1..120: mol_type = other DNA
cagaagtgacagtatgtttgtggggtccacttgtaacctgggaaccacttgttttggcctggaaacctcgctctgtcccgaggtcagaatccacggtcactaggtggagaggaaacatct

SEQ ID NO: 20389 - DNA, 120 bp, synthetic construct
  source 1..120: mol_type = other DNA
tccagttgctgaaagccaaaggtgacaatggggaggtctcaacctgaggaggaggccaaaagagtccggtcttctgttctcagcccgctgaccacacacaagtgccgatgttctgctctc

SEQ ID NO: 20390 - DNA, 120 bp, synthetic construct; identical to SEQ ID NO: 6192
  source 1..120: mol_type = other DNA

SEQ ID NO: 20391 - DNA, 120 bp, synthetic construct
  source 1..120: mol_type = other DNA
gcctgaccaatatggagaaatcctctctctactaaaaatacaaaattagccgggcatggtggtgcattcctgtaatcccagctactcaggaggctgaggcaggagaatctcttgagcctg

SEQ ID NO: 20392 - DNA, 120 bp, synthetic construct
  source 1..120: mol_type = other DNA
gatttacagaaaagttgcaaagatagtacatagttctcctatgttccacattcagtttcctctattattaatgtcttattttattatacatttgtgacaggttatgaaacaatattgata

SEQ ID NO: 20393 - DNA, 120 bp, synthetic construct
  source 1..120: mol_type = other DNA
ctggtctgtgacaatttctcagacctcgtttttgataatttggtatttcttgaggagtactagtgaggcatattgtaaaatgtcccttaatttgagtgtggttgacagggctataggttt

SEQ ID NO: 20394 - DNA, 120 bp, synthetic construct
  source 1..120: mol_type = other DNA
aaatgattatgttaacctccatcacttggctagggcagtgtttcccagtctataatatataatttttaatagcatcccaaaaagactaaaacacttgcccttgcatgaagaaccctgtct

SEQ ID NO: 20395 - DNA, 120 bp, synthetic construct; identical to SEQ ID NO: 6193
  source 1..120: mol_type = other DNA

SEQ ID NO: 20396 - DNA, 120 bp, synthetic construct
  source 1..120: mol_type = other DNA
ttccaatcttttctccctcttcccagccccttgataggaaaccctgggaaaactaaaaagtatactgttttttctttaactccctattcctttcctcttctgagggttgttgttgttgtt

SEQ ID NO: 20397 - DNA, 120 bp, synthetic construct
  source 1..120: mol_type = other DNA
tttgagggagtctcactctgtcgcccaggctgaagtgcagtggcacgatttcggctcactgcaacctctgcctccgggtttcaagccattctcctgcctcagcctcctgagtagctagga

SEQ ID NO: 20398 - DNA, 120 bp, synthetic construct
  source 1..120: mol_type = other DNA
ccaaagtgctggcattacaggtgtgtgccactgcccccagccccattgttaacatcttatatcactattatacatttttcacaaccagtgagacaatattaatatagtatcactaaactt

SEQ ID NO: 20399 - DNA, 120 bp, synthetic construct; identical to SEQ ID NO: 6194
  source 1..120: mol_type = other DNA

SEQ ID NO: 20400 - DNA, 120 bp, synthetic construct
  source 1..120: mol_type = other DNA
cgaggatatcacattgtatttagtcctaatcatgtctccttaaggctcctccaggttgactttgttttcaatgactgtcttagtatgttgagtattactataacagaataacttgaaact

SEQ ID NO: 20401 - DNA, 120 bp, synthetic construct
  source 1..120: mol_type = other DNA
ttggagaaggggaaaagtgagtggcatgtgcaaaaacatcacatggggagacagggaagcaagagagagtctaggaaaccaaacttgcttttataacaacctgctttttggtaactaacc

SEQ ID NO: 20402 - DNA, 120 bp, synthetic construct
  source 1..120: mol_type = other DNA
cattgagaacttttttttttttgcctgaggttgggagtttgagaccagcctcaccaacatggataaaccctgtctctactaaaaatagaaaattagccaggtgtgatggcacatgcctgt

SEQ ID NO: 20403 - DNA, 120 bp, synthetic construct; identical to SEQ ID NO: 6195
  source 1..120: mol_type = other DNA

SEQ ID NO: 20404 - DNA, 120 bp, synthetic construct
  source 1..120: mol_type = other DNA
gatgggtgtgtttaaggggcaatgattgtgatggagtctcaaatatttcctgacagattttctgatgtgtaacaattttcctgaaaatgcaaatgattcagatcttttctttatctttca

SEQ ID NO: 20405 - DNA, 120 bp, synthetic construct
  source 1..120: mol_type = other DNA
gctgaggcaggagaatcccgtgaaccagggaggcagaagtttgcagtgagccgagatcgcgccattacactccagcctgggcgacagagtgagactctgtccgccccgcgcccccctccc

SEQ ID NO: 20406 - DNA, 120 bp, synthetic construct
  source 1..120: mol_type = other DNA
aggtaaacatctctttcacttctgtatcactttctttctttctttctttctttcttttttgagacggagtctcgccctttaagtgcagttgcgctgtctctgctcactgcaagctccgcc

SEQ ID NO: 20407 - DNA, 120 bp, synthetic construct; identical to SEQ ID NO: 6196
  source 1..120: mol_type = other DNA

SEQ ID NO: 20408 - DNA, 120 bp, synthetic construct
  source 1..120: mol_type = other DNA
ccgccaccacgcccggctaatttttttgtatttttagtagagacgaggtttcacctcgttagccaggatggtctcgatctcctgacctagtgatccgcccacctcggcctcccaaagtgc

SEQ ID NO: 20409 - DNA, 120 bp, synthetic construct
  source 1..120: mol_type = other DNA
aagtcaagcgattctcctgcctcagccttccgagtagctgggattacaggcatgcaccaccacgcctgcctaatttgtattttcagtagagagggggtttctccatgttggtcaggctgg

SEQ ID NO: 20410 - DNA, 120 bp, synthetic construct
  source 1..120: mol_type = other DNA
ggaatgaattaaagtcattaaatgaggactaggttgctatgcacttggctgtttctggacttcctgtgctgttccattggttggtctattcattcaccagtgccacactgttctagtgac

SEQ ID NO: 20411 - DNA, 120 bp, synthetic construct; identical to SEQ ID NO: 6197
  source 1..120: mol_type = other DNA

SEQ ID NO: 20412 - DNA, 120 bp, synthetic construct
  source 1..120: mol_type = other DNA
gatatgtagaagctgagttatgaagacacaaaggcatatgaatgatgcaatggactttggggacttgagaggaagaataggagggggcaagggacagaagactacaaggtgcagtgtata

SEQ ID NO: 20413 - DNA, 120 bp, synthetic construct
  source 1..120: mol_type = other DNA
tttttttttttttttttttgaaatggactctcattctgtcacccaggctggagtgcagtggtgtgacctcggctcaccacaacctccacttcccaggttcaagccattctcctgcctcag

SEQ ID NO: 20414 - DNA, 120 bp, synthetic construct
  source 1..120: mol_type = other DNA
tcctccaacctcagcctgccaaagtgctgagattacaggcgtgagacaccgcacccggcccgatttgttcatatctaatttttaaatttcagatgtgttttaatgttttcatttaaagtt

SEQ ID NO: 20415 - DNA, 120 bp, synthetic construct; identical to SEQ ID NO: 6198
  source 1..120: mol_type = other DNA

SEQ ID NO: 20416 - DNA, 120 bp, synthetic construct
  source 1..120: mol_type = other DNA
caggttttcaccacgttggccaggctggtcttgaattcctgatctcaggtgatctgcctgtctcagcctcccaaagcgctgggattagtcgtgagccacctcgcccggcctagtcccttc

SEQ ID NO: 20417 - DNA, 120 bp, synthetic construct
  source 1..120: mol_type = other DNA
tcactgcaagctccgcctcccaggttgaagcgattctcctgcctcagcctcctgagcagctgggactacaggtgcgtgccaccatgcccagctaatttttgtatttttaatagaggtgga

SEQ ID NO: 20418 - DNA, 120 bp, synthetic construct
  source 1..120: mol_type = other DNA
ttttttttttttttttttttttttttttttttttgagaaggagtctggctcttgttgcccaggctagagtgcaatggcgccatattgtagcaggacgagccgcagacaaaactcctcaga

SEQ ID NO: 20419 - DNA, 120 bp, synthetic construct; identical to SEQ ID NO: 6199
  source 1..120: mol_type = other DNA

SEQ ID NO: 20420 - DNA, 120 bp, synthetic construct
  source 1..120: mol_type = other DNA
cttcgggagtagctgggactacaggcgcctgcaaccacgcccggctaattttttgtatttttagtagagacggggtttcactgtgttacccaggacagtatcgatctcctgacctcgtga

SEQ ID NO: 20421 - DNA, 120 bp, synthetic construct
  source 1..120: mol_type = other DNA
tgatggaatttcctatataggtttttaggacactttttctcttctcttgctcattttaagattttttttcctttacattgagtttagattgtctgatgactatttgtcttggtgaagtcc

SEQ ID NO: 20422 - DNA, 120 bp, synthetic construct
  source 1..120: mol_type = other DNA
tcctcaattatttcctcaagtagattttccacactttttacccttcattctcccttaggaatacctatgattcatgggtacagatgttttacataaccccatacttcctgaaggctttgt

SEQ ID NO: 20423 - DNA, 120 bp, synthetic construct; identical to SEQ ID NO: 6200
  source 1..120: mol_type = other DNA

SEQ ID NO: 20424 - DNA, 120 bp, synthetic construct
  source 1..120: mol_type = other DNA
gtttcactgtgttagccaggatggtctagatctcctgacctcgtgatctgcccgcctcagcctcccaaaatgctgggattacaggcatgagccaccgcgcccagcccaggtggtttactt

SEQ ID NO: 20425 - DNA, 120 bp, synthetic construct
  source 1..120: mol_type = other DNA
tttgaattatttatttggtatttcaaagattttatttttgttaggatctattgctagaaagttagtgtaatgttttggggatgtcataacactcttttttcagagtatgttttcaaaaca

SEQ ID NO: 20426 - DNA, 120 bp, synthetic construct
  source 1..120: mol_type = other DNA
tttatttcatttgggcaggatttttttttccctttactatgtgactataatgtatgttgtttaaggtcctttgcatttggttgtgaatgctttcagtggcaaagacgctgtagttgtccc

SEQ ID NO: 20427 - DNA, 120 bp, synthetic construct; identical to SEQ ID NO: 6201
  source 1..120: mol_type = other DNA

SEQ ID NO: 20428 - DNA, 120 bp, synthetic construct
  source 1..120: mol_type = other DNA
gctcagcaccagagagggggacatagctgagtagagctggatccccaagcctgccccacaatggtgagcacaggcagcagctttcaggcaggagtgatggcatgggaaacttctggtgaa

SEQ ID NO: 20429 - DNA, 120 bp, synthetic construct
  source 1..120: mol_type = other DNA
ccagacactactctctatctccaactgcaatgtagttgagactcattaaagatgtcttctcctcagctcaccatttaaatgtctttggtgcagagcatcctccctcaaccccaaacacat

SEQ ID NO: 20430 - DNA, 120 bp, synthetic construct
  source 1..120: mol_type = other DNA
gcctcagcctctcgagtacctgggattacaggcatgcgccaccacgcctggctaattgtttttgtagttttagtagagacagggtttctccatgttggtcaggctggtctcgaactcctg

SEQ ID NO: 20431 - DNA, 120 bp, synthetic construct; identical to SEQ ID NO: 6202
  source 1..120: mol_type = other DNA

SEQ ID NO: 20432 - DNA, 120 bp, synthetic construct
  source 1..120: mol_type = other DNA
ggaactacactccttcagcgcagagctgaacacagtgtccacgactctgctggaagtggtgcagtcactcagcccacaaacaaggagctcttggacacagatgagtacatggtctggcct

SEQ ID NO: 20433 - DNA, 120 bp, synthetic construct
  source 1..120: mol_type = other DNA
tggctgccacaatccaagtgggcactgggggcatggctgcaggagcttctgtgatgtgaatatacaaaggttggggttccctgggaaggacacagtcccctgatggctacactcctaata

SEQ ID NO: 20434 - DNA, 120 bp, synthetic construct
  source 1..120: mol_type = other DNA
tgtgagggcagaggagctctccgacagttcagatactggtggtcttccttagggacgacgggagtcaaaacactcctatcttacctttcaatgaaataccaagtctctcaaggttcctag

SEQ ID NO: 20435 - DNA, 120 bp, synthetic construct; identical to SEQ ID NO: 6203
  source 1..120: mol_type = other DNA

SEQ ID NO: 20436 - DNA, 120 bp, synthetic construct
  source 1..120: mol_type = other DNA
ttcgttcacacgagagctgattatttaaaagagcctagcagctctcttgctctttctctctccatgtgacacacctgctcttcctttgccttctgccacaagtaaaagcttcctgagact

SEQ ID NO: 20437 - DNA, 120 bp, synthetic construct
  source 1..120: mol_type = other DNA
ggactaatacagtctccctctgctgcctccaaggtcactccttgatcttcactgctttaggcagccttttaccctactttgtagttggagcttcaggggcttaacatcttaaaagtttta

SEQ ID NO: 20438 - DNA, 120 bp, synthetic construct
  source 1..120: mol_type = other DNA
caagcgattctcctgcctcagcctcccaagtaggtgggattacaggcgcgcaacaccatgctcggctaatttttgttgttttagtagaaacagtgtttcaccatgttggtcaggctggtc

SEQ ID NO: 20439 - DNA, 120 bp, synthetic construct
  source 1..120: mol_type = other DNA
aaatgatttttaaaaaataattactatgtataaaataacaaataggtaatttgggtaatttcattttgaactctttggctaaatattttatgtacatattgtctcagcaatcaggaatta

SEQ ID NO: 20440 - DNA, 120 bp, synthetic construct; identical to SEQ ID NO: 6204
  source 1..120: mol_type = other DNA

SEQ ID NO: 20441 - DNA, 120 bp, synthetic construct
  source 1..120: mol_type = other DNA
cccgagtagctgggattacaggcgtccatcaacagtcccggctaatttttgtatttttggtagaggcggggtttcaccatgttggccaggctggtcttgaacccctgacctcaggtgatc

SEQ ID NO: 20442 - DNA, 120 bp, synthetic construct
  source 1..120: mol_type = other DNA
ttcatcctaaaaatttccctttgaatgttctttatcccttctccctccaacctttgataaccattaacctgttttctgtccccatagatctgctttttccagaatggtatatgaattgag

SEQ ID NO: 20443 - DNA, 120 bp, synthetic construct
  source 1..120: mol_type = other DNA
ttttttttgagacagagttttgcccttgttgcccaggctggagtgcaatggcgcgatattagctcgctgcaacctctgcctcccaggttcaaatgattcttctgcttcagcttcctgagt

SEQ ID NO: 20444 - DNA, 120 bp, synthetic construct; identical to SEQ ID NO: 6205
  source 1..120: mol_type = other DNA

SEQ ID NO: 20445 - DNA, 120 bp, synthetic construct
  source 1..120: mol_type = other DNA
gtcttggctcactccaacctctgcctcccaggttcaagtgattctcctgcctcagcctcccgaggagctgggactacagttgctcgccaccacgcctagctaattttttctttttgtatt

SEQ ID NO: 20446 - DNA, 120 bp, synthetic construct
  source 1..120: mol_type = other DNA
gcctgacaatagctcatttcttatgatccatatggttataccacagtttgcttagtcttgcatggctgaaagatatcttggttgtttacagtttttagtgaacatatgtaaagctgctat

SEQ ID NO: 20447 - DNA, 120 bp, synthetic construct
  source 1..120: mol_type = other DNA
tcaaagtggctttaccgttttccattcccattagcagtgagtgggaattcttgttgctctgtatattttcagcattttttattgtaagtttaaaaaattttagctactctaatagtgtag

SEQ ID NO: 20448 - DNA, 120 bp, synthetic construct; identical to SEQ ID NO: 6206
  source 1..120: mol_type = other DNA

SEQ ID NO: 20449 - DNA, 120 bp, synthetic construct
  source 1..120: mol_type = other DNA
agcatattttcaagtattatttaccacccatatatcttctttggtggtgtctgttgagatctttcacccacttctaaaatcaagatttttttccccaattattgtgttttaattttgttc

SEQ ID NO: 20450 - DNA, 120 bp, synthetic construct
  source 1..120: mol_type = other DNA
aactattaattatgataaagtctaattgatttgttttctctttcatggattgtatttttggtgttttatctaaaaactcaaactcaaggttaagattttctcctttatattcttccagaa

SEQ ID NO: 20451 - DNA, 120 bp, synthetic construct
  source 1..120: mol_type = other DNA
ttaccctgtggcccaggctggagtgcaatggcgtgatctctgctcactgcaacctctgcctcccaggttcaagtgattcttctacctcagcctcccgagtagctgggattacaggcatga

SEQ ID NO: 20452 - DNA, 120 bp, synthetic construct; identical to SEQ ID NO: 6207
  source 1..120: mol_type = other DNA

SEQ ID NO: 20453 - DNA, 120 bp, synthetic construct
  source 1..120: mol_type = other DNA
ttcagttgaaaatattatctaacttcccttatgttttcttctttgatccgtaggttatttagaaggaagatttaaaattttcaatacttttttgcccctagacaacttattattgatttc

SEQ ID NO: 20454 - DNA, 120 bp, synthetic construct
  source 1..120: mol_type = other DNA
tacaaaatatatattctggagctgttgaacacagtgactgtaaatgtcagatcaagacggttgatagtgttgttcatttgtatttttaaaaaactaagaaaaagctgggcgcggtggctc

SEQ ID NO: 20455 - DNA, 120 bp, synthetic construct
  source 1..120: mol_type = other DNA
gggcgtggtggtgcatgcctgtaatcccagctactcgggaggctgaggcaggataatcgcttgaacccaggaggcagaggttgcagtgagcggagattgtgccattgcactccagcctgg

SEQ ID NO: 20456 - DNA, 120 bp, synthetic construct; identical to SEQ ID NO: 6208
  source 1..120: mol_type = other DNA

SEQ ID NO: 20457 - DNA, 120 bp, synthetic construct
  source 1..120: mol_type = other DNA
acaaattatgaacacatggactggtcattctcataattgttctcatgtatgtaacgtgtcatttttctctgattattctcacgattttctgtgaccataggctgctcagggctggacttg

SEQ ID NO: 20458 - DNA, 120 bp, synthetic construct
  source 1..120: mol_type = other DNA
agaaaccccctcctgatctacacacacacacacacatgcacacacaacttctaacagggcccttctcgtttttctctcccccctggttccttccactctcccccttctcttatgatccat

SEQ ID NO: 20459 - DNA, 120 bp, synthetic construct
  source 1..120: mol_type = other DNA
ggggacaggagggcaaggccccattttggaggctgagggactaggtcatgtggtagcaatggtttgggggtggatgagccccagatatgatcccactgttttggcctggaggtatctctt

SEQ ID NO: 20460 - DNA, 120 bp, synthetic construct; identical to SEQ ID NO: 6209
  source 1..120: mol_type = other DNA

SEQ ID NO: 20461 - DNA, 120 bp, synthetic construct
  source 1..120: mol_type = other DNA
tagatttgtttgtcttgcaacgtgaggcaattgtggtgtagcaagatctggctctagaattcttatggcaaaatagctgtcatagaatccaactagaatgagagtccagggcctgggttg

SEQ ID NO: 20462 - DNA, 120 bp, synthetic construct
  source 1..120: mol_type = other DNA
atcaaagtccaaaagaattatgtacaatttcatttctgatgtctctggctgtgctttcgaaagggcaggaagagccatggaaagaggctgaaaggcccctctgggaattctcaaatctct

SEQ ID NO: 20463 - DNA, 120 bp, synthetic construct
  source 1..120: mol_type = other DNA
ctgtgttcagcaggatggactctgcagtgaggcgcagcccctgtctccccactgccccagatcagaagcatgtttccttatcttgttttccacacactccttttctttttctgtcttgtg

SEQ ID NO: 20464 - DNA, 120 bp, synthetic construct
  source 1..120: mol_type = other DNA
gcgaatcacaaggtcaggagtttgagaccagcctggccaacatggtgaaaccccatctctacaaaaaaaatcaaaataaaaatacaaaatttagccgggcgtggtggcatgtgcctataa

SEQ ID NO: 20465 - DNA, 120 bp, synthetic construct; identical to SEQ ID NO: 6210
  source 1..120: mol_type = other DNA

SEQ ID NO: 20466 - DNA, 120 bp, synthetic construct
  source 1..120: mol_type = other DNA
ctatctccttgcaaggtaggttcatcaacacttttacatttatgccccagcaaaaatctttttttggctcacacctgccctccttcatccagccaactgacatatttgctgaggtcttgc

SEQ ID NO: 20467 - DNA, 120 bp, synthetic construct
  source 1..120: mol_type = other DNA
tgaggctcttgtttctggtcactgggaaaagtccctggcccacctctctattgacacctgggagactctatcgctactttgaataaagcactgattttcagcatttattctgtatccaca

SEQ ID NO: 20468 - DNA, 120 bp, synthetic construct
  source 1..120: mol_type = other DNA
ctcccagaacacttcatattcattttctcacctgtgtttggttggttgcaaggtggcttccacacccccaagtttatttcaagtagcagaaacacttgcttagaaaacaagtactttggg

SEQ ID NO: 20469 - DNA, 120 bp, synthetic construct; identical to SEQ ID NO: 6211
  source 1..120: mol_type = other DNA

SEQ ID NO: 20470 - DNA, 120 bp, synthetic construct
  source 1..120: mol_type = other DNA
agagaattctctgacctcaaatttcatgtagcagctgtaaggtggagctggcagcatctgtccccacctctgggtacacagcagaacgtgccagctttagggaccccggaggacacagct

SEQ ID NO: 20471 - DNA, 120 bp, synthetic construct
  source 1..120: mol_type = other DNA
attcatgtctctgataaagaaaagaaatgccagcaatccagcactgagaagggaagctacgagaccacattttctgcatgtggagaagacacgtctaatggagaggtgggaacttgtctc

SEQ ID NO: 20472 - DNA, 120 bp, synthetic construct
  source 1..120: mol_type = other DNA
tactgaaataaggctattacaataaatcatctctgtggttgatttttcacttaaggatgggataactggggaaattggtgcctgtagtgcaggttttaaagaagctcccagaagcccttc

SEQ ID NO: 20473 - DNA, 120 bp, synthetic construct; identical to SEQ ID NO: 6212
  source 1..120: mol_type = other DNA

SEQ ID NO: 20474 - DNA, 120 bp, synthetic construct
  source 1..120: mol_type = other DNA
tttcaatttcgtgcctctgcttttcctccccctcctccaaccggaaagtcaggaccaagggaatggatgaaggcattaaaggtataaatgagaatgggtgataatttccctttctctgag

SEQ ID NO: 20475 - DNA, 120 bp, synthetic construct
  source 1..120: mol_type = other DNA
ggctctgggctgctgctttcttttattgagaatctaagaggtgctgagcattcagttaaaacgggactcaagggttcctgcattgtcctctgccttaattgcatttgaaaatatattttg

SEQ ID NO: 20476 - DNA, 120 bp, synthetic construct
  source 1..120: mol_type = other DNA
taacctggtgttgggctatggttgaggatgtagataaatcaagagtgggtgttactgagtgaagggtacagtgaaggtcactttactcttctgtctacttctgtgtttgcttaaaatatt

SEQ ID NO: 20477 - DNA, 120 bp, synthetic construct; identical to SEQ ID NO: 6213
  source 1..120: mol_type = other DNA

SEQ ID NO: 20478 - DNA, 120 bp, synthetic construct
  source 1..120: mol_type = other DNA
tgccccaaggaactccttcttcaccctctgagagaaagtgtcacaggaccacagacccttggtcttcatagatcccataacctcccccgaattgtatgtaaaattgtgtgggaatgcagg

SEQ ID NO: 20479 - DNA, 120 bp, synthetic construct
  source 1..120: mol_type = other DNA
agatgatggaaaactcgatgggagggagacacggtgccttgacccagagtcaatgccaataaacttggctaggacatagtacccagtcatttaatcaaaacctaatctagatgttgctgt

SEQ ID NO: 20480 - DNA, 120 bp, synthetic construct
  source 1..120: mol_type = other DNA
cagtttcccagaaaagaagaaattctgtcttaagactaccatatcaacttctgtctgcattttcagcctgctggcgtatcctacagatttcacacttgccaccgtaataattgcatgagt

SEQ ID NO: 20481 - DNA, 120 bp, synthetic construct
  source 1..120: mol_type = other DNA
tgtttctctgttgaatccagaataatacagattttggtacttagagtgattctagaggaagagaatccttttaaaacgtttatagccaacaataaaaaactttattaaaaatgttgaaaa

SEQ ID NO: 20482 - DNA, 120 bp, synthetic construct; identical to SEQ ID NO: 6214
  source 1..120: mol_type = other DNA

SEQ ID NO: 20483 - DNA, 120 bp, synthetic construct
  source 1..120: mol_type = other DNA
gtaagcattatttccaaagtaaaattaagtcacatttgtggttgctagtgaatgcggcacaaatggaccctgaagattcaggcattgttctgctctggagtaggacatctgtggctccag

SEQ ID NO: 20484 - DNA, 120 bp, synthetic construct
  source 1..120: mol_type = other DNA
tgcaaacaaaactgaaaatatcagttcataatgtgtttccatacaccttgcccttattcaaatggttatgaacaagtggtcttccattttctattgccgctgtaattatttgttcctgat

SEQ ID NO: 20485 - DNA, 120 bp, synthetic construct
  source 1..120: mol_type = other DNA
cttaataggacaacgttgatttgagccaatacttctggcatgttcatttcaatttgtaacttttttctgaattcatccccacaaggtgagctggaaaactgcaaccataaccaaagctag

SEQ ID NO: 20486 - DNA, 120 bp, synthetic construct
  source 1..120: mol_type = other DNA
ccagccaacagtagtagctgaaaagcgagagcacactgatgaagaacactgcgggcacaaagaaaaggaaaagtatgtggagctttgctgtgtatctcttagttcattctactcactaga

SEQ ID NO: 20487 - DNA, 120 bp, synthetic construct; identical to SEQ ID NO: 6215
  source 1..120: mol_type = other DNA

SEQ ID NO: 20488 - DNA, 120 bp, synthetic construct
  source 1..120: mol_type = other DNA
cccagaaacccatgaatagcgtccttgggctgacctatgctcattacaatagtagcaaacacaactctgagagggaagttaagatgctaatgagacgtaagatgtgtgtgctgatatgta

SEQ ID NO: 20489 - DNA, 120 bp, synthetic construct
  source 1..120: mol_type = other DNA
tgtaagactcccgtgaggggagggtactgtctctcttttgagcagctgctctgatcagctgtcagagtgtactttcactttgcaataaattctcttgctgacttttactttggacttgct

SEQ ID NO: 20490 - DNA, 120 bp, synthetic construct
  source 1..120: mol_type = other DNA
tatcttgttgctagggataactttgcccctgctggcagcatgcccctgaggatggcaccctgtggctggcgtcttccttggcttggcctcgggtcactaagcatagcccatggtaggagg

SEQ ID NO: 20491 - DNA, 120 bp, synthetic construct
  source 1..120: mol_type = other DNA
caactgtttaaaaagactcaagaatgtactgtgggaggagagcaggtctggagactcacctgtgtcccccacctgctcatctgcatggccgtgtgcctgacatggtcagaaatgagaaat

SEQ ID NO: 20492 - DNA, 120 bp, synthetic construct; identical to SEQ ID NO: 6216
  source 1..120: mol_type = other DNA

SEQ ID NO: 20493 - DNA, 120 bp, synthetic construct
  source 1..120: mol_type = other DNA
acatggggcacggcagggctcgccttcctgatgatgccgcctatcccagttgcccaccagaagttgcagtgcccagattagttttgtattgatggaaattaaaaaaaaattatattacat

SEQ ID NO: 20494 - DNA, 120 bp, synthetic construct
  source 1..120: mol_type = other DNA
tgtgcttcctgtggggtctattttccagtggctttccctgttggttgcccctgtgactgctgacatcctgccttctggtggaaaccacactcttccttgcccagtgagggttggaaaatt

SEQ ID NO: 20495 - DNA, 120 bp, synthetic construct
  source 1..120: mol_type = other DNA
tggcaagtggcctaggggcaatgtgagcctgagtgtatgacactgtgacacaggacagggtgcgtcacagtgttgcccattgtgactgcagggccaaaaggaaccagggctgagaggaac

SEQ ID NO: 20496 - DNA, 120 bp, synthetic construct; identical to SEQ ID NO: 6217
  source 1..120: mol_type = other DNA

SEQ ID NO: 20497 - DNA, 120 bp, synthetic construct
  source 1..120: mol_type = other DNA
cctatgatgcagtgggaattccactcaggagctttgcagtaacagccgttatgtccccgtaggagcctgaggagcagttctgggattggaatttaagggtgtttgatcaaagggccagaa

SEQ ID NO: 20498 - DNA, 120 bp, synthetic construct
  source 1..120: mol_type = other DNA
ggaaaaaatgatgtccaactctcagtaagttagacatgacttagttgtcctggaacatgtagaggatggacaatgaggctgagggaagtgggtgtgtgggatggagacatcatgtgaacc

SEQ ID NO: 20499 - DNA, 120 bp, synthetic construct
  source 1..120: mol_type = other DNA
tgcaggctgggtgtgatggcaggaaggaggtcctatagttgggctcattgatattcctgaggaaagtgtggccttgaaaaggcagagaactaaatggtgacagtggcctgcaaaagccag

SEQ ID NO: 20500 - DNA, 120 bp, synthetic construct; identical to SEQ ID NO: 228
  source 1..120: mol_type = other DNA

SEQ ID NO: 20501 - DNA, 120 bp, synthetic construct
  source 1..120: mol_type = other DNA
gactgtacactaggaaagggaaacaggcagaatttgggggagtgttgacattgggtgtgagctgatattgatgcctacaggcctacagcaccattatgtccctaccacagtggggcttac

SEQ ID NO: 20502 - DNA, 120 bp, synthetic construct
  source 1..120: mol_type = other DNA
acccccacattgggtcccaagtctctggaataagggctgtcattgtctgaaagccaaagggaaacctctgcaactgacttcatcctggccaaataaaaaatgatattgagtcccagggtg

SEQ ID NO: 20503 - DNA, 120 bp, synthetic construct
  source 1..120: mol_type = other DNA
tgcctgttatcttcacgtaatccagcaatctgtccccaaggaagcctgatggggcctaaagaatgaatgagattacttcagacttgaaaaagtaggagtcataattgcagctgccatgct

SEQ ID NO: 20504 - DNA, 120 bp, synthetic construct
  source 1..120: mol_type = other DNA
gcacaaagtgtgcagctgtggatttggtgagtgcattcctttccattccaatgagaaaaactatacatgaagtgattcatgtgggatccacaacacatttattgataattggcctcaggg

SEQ ID NO: 20505 - DNA, 120 bp, synthetic construct; identical to SEQ ID NO: 6219
  source 1..120: mol_type = other DNA

SEQ ID NO: 20506 - DNA, 120 bp, synthetic construct
  source 1..120: mol_type = other DNA
ctgcctggtgagcctctttgaattctgacaacaccacatcccacatctattgctttgacctacactctaggagaaataggaggggacttgcttcaattaggcctgctgaggaaaggacac

SEQ ID NO: 20507 - DNA, 120 bp, synthetic construct
  source 1..120: mol_type = other DNA
gggattctggagtaaggccatgtcatccacagcagagacatatgcccctgttagaagcaacttttggtatgttactggccttgataagatagaatccttgccatgggacatcaaacaacc

SEQ ID NO: 20508 - DNA, 120 bp, synthetic construct
  source 1..120: mol_type = other DNA
tgagatagaaatggtccatctggattgagcatgaatcctatgttgacacctccagaaaacatccaaacctgaagtggcactaaacaaccaagcagacaaattgaagttagccagccctca

SEQ ID NO: 20509 - DNA, 120 bp, synthetic construct; identical to SEQ ID NO: 6220
  source 1..120: mol_type = other DNA

SEQ ID NO: 20510 - DNA, 120 bp, synthetic construct
  source 1..120: mol_type = other DNA
cctcagtcagcaccactctccagggactgttgacattcctgattcacaggcatggcattgctcttagcacactgtcttcctggtggaacccacttgacagggaagcaggtgcagcatttt

SEQ ID NO: 20511 - DNA, 120 bp, synthetic construct
  source 1..120: mol_type = other DNA
tgaggggtgggtgctgtctttcgggacatggtgcatttattaaatcagagacatctctacagtgccgtgttctcagtaggaagaacatgtgggtccagaaactaaggagtgaaagtgggt

SEQ ID NO: 20512 - DNA, 120 bp, synthetic construct
  source 1..120: mol_type = other DNA
tagaaggtcctggattctaaaggaaggtactcttaaatcaggacaaatgagagcctactgaagaacacattactattgcccccagagagatttggacagtatgtgcccagagaccagcaa

SEQ ID NO: 20513 - DNA, 120 bp, synthetic construct; identical to SEQ ID NO: 6221
  source 1..120: mol_type = other DNA

SEQ ID NO: 20514 - DNA, 120 bp, synthetic construct
  source 1..120: mol_type = other DNA
aggcctatgtctggaagacaagggccaactgtggctagaggactcctctatggccttgctcaactctccttagattgcctgtggtctaggatgtgtccaacaaacctcctctcctgtccc

SEQ ID NO: 20515 - DNA, 120 bp, synthetic construct
  source 1..120: mol_type = other DNA
atctgcttcttggagaacatggaccaacaaaatcatttccatttacacaccagtgacctcttacttttccagtttgtaaaatcctttttattatccaacttcttccacctgctccagttt

SEQ ID NO: 20516 - DNA, 120 bp, synthetic construct
  source 1..120: mol_type = other DNA
attccatagtggttatctacatctgatttatttccttctatttttataatattatccatacataatgtttcccgtttctctccacctattctcttcttgatttttcttttccttcccacc

SEQ ID NO: 20517 - DNA, 120 bp, synthetic construct; identical to SEQ ID NO: 6222
  source 1..120: mol_type = other DNA

SEQ ID NO: 20518 - DNA, 120 bp, synthetic construct
  source 1..120: mol_type = other DNA
atgctatgaaagtggccttgaccagaaataggtcatttgatccttggctcattgacatctccatagattttcggtgtacaatgttcggtctgatgtgcaaggtaattccatcttgcaaag

SEQ ID NO: 20519 - DNA, 120 bp, synthetic construct
  source 1..120: mol_type = other DNA
gaatagcaaataggaatggaaaacacaataggattgcttaaaaaatactgtagaagtacagaatagcagtgctatttagaatcatagtgatgtccaaatcatgtctaccacgtctcatta

SEQ ID NO: 20520 - DNA, 120 bp, synthetic construct
  source 1..120: mol_type = other DNA
ctgacatcatgctaagctagatgtgttggctgaggtatgagattcacattttttctaccttaaaagcaatctgatttggcaaatatttttaaagatgatatttgaatgagaaaattggca

SEQ ID NO: 20521 - DNA, 120 bp, synthetic construct; identical to SEQ ID NO: 6223
  source 1..120: mol_type = other DNA

SEQ ID NO: 20522 - DNA, 120 bp, synthetic construct
  source 1..120: mol_type = other DNA
gcttaattttgcttttaacatatatgcaaattctttgatactctccactttgcagaggtgcaggttcattccctccctgtgagtgtggcctggacttaatgattcacttctatctgatgg

SEQ ID NO: 20523 - DNA, 120 bp, synthetic construct
  source 1..120: mol_type = other DNA
tccatgtggctaggaccgaggcctcccgggaccagacaacaaggaactgaggccttttccaatagccatgtgagtgagccatttttcatgcaaatccccagcccagttgagccctcagat

SEQ ID NO: 20524 - DNA, 120 bp, synthetic construct
  source 1..120: mol_type = other DNA
ttgctttgagctgttacattttcagtaatttgtaatgtaacagtaaaaaaaaatacagcttcacaagagaggatgaatagttgcactttaattttcatttgctctaaatttattagtgtt

SEQ ID NO: 20525 - DNA, 120 bp, synthetic construct; identical to SEQ ID NO: 6224
  source 1..120: mol_type = other DNA

SEQ ID NO: 20526 - DNA, 120 bp, synthetic construct
  source 1..120: mol_type = other DNA
gaatttccatggctaaataggatgtattttattatcattcacaattattgctttatttgaacttcaatttccacctgtgtcccaattaaactcaaaagaaagacccaagcctccctctcc

SEQ ID NO: 20527 - DNA, 120 bp, synthetic construct; identical to SEQ ID NO: 6225
  source 1..120: mol_type = other DNA

SEQ ID NO: 20528 - DNA, 120 bp, synthetic construct
  source 1..120: mol_type = other DNA
ggtggagatggggtttcgctgtgttggccgggctggtctccagctcctaaccgcgagtgatccgccagcctcggcctcccgaggtgccgggattgcagatggagtctcgttcactcagtg

SEQ ID NO: 20529 - DNA, 120 bp, synthetic construct
  source 1..120: mol_type = other DNA
gtctgggaagtgaggagcgtctctgcttggccacccatcgtctgggatatgaggagcccctctgcctggctgcccagtgtggaaagtggggagcgtctctgcccggccgccatcccatct

SEQ ID NO: 20530 - DNA, 120 bp, synthetic construct
  source 1..120: mol_type = other DNA
tgtgaggagcgcctctgctgggccgcggccctgtctgggaggtgaggagtgtctctgcccggccgctccgtctgagaagtgaggaaaccctctgcctggcaaccgccccgtctgagaagt

SEQ ID NO: 20531 - DNA, 120 bp, synthetic construct; identical to SEQ ID NO: 6226
  source 1..120: mol_type = other DNA

SEQ ID NO: 20532 - DNA, 120 bp, synthetic construct
  source 1..120: mol_type = other DNA
ccgcccagtccgggagggaggtggggggtcagccccccgcccggccagccgccccgtccgggaggggggagggggggtcagccccctgcccggccagccgccccgtccgggagggaggtg

SEQ ID NO: 20533 - DNA, 120 bp, synthetic construct
  source 1..120: mol_type = other DNA
tactgggaagtgaggacccctctgcccggccagccgccccgtccgggagggaggtgggggggtcagccccccgcccggccagccgccccgtccgggagggaggtggggggatcagccccc

SEQ ID NO: 20534 - DNA, 120 bp, synthetic construct
  source 1..120: mol_type = other DNA
gtcccccgcccggccagccgccctatccaggaggtgaggggcgcctctgcccggccgcccctactgggaagtgaggagcccctctgcctggccagccgccccgtccgggagggcggtggg

SEQ ID NO: 20535 - DNA, 120 bp, synthetic construct; identical to SEQ ID NO: 6227
  source 1..120: mol_type = other DNA

SEQ ID NO: 20536 - DNA, 120 bp, synthetic construct
  source 1..120: mol_type = other DNA
tcagggttagatggattgagggcggtgcaagatgtgctttgttaaacagatgcttgaaggcagcatgctcgttaagagtcatcaccactccctaatcttaagtacccagggacacaaaca

SEQ ID NO: 20537 - DNA, 120 bp, synthetic construct
  source 1..120: mol_type = other DNA
cacccaagaatgatcaataaaaataaaaaataaaataaaaaaaaaaaaaaaaaaaaaaaaaaaaaaaagaaagacccaagccttgctaggctgattctatcatcccccccatgatagacg

SEQ ID NO: 20538 - DNA, 120 bp, synthetic construct
  source 1..120: mol_type = other DNA
tatccctggtcgggctgtcctcatctggcgagcccctgaaaggactgggttcttcctgatcagagagattcacagtgtgagagggattcagtgtgagggggttcctccaatgtggattct

SEQ ID NO: 20539 - DNA, 120 bp, synthetic construct; identical to SEQ ID NO: 6228
  source 1..120: mol_type = other DNA

SEQ ID NO: 20540 - DNA, 120 bp, synthetic construct
  source 1..120: mol_type = other DNA
gaccttcctctctacaaaaaggaattttttttttttttaatttacctgagcacggtggtacttgcctgtagtcccaggtactccagacactgaggcagggggacctctagaggccaggag

SEQ ID NO: 20541 - DNA, 120 bp, synthetic construct
  source 1..120: mol_type = other DNA
ttgtggtaatttgttatgcagtcatacaaaagtcatacacagactcaacagacacatggaatgaatttataaattgataagcacactacatgagtaaaataaaatatttcctttttccag

SEQ ID NO: 20542 - DNA, 120 bp, synthetic construct
  source 1..120: mol_type = other DNA
caagtgcctgacattctagaagcttcacaagaccgaagtggagccactggagtgttttaggtgaagaaacgacacactttgactcacagtagcaggaccactgtggagagaacactcagg

SEQ ID NO: 20543 - DNA, 120 bp, synthetic construct; identical to SEQ ID NO: 6229
  source 1..120: mol_type = other DNA

SEQ ID NO: 20544 - DNA, 120 bp, synthetic construct
  source 1..120: mol_type = other DNA
gctttttctgctttttttcaggtttaaaaaaatactaagtgttccaataaaacatgcacaccacttagatgcggatacttcctaaaaacaggaagtgcatgagcactggtgaggggcatt

SEQ ID NO: 20545 - DNA, 120 bp, synthetic construct
  source 1..120: mol_type = other DNA
actcagggctatggaatgaaggtaattttagaatacaacaagagtcacagatacatagtctgggaaagcaaaacttaggagctctgagagttgtacaactgtaatgcatttagacacatt

SEQ ID NO: 20546 - DNA, 120 bp, synthetic construct
  source 1..120: mol_type = other DNA
aggagatcgagaccatcctggctaacacggtgaaacccgtctctacaaaaaaattagccgggcgtggtggcgggcatctgtagtctcagctactcgggaggctgaagcagaagaatggcg

SEQ ID NO: 20547 - DNA, 120 bp, synthetic construct; identical to SEQ ID NO: 6230
  source 1..120: mol_type = other DNA

SEQ ID NO: 20548 - DNA, 120 bp, synthetic construct
  source 1..120: mol_type = other DNA
aagaagaagaagaagaagaagaagaagaagaagaagaagaagaagaagaagaagaagaagaagaagaagaagaagaagaagaagaagaagaaaaggaagaagaagaaactgtctctacac

SEQ ID NO: 20549 - DNA, 120 bp, synthetic construct
  source 1..120: mol_type = other DNA
gatttcggaatgaataatgaagggagatggactgggtccatgccgaaggtttctccctggtttctcagcccccgggcgaagactcagggagacattgagacacaccctgcacaggagggg

SEQ ID NO: 20550 - DNA, 120 bp, synthetic construct
  source 1..120: mol_type = other DNA
tctctttctctcccaacccgtgtcaggtccttcttcctggatactcataacgcggccccatttctcactcccattgggcgtcgcgtttctagagaagccaatcagtgtcgccgcagttcc

SEQ ID NO: 20551 - DNA, 120 bp, synthetic construct; identical to SEQ ID NO: 6231
  source 1..120: mol_type = other DNA

SEQ ID NO: 20552 - DNA, 120 bp, synthetic construct
  source 1..120: mol_type = other DNA
ggttcgacagcgacgccgcgattccgaggatggagccgcgggagccgtgggtggagcaagaggggccgcagtattgggagtggaccacagggtacgccaaggccaacgcacagactgacc

SEQ ID NO: 20553 - DNA, 120 bp, synthetic construct
  source 1..120: mol_type = other DNA
gtctccggatccgaaatctaccccgaggcagcgggacccgcccagaccctccacccgggagagtcccaggcgcctttacccaggttcattttcagtttaggccaaaatccccgcgggttg

SEQ ID NO: 20554 - DNA, 120 bp, synthetic construct
  source 1..120: mol_type = other DNA
tcaccagcacgcgtacgacggcaaggattacatctccctgaacgaggacctgcgctcctggaccgcggcggacaccgtggctcagatcacccagcgcttctatgaggcagaggaatatgc

SEQ ID NO: 20555 - DNA, 120 bp, synthetic construct; identical to SEQ ID NO: 6232
  source 1..120: mol_type = other DNA

SEQ ID NO: 20556 - DNA, 120 bp, synthetic construct
  source 1..120: mol_type = other DNA
aacagccttgggccccgtgacttttctctcaagttttgttctctgcctcacactcaatgtgtttgaggctctgattccagtccctcggcctccacttaggtcagggccagaagtccctgc

SEQ ID NO: 20557 - DNA, 120 bp, synthetic construct
  source 1..120: mol_type = other DNA
ttggtcacatgggtgctgctggggtttcccatgaggagtgcaaagtgcctgaattttctgactcttctcagatcctccaaaggcacacgttgcccaccaccccatctctgaccatgaggc

SEQ ID NO: 20558 - DNA, 120 bp, synthetic construct
  source 1..120: mol_type = other DNA
aaccttccagaagtgggccgctgtggtggtgcctcctggagaggaacagagatacacatgccatgtgcagcacgaggggctgccccagcccctcatcctgagatggggtaaggagggaga

SEQ ID NO: 20559 - DNA, 120 bp, synthetic construct; identical to SEQ ID NO: 6233
  source 1..120: mol_type = other DNA

SEQ ID NO: 20560 - DNA, 120 bp, synthetic construct
  source 1..120: mol_type = other DNA
acccagcctgggccctgtgtgccagcacctactcatttgtaaagctcctgtgaaaatgaaggacagattcttcacttcgatgattatggtggtgatgggacctgatcccagcagtcacaa

SEQ ID NO: 20561 - DNA, 120 bp, synthetic construct
  source 1..120: mol_type = other DNA
cttgatcctgccctggatctacagttacacttttctggaaacttctctgggatcaaagactaggggtttgctctaggaccttatggccctgcctcctttctggcctctcacaggacattt

SEQ ID NO: 20562 - DNA, 120 bp, synthetic construct
  source 1..120: mol_type = other DNA
acagttcctctagccacatctgtgggctctgaccaggtcctgtttttgttctaccccaatcactgacagtgcccagggctctggggtgtctctcacagctaataaaggtgacactccagg

SEQ ID NO: 20563 - DNA, 120 bp, synthetic construct; identical to SEQ ID NO: 6234
  source 1..120: mol_type = other DNA

SEQ ID NO: 20564 - DNA, 120 bp, synthetic construct
  source 1..120: mol_type = other DNA
agagagattaagattcttttaatggtgaaaagatatacatatatttggaactagccagcttgactcagtttaggtgatcccaattttggtggcaacaaccaaagcatcgtagtcaggagc

SEQ ID NO: 20565 - DNA, 120 bp, synthetic construct
  source 1..120: mol_type = other DNA
acagtgaacacaagtaggctgttgttttctatcttcttcacagcctactcagtggtcagcggaaacttgatgataacatggtggtcaagcttatttctcctgggggtgctcttccaagga

SEQ ID NO: 20566 - DNA, 120 bp, synthetic construct
  source 1..120: mol_type = other DNA
cttcgctttggcttcggctttaggaggggcaggagcttccttcttcgttcttggcaccatcttatgaaaagggtccagattaagatttttgactgagtcattctaaagtaagttgcaaga

SEQ ID NO: 20567 - DNA, 120 bp, synthetic construct; identical to SEQ ID NO: 6235
  source 1..120: mol_type = other DNA

SEQ ID NO: 20568 - DNA, 120 bp, synthetic construct
  source 1..120: mol_type = other DNA
tcatattatttcccctgatgcctttaacttttttcctctaactgctatgcctcctaaggacctatgtagctctgggttaaacatttggcagcaatgtttacaggaggagctgtgaccgca

SEQ ID NO: 20569 - DNA, 120 bp, synthetic construct
  source 1..120: mol_type = other DNA
ttcccagagatgcagaaccatgggctgggtgtttagtgggtatgagtgtgatattctggcaataggaggttctgccactctccccattcctcacgagctttagttccccataccctgagg

SEQ ID NO: 20570 - DNA, 120 bp, synthetic construct
  source 1..120: mol_type = other DNA
cagctcctgagtgtctctacctctcaaacaagtattctcatccaggagcaattttcccaccagaggacattagctatgtctggaaaaatgttttgttgccatgactggagtgaggaggag

SEQ ID NO: 20571 - DNA, 120 bp, synthetic construct
  source 1..120: mol_type = other DNA
cagataattatccagccccaataccaagattgccaagggtaaggaggcctgccaggactttctctcccttgagtacaagcttccttgaactgagggacaccctgaaggaaaagtgtggtc

SEQ ID NO: 20572 - DNA, 120 bp, synthetic construct; identical to SEQ ID NO: 6236
  source 1..120: mol_type = other DNA

SEQ ID NO: 20573 - DNA, 120 bp, synthetic construct
  source 1..120: mol_type = other DNA
gaaccacacaggaaggcagagtgtccaccaatgtcaaattccatcaaagaaataatattttgacaaaaaatgcaagtcacctttctaagtcccagacagcagctcaaaataaaaagcatt

SEQ ID NO: 20574 - DNA, 120 bp, synthetic construct
  source 1..120: mol_type = other DNA
gggttcctggaagggaccctctcccttcagcgacgcattgtgaggccatttctaggtaaaaaggtagaatttccttggattcctgaggtttattttacacttactgcttattctttgact

SEQ ID NO: 20575 - DNA, 120 bp, synthetic construct
  source 1..120: mol_type = other DNA
tgtggcccccttatgcaataaacataagccattgtgagccagcaaaatttaaagcaaggaaagcagtaaaccctccatttcagcatgtttcagcctgtctagtgatgttctagtcttgcc

SEQ ID NO: 20576 - DNA, 120 bp, synthetic construct; identical to SEQ ID NO: 6237
  source 1..120: mol_type = other DNA

SEQ ID NO: 20577 - DNA, 120 bp, synthetic construct
  source 1..120: mol_type = other DNA
gaagaaaatcttaggaacattggatgtggcaatggcttcttggctggtgagcaaaagcacaaccaataaaagaaaaacaataaattagactatcaaaatttaaaaaccttttttatatat

SEQ ID NO: 20578 - DNA, 120 bp, synthetic construct
  source 1..120: mol_type = other DNA
gaaaaacaaacaatctcattcaaaaatgagtgaacaacatgaatagacaattctccaaagaagatatacaaatgggcaataggcacatgaaaatatgctgaacttcactagtccaagtgt

SEQ ID NO: 20579 - DNA, 120 bp, synthetic construct
  source 1..120: mol_type = other DNA
gagccaacaattccacttttgggcatatacccaaaagaattgaaagcaggaactcacacagataattgtacactcatgctcgtagcagcactattcccaatggccaaaaggtggaagcaa

SEQ ID NO: 20580 - DNA, 120 bp, synthetic construct; identical to SEQ ID NO: 6238
  source 1..120: mol_type = other DNA

SEQ ID NO: 20581 - DNA, 120 bp, synthetic construct
  source 1..120: mol_type = other DNA
gaaaaagtggttagaaggtaaattacatggtatgtatgttttaccacaatattaacaagtatatcaacactaaatccaatcacttttcactcctctcctgccaccacccgagagccaccc

SEQ ID NO: 20582 - DNA, 120 bp, synthetic construct
  source 1..120: mol_type = other DNA
aggcagagtgagcctctcaaacgaaaattaggacatatcctatgaacacctcagcccttttctttcctaggcacaatgaaacctcagtctctcaccgtttcctacaagcccctcatcata

SEQ ID NO: 20583 - DNA, 120 bp, synthetic construct
  source 1..120: mol_type = other DNA
acctgctccccgggggtccacatggctcactcctcacaccattcaagtctctgttcaaatgtcccatggtcaagttctcagaaatgtcatgcccagttaccttttctgaaatctattccc

SEQ ID NO: 20584 - DNA, 120 bp, synthetic construct
  source 1..120: mol_type = other DNA
tattttttatcagtggcaattatcactgatactgtgacagattctatttgtttattgtctgttggtgtatcagggttaccaagacagaaagacccaatagagtagatggatacatagata

SEQ ID NO: 20585 - DNA, 120 bp, synthetic construct; identical to SEQ ID NO: 6239
  source 1..120: mol_type = other DNA

SEQ ID NO: 20586 - DNA, 120 bp, synthetic construct
  source 1..120: mol_type = other DNA
ggctgcccacagcgagagaggattttccccgctcagtcactcacatgccaatcccttccagaaacaccctcgcaggcacacccagaaataatgttataccagctatctaggcatccctta

SEQ ID NO: 20587 - DNA, 120 bp, synthetic construct
  source 1..120: mol_type = other DNA
atagctctcagtaagtatttgttaaatgaataaatatgtcagtacaatcacagtatgacagtataataaggctttaaaatgtttaaagcagtctctggtttaatatttatcacttgagta

SEQ ID NO: 20588 - DNA, 120 bp, synthetic construct
  source 1..120: mol_type = other DNA
tcaaacactggggtacctaggactacaggctcatgccaccatgcccagctaatttttttttgtattttttgtagagacaggattttgccatgttgcccaggctggtcttgaacttctggg

SEQ ID NO: 20589 - DNA, 120 bp, synthetic construct; identical to SEQ ID NO: 6240
  source 1..120: mol_type = other DNA

SEQ ID NO: 20590 - DNA, 120 bp, synthetic construct
  source 1..120: mol_type = other DNA
ctcagcatcctgagtagctgggactacaggcacatgcctagactcctggctaattttttgtattttttagtacagatggggtttcaccatgttggccagtctggtctcgaattcctgacc

SEQ ID NO: 20591 - DNA, 120 bp, synthetic construct
  source 1..120: mol_type = other DNA
aataatacattcaaaaagcaacattcaagataacccatgacatatgaatgcaaccttgtacaataaagatacctataaaaatatatacatagagaacaacaaaatgggccaggcgccttg

SEQ ID NO: 20592 - DNA, 120 bp, synthetic construct
  source 1..120: mol_type = other DNA
caatatggcaaaaccctgtctctactaaaaatacaaaaaatttgctgggcctggtggcgcatgcgtgtaatctcagctactcaggaggctgaggcatggaaatcacttgaacccgagagg

SEQ ID NO: 20593 - DNA, 120 bp, synthetic construct; identical to SEQ ID NO: 6241
  source 1..120: mol_type = other DNA

SEQ ID NO: 20594 - DNA, 120 bp, synthetic construct
  source 1..120: mol_type = other DNA
tcaaaataaagcatttgaagtaaaataacaatgaaaagtggctgagtgcacacctgtagtcccagctactcaggaggctgagatgggagaatcacttgagcccaggattttgaggctgtc

SEQ ID NO: 20595 - DNA, 120 bp, synthetic construct
  source 1..120: mol_type = other DNA
gcaaatttctcatttgaaatccatagggcagaaatgccgattatggcacctccagagagtagaaaaatattcttcctccactccatgactcatcctttggttacagcgtttagctgagca

SEQ ID NO: 20596 - DNA, 120 bp, synthetic construct
  source 1..120: mol_type = other DNA
agatggatttttcccttccacagatgaaaatatgagtccctgagaacataaaatcttcatttgagctcactgaaaatgttggccttgagaattaggagacactcagtctcctgcaggccc

SEQ ID NO: 20597 - DNA, 120 bp, synthetic construct; identical to SEQ ID NO: 6242
  source 1..120: mol_type = other DNA

SEQ ID NO: 20598 - DNA, 120 bp, synthetic construct
  source 1..120: mol_type = other DNA
ttaggaaagcaaatgactttcctaacataaggtcaaacatttccctccaaatgaatcatcctagttggataatctcttcactcccactgaaattgccccagagttgcacctgagcatttg

SEQ ID NO: 20599 - DNA, 120 bp, synthetic construct
  source 1..120: mol_type = other DNA
ggggaaagacagatgggcagatgctcaagcaaactcaggagtttaccatataaaagattttggaatctattcttcagcctcttttttactgtgatacaatatacatgaacacaaaattta

SEQ ID NO: 20600 - DNA, 120 bp, synthetic construct
  source 1..120: mol_type = other DNA
accattaagcagtcaccctccatttcctcctgccaccagaccctgtcaccacaagtctgctttctttctctatagattggtctcttctgaagatttcacaaaaatgggttcatgaaatat

SEQ ID NO: 20601 - DNA, 120 bp, synthetic construct; identical to SEQ ID NO: 6243
  source 1..120: mol_type = other DNA

SEQ ID NO: 20602 - DNA, 120 bp, synthetic construct
  source 1..120: mol_type = other DNA
gcttttatagtatgactactatatatagtactatatatataatttcatagtagtactatatatagttatatatatgtagtactatgtatagtcatatatatgtatatatatgtatatata

SEQ ID NO: 20603 - DNA, 120 bp, synthetic construct
  source 1..120: mol_type = other DNA
ttccaatgccttctgaactctatggtttctgaagaaaactgggctgcaatcttattgaggatccattgaacctgaaaagttccttctctgttattcatttcaatatgctctgtttgtcat

SEQ ID NO: 20604 - DNA, 120 bp, synthetic construct
  source 1..120: mol_type = other DNA
aggtttggagttattctttaaatagtcattcttctcctttctctctctcctttctttgaggactcccaaagtgcatgtgcttgatgttgtctcacagatctttaaagttctgtttatttt

SEQ ID NO: 20605 - DNA, 120 bp, synthetic construct
  source 1..120: mol_type = other DNA
tcttcataattttttttctttctgctactgaactagagaatttcaattgtcttatcttcaagcttgctgattctccattctgcatggtgaaatttgctctggagcccctctagtgaattt

SEQ ID NO: 20606 - DNA, 120 bp, synthetic construct; identical to SEQ ID NO: 6244
  source 1..120: mol_type = other DNA

SEQ ID NO: 20607 - DNA, 120 bp, synthetic construct
  source 1..120: mol_type = other DNA
aacagccatttccaaagctgttcttgcgttagctcccaagcctactgctcttgttgtagattctcctcttaatgtctgagtcacagcatttatttcatagatttttaataattggactaa

SEQ ID NO: 20608 - DNA, 120 bp, synthetic construct
  source 1..120: mol_type = other DNA
aggtggacaaaccataagtgggccgtggattttcacaaagtgaacactcaggtaaatagcagccacatcaaggaatagcatttccagcctccaggaaacaccattgggttctacttggtc

SEQ ID NO: 20609 - DNA, 120 bp, synthetic construct
  source 1..120: mol_type = other DNA
atcactcccgtggcagtcaggtgctcagctttataaatagctcacacttcttgtctctccactgttgatagacatttgtgttgtattcagagtctacaaatcgtgctgctataaataata

SEQ ID NO: 20610 - DNA, 120 bp, synthetic construct; identical to SEQ ID NO: 6245
  source 1..120: mol_type = other DNA

SEQ ID NO: 20611 - DNA, 120 bp, synthetic construct
  source 1..120: mol_type = other DNA
aaccctgaatagacgcaaacctctataacaaactaccaatttacagaaaatacaggtcatagagatacattaaaccacaccttggggtgcaatctgcaaaatgcaaaggacaggaaacta

SEQ ID NO: 20612 - DNA, 120 bp, synthetic construct
  source 1..120: mol_type = other DNA
aactttagatgataaaaatataaaattgtacaaagaagtgatggccatgtaagccaggatgtgcttttatttgaagaagagaagagtttatcattgagctggggcagttgatggggcttc

SEQ ID NO: 20613 - DNA, 120 bp, synthetic construct
  source 1..120: mol_type = other DNA
ttttatcttttatggtacccgtggggttttttatgacaaaaacactaataaagaataaaatagtatgtgacatatggttcttgttctgcatcaagcctccttcccaccctccgctccaga

SEQ ID NO: 20614 - DNA, 120 bp, synthetic construct
  source 1..120: mol_type = other DNA
tgccagaggcaatgtccagggtctattctttgaggcctagataaacctgacaggacacagctgagggaaaagcctggccccactctggaggctctggccatcggtgtagaggggacaggt

SEQ ID NO: 20615 - DNA, 120 bp, synthetic construct; identical to SEQ ID NO: 6246
  source 1..120: mol_type = other DNA

SEQ ID NO: 20616 - DNA, 120 bp, synthetic construct
  source 1..120: mol_type = other DNA
gctcagggtggagagatgtcattgctcatcctccaggttccaggtgaaaacccacctgcccagcccatctggttctccctggttcttcaattctagggaggactgtcttcttctcacctc

SEQ ID NO: 20617 - DNA, 120 bp, synthetic construct
  source 1..120: mol_type = other DNA
cataataagtaaacatttacaatttactcacaccattgaggtttcctccaggtgtgagcacagctgcagacacaccttgtcgcttcagtcaggacacaggacagagtaaaatgggaagaa

SEQ ID NO: 20618 - DNA, 120 bp, synthetic construct
  source 1..120: mol_type = other DNA
ctttttgtattcatagttgttctgaaattgcaggatgatgagacccagcactggtgagttatactgtctctttcttccctattaaattctgtgccaaacagcaccttcatatatttatct

SEQ ID NO: 20619 - DNA, 120 bp, synthetic construct; identical to SEQ ID NO: 6247
  source 1..120: mol_type = other DNA

SEQ ID NO: 20620 - DNA, 120 bp, synthetic construct
  source 1..120: mol_type = other DNA
aactgaaagtagactaatggctgctaggggctcggtgagggggatggatgaatgtttgttcaatgggcatagagtttcagtgttgcaagatgaaaagttctagagatctgttgcacaact

SEQ ID NO: 20621 - DNA, 120 bp, synthetic construct
  source 1..120: mol_type = other DNA
aaaagtacatgaattcattaaaaatatattagtatgcgcttaccttagatacagaaaactatgagacaaaaagagagatccctgctaccccagctatcacccatgaaccaggaaaatcag

SEQ ID NO: 20622 - DNA, 120 bp, synthetic construct
  source 1..120: mol_type = other DNA
ggagggagatcctaggacagtgactctgctccacggggagaagcctccagtccagatgggagcagccagaagggcccaggagggacatttccaagaagataaaattaacagaatgtccaa

SEQ ID NO: 20623 - DNA, 120 bp, synthetic construct; identical to SEQ ID NO: 6248
  source 1..120: mol_type = other DNA

SEQ ID NO: 20624 - DNA, 120 bp, synthetic construct
  source 1..120: mol_type = other DNA
cagctaaaaaacttgaaagtggttggcccctagaaaggcagaaattgagaagaggcagagaggactctcatttttctcaagagattctgcacaaatatttgactctttcaattgtgcaca

SEQ ID NO: 20625 - DNA, 120 bp, synthetic construct
  source 1..120: mol_type = other DNA
tgaaataggcatgtataaatgtgtttttgacaccaaacgtgaacacaaatgtgaaataatacacctgtaaacacatctctggatagatagcccacgattgaattctctaccccacctcct

SEQ ID NO: 20626 - DNA, 120 bp, synthetic construct
  source 1..120: mol_type = other DNA
gccttggtccgtttcacaggtgatcccataactctccctgccaccactgccttacctgagtggagccgaggctaccctgaccaagaagagcaccacccatctgtgccccaaggccagaaa

SEQ ID NO: 20627 - DNA, 120 bp, synthetic construct; identical to SEQ ID NO: 6249
  source 1..120: mol_type = other DNA

SEQ ID NO: 20628 - DNA, 120 bp, synthetic construct
  source 1..120: mol_type = other DNA
gcagatgtccccctccatcccttcccagccctttctgtgttgctgtgaatctgtccatcaccgagaactggtggggagatgtgggggaggtggggagatttctttgtgctgtgtcaaggc

SEQ ID NO: 20629 - DNA, 120 bp, synthetic construct
  source 1..120: mol_type = other DNA
atgtctacttaaagggtaaatttctatagtataaaattatgaagacatagtagatatgaggtaatgcatgagagtgtgacagggtgaggggacctcaaggtgccaggaaagctggtcctg

SEQ ID NO: 20630 - DNA, 120 bp, synthetic construct
  source 1..120: mol_type = other DNA
tatattaaaatataatcaaatgataacaaaaataatgtggcacagctgcaaacccctcatatatactaacgcttttcatccacccaaccacaagaaataaatgctgttagtttccccatt

SEQ ID NO: 20631 - DNA, 120 bp, synthetic construct
  source 1..120: mol_type = other DNA
gagttgacaccagagactgaaatcccagctgtgcactgccctggtggtctcctgtcccaaccgggcgttgatccgggccttgcaggctcacgtgctctgcagaaaatagagaaaccaata

SEQ ID NO: 20632 - DNA, 120 bp, synthetic construct; identical to SEQ ID NO: 6250
  source 1..120: mol_type = other DNA

SEQ ID NO: 20633 - DNA, 120 bp, synthetic construct
  source 1..120: mol_type = other DNA
gaggccctggctccacgtacttccaggcctgggctgggtcacacacaaggcctttctctccctctttccccaggccctcctttcctgcagaagcacctgcacaccagggcaggccctgcc

SEQ ID NO: 20634 - DNA, 120 bp, synthetic construct
  source 1..120: mol_type = other DNA
aacacgtggctgccatggggtctgcacctgacctgaccctggagacccccttgctcaagaaggctctgcttcccttgacacccaggtccatgacctgcacttgggatgccctgctcctgc

SEQ ID NO: 20635 - DNA, 120 bp, synthetic construct
  source 1..120: mol_type = other DNA
agaggatcttcttcttctccctatggaataagggatttcttgagacccctcagcctgaggctgcctccgcccactctgcacctggggattgccacagccacagccaccatctcccacatg

SEQ ID NO: 20636 - DNA, 120 bp, synthetic construct; identical to SEQ ID NO: 6251
  source 1..120: mol_type = other DNA

SEQ ID NO: 20637 - DNA, 120 bp, synthetic construct
  source 1..120: mol_type = other DNA
ggtaacacttggacatatgatgaaaatagggaccacagctgccctgacaaggagctggttcctgcttcccaaatggcccagggatgtctgcttatatactcctccataacatctgcacag

SEQ ID NO: 20638 - DNA, 120 bp, synthetic construct
  source 1..120: mol_type = other DNA
tgcactcaggaccctccctgttacaaggggacctcaaaggggctgcacaggcaggcctcccagtctgggcttcgtgggtctttttcttggtgtcctcctgatggctggagaaacaggaga

SEQ ID NO: 20639 - DNA, 120 bp, synthetic construct
  source 1..120: mol_type = other DNA
agccgcctttactatttactcccactgaagccatgatcatccaggccctcagcaatcagcacgtgattctcaactcaccccacctggacgcaccgtggtgagcccaagaaacaagagaga

SEQ ID NO: 20640 - DNA, 120 bp, synthetic construct; identical to SEQ ID NO: 6252
  source 1..120: mol_type = other DNA

SEQ ID NO: 20641 - DNA, 120 bp, synthetic construct
  source 1..120: mol_type = other DNA
actaataataatgacagtagcaatagcagcatacagaatggctgccattgactctgaagcaccagggccttctctaaaaaaagggccttgtgacacactgagcacgcaaagccacagccg

SEQ ID NO: 20642 - DNA, 120 bp, synthetic construct
  source 1..120: mol_type = other DNA
aacctctgctcctctcctcggggaatcctggtggccatgcaggtctggtaggtcccattcccattgggcaggacacccctagactgctgggcatcctggctcaaagatgcctcatcctga

SEQ ID NO: 20643 - DNA, 120 bp, synthetic construct
  source 1..120: mol_type = other DNA
cagagccagtgaggcatgtggccaagcctttctcccctctaagggagatgcagggaacaggactggtcctctctattgttctgactctcgctgaaacccacactgaccccagaccttctg

SEQ ID NO: 20644 - DNA, 120 bp, synthetic construct; identical to SEQ ID NO: 6253
  source 1..120: mol_type = other DNA

SEQ ID NO: 20645 - DNA, 120 bp, synthetic construct
  source 1..120: mol_type = other DNA
atggcattttcctcccagaaatttgtgacattcatagccaaagtctgagttctggaggaccggggcactgtccattactgagtctccaggttgggagagaggaagagcttcccatatgtg

SEQ ID NO: 20646 - DNA, 120 bp, synthetic construct
  source 1..120: mol_type = other DNA
gaggaactcggaccaggaaggacccctccctggccctcttccatccctccctgtgtgggctgagccccgctgagcaccattcctcacccctactcacagccaaatccagtgggaagagac

SEQ ID NO: 20647 - DNA, 120 bp, synthetic construct
  source 1..120: mol_type = other DNA
ccattctctgtcaagtcttcagtctctgtgtcccaggtctcagctcccaggactgcttctgcccactgtccccggggccctgccctgcctttctgcctgtcacagagcaggaagagctga

SEQ ID NO: 20648 - DNA, 120 bp, synthetic construct; identical to SEQ ID NO: 6254
  source 1..120: mol_type = other DNA

SEQ ID NO: 20649 - DNA, 120 bp, synthetic construct
  source 1..120: mol_type = other DNA
ggaggccaatggaaggggctgccctgcaggttcaagggaggagcatgaaggcagtggtggaaggaaggtcttgccagaggggagagcagaaactgtaagggacccaggctcagagggacc

SEQ ID NO: 20650 - DNA, 120 bp, synthetic construct
  source 1..120: mol_type = other DNA
gggcaggtaggctgtggtgccagagacgttttctacgaggtccgtatcccagggagaagcaatggtgtgggcttcagagtggcatggcaatgccccaagtagggaggtggatggaccagt

SEQ ID NO: 20651 - DNA, 120 bp, synthetic construct
  source 1..120: mol_type = other DNA
cctaacttacaccacatatgaaaattaactaagaaaaacatcaaagacctaaactcaagaactaaaactgaaaaactcttacaataaaacatagggaattatcttcatgccatagaattt

SEQ ID NO: 20652 - DNA, 120 bp, synthetic construct; identical to SEQ ID NO: 6255
  source 1..120: mol_type = other DNA

SEQ ID NO: 20653 - DNA, 120 bp, synthetic construct
  source 1..120: mol_type = other DNA
tacaccaattagtttggctattatcaaacacacacacacacacacacacacacacacacagaaatatcaagtttggcaaacaggttgcgaaactggaacctttgtgtaatgcatttggaa

SEQ ID NO: 20654 - DNA, 120 bp, synthetic construct
  source 1..120: mol_type = other DNA
gcaggcagatcacgaggtcaggagattgagaccatcccggtcaacatggtgaaacccagtctctattaaaatacaaaatattagccgggtgtggtggtgggcacttgtaatcccagctac

SEQ ID NO: 20655 - DNA, 120 bp, synthetic construct
  source 1..120: mol_type = other DNA
aaaaaaaaaaaaaaaaagaagcagttggacacacggcctgtgttgggtctgggtagaggaggacagatgtgcagggcaaggactggaggatggggtgagcatggtgtgggggtgaccctg

SEQ ID NO: 20656 - DNA, 120 bp, synthetic construct; identical to SEQ ID NO: 6256
  source 1..120: mol_type = other DNA

SEQ ID NO: 20657 - DNA, 120 bp, synthetic construct
  source 1..120: mol_type = other DNA
gagtgggacggagggaagaccctgggacaaaaggcggcaccagagagttagggtcagggagagttgggagtgggaggcataggggcagccctgggttaaggctgcttctaggaaaggccc

SEQ ID NO: 20658 - DNA, 120 bp, synthetic construct
  source 1..120: mol_type = other DNA
acccaaggtgccctgagggcaggggaggaggtgggagggaatctggtgtccttagatcactggagttaatagtagcagggaaggatgcaagacaagagaggatccccggcagcgggaggc

SEQ ID NO: 20659 - DNA, 120 bp, synthetic construct
  source 1..120: mol_type = other DNA
cactagctccgggtcccgagaaaggagggccccaactccaggagatgcggcccaggagctgagaacacgtcggctccgggagaggacagggcttcagggaccttagggccgcccccagca

SEQ ID NO: 20660 - DNA, 120 bp, synthetic construct; identical to SEQ ID NO: 6257
  source 1..120: mol_type = other DNA

SEQ ID NO: 20661 - DNA, 120 bp, synthetic construct
  source 1..120: mol_type = other DNA
ccgccaggaaccccacttaccagcagcagctccctggggtgcaaaaagggcagtgcggatcaggaacagcaggactaggctcatctccatggcccagactttgctttcctcgcagtggct

SEQ ID NO: 20662 - DNA, 120 bp, synthetic construct
  source 1..120: mol_type = other DNA
agctgggagggcggggccacactcagaaggggaaggttccagcggtcaggagacctggagaactttggctggcgggacctggagcccagaaaagggggagcgcgcggaagcgccgccaaa

SEQ ID NO: 20663 - DNA, 120 bp, synthetic construct
  source 1..120: mol_type = other DNA
gtgcctcaccaagaccgtttcgccagccaccccatcaagctgactgtcattcgcttgttctttccaggacacacttacagaagagacgaggcctggttattcttccaacacactcccctc

SEQ ID NO: 20664 - DNA, 120 bp, synthetic construct; identical to SEQ ID NO: 6258
  source 1..120: mol_type = other DNA

SEQ ID NO: 20665 - DNA, 120 bp, synthetic construct
  source 1..120: mol_type = other DNA
gcctgctttaggacatctgtacctctgagaccatagtagcttccaatgtgacaggtctacaaggacactctacacgtctcgcatgacatcatcctctcttcctcccctgtttctctttcc

SEQ ID NO: 20666 - DNA, 120 bp, synthetic construct
  source 1..120: mol_type = other DNA
agcctagatcactgtacaggcttcctaaacactgtgactgtcccagctatagtcagagtgctctaagacccccacagcaccccatctgctgaatgtcacacgtgaggtctctaccatgga

SEQ ID NO: 20667 - DNA, 120 bp, synthetic construct
  source 1..120: mol_type = other DNA
cactgcctaagcagtctcctgcttccagattactgtcgcttctgcctctgagcccattagaccgtgtcacatccttaaatcttcccaattaggctggtcagagtgtagtggtgtttacaa

SEQ ID NO: 20668 - DNA, 120 bp, synthetic construct; identical to SEQ ID NO: 6259
  source 1..120: mol_type = other DNA

SEQ ID NO: 20669 - DNA, 120 bp, synthetic construct
  source 1..120: mol_type = other DNA
cctcctgatctatcgacagacttggaagatcaacactaggatgatgacggtgagcagaatggtcatgatgatgcacacaatcagggctcagatgttcaggtacttggcagtggaggcata

SEQ ID NO: 20670 - DNA, 120 bp, synthetic construct
  source 1..120: mol_type = other DNA
aacatagtcagacacggaggtctcgctgcagatatggatcatggtggacattgggggagcagggttgtggggcgcccccagcacagccacctcatgctcctccttgagcatctcatagct

SEQ ID NO: 20671 - DNA, 120 bp, synthetic construct
  source 1..120: mol_type = other DNA
ggccctggactgtacatttttaaatggtaaattacgtggcacataaattatatctcgataataaaacaccatgcaaaagcctctttctactgaaagaatcatctcgtccccaacacacac

SEQ ID NO: 20672 - DNA, 120 bp, synthetic construct; identical to SEQ ID NO: 6260
  source 1..120: mol_type = other DNA

SEQ ID NO: 20673 - DNA, 120 bp, synthetic construct
  source 1..120: mol_type = other DNA
gatgcctgggcccaagcaatccagccacttcagcctcctgagtacctgggactgtaggtgagtgccaccatgcccagctgtcatctaccatcttgtaccatccctcactacacgatgaac

SEQ ID NO: 20674 - DNA, 120 bp, synthetic construct
  source 1..120: mol_type = other DNA
gtgagtgaaaatttaagcatcacagggttttaacaattacttagatttcccatccacattcactgattatttattttgatcatcataatctattgcgcacagcagggactggggtcctgt

SEQ ID NO: 20675 - DNA, 120 bp, synthetic construct
  source 1..120: mol_type = other DNA
aggacgaccttcctccctgtgccagctctagcaaagggtctcattcagctcacctcaaaaaatacttttaatacttaaataacgacaataataataatatacaaggttagttccaaggca

SEQ ID NO: 20676 - DNA, 120 bp, synthetic construct; identical to SEQ ID NO: 6261
  source 1..120: mol_type = other DNA

SEQ ID NO: 20677 - DNA, 120 bp, synthetic construct
  source 1..120: mol_type = other DNA
cagtgcggtcgcttacagaacccagggcggggttgggctgggcgcccgcgcgcgttttcaagcctgcggcccggagttcactgcgaggactgagatcacccgttaccccgccctggtcta

SEQ ID NO: 20678 - DNA, 120 bp, synthetic construct
  source 1..120: mol_type = other DNA
tagaaacggaataacggcgctgtgggctggggaggacggagttgccttcaggcttctggtctccagccgcggggcactcacagctgccgctatgaaaatgcagacctgtggggcaggaat

SEQ ID NO: 20679 - DNA, 120 bp, synthetic construct
  source 1..120: mol_type = other DNA
ggaaatgcgcctcagcccctcccacgggccgcccacggattccaggatccgaaaacgcttccagctgctccgccaccccaggaaggcagcgcctgcctctgggcggttctgacggaaact

SEQ ID NO: 20680 - DNA, 120 bp, synthetic construct
  source 1..120: mol_type = other DNA
ctaaatttacatcccgagtgtggccccatcaaagactggagcgacgttcactgaaatgatacaagaccagcaggggcgcagggcgctgcggccctcagaatgcggtgacagcgccgcctc

SEQ ID NO: 20681 - DNA, 120 bp, synthetic construct; identical to SEQ ID NO: 6262
  source 1..120: mol_type = other DNA

SEQ ID NO: 20682 - DNA, 120 bp, synthetic construct
  source 1..120: mol_type = other DNA
agctttatctctgtctctctctctgaatctgtaaatatacagtaatatatatacacgtaagcctctacctgccgatgtgtcagggtgtgtctcttgggcacaaaaacaaggtttttgttt

SEQ ID NO: 20683 - DNA, 120 bp, synthetic construct
  source 1..120: mol_type = other DNA
agctcgttgtgttttggctgttgtacacacccacatctccactaccacaatgaagatgtagaacatttccatcggactccaaagagctgctatgcaatacaattttatagggtcaataaa

SEQ ID NO: 20684 - DNA, 120 bp, synthetic construct
  source 1..120: mol_type = other DNA
tatattttaagtagggaaaaacctggaagatttctcaccaaagttttatttatttatttattttttgagacagagtctagctctgtcgcccaggctggagtgcagtggcgagatctcggc

SEQ ID NO: 20685 - DNA, 120 bp, synthetic construct
  source 1..120: mol_type = other DNA
tttttgtatttttttttttggtagagacggggtttcaccgtgttggccaggatagtctcgatctcctgacctcgtgatctgcccgcctcggcctcccaaagtgctgggattacagtcgtg

SEQ ID NO: 20686 - DNA, 120 bp, synthetic construct; identical to SEQ ID NO: 6263
  source 1..120: mol_type = other DNA

SEQ ID NO: 20687 - DNA, 120 bp, synthetic construct
  source 1..120: mol_type = other DNA
acaataacttggtgattttcactttctctgaaatgttggaattttatattacagtattaacttggatttggcttggcccggtggtttgtacctgtaatttcagctctggaaggtgaggca

SEQ ID NO: 20688 - DNA, 120 bp, synthetic construct
  source 1..120: mol_type = other DNA
aaaaataaacctgaatttgtatggaggttaaggaagagtatatctcagtttgaaacattatgaagctaagccccaaacccaaatagttagagatttttaaataccaaagtgttaattaaa

SEQ ID NO: 20689 - DNA, 120 bp, synthetic construct
  source 1..120: mol_type = other DNA
atgtttttagtggagtagagatacatgtaataaaatttacagaagggctataataaagagggaaacgcaaaatcgagtctgacacaggagaccctgttccatttatactcaaagcaactt

SEQ ID NO: 20690 - DNA, 120 bp, synthetic construct
  source 1..120: mol_type = other DNA
gtcgaagcaaattttgttcctagagtattgatttcccctttccaatggctaaaggctttcggaactagtctgaaaactcaggctctgactttggatctaaagaagtgtcaagaatgtgcg

SEQ ID NO: 20691 - DNA, 120 bp, synthetic construct; identical to SEQ ID NO: 6264
  source 1..120: mol_type = other DNA

SEQ ID NO: 20692 - DNA, 120 bp, synthetic construct
  source 1..120: mol_type = other DNA
ctcccagctactactgatgagttcaaactaggaggacactaagacgtgtcttttgcaaggtagactccttatctcgcactctgtctggttttctaagtccatcctaatgaaacacaaaaa

SEQ ID NO: 20693 - DNA, 120 bp, synthetic construct
  source 1..120: mol_type = other DNA
agtatctcctgctttcttcagaggacttctcatgaagtacagactcctccacctccaggaaaaagagacaaagtccactgagaaggacctgagggatgcctgtgaccccgcccctgaggt

SEQ ID NO: 20694 - DNA, 120 bp, synthetic construct
  source 1..120: mol_type = other DNA
tggagagtcaaagtgctaaactcggcatctatcataggaaactttctcaccttggcactgcatgcaagagtcagtgtatttatgtgcacctgtgcctttatttcaggagctggaacaatt

SEQ ID NO: 20695 - DNA, 120 bp, synthetic construct; identical to SEQ ID NO: 6265
  source 1..120: mol_type = other DNA

SEQ ID NO: 20696 - DNA, 120 bp, synthetic construct
  source 1..120: mol_type = other DNA
caaattccagcaaagaaacaattacagcaaaatctccatgtcacatttttaagcttacacaatggctcaaatagaaccagcatcaaaaatcccgaattcctggttcaggtgggatcactg

SEQ ID NO: 20697 - DNA, 120 bp, synthetic construct
  source 1..120: mol_type = other DNA
gcacagtgaggccatttctggggaagaaatgtagactctccttgggggaggttttatacttagttactgactttgcattcgttgacttcatctttgaacatcttacagttacgtaatttg

SEQ ID NO: 20698 - DNA, 120 bp, synthetic construct
  source 1..120: mol_type = other DNA
catggataggtaaacagtaaaccatttcagcaaatgtttcagatgctccttcgtgcctagcaatgtgctagctttaccccagccttaacattctaaagtttatattttccttggtgttgt

SEQ ID NO: 20699 - DNA, 120 bp, synthetic construct
  source 1..120: mol_type = other DNA
gtaaataaatgtgtgattctccattgacttattgctaacaccatcttaaatatttgaccccaaatccaatcacttctcactcctctactactttaccccagagccaatcctctctaggat

SEQ ID NO: 20700 - DNA, 120 bp, synthetic construct; identical to SEQ ID NO: 6266
  source 1..120: mol_type = other DNA

SEQ ID NO: 20701 - DNA, 120 bp, synthetic construct
  source 1..120: mol_type = other DNA
ctgttcttgtctctggcttagagctacttcctgctatggtccttggacttgtgatgtgcaagaagttctcaggtatgggagggactagaatgatggctttgccccatctcacatgtaggg

SEQ ID NO: 20702 - DNA, 120 bp, synthetic construct
  source 1..120: mol_type = other DNA
aaggagggcactgcctgtcaagtggccaatgaccccagtcagaagaggtgaagggtgagagaggaggctgctgggaaccagaagcttggcagccaggaagactgagaacaatcaggctga

SEQ ID NO: 20703 - DNA, 120 bp, synthetic construct
  source 1..120: mol_type = other DNA
ctgtactctcctgatcctccatgaggattttaaacagtgagataaggtatccagggccccagaaatctgaattacctttaccaaagagatcatccttccatttcatttcttataagatat

SEQ ID NO: 20704 - DNA, 120 bp, synthetic construct
  source 1..120: mol_type = other DNA
gaaatattaaatcaaactaatacaggattaatgtgaagctagcaggtgttttgtggatggattcccctggctgtttatactgggggaagaaacaggcctggccccattcacagatgagaa

SEQ ID NO: 20705 - DNA, 120 bp, synthetic construct; identical to SEQ ID NO: 6267
  source 1..120: mol_type = other DNA

SEQ ID NO: 20706 - DNA, 120 bp, synthetic construct
  source 1..120: mol_type = other DNA
ggtcctgcctcaaatacagtctcctcctgcaggctctgctgggtctttttattatcattctccaggtggtgaccgggtccctgatgctgatgtggtgctcacagcttcctgaaatatgac

SEQ ID NO: 20707 - DNA, 120 bp, synthetic construct
  source 1..120: mol_type = other DNA
tgagagtggctgagctgaatctgctcattagcatgttctccactgtttgagagctgccttgtgcagaccagcaagacacagattgttcacagctccccttgtctcttggaagaccctgac

SEQ ID NO: 20708 - DNA, 120 bp, synthetic construct
  source 1..120: mol_type = other DNA
tatccaggcctggtgtatctccctggaccatcatttcttttctgggaatgaaagggttataatatctgcctcctagatttcccttgtcactcactcaccctgaatagacttcttactcta

SEQ ID NO: 20709 - DNA, 120 bp, synthetic construct; identical to SEQ ID NO: 6268
  source 1..120: mol_type = other DNA

SEQ ID NO: 20710 - DNA, 120 bp, synthetic construct
  source 1..120: mol_type = other DNA
catcctgccctcgcctccactttatctggcatatttttatatgttgatctgatcctcctcataagggatgtatatgagcattattttgtaggagagccgctatgtcccacagtggccatg

SEQ ID NO: 20711 - DNA, 120 bp, synthetic construct
  source 1..120: mol_type = other DNA
ttctcagatgacacagattgatcgttcccacctctgccttctttcctgttccatttccagaatgcttctattgtttcccttttattgtagtaagtcaaatttttgaattaaggcctgggc

SEQ ID NO: 20712 - DNA, 120 bp, synthetic construct
  source 1..120: mol_type = other DNA
attgaattcgcattgtgaatagatatgttattgccatgtcataaataaattcttgtccctttttctgtgggagcaccctgtggtctgggtcctggcaggaaagagatggcacagaaggaa

SEQ ID NO: 20713 - DNA, 120 bp, synthetic construct; identical to SEQ ID NO: 6269
  source 1..120: mol_type = other DNA

SEQ ID NO: 20714 - DNA, 120 bp, synthetic construct
  source 1..120: mol_type = other DNA
catagttgcctcccagtgtagggggcaggatggaagagagtggatgatggctctgtgaggagatggaagctgagaataatgcacttgcttacagtgttcacattcttcatggaatttact

SEQ ID NO: 20715 - DNA, 120 bp, synthetic construct
  source 1..120: mol_type = other DNA
ctgaggtcaggagttcgagactagcctggccaaagtggtgaaaccctgtctccactaaaaatgcaaaaattagctgggcatgatggtgggtgcctgtaacctcagctacttgagaggctg

SEQ ID NO: 20716 - DNA, 120 bp, synthetic construct
  source 1..120: mol_type = other DNA
atgtatatatgcttagcaggtagtaacattgaagagtacctaactctccttccctatctccacatgggacgtataactcataaataaataacttaaattatttgagtataagccataaaa

SEQ ID NO: 20717 - DNA, 120 bp, synthetic construct; identical to SEQ ID NO: 6270
  source 1..120: mol_type = other DNA

SEQ ID NO: 20718 - DNA, 120 bp, synthetic construct
  source 1..120: mol_type = other DNA
taggaatagagtcaatgttttcccttaatgggagctccttttctccatttatcttcttaaagcagggggaaggggatgagtctttcaagttcccatggacccatggacatcatgagatca

SEQ ID NO: 20719 - DNA, 120 bp, synthetic construct
  source 1..120: mol_type = other DNA
aacttcctggaattgagacctccccagcaggcttgggggtgaaaagagaaactagactccaaaagggacccagtgctctgttggggagagaggagcacaccactgcatcccaccctgaag

SEQ ID NO: 20720 - DNA, 120 bp, synthetic construct
  source 1..120: mol_type = other DNA
acatgtctggggccctctcaggccgacatgagttttactgctccacacactcttttgttaagagctagctgtcagtagatcagtgagagagcaactttgatacagaggaaaccatgcctg

SEQ ID NO: 20721 - DNA, 120 bp, synthetic construct; identical to SEQ ID NO: 6271
  source 1..120: mol_type = other DNA

SEQ ID NO: 20722 - DNA, 120 bp, synthetic construct
  source 1..120: mol_type = other DNA
tgaggtaacactactgcagcagagcaaaccttattgtatcagtgcaccaaccccaagttcatgttcattacagcaggaaaaactaacatgtggtgaattctgcctccacaagggacaagg

SEQ ID NO: 20723 - DNA, 120 bp, synthetic construct
  source 1..120: mol_type = other DNA
gacatctgaaggaagtgccaggcacagatgccaggttgcataagtgctgacccctgagcaactggagaagctgttaggtcccagctggcctagagatccctggctcagggagtataactg

SEQ ID NO: 20724 - DNA, 120 bp, synthetic construct
  source 1..120: mol_type = other DNA
tgctctggagggggtggggagagggaggagccctgaggtctgggctggggtgtggttgggaaggagctgagagctgagagctgtaactacccaaggagctgcaggggtgaggttggtgca

SEQ ID NO: 20725 - DNA, 120 bp, synthetic construct; identical to SEQ ID NO: 6272
  source 1..120: mol_type = other DNA

SEQ ID NO: 20726 - DNA, 120 bp, synthetic construct
  source 1..120: mol_type = other DNA
ggtgaggcagggagctgtctgagtttcctagcagacatcaggagcccgcccttccaggcctgggctttgcttcagtgcctggccctgcataggcccctgcccctgtcccgttctgctgcc

SEQ ID NO: 20727 - DNA, 120 bp, synthetic construct
  source 1..120: mol_type = other DNA
ggtcttgtgtctgtttttcttggcactatgtttcttctcatgtattcttctgaattggcaaggcaggaattacatcactggtttgcagatgaggaaactgactcatatggtttcattcag

SEQ ID NO: 20728 - DNA, 120 bp, synthetic construct
  source 1..120: mol_type = other DNA
ctcatattgaccttacttatgtactaattcccactttacaatccatgccacaaactttgttgtcttaagaagttgccacagcagccttcagcagccaccttgtgatcagtcagcagtcat

SEQ ID NO: 20729 - DNA, 120 bp, synthetic construct; identical to SEQ ID NO: 6273
  source 1..120: mol_type = other DNA

SEQ ID NO: 20730 - DNA, 120 bp, synthetic construct
  source 1..120: mol_type = other DNA
acactttgtattccctgtaaccttgcctcctggcatatgacactagtactagcctcaagctctgttggattagcgagcctcactccacacctcctgaactagaaccaaagctctgtgcac

SEQ ID NO: 20731 - DNA, 120 bp, synthetic construct
  source 1..120: mol_type = other DNA
gggtggccccagtttgggtcatctgggaaggggaagattttcagataaaaacccatgccttagaagacaaaactacccaagagctggcagcagctaaccagcttgctatctgggatatca

SEQ ID NO: 20732 - DNA, 120 bp, synthetic construct
  source 1..120: mol_type = other DNA
tgcttctcacagttgggagatgaatcacctttcgatgaggccaaagacctcatgttcctcactagctgacttgttcccactcagtggaaaaagaacccagaacctttgcaaaattttagg

SEQ ID NO: 20733 - DNA, 120 bp, synthetic construct; identical to SEQ ID NO: 6274
  source 1..120: mol_type = other DNA

SEQ ID NO: 20734 - DNA, 120 bp, synthetic construct
  source 1..120: mol_type = other DNA
gagtttctgctttaagttacaaattccaaaaggtactaatccccaataatttacagtagggagccctaagccacaaagaaaggtgtcagggcacacctgagacctgaagtgagaacatac

SEQ ID NO: 20735 - DNA, 120 bp, synthetic construct
  source 1..120: mol_type = other DNA
agagagcccaggtgacagccatgcctgctcctcctccctcatctcccacagcctcagcaccatcgtctgcctcgagtccaccaggactgagctcctcatgccctttccctgtttgtgtca

SEQ ID NO: 20736 - DNA, 120 bp, synthetic construct
  source 1..120: mol_type = other DNA
aatctggaatcctcagtccatgatcagcaaaacctcctcattctctctcaggatgctccctcacctcgaagctctagcaggaaccaggtcttcctgaggatgtgacccgctctgaagttc

SEQ ID NO: 20737 - DNA, 120 bp, synthetic construct; identical to SEQ ID NO: 6275
  source 1..120: mol_type = other DNA

SEQ ID NO: 20738 - DNA, 120 bp, synthetic construct
  source 1..120: mol_type = other DNA
acattactcatgtaatgaagataaaggaccttaaagtagggagatcatcctggactctctgtgtgggcccgatcaaatcacatgagccattaaaaggagagaatctgctctagatggagt

SEQ ID NO: 20739 - DNA, 120 bp, synthetic construct
  source 1..120: mol_type = other DNA
ttaggcaccagagagaagtctctaggatctaagggtgctcccaaaaaggaagtgggaagctcagttctatctgcaggaagtgaattcagacaagaacctgaataagcttggatgtggact

SEQ ID NO: 20740 - DNA, 120 bp, synthetic construct
  source 1..120: mol_type = other DNA
tgcttggtttgtggtaatttttatggcagcaatagacacctatacagcagagaagatgccctcactccctggcctctcagatcctggaactccttttcttcattaccatctcctctctct

SEQ ID NO: 20741 - DNA, 120 bp, synthetic construct; identical to SEQ ID NO: 6276
  source 1..120: mol_type = other DNA

SEQ ID NO: 20742 - DNA, 120 bp, synthetic construct
  source 1..120: mol_type = other DNA
tagtaaataatttccatccctcccttgcctctccctttcgttgtcacacttgcctggcaaaactacacagctagtggattccacctcagcctacactgcacctgcccccataagctgcag

SEQ ID NO: 20743 - DNA, 120 bp, synthetic construct
  source 1..120: mol_type = other DNA
tcctcctggcctgggtgactcttacataccttctctctgtcctcacacatccaatcttccttccccattcttacttccgctgatgatcttgcttcctacttcactgagaaaactgaacac

SEQ ID NO: 20744 - DNA, 120 bp, synthetic construct
  source 1..120: mol_type = other DNA
gagccagttcctctgctggtgccctgaacatcatcccttctcatctacttaaagtgttagttcatcaattaataccttttttttccctctattgtcatcccttttccttttattccagtg

SEQ ID NO: 20745 - DNA, 120 bp, synthetic construct; identical to SEQ ID NO: 6277
  source 1..120: mol_type = other DNA

SEQ ID NO: 20746 - DNA, 120 bp, synthetic construct
  source 1..120: mol_type = other DNA
tgatggcttttccagcatttctgtctctatcctgattttctctcacaactatttcccctaataaatccttacacatttaatactgtattggggtctaagttcaggaccgcagctatcaca

SEQ ID NO: 20747 - DNA, 120 bp, synthetic construct
  source 1..120: mol_type = other DNA
gagaagttgcatctgagctgccgtgggtctcaccagtgctaacctgagaagatgctctggttaggggaagctatggcagatgtggtgatagaatgccctgcacaataatgatggagttgg

SEQ ID NO: 20748 - DNA, 120 bp, synthetic construct
  source 1..120: mol_type = other DNA
tctgcagtgtctcatggagaggcctttatctcctggatcaaaagagcagatagcatggaatggtagctgaacatcattatggtgggcacagtgctccagagacgtttgatactcagccaa

SEQ ID NO: 20749 - DNA, 120 bp, synthetic construct; identical to SEQ ID NO: 6278
  source 1..120: mol_type = other DNA

SEQ ID NO: 20750 - DNA, 120 bp, synthetic construct
  source 1..120: mol_type = other DNA
atcaaagaacccaggacatggggtaaacccactactggggtgagtccatatagactggaaaaaatgatgcccaactctcaacaaggtagatatgacctagttatcctggaacatgtagag

SEQ ID NO: 20751 - DNA, 120 bp, synthetic construct
  source 1..120: mol_type = other DNA
cctgcatcactaagaagtgtcggggtgttatcctctgcaggctgggggggatgatagtaaaggtcccagagttgtgcttattcatatctctggggagaatgtgggcctgaagagactgag

SEQ ID NO: 20752 - DNA, 120 bp, synthetic construct
  source 1..120: mol_type = other DNA
agggttacaagaggcagccaacaagggcactgcttgatatatatgataagaaagcaagaattgaggagcaggagactgagggtgttcgaccaaatacaaagccatgatccccttctcaat

SEQ ID NO: 20753 - DNA, 120 bp, synthetic construct; identical to SEQ ID NO: 6279
  source 1..120: mol_type = other DNA

SEQ ID NO: 20754 - DNA, 120 bp, synthetic construct
  source 1..120: mol_type = other DNA
ccctgagtgcataattgacactgatgctctggtaagtggagtcacccccacactgggtccccagtctgtggtataagggatctcttgatgccaaaggccaaagggaaacctctgaaactg

SEQ ID NO: 20755 - DNA, 120 bp, synthetic construct
  source 1..120: mol_type = other DNA
aggctgcctattgtctccgtgtaatccagcaatctgtccctgaggaagcctagtgaggcctaaagaatgaatgagattactccagatatggccaagtaggagttataagtgcagcttttg

SEQ ID NO: 20756 - DNA, 120 bp, synthetic construct
  source 1..120: mol_type = other DNA
ttctttccattccaattacaaaggggatatggagtgattcacattcatgtgggatccacaacacattgaattatagtttgcctcaggacttttgtaactcccctgtcctctatagtatag

SEQ ID NO: 20757 - DNA, 120 bp, synthetic construct; identical to SEQ ID NO: 6280
  source 1..120: mol_type = other DNA

SEQ ID NO: 20758 - DNA, 120 bp, synthetic construct
  source 1..120: mol_type = other DNA
cgacagcacattccacatgtagaaatgttgctttggcccacactctaggtgacataggaggaggccagcttcaagtgaggcctacacaggaaagcaccctgcagcagatacaggctgcgg

SEQ ID NO: 20759 - DNA, 120 bp, synthetic construct
  source 1..120: mol_type = other DNA
aagatcatgtcatccacagcagagacatggctccccattagaagcaacttttagtgttcctggtcctgattcgatagaatgcttaaccacaggacaccaagcaacgatgtgattccaagt

SEQ ID NO: 20760 - DNA, 120 bp, synthetic construct
  source 1..120: mol_type = other DNA
ggtccacctgggttgtgcttgaatcccatgttgacacccccagaaaacacccaagtctgaagcagcactgaacaaccaaacagacaaatggaagttagccagccttcactatgggtcaat

SEQ ID NO: 20761 - DNA, 120 bp, synthetic construct; identical to SEQ ID NO: 6281
  source 1..120: mol_type = other DNA

SEQ ID NO: 20762 - DNA, 120 bp, synthetic construct
  source 1..120: mol_type = other DNA
gcaccactctctgggtgctgttgacattcctgatccacaggctaggtggtgctcccaacccagtatctgcctgaaggacccacttggcagggaaagttccagtgtttccgtggctatggg

SEQ ID NO: 20763 - DNA, 120 bp, synthetic construct
  source 1..120: mol_type = other DNA
gccgtttttcaggacatggtgcattgtttgaatcagagacatctctacggtgctgtgttctcaataggaagaatatgtgggtctagaaaccgaaagttggaagcaggtttgtctccatgt

SEQ ID NO: 20764 - DNA, 120 bp, synthetic construct
  source 1..120: mol_type = other DNA
aaaaagagacacatgacagcccattgaactacacattatggttgtcaccagagaagtttggacagtatgtgcccagagaccagctggtgagaaaaggagtctcttcctctccaggtgcag

SEQ ID NO: 20765 - DNA, 120 bp, synthetic construct
  source 1..120: mol_type = other DNA
tctacttgggggccttctggtttgccttgtccctttgtaaatgtgagcagaatcatccagcaatccagcctgagaggatttgatttccaagggcccagacctctcaggacaggaggtttg

SEQ ID NO: 20766 - DNA, 120 bp, synthetic construct; identical to SEQ ID NO: 6282
  source 1..120: mol_type = other DNA

SEQ ID NO: 20767 - DNA, 120 bp, synthetic construct
  source 1..120: mol_type = other DNA
atcctgtaactttaatcccatgatggcacttggaatgcaaaatcattttcatctgcacaccagtgacctcttacttactccaatttgtaaaatccttttgtttgttcaacttctacctgc

SEQ ID NO: 20768 - DNA, 120 bp, synthetic construct
  source 1..120: mol_type = other DNA
tacatttctgttattctatagaggttaaatacatccgttttatttcctcccattttgataatattagccatatattgggttcctagtttctctacgcctgtttttttctttattttcgtt

SEQ ID NO: 20769 - DNA, 120 bp, synthetic construct
  source 1..120: mol_type = other DNA
actcctctctccttctttctctcctttcctccatttttttcttttttattatgacatattctgacatataaaataaccctatgtgtttgtactataaggaaacattttctgaatctatat

SEQ ID NO: 20770 - DNA, 120 bp, synthetic construct
  source 1..120: mol_type = other DNA
actttgggaggcctagacgggcggatcacgaggtcaggggatagagaccatcctggctaacacggtgaaaccctgtctttactaaaaatacaaaaaaaaaattagccggtgtggtggcgg

SEQ ID NO: 20771 - DNA, 120 bp, synthetic construct; identical to SEQ ID NO: 6283
  source 1..120: mol_type = other DNA

SEQ ID NO: 20772 - DNA, 120 bp, synthetic construct
  source 1..120: mol_type = other DNA
attatttagtatggttaaaggccatacaacatatcatccaaccatcccactcctaatcatacactctggcggctttctcgcctatgtgcccaggagacatgcacactaatgtttatggca

SEQ ID NO: 20773 - DNA, 120 bp, synthetic construct
  source 1..120: mol_type = other DNA
taaaaatgagtgaatgacagcctcccacacaacagataactcctatacataatgtgcatcatgagaaaagaaatgtagtaggaatttctgtacaggaagcttaaaaaccagtgaaactaa

SEQ ID NO: 20774 - DNA, 120 bp, synthetic construct
  source 1..120: mol_type = other DNA
ggtggctttgcgggttctgtgtcttatgccagtgctgggaacccaggtaactactagattataactccttaaacagtatttttcaaactaaaatatacctgtttcttaaaaaatgaaaga

SEQ ID NO: 20775 - DNA, 120 bp, synthetic construct
  source 1..120: mol_type = other DNA
acccttggctaaagggccatatgatccttggctcacaggcatctctctagattttcaggtatacaagattcaatctgatgtgcaaggtaattccattttgcaaaggatttgatttgttac

SEQ ID NO: 20776 - DNA, 120 bp, synthetic construct; identical to SEQ ID NO: 6284
  source 1..120: mol_type = other DNA

SEQ ID NO: 20777 - DNA, 120 bp, synthetic construct
  source 1..120: mol_type = other DNA
tttgaaaaatcttatgcctcagttggagctaaccattttgggctactgcatccaaccaaagctattgacatcttgctaagctagatgtgttaactgaggtatgagattcacatttttgta

SEQ ID NO: 20778 - DNA, 120 bp, synthetic construct
  source 1..120: mol_type = other DNA
atagacacaacagcccttttttttaagtgtaggcaaatgttttttgaagatgatatttcaataagaaaattggcacttggggcatacttcaactaaatgtgagacaccttagttgaaaca

SEQ ID NO: 20779 - DNA, 120 bp, synthetic construct
  source 1..120: mol_type = other DNA
aagaaaaactcagacatactattgtatcctctttctctgtctcaaacagttttcgccacaacacccaaggctctgtgatgtctcaaacttttaatcattaatttaaaaagagaagcttat

SEQ ID NO: 20780 - DNA, 120 bp, synthetic construct; identical to SEQ ID NO: 6285
  source 1..120: mol_type = other DNA

SEQ ID NO: 20781 - DNA, 120 bp, synthetic construct
  source 1..120: mol_type = other DNA
ttaaagacctaaatgtaaaacccaaaactataaaaacccaagaagaaaatctaggcaataccatttgcctgggcatgggcaaagattttatgatgaaatcgccaaaagcatctgccacaa

SEQ ID NO: 20782 - DNA, 120 bp, synthetic construct
  source 1..120: mol_type = other DNA
ctgacaaagatctaatatccacaatctacaaggaaattaagcaaatttacaagaaaataacaaacaaccccattaaaaagtgggcaaatgacatgaacagacacttctcaaaagaagaca

SEQ ID NO: 20783 - DNA, 120 bp, synthetic construct
  source 1..120: mol_type = other DNA
caagaaacaacagatactggcaaggttgcagggaaataggaatgctttaactgttggtgggaatgtaaattagttcaaccattgtggaagacaatatgacgattcctcaaagatctagaa

SEQ ID NO: 20784 - DNA, 120 bp, synthetic construct; identical to SEQ ID NO: 6286
  source 1..120: mol_type = other DNA

SEQ ID NO: 20785 - DNA, 120 bp, synthetic construct
  source 1..120: mol_type = other DNA
gaacactgtgtccttttggggggggggcagaggtggggtgcgcattaggaaaaatagctcattcatgctaggcttaatacctaggtgctgggttgataagtgtagcaaaacaccatggca

SEQ ID NO: 20786 - DNA, 120 bp, synthetic construct
  source 1..120: mol_type = other DNA
tacaaaatcctgaaataataattttaattttgctttcaacatgtatgcaaatcccttgatactcctcccttccaatggtgcagcttaattccttccctgtgagttcggcttggacttaat

SEQ ID NO: 20787 - DNA, 120 bp, synthetic construct
  source 1..120: mol_type = other DNA
acatggtgggaagtgattagatcatggggatggttccctcatgctgttctcatgatagtgagtgagttctatgagatctgatggttttgcaagagtcttccctgccacccccgcccccga

SEQ ID NO: 20788 - DNA, 120 bp, synthetic construct; identical to SEQ ID NO: 6287
  source 1..120: mol_type = other DNA

SEQ ID NO: 20789 - DNA, 120 bp, synthetic construct
  source 1..120: mol_type = other DNA
aagcagccctgcaggaaggtccatgtggctaaaaactgaggcctcctgggaccggacaacaaggaaccatgtgagtgagccatgtttcttgtaaatcccaagccctagtgaagctctcag

SEQ ID NO: 20790 - DNA, 120 bp, synthetic construct
  source 1..120: mol_type = other DNA
cctgaccattggaaactgcggtagatgatgtttgttgttttgcgctgctaagttttatgtaatttgttatgcaatagtaaataactaatacattttcataagagaggatgatttattgca

SEQ ID NO: 20791 - DNA, 120 bp, synthetic construct
  source 1..120: mol_type = other DNA
ttcctgtgctcaaatatcctctgacctcagcctcctgagtagctggctgggactacaggcatgaaccaccatgcctggataatactctaatgtttttgtagagatggaggtttcaccatg

SEQ ID NO: 20792 - DNA, 120 bp, synthetic construct; identical to SEQ ID NO: 6288
  source 1..120: mol_type = other DNA

SEQ ID NO: 20793 - DNA, 120 bp, synthetic construct
  source 1..120: mol_type = other DNA
tttagcagatataatcaaggtcctcaatcagttgacttgaggctgggtttagcctgcttggacactcctaatcaggtgagcccatgaaaggactgggttcttcctgagcatagagattca

SEQ ID NO: 20794 - DNA, 120 bp, synthetic construct
  source 1..120: mol_type = other DNA
accttgacagctagcagggaacaggaaactcagtcttaacgactgtcagaaactgaattctgccgcctctatatatgcttgaaggaggattcaaaatgaaaacacagctttgggaagccc

SEQ ID NO: 20795 - DNA, 120 bp, synthetic construct
  source 1..120: mol_type = other DNA
ttacacaggaggatcacttacactcaggaatttgagaccagcctgggtaatgcaatgagaccctcatctctacaatttttttttaattagctgggcgtggtggcatttgcctgtagttct

SEQ ID NO: 20796 - DNA, 120 bp, synthetic construct
  source 1..120: mol_type = other DNA
ataaatgaattaattaaataaatgggtattgtttaaagccaatatttgtgataatttgttatgcagtcataaaattcgtacagtctcaacagacaaatggaatgaatttatgaattgata

SEQ ID NO: 20797 - DNA, 120 bp, synthetic construct; identical to SEQ ID NO: 6289
  source 1..120: mol_type = other DNA

SEQ ID NO: 20798 - DNA, 120 bp, synthetic construct
  source 1..120: mol_type = other DNA
tgacagatggcacctggaaaattaggtcactcccaccctaatactgcacttttcctatggtcttagcaaacggcacaccgagagattatatcccatgcctggctcgcagggtcctacacc

SEQ ID NO: 20799 - DNA, 120 bp, synthetic construct
  source 1..120: mol_type = other DNA
agctcgagctgggtggagcccacacagctcaaggaggcctgcctgcctctgtagactccacctctgggggcagggcatagccaaacaaaaggcagcagaaacctctgcagacttaaatgt

SEQ ID NO: 20800 - DNA, 120 bp, synthetic construct
  source 1..120: mol_type = other DNA
cccccagtaggggcagactgacacgtcacacggccgagtactcctctgagacaaaatctccagaggaaagatcaggcagcaacatttgctgttcaccaatatgcattgttctgcagcctc

SEQ ID NO: 20801 - DNA, 120 bp, synthetic construct
  source 1..120: mol_type = other DNA
aaaaccccatctgtacgtcaccatcatcaaagaccaaaggtagataaatccacaaagacggggaaaaaacagagcagaaaaactgaaaattctaaaaatcagagtgcctctcctcctcca

SEQ ID NO: 20802 - DNA, 120 bp, synthetic construct; identical to SEQ ID NO: 6290
  source 1..120: mol_type = other DNA

SEQ ID NO: 20803 - DNA, 120 bp, synthetic construct
  source 1..120: mol_type = other DNA
aatgaacaaagcctccaagaaatatgggactatgtgaaaagaccaaatctgcatctgattggtgtacctgcaagtgacggagagaatggaaccaagttggaaaacactctgcaggatatt

SEQ ID NO: 20804 - DNA, 120 bp, synthetic construct
  source 1..120: mol_type = other DNA
ctcaagaagagcaactccaagacacataattgtcagattcaccaaagttgaaattaaggaaaaaatgttaaggaaagacagagagaaaggtcgggctacccacaaagggaaacccatcag

SEQ ID NO: 20805 - DNA, 120 bp, synthetic construct; identical to SEQ ID NO: 6291
  source 1..120: mol_type = other DNA

SEQ ID NO: 20806 - DNA, 120 bp, synthetic construct
  source 1..120: mol_type = other DNA
aacaatattaaccttaaatgtaaatgggctaaatgctccaattaaaagacacagactggcaaattggataaagagtcaagacccatcagtgtgctgtattcaggaaacccatctcacgtg

SEQ ID NO: 20807 - DNA, 120 bp, synthetic construct
  source 1..120: mol_type = other DNA
gatcaaaagagacaaagaaggccaatacataatggtaaagggatcaattcaatgagaagagctaactatcctaaatatatatgcacccaatacaggagcacccagattcataaagcaagt

SEQ ID NO: 20808 - DNA, 120 bp, synthetic construct; identical to SEQ ID NO: 6292
  source 1..120: mol_type = other DNA

SEQ ID NO: 20809 - DNA, 120 bp, synthetic construct
  source 1..120: mol_type = other DNA
tagaactcaggattaagaaactcactcaaaactgctcaaccacatggaaactgaacaacctgctcctgaatgactactgggtacataatgaaaggaaggcagaaataaagaggttctttg

SEQ ID NO: 20810 - DNA, 120 bp, synthetic construct
  source 1..120: mol_type = other DNA
acaccctaacatcacaattaaaagaactagagaagcaagagcaatcacattcaaaagctagcagaaggcaagaaataaccaagatcagggcagaactgaaggagatagagacacaaaaaa

SEQ ID NO: 20811 - DNA, 120 bp, synthetic construct
  source 1..120: mol_type = other DNA
gggatatcaccaccaatcccacagaaatacaaactaccatcagagaatactataaacacctctatgcaaataaactagaaaatctagaagaaatggataaattcctcgacgcatacaccc

SEQ ID NO: 20812 - DNA, 120 bp, synthetic construct; identical to SEQ ID NO: 6293
  source 1..120: mol_type = other DNA

SEQ ID NO: 20813 - DNA, 120 bp, synthetic construct
  source 1..120: mol_type = other DNA
ttatccaccatgatcaagtgggcttcatccctgggatgcaaggctggttcaacatacgaaaatcaataaacataatccagcatttaaagagaaccaacgacaaaaaccacatgattatct

SEQ ID NO: 20814 - DNA, 120 bp, synthetic construct
  source 1..120: mol_type = other DNA
agccaatatcatactgaatgggcaaaaactggaagcattccctttgaaaactggcacaagacagggatgccctctctcatcactcctattcaacatagtgttggaagttctggccagggc

SEQ ID NO: 20815 - DNA, 120 bp, synthetic construct; identical to SEQ ID NO: 6294
  source 1..120: mol_type = other DNA

SEQ ID NO: 20816 - DNA, 120 bp, synthetic construct
  source 1..120: mol_type = other DNA
gaacattccacgttcatggataggaagaatccatatcatgaaaatggccacactgcccaaggtaatttatagattcaatgccatccccatcaagctaccaatgactttcttcacagaatt

SEQ ID NO: 20817 - DNA, 120 bp, synthetic construct
  source 1..120: mol_type = other DNA
ggctgcagtaaccaaaacagtatggtactggtaccaaaacagagatacagaccaatggaacagaacagaggcctcagaagtaacaccacacatctacaatcatctgatctttgacaaacc

SEQ ID NO: 20818 - DNA, 120 bp, synthetic construct
  source 1..120: mol_type = other DNA
aattccagatggattaaagacttcaatgttagacctaaaaccataaaacccaaaagaaaacctaggcaataccacttaggaaatcagcatgggcaaggatttcgtgactaaaacaccaaa

SEQ ID NO: 20819 - DNA, 120 bp, synthetic construct; identical to SEQ ID NO: 6295
  source 1..120: mol_type = other DNA

SEQ ID NO: 20820 - DNA, 120 bp, synthetic construct
  source 1..120: mol_type = other DNA
ttacactgttggtgggactgtaaactagttcaaccattgtggaagacagtgtggcaattcctgaaggatctagaactagaaataccatttgacccagccatcccattactgggtatatgc

SEQ ID NO: 20821 - DNA, 120 bp, synthetic construct
  source 1..120: mol_type = other DNA
aagaaaatgtggcacatatacaccatggaatactatgcagccataaaaaggatgagttcatgtcctttgtagtgacatggatgaagcaggaaaccatcattctgagcaaactatcgcgaa

SEQ ID NO: 20822 - DNA, 120 bp, synthetic construct
  source 1..120: mol_type = other DNA
ggatagcattaggagaaatacctaatgtaaatgactagttaaagagggcagcaaaccaacagggcacatgcatacatatgtgacaaacctgcacgttatgcacatgtaccatagaactta

SEQ ID NO: 20823 - DNA, 120 bp, synthetic construct; identical to SEQ ID NO: 6296
  source 1..120: mol_type = other DNA

SEQ ID NO: 20824 - DNA, 120 bp, synthetic construct
  source 1..120: mol_type = other DNA
aaccagtgatggaatatcaaatatgaatggaaaacagaataggactgataaaaagaaaaaaagcttcagaagcacataatagccgtgttatttagaatcatagtggtgtgcaaatgactt

SEQ ID NO: 20825 - DNA, 120 bp, synthetic construct
  source 1..120: mol_type = other DNA
aaacttgtttctcaatttgagctaaccatttcaggctactgcatcaaaccaaagttattggcatcatgctaagctagatgtgttgactgaagtatgagattcacacttttgtaaatgaaa

SEQ ID NO: 20826 - DNA, 120 bp, synthetic construct
  source 1..120: mol_type = other DNA
gtttagtgaagatgatatttcaataagaaaattggtgcttgggacgtgcttccactaaatttgagatatcttagacaaaacaaagtcttattttcaagacattatttttatcagactgaa

SEQ ID NO: 20827 - DNA, 120 bp, synthetic construct; identical to SEQ ID NO: 6297
  source 1..120: mol_type = other DNA

SEQ ID NO: 20828 - DNA, 120 bp, synthetic construct
  source 1..120: mol_type = other DNA
tactggtacaaaaacaggcacatagaccaatggaacagaatagagaattcacaaaaaaagtccgcacatctacaaccatttgatcttcaacaaacctgacaaaaacaagcaacggggaaa

SEQ ID NO: 20829 - DNA, 120 bp, synthetic construct
  source 1..120: mol_type = other DNA
tgtaaaacacaaaattataaaaaccctgaaagaaaatctaggcaataccattcaggacacaggcatgggcaaagattttatgatgaaatcgccaagagcatctgccacaaaagcaaaaat

SEQ ID NO: 20830 - DNA, 120 bp, synthetic construct
  source 1..120: mol_type = other DNA
aatattcagaatctataaagaacttaagcaaatttacatgaaaaaaacttcattaaaaagtgaacaaaggacatgaagagacatttcacaaaataagatgtacatgtggccaaaaaaaca

SEQ ID NO: 20831 - DNA, 120 bp, synthetic construct; identical to SEQ ID NO: 6298
  source 1..120: mol_type = other DNA

SEQ ID NO: 20832 - DNA, 120 bp, synthetic construct
  source 1..120: mol_type = other DNA
tgcccatcaatgatgtactgcattaagaaaatatggtacatatacaccatggaatattatgcagccacaaaaaggaatgagattcagtcttttgcagggatatggatgaagctggaagcc

SEQ ID NO: 20833 - DNA, 120 bp, synthetic construct
  source 1..120: mol_type = other DNA
ctgggggagggcagtggtgggaggagtattaggaaaaaatagctaatgcatgccagggttaatacataggtgatggtttgataggtgcagcaaaccaccatggcacacatttacctatgt

SEQ ID NO: 20834 - DNA, 120 bp, synthetic construct
  source 1..120: mol_type = other DNA
aaacaagagttttaaatttgcttttaatatatattcaaatcctttaatactgttcccttccagagatgctgcttaatttcctctcttgagtgtggctgggacttaatgatgcatttctga

SEQ ID NO: 20835 - DNA, 120 bp, synthetic construct; identical to SEQ ID NO: 6299
  source 1..120: mol_type = other DNA

SEQ ID NO: 20836 - DNA, 120 bp, synthetic construct
  source 1..120: mol_type = other DNA
gtgagaacggactaatacaacttctaactggtaatgctgacataagagtttgtgactctgggtgtagaacataaaactcactgcagcctcccccttctctctcaatgtctctggaatcat

SEQ ID NO: 20837 - DNA, 120 bp, synthetic construct
  source 1..120: mol_type = other DNA
gaacagaaaacaaggaactagggcttttccaacagccatgtgacccatccatgtttcatgtgaatcctcagtcccagtgaagcactcagatgatgcaggcctaggctgacaactggactg

SEQ ID NO: 20838 - DNA, 120 bp, synthetic construct
  source 1..120: mol_type = other DNA
acctctcctggattcctgaccattggaacctgcgggagatgatgaatatttgccattttgagctgctaagttttacataatttgttatgcaatagtaaataactaacacattttcacaaa

SEQ ID NO: 20839 - DNA, 120 bp, synthetic construct
  source 1..120: mol_type = other DNA
accatgcactgcagtgtcgacttcctgggctcaagggaccctcttatctcagcgtcctgagtaactgggactacaggcatgaagcaccacgcctggctaattttctaaatttttttgtag

SEQ ID NO: 20840 - DNA, 120 bp, synthetic construct; identical to SEQ ID NO: 6300
  source 1..120: mol_type = other DNA

SEQ ID NO: 20841 - DNA, 120 bp, synthetic construct
  source 1..120: mol_type = other DNA
ggtcattcactttcccccagttattcaagcaactctagtgtagatgctgctgtgaagggatttagcagatataactaagggcctcaattagttgactttaggctgggtttatcctgcttt

SEQ ID NO: 20842 - DNA, 120 bp, synthetic construct
  source 1..120: mol_type = other DNA
gctgtgtaggaaagaacactgttaggcaccaggaattgagcacaaccctgcctattctctgtattgacagccagcaaggaacagaaacctcagtcttacaactgccagaaactgcattct

SEQ ID NO: 20843 - DNA, 120 bp, synthetic construct
  source 1..120: mol_type = other DNA
tcttgcccagatttctgaccaaggaagtataagcagataaatgggtgttgttttgccagtcgtggtagtgcacgaatgaattgatgaattgatatgcacactaattacataaaataaaat

SEQ ID NO: 20844 - DNA, 120 bp, synthetic construct; identical to SEQ ID NO: 6301
  source 1..120: mol_type = other DNA

SEQ ID NO: 20845 - DNA, 120 bp, synthetic construct
  source 1..120: mol_type = other DNA
agatgcaggaggtgaggaaatggagcagagggaaagaattcgaaagcagcagaactcaggtttaaacacattgttttatatattttaatacatcaatctacagagccttgcagggtgatc

SEQ ID NO: 20846 - DNA, 120 bp, synthetic construct
  source 1..120: mol_type = other DNA
cgaaagcagcagaactcaggtttaaacacattgttttatatattttaatacatcaatctacagagccttgcagggtgatctttgcagttggcctttaataccttatgtgggtctgcctaa

SEQ ID NO: 20847 - DNA, 120 bp, synthetic construct
  source 1..120: mol_type = other DNA
attgtgactgcattgagtgcttgccactgtgagatgaataaagtccgtactggctcctggttacaacatatagtaacacagtggctaccttgtattaggagatgtcctggactcacacag

SEQ ID NO: 20848 - DNA, 120 bp, synthetic construct
  source 1..120: mol_type = other DNA
atttatatgtcaagggaccaaagtcacatttttggccgattagattcctgatcattaggagttaccaagattctgctacccactgtagttaataaacaaaaagcaaactggtctctattc

SEQ ID NO: 20849 - DNA, 120 bp, synthetic construct; identical to SEQ ID NO: 6302
  source 1..120: mol_type = other DNA

SEQ ID NO: 20850 - DNA, 120 bp, synthetic construct
  source 1..120: mol_type = other DNA
gctctcaggatctcaggccccaaaggcggtgtatggattggggaggcccagcgctgggcattccccatctttgcagggtttctcttctccctctcccaacctgtgtcgggtccttcttcc

SEQ ID NO: 20851 - DNA, 120 bp, synthetic construct
  source 1..120: mol_type = other DNA
tcttcccagtcgccgaggatggtgtcatggcgccccgaaccctgcttctgctgctctcgggggccctggtcctgacccagacctgggcaggtgagtgcggggtcgggagggaaacggcgt

SEQ ID NO: 20852 - DNA, 120 bp, synthetic construct
  source 1..120: mol_type = other DNA
tttccacaccaccatgtcccggcccggccgcgcggatccccgcttcctctccgtgggcgacgtggacgacacgcagtgcgtgcggctcgacagcgacgccacgagtcccaggatggagcc

SEQ ID NO: 20853 - DNA, 120 bp, synthetic construct; identical to SEQ ID NO: 6303
  source 1..120: mol_type = other DNA

SEQ ID NO: 20854 - DNA, 120 bp, synthetic construct
  source 1..120: mol_type = other DNA
cggggccagggtctcacacccatctagaggatgtctgtctgcgacgtggggtcggacgggcgcctactccgcgggtatcaccagcttgcttacgatggcaaggattacatcgtcctgaac

SEQ ID NO: 20855 - DNA, 120 bp, synthetic construct
  source 1..120: mol_type = other DNA
tggttttcctctctactcttagaccctcagccagtatcactattggcattcctgagccactggctcagaatttcagtacattatctgcccgcgggacacacctcagaggaaaggggatga

SEQ ID NO: 20856 - DNA, 120 bp, synthetic construct
  source 1..120: mol_type = other DNA
aaaccctctgaggaatgggtgccatctttcaggatgtggtgcatgtattgaatcaaagatgtctctatagtgctgtgtttacagaaggaagaatacgtgggtccaaaaaccaagaagtag

SEQ ID NO: 20857 - DNA, 120 bp, synthetic construct; identical to SEQ ID NO: 6304
  source 1..120: mol_type = other DNA

SEQ ID NO: 20858 - DNA, 120 bp, synthetic construct
  source 1..120: mol_type = other DNA
aagtgtgagcagaatcatccagcaacccagcctgagagggtttcatattcaagagcccagaaccctcaggaaggaaggattgagtgatactcacaggtaatgtcccaaggctgtgctcct

SEQ ID NO: 20859 - DNA, 120 bp, synthetic construct
  source 1..120: mol_type = other DNA
tgatggctaactgtagctggaagactcctccacggccttgctcaactctccttagattgcctgtgctctaggatgcgtcaaacaaactttctctccttctgtccagcacttggggtcaca

SEQ ID NO: 20860 - DNA, 120 bp, synthetic construct
  source 1..120: mol_type = other DNA
gatgtcgcagactttaagctcatcttggcatctgctccttgaaggacttggactaaaaattatttccatctgcatatcaataactcttattccaacctgtaaaatccttctctttatcca

SEQ ID NO: 20861 - DNA, 120 bp, synthetic construct
  source 1..120: mol_type = other DNA
tactaaattttgaggtagtttgtgacacagcacttgataactattaaggctttcttaagtttccattattccatggatattatctacatatcttttaatcccttgcattttaataacatt

SEQ ID NO: 20862 - DNA, 120 bp, synthetic construct; identical to SEQ ID NO: 6305
  source 1..120: mol_type = other DNA

SEQ ID NO: 20863 - DNA, 120 bp, synthetic construct
  source 1..120: mol_type = other DNA
gaacacatgagcaacacaagctctttcccattcttggtacaagcacttgagaaatcaaattagccttatctagtatgattaatgtccatacatcatataatcccaccatctgcctcctga

SEQ ID NO: 20864 - DNA, 120 bp, synthetic construct
  source 1..120: mol_type = other DNA
aataaaaagtaaaacttcagcagcaacagtgaatgaacagcaccctcccacatcagagataactctcctacacataacatgcatcagcatcacagaagaatgcacattgtgtgagttctc

SEQ ID NO: 20865 - DNA, 120 bp, synthetic construct
  source 1..120: mol_type = other DNA
ttccttttggggaatagaattggacaacagccgagggtggcttcataggttttgttttttatgccaggaggggatgtccaggtagttaagttacttgatcataaatctttctttctttct

SEQ ID NO: 20866 - DNA, 120 bp, synthetic construct; identical to SEQ ID NO: 6306
  source 1..120: mol_type = other DNA

SEQ ID NO: 20867 - DNA, 120 bp, synthetic construct
  source 1..120: mol_type = other DNA
gacacccaggtaatttttgtatttttagtagagacggggtttcaccatattgtccaggttggtctcaaactcctgacctcaggtgatccgccaacttcggccttccaaagtgctgggatt

SEQ ID NO: 20868 - DNA, 120 bp, synthetic construct
  source 1..120: mol_type = other DNA
tcatctcaaggatccttagcaataactacacacgttaaaacaaagccacagccaattgtaaagagtcatgtgacagagaggaccaggatctcatgaaaaatagccttggctagaaagagg

SEQ ID NO: 20869 - DNA, 120 bp, synthetic construct
  source 1..120: mol_type = other DNA
gaccaggatctcatgaaaaatagccttggctagaaagaggtcatttgaccctgggctaattggcaactctctacattgtctggcatacagtgttcaatctgatgtgcaaggcaattgtat

SEQ ID NO: 20870 - DNA, 120 bp, synthetic construct
  source 1..120: mol_type = other DNA
cataaaggaataactagtgatgaaatagcaataagaatggaaaacatgaaagagatgcttgtacagcaatgatagcagcacaaaagaacagtgtttttcagaatcatacaggagtccaaa

SEQ ID NO: 20871 - DNA, 120 bp, synthetic construct; identical to SEQ ID NO: 6307
  source 1..120: mol_type = other DNA

SEQ ID NO: 20872 - DNA, 120 bp, synthetic construct
  source 1..120: mol_type = other DNA
ggcattattgtatggcaccaaagtcttgggacactttaatttagctactgtattttctcaactctgttgcaacttatcaaagagaatattaatattaaaggcatttacaaaaaaaatctg

SEQ ID NO: 20873 - DNA, 120 bp, synthetic construct
  source 1..120: mol_type = other DNA
taatgttaattttgcttttaacatgtttataaattctttgatactcctcctttccagaagtgcagcttcattccctccctgttcgtgtggcctggacttaatgactcacttctaactgat

SEQ ID NO: 20874 - DNA, 120 bp, synthetic construct
  source 1..120: mol_type = other DNA
tcataaggaggcctgtggtccatgtgactaggaagtgagtcctcctgggaccagacaataagaagctaaagcctcttccaaaagccatgtgagagattcttgtgtcttgtgaatccccgg

SEQ ID NO: 20875 - DNA, 120 bp, synthetic construct; identical to SEQ ID NO: 6308
  source 1..120: mol_type = other DNA

SEQ ID NO: 20876 - DNA, 120 bp, synthetic construct
  source 1..120: mol_type = other DNA
tgtatgttctatttaaacatgaaaggaagatccaggctagctaggctgattctatgatgacaccccaataaccacccttggtttctcaggttaccccagttactcagttgacactaaagc

SEQ ID NO: 20877 - DNA, 120 bp, synthetic construct
  source 1..120: mol_type = other DNA
ttcctgagaatagagactcacagtgtgagagggattcagcgtgaggggcttcctccactttgggctttgaaaatggagggatcatggggaaagaacactggtggccaataggaattagaa

SEQ ID NO: 20878 - DNA, 120 bp, synthetic construct
  source 1..120: mol_type = other DNA
acaaactctacataagcttgggggagaaccccaatcttaagatgaggatacagctttgcgaaactctgaacaaagagtctatcacattaggcctggatttctgatgaaggaaatgtagac

SEQ ID NO: 20879 - DNA, 120 bp, synthetic construct; identical to SEQ ID NO: 6309
  source 1..120: mol_type = other DNA

SEQ ID NO: 20880 - DNA, 120 bp, synthetic construct
  source 1..120: mol_type = other DNA
aagcccctgtgcttgtgccttccattctagaggcttcttgagagtaagatggagccattagaggcttttaagtgaagaaatgacacaatctgactcacattagcaggattgctgaccttt

SEQ ID NO: 20881 - DNA, 120 bp, synthetic construct
  source 1..120: mol_type = other DNA
gggctggagaagcaggaggtgaggtaaaggaacagagagaaagaattctaaagcaatggaattctcagacttaaatacagtgttttatagatttttaatgcatttatccgcaaagcctgg

SEQ ID NO: 20882 - DNA, 120 bp, synthetic construct
  source 1..120: mol_type = other DNA
agcactttgggaggccgaggcgcgtggatcacaaggtcaggagatcgagaccatcctagctaacatggtgaaaccccgtctctaataaaaaattacaaaaaaattagccgggcgtggtgg

SEQ ID NO: 20883 - DNA, 120 bp, synthetic construct; identical to SEQ ID NO: 6310
  source 1..120: mol_type = other DNA

SEQ ID NO: 20884 - DNA, 120 bp, synthetic construct
  source 1..120: mol_type = other DNA
tagaaaaattagccaggagtggtggcacaagcctgtggtgccagctacttgggaggctgagggaggagcattgatcacatgagccaaggaggtcgaggcttcagtgagtcatgagcgtgc

SEQ ID NO: 20885 - DNA, 120 bp, synthetic construct
  source 1..120: mol_type = other DNA
acttgcaattctgaggtaattaaattctgtacaggctcctggttgcaatatacggtaatacattgtgctttgtattgagatgtcctggactcgcacacacaaactcagagctatgaaata

SEQ ID NO: 20886 - DNA, 120 bp, synthetic construct
  source 1..120: mol_type = other DNA
gcaatgcgtttagacatatttatatataatggggccaaaaatcatctcttttacaaattagattcgtgaccattcaggggctaccaagattgtgctacccactgtagcacaatcggagac

SEQ ID NO: 20887 - DNA, 120 bp, synthetic construct; identical to SEQ ID NO: 6311
  source 1..120: mol_type = other DNA

SEQ ID NO: 20888 - DNA, 120 bp, synthetic construct
  source 1..120: mol_type = other DNA
gggcggagtggctcagcaaaggccttaagaatgagaaggagaggctgcaatgcgcaggtaccagaggccacgggtcgcctccctgatctcctgcagatatccctgagccaccttccaaaa

SEQ ID NO: 20889 - DNA, 120 bp, synthetic construct
  source 1..120: mol_type = other DNA
ctgggacaattaacggatgaagtctctgcgggaaaggaggggaagacaatccctggaatactgatacgcggtaccctttgaccccccagcagccttgggcaccaggaattttcctctcag

SEQ ID NO: 20890 - DNA, 120 bp, synthetic construct
  source 1..120: mol_type = other DNA
ttccaaggaataagagattatcccaggtgcctgtgtccagaatgttgtctgggttctgtgctcccttccccaccccagatgtcccatccattctcaggatggtcacatgggtgctgtgtc

SEQ ID NO: 20891 - DNA, 120 bp, synthetic construct; identical to SEQ ID NO: 6312
  source 1..120: mol_type = other DNA

SEQ ID NO: 20892 - DNA, 120 bp, synthetic construct
  source 1..120: mol_type = other DNA
aaagcagaagtccttctggagcctttaagcagggtcagggctgaggcctgggggtcagggcccctcacgttcacctcctttcttagagctgtcttcccagcccatcatccccgttgtggg

SEQ ID NO: 20893 - DNA, 120 bp, synthetic construct
  source 1..120: mol_type = other DNA
tggtggatttcaagccccaggtaggagtaggctcatatcttgcctagttgtgaggcaccatctccacacacatttaccctgttcagaggccctgtctatcaacgcttactcttttgtaaa

SEQ ID NO: 20894 - DNA, 120 bp, synthetic construct
  source 1..120: mol_type = other DNA
gaaggtccctgctgaggacagacctcaggaggacaattggtccagcctcaacacatcctcttcccttgggttttctgatcctgacctgggtctgtagtcacagttctggaaactcctcta

SEQ ID NO: 20895 - DNA, 120 bp, synthetic construct; identical to SEQ ID NO: 6313
  source 1..120: mol_type = other DNA

SEQ ID NO: 20896 - DNA, 120 bp, synthetic construct
  source 1..120: mol_type = other DNA
atttggaatttttcaaggtgtggtgggctgttcagtgtcacaacttactatgactgacctggattagtttatgactatgttttttctaagattgccttgtgagggactgagatgcaagat

SEQ ID NO: 20897 - DNA, 120 bp, synthetic construct
  source 1..120: mol_type = other DNA
ccaccatgacccctgatattgtttggatctgtgtccccacccaaatctcatgttcaattgtaatccctaattttggaggtggtgtctggtggcaggtgatcggctcatgaggatggatcc

SEQ ID NO: 20898 - DNA, 120 bp, synthetic construct
  source 1..120: mol_type = other DNA
gtaatgtctgcttccccttagccttccagcataatcgaaagttccctgaggccctctcataagatgagcagatgccagaatcatactttctgtatagcctgcagaaccatgacccaattt

SEQ ID NO: 20899 - DNA, 120 bp, synthetic construct; identical to SEQ ID NO: 6314
  source 1..120: mol_type = other DNA

SEQ ID NO: 20900 - DNA, 120 bp, synthetic construct
  source 1..120: mol_type = other DNA
gatgtcccagtcttgccttccctttgataatgcagtaagggaccccattttatgacacaggacaggcaagaagacaaccagcttgatgggatctacatcatgtgcaatcaccaccagctg

SEQ ID NO: 20901 - DNA, 120 bp, synthetic construct
  source 1..120: mol_type = other DNA
tctgcttcttctcttggtttgtctctggtctgtattgtgggccagcttaagcagcagagtagctgtttggctgtctggtgcctgggtgaactggttaatctcaggaggcactttcagcca

SEQ ID NO: 20902 - DNA, 120 bp, synthetic construct
  source 1..120: mol_type = other DNA
aaacaagggatttaccactttcttggcctcctgcttcttcacgacagcaggggctggagccaccttcttctccttggccttctttccttttggcatcttggatggtgggaggagaaagaa

SEQ ID NO: 20903 - DNA, 120 bp, synthetic construct; identical to SEQ ID NO: 6315
  source 1..120: mol_type = other DNA

SEQ ID NO: 20904 - DNA, 120 bp, synthetic construct
  source 1..120: mol_type = other DNA
aggcattgttccccctccctagggatctgtagaactttgaacttgagagtgatgtataagggtatctggtggaagaaatttctaagcagcatagcattccagatttggcctgcctgcttg

SEQ ID NO: 20905 - DNA, 120 bp, synthetic construct
  source 1..120: mol_type = other DNA
aagactactaaatcatagagccactggcaatatgcaagctcagcctggaaaagccataagcattcaatgttcacccatgagagcagctatatggattatgttcaccaaagccacggatat

SEQ ID NO: 20906 - DNA, 120 bp, synthetic construct
  source 1..120: mol_type = other DNA
ttcaaccttgtgaggacactgcattcatttcttttggtccacttatttcttttggaatggaaatgtataggaaatgtctctaccactgttgtattaatattttagaagtaaataactttt

SEQ ID NO: 20907 - DNA, 120 bp, synthetic construct; identical to SEQ ID NO: 6316
  source 1..120: mol_type = other DNA

SEQ ID NO: 20908 - DNA, 120 bp, synthetic construct
  source 1..120: mol_type = other DNA
ctcgcaccttcctactccctctgttcctctcttaccacgtgacttctgcacataccagctcccctttgccttctgccatgagtggaagcagcctgaggccctcgctaaatgctcaaacat

SEQ ID NO: 20909 - DNA, 120 bp, synthetic construct
  source 1..120: mol_type = other DNA
tgtggcagccagcccccattctcaaggtatccaggatcctctcagccaagagtcctttcctcagtattctaaagacactctaatcactcaagagattctaaggtttttaggagaaaccag

SEQ ID NO: 20910 - DNA, 120 bp, synthetic construct
  source 1..120: mol_type = other DNA
ggtcattcaaaattaggccagtttatcatcctcttgtatgaatatgtctcccagaatgacatcactcagctttgcagacaccattcaatcttatcaggttccaaaaacaagaatggtctc

SEQ ID NO: 20911 - DNA, 120 bp, synthetic construct; identical to SEQ ID NO: 6317
  source 1..120: mol_type = other DNA

SEQ ID NO: 20912 - DNA, 120 bp, synthetic construct
  source 1..120: mol_type = other DNA
ccgactttgccagatgaaatgaaggcacagcgcaatccttgatttgcttgggaattcttacataaaggtataaaaatatagttatggttttttccttagggataattcctgtttctggca

SEQ ID NO: 20913 - DNA, 120 bp, synthetic construct
  source 1..120: mol_type = other DNA
acagcatcaccctgatccatcaggaaaaagagaggaagctacctagtggagtcagtttcgcagctccacccatgttgacagtaagcacattcatgaagatataaaagccagtccttcatg

SEQ ID NO: 20914 - DNA, 120 bp, synthetic construct
  source 1..120: mol_type = other DNA
agtgcagtagtatgatctcggctcatgcaacctctgcctcccaggttcaagcaattctactgtctcagcctcccgagtagctggtaatacaggcgcccaccaccacacgcagctaatttt

SEQ ID NO: 20915 - DNA, 120 bp, synthetic construct; identical to SEQ ID NO: 6318
  source 1..120: mol_type = other DNA

SEQ ID NO: 20916 - DNA, 120 bp, synthetic construct
  source 1..120: mol_type = other DNA
tggcagctcctttggggttgctggcattagtctggcttgccagctatgaatgatcaaagcttcccactacagaatctgtcacagagctgcctctgtctgttttcttgaccaaaagtcaaa

SEQ ID NO: 20917 - DNA, 120 bp, synthetic construct
  source 1..120: mol_type = other DNA
aaaaacattataagttaatactctgaaaaacctgaagccaatcagttagaccacttagataaaatggacagatttatacaaagatagaaattgctgaaactgactcaaaaataaatagaa

SEQ ID NO: 20918 - DNA, 120 bp, synthetic construct
  source 1..120: mol_type = other DNA
gaagagaggaggcaagactttctagctcatttacagaactgacattaccctaatatcaaagtcagagcaagactgacaagaaaagaataccatagaccagtgtcaccaataaacataaat

SEQ ID NO: 20919 - DNA, 120 bp, synthetic construct; identical to SEQ ID NO: 6319
  source 1..120: mol_type = other DNA

SEQ ID NO: 20920 - DNA, 120 bp, synthetic construct
  source 1..120: mol_type = other DNA
cttttctcctaagatggagatcaatgcaaggatgtccaatccaacacttctacttaacattgtactggagattgcagctggtgcaataaggcaaataattaaaagttaaaggcatccaga

SEQ ID NO: 20921 - DNA, 120 bp, synthetic construct
  source 1..120: mol_type = other DNA
tcaaattaaaaattattaacatatttctctatacaagcaattaaaatctaaactttcctatcacagtagttacaaaaagagagaaataggaataaatttaggaagacagcagagtttgtt

SEQ ID NO: 20922 - DNA, 120 bp, synthetic construct
  source 1..120: mol_type = other DNA
acaatctctatcaaaaccccagcaggcattttatggaaaattgacaatttaatcctaaaaatgtatgtgaaaatgcagaggatgcagaaaagccaacgcaaatttgaaaaaaaatggaat

SEQ ID NO: 20923 - DNA, 120 bp, synthetic construct; identical to SEQ ID NO: 6320
  source 1..120: mol_type = other DNA

SEQ ID NO: 20924 - DNA, 120 bp, synthetic construct
  source 1..120: mol_type = other DNA
aaagtgagagacaaattgggcttagttaaaatttaaaacttaagtgctccaaaagacaatattgagaaaatgagaagacaagccgtagattgagagaaaatatttcacaatttatcacaa

SEQ ID NO: 20925 - DNA, 120 bp, synthetic construct
  source 1..120: mol_type = other DNA
cacaaaagcaattcaatgaaggaaggagagcttttccatcaaatggtgatggaacaactggacaaccacagtggaaaaaaaataacctgagccaaaacctcatgcttcatacaaaaataa

SEQ ID NO: 20926 - DNA, 120 bp, synthetic construct
  source 1..120: mol_type = other DNA
gtactctcagctactcaggaagctgaggtgggaggatcccttgagcccaggagttcaaggccagcctaggcaataattttttttctaaaataaataataaatttaaatttttaaattaca

SEQ ID NO: 20927 - DNA, 120 bp, synthetic construct; identical to SEQ ID NO: 6321
  source 1..120: mol_type = other DNA

SEQ ID NO: 20928 - DNA, 120 bp, synthetic construct
  source 1..120: mol_type = other DNA
aggaaaatacaaattaaaaccacagtgatgagaatggctgaaatacaaaataaaggtagcaacagatgctggcaaggacgcagaggaactgggacactcttatattgctggtagggatgt

SEQ ID NO: 20929 - DNA, 120 bp, synthetic construct
  source 1..120: mol_type = other DNA
caattgccctcctaggcacttatttcaaacgagggaatactttatgttcacgaaaatcctgtgcacaaatactcttgcagctttattcatgatacccccaaacaggaattaatacaactg

SEQ ID NO: 20930 - DNA, 120 bp, synthetic construct
  source 1..120: mol_type = other DNA
ttctcacaaagaatattaaacacgtatactcaaggatcaaactttaatccacataaattttttactgctccatcaaagacactcttaaatgggactgcagtttggagccactgcctggtt

SEQ ID NO: 20931 - DNA, 120 bp, synthetic construct; identical to SEQ ID NO: 6322
  source 1..120: mol_type = other DNA

SEQ ID NO: 20932 - DNA, 120 bp, synthetic construct
  source 1..120: mol_type = other DNA
tctgccgtatttggttaatatctctttatatacataaaaggagagtgtgaaatgatggaccatggagacccagaagggtaagggggttggcagttggtgtataatagaggggtttcttga

SEQ ID NO: 20933 - DNA, 120 bp, synthetic construct
  source 1..120: mol_type = other DNA
taaaaaataaaataacataacatgtttctttatagatacaggtagacatgtttgtatagcatgtgtgtgaatgtgtgtgtgtgcctgtgtgtgtgtgtccacctgtgtgtgtgtttccgt

SEQ ID NO: 20934 - DNA, 120 bp, synthetic construct
  source 1..120: mol_type = other DNA
aaataatatgtctataaacacatctctagatagatagcttatgaatgaattccctaccccagctcccttactggttgccctgtgaacacagggagtcagggaacaggacccagctagggt

SEQ ID NO: 20935 - DNA, 120 bp, synthetic construct; identical to SEQ ID NO: 6323
  source 1..120: mol_type = other DNA

SEQ ID NO: 20936 - DNA, 120 bp, synthetic construct
  source 1..120: mol_type = other DNA
gacctctactcttcgtaatcaggaaaccacaaagcactctccttcccctccctgatatcacccttcagctctacatcatcatatgtgggctctaactctgcagggaagatgttgccccac

SEQ ID NO: 20937 - DNA, 120 bp, synthetic construct
  source 1..120: mol_type = other DNA
tttctttatgctgtgtcaaagcatggagacagacctctccttctctcctgaacctcacactatcccttcccagacacttgaaataaaacgcagaccagaaatgtctatttaagagttaaa

SEQ ID NO: 20938 - DNA, 120 bp, synthetic construct
  source 1..120: mol_type = other DNA
gccaggaaagctggtgctgggccaggaccaaggagccatcagcaggacactcactcataatgctcacctataataatacaattactgcatatgtaatatatcaaaatataataaaataac

SEQ ID NO: 20939 - DNA, 120 bp, synthetic construct; identical to SEQ ID NO: 6324
  source 1..120: mol_type = other DNA

SEQ ID NO: 20940 - DNA, 120 bp, synthetic construct
  source 1..120: mol_type = other DNA
gaaaaaagagagaaaccaataaatgctcccctgggtgcagagtgctgctttttattccctgaggagttctccctcctcagtcactcccaaatcagatttaccctttctctgacggaagat

SEQ ID NO: 20941 - DNA, 120 bp, synthetic construct
  source 1..120: mol_type = other DNA
ggacccaggactaaggaacaagacccaggaggaaactcagtgccctttcctcctcctctcaagcctgaccagccctgacacagtgagaggcctccccaaagagaggccctggccctgtct

SEQ ID NO: 20942 - DNA, 120 bp, synthetic construct
  source 1..120: mol_type = other DNA
ccctccaccagcagctcactgttcctcccctcccagctctgagcagacagctcctaactagagatcctatcaggaagccctggggctcacaggccctgcatggaaatatgtggctgccat

SEQ ID NO: 20943 - DNA, 120 bp, synthetic construct; identical to SEQ ID NO: 6325
  source 1..120: mol_type = other DNA

SEQ ID NO: 20944 - DNA, 120 bp, synthetic construct
  source 1..120: mol_type = other DNA
tttgacttcctgttctattcaacatcctttacaacatcagtattgggggaaatcctattaagattatccagctgaaattatgttgatggacaccaatacttaaagcaggaattttgagaa

SEQ ID NO: 20945 - DNA, 120 bp, synthetic construct
  source 1..120: mol_type = other DNA
gcaggagcaaccacagacctgcactgcccgtgctgtggttgcctcctggacggggccctcttgctgcagggcaggggatgaaccgtcccatctgcccaggcctgagtggccaactaactg

SEQ ID NO: 20946 - DNA, 120 bp, synthetic construct
  source 1..120: mol_type = other DNA
ctctgtctttgcagaaactcaaaactttctgcttgctcttttcctctcccctcaaacaacctgactgtgggggaaatgattctgactgtctcttattgtaaacttaccaggcagcgacta

SEQ ID NO: 20947 - DNA, 120 bp, synthetic construct; identical to SEQ ID NO: 6326
  source 1..120: mol_type = other DNA

SEQ ID NO: 20948 - DNA, 120 bp, synthetic construct
  source 1..120: mol_type = other DNA
ggccatgtgcactcaggactctccctgttacaaggggacctcaaaggggctgtacacatgggggccctcattctgggcctcgtgggtctttttcttgatgtcctcctgatggctggagaa

SEQ ID NO: 20949 - DNA, 120 bp, synthetic construct
  source 1..120: mol_type = other DNA
agatcacatctgcctttactatttgctccctctgagatagtgatcatccaggccctcagcaatcagcacgcaattcccaactcacccacctggatgcgacctggtaagcctgagagacag

SEQ ID NO: 20950 - DNA, 120 bp, synthetic construct
  source 1..120: mol_type = other DNA
acttaagggtgtaaaaaataacctacatgtgatggttcattttcaattctatgtgccttagtataggtttaagcaggccacatggtcataaagagataaagaaggaaaatgtactaagcc

SEQ ID NO: 20951 - DNA, 120 bp, synthetic construct; identical to SEQ ID NO: 6327
  source 1..120: mol_type = other DNA

SEQ ID NO: 20952 - DNA, 120 bp, synthetic construct
  source 1..120: mol_type = other DNA
ctcagctaatgagcaactgggggagggagttgcgcactagggaataaattgttgaaactctccctggtgtgcctgcattccagacacccaatattgcaaaaccgtcactaacactctcac

SEQ ID NO: 20953 - DNA, 120 bp, synthetic construct
  source 1..120: mol_type = other DNA
ctgaaaggagaaacacgtaccaattgattcatgtggcccattctatctggatgtcctggctcctcgcagaagccatagacaaacttgaaactgttattcaggacacaatgaaagtgacat

SEQ ID NO: 20954 - DNA, 120 bp, synthetic construct
  source 1..120: mol_type = other DNA
tggggtggtgttggggctgtctatcgtctctacgtaatccagcaaactgtccctgagggagcctgatgatgcctaaagaatgaatgagattactctaggtatggccaagtaggagttata

SEQ ID NO: 20955 - DNA, 120 bp, synthetic construct; identical to SEQ ID NO: 6328
  source 1..120: mol_type = other DNA

SEQ ID NO: 20956 - DNA, 120 bp, synthetic construct
  source 1..120: mol_type = other DNA
gatatcctataggatattaaatcagctcatttcattgacaatttcatgtttactggggtggatgagcagcaggtagaaactgcactggagtccttggcaaaacaagcacactccagaagg

SEQ ID NO: 20957 - DNA, 120 bp, synthetic construct
  source 1..120: mol_type = other DNA
tcatcttgcatcctcaccagaaggaaggaagcacactgcctgatgagcctctttgagttctgatgacaccacattccacatttaggtgtgttgctttggcccacactctaggtgacatag

SEQ ID NO: 20958 - DNA, 120 bp, synthetic construct
  source 1..120: mol_type = other DNA
agatgcaggatggagctgaaccaagcaccagtgggagagtcacaatgaagggcctgggattctggagtaagatcatgtcatccacagcagagacatatgccccctgttagaagcaacatt

SEQ ID NO: 20959 - DNA, 120 bp, synthetic construct; identical to SEQ ID NO: 6329
  source 1..120: mol_type = other DNA

SEQ ID NO: 20960 - DNA, 120 bp, synthetic construct
  source 1..120: mol_type = other DNA
agctactgccactcctgaatgtcaactcgtcagcatttggagcccatgatgtgccctagtggggcgctatttctttaggcgaccagccactaagtaacaagtgactacatttagctactt

SEQ ID NO: 20961 - DNA, 120 bp, synthetic construct
  source 1..120: mol_type = other DNA
gatctgcaggctaggcggtgctcctagcccattctctgcctgaaggacccatttggcctggaaagttttaaagtttccatggctgtgggttccactaatcctatcaccatctgcaccacc

SEQ ID NO: 20962 - DNA, 120 bp, synthetic construct
  source 1..120: mol_type = other DNA
aagtgccatctttcagaacatggtacattgtttgaatcagagatgtctctatggtgctgtgttctcaatggaagaacatgtaggtccagaaatcaaaaggtggaagcaggtatggctcca

SEQ ID NO: 20963 - DNA, 120 bp, synthetic construct; identical to SEQ ID NO: 6330
  source 1..120: mol_type = other DNA

SEQ ID NO: 20964 - DNA, 120 bp, synthetic construct
  source 1..120: mol_type = other DNA
tgggtccccttgccccattgtaagtgtgagcagaatcatccagcaatttagcctgagaggatttgatttccaagaacccagacccatctgggcagcaggtttgagtcacactcctgggta

SEQ ID NO: 20965 - DNA, 120 bp, synthetic construct
  source 1..120: mol_type = other DNA
ttcctgggagacaggggactcctctgatggccaatggtggctccgggtctcctccatggccttgctcaactctccttagattgcctgtggtctaggaaacatccagtaaaccttctctcc

SEQ ID NO: 20966 - DNA, 120 bp, synthetic construct
  source 1..120: mol_type = other DNA
cccatgatggcacttgctttttggaggatttggactacaaaatcattttcatctacacaccagtgtcctcttattccaatttgtaaaatccttttgtttattcaacttcttctacttgcg

SEQ ID NO: 20967 - DNA, 120 bp, synthetic construct; identical to SEQ ID NO: 6331
  source 1..120: mol_type = other DNA

SEQ ID NO: 20968 - DNA, 120 bp, synthetic construct
  source 1..120: mol_type = other DNA
tccccttccccttccttcttttcttctttcactccttcttctcttcctccttctttccctcccttcctccattttttcctttttattatgaaaatttcctaacatataaaataaccctat

SEQ ID NO: 20969 - DNA, 120 bp, synthetic construct
  source 1..120: mol_type = other DNA
ataattctgcagccaagacagcggctttcaactcaattccttcaactcagtgttttcagaacacatcatcaacatcaagtattacgcacttatttcaaaagtttaagccaggcgtggtgg

SEQ ID NO: 20970 - DNA, 120 bp, synthetic construct
  source 1..120: mol_type = other DNA
aacatggtaaaaccccattgtcgcaatcggttactatgggatataatgaagggggatgaacacagaaataaagacaaagacaaaaagatctgttctaaaagaaggggtcgggggcttctt

SEQ ID NO: 20971 - DNA, 120 bp, synthetic construct; identical to SEQ ID NO: 6332
  source 1..120: mol_type = other DNA

SEQ ID NO: 20972 - DNA, 120 bp, synthetic construct
  source 1..120: mol_type = other DNA
aaataagtttaagttggcacaatcactttggaaatcatattattattatctagtatggttaaaggccatataacatatcatccaatcatcccactcctaatcatacactctgcgggcttt

SEQ ID NO: 20973 - DNA, 120 bp, synthetic construct
  source 1..120: mol_type = other DNA
gcagtaaaaacgaatgaatgacagcctcccacaccacagataactcctatatgtaatgtgcatcatgggaaaataaatgcagtaggaatttgctgtactggaagcttaaaaaccatcaaa

SEQ ID NO: 20974 - DNA, 120 bp, synthetic construct
  source 1..120: mol_type = other DNA
tagaccaatggaacagaacagagaactcagaaataagaccacacatctaaataaaggaataataatcacaagactcaggatggagtctccttttgggggatgtgaatgggcagcagccca

SEQ ID NO: 20975 - DNA, 120 bp, synthetic construct; identical to SEQ ID NO: 6333
  source 1..120: mol_type = other DNA

SEQ ID NO: 20976 - DNA, 120 bp, synthetic construct
  source 1..120: mol_type = other DNA
ccacgaggccatgaaaacggctttggctacaaataggtcatttgatccttggctcactggcatctctgtagattttcatgtatacaatcttcaatctgatgtgcaaggtaattccatctt

SEQ ID NO: 20977 - DNA, 120 bp, synthetic construct
  source 1..120: mol_type = other DNA
gtgacggaatagcaatatgaatagaaaacacaataggactgcgaaaacaaagaaacaaacaaaaccacttcagaagcacctgatggcatgctatttagaatcatagtggtgtccaaatca

SEQ ID NO: 20978 - DNA, 120 bp, synthetic construct
  source 1..120: mol_type = other DNA
aaaaactagtttctcaattcgagctaacaatttcgtgatactgcatcaaaccgaagttattggcatgctagatgtgttgactgaagtatgagattcacatctttgtaaatgaaaagcaat

SEQ ID NO: 20979 - DNA, 120 bp, synthetic construct
  source 1..120: mol_type = other DNA
acgatatttcaataagaaaactggcactaggggcatacttcccctaaatttgagacattttagacaaaacaaagacttattttcaaggcattatttttatagcactaaagtcttggaact

SEQ ID NO: 20980 - DNA, 120 bp, synthetic construct; identical to SEQ ID NO: 6334
  source 1..120: mol_type = other DNA

SEQ ID NO: 20981 - DNA, 120 bp, synthetic construct
  source 1..120: mol_type = other DNA
ctacaaggctacagtaactgaaacagcaaggtactggtacaaaaacaggcacatagaccaatggaacagaatagagaactcagaaataagaccacacatctaaaaccctgtgatcttcaa

SEQ ID NO: 20982 - DNA, 120 bp, synthetic construct
  source 1..120: mol_type = other DNA
aattaacttaagatggattaaagacttaaatgtaaatcccaaaactataaaaaccctggaagaaaatctaggcaataccaatcaggacatagggatgggcaaagattttatgatgaaaat

SEQ ID NO: 20983 - DNA, 120 bp, synthetic construct
  source 1..120: mol_type = other DNA
aatttttgcagtctgtccacctgacaaaggtctcatattcagaagctacaaagaacttaagcaaatttacaccaaaaaaaaagcttcattaaaaagtggacaaaggacctaaacagacac

SEQ ID NO: 20984 - DNA, 120 bp, synthetic construct; identical to SEQ ID NO: 6335
  source 1..120: mol_type = other DNA

SEQ ID NO: 20985 - DNA, 120 bp, synthetic construct
  source 1..120: mol_type = other DNA
cactattcacaatagcaaagacatggaatcaacccaaatgcccacaaatgaggaactggataaagaaaatatggtacatatacaccacggaatattatgcaaccataaaaaggaatgaga

SEQ ID NO: 20986 - DNA, 120 bp, synthetic construct
  source 1..120: mol_type = other DNA
tacatggaaccagggagaggaaaaacacacaatggggcctgttcggggagggcagtgatggggggatcattaggaaaaatagctaatgaatgccagggttaacacctaggtgatgggttg

SEQ ID NO: 20987 - DNA, 120 bp, synthetic construct
  source 1..120: mol_type = other DNA
gcattaaagaaaaataattagataaaagaagtctttgatttacaaaatcctgaaacaatagttttaattttgcttttaacatatacgtaagtcctttagtacagctctctttcagaggtg

SEQ ID NO: 20988 - DNA, 120 bp, synthetic construct; identical to SEQ ID NO: 6336
  source 1..120: mol_type = other DNA

SEQ ID NO: 20989 - DNA, 120 bp, synthetic construct
  source 1..120: mol_type = other DNA
tggcttccagcttcatccatatccctgcaaaggacttgatctcattcctttttatggctgcataatattccatggtgtatatgtaccatataaggggattttccccacttcactctgcat

SEQ ID NO: 20990 - DNA, 120 bp, synthetic construct
  source 1..120: mol_type = other DNA
tttataaattacccagtctcaggtatttctttatagcagtgtgagaacagactaatacaacttctaactgatagagtaatgttgacataacagtttgtgactctgggtgtagaatgtgaa

SEQ ID NO: 20991 - DNA, 120 bp, synthetic construct
  source 1..120: mol_type = other DNA
ctgggaccagacagcaaggaactaggcttttccaacagccatgtgactaagccatgtttcacatgaatccctagccccagtgaagccctcagacgatgcagccctaggctgacaactgga

SEQ ID NO: 20992 - DNA, 120 bp, synthetic construct; identical to SEQ ID NO: 6337
  source 1..120: mol_type = other DNA

SEQ ID NO: 20993 - DNA, 120 bp, synthetic construct
  source 1..120: mol_type = other DNA
aattaacatgcctggctaattttctaatttttttgtagagatgggggtttcaccatgttgcccaggctgatcttgaacttctggagtcaaatctgccttcctctgccttcaacagtgcta

SEQ ID NO: 20994 - DNA, 120 bp, synthetic construct
  source 1..120: mol_type = other DNA
tcacaatgatcactttacttgaacttcaatttccaactgtgtccaaattaaacacaaaaggaagatccagcccttcctgggctgattctatcatggctcccaacaaccagctcctggtca

SEQ ID NO: 20995 - DNA, 120 bp, synthetic construct
  source 1..120: mol_type = other DNA
tcctaataaggagagtccttgaaaggactgggttcttcctgagcatagagattcacagtgtgagagggattcagcataaggggtttcctccactgtgggctttgaaaatgaaggggctgt

SEQ ID NO: 20996 - DNA, 120 bp, synthetic construct; identical to SEQ ID NO: 6338
  source 1..120: mol_type = other DNA

SEQ ID NO: 20997 - DNA, 120 bp, synthetic construct
  source 1..120: mol_type = other DNA
actttgagaccagctaggataatatagtgagacactcgtctctacatttctttttaattagctgggcatggtggcacttgcctgcagtcctagctactctgaagactgaggtaggagggt

SEQ ID NO: 20998 - DNA, 120 bp, synthetic construct
  source 1..120: mol_type = other DNA
tgtttaaagccaatgtttgtgacaatttgttacccagtcttataaaattcatacacagactcaaaagactcctggaatgaactgatgaattgatacgcacactagttacataaaataaaa

SEQ ID NO: 20999 - DNA, 120 bp, synthetic construct
  source 1..120: mol_type = other DNA
gccctcatatgctcaagtgcctgacattctagaagcttcacaagaatgaggtggagccactggagtgttttaggtggagaaatgacacactctgactcatagtagcaggaccactataga

SEQ ID NO: 21000 - DNA, 120 bp, synthetic construct; identical to SEQ ID NO: 6339
  source 1..120: mol_type = other DNA

SEQ ID NO: 21001 - DNA, 120 bp, synthetic construct
  source 1..120: mol_type = other DNA
actaagtattcctaaaaaatatacactccactcacatgtggatacttcctaaaaacaggcagtgcgtgagcactagtgaggggcattgtgactgcactgaacacttacaactgtgaggtg

SEQ ID NO: 21002 - DNA, 120 bp, synthetic construct
  source 1..120: mol_type = other DNA
acacggaaacttagggctacggaatgaaggtaaatttaaaataaaacaagcgggagtcacagatacactgtctgggaaagtgaaacttaagagctttgtgagtcgtgttgtaatgctttt

SEQ ID NO: 21003 - DNA, 120 bp, synthetic construct
  source 1..120: mol_type = other DNA
tgctacccactatagttaataaacaaaaagcaaactggtctctattctatctcatgcactcaggcacaacttttccagatttaagggggaaaaaaaaccctgtctttacacctacaatcc

SEQ ID NO: 21004 - DNA, 120 bp, synthetic construct
  source 1..120: mol_type = other DNA
tgaaaagtgaagggagagggccagggaccttgccgagggtttctccctggtttctcagacagctcctgggccaagactcagggagacactgagacagaacgcttggcacaagagtagcgg

SEQ ID NO: 21005 - DNA, 120 bp, synthetic construct; identical to SEQ ID NO: 356
  source 1..120: mol_type = other DNA

SEQ ID NO: 21006 - DNA, 120 bp, synthetic construct
  source 1..120: mol_type = other DNA
accctgaccgagacctgggcgggtgagtgcggggtcaggagggaaacagcccctgcgcggaggagggaggggccggcccggcgggggcgcaggactcggcagccgcgccgggaggagggt

SEQ ID NO: 21007 - DNA, 120 bp, synthetic construct
  source 1..120: mol_type = other DNA
acgcagttcgtgcggttcgacagcgactcggcgtgtccgaggatggagccgcgggcgccgtgggtggagcaggaggggccggagtattgggaagaggagacacggaacaccaaggcccac

SEQ ID NO: 21008 - DNA, 120 bp, synthetic construct
  source 1..120: mol_type = other DNA
cccgggtactcccgagtctccgggtctgggatccaccccgaggccgcgggacccgcccagaccctctacctgggagaaccccaaggcgcctttaccaaaatccccgcgggtgggtccggg

SEQ ID NO: 21009 - DNA, 120 bp, synthetic construct; identical to SEQ ID NO: 6341
  source 1..120: mol_type = other DNA

SEQ ID NO: 21010 - DNA, 120 bp, synthetic construct
  source 1..120: mol_type = other DNA
agacctctcagcctggcctagcacaaggagaggaggaaaatgggaccaacactagaatatcgccctccctctggtcctgagggagaggaatcctcctgggtttccagatcctgtaccaga

SEQ ID NO: 21011 - DNA, 120 bp, synthetic construct
  source 1..120: mol_type = other DNA
ccttggcaccaggacttttcccctcaggccttgttctctgcctcacactcaatgtgtgtgggggtctgactccagctcctctgagtcccttggcctccactcaggtcagaaccggaggtc

SEQ ID NO: 21012 - DNA, 120 bp, synthetic construct
  source 1..120: mol_type = other DNA
cttaggatggtcacatccaggtgctgctggagtgtcccatgagagatgcaaagtgcttgaattttctgactcttcctttcagacccccccaagacacacgtgacccaccaccctgtcttt

SEQ ID NO: 21013 - DNA, 120 bp, synthetic construct; identical to SEQ ID NO: 6342
  source 1..120: mol_type = other DNA

SEQ ID NO: 21014 - DNA, 120 bp, synthetic construct
  source 1..120: mol_type = other DNA
agcagtcttccctgcccaccatccccatcatgggtatcgttgctggcctggttgtccttgcagctgtagtcactggagctgcggtcgctgctgtgctgtggagaaagaagagctcaggta

SEQ ID NO: 21015 - DNA, 120 bp, synthetic construct
  source 1..120: mol_type = other DNA
cctgggccctgtgtgccagcaccttctcttttgtaaagcacctgtgacaatgaaggacagatttattaccttgatgattgtagtgatggggacctgatcccagtaatcacaggtcaggag

SEQ ID NO: 21016 - DNA, 120 bp, synthetic construct
  source 1..120: mol_type = other DNA
gccctgggtctgcagtcacacatttctggaaacttctcgagggtccaagactaggaggttcctctaggacctcatggccctgccacctttctggcctctcacaggacattttcttcccac

SEQ ID NO: 21017 - DNA, 120 bp, synthetic construct
  source 1..120: mol_type = other DNA
tttgggagcccatgggggagctcacccaccccacaattcctcctctggccacatctcctgtggtctctgaccaggtgctgtttttgttctactctaggcagtgacagtgcccagggctct

SEQ ID NO: 21018 - DNA, 120 bp, synthetic construct; identical to SEQ ID NO: 6343
  source 1..120: mol_type = other DNA

SEQ ID NO: 21019 - DNA, 120 bp, synthetic construct
  source 1..120: mol_type = other DNA
gcattccttccccaatcacctttcctgttccagaaaaggggctgggatgtctccgtctctgtctcaaatttgtggtccactgagctataacttacttctgtattaaaattagaatctgag

SEQ ID NO: 21020 - DNA, 120 bp, synthetic construct
  source 1..120: mol_type = other DNA
aaaataaatggaagacatgagaactttccacagtacacgtgtttcttgtgctgatttgttgcaggagaggagagtagatggggctgcgcccagtgggtgctcaggccaccatgaacttta

SEQ ID NO: 21021 - DNA, 120 bp, synthetic construct
  source 1..120: mol_type = other DNA
gtgatcacatagacttggatatcacctaggatggtccctacacgtagaagttcctgtgttatcagaagaaaaattttcagacccctacacctcttcccctccttccaggtctctttcaat

SEQ ID NO: 21022 - DNA, 120 bp, synthetic construct
  source 1..120: mol_type = other DNA
tctcagcctccctagtaactgggagtacaggcacatgccacaatacccagctaattttttgtatttttagtaaagacgggatttcaccatgttagccaggatggtcttgatctcctgacc

SEQ ID NO: 21023 - DNA, 120 bp, synthetic construct; identical to SEQ ID NO: 6344
  source 1..120: mol_type = other DNA

SEQ ID NO: 21024 - DNA, 120 bp, synthetic construct
  source 1..120: mol_type = other DNA
tgggaggagggagggagggaggacacaaaagcagccctggtgagaaaagcactggtgcatttatatccacatgagataatattgttccacagcggctacaaaatgacatttggcctgagt

SEQ ID NO: 21025 - DNA, 120 bp, synthetic construct
  source 1..120: mol_type = other DNA
taggtatttgactgtttttgcatttagaaaacatcgttaaagtaaaaacagaaaaatttctggccttgtcgtgtatacattctagatgcaagcttgtccaacctgcagctctcgggatgc

SEQ ID NO: 21026 - DNA, 120 bp, synthetic construct
  source 1..120: mol_type = other DNA
cattagtgtattttttgtgtggctcaagacaattcttcttcctatgtgacccagggaagccaaaagattggacacctctgcaggcagatgatatagtataagcagagtaggaacagaaaa

SEQ ID NO: 21027 - DNA, 120 bp, synthetic construct; identical to SEQ ID NO: 6345
  source 1..120: mol_type = other DNA

SEQ ID NO: 21028 - DNA, 120 bp, synthetic construct
  source 1..120: mol_type = other DNA
gagttagaggacagttttggaaagtgggacatggtaggacttatcctttgaaagcttctctctggctgctgtgctgagaacagaattgagaggtgggggactagtgaggcagtgggaaaa

SEQ ID NO: 21029 - DNA, 120 bp, synthetic construct
  source 1..120: mol_type = other DNA
gatttatctgtggtgtgagaaagaagaatcaaggacacccacagtattggactgagtgagcagaagggtggagctgctgtcaatggagatggggagactctggcaggagcatacagagga

SEQ ID NO: 21030 - DNA, 120 bp, synthetic construct
  source 1..120: mol_type = other DNA
tctcagagccagagcattgattctcccctgtgctgtctgcacaggtaggtgaaagtcagggaagttatggtctgctgttggttataataagtcacagattattgtgctttctcagataat

SEQ ID NO: 21031 - DNA, 120 bp, synthetic construct; identical to SEQ ID NO: 6346
  source 1..120: mol_type = other DNA

SEQ ID NO: 21032 - DNA, 120 bp, synthetic construct
  source 1..120: mol_type = other DNA
aagatagaaaagaaataccagacaaacattcatgaaagaccacatggagatgccatttagaaaaattacagcacatgagtctcctgagacatagagtacatgtagacagctcacagtgtc

SEQ ID NO: 21033 - DNA, 120 bp, synthetic construct
  source 1..120: mol_type = other DNA
tagctaggacgagaagcctgtgccgccacacctggctataatgtctcattttctcatttgctgtggtgtgaacaaggaaacaatatcataccatgtatttgacttgcagcaggtacacaa

SEQ ID NO: 21034 - DNA, 120 bp, synthetic construct
  source 1..120: mol_type = other DNA
atccagagcagaatcgagaacacattccctgtgctaaaggaatcagaactctactaggggtcatagcagatatcatgcaagtcacatatgttaattactagaactggagttgatacattt

SEQ ID NO: 21035 - DNA, 120 bp, synthetic construct
  source 1..120: mol_type = other DNA
gttagaatctttaaagaaacaacatctttttaaagtggccttatgtggaccaaagcagagatgagctcaaatgtcaggtgggaaaatgcttgactaaatgcagctctagacccaagggag

SEQ ID NO: 21036 - DNA, 120 bp, synthetic construct; identical to SEQ ID NO: 6347
  source 1..120: mol_type = other DNA

SEQ ID NO: 21037 - DNA, 120 bp, synthetic construct
  source 1..120: mol_type = other DNA
caatcccagctgcgcggtgccttcatggtctgtggcgccccctggtgttgacactgggcctgtggccaaatgaggcttgagggaaaaggaaaacgggtttaggtagcgggatctccttca

SEQ ID NO: 21038 - DNA, 120 bp, synthetic construct
  source 1..120: mol_type = other DNA
cagttccggccagtaccctccctcgactccatcaacatcagtacctgccagatgcccagcacccaccatgtgaggagtgaaaatgccccaggactaaaggacaagatgacgttccacccc

SEQ ID NO: 21039 - DNA, 120 bp, synthetic construct
  source 1..120: mol_type = other DNA
tgacttcattacaggacattggatattaatattcatccgatcaactgggggcccaagataccactcttcccccaacagtttgtgatcctctgaattaaagaaagggcagagattgaggga

SEQ ID NO: 21040 - DNA, 120 bp, synthetic construct; identical to SEQ ID NO: 6348
  source 1..120: mol_type = other DNA

SEQ ID NO: 21041 - DNA, 120 bp, synthetic construct
  source 1..120: mol_type = other DNA
ttttcctcatcatgaagttctcctggagggaccttctcccttcagcagtgcatagtgaggccatttctgtgtaaaaagatagaatctccttggattcctgatgtttacatttactactca

SEQ ID NO: 21042 - DNA, 120 bp, synthetic construct
  source 1..120: mol_type = other DNA
agctatcaccccactctgtggctctcttatgcaataagcataagagattgtgggccaacagaatttgtagcaagataaacataaacccttcatttcagcctatgtttctgtttgtctggt

SEQ ID NO: 21043 - DNA, 120 bp, synthetic construct
  source 1..120: mol_type = other DNA
acaactgtgaagtaaagacatgtaaataaattcatggtgctcccatgtattcgtgctcattgcatcttacaaatgtgtcagccccactgcaacagatggtgcatcaacaaatggtgctgg

SEQ ID NO: 21044 - DNA, 120 bp, synthetic construct; identical to SEQ ID NO: 6349
  source 1..120: mol_type = other DNA

SEQ ID NO: 21045 - DNA, 120 bp, synthetic construct
  source 1..120: mol_type = other DNA
tcaggagttcgaaatcagcctggccaacatggcaaaaccctgtctctactaaaaatacaaaaattagccgggcgcagtggtgggcacctgtaatcccagctactcgggaggctgaggcag

SEQ ID NO: 21046 - DNA, 120 bp, synthetic construct
  source 1..120: mol_type = other DNA
aaaaaaaaaagtgaaaataaaagaaactgcatagaataagataaaatatttgccaatcacatatctgataaagaattaatatccagactacatacagaactacaacttaacaatagcaaa

SEQ ID NO: 21047 - DNA, 120 bp, synthetic construct
  source 1..120: mol_type = other DNA
gaattccaataaggacatgaaaatatgctcagcttcactagtccaggtgttggtgaggatgtggagaaaatggaatgcttgtgcactgctgctgagagtgaacaacagtgcagccatcat

SEQ ID NO: 21048 - DNA, 120 bp, synthetic construct; identical to SEQ ID NO: 6350
  source 1..120: mol_type = other DNA

SEQ ID NO: 21049 - DNA, 120 bp, synthetic construct
  source 1..120: mol_type = other DNA
caaaaacagaaagtagaatacaggttaccaggggctgaaggcaggaacaatgggcagctgtcatttaatgggtacagtctctgttgggatgatgaaaatgttctgaaaatgcatgttggt

SEQ ID NO: 21050 - DNA, 120 bp, synthetic construct
  source 1..120: mol_type = other DNA
tcaacaccaaatccaatcacttctcactcctctgccacctccaccccagaaccatcctcactaggatagaaaaccggaagggccttccagctgggctgcctgctgactctcatgcccact

SEQ ID NO: 21051 - DNA, 120 bp, synthetic construct
  source 1..120: mol_type = other DNA
tatgcactccttatcacagggtcccctctggccactttggcctcatcccattactctcagcctagctcattcttctccactcacaccagtttcttgtctactccaccctgtctctaccac

SEQ ID NO: 21052 - DNA, 120 bp, synthetic construct; identical to SEQ ID NO: 6351
  source 1..120: mol_type = other DNA

SEQ ID NO: 21053 - DNA, 120 bp, synthetic construct
  source 1..120: mol_type = other DNA
atagatgatagatgatagatagatgttagatgatgatagatagatagatagatagatagatagatagatagatagatagacagacagatagataggtgatttattgggctaattggctca

SEQ ID NO: 21054 - DNA, 120 bp, synthetic construct
  source 1..120: mol_type = other DNA
ccaaagtcaaagccctgaggacccagaatacagaacaggaggataaaggggctcactggtgcaaaagtcagagtccaaagatcatcgaacctggagttttgatgtccaaggcaggagaag

SEQ ID NO: 21055 - DNA, 120 bp, synthetic construct
  source 1..120: mol_type = other DNA
tggactgtggctgcccacagtgagagagcatcttccccaccagtccacccactcacatcccttccagaaaaactctcacagacactggtttaatacttacaatttgagtagtctataatt

SEQ ID NO: 21056 - DNA, 120 bp, synthetic construct; identical to SEQ ID NO: 6352
  source 1..120: mol_type = other DNA

SEQ ID NO: 21057 - DNA, 120 bp, synthetic construct
  source 1..120: mol_type = other DNA
aaaagacaagatgaaagcacatggatctaaaagaaccctggtgacttctccttgtttgagatgggatgcagcttctagaagtgtgtaaattttatgcagactttatgacatggaaaacta

SEQ ID NO: 21058 - DNA, 120 bp, synthetic construct
  source 1..120: mol_type = other DNA
cccatctatattaaaaacacaaaattagccaggcgtggtagtgcacatctgtaatcccagctactcgaggggctgaggcagaagactcacttgcatccgagatgcagaggttgcagtgag

SEQ ID NO: 21059 - DNA, 120 bp, synthetic construct
  source 1..120: mol_type = other DNA
tagaaaacaaaagaatggaagtcagcatcactgcagaagatagctccagggatgaccattcacactgcagtccaggaagtttcaataatatgatagcagtggttctttggaggggaagcc

SEQ ID NO: 21060 - DNA, 120 bp, synthetic construct; identical to SEQ ID NO: 6353
  source 1..120: mol_type = other DNA

SEQ ID NO: 21061 - DNA, 120 bp, synthetic construct
  source 1..120: mol_type = other DNA
atctcaacctaaaacaaatttctcatttgaagtccatatggcagaaatgcctactgatggctcctccagagagtaaaaaaaatattgttcctctacaatccatgactcatccttctgtta

SEQ ID NO: 21062 - DNA, 120 bp, synthetic construct
  source 1..120: mol_type = other DNA
tataattaccatcacacctgagagagtgagatggattcttttcttccacagatgaaaatctgagtccctgagaacctagggttttggtatgggttcactgaaaatgttggccttgagaat

SEQ ID NO: 21063 - DNA, 120 bp, synthetic construct
  source 1..120: mol_type = other DNA
ggcattcagttgatggatgggccaagataagaatacagctccttccttcaattgggggtggcagaggggtgaatcagtcagctacacataatgtgtgtggtgtttctacagatatcttta

SEQ ID NO: 21064 - DNA, 120 bp, synthetic construct; identical to SEQ ID NO: 6354
  source 1..120: mol_type = other DNA

SEQ ID NO: 21065 - DNA, 120 bp, synthetic construct
  source 1..120: mol_type = other DNA
tttgctctgggtaggagatgatgtcctgagaagaaaagacagataggcagattctcaagcaaactcaggagtttactatacaaaagattttggaataccttcctcagcctctttttcatt

SEQ ID NO: 21066 - DNA, 120 bp, synthetic construct
  source 1..120: mol_type = other DNA
aatgttatgtaaccatcatcactctctagttccagagtgtttttatcacctcagggggaactctgcacccattaagcagtcaccctccatttccacctgccagcagaccctgtcgccaca

SEQ ID NO: 21067 - DNA, 120 bp, synthetic construct
  source 1..120: mol_type = other DNA
ttcacaaaaatgggctcataagttacgtagcctcctgtgactggcttccttcacttgtcttgttttcaagattcagcaatgttttagcatatgccagtgctttattcattttatgaccaa

SEQ ID NO: 21068 - DNA, 120 bp, synthetic construct
  source 1..120: mol_type = other DNA
tgtgtatatatatatgtcttgtagggttgagacaatctcagtcagctttttttaacctgtgaatgtcgtgatttctccatcatttctgaaggagagttttgcagacatacaattcttggt

SEQ ID NO: 21069 - DNA, 120 bp, synthetic construct; identical to SEQ ID NO: 6355
  source 1..120: mol_type = other DNA

SEQ ID NO: 21070 - DNA, 120 bp, synthetic construct
  source 1..120: mol_type = other DNA
agttattattcctccaaatagccattcttctttttctctctcctttctttgaggattcccaaaatgcatatgcttggtgttgtctcacagttttcttaagttctgttcatttttcttcat

SEQ ID NO: 21071 - DNA, 120 bp, synthetic construct
  source 1..120: mol_type = other DNA
ctctagtaaaatatagtaaaaaatagtaaaattactctagtaaatttttcatttcagttattgcacttttcagctccaaaatttctatttggtttctttttaaactttctatctttttat

SEQ ID NO: 21072 - DNA, 120 bp, synthetic construct
  source 1..120: mol_type = other DNA
atgttcaatggcctttctcaggaacagtttctgtcaattcctcttttttcttgagaatgggtcttactgtctagtttaattgcatacctcatttttattttgaatactaacatgtggtga

SEQ ID NO: 21073 - DNA, 120 bp, synthetic construct; identical to SEQ ID NO: 6356
  source 1..120: mol_type = other DNA

SEQ ID NO: 21074 - DNA, 120 bp, synthetic construct
  source 1..120: mol_type = other DNA
gggatatggaagcttttcaaaacccatattcccatctcactcacccagtttctcctccaggcttttctgtatgtctattacctttctcatgtaatatatttttgccccaagggggcagct

SEQ ID NO: 21075 - DNA, 120 bp, synthetic construct
  source 1..120: mol_type = other DNA
ttttttagacaaggtcttgctctgaagcccaagctggagtgcagttgcacgatcctggctcactgtagcctcaacctcctgggcttaagcaatcctcccacctcagcctcttgagtagct

SEQ ID NO: 21076 - DNA, 120 bp, synthetic construct
  source 1..120: mol_type = other DNA
gcttcccaaagtgctgtgattacaggcatgagtcaccatgcccagcccaatgtaagccatttcttatcatccttcacggagtcacccaacaggaaaaggtagacaaccacaacactttga

SEQ ID NO: 21077 - DNA, 120 bp, synthetic construct; identical to SEQ ID NO: 6357
  source 1..120: mol_type = other DNA

SEQ ID NO: 21078 - DNA, 120 bp, synthetic construct
  source 1..120: mol_type = other DNA
tgcaacctctgcctcccgggttcaagcgattctccttcctcacctcccgagtagctgggactacaggcgcgagccaccacacccagctaattttgtatatttagtagagactgggattct

SEQ ID NO: 21079 - DNA, 120 bp, synthetic construct
  source 1..120: mol_type = other DNA
gtgatgttttacaagcacattgtctctgtgcagaggtggcccttggagttcctatgccactatgttctctgatgtcactcctcagccacctttgaattgtgcttatgcatcagaattcct

SEQ ID NO: 21080 - DNA, 120 bp, synthetic construct
  source 1..120: mol_type = other DNA
atggagttgagcctcagataaaagactcaaacttccttggacttcatagaagtcaaaggtgggggtgggaagataaataaagaaattatagcacagcatgttatgtattttacatgactt

SEQ ID NO: 21081 - DNA, 120 bp, synthetic construct; identical to SEQ ID NO: 6358
  source 1..120: mol_type = other DNA

SEQ ID NO: 21082 - DNA, 120 bp, synthetic construct
  source 1..120: mol_type = other DNA
accagttgcttcttagaggatctgtgtttctcctgtggcaaattttaagatatctgtttctctttaacatcttctgttccagtgcagtatgagtaaatgtggatctctttttattcacag

SEQ ID NO: 21083 - DNA, 120 bp, synthetic construct
  source 1..120: mol_type = other DNA
tcacctgttccaccctgactcatcctgattacttgctccagcctgactcattctggttacctgctccaccctgactcattccagtcacctgctccaccctgactcattctgattacctgc

SEQ ID NO: 21084 - DNA, 120 bp, synthetic construct
  source 1..120: mol_type = other DNA
agcctgtgcggtctaaccctagccaataggggaataacacagcagcaggggccacgtgcatcagggataagaaccccttccccttccttgtccaggggtgtgctcaccattgctccatct

SEQ ID NO: 21085 - DNA, 120 bp, synthetic construct; identical to SEQ ID NO: 6359
  source 1..120: mol_type = other DNA

SEQ ID NO: 21086 - DNA, 120 bp, synthetic construct
  source 1..120: mol_type = other DNA
gactttgctgatatgattaagagcatggacctttagatgtggagattattttgtattatttgagtggccccaatctgattgcatgatttctttaacctggagatgactggagaaatatgg

SEQ ID NO: 21087 - DNA, 120 bp, synthetic construct
  source 1..120: mol_type = other DNA
ttaagtggcaaaatgcattaaaaggtttaaagtttaaatatccttgcattcttgggctatataccttggtcaagacagtctgtttataacacattggttaatacagtctactaatatttt

SEQ ID NO: 21088 - DNA, 120 bp, synthetic construct
  source 1..120: mol_type = other DNA
ctgagactacaactctttgccatccgtaatgaatgaacagatctagccactgaacagcaatgacaattttcatcaccaaagggaaataaccagtattaaactcttccccttgttgaaaaa

SEQ ID NO: 21089 - DNA, 120 bp, synthetic construct; identical to SEQ ID NO: 6360
  source 1..120: mol_type = other DNA

SEQ ID NO: 21090 - DNA, 120 bp, synthetic construct
  source 1..120: mol_type = other DNA
cttctaggtcagctgacaaacttctctctctttctgatggttaaagagtgtttactgttgattaaaggtcaccattttaagattttttttcttttatgtcacctgtgttttatgacaaaa

SEQ ID NO: 21091 - DNA, 120 bp, synthetic construct
  source 1..120: mol_type = other DNA
cagggctgtctcattactgagtgtgcatccagctccacggttcctgttctgcacaaagcctcctccccatcctcctctctggacactgagcacccagaacaaccggcagccccaggaccc

SEQ ID NO: 21092 - DNA, 120 bp, synthetic construct
  source 1..120: mol_type = other DNA
acccctggcagggctgtctcattactgagtgtgcatccagctccacggttcctgttctgcacaaagcctcctccccatcctcctctctggacactgagcacccagaacaaccggcagccc

SEQ ID NO: 21093 - DNA, 120 bp, synthetic construct; identical to SEQ ID NO: 6361
  source 1..120: mol_type = other DNA

SEQ ID NO: 21094 - DNA, 120 bp, synthetic construct
  source 1..120: mol_type = other DNA
ttcccctgaacacggtgacagggatctctccacaggtagagatgacaccattcctcctgtaacatggtccaatctcacgcttgttctgctttacaagaaagttgacccacgctggtgtcc

SEQ ID NO: 21095 - DNA, 120 bp, synthetic construct
  source 1..120: mol_type = other DNA
gcctgctggggctgagattgaaggtggggagaaggatgtcacagctcatcgcacaggttcccggtaaaaatcctcctgcccagcctagcgggctctcccttaatcaactgtagcgaaaac

SEQ ID NO: 21096 - DNA, 120 bp, synthetic construct
  source 1..120: mol_type = other DNA
ataataaaataacccatgataagccaatgtttataatgtactaacaccactgagccagtgtttataatgtactgacacactccaagtgtgggcacagctgcagacatgccttgtctcttg

SEQ ID NO: 21097 - DNA, 120 bp, synthetic construct; identical to SEQ ID NO: 6362
  source 1..120: mol_type = other DNA

SEQ ID NO: 21098 - DNA, 120 bp, synthetic construct
  source 1..120: mol_type = other DNA
caaaaatactttaaatatgtgctatcagaagtagctactaaaacattaattccactgaaatgagggaggctgtaaaaaagaaaaacattgcatacccgtattcacagcaacattactcac

SEQ ID NO: 21099 - DNA, 120 bp, synthetic construct
  source 1..120: mol_type = other DNA
aatatgattcaaccttaaaaagaaggaaattctgttacatgctgcaacatggatgaacctggagaacaatgctaagtgtaataagccaatcacaaggaaattccaatactgcgcaattcg

SEQ ID NO: 21100 - DNA, 120 bp, synthetic construct
  source 1..120: mol_type = other DNA
gattttcagcgtagagtttcagttttgcaagatgaaaagttctagagatctgttgcataacaatgtgctacagttcatattatagtactctatacttaaaaattgttacgataccaaatt

SEQ ID NO: 21101 - DNA, 120 bp, synthetic construct
  source 1..120: mol_type = other DNA
agaaaactgtgagacaaaaagagagatccttgctaccccagctattatccatgaaccagcagaaccagcatctcatgaaactggacagaaaggctcacaggcccagccttgacaggttga

SEQ ID NO: 21102 - DNA, 120 bp, synthetic construct; identical to SEQ ID NO: 6363
  source 1..120: mol_type = other DNA

SEQ ID NO: 21103 - DNA, 120 bp, synthetic construct
  source 1..120: mol_type = other DNA
aaaaacaaggagtggctgaattaaacataattactatataaatatactgggaaaaggaaagaacgggaagagtgaaagagaacaagtgatggatgtggtgacgtcgcgttctcccgggcg

SEQ ID NO: 21104 - DNA, 120 bp, synthetic construct
  source 1..120: mol_type = other DNA
ggggtgcggaatccggccgacctcgctgtcctcgccctctaccttgtggcgtcggtggggttggggagatgagttctccgacgcagcaggcacccctgctcatctcctatggctgttgcc

SEQ ID NO: 21105 - DNA, 120 bp, synthetic construct
  source 1..120: mol_type = other DNA
gctccgcttggacctttgcggtgctcccggagccctccaggttgtccctccggtgccggaggccaagcggtggtgtccttcctgttcccagcgccccctcctcctgtcgctgctgcagtg

SEQ ID NO: 21106 - DNA, 120 bp, synthetic construct
  source 1..120: mol_type = other DNA
acaaaaagaaagagaacaagtaatcttaactattgattccaccatcgtgcagtgcaatagtcaatggctgcaactgaaaaatcaagcaatgttaataaagaaatggtgctttggtgctta

SEQ ID NO: 21107 - DNA, 120 bp, synthetic construct; identical to SEQ ID NO: 6364
  source 1..120: mol_type = other DNA

SEQ ID NO: 21108 - DNA, 120 bp, synthetic construct
  source 1..120: mol_type = other DNA
atacaaacttgaaagaatatgtctataaacaactctggatagatagcccatgaatgaattccccactccagcatctttactggttgtcctgtgagcctaggcagggaggggaccaggacc

SEQ ID NO: 21109 - DNA, 120 bp, synthetic construct
  source 1..120: mol_type = other DNA
ctgccttacctgggtggagctgaggccgccctgaccaagaagagcaccacccatctatgtgccccaaaaccagaaagtcaaaagaaaccttgcaacagggtcaggaactatcccacctcc

SEQ ID NO: 21110 - DNA, 120 bp, synthetic construct
  source 1..120: mol_type = other DNA
cctacccttcataatcaggaaaccccagagcactttttatcccctccagaatataacacttcagctctgcatcatcacatgagggctccaactctgtagggcaggtgtactctcacagct

SEQ ID NO: 21111 - DNA, 120 bp, synthetic construct; identical to SEQ ID NO: 6365
  source 1..120: mol_type = other DNA

SEQ ID NO: 21112 - DNA, 120 bp, synthetic construct
  source 1..120: mol_type = other DNA
ggaaagttggtccttggctccccggaggagccgtcaccaggacactcactcataaagctcacctgtgataatacaactacatgacattaatgtattaaaatataataaaatcataacaaa

SEQ ID NO: 21113 - DNA, 120 bp, synthetic construct
  source 1..120: mol_type = other DNA
gttgttacattccctatttcatagatgagaaagctgagccagcaagagaaaaagtgctggtgagacctgggcagggcgttcaatccaggccgcctggctgcagagtgtaggtgccctcag

SEQ ID NO: 21114 - DNA, 120 bp, synthetic construct
  source 1..120: mol_type = other DNA
agagaaaaaatagtaagtgctcccctgggtgcacagtgctgctttttactccctgacgacttctccctcctcagtcagtcccaaatcagattcaccctttctccgagggaagatgatgtc

SEQ ID NO: 21115 - DNA, 120 bp, synthetic construct; identical to SEQ ID NO: 6366
  source 1..120: mol_type = other DNA

SEQ ID NO: 21116 - DNA, 120 bp, synthetic construct
  source 1..120: mol_type = other DNA
tgcagctcagtgctcctccacttccagccctgagcaggcagctcctaactgggaagcccattaagaatcccatcagcatggcaggcccagcatggaaacatgtagctgctatggggtctg

SEQ ID NO: 21117 - DNA, 120 bp, synthetic construct
  source 1..120: mol_type = other DNA
tctccccagggctgctgcttggggaggctgaaaggccttcctctcctgttcctagcagggattcctagcagggattccacccaagccactgccctcacagcccataggggatcttcttct

SEQ ID NO: 21118 - DNA, 120 bp, synthetic construct
  source 1..120: mol_type = other DNA
gagctccacatttgagttcctgtttcatttgatatgggttacaacattagtattggtggaaatccttttaagacccagctgaaactacgaacatctttattggacatcagcatttaaagc

SEQ ID NO: 21119 - DNA, 120 bp, synthetic construct; identical to SEQ ID NO: 6367
  source 1..120: mol_type = other DNA

SEQ ID NO: 21120 - DNA, 120 bp, synthetic construct
  source 1..120: mol_type = other DNA
tctcctgcactgtctctgtctttgcagaaacacaaaacttgctgcttgctcttttcccctcccttcaaacaacctgactgtgcgggaaatcatcctgaccatctctcactccaaactcat

SEQ ID NO: 21121 - DNA, 120 bp, synthetic construct
  source 1..120: mol_type = other DNA
ccttgctgttttcccttaccattgtatcacggagaccatcccatgaagaaatatcaagaactacactatgtctttcttttttttgttcaaaaatttcttggcaatccactgtataggcat

SEQ ID NO: 21122 - DNA, 120 bp, synthetic construct
  source 1..120: mol_type = other DNA
tctttcagagaacaatttgacatcatgtagcatcatatgggaagggtgcagtgaccccactcttacatgcatatcctaggggagctcacatattcttggaaccagaaagcaatgtcccag

SEQ ID NO: 21123 - DNA, 120 bp, synthetic construct; identical to SEQ ID NO: 6368
  source 1..120: mol_type = other DNA

SEQ ID NO: 21124 - DNA, 120 bp, synthetic construct
  source 1..120: mol_type = other DNA
gccaggcatggtggcgcaaacctctagtcccagctactcaagaggcctagaagggaggaattgcttaagcctggcaggtagaggctgaagtgagttgtgtttgtgccactgcatttcagt

SEQ ID NO: 21125 - DNA, 120 bp, synthetic construct
  source 1..120: mol_type = other DNA
ccaacagttcttgctttgctcagtacagtattgactgaaacacatgcataacagaactgtggaaaatcagggctatctacacgtgtttctgttattttctatgtatactacatacagcca

SEQ ID NO: 21126 - DNA, 120 bp, synthetic construct
  source 1..120: mol_type = other DNA
acagaaattgagcaaaataaaaaggagtcgttgagtgtgaggaaagctacagagaagtaaagacaggtggagacatgacaatactgagcatgttagtgaccttcacagtaactgacttcc

SEQ ID NO: 21127 - DNA, 120 bp, synthetic construct; identical to SEQ ID NO: 6369
  source 1..120: mol_type = other DNA

SEQ ID NO: 21128 - DNA, 120 bp, synthetic construct
  source 1..120: mol_type = other DNA
tccattgcctataagaatataaaacatccattttgaaaatcaatttcatatcatctaataaagttaaacaagctagtcctctacagctaccatttccactcctaggtatatactcaagag

SEQ ID NO: 21129 - DNA, 120 bp, synthetic construct
  source 1..120: mol_type = other DNA
tattatcagcaatgaaaatgaaagaactactgatacgtgcaccaacatggattgatcacataggtattacaacaagcgcaaaaagccagatacaagggaggccatatgggatgagtagat

SEQ ID NO: 21130 - DNA, 120 bp, synthetic construct
  source 1..120: mol_type = other DNA
acagccgtcagatcaatggctgctggaggcatggaagctgagttgaagggagaaaaagggatctttatgtacattgatagtggcaagagtaatatgctgtattggtcaaaattcattgat

SEQ ID NO: 21131 - DNA, 120 bp, synthetic construct
  source 1..120: mol_type = other DNA
aacagtataccaaaagaataatacaccatgatatatccatatatggcaaacacacagctaacattatactgaatagggacaagcttatagcctctcctccaagatctggaagaaggctaa

SEQ ID NO: 21132 - DNA, 120 bp, synthetic construct; identical to SEQ ID NO: 6370
  source 1..120: mol_type = other DNA

SEQ ID NO: 21133 - DNA, 120 bp, synthetic construct
  source 1..120: mol_type = other DNA
tcgtggtggcgggcgcctgtagtcccagctactcaggaggctgagacaggagaatggcgtgaacccaggaggtggagcttgcagtgagccgagatcgcgccactgcactccagcctggat

SEQ ID NO: 21134 - DNA, 120 bp, synthetic construct
  source 1..120: mol_type = other DNA
tcaatgtgcaaactttcagagcatttatatatacaagcaccatataatctgaagaagaaatcaagaaagcaaaactatttataaatcataaagaggataaaataactaagaatcaattta

SEQ ID NO: 21135 - DNA, 120 bp, synthetic construct
  source 1..120: mol_type = other DNA
caggagaattgtttgagcctgggagttcaagactagcctgggaaacatagtgagaccttgtctctaaggaaaaaaaataaaacacacaaattgggagaattaatattgttaaatattaat

SEQ ID NO: 21136 - DNA, 120 bp, synthetic construct; identical to SEQ ID NO: 6371
  source 1..120: mol_type = other DNA

SEQ ID NO: 21137 - DNA, 120 bp, synthetic construct
  source 1..120: mol_type = other DNA
ggtaaagaatatacaatggagaaagaacaaaagcaacaatggagaataaatggagctgggaaaatgctaccagatgcagaagaataccactagaaccctgtctcccaccatatacagaaa

SEQ ID NO: 21138 - DNA, 120 bp, synthetic construct
  source 1..120: mol_type = other DNA
cagacatgggtctgggcaaagactttatggctaagacctcaaaagcacaggcaacaaaaataaaatagacaagtgggactatattaaactaaatagcttcagcacagcaaatgaaacaat

SEQ ID NO: 21139 - DNA, 120 bp, synthetic construct
  source 1..120: mol_type = other DNA
atacaaggaacttaaaaaactcagcagtaaaaacacaaataatccaattaaaaaatggacaaagtgtctgaatagatgtttctcaaaaggagacatacaaatggtcaacaggtatacgaa

SEQ ID NO: 21140 - DNA, 120 bp, synthetic construct; identical to SEQ ID NO: 6372
  source 1..120: mol_type = other DNA

SEQ ID NO: 21141 - DNA, 120 bp, synthetic construct
  source 1..120: mol_type = other DNA
gggtgaatgaataaatggtggtatatatatacacaatggaatgcaattcagccataaaaaagaatgaaatcctgtcagttgcagaaacatggatgtaaccaaaggtcattacgttaggtg

SEQ ID NO: 21142 - DNA, 120 bp, synthetic construct
  source 1..120: mol_type = other DNA
agagagagtagaatgacagttcccagaaactgggaagaatgtaggggtgggaaaatatagagatgcaggttaatggatgcaaatgtccaattatatagagaaaataagttctaatgtttg

SEQ ID NO: 21143 - DNA, 120 bp, synthetic construct
  source 1..120: mol_type = other DNA
ggtggatcatgaggtcaggagatcgagaccatcctggctaacatggtgaaaccccgtctctactaaaaatacaaaaaaaaaaaaaaaaattagccgggcgtggtggtgggtgcctgtagt

SEQ ID NO: 21144 - DNA, 120 bp, synthetic construct; identical to SEQ ID NO: 6373
  source 1..120: mol_type = other DNA

SEQ ID NO: 21145 - DNA, 120 bp, synthetic construct
  source 1..120: mol_type = other DNA
aaaatttggcaaatattttcctttttattaagatctttttcattccataagtttaaggagaataaagcccataaagcatcagaagaagttgctctcctgaaagagactcttctgctcagt

SEQ ID NO: 21146 - DNA, 120 bp, synthetic construct
  source 1..120: mol_type = other DNA
cacagacttagggaggaggcctcaccttccgggaagaactaaactttggttctctttcttgttttttctattgcaagaccaaaattttagaaaaccaagagaaagatttcagccaaaggg

SEQ ID NO: 21147 - DNA, 120 bp, synthetic construct
  source 1..120: mol_type = other DNA
gagaaggcagaagaagtggccatctacaagcaaaggaaagaggcctcagaagagatcaaccctgcagcaccttgaccttgcacctgtggcctctggaactgtgagacaacacatatttat

SEQ ID NO: 21148 - DNA, 120 bp, synthetic construct; identical to SEQ ID NO: 6374
  source 1..120: mol_type = other DNA

SEQ ID NO: 21149 - DNA, 120 bp, synthetic construct
  source 1..120: mol_type = other DNA
ctagttttgcccaaatttcacagaaagacgatgaacaagtagtaagctaaagaggcttcttttgcaggggattgcaggtattatatgtttttctcctacttttaagatacattttcctaa

SEQ ID NO: 21150 - DNA, 120 bp, synthetic construct
  source 1..120: mol_type = other DNA
atgattcaaagagcagagagcttctcctgaggtcacacagcacgtaagcggtggaacaatggcaggcacatgactctctaggcccctagtccagttttctgggttctatgagaattgtag

SEQ ID NO: 21151 - DNA, 120 bp, synthetic construct
  source 1..120: mol_type = other DNA
aggctgccactgattctcttaactccagcttctattaccagtcactaagctgaaagcaggaaagtttatcttctgcacttggtccatcagaactaagatggcagaaagccccactatcta

SEQ ID NO: 21152 - DNA, 120 bp, synthetic construct; identical to SEQ ID NO: 6375
  source 1..120: mol_type = other DNA

SEQ ID NO: 21153 - DNA, 120 bp, synthetic construct
  source 1..120: mol_type = other DNA
gagagagccttggggtgaccaaggcctcacagacttcattattcctggaccacatggctccagcctcctgatcacaatggatcagtggtcttagattccgctccaatatttgaagttttt

SEQ ID NO: 21154 - DNA, 120 bp, synthetic construct
  source 1..120: mol_type = other DNA
tggccatgtcctcatgaatttagtgaaatgggcatgttgtctctgagtggaagtgaggggacactactgggcagagctccatcaaagggtggctggtgtcctctataccatttatctaca

SEQ ID NO: 21155 - DNA, 120 bp, synthetic construct
  source 1..120: mol_type = other DNA
ccaagagaccttctaaatattgggacactttagttctgaatcccagaagttggcttcttgcctgggaggcaggtgtcactgcatctgatccaaaaaagcagccccatagctcaagatgct

SEQ ID NO: 21156 - DNA, 120 bp, synthetic construct; identical to SEQ ID NO: 6376
  source 1..120: mol_type = other DNA

SEQ ID NO: 21157 - DNA, 120 bp, synthetic construct
  source 1..120: mol_type = other DNA
cctgagagcatagtacgacacttatcaccttcactcatgagccagatagtgtgaaatgagaagcagagatttgaaatgtgttgcaaaactctctcaaagaaagtagagtaatatttttcg

SEQ ID NO: 21158 - DNA, 120 bp, synthetic construct
  source 1..120: mol_type = other DNA
ctggctcactagctgtcacttcaccaacaatcattccatttaataaaagggagatccccccatgggccagcatttcccaggtggaggcctcttgcaggcataatcttccaacagagaatt

SEQ ID NO: 21159 - DNA, 120 bp, synthetic construct
  source 1..120: mol_type = other DNA
tggatcacctgaggtcaggagttcaagaccagactgcctaacatggggaaactccgtttctactaaaaatacaaaaaattagctgggtgtagtagcgggcgcctgtaatcccagctactc

SEQ ID NO: 21160 - DNA, 120 bp, synthetic construct; identical to SEQ ID NO: 6377
  source 1..120: mol_type = other DNA

SEQ ID NO: 21161 - DNA, 120 bp, synthetic construct
  source 1..120: mol_type = other DNA
cagaatgtgagggtgggtggagagtccagctcagggagagtgattggagagacagaataataagaagagtgggcagactggatcactctgatggttctggggcttctcttccaggagaga

SEQ ID NO: 21162 - DNA, 120 bp, synthetic construct
  source 1..120: mol_type = other DNA
ggctgggcagggaagacaaactaagccaagggcccagctcggaagagtttcctttcctgagaattctgcaggaatttccctgacctcatggccacctctcatactttgctcttgtttttt

SEQ ID NO: 21163 - DNA, 120 bp, synthetic construct
  source 1..120: mol_type = other DNA
ataaagtgggagatctccaggatccttcctggaatccaagattcccagagaagccggatcccgcgtcccggaacccaactcctgctgctctatgagccctgaccttggggagacctgggc

SEQ ID NO: 21164 - DNA, 120 bp, synthetic construct; identical to SEQ ID NO: 6378
  source 1..120: mol_type = other DNA

SEQ ID NO: 21165 - DNA, 120 bp, synthetic construct
  source 1..120: mol_type = other DNA
ggctcgcactcccgggtacttggaggccaggggagagggaggactgtggcaggtgaggcaaggagctgtctgagccgctcagcagcctccaggagtcagctctctccaggcctgtcttca

SEQ ID NO: 21166 - DNA, 120 bp, synthetic construct
  source 1..120: mol_type = other DNA
cttgctttagagcactggcacagacttccgcaggtcttgtgtctgaatttcttggcactgtgtcttttctcacttattcttctgcaaggaaggaattatatcactggttggatgagacaa

SEQ ID NO: 21167 - DNA, 120 bp, synthetic construct
  source 1..120: mol_type = other DNA
gatctatagctagttggtggaaaggcctggagggttcatattcaagtccacctgacttgaaaactcatattgaccttacttaagtactgattccccctttataatccatgccataaactt

SEQ ID NO: 21168 - DNA, 120 bp, synthetic construct; identical to SEQ ID NO: 6379
  source 1..120: mol_type = other DNA

SEQ ID NO: 21169 - DNA, 120 bp, synthetic construct
  source 1..120: mol_type = other DNA
ttcttgtccttgtctggtcctgcaagctgtatgagtttgccttctctggtaggtctggggacatggtatcccttataaccttggttcctggcatatgacactggtaccaggctctgttgg

SEQ ID NO: 21170 - DNA, 120 bp, synthetic construct
  source 1..120: mol_type = other DNA
ttgtgactggaggaaatagccatgggcccctgggcagaagtggctcagaatggaatggatggccccagttttgatcatctgggaacaggaagattctcagataaaaacccatgttttaga

SEQ ID NO: 21171 - DNA, 120 bp, synthetic construct
  source 1..120: mol_type = other DNA
cttcctaggggtcagtgcttctgaagcacctttaaatgaggacaaatacctcatgttcatgattagccaacttgtgcccactcagtggaaaaagaacccagaattttgcaaaattttcag

SEQ ID NO: 21172 - DNA, 120 bp, synthetic construct; identical to SEQ ID NO: 6380
  source 1..120: mol_type = other DNA

SEQ ID NO: 21173 - DNA, 120 bp, synthetic construct
  source 1..120: mol_type = other DNA
gctttaagttataaactccaaaatgaactaactcccaataatttacagtagggagctctaagccacaaataaaggtgtcaggacagacctgagacctggagtgagcacatcccctccctc

SEQ ID NO: 21174 - DNA, 120 bp, synthetic construct
  source 1..120: mol_type = other DNA
tggacagagcccaggtgaaagccacccctgctcctcctcccgcatctctcacaggctcagcaccatcgtcggcctggagtgcacctggactgagctcatcatgctctgtccctgtttgtg

SEQ ID NO: 21175 - DNA, 120 bp, synthetic construct
  source 1..120: mol_type = other DNA
tctcagtccacatcagcaaaacctcctcagcctctctcaggatgttcctgcatctcacagctccagcagcaacctgggtctccctgaggacatgaccccctccgaagtcctcccacatgg

SEQ ID NO: 21176 - DNA, 120 bp, synthetic construct; identical to SEQ ID NO: 6381
  source 1..120: mol_type = other DNA

SEQ ID NO: 21177 - DNA, 120 bp, synthetic construct
  source 1..120: mol_type = other DNA
atgtaatgaagattaaggaccttaaaatagggagattctgctggaatctctgtgtgggcccaatcaaatcacaagagctattaaaagcagagagcctgccctggttggagtcagattctg

SEQ ID NO: 21178 - DNA, 120 bp, synthetic construct
  source 1..120: mol_type = other DNA
atgtgtgagtatctgagagaaggctctaggagctaaggatggctcttaacaaggaagtggaaacctcttttctatctgcaaggaagtgaattcaggcaagaacctgaatgagcttggaag

SEQ ID NO: 21179 - DNA, 120 bp, synthetic construct
  source 1..120: mol_type = other DNA
taaagccatttggtttgtggtaatttttatggcagcaatagacacccacacagcagagaagatgccctcgcttcctggcctctcagatcctggaactcctctcctccatgatcttctcct

SEQ ID NO: 21180 - DNA, 120 bp, synthetic construct; identical to SEQ ID NO: 6382
  source 1..120: mol_type = other DNA

SEQ ID NO: 21181 - DNA, 120 bp, synthetic construct
  source 1..120: mol_type = other DNA
tatggtaaataatttccatccctcccttccctctcccttgagttgtcacactcacctggcaaaactacacagctggtgggttccacctcggcctatgctgagcctgcccccatgagctgc

SEQ ID NO: 21182 - DNA, 120 bp, synthetic construct
  source 1..120: mol_type = other DNA
gcctcctcctggcctgggtgactcttccataccttttctttgtgctcacacatccaatctgccttccccattcttacttcagctgatgaccttgcttcccacttcactgagaaaactgaa

SEQ ID NO: 21183 - DNA, 120 bp, synthetic construct
  source 1..120: mol_type = other DNA
cagagccagaccctcttctggtgccccaattgccaccccttatcatctacttaaaggtgtcagttcatcaattaataccatttttatctttatcgtcaacctttttcctctctccccact

SEQ ID NO: 21184 - DNA, 120 bp, synthetic construct; identical to SEQ ID NO: 6383
  source 1..120: mol_type = other DNA

SEQ ID NO: 21185 - DNA, 120 bp, synthetic construct
  source 1..120: mol_type = other DNA
tggtccagtggctttcccagcattttctatctcatgaatttctctcacaagtatttcccctaataaatccttacatgtttactactgtattggggtccgcttctcaggggaccctaacta

SEQ ID NO: 21186 - DNA, 120 bp, synthetic construct
  source 1..120: mol_type = other DNA
catggcacaaggtgcagctgagcagctgggggtctcaccagtgctgagctgagaagttgccttggttagggagtgctatggcagatgcagtgatagaatgccctgcataataaggacagg

SEQ ID NO: 21187 - DNA, 120 bp, synthetic construct
  source 1..120: mol_type = other DNA
accctcggcagtgtctcatgggcaggtctttatctcctgtagcaaaagggcagataccaaggaatggtagctgaacatcattatgagggccacagtgctccagagatgtttgacactcaa

SEQ ID NO: 21188 - DNA, 120 bp, synthetic construct; identical to SEQ ID NO: 6384
  source 1..120: mol_type = other DNA

SEQ ID NO: 21189 - DNA, 120 bp, synthetic construct
  source 1..120: mol_type = other DNA
atcaaacactccaggactttgataagtggaataaacccactgctgggatgtatccacatagtctagaaaaaaacatgcccaactctcaacaaggtagacatgtcttagttgccctggaac

SEQ ID NO: 21190 - DNA, 120 bp, synthetic construct
  source 1..120: mol_type = other DNA
agagggacctgcatcactaagaagtgacggggtattgtcctttgtaggctgggggtgatggtagtaaagatagtcccagagtttcatttctaatattactggggagagtgtggccctgaa

SEQ ID NO: 21191 - DNA, 120 bp, synthetic construct
  source 1..120: mol_type = other DNA
gggtggtgtcccagggttaggacaggcagctgattgatatctatgataagaaagcaagaattgagaagcaggagggtgaaggtgtttgacccaatacaaaatcatgatcccatcctcaat

SEQ ID NO: 21192 - DNA, 120 bp, synthetic construct; identical to SEQ ID NO: 6385
  source 1..120: mol_type = other DNA

SEQ ID NO: 21193 - DNA, 120 bp, synthetic construct
  source 1..120: mol_type = other DNA
ctgagtgcataattgacactgatgcactgctaagtggagtcacccccacaatgggtccctagtctgtggagtaaggactttcattgtgctgaaagccaaagggaaacctctgacactgcc

SEQ ID NO: 21194 - DNA, 120 bp, synthetic construct
  source 1..120: mol_type = other DNA
gctgtctgttgtctctacgtaatccagcaatctgtccctgaagaagcctgatgaagcctaaagaatgaactagattactccaggtctggccaagtaggagttataattgcagcttttgtg

SEQ ID NO: 21195 - DNA, 120 bp, synthetic construct
  source 1..120: mol_type = other DNA
ctttccactccaattagaaagtggatatggagtgattcacattcatgtgggatcctcaaaacattgatttatcatttgtctcagggctattgtaactcccctgacctctatagtatagtc

SEQ ID NO: 21196 - DNA, 120 bp, synthetic construct; identical to SEQ ID NO: 6386
  source 1..120: mol_type = other DNA

SEQ ID NO: 21197 - DNA, 120 bp, synthetic construct
  source 1..120: mol_type = other DNA
gctgaggcaggagaatcacttgaacccaggaggcagagattgcagtgagccaagatcgtgccattgcactccagagtgggcaacaagagcaaaattccatctcaaaaagaaaaaaatagt

SEQ ID NO: 21198 - DNA, 120 bp, synthetic construct
  source 1..120: mol_type = other DNA
gcacactgcctgatgagcctctttcagttctgacaacaccactttccacatctaggtatgttgctttggcccacactctaggtgacataggaggaggccagcttcaagtggggcccacac

SEQ ID NO: 21199 - DNA, 120 bp, synthetic construct
  source 1..120: mol_type = other DNA
gtgggaaagtcacagtgaaaggcctgggattctggagtaaggtcatgtcattcacagcagagacatatgccacctattagaagcaacttttagtgtcccttgtcctgattagatagaatg

SEQ ID NO: 21200 - DNA, 120 bp, synthetic construct; identical to SEQ ID NO: 6387
  source 1..120: mol_type = other DNA

SEQ ID NO: 21201 - DNA, 120 bp, synthetic construct
  source 1..120: mol_type = other DNA
agatccagctgtcgacacctctgaatgtccaactcatcagcaattgaggcccatgatgtgccccagtggggcactatttctttaggtgactaactagccactaagtaacaagttgactac

SEQ ID NO: 21202 - DNA, 120 bp, synthetic construct
  source 1..120: mol_type = other DNA
gttgacattcctgatctgcaggctaggaggtgctcctagcccattatctgcctgaaggacccacttggctgggaaagtttcagtgtttccatggctgtgggttccactaatcctatcacc

SEQ ID NO: 21203 - DNA, 120 bp, synthetic construct
  source 1..120: mol_type = other DNA
tgcattgtttgaatcagagatgtctctagagtgctgtgttctcaataggaagaacatgtgtgtccaggaatcaaaagatggaagcaggtttggctccacgtccaatcccttagattcacc

SEQ ID NO: 21204 - DNA, 120 bp, synthetic construct; identical to SEQ ID NO: 6388
  source 1..120: mol_type = other DNA

SEQ ID NO: 21205 - DNA, 120 bp, synthetic construct
  source 1..120: mol_type = other DNA
atcgacctgggggccttctggtttcccttacctcattgtaagtgtgaacagaatcatccagcaattcagcctgagacagcttgatttccaaggacccagacccatcagggcagaaggttt

SEQ ID NO: 21206 - DNA, 120 bp, synthetic construct
  source 1..120: mol_type = other DNA
cacgaaagcaggacattcctgggagaccagggactcctctgatagccaactgtagctcaaggactcctccatggccttgcttaactctccttagattgcctgtggtctagggcacatcca

SEQ ID NO: 21207 - DNA, 120 bp, synthetic construct
  source 1..120: mol_type = other DNA
gccatatcgcctgacaggtgtgtcccctaataaaatgctataactttaatcccatgatggaacttgctttttggagcatttggactataaaatcattttcatctgcccactagtgacctc

SEQ ID NO: 21208 - DNA, 120 bp, synthetic construct; identical to SEQ ID NO: 6389
  source 1..120: mol_type = other DNA

SEQ ID NO: 21209 - DNA, 120 bp, synthetic construct
  source 1..120: mol_type = other DNA
gctaaagtgcagtggctcaatctcagctcactgcaagctctgcctcctgggttcatgccattctcctgcctcagcttcccaagtagctgggactacaggcacctgccaccacgcccagct

SEQ ID NO: 21210 - DNA, 120 bp, synthetic construct
  source 1..120: mol_type = other DNA
ccaccacacctggcctcttccttccctttctccttccttctagccctccctctctctctttcttctctatttccattcaacctatcaccttccctccttctttctccctttccttcccct

SEQ ID NO: 21211 - DNA, 120 bp, synthetic construct
  source 1..120: mol_type = other DNA
gggctgtaagtaagcattttctgaatctatctgtcaaaagcataatgtcttttatatgagaaacaagtaaacaacaggaagttattaacagaataaaaatgcttgctataattctaccac

SEQ ID NO: 21212 - DNA, 120 bp, synthetic construct; identical to SEQ ID NO: 6390
  source 1..120: mol_type = other DNA

SEQ ID NO: 21213 - DNA, 120 bp, synthetic construct
  source 1..120: mol_type = other DNA
cacagataactcctacacataatgtgcatcatgggaaaatacatgcagtaggaatttgctatacaggaagcttaaaaaccagcaaaactaactgaggtttgttttggggagatatatata

SEQ ID NO: 21214 - DNA, 120 bp, synthetic construct
  source 1..120: mol_type = other DNA
aggaattaaagacacacacacagaaatatagaggtgtgaagtgggaaatcaggggtctcacagccttcagagctgagagcccggaacagagatttatccacatatttattaacagcaaac

SEQ ID NO: 21215 - DNA, 120 bp, synthetic construct
  source 1..120: mol_type = other DNA
cttaagacacagatcgctcatgctattgtttgtggcttaagaatgcctttaagcagttttccgccctgggcaggacaggtgttccttgccctcattcccgtaaacctgcaaccttccagc

SEQ ID NO: 21216 - DNA, 120 bp, synthetic construct; identical to SEQ ID NO: 6391
  source 1..120: mol_type = other DNA

SEQ ID NO: 21217 - DNA, 120 bp, synthetic construct
  source 1..120: mol_type = other DNA
atgctttacatatttcttcttttaattttaaatccttatgttaagctcctacagtgggccatatcatttcaggttgaggtgccactataccgccatggttccagataataggaacttttg

SEQ ID NO: 21218 - DNA, 120 bp, synthetic construct
  source 1..120: mol_type = other DNA
taatgattccataggaattattgtgcagcacctctgcctgttctgcaaagcaatcttcctaaacaagtatgttcattttttctaactgggtccaattttgtttccaaatacgtttttgag

SEQ ID NO: 21219 - DNA, 120 bp, synthetic construct
  source 1..120: mol_type = other DNA
atactcacggcagtggtgataaccgctatcatagctgccattaaattattcattgtgactggttgtcctgctttcctcaggttttcttctgccatctgtgacagcttcttcatctgtccc

SEQ ID NO: 21220 - DNA, 120 bp, synthetic construct; identical to SEQ ID NO: 6392
  source 1..120: mol_type = other DNA

SEQ ID NO: 21221 - DNA, 120 bp, synthetic construct
  source 1..120: mol_type = other DNA
gttaataatgataggttcagttgcatttgtggggttccatattctctgtctctccctttctgcttttgcaactgctgttttagggagagattcattctttccactatggcttgtacttga

SEQ ID NO: 21222 - DNA, 120 bp, synthetic construct
  source 1..120: mol_type = other DNA
gcaaaacactgcaaaagatgacgtttaacacaggcagaagactctcctgttaggcatgtagcccagacaaagtgagaaaaggtgtccacacatacatgtacataagctagtctcccaagc

SEQ ID NO: 21223 - DNA, 120 bp, synthetic construct
  source 1..120: mol_type = other DNA
gctttagcttctttccaggtaatgctgtatctgcgtttgagaccagaggcattaacatgggttaaattgtgaaagtgtctagcattaaatattgcagtagcaactaagcaatcagccatt

SEQ ID NO: 21224 - DNA, 120 bp, synthetic construct; identical to SEQ ID NO: 6393
  source 1..120: mol_type = other DNA

SEQ ID NO: 21225 - DNA, 120 bp, synthetic construct
  source 1..120: mol_type = other DNA
aagtttattttagggagaatccaattagttaatttgaaaaactgaaacagcttcattttaggaaaatgattatccagaatacccacaaagtcagctaaaatgggtttgctgagtaagact

SEQ ID NO: 21226 - DNA, 120 bp, synthetic construct
  source 1..120: mol_type = other DNA
aaataaggagttagagtccataaattagtatgtgaaagaaaaagccactccactaagtcctgttcttggacaataacaccagtaggtgaatgctgagttgaaaaaattagcaaatctaga

SEQ ID NO: 21227 - DNA, 120 bp, synthetic construct
  source 1..120: mol_type = other DNA
aggatagaaaacagattactcatggcataggtaggaatgcttagagcaggtcgtatccaattaatatcccctagtaatttttgaaagtcatttaatatttttagttgatccctacgtatg

SEQ ID NO: 21228 - DNA, 120 bp, synthetic construct; identical to SEQ ID NO: 6394
  source 1..120: mol_type = other DNA

SEQ ID NO: 21229 - DNA, 120 bp, synthetic construct
  source 1..120: mol_type = other DNA
tcttgctcagctaaagggatagtaaagaaacagtcctttaaatctatgactattaaaggccaatttttttgaattatagcaggagaaagtaatcctggctgtaatgctcccataggttgt

SEQ ID NO: 21230 - DNA, 120 bp, synthetic construct
  source 1..120: mol_type = other DNA
ttgttcaacaactaatttctctaaagcctccagtttttctttacttagtggccattgttctatccaaattggcttatccattaaccattttaaaggtataggttcggaaggcttaacaat

SEQ ID NO: 21231 - DNA, 120 bp, synthetic construct
  source 1..120: mol_type = other DNA
atatataattgatctggaattagaacttgtgctctccattgttgtaataaatctcttccccataaatgtataggtacagaagtgataactggttgaatagtcccaggttgtccatcaggc

SEQ ID NO: 21232 - DNA, 120 bp, synthetic construct; identical to SEQ ID NO: 6395
  source 1..120: mol_type = other DNA

SEQ ID NO: 21233 - DNA, 120 bp, synthetic construct
  source 1..120: mol_type = other DNA
agaatttgaatttccccattgtaaactgaatcaatgactcctgtatgtatttgtacgccttttaaacttaaactaggccttcctaaaagtaatcctattttccctgctggcaagggtcca

SEQ ID NO: 21234 - DNA, 120 bp, synthetic construct
  source 1..120: mol_type = other DNA
agggaatggcctgagctggaaatgccctggtttagaatggggcccgggacgggcccctcatggtgtttcctgagaatgagttcccttgtttatcaaacttagagtgacattgactagccc

SEQ ID NO: 21235 - DNA, 120 bp, synthetic construct
  source 1..120: mol_type = other DNA
taaattctttgagtaatttaaaagggaaaggctcaaatgtagctataatatttccctgttgatctggggggtgtattctaacagggaactgccaagcctctaaatcaccctcttgtctag

SEQ ID NO: 21236 - DNA, 120 bp, synthetic construct; identical to SEQ ID NO: 6396
  source 1..120: mol_type = other DNA

SEQ ID NO: 21237 - DNA, 120 bp, synthetic construct
  source 1..120: mol_type = other DNA
ctgacacttccgagctccccttcttacgcacgacagggattgctttaagagtactcgggtgtcctccagctagtttcccattccaaccattgctctggtgacccttcgacctggatatga

SEQ ID NO: 21238 - DNA, 120 bp, synthetic construct
  source 1..120: mol_type = other DNA
gggtctcacagtcttcagagctgagagccccaaacagatatttacccacatatttattaacagcaaaccggtcattagcattgtctctatagatattaaattaactaaaagtatccctta

SEQ ID NO: 21239 - DNA, 120 bp, synthetic construct
  source 1..120: mol_type = other DNA
atcactcatgctattgtttgtggcttaagaatgcctttaagcggttttccgccctgggcaggccaggtgttccttgccctcattctcgtaaacccgcaaccttccagcttggacgttagg

SEQ ID NO: 21240 - DNA, 120 bp, synthetic construct; identical to SEQ ID NO: 6397
  source 1..120: mol_type = other DNA

SEQ ID NO: 21241 - DNA, 120 bp, synthetic construct
  source 1..120: mol_type = other DNA
tgaaaatggccttggctacaaataggtcatttgatccttggctccctggcatctctctagattttcaatgatacaatgttcaatctgctgtgcaagataatttcatcttgcaaagatttg

SEQ ID NO: 21242 - DNA, 120 bp, synthetic construct
  source 1..120: mol_type = other DNA
catgaaaagagtaggaaggaatacccagtgatggaatagcaaatatgaatggaaaacagaataggactgctaaaaagaaaaaaaaaaattcagaagcatgtaatagcagcgctatttaga

SEQ ID NO: 21243 - DNA, 120 bp, synthetic construct
  source 1..120: mol_type = other DNA
tagaactaaccatttcaggctacagcatcaagccaaaattattggcatcatgctaagctaggtgtgtttactgaagtatgagattcacatttttgtaaatgaaaagcaatttgattaggc

SEQ ID NO: 21244 - DNA, 120 bp, synthetic construct; identical to SEQ ID NO: 6398
  source 1..120: mol_type = other DNA

SEQ ID NO: 21245 - DNA, 120 bp, synthetic construct
  source 1..120: mol_type = other DNA
ggaatgcttttacactgttggtggaaaagtaaattggttaatccattgtggaagacagtgacaatgtggtgattcctcagagatttagaatcagaaataccatttgatccagcaattgca

SEQ ID NO: 21246 - DNA, 120 bp, synthetic construct
  source 1..120: mol_type = other DNA
atgatggactggataaagaaaatgtggtacatatacaccatggaatattatgcagccataaaaaggaatgagatcaagtcctttgcagggatatggatgaagctggaagccattatcctc

SEQ ID NO: 21247 - DNA, 120 bp, synthetic construct
  source 1..120: mol_type = other DNA
cagggtggtggtgggaggatcattagcaaaaatagctaatgcatgccagggttaatacctaggtgatgagttgacaggtgcagcaaaccaacatggcacatgtttacctatgtaacaaac

SEQ ID NO: 21248 - DNA, 120 bp, synthetic construct; identical to SEQ ID NO: 6399
  source 1..120: mol_type = other DNA

SEQ ID NO: 21249 - DNA, 120 bp, synthetic construct
  source 1..120: mol_type = other DNA
ggcggtgcccccatgctgttctcgtgatactgagggaattctcatgcaatctgatggttttataaggggcttttccctgcttcattctgcatttctctctcctgtcatcatgtgaagaag

SEQ ID NO: 21250 - DNA, 120 bp, synthetic construct
  source 1..120: mol_type = other DNA
aaacctctctcctttataaattacccagtctcaggtatttctttatagcagtgtgagaatggactaatataacttctaacttacagaataatgctgacataatggtttgtgactctgggt

SEQ ID NO: 21251 - DNA, 120 bp, synthetic construct
  source 1..120: mol_type = other DNA
tgtgccacaagcagccctgcaggaaggtccatgtggctgagaaccgaggcgttctgggaacagacaacaaagaactaggccttttccaacagccatatgactgatccatgtttcatgtga

SEQ ID NO: 21252 - DNA, 120 bp, synthetic construct
  source 1..120: mol_type = other DNA
aagaagcactcagggaaacctctcctggactcctgaccattggaaactgcggcagatgaggaatatttgttgttttgagctaagttttacataatttgttatgcaatagtaaataaataa

SEQ ID NO: 21253 - DNA, 120 bp, synthetic construct; identical to SEQ ID NO: 6400
  source 1..120: mol_type = other DNA

SEQ ID NO: 21254 - DNA, 120 bp, synthetic construct
  source 1..120: mol_type = other DNA
attaattataagatattaaacacgtaacttagttttaaaaggtaaggagaatttccatggctgaagaggatgtattttatgaccattcacaatgatcactttacttgaacttcaatttcc

SEQ ID NO: 21255 - DNA, 120 bp, synthetic construct
  source 1..120: mol_type = other DNA
ggtcattcaccatcctccagttattcaatcaactctaatgtaggtgctgctgtgaagggagttagtggatataattaagggtctcaattagttgactttaggctgggtttatcctgcttg

SEQ ID NO: 21256 - DNA, 120 bp, synthetic construct
  source 1..120: mol_type = other DNA
gctgtgggccaggtgcggtggctcacgcctgtaatcccagcactttgggaggatgaggcgggcggatcacgaggtcaggagatcgagaccatcctggctaacacggtgaaaccctgtctc

SEQ ID NO: 21257 - DNA, 120 bp, synthetic construct; identical to SEQ ID NO: 6401
  source 1..120: mol_type = other DNA

SEQ ID NO: 21258 - DNA, 120 bp, synthetic construct
  source 1..120: mol_type = other DNA
tcaaaatgaaaacacagcttttggaagcccagaagagagattccatccacattttgcccagatttctgatcaaggaactataagcagataaatgggtgttgtttcgccaggcgtggtagt

SEQ ID NO: 21259 - DNA, 120 bp, synthetic construct
  source 1..120: mol_type = other DNA
attcattcagtcgacaaaaattaatttagtccctacgataaaccagatatcccctcatatgctcacgtgcctgacactccagaagtttcacaagaccgaggtggagacactggagtgttt

SEQ ID NO: 21260 - DNA, 120 bp, synthetic construct
  source 1..120: mol_type = other DNA
ctaaggggacaggacggcctgaaggatgagaagaatggagggaagggttggagaagcaggaggtgaagaaaaggagcagaggaaagaattcgaaagcagcagaattcttaggtttaaata

SEQ ID NO: 21261 - DNA, 120 bp, synthetic construct; identical to SEQ ID NO: 6402
  source 1..120: mol_type = other DNA

SEQ ID NO: 21262 - DNA, 120 bp, synthetic construct
  source 1..120: mol_type = other DNA
atgatggcaaatttaaaatatgacaagcgggagtcacaggtacactgcaaaagtgaaacttagaagctttgtgagtcctgttgtaacgcttttgggcacatttatacatcatggggccaa

SEQ ID NO: 21263 - DNA, 120 bp, synthetic construct
  source 1..120: mol_type = other DNA
ggcacaacttttcccaataaaaaaaaaaaacaaaaaggaaaacaaaaaacagtttctacacctccattcccagagcaagctcactctctgtcaccaaactccgtgggtgagttttcttct

SEQ ID NO: 21264 - DNA, 120 bp, synthetic construct
  source 1..120: mol_type = other DNA
gccaagactcagggaaacactgagacagagcgcttggcacaggaggagcggggtcagggcgaagtcccagggccccaggcgtggctctcagggtctcaggccccgaaggcggtgtatgga

SEQ ID NO: 21265 - DNA, 120 bp, synthetic construct; identical to SEQ ID NO: 6403
  source 1..120: mol_type = other DNA

SEQ ID NO: 21266 - DNA, 120 bp, synthetic construct
  source 1..120: mol_type = other DNA
acccggggatccgcgcagggaggagggtcgggccggtctcagctcctcctcgctcccaggctcccactccatgaggtatttctacaccaccatgtcccggcccggccgcggggagccccg

SEQ ID NO: 21267 - DNA, 120 bp, synthetic construct
  source 1..120: mol_type = other DNA
ccggaacacacagatctgcaaggcccaggcacagactgaacgagagaacctgcggatcgcgctccgctactacaaccagagcgagggcggtgagtgaccccggcccggggcgcaggtcac

SEQ ID NO: 21268 - DNA, 120 bp, synthetic construct
  source 1..120: mol_type = other DNA
gtttcattttcagtttaggccaaaacccccgcgggttggtcggggcagggcggggctcgggggaccgggctgaccgcgggggcggggccaggttctcacaccatgcaggtgatgtatggc

SEQ ID NO: 21269 - DNA, 120 bp, synthetic construct; identical to SEQ ID NO: 6404
  source 1..120: mol_type = other DNA

SEQ ID NO: 21270 - DNA, 120 bp, synthetic construct
  source 1..120: mol_type = other DNA
ttgagggagaagaatcctcctgggtttccagagagtgactctgagggtccgccctgctctctgacacaattaagggatgaaatctgtgaggaaatgaagggaagacaatccctggaatac

SEQ ID NO: 21271 - DNA, 120 bp, synthetic construct
  source 1..120: mol_type = other DNA
cctcagcctccactcaggtcaggaccagaagtcgctgttccctcttcagggactagaattttccacggaataggagattatcccaggtgcctgtgtccaggctgttgtctgggttctgtg

SEQ ID NO: 21272 - DNA, 120 bp, synthetic construct
  source 1..120: mol_type = other DNA
caagacacatatgacccaccaccccatctctgaccatgaggccaccctgaggtgctgggccctgggcttctaccctgcggagatcacactgacctggcagcgggatggggaggaccagac

SEQ ID NO: 21273 - DNA, 120 bp, synthetic construct; identical to SEQ ID NO: 6405
  source 1..120: mol_type = other DNA

SEQ ID NO: 21274 - DNA, 120 bp, synthetic construct
  source 1..120: mol_type = other DNA
gagctcaggtaaggaaggggtgaggagtgtggtctgagatttcttgtctcactgagagttccaagccccaggtagaagtgccctgcctggttactgggaagcaccatccacactcatggg

SEQ ID NO: 21275 - DNA, 120 bp, synthetic construct
  source 1..120: mol_type = other DNA
gtcacaggggaaggtccccaaggacagacctcagaagggcggttggtccaggacccatatctgctttcttcatgtttcctgatcccaccctgggtctgcagttgcacatttctggaaact

SEQ ID NO: 21276 - DNA, 120 bp, synthetic construct
  source 1..120: mol_type = other DNA
agtaagtatgaaggaggctgatccctgaaatcctttggatattgtgtttgggagcccatgggggagctcacccaccccacaattcttcctctagccacatctactgtgggatctgaccag

SEQ ID NO: 21277 - DNA, 120 bp, synthetic construct; identical to SEQ ID NO: 6406
  source 1..120: mol_type = other DNA

SEQ ID NO: 21278 - DNA, 120 bp, synthetic construct
  source 1..120: mol_type = other DNA
ataatgtgtggaggaggggagaccaacccaccctcatgtccaccatgaccctcttccccacgctgatctgtgttccctccccaatcatctttcctgttccagagaggaggggctgagatg

SEQ ID NO: 21279 - DNA, 120 bp, synthetic construct
  source 1..120: mol_type = other DNA
attaaaggagaagattcctaaaatttgagagacaaaataaatggaacacatgagaaccttccagagtccatgtgtttcttgtgctgatttgttgcaggggaggagaatagatggggctgt

SEQ ID NO: 21280 - DNA, 120 bp, synthetic construct
  source 1..120: mol_type = other DNA
cagggacttggatgtcacctacggtggtccctgcatacaaatctcattgtggtatcaagagactaattttcagacctgtccagctcttgccctcctcccagggctctttcctggattgta

SEQ ID NO: 21281 - DNA, 120 bp, synthetic construct; identical to SEQ ID NO: 6407
  source 1..120: mol_type = other DNA

SEQ ID NO: 21282 - DNA, 120 bp, synthetic construct
  source 1..120: mol_type = other DNA
gcggcatcgatgtccacatgagatgatgttgttctttagctgccacaaaacagcatttgccctgaggctaccttaacaaagatattggcttcagaatagagaagtgctttacagtgatca

SEQ ID NO: 21283 - DNA, 120 bp, synthetic construct
  source 1..120: mol_type = other DNA
gcttttgcatttagaaagcatcattaaggtgaaaatagaaaaatttctggcgttgtggtacatatgttctagatgctagcttgtccaacccatagctcgcaggctgaatgtggcccagga

SEQ ID NO: 21284 - DNA, 120 bp, synthetic construct
  source 1..120: mol_type = other DNA
aggagtgaatgctttaggaaccctcctttgcagtgacctgcaaaagatagagggcacagttactgtgagaacccagagtagcagccaaaggggctcaaccttcatggagttttgggaaag

SEQ ID NO: 21285 - DNA, 120 bp, synthetic construct
  source 1..120: mol_type = other DNA
aagaattgaggagcaggagactgagggtgtttgactaaatacaaagtcatgatcccagtctcaattcctagacttcagccaagcttcagattcagaatccacagtggggcttaaggaggc

SEQ ID NO: 21286 - DNA, 120 bp, synthetic construct; identical to SEQ ID NO: 6408
  source 1..120: mol_type = other DNA

SEQ ID NO: 21287 - DNA, 120 bp, synthetic construct
  source 1..120: mol_type = other DNA
ggcactgccattagagagctgaaggatggggggtggtgttgggattgcctattatctccatataattcagcagtctatccctgaagaagcctgataaagaatgaatggaattactccaga

SEQ ID NO: 21288 - DNA, 120 bp, synthetic construct
  source 1..120: mol_type = other DNA
acatggcaaacagccatgcatttggtgagtgcattctttcccattccatttagaaaatggatatggaatgattcacattcacatgggatttataatacatttattgatagcttgcctcag

SEQ ID NO: 21289 - DNA, 120 bp, synthetic construct
  source 1..120: mol_type = other DNA
ctcttcatttcattggcaatatcacatagattgggatggatgagcaagaggaggaaagtatgctgagttctttggcaaaacatgtgcactacagaaggtgaagattaaccttacagagct

SEQ ID NO: 21290 - DNA, 120 bp, synthetic construct
  source 1..120: mol_type = other DNA
actacctggtgagcttctctgtgtcctggcaacaccacattccacatctaagtatattgtttggcccactgtctgggtataatataggaagaggtcagctttgagtgcggactagacagg

SEQ ID NO: 21291 - DNA, 120 bp, synthetic construct; identical to SEQ ID NO: 6409
  source 1..120: mol_type = other DNA

SEQ ID NO: 21292 - DNA, 120 bp, synthetic construct
  source 1..120: mol_type = other DNA
gaatagcaaatacaagactcaagacataggttccttttaggggataggattggacaacagcctagggtggcttcataggttctgtttcttatgccaggaggggatatccaggtagttagt

SEQ ID NO: 21293 - DNA, 120 bp, synthetic construct
  source 1..120: mol_type = other DNA
gattctcctgcctcagcctcctgagcagctgggattgcaggcaaatgccaccactcccagctaatttttgtatttttagtagagacgggcttcaccatgttgaccaggttggtctggaac

SEQ ID NO: 21294 - DNA, 120 bp, synthetic construct
  source 1..120: mol_type = other DNA
cattcctgattgattatttggaaatgaaagagaaaagaaaatgccaaagttcatcacaagcatcctttgcgataactactcatagtaaaacaaagccgcagctggccgggcacggtggct

SEQ ID NO: 21295 - DNA, 120 bp, synthetic construct; identical to SEQ ID NO: 6410
  source 1..120: mol_type = other DNA

SEQ ID NO: 21296 - DNA, 120 bp, synthetic construct
  source 1..120: mol_type = other DNA
aaataggtcatttgatccttggctagttggcgactctctacattttctgatacacagtgttcaatctgataggcaaggcaatagtatcttgcaaagaatttgagaatttgatatgttgct

SEQ ID NO: 21297 - DNA, 120 bp, synthetic construct
  source 1..120: mol_type = other DNA
aaagacataaatgaataactagtgatgaaatagcaataagaatggaaaacacgaaagagctgcttttaaagcaacattagaagcacaaaataacagtgtttttcagaatcatactggagt

SEQ ID NO: 21298 - DNA, 120 bp, synthetic construct; identical to SEQ ID NO: 6411
  source 1..120: mol_type = other DNA

SEQ ID NO: 21299 - DNA, 120 bp, synthetic construct
  source 1..120: mol_type = other DNA
cagcacatgtctcagagagcacggggttgggggtaaggttatagattaacagcatcccaaggcagaagaatttttcttagtacagaacaaaatggagtctcctatgtctgcttctttcta

SEQ ID NO: 21300 - DNA, 120 bp, synthetic construct
  source 1..120: mol_type = other DNA
gacagggtggcggccgggcagaggggctcctcacttcccagacggggtggccaggcagaggtgccccccacctcctggacggggtggctggccgggcgggggctgccccccacctccctc

SEQ ID NO: 21301 - DNA, 120 bp, synthetic construct
  source 1..120: mol_type = other DNA
tcacttcccagactgggcggctgctgggtggaggggctcctcacctctcagacggggcggccggggagagacgctccttacctcccagacggggtcgcggccgggcagaggcgctcctca

SEQ ID NO: 21302 - DNA, 120 bp, synthetic construct
  source 1..120: mol_type = other DNA
actttgggaggccaaggcaggcggctgggaggcagaggttgtagcgagccgagatcacgccactgcactccagcctgggcaacattgagcactgagtgagtgagactccgtctgcaatcc

SEQ ID NO: 21303 - DNA, 120 bp, synthetic construct; identical to SEQ ID NO: 6412
  source 1..120: mol_type = other DNA

SEQ ID NO: 21304 - DNA, 120 bp, synthetic construct
  source 1..120: mol_type = other DNA
gcaaagtgcctgaattttcttactcttcccctcagaatcccagaatacatgtgggatccactaccccatctcggaccatgaggccaccctgaggtgctgggtcccgggcttctaccatgt

SEQ ID NO: 21305 - DNA, 120 bp, synthetic construct
  source 1..120: mol_type = other DNA
tagagacaagtagagatacacatgccatgtgcagcaggaggcactgccagagcccctcacactgagatgggctaaggagatgaatgaggggccatgtctcttctcagggaaagcaggagc

SEQ ID NO: 21306 - DNA, 120 bp, synthetic construct
  source 1..120: mol_type = other DNA
tcctggttgttctaggtgctgtggtcactgctgtgatgtggaagaataagaccccaggtaggaaaggggtgagttccaagatttcttcttccattcgtggatttcaagctccagatggaa

SEQ ID NO: 21307 - DNA, 120 bp, synthetic construct; identical to SEQ ID NO: 6413
  source 1..120: mol_type = other DNA

SEQ ID NO: 21308 - DNA, 120 bp, synthetic construct
  source 1..120: mol_type = other DNA
tctcacagtttgttttctttcctcatatggaaaaggagtcagctatgctcaggcttcaagtaagtgtggtaggggtgggagaatgattcctgagatccttggaatagtgtagacaggagc

SEQ ID NO: 21309 - DNA, 120 bp, synthetic construct
  source 1..120: mol_type = other DNA
ctcaagtcttgtaaaagtggcaccttagagggcctgaagtgaaggaggagttggggcagatgggacacaactaggctctagagagtctttgatttggaatttttcaatgtgtggtgggct

SEQ ID NO: 21310 - DNA, 120 bp, synthetic construct
  source 1..120: mol_type = other DNA
gttcagtgtcaccacttaccatgactgacttgaatttgttcatgactattttctttctaagactgccttgtgagggactgagatgcaagatttgttcatggctccactttgagacttcaa

SEQ ID NO: 21311 - DNA, 120 bp, synthetic construct
  source 1..120: mol_type = other DNA
ctgtgtccccacccaaatctcatgctcacttgtaatccctaatgttggaggtggtgcttggtgggacgtgattggctcatgaggatggatcattcatgaatggtttagaatcatctcttt

SEQ ID NO: 21312 - DNA, 120 bp, synthetic construct; identical to SEQ ID NO: 6414
  source 1..120: mol_type = other DNA

SEQ ID NO: 21313 - DNA, 120 bp, synthetic construct
  source 1..120: mol_type = other DNA
ggttatgttcagcaaagccataaatgtggagctgcaaatggcattaggagcccagcagttgcaccagccactgtgctctggattcaaaatatacagtcaaaggagattcttttagacctt

SEQ ID NO: 21314 - DNA, 120 bp, synthetic construct
  source 1..120: mol_type = other DNA
ttggaatggaaatgtacaagaaatgtctcttccactgttgtattaatattttagatgtaaataacattttttaaaaaaaattttacaggctcaaagctataagaatttatcttgagtctc

SEQ ID NO: 21315 - DNA, 120 bp, synthetic construct
  source 1..120: mol_type = other DNA
ggatgcaatgatataaacatttatcccctgatacctcatgttaaaatctgatgcccactgtgggacgtggggcctaatggccaccatttgggtcatggtgaccaatcttttatgaataga

SEQ ID NO: 21316 - DNA, 120 bp, synthetic construct; identical to SEQ ID NO: 6415
  source 1..120: mol_type = other DNA

SEQ ID NO: 21317 - DNA, 120 bp, synthetic construct
  source 1..120: mol_type = other DNA
gccaagagtcttctcatcagtactctaaagacacttatcactcaagagagtctaaggtttttaggagaaaccagggacaaagtctaaatgtttttgtgataactcagattgcccactttt

SEQ ID NO: 21318 - DNA, 120 bp, synthetic construct
  source 1..120: mol_type = other DNA
attcaaaattaggccagtttatcatcctcttgtatgaatatgtctcccagaatgaaatcactcagctttgctgacaacactcaatcttaccaggttccaaaaacaagaatggtctcaggg

SEQ ID NO: 21319 - DNA, 120 bp, synthetic construct
  source 1..120: mol_type = other DNA
gagttaagctaatattgaatttttctcattatataaccctttgatttattcacttgccctcagccactattcctccctctgtccctttatatcagttgtttccaggtttgggagtgacat

SEQ ID NO: 21320 - DNA, 120 bp, synthetic construct
  source 1..120: mol_type = other DNA
tagagggtaggttatataggtaaggaactagtgggggctatcaagaccaccaggctatataactctacttactgttaatcctaacttttccagatgaaatgaatacttgagaattcttac

SEQ ID NO: 21321 - DNA, 120 bp, synthetic construct; identical to SEQ ID NO: 6416
  source 1..120: mol_type = other DNA

SEQ ID NO: 21322 - DNA, 120 bp, synthetic construct
  source 1..120: mol_type = other DNA
tttcaattttctatcaaattttcccctgaggaggacatgtccctctgcattgttggccatttgaggctgtaaagtgtgttttcttgtgtaaagaagtgtgactcggcagtccaaattggt

SEQ ID NO: 21323 - DNA, 120 bp, synthetic construct
  source 1..120: mol_type = other DNA
gggttgctggcatcattctggcttgccaggtattatgatcaaagccttcccactagagaatctgtcacatctccatctgctgcctctgtctgttttcttgaccaacagtgaaaaaagaga

SEQ ID NO: 21324 - DNA, 120 bp, synthetic construct
  source 1..120: mol_type = other DNA
agaccacttggataaaaaggaccaattcgtgcagagatagaaattgccaaaactgacccaaattaactggaaaacctgaagagaactgtgaactaagtcagaaattgaaaaaccttctca

SEQ ID NO: 21325 - DNA, 120 bp, synthetic construct; identical to SEQ ID NO: 6417
  source 1..120: mol_type = other DNA

SEQ ID NO: 21326 - DNA, 120 bp, synthetic construct
  source 1..120: mol_type = other DNA
gatgcaggagaaacagttgacaaaaatgttaacatcactcatgttcataagtttcaacaaaataggaatggaggagaccttcttcactctgataaagggcgtctataaaaaacccacagc

SEQ ID NO: 21327 - DNA, 120 bp, synthetic construct
  source 1..120: mol_type = other DNA
gtgcaataaggcagaaaattaaaaattaaaggcatccagataaaaaggaaaacatacaattctattcacagataacatgaccctgtctgtagaattcacaagcagataaaaactggctag

SEQ ID NO: 21328 - DNA, 120 bp, synthetic construct
  source 1..120: mol_type = other DNA
gcaatgaaaatctcaactttcctatcacagtagttaccagaagagcgaaataggaataaatttaggaagacagcagtgtttgttcactgaaaataaaaaaacattcctcagagaaattaa

SEQ ID NO: 21329 - DNA, 120 bp, synthetic construct
  source 1..120: mol_type = other DNA
aggttcaacacaatccctatcaaaatcccagcagggattttatagaaaattgacaaaataggccgggcgcggtggctcatgccggtaatcccagcactttgggaggctgaggcgggcgga

SEQ ID NO: 21330 - DNA, 120 bp, synthetic construct; identical to SEQ ID NO: 6418
  source 1..120: mol_type = other DNA

SEQ ID NO: 21331 - DNA, 120 bp, synthetic construct
  source 1..120: mol_type = other DNA
aaatgcagaggatgcagaagggccaacacaaatttggaaaaaaaaatggaatgtcatatgaaactacaataatccagacagtgtgaaactgagagacacagagatcaatgaacagaagtg

SEQ ID NO: 21332 - DNA, 120 bp, synthetic construct
  source 1..120: mol_type = other DNA
acagctaaaatttatgagttaaaactataaaatttctaaaagaaaatacaggagaaaatttttgttactttgggtagttaggcaaaagattcttagttaaaataccaaaagcatgatcta

SEQ ID NO: 21333 - DNA, 120 bp, synthetic construct
  source 1..120: mol_type = other DNA
atcacaaattacatttgtgttgaaaaacatgtttccagaataatgtggcaagttcttaaactcaatgtaagaagatgagcaactcaactgaaaatgagcaaaacacacaaatatgctcaa

SEQ ID NO: 21334 - DNA, 120 bp, synthetic construct; identical to SEQ ID NO: 6419
  source 1..120: mol_type = other DNA

SEQ ID NO: 21335 - DNA, 120 bp, synthetic construct
  source 1..120: mol_type = other DNA
aagccatcagaactaagactagacaaagagttcttacacataacaccaaaagtatgatccgtaaaagaaaaagttactaaactggatcttttcaaaattaaaactgttgctctgtgagag

SEQ ID NO: 21336 - DNA, 120 bp, synthetic construct
  source 1..120: mol_type = other DNA
gaaatccaaataaacaataggcaatgagcaagacatgaacagacgtttcactgaagaggataaacaccaggctaacaagcagatgaaaagacactcaacatcactatccagtaggaaaat

SEQ ID NO: 21337 - DNA, 120 bp, synthetic construct
  source 1..120: mol_type = other DNA
ggtacagccactctggaaatggatattgcagttttcttcaaactgaacatgcaatttaccatatgactagcaattgccctcctaggcatttatttcaaacaagggaaaactttatgttca

SEQ ID NO: 21338 - DNA, 120 bp, synthetic construct
  source 1..120: mol_type = other DNA
aatactcctggaagtaattattcataattacttccataaactggaaataatgcaattgtctttcagtgggtgaaggagatctgctggttgaactcataactgagtctacacaagtgccct

SEQ ID NO: 21339 - DNA, 120 bp, synthetic construct; identical to SEQ ID NO: 6420
  source 1..120: mol_type = other DNA

SEQ ID NO: 21340 - DNA, 120 bp, synthetic construct
  source 1..120: mol_type = other DNA
atggcagagatcaattatggttcctagtgagacccaacccctagcctattcagattcagcactctctctcgctcttttttttccctcattcttccaacttataattgtatatattttcaa

SEQ ID NO: 21341 - DNA, 120 bp, synthetic construct
  source 1..120: mol_type = other DNA
gaagggtaagagtggttggcagtgggtgtatcgtagaggagtttcttgttggggtcaatgtatctgtctccagtgctggatgcactgaaggccctgactttaccacaactcaatatagca

SEQ ID NO: 21342 - DNA, 120 bp, synthetic construct
  source 1..120: mol_type = other DNA
tgtgtatgtgtgtgtagagaggcagcaggaatgaagagattaagcttttgtgactgagccattctaaagtaacaaacataaaacacgcatggataaatgtctatgtgacaacaaacctga

SEQ ID NO: 21343 - DNA, 120 bp, synthetic construct; identical to SEQ ID NO: 6421
  source 1..120: mol_type = other DNA

SEQ ID NO: 21344 - DNA, 120 bp, synthetic construct
  source 1..120: mol_type = other DNA
cccagtcagtctgaactgatggcgggagatgctgatgcttgcttatcctcattccccgtttatttattcttcattaattcaatccaaactcccctcagtctgaactgatggtgggagatg

SEQ ID NO: 21345 - DNA, 120 bp, synthetic construct
  source 1..120: mol_type = other DNA
ggaagcagactgacctctgctcttcataatcaggaaaccccaaagcactcttcatcacctccctgatatcacccttcatctctacgtcatcacatgtgggctctaactctgaaggcaggt

SEQ ID NO: 21346 - DNA, 120 bp, synthetic construct
  source 1..120: mol_type = other DNA
ggaggggaaatttcttggtgctgtgtcaaagcatcaagacagacctctccttctctcctgaacctcacactctatcccttcccagacacttgaaataaaacacagaccagaaatgtttat

SEQ ID NO: 21347 - DNA, 120 bp, synthetic construct
  source 1..120: mol_type = other DNA
actattcacaaaggacagagctcacttcaatgccagcttatgaatccacaccttgccacctgcagaggtggaaaaaggcacctaaatccacgatccaatagttcttcctgcccttaactc

SEQ ID NO: 21348 - DNA, 120 bp, synthetic construct; identical to SEQ ID NO: 6422
  source 1..120: mol_type = other DNA

SEQ ID NO: 21349 - DNA, 120 bp, synthetic construct
  source 1..120: mol_type = other DNA
tatcttttcacactttacatcctcatccttccctctgggagtcttccctctttgggtcttctagtcctatcctaccctctatccccttccaggtggcacagggcttgaccatcacatttg

SEQ ID NO: 21350 - DNA, 120 bp, synthetic construct
  source 1..120: mol_type = other DNA
ctttaggtcttcctagttccttaatatgtttgtcttcaatcctgtcatgggcacctgatgcataatggacacttggctggttcatgcaccctggtctttgatgctgtgttgggatgtttt

SEQ ID NO: 21351 - DNA, 120 bp, synthetic construct
  source 1..120: mol_type = other DNA
gcctcactttttccttttcatgccttattctcaccatgccacattttcccctcagttgaacagacacagtaggggactagcccattctggcatgtgaccacgcttcaggaggagactgca

SEQ ID NO: 21352 - DNA, 120 bp, synthetic construct; identical to SEQ ID NO: 6423
  source 1..120: mol_type = other DNA

SEQ ID NO: 21353 - DNA, 120 bp, synthetic construct
  source 1..120: mol_type = other DNA
tgctggggtgtttctgatcctggggttcctggggggtggtgcacattagttccaggcatggagggtgctgtgggcactgctgggaagcttggctgtcccctcccaggctctctcctccca

SEQ ID NO: 21354 - DNA, 120 bp, synthetic construct
  source 1..120: mol_type = other DNA
gcaactcctcggcttgggccagctcagctgtgtggggggctcagggccctggtcagagggagtggaggagggaacatcagccagggtagaggggttgaggcccttggaacctgtgttgca

SEQ ID NO: 21355 - DNA, 120 bp, synthetic construct
  source 1..120: mol_type = other DNA
cagatacagatccctggctcaggggctatatctggatgccttgaatgaggatgtggggtcactggaaagagacgaccaggtgtctgtccccactaataaatgattaactgttagatgagg

SEQ ID NO: 21356 - DNA, 120 bp, synthetic construct; identical to SEQ ID NO: 6424
  source 1..120: mol_type = other DNA

SEQ ID NO: 21357 - DNA, 120 bp, synthetic construct
  source 1..120: mol_type = other DNA
gtgccagggaccaggagggcaggaggaggtgaagaaaacagcaccgagagagccaggggagtgggaggactgtggcaggtgaggcaaagagctgtctgagccgctcagcagccttcagga

SEQ ID NO: 21358 - DNA, 120 bp, synthetic construct
  source 1..120: mol_type = other DNA
tgtttctgccgctttaggcagaacttgctttagagcactggcacagccttccgccggtcgtgtgtctgattctcttggcactgtgccttttttcacttattcttctgcaaggaaggaatt

SEQ ID NO: 21359 - DNA, 120 bp, synthetic construct
  source 1..120: mol_type = other DNA
gctatggccaagatgtgtccaaggctctatagctagttggtggaaaggcctggagggttcatattcaggtccacctaacttgaaaacttatattgaccttacttaagtactgattccccc

SEQ ID NO: 21360 - DNA, 120 bp, synthetic construct
  source 1..120: mol_type = other DNA
gccagcaatcatcaacattgaggcaagaccgtgccccagcaaaaagattaagattagctgaagcctcagatgatccttagcatttttgagcaatagagtaattttaaattaaggtatata

SEQ ID NO: 21361 - DNA, 120 bp, synthetic construct; identical to SEQ ID NO: 6425
  source 1..120: mol_type = other DNA

SEQ ID NO: 21362 - DNA, 120 bp, synthetic construct
  source 1..120: mol_type = other DNA
gtgagcctcctccccacacacctcctgaactagaaccaaagctctgtgcatgcaccgtgcatgtgtgagccaatgacaagatgttgtcttcctgcaggtgttctgaaggaatgttctgtt

SEQ ID NO: 21363 - DNA, 120 bp, synthetic construct
  source 1..120: mol_type = other DNA
gggacaagaaggtcctgagataaaaacccatgttttggaaaacaaaactgcctgagactgaaaagtggctaaccaattcgctatctgggacatcactgcacactgggatggaagatggct

SEQ ID NO: 21364 - DNA, 120 bp, synthetic construct
  source 1..120: mol_type = other DNA
tcagtggaaaaaaaacccagaacttttgcaaaattttaggagagagggatttccctcttgtctcttagtgctacggttatgcatgactcatacttgaattgcaatgtgtacacagcttaa

SEQ ID NO: 21365 - DNA, 120 bp, synthetic construct; identical to SEQ ID NO: 6426
  source 1..120: mol_type = other DNA

SEQ ID NO: 21366 - DNA, 120 bp, synthetic construct
  source 1..120: mol_type = other DNA
ccctctctcagggtaatgagtaaatcctctaagacccgttctatctcagacagaccatccactcataaggaggtcaaaaacaagttccacacagcactgagacacaaccacctcattgtc

SEQ ID NO: 21367 - DNA, 120 bp, synthetic construct
  source 1..120: mol_type = other DNA
cctgtttgtgtcagtgacactgggtcccccacatactctgcactcacatccccacaaggctctgaacaccactattctgtctccccaacctcctgaaccacagaaatcttcccagtgcac

SEQ ID NO: 21368 - DNA, 120 bp, synthetic construct
  source 1..120: mol_type = other DNA
cccacataggggagtttcccccatggacttgtacccctgggttcagaggtgaggtggggtcctttctcctcactgtggttctcagaactttctgcctccctcctccctaaaacccctaag

SEQ ID NO: 21369 - DNA, 120 bp, synthetic construct; identical to SEQ ID NO: 6427
  source 1..120: mol_type = other DNA

SEQ ID NO: 21370 - DNA, 120 bp, synthetic construct
  source 1..120: mol_type = other DNA
aggaggaaggcagaggagacatagaagaggggaggtcagacgttccaagcaggaggattggatgtgccttaggcaccatgtgtgagtagctgaaagaagattctaggagctaagggtggc

SEQ ID NO: 21371 - DNA, 120 bp, synthetic construct
  source 1..120: mol_type = other DNA
attcttccccagagtccccaggaaggaacacagacctgcccataccttgaccttagccccataagactgtgcggacttgcaacctacaggactgtaacatgataattaggtgctgtttaa

SEQ ID NO: 21372 - DNA, 120 bp, synthetic construct
  source 1..120: mol_type = other DNA
tctgcctgaatctcatgcccctgtcatcccctaggcctcatcatgcccaaggaccccagcccttccatactctcaatttcacacttcccactctctggccatctttccactcatcccatg

SEQ ID NO: 21373 - DNA, 120 bp, synthetic construct; identical to SEQ ID NO: 6428
  source 1..120: mol_type = other DNA

SEQ ID NO: 21374 - DNA, 120 bp, synthetic construct
  source 1..120: mol_type = other DNA
cacaccttctctctgtgctcacacatccaaccctccttccccattcttatctcagctgacaaccttggttcctacctcactgagaaaactgaacacattagaagacagattccatcacca

SEQ ID NO: 21375 - DNA, 120 bp, synthetic construct
  source 1..120: mol_type = other DNA
ccagccagagccaatccctcttctggtgccccaaacatcatcccttatcatctacttaaaggtgtcagttcatcaattaatacctttttttctctttatcatcaacctttttcctctctc

SEQ ID NO: 21376 - DNA, 120 bp, synthetic construct
  source 1..120: mol_type = other DNA
acttttgaatcctgaaacctattgccacatttgctctgagaccacacctgccccctgtcttttcctgccaatgactgaggaaagcagggcagaaactaaggcaggaacatttcttctctg

SEQ ID NO: 21377 - DNA, 120 bp, synthetic construct
  source 1..120: mol_type = other DNA
tgctttgtggtctgatgacattcccagcattttccgtctgtgtcctgaatttctctcataactatttcctccaataaatccttgcacattgaatactgtattggggtctgctcctcaggg

SEQ ID NO: 21378 - DNA, 120 bp, synthetic construct; identical to SEQ ID NO: 6429
  source 1..120: mol_type = other DNA

SEQ ID NO: 21379 - DNA, 120 bp, synthetic construct
  source 1..120: mol_type = other DNA
gctacatgtgacagcctctgcagtgtctcatgcagaggtctttatctcttgtagcgaaagggcagataccgtggaatggtagctgaagacatcattatgagggccacagtgctccagaga

SEQ ID NO: 21380 - DNA, 120 bp, synthetic construct
  source 1..120: mol_type = other DNA
atgcataggaggctcacccttctctagtaatggttcccacttcctatgctggaagatgctacagaagtctcacccccatgatacagcaggaatcccactgaagagctttgcaggaactag

SEQ ID NO: 21381 - DNA, 120 bp, synthetic construct
  source 1..120: mol_type = other DNA
tcaaggcatgggtttatcaaacaccccaggactttgataagcggggggccaaacccaccgctggggtgaatccatatagactagaaaaaatgatgcctaactctcaacaaggtagacgtg

SEQ ID NO: 21382 - DNA, 120 bp, synthetic construct; identical to SEQ ID NO: 6430
  source 1..120: mol_type = other DNA

SEQ ID NO: 21383 - DNA, 120 bp, synthetic construct
  source 1..120: mol_type = other DNA
tgtggggaaggatagtagagggtgttgtcccaggattaggacaggaagccaacaagggcgctgcttgatatctatgataagaaagcaagaattgagaagcaggagggtgaaggtgtttga

SEQ ID NO: 21384 - DNA, 120 bp, synthetic construct
  source 1..120: mol_type = other DNA
agtaaatgctggcacaattccctcagtccttcagcaaaggaacctatagccatttactcaggagattgtacactggcgaaaggaaagatgcagaactggtcagattattgacactgagtg

SEQ ID NO: 21385 - DNA, 120 bp, synthetic construct
  source 1..120: mol_type = other DNA
atagacccagccctggttatcttccaattccctgagtacataattgacactgatgcactgttaagtggagtcacccccacactgggtccctagtctgtggagtcaggactctcattgtgc

SEQ ID NO: 21386 - DNA, 120 bp, synthetic construct; identical to SEQ ID NO: 6431
  source 1..120: mol_type = other DNA

SEQ ID NO: 21387 - DNA, 120 bp, synthetic construct
  source 1..120: mol_type = other DNA
tccactccaattagaaaggggatatggagcgattcacatccatgtgggatccacaacacatttatttatagttttttctcagggctattgtaactcccctgccctatatagtatggtcta

SEQ ID NO: 21388 - DNA, 120 bp, synthetic construct
  source 1..120: mol_type = other DNA
gaatgagcagcaggtagaaagtgcactggagtcattggcaaaacacacgcactccagtatgtgaagataaaccttacagagcttcaagagtggccactgaagtgaagttttatgggttaa

SEQ ID NO: 21389 - DNA, 120 bp, synthetic construct
  source 1..120: mol_type = other DNA
gaaggaaggaagcacactgcctgatgagcctctttgagttctgacaacaccacattccacatctaggtacgtgctttggcaaacactctaggtgatataggaggaggccagcttcaagta

SEQ ID NO: 21390 - DNA, 120 bp, synthetic construct
  source 1..120: mol_type = other DNA
ccaagcaccagtggaagagtcacagtgaagggcctgggattctggagtaagatcgtatcatccacagcagagacatatgccccctgttagaagcaacttttagtgttccttgtcctgatt

SEQ ID NO: 21391 - DNA, 120 bp, synthetic construct; identical to SEQ ID NO: 6432
  source 1..120: mol_type = other DNA

SEQ ID NO: 21392 - DNA, 120 bp, synthetic construct
  source 1..120: mol_type = other DNA
gatccagctgctgccacctctgaatgtccaactcatcagcattttaggcccatgatatgccctagtggggcactatttctttaggtgactagccattaactaagaagttgactacattta

SEQ ID NO: 21393 - DNA, 120 bp, synthetic construct
  source 1..120: mol_type = other DNA
ctcagacatagccagtaccattctctggatgctgttgacattcctggtctgcaggctaggttgtgctcctagcccattatctgcctgaaggacccacttggcaagggaaagattcagtgt

SEQ ID NO: 21394 - DNA, 120 bp, synthetic construct
  source 1..120: mol_type = other DNA
ccatcctatcatgcatgggctgacccatagtgaaggctggctaacttccatttgtctgtttcgttgtttaatgacacttcagacttggctgttttctgtgggtgtcaacatgggattcaa

SEQ ID NO: 21395 - DNA, 120 bp, synthetic construct; identical to SEQ ID NO: 6433
  source 1..120: mol_type = other DNA

SEQ ID NO: 21396 - DNA, 120 bp, synthetic construct
  source 1..120: mol_type = other DNA
tttgacatgttttatctcagaacactgggctgtgcagggtacgaggtcctggtttgcaaaggagggtacccttaaaagcagacaaaagacagcccactgaactacacattaagtgtgtca

SEQ ID NO: 21397 - DNA, 120 bp, synthetic construct
  source 1..120: mol_type = other DNA
taaaggcagaagtgtggaaaccagagatccacctgggggccttctgttttccctcaccccattgcaagtgtgagtagaattatccagcaattcagcctgagaggatttgatttccaaggg

SEQ ID NO: 21398 - DNA, 120 bp, synthetic construct
  source 1..120: mol_type = other DNA
tcccaaccagtgatgggtcacaccagtgacactaaggcaggacattcctggaagacaggggactcctctgatggccagctgtggctggaggactcctccatggccttgctcaactctcct

SEQ ID NO: 21399 - DNA, 120 bp, synthetic construct; identical to SEQ ID NO: 6434
  source 1..120: mol_type = other DNA

SEQ ID NO: 21400 - DNA, 120 bp, synthetic construct
  source 1..120: mol_type = other DNA
ttgggggtagtgttttacacagcaacagataactaatgcagccttcttacatttccgttattctatagaggttaactacgtctattttatttcctcctattttgataatattagccatac

SEQ ID NO: 21401 - DNA, 120 bp, synthetic construct
  source 1..120: mol_type = other DNA
accctccttctcccttcctcctttccgtcctttttcttccccttccccttccttcttttcttctttcactccttcctcaattcctccttctttctctcccttcctccattttttcctttt

SEQ ID NO: 21402 - DNA, 120 bp, synthetic construct
  source 1..120: mol_type = other DNA
aggaagttattaacagagtctgaataaaaatgcctgctataattctgcagccaagacagtggcttttaactcaattccttcaactaggtgttttcagaacacatgagtttaagttgacac

SEQ ID NO: 21403 - DNA, 120 bp, synthetic construct; identical to SEQ ID NO: 6435
  source 1..120: mol_type = other DNA

SEQ ID NO: 21404 - DNA, 120 bp, synthetic construct
  source 1..120: mol_type = other DNA
atgacagcctcccacaccacagataactcctgtacgtaatgtgcatcatgggaaaataaacgcagtaggaatttgctgtacaggaagcttaaaaaccagcaaaagtaaataatttttttt

SEQ ID NO: 21405 - DNA, 120 bp, synthetic construct
  source 1..120: mol_type = other DNA
cagcagcccaggggagctttacaggtttgtgttttacaccagtgttgggcatctttttagttacatgattgtaatttgttaaacagagttttcaaattaaaatatacctggtatttataa

SEQ ID NO: 21406 - DNA, 120 bp, synthetic construct
  source 1..120: mol_type = other DNA
aatgtaagcagccatgtgacagagaggaccaggatgtgatgaaaatggccttggttaataatagttcatttgatccttagctcactggcatctctctggattttcaagtatacaatgttc

SEQ ID NO: 21407 - DNA, 120 bp, synthetic construct
  source 1..120: mol_type = other DNA
acaagaaaagagtagaaaggaacaaccagtgatggaatagcaaatatgaatggaaagcaaaataagacagctaaaaaaaaaaaaaagaaagcttcagaagcacataatagcagtgctatt

SEQ ID NO: 21408 - DNA, 120 bp, synthetic construct; identical to SEQ ID NO: 6436
  source 1..120: mol_type = other DNA

SEQ ID NO: 21409 - DNA, 120 bp, synthetic construct
  source 1..120: mol_type = other DNA
gatatgtcaataagaaaattggcacttggggcatacttccactaaatttgagacatcttagacaaaacaaagacttattttcaaggcatgattcttatggcactgaagtcttggaactat

SEQ ID NO: 21410 - DNA, 120 bp, synthetic construct
  source 1..120: mol_type = other DNA
ttctctgcagcacccaaggctctgtcatgtctcaaacatttaatcattaatttaaaaagagaagcttatcacagaattagaaaaaaaaatttgaaaattcatatggatccaaaaaagagg

SEQ ID NO: 21411 - DNA, 120 bp, synthetic construct
  source 1..120: mol_type = other DNA
gcatatagaccaacagaacagaatagaaaactcagaaataagacctcacatctacaaccatgtgatcttcaacaaacctgacaaaaacaagcaatggggaaaggaaacgctatttaataa

SEQ ID NO: 21412 - DNA, 120 bp, synthetic construct
  source 1..120: mol_type = other DNA
aaaaaccctgaaagaaaatctaggcaataccattcaggacataggcatgggcaaagattttatgatgaaattgccaaaagcaactgccacagaagcaaaaattgacaaatgggatctaat

SEQ ID NO: 21413 - DNA, 120 bp, synthetic construct; identical to SEQ ID NO: 6437
  source 1..120: mol_type = other DNA

SEQ ID NO: 21414 - DNA, 120 bp, synthetic construct
  source 1..120: mol_type = other DNA
aaagaaataggaatgtttttacactgttggtggaaatgtaaattggttcaaccaatgaggaaggcagtgtggtgattcctcaaagatttagaaccagaaataccatttgacccagcaatc

SEQ ID NO: 21415 - DNA, 120 bp, synthetic construct
  source 1..120: mol_type = other DNA
ccaatgagggactagataaagaaaatatgatacatatatgccatggaatattatgcagccataaaaaggaatgagatcaaatcctttgcagggatatggatgaagctggaagccattatc

SEQ ID NO: 21416 - DNA, 120 bp, synthetic construct
  source 1..120: mol_type = other DNA
ggggagggcggtggtggggggagcattaggaaaaatggctaatgcatgcaggggttaatacctaggttatgggttgattggtgcagcaaactgccgtggaacccgtttacctgtgtaaca

SEQ ID NO: 21417 - DNA, 120 bp, synthetic construct; identical to SEQ ID NO: 6438
  source 1..120: mol_type = other DNA

SEQ ID NO: 21418 - DNA, 120 bp, synthetic construct
  source 1..120: mol_type = other DNA
tgagtgaattctcatgagatctgatggttttataaggggcttttccccgcttcgctctgcatttctctctcctgccaccatgtgaagaaggacgggttttcttccacttctgccatgatt

SEQ ID NO: 21419 - DNA, 120 bp, synthetic construct
  source 1..120: mol_type = other DNA
aacttctgatggagcaatgccgacataacagcttgtgactctgggtgtagaacctaaaactccctgcagcttccaccttctctctctctgtctctgggatcatgagctctggggaaagtc

SEQ ID NO: 21420 - DNA, 120 bp, synthetic construct
  source 1..120: mol_type = other DNA
atgtgaatcctcagccccagtgaagccctcagatgatgcaggcctagactgacaactggactgcaaccttgtgagaggcccttagcaagaagcactcagggaaacttctcctggattcct

SEQ ID NO: 21421 - DNA, 120 bp, synthetic construct; identical to SEQ ID NO: 6439
  source 1..120: mol_type = other DNA

SEQ ID NO: 21422 - DNA, 120 bp, synthetic construct
  source 1..120: mol_type = other DNA
cccaggctgatcttgaacttctggagtcaacaaatctgccttcctctgccttccacaatgctaggattgcaggtgtgagccaccaaatctggcctaaattaattaaaagatataaatatg

SEQ ID NO: 21423 - DNA, 120 bp, synthetic construct
  source 1..120: mol_type = other DNA
ttgaacttcaatttgcaactgtgtcccaagtgaacacaaaaagaagatccagcccttgctaggctgattctatgatggcctcaacaacaagctcctggtcattcaccttccccccattat

SEQ ID NO: 21424 - DNA, 120 bp, synthetic construct
  source 1..120: mol_type = other DNA
tgaaaggattgggttcttcctgagcatagagattcacagtgtgagagggattcagcatgaggggtttcctccactgtgggctttgaaaatgaaggggctgtacagggaagaacactggtg

SEQ ID NO: 21425 - DNA, 120 bp, synthetic construct; identical to SEQ ID NO: 6440
  source 1..120: mol_type = other DNA

SEQ ID NO: 21426 - DNA, 120 bp, synthetic construct
  source 1..120: mol_type = other DNA
gatcaaacagtgagacactcatctctacaatttctttttaattagctgggcgtggtggcacttgtctgcagtcctatctattctgaagactgaggcaggaagatcccttgagcccaggag

SEQ ID NO: 21427 - DNA, 120 bp, synthetic construct
  source 1..120: mol_type = other DNA
gtgataatttgttatgcaatcttataaaattcatacacaggctcaacagactcggaatgaattgatatgcacactagttacataaaataaaatatttcttaatttttcagtgttttacat

SEQ ID NO: 21428 - DNA, 120 bp, synthetic construct
  source 1..120: mol_type = other DNA
agcttcacaagaccgaggtggagccactggagtgttttaggtgaggaaatgacacactctgactcacaggagcaggaccactgtggagagaacagtcacgtagcaggtaatgggacaatg

SEQ ID NO: 21429 - DNA, 120 bp, synthetic construct; identical to SEQ ID NO: 6441
  source 1..120: mol_type = other DNA

SEQ ID NO: 21430 - DNA, 120 bp, synthetic construct
  source 1..120: mol_type = other DNA
ttaatcaggttttaaaaatactaagtgttcctataagatatacacaccacttagacgtgaatacttcctaaaaacaggcagcacatgagcactgctgaggggcattgtgactgcattgaa

SEQ ID NO: 21431 - DNA, 120 bp, synthetic construct
  source 1..120: mol_type = other DNA
gaatgaaggtaaatgtaaaaaacaagcgggagtcacagatacattgtctgcgaaagtcaaacttagtagctttgtgagtcctgttgtaatgctttcagacacatttatgtatcaaggggc

SEQ ID NO: 21432 - DNA, 120 bp, synthetic construct
  source 1..120: mol_type = other DNA
caaagagaaaacttgtctctatgctgtctcatgtactcaggcacaacttttccggatttaaagaaaaaaaaaacaaaaacctgtctctacgcctccattcccagggcgagctccctctct

SEQ ID NO: 21433 - DNA, 120 bp, synthetic construct; identical to SEQ ID NO: 6442
  source 1..120: mol_type = other DNA

SEQ ID NO: 21434 - DNA, 120 bp, synthetic construct
  source 1..120: mol_type = other DNA
aggccccgaaggcgatgtattgattggggaggcccagggttggggattccccatctccgcagtttctcttctccctctcccaacttatgtagggtccttcttcctggacactcaggatgt

SEQ ID NO: 21435 - DNA, 120 bp, synthetic construct
  source 1..120: mol_type = other DNA
aggatggggtcatggcgtcccgaaccctcctcctgctgctcttgggggccctggccctgaccgagacctgggcgggtgagtgcgggatccggagggaaatggcctctgcggggaggaggt

SEQ ID NO: 21436 - DNA, 120 bp, synthetic construct
  source 1..120: mol_type = other DNA
cccggccgggtcgcggggagccccggtacatcgcagtgggctacgtggacgacacgcagttcgtgcggttcgacagcgacgcggcgactccgaggatgtagccgcagtcgccgtggttgg

SEQ ID NO: 21437 - DNA, 120 bp, synthetic construct; identical to SEQ ID NO: 6443
  source 1..120: mol_type = other DNA

SEQ ID NO: 21438 - DNA, 120 bp, synthetic construct
  source 1..120: mol_type = other DNA
agggtctaacaccctccagataatgtatggctgcgacttggggctggaagggcgcctcctccgcgggtatgaacagcacgccaacgatggcaaggattacatagcccggaactaggacct

SEQ ID NO: 21439 - DNA, 120 bp, synthetic construct
  source 1..120: mol_type = other DNA
gggcctacctggagggcacgtgcgtggagaggctcgcagacacctggagaacgggaaggagacgctgcagctcacgggtaccagggaacacaagacgcctccctgatcgcctgtagatct

SEQ ID NO: 21440 - DNA, 120 bp, synthetic construct
  source 1..120: mol_type = other DNA
ggaatcctcctgggtttccagatcctgtacaagagagtgactctgagggtctgccctgctctctgatacaattaagggatgaaatctctgaggaaatgaagggaagacaatccctggaat

SEQ ID NO: 21441 - DNA, 120 bp, synthetic construct
  source 1..120: mol_type = other DNA
tccctcagcctccactcaggtcaggaccagaagtcactgttccctcctcagggactggaattttccacggaattcggagattatcccagatacctgtgtccaggttggtgtctgggttct

SEQ ID NO: 21442 - DNA, 120 bp, synthetic construct; identical to SEQ ID NO: 6444
  source 1..120: mol_type = other DNA

SEQ ID NO: 21443 - DNA, 120 bp, synthetic construct
  source 1..120: mol_type = other DNA
tctggagaggaacagagatacccgtgccatgtgcagcatgaggggttgcccaagcccctcaccctgagatggggtaaggcaggagatgagtggagggggggtcatgtctcttaggaaagc

SEQ ID NO: 21444 - DNA, 120 bp, synthetic construct
  source 1..120: mol_type = other DNA
ttgctggcctggttctccttggagctgtagtcactggagctgtggtttctgctgtgatgtgcaggaagaagaactcaggtaaggaatggatgaggagtggggtctgagatttcttgtccc

SEQ ID NO: 21445 - DNA, 120 bp, synthetic construct
  source 1..120: mol_type = other DNA
acctgtgacaatgaaggacagatttatcaccttgatgattatgatgatggggacctgatcccagcagtcacaagtcacaggggaaggtccctgctgaggacagacctcaggagggcagtt

SEQ ID NO: 21446 - DNA, 120 bp, synthetic construct; identical to SEQ ID NO: 6445
  source 1..120: mol_type = other DNA

SEQ ID NO: 21447 - DNA, 120 bp, synthetic construct
  source 1..120: mol_type = other DNA
ctctcacggcttgtaaaggtgagacactgggggacctgatgtgggggggtgttgggggcaatagtggacgcagctgtgctatggggtttctttgaattggatgtattgagcatgtgatgg

SEQ ID NO: 21448 - DNA, 120 bp, synthetic construct
  source 1..120: mol_type = other DNA
cttgtgtgggactgagaggcaagatttgttcacgccttccctttgtgacttcaaaaaccctgactctctttctgcaaaggcacctgaatgtgcctgtgttcctgtaggcataatatgagg

SEQ ID NO: 21449 - DNA, 120 bp, synthetic construct
  source 1..120: mol_type = other DNA
tcttccctcatgctgacctgtgttccgtctccaataattaatcattcctgctccatagaggtgaggctgagatgtctccatctctgtctcaactttatgtgcactgagctgtaacttctt

SEQ ID NO: 21450 - DNA, 120 bp, synthetic construct
  source 1..120: mol_type = other DNA
gacatgagaaccttccagagtccacatgtttcttatgctgatttgttgcatgagaggagagtagatggggctgtgcccagtgggtgctcaggccaccgtgcgctttatgtggtcactgct

SEQ ID NO: 21451 - DNA, 120 bp, synthetic construct; identical to SEQ ID NO: 6446
  source 1..120: mol_type = other DNA

SEQ ID NO: 21452 - DNA, 120 bp, synthetic construct
  source 1..120: mol_type = other DNA
aagactttaagactttcactatttcttctaccgttatctactacaaaattcaaagaggaaccaggagtacaggaggagcatgaaagtggacaaggagcatgaccactgaagcacagcacc

SEQ ID NO: 21453 - DNA, 120 bp, synthetic construct
  source 1..120: mol_type = other DNA
catggtctgctaagtaacaggtgccttcctagacactggtgttaccacttgaccaaggagccctcaagtggcccttatgcgggcgtgacagaaggctcatatcttgccttctaggtcact

SEQ ID NO: 21454 - DNA, 120 bp, synthetic construct
  source 1..120: mol_type = other DNA
ataattgttcatgatcatctctatatctaatttgtattatgactattcttattctaactattttctttattatactaaaacagtttgtgctttcagtctcttgcctcggcacctgagtaa

SEQ ID NO: 21455 - DNA, 120 bp, synthetic construct; identical to SEQ ID NO: 6447
  source 1..120: mol_type = other DNA

SEQ ID NO: 21456 - DNA, 120 bp, synthetic construct
  source 1..120: mol_type = other DNA
gtaatcctagtgctggctccaatagaaactcatcaatttataaagcagagtctagtttagattcatatgtggttggaaaattggacccataagcctagggttatctttcctgaagagaaa

SEQ ID NO: 21457 - DNA, 120 bp, synthetic construct
  source 1..120: mol_type = other DNA
ggtgagaaaagatctggtggcactgatgtcagtgtgagatgatgttgttctgtagctgccacaaaaataaagcatttgtcctgaggctacattaataaagatattgcctctagaatagag

SEQ ID NO: 21458 - DNA, 120 bp, synthetic construct
  source 1..120: mol_type = other DNA
gctaggtatatgactgtttttgcatttagaaagcatcattaaagtaaaaacagaaaaatttcgggccttatggtgtatatgttctagatgcaagcttgtccaacccgcagctcgtgggct

SEQ ID NO: 21459 - DNA, 120 bp, synthetic construct; identical to SEQ ID NO: 6448
  source 1..120: mol_type = other DNA

SEQ ID NO: 21460 - DNA, 120 bp, synthetic construct
  source 1..120: mol_type = other DNA
tctccctctgccacggtctccctctccctctctttccacggtctccctctgatgccgagccgaagctggactgtactgctgccatctcggctcactgcaacctccctgcccgattctcct

SEQ ID NO: 21461 - DNA, 120 bp, synthetic construct
  source 1..120: mol_type = other DNA
ccgcgagcgatccgccagcctcggcctcccgaggtgccaggattgcagacggagtctcgttcactcagtgctcaatggtgcccaggctggagtgcagtggcgtgatctcggctcactaca

SEQ ID NO: 21462 - DNA, 120 bp, synthetic construct
  source 1..120: mol_type = other DNA
tgaggagcatctctgcctggccgccatcccatctaggaagtgaggagcgtttctgcccggccgcccatcatctgagatgtggggagtgcctctgccccgccgccccatctgggatgtgag

SEQ ID NO: 21463 - DNA, 120 bp, synthetic construct; identical to SEQ ID NO: 6449
  source 1..120: mol_type = other DNA

SEQ ID NO: 21464 - DNA, 120 bp, synthetic construct
  source 1..120: mol_type = other DNA
ggaagtgaggagcccctctgcccggccagccgccccgtccgggagggaggtggggggggtcagccccccgcctggccagccgctccatccgggagggaggtgggggggtcagccccccgc

SEQ ID NO: 21465 - DNA, 120 bp, synthetic construct
  source 1..120: mol_type = other DNA
gagaacgggccatgatgacaatggcggtttagtggaatagaaaggggggaaaggtggggaaaagattgagaaatcggatggttgccctgtctgtgtagaaagaagtagacatgggagact

SEQ ID NO: 21466 - DNA, 120 bp, synthetic construct
  source 1..120: mol_type = other DNA
taagggcggtgcaagatgtgctttgttaaacagatgcttgaaggcagcatgctcgttaagagtcatcaccactccctaatctcaagtacccagggacacaaacactgcggaaggccgcag

SEQ ID NO: 21467 - DNA, 120 bp, synthetic construct; identical to SEQ ID NO: 6450
  source 1..120: mol_type = other DNA

SEQ ID NO: 21468 - DNA, 120 bp, synthetic construct
  source 1..120: mol_type = other DNA
tcacagtggggcttacagaggccagggaataaacctggacaaattatgccccacggtggaatcactgggtccataaatcctgtcctggttatctccccattctctgtaaaaaggattctc

SEQ ID NO: 21469 - DNA, 120 bp, synthetic construct
  source 1..120: mol_type = other DNA
acctggagggcaggtgcgtggagtggctccgcagatacctggagaacaggaaggagacactgcagcacacctgtaccagggaccacgggcgcctccctgatcgcctgtaatctcccgggc

SEQ ID NO: 21470 - DNA, 120 bp, synthetic construct
  source 1..120: mol_type = other DNA
gttccacactgctctctgacacaattaagggataaaatctctgaggcaatgacgggaagacgcaattaagggataaaatctctgagggaatgacgggaacacgatccctcatttagtgat

SEQ ID NO: 21471 - DNA, 120 bp, synthetic construct; identical to SEQ ID NO: 6451
  source 1..120: mol_type = other DNA

SEQ ID NO: 21472 - DNA, 120 bp, synthetic construct
  source 1..120: mol_type = other DNA
cctcccaggttcatgccattctcctgcctcagctttccaagtagctgggactacaggcacctgccaccatgcccggctaattttttgtatttttagtagagacagggtttcaccatgtta

SEQ ID NO: 21473 - DNA, 120 bp, synthetic construct
  source 1..120: mol_type = other DNA
cctccctccatctctttcttctctatttccattcaaactatcgccttccctccttctttctccctttccttcccctccccttccttcttttcttcttttgctttttcctccattcctcct

SEQ ID NO: 21474 - DNA, 120 bp, synthetic construct
  source 1..120: mol_type = other DNA
tgtcatgtatatgagaaacaagtaaacaacaggaagttattaacagagtctgaataaaaatgcctgctataattctacagccaagacagtggcttttaactcaattccttcaacacagtg

SEQ ID NO: 21475 - DNA, 120 bp, synthetic construct; identical to SEQ ID NO: 6452
  source 1..120: mol_type = other DNA

SEQ ID NO: 21476 - DNA, 120 bp, synthetic construct
  source 1..120: mol_type = other DNA
gcagtaaaaatgaatgaatgacagtctcccacaccacagataactcctacacataatgtgcatcatgggaaaataaaggcagtaggaacttgctgtacaggaagcttaaaaaccagcaaa

SEQ ID NO: 21477 - DNA, 120 bp, synthetic construct
  source 1..120: mol_type = other DNA
tacatatatggatacatatatgtgtatatatacacatatatacacatatatgtatatatatacacatatatacacatatatgtgtatatatatacttattgcacaaatctttgaagaaat

SEQ ID NO: 21478 - DNA, 120 bp, synthetic construct
  source 1..120: mol_type = other DNA
tgctagaggaattaaagacacacacacagaaatatagaggtgtgaagtgggaaatcaggggtctcacagccttcagagctgagccccaaacagagatttacccacatatttattacagtc

SEQ ID NO: 21479 - DNA, 120 bp, synthetic construct; identical to SEQ ID NO: 6453
  source 1..120: mol_type = other DNA

SEQ ID NO: 21480 - DNA, 120 bp, synthetic construct
  source 1..120: mol_type = other DNA
ctgggtagcagcccagggtagttttacagttttgtgttttacaccagtgctgggccccctggtagttacttgattataattccttaaacagagttttccaaattaaaatatacctgtttt

SEQ ID NO: 21481 - DNA, 120 bp, synthetic construct
  source 1..120: mol_type = other DNA
atgccatgaaaacggccttggctacatataggtcattcgatccttggctcactggcatctctctagattttcaataatacaatgttcaatatgctatgcaaggtaatttcatcttgcaaa

SEQ ID NO: 21482 - DNA, 120 bp, synthetic construct
  source 1..120: mol_type = other DNA
aatgaaacatgaaaagagtaggaaggaatacccagtgatggaatagcaaatatgaatggaaacagaataggactgctaaaaagaaaaaaaattcagaagcacataatagcagtgctattt

SEQ ID NO: 21483 - DNA, 120 bp, synthetic construct; identical to SEQ ID NO: 6454
  source 1..120: mol_type = other DNA

SEQ ID NO: 21484 - DNA, 120 bp, synthetic construct
  source 1..120: mol_type = other DNA
acaaagaacttaagcaaatttacatgaaaaaaaacttcattaaaaagtggacaaagaacatgaacagacacttctaaagaagacatacatgtggccaacaaaaatatgaaaaagaaagct

SEQ ID NO: 21485 - DNA, 120 bp, synthetic construct
  source 1..120: mol_type = other DNA
aaataggaatgcttttacactgttggtggaaaagtaaatggttaatccattgtggaagacagtgacagtgtggcgattcctcaaagatttagaaccagaaataccatttgacccagcaat

SEQ ID NO: 21486 - DNA, 120 bp, synthetic construct
  source 1..120: mol_type = other DNA
atcaatgatggtctggataaagaaaatatggtacatatacaccatggaatattatgcagccataaaaaggaaggagatcaagtcctttgcagggatatggatgaagctggaagccattat

SEQ ID NO: 21487 - DNA, 120 bp, synthetic construct; identical to SEQ ID NO: 6455
  source 1..120: mol_type = other DNA

SEQ ID NO: 21488 - DNA, 120 bp, synthetic construct
  source 1..120: mol_type = other DNA
aacaatagttataattttgcttttaacatatattcaaatcctttgatactgttcctttctagaggtgcagcttaattccctctcttgagtgtggcttggacttaatgaggcacttctgaa

SEQ ID NO: 21489 - DNA, 120 bp, synthetic construct
  source 1..120: mol_type = other DNA
tgctgttctcctgatgctgagggaattctcatgagatctgatggttttataaggggcttttccctgcttcattgtgcatttctctctcctgtcaccacatgaagaaggacgggtttgctt

SEQ ID NO: 21490 - DNA, 120 bp, synthetic construct
  source 1..120: mol_type = other DNA
tgagaatggactaatacaacttctaacttatagaatagtgccaacataacagtttgtgactctgggtgtagaacataaaactaactgcggcttccaccttctctctctctgaatctggga

SEQ ID NO: 21491 - DNA, 120 bp, synthetic construct
  source 1..120: mol_type = other DNA
gccctgcaggaaggtccacatgactgagaactgaggccttctgggaacagacaacaaggaaccaggccttttccaacagccatgtgactgatccatgtttcttgtgaattcccagcccca

SEQ ID NO: 21492 - DNA, 120 bp, synthetic construct; identical to SEQ ID NO: 6456
  source 1..120: mol_type = other DNA

SEQ ID NO: 21493 - DNA, 120 bp, synthetic construct
  source 1..120: mol_type = other DNA
cactgcagtgtcgaacgcctggggtcaagggactctctgacctcagcctcctgagtagctgcgactaccatcatgaactaccatgcctggctaattttctaattttttgtatagatggag

SEQ ID NO: 21494 - DNA, 120 bp, synthetic construct
  source 1..120: mol_type = other DNA
aaacatgtaacttagttttaaaaagtaaggacaatttccatggctgaagaggatgtattttatgaccattcacaatgatcacgttacttgaacttcactttccaactgtgtcccaattaa

SEQ ID NO: 21495 - DNA, 120 bp, synthetic construct
  source 1..120: mol_type = other DNA
ggatttagcagatataattaagggtctcaattagttgactttatgctgggtttatcctgcttggactgtcctaatcaggtgagtccttgaaaggactgggttcttcatgagcatagagac

SEQ ID NO: 21496 - DNA, 120 bp, synthetic construct; identical to SEQ ID NO: 6457
  source 1..120: mol_type = other DNA

SEQ ID NO: 21497 - DNA, 120 bp, synthetic construct
  source 1..120: mol_type = other DNA
aaaagaaaaattaaggggctgtgtaggaaagaacgctggtgagcaccgggaattgagcccctcccagttctctacattgacagctagccaggaacagggacctcagtcttacaactgcaa

SEQ ID NO: 21498 - DNA, 120 bp, synthetic construct
  source 1..120: mol_type = other DNA
gattctatccacatcttgcccagatttctgaccaaggaactataagcagataaatgtgtgttgttttgccaggcatggtagtgtgcgaatgaattgatgaattgatatacacactagttg

SEQ ID NO: 21499 - DNA, 120 bp, synthetic construct
  source 1..120: mol_type = other DNA
tcattcattaagtcaacaaaaattaacttagtccctacaatgaacgaggtatcccctcatatgctcaagtgcctgacactccagaagcttcacaagaccgaggtggagacactggagtgt

SEQ ID NO: 21500 - DNA, 120 bp, synthetic construct
  source 1..120: mol_type = other DNA
tttaagtggagaaatgacacactccgactcacaggagcagggccactgtgaaaagaacagttacgtagcaggtcatgggacagtgctagtgtcacaattcatgagtgacagtgtggtggg

SEQ ID NO: 21501 - DNA, 120 bp, synthetic construct; identical to SEQ ID NO: 6458
  source 1..120: mol_type = other DNA

SEQ ID NO: 21502 - DNA, 120 bp, synthetic construct
  source 1..120: mol_type = other DNA
ttgaggtgaataaagcctgtaatggcttctggttgcaacatataggaacacagtggctactttgtattgaggagatgtcgtggactcacacagaaactcagagctaaggaatgatggcaa

SEQ ID NO: 21503 - DNA, 120 bp, synthetic construct
  source 1..120: mol_type = other DNA
attttttacctattagattcctgatcattcaggggttaccaagattctgctacccactgtagttaataaacaaagagcaaattggtctctattctgtctcatgcactcaggcacaacttt

SEQ ID NO: 21504 - DNA, 120 bp, synthetic construct
  source 1..120: mol_type = other DNA
ggtaaggagtgggagtcagggagtccagttcagggacagagataatgggatgaaaagtgaaaggagagggacggggcccatgccgagggtttctcccttgtttctcagacagctcctggg

SEQ ID NO: 21505 - DNA, 120 bp, synthetic construct; identical to SEQ ID NO: 6459
  source 1..120: mol_type = other DNA

SEQ ID NO: 21506 - DNA, 120 bp, synthetic construct
  source 1..120: mol_type = other DNA
ccctcctcctgctactctcgggggccctggccctgacccagacctgggcgggtgagtgcggggtcgggagggaaaccgcctctgcggggagaagcaaggggccctcctggcgggggcgca

SEQ ID NO: 21507 - DNA, 120 bp, synthetic construct
  source 1..120: mol_type = other DNA
cgcttcatcgccgtgggctacgtggacgacacgcagttcgtgcggttcgacagcgacgccgcgagccagaggatggagccgcgggcgccgtggatagagcaggaggggccggagtattgg

SEQ ID NO: 21508 - DNA, 120 bp, synthetic construct
  source 1..120: mol_type = other DNA
aggacccctcatcccccacggacgggccaggtcgcccacagtctccgggtccgagatccaccccgaagccgcgggaccccgagacccttgccccgggagaggcccaggcgcctttacccg

SEQ ID NO: 21509 - DNA, 120 bp, synthetic construct; identical to SEQ ID NO: 6460
  source 1..120: mol_type = other DNA

SEQ ID NO: 21510 - DNA, 120 bp, synthetic construct
  source 1..120: mol_type = other DNA
gcgcacgggtaccaggggccacggggcgcctccctgatcgcctgtagatctcccgggctggcctcccacaaggaggggagacaattgggaccaacactagaatatcaccctccctctggt

SEQ ID NO: 21511 - DNA, 120 bp, synthetic construct
  source 1..120: mol_type = other DNA
tccctcgaatactgatgagtggttccctttgacaccggcagcagccttgggcccgtgacttttcctctcaggccttgttctctgcttcacactcaatgtgtgtgggggtctgagtccagc

SEQ ID NO: 21512 - DNA, 120 bp, synthetic construct
  source 1..120: mol_type = other DNA
tccccatcccgggtgtcctgtccattctcaagatggccacatgcgtgctggtggagtgtcccatgacagatgcaaaatgcctgaattttctgactcttcccgtcagacccccccaagaca

SEQ ID NO: 21513 - DNA, 120 bp, synthetic construct; identical to SEQ ID NO: 6461
  source 1..120: mol_type = other DNA

SEQ ID NO: 21514 - DNA, 120 bp, synthetic construct
  source 1..120: mol_type = other DNA
ccagagctgtcttcccagcccaccatccccatcgtgggcatcattgctggcctggttctccttggagctgtgatcactggagctgtggtcgctgccgtgatgtggaggaggaagagctca

SEQ ID NO: 21515 - DNA, 120 bp, synthetic construct
  source 1..120: mol_type = other DNA
ccagtctgggccctgtgtgccagcacttactcttttgtaaagcacctgttaaaatgaaggacagatttatcaccttgattacggcggtgatgggacctgatcccagcagtcacaagtcac

SEQ ID NO: 21516 - DNA, 120 bp, synthetic construct
  source 1..120: mol_type = other DNA
ggggtccaagactaggaggttcctctaggaccttaaggccctggctcctttctggtatctcacaggacattttcttctcacagatagaaaaggagggagttacactcaggctgcaagtaa

SEQ ID NO: 21517 - DNA, 120 bp, synthetic construct; identical to SEQ ID NO: 6462
  source 1..120: mol_type = other DNA

SEQ ID NO: 21518 - DNA, 120 bp, synthetic construct
  source 1..120: mol_type = other DNA
gatatgaatttgttcatgaatatttttttctatagtgtgagacagctgccttgtgtgggactgagaggcaagagttgttcctgcccttccctttgtgacttgaagaaccctgactttgtt

SEQ ID NO: 21519 - DNA, 120 bp, synthetic construct
  source 1..120: mol_type = other DNA
aatcatctttcctgttccagagaggtggggctgaggtgtctccatctctgtctcaacttcatggtgcactgagctgtaacttcttccttccctattaaaattagaaccttagtataaatt

SEQ ID NO: 21520 - DNA, 120 bp, synthetic construct
  source 1..120: mol_type = other DNA
tgctgatttgttgcaggggaggagagtagatggggctgtgcccagtttctgttctggccaccatgggctttatgtggtcacagctcacctgggtcatctttgctgctccattgtccttgg

SEQ ID NO: 21521 - DNA, 120 bp, synthetic construct; identical to SEQ ID NO: 6463
  source 1..120: mol_type = other DNA

SEQ ID NO: 21522 - DNA, 120 bp, synthetic construct
  source 1..120: mol_type = other DNA
cttcttcctgctctgagttgtagtaatcctagtgctggctccaatccaaactcatagatttataaagcagagtctaatttagattcatatgtggttggaaaattgtacccataaggctag

SEQ ID NO: 21523 - DNA, 120 bp, synthetic construct
  source 1..120: mol_type = other DNA
cacgtgaacttatgttctttagctgccacaaaacagcatttgccctgtggctacattaataaagatatgggctttagaatagggaggtgctctacagtgatcattcattcaactgacatt

SEQ ID NO: 21524 - DNA, 120 bp, synthetic construct
  source 1..120: mol_type = other DNA
tgttgtctgctagggatatgactgcttttgcatttagaaagcatccttaaagtaaaaacagaaaaatgtctggggttatggtgcatacgttctagatgcaggcttgtccaacccgcggct

SEQ ID NO: 21525 - DNA, 120 bp, synthetic construct
  source 1..120: mol_type = other DNA
ggaaccctccttttcagtgacctgcaaaagatagagggcacatttactgtgataacccagagtatcagccaagggggcttgaccttcaaggagttgtggggaaggttaataaagggtggt

SEQ ID NO: 21526 - DNA, 120 bp, synthetic construct; identical to SEQ ID NO: 6464
  source 1..120: mol_type = other DNA

SEQ ID NO: 21527 - DNA, 120 bp, synthetic construct
  source 1..120: mol_type = other DNA
ccataaatcctgtcctggttatctccccattctctgagtgcataattggccttgatgcactggcaactggagtcaccccacactgtgtccctagtctggagagtaagggatctcactgtg

SEQ ID NO: 21528 - DNA, 120 bp, synthetic construct
  source 1..120: mol_type = other DNA
gaacgatgtggggtggtgttgggattgcctgttatctccatataactcagcaatctgtacctgcagaagcctgatatggctaaagaatgaatggaattactccagacttgaccaagtagg

SEQ ID NO: 21529 - DNA, 120 bp, synthetic construct
  source 1..120: mol_type = other DNA
tgtggatttggtgagtgcattccctcccatttcatttagaagatggatatggaatgattcacattcacatgggatttataatacatttattgatagcttgcatcagggctaccttaactc

SEQ ID NO: 21530 - DNA, 120 bp, synthetic construct; identical to SEQ ID NO: 6465
  source 1..120: mol_type = other DNA

SEQ ID NO: 21531 - DNA, 120 bp, synthetic construct
  source 1..120: mol_type = other DNA
ctaccttgtgagcctctctgggttctagcaacaccacattccacatctaagtttattgctttggctgacactctgggtgatataggaggaggccagctttgagtggggcctggactggaa

SEQ ID NO: 21532 - DNA, 120 bp, synthetic construct
  source 1..120: mol_type = other DNA
agtcagaatgcagggcctgggatcaggagtaaggccatggagtccacagcagagaaacatgctccatgttagaagcaacttttagcatgttactggccctgataagatagaatgcttgag

SEQ ID NO: 21533 - DNA, 120 bp, synthetic construct
  source 1..120: mol_type = other DNA
gtcggttgagcctcaattccatgttaacacccacagaaaacacccagtcctgatgtggccctgaataaccaaacaaattgaagacaaattgaagttagccagtctgcatcatggatcagc

SEQ ID NO: 21534 - DNA, 120 bp, synthetic construct; identical to SEQ ID NO: 6466
  source 1..120: mol_type = other DNA

SEQ ID NO: 21535 - DNA, 120 bp, synthetic construct
  source 1..120: mol_type = other DNA
agtcaacaacactattggcattcctgatccactggctcagaatttcagtacactatctgcctgggggacacacctgttggggaaggggatgaagtgtgggccctgaccatgggatcccct

SEQ ID NO: 21536 - DNA, 120 bp, synthetic construct
  source 1..120: mol_type = other DNA
tcaggatgtgatgcatgtattgaatcaaagacgtctctaaggcactgttttcagaaggaagaatacgcgggtccaaaaaccaagaagtcaaagcaggtgtgtctcattccttatattcac

SEQ ID NO: 21537 - DNA, 120 bp, synthetic construct
  source 1..120: mol_type = other DNA
tgtatttattttattcattatattcacccccagggtgattttgctcttcttacttccaaaatctggactctgcagggtaggaggtcctggtttcccaaagagggcaccctggcaaggaga

SEQ ID NO: 21538 - DNA, 120 bp, synthetic construct; identical to SEQ ID NO: 6467
  source 1..120: mol_type = other DNA

SEQ ID NO: 21539 - DNA, 120 bp, synthetic construct
  source 1..120: mol_type = other DNA
ccagtgaccggtcacagcaagcacactaaggcaggccattactgggagacatgggactcctctgatggccaaatgtggctccaggactcctccatgcccttcctcaactctccttagact

SEQ ID NO: 21540 - DNA, 120 bp, synthetic construct
  source 1..120: mol_type = other DNA
tacaggtgtgtcccctcataagatgccgtagactttaagctcatcttggcatctgctccttggaggacttggactaaaaagcattgccatgtgcacaccaataactcttacttattccaa

SEQ ID NO: 21541 - DNA, 120 bp, synthetic construct
  source 1..120: mol_type = other DNA
tagtttgtgacacagcagttaataactattaaggctttcttaagtttctgttattccatggatgttatctacatcttttaatttcctgcattttaataatattagccacacttgctgttt

SEQ ID NO: 21542 - DNA, 120 bp, synthetic construct; identical to SEQ ID NO: 6468
  source 1..120: mol_type = other DNA

SEQ ID NO: 21543 - DNA, 120 bp, synthetic construct
  source 1..120: mol_type = other DNA
cataagttctttcccattcttggtacaagcacttgggaaatcaaattagccttatcttgtatgattaatgtccatacactgtataatcccaccatctgctcctgatcatacactctgggg

SEQ ID NO: 21544 - DNA, 120 bp, synthetic construct
  source 1..120: mol_type = other DNA
attttagcagtaaaaatgattgaacagcaccctcccacatcagagataactctcctacacataacatgcatcacagaagaatacatatagtgtgagttctctgtacagcgaagttaaaaa

SEQ ID NO: 21545 - DNA, 120 bp, synthetic construct
  source 1..120: mol_type = other DNA
actcaagatagaggttccttttggtggataggattgggcaacagtctagggtggcttcataggttctgtttcttatgccaggagaggatgtccaggtaattagttacttgatcataaatc

SEQ ID NO: 21546 - DNA, 120 bp, synthetic construct; identical to SEQ ID NO: 6469
  source 1..120: mol_type = other DNA

SEQ ID NO: 21547 - DNA, 120 bp, synthetic construct
  source 1..120: mol_type = other DNA
ctgattatttggaaatgaaagagaaaagaaaacacaaaagttcattgcaaggatccttagcaataactacatgagttaaaacaaagccacagccaattgtaaggagccatgtgacagaga

SEQ ID NO: 21548 - DNA, 120 bp, synthetic construct
  source 1..120: mol_type = other DNA
acaaagccacagccaattgtaaggagccatgtgacagagagtaccaggatgccatgaaaaaatagcctttgatagaaataggtcatttgattcttggctaattggcaactctctacattc

SEQ ID NO: 21549 - DNA, 120 bp, synthetic construct
  source 1..120: mol_type = other DNA
aaaaaagcactgtcgagcaaaataaattaaatgaaaacacataaaggaataactagtgatgaaatagcaatacgaatggaaaacacgaaagagcttcttttacagcaacattagaagcac

SEQ ID NO: 21550 - DNA, 120 bp, synthetic construct
  source 1..120: mol_type = other DNA
gaaaaatcgtgttcctagattggagttaaccatttccgcctaccacatcaaaccaaatctttgtcgtgatgctaagctagctgtacagacaaagatgtgagacacattttctctaactgc

SEQ ID NO: 21551 - DNA, 120 bp, synthetic construct; identical to SEQ ID NO: 6470
  source 1..120: mol_type = other DNA

SEQ ID NO: 21552 - DNA, 120 bp, synthetic construct
  source 1..120: mol_type = other DNA
tagtcagatacaagaagtatttgatttacaaaatcctgaaacaataatgttaattgtggtgccagctacttgggaggctgaaggaggagcattgatggcatgagcccaggaggttgaggc

SEQ ID NO: 21553 - DNA, 120 bp, synthetic construct
  source 1..120: mol_type = other DNA
agccctggtgaagggcactttggctgcattgagcacttgcagatttgaggtgattacattctgtacgttacttaacatgcatactgtacatacttaacatgcatataaattctttgatac

SEQ ID NO: 21554 - DNA, 120 bp, synthetic construct
  source 1..120: mol_type = other DNA
tgtggcctgaacttaatgactcacttacagactgatagagtaatgttgagataatagtttgtgactctgggtgtagatcataagactcactaagtctgggagcggtcactcacgcctgta

SEQ ID NO: 21555 - DNA, 120 bp, synthetic construct; identical to SEQ ID NO: 6471
  source 1..120: mol_type = other DNA

SEQ ID NO: 21556 - DNA, 120 bp, synthetic construct
  source 1..120: mol_type = other DNA
aagccagctgctgtgtcataagcaggcctgtggaaagctccaagtgactaggaagtgaggcctcctggggccagacaataagaagatgaagcctcttccaacagccacgtgggatattct

SEQ ID NO: 21557 - DNA, 120 bp, synthetic construct
  source 1..120: mol_type = other DNA
ttcctgaccactagaaactgtgggacatgataaatatttgttgattttagttgctaagttttaagtgacttgttatgcatcagtagataactaacacaccttcacaagagaggatgaatc

SEQ ID NO: 21558 - DNA, 120 bp, synthetic construct
  source 1..120: mol_type = other DNA
aattttttttaccttcaatttgtatgttctattcaaacacaaaaggaagagccaggctatgctagggtgattctatgatgacaccccaataaccacccttggttgctcacattaccccag

SEQ ID NO: 21559 - DNA, 120 bp, synthetic construct; identical to SEQ ID NO: 6472
  source 1..120: mol_type = other DNA

SEQ ID NO: 21560 - DNA, 120 bp, synthetic construct
  source 1..120: mol_type = other DNA
gggggagaatcccaatcttaagatgaggatacagctttgcgaaaccctgaacaaagaatctctgacactaggcctggatttctgatgaaggaaatgcagaaaaataaatgagtgctcttt

SEQ ID NO: 21561 - DNA, 120 bp, synthetic construct
  source 1..120: mol_type = other DNA
tcctccaatggaatgaatttatgaactgatatgcatagtagttgcataaaaccaaatgtttcctaacttgctttgcatttttcattttgtgatttttgtgtgatacaatttttaacacaa

SEQ ID NO: 21562 - DNA, 120 bp, synthetic construct
  source 1..120: mol_type = other DNA
tgatcaaaacaacccaaagcccctgtgcttgtgccttccattttagaggcttcttgagagtgagatggagccattggagtgttttaagtgaagaaatgacacaatctgactcacattagc

SEQ ID NO: 21563 - DNA, 120 bp, synthetic construct
  source 1..120: mol_type = other DNA
gacagggacagagagaagggctggagaagcaggaggtgaggtaaaggaacagagagaaagaattctaaagcaatggaattctcagacttaaacacagggttttatagatttttaatccat

SEQ ID NO: 21564 - DNA, 120 bp, synthetic construct; identical to SEQ ID NO: 6473
  source 1..120: mol_type = other DNA

SEQ ID NO: 21565 - DNA, 120 bp, synthetic construct
  source 1..120: mol_type = other DNA
ccaggagtggtggtacaagcctgtggtgccagatacttggaggctgaaggaggagcattgatcgcatgagcccaggaggtcgaggcttcagtgagtcatgaacgtgccacagcactccag

SEQ ID NO: 21566 - DNA, 120 bp, synthetic construct
  source 1..120: mol_type = other DNA
gaggtgattaaattctgtacaggctcctggttgcaatatacggtaacacattgtgctttgtattgagatgtcctggactcgcgcacacaaactcagggctataagataaagataatttaa

SEQ ID NO: 21567 - DNA, 120 bp, synthetic construct
  source 1..120: mol_type = other DNA
gacacatttatatataatggggccaaaaatcacctcttttacaaattagattcgtgaccattcaggggctaccaagattgtgctagccactgtactgcgctacccactgttactaagatt

SEQ ID NO: 21568 - DNA, 120 bp, synthetic construct; identical to SEQ ID NO: 6474
  source 1..120: mol_type = other DNA

SEQ ID NO: 21569 - DNA, 120 bp, synthetic construct
  source 1..120: mol_type = other DNA
tcaaaacctacctgcagggaaggtgggcggagtggctcagcaaagtccttaagaatgggaaggagaggctgcagtgcccaggtaccagtggccacggggtgcctccctgatctcctgcag

SEQ ID NO: 21570 - DNA, 120 bp, synthetic construct
  source 1..120: mol_type = other DNA
actgagggcctgccctgcactctgggacagttaaaggatgtagtctctgagggaaaggaggggaagacaatccctgaaatactgatccgcggtcccctttgtccccacagcagccttggg

SEQ ID NO: 21571 - DNA, 120 bp, synthetic construct
  source 1..120: mol_type = other DNA
cggcctcagacactaaaactttctaaggaatagaagattgccccaggtgcctgtgtctagactggtgtctgagttgctcccttccccacttcaggtgtcccgtcaattttcaggatggtc

SEQ ID NO: 21572 - DNA, 120 bp, synthetic construct; identical to SEQ ID NO: 6475
  source 1..120: mol_type = other DNA

SEQ ID NO: 21573 - DNA, 120 bp, synthetic construct
  source 1..120: mol_type = other DNA
tgtctcttctcacgggaactaggagcccttctggagcccttcagcaaggtcagggtttgaggcctgatggtcagggcccctcacgttcccctcctttcttacagctgtcttcccagccca

SEQ ID NO: 21574 - DNA, 120 bp, synthetic construct
  source 1..120: mol_type = other DNA
gttttcttcttccattggtggattcccagccccagatgggagttggcttgtatcctgcctagtcatgaggcaccatctctgtctatcaacacttactcttttgtaaagaacttgtgaaaa

SEQ ID NO: 21575 - DNA, 120 bp, synthetic construct
  source 1..120: mol_type = other DNA
catcctcttacctagggtttcctgattctgacctgggtctgcagtcacagttctggacactcctctgggatctcatgaccctgcttcctccctggcctttcacagtttattttctttcca

SEQ ID NO: 21576 - DNA, 120 bp, synthetic construct; identical to SEQ ID NO: 6476
  source 1..120: mol_type = other DNA

SEQ ID NO: 21577 - DNA, 120 bp, synthetic construct
  source 1..120: mol_type = other DNA
acacaactaggctctggagattctttgatttggaatttttcagggtgtggtgggctgttcagtgtcacaacttactatgactgatctgaatttgttcatgactattttttttctaagact

SEQ ID NO: 21578 - DNA, 120 bp, synthetic construct
  source 1..120: mol_type = other DNA
aagtggggagaccagcccaccctcatgtccaccatcacccctgatattgtttggatctgtgtctccacccaaatctcatgttcacttgtaatcactaaggttggaggtggcacctcaggg

SEQ ID NO: 21579 - DNA, 120 bp, synthetic construct
  source 1..120: mol_type = other DNA
tctctccctcctactccaggcttgtaagtcatgcctacttccccttaaccttccagcatgattgaaaatttcctgaggtcctctcataagttgagcagatgccagaatcatactttcata

SEQ ID NO: 21580 - DNA, 120 bp, synthetic construct; identical to SEQ ID NO: 6477
  source 1..120: mol_type = other DNA

SEQ ID NO: 21581 - DNA, 120 bp, synthetic construct
  source 1..120: mol_type = other DNA
tatgcattggcaaagaacttggaggcattctgccccctccttagggatctgtggaactttgaacatgagggtgatgattaagggtatctgatagaagaaatttctaagcagcatagcatt

SEQ ID NO: 21582 - DNA, 120 bp, synthetic construct
  source 1..120: mol_type = other DNA
gcaggagcaggacccctatcaggactactaaatggtggagccactggcaatgtgcaagctcagcttggaaaatccataggtattcaattttcacccatgagagcagctatatgggttatg

SEQ ID NO: 21583 - DNA, 120 bp, synthetic construct
  source 1..120: mol_type = other DNA
atcttccatgatgagtttcagctttgtgaggacactgcattcatttcttttggcccatttattccttttagaatggaaatgtataagaaatgtctcttccactcttgtattaatatttta

SEQ ID NO: 21584 - DNA, 120 bp, synthetic construct; identical to SEQ ID NO: 6478
  source 1..120: mol_type = other DNA

SEQ ID NO: 21585 - DNA, 120 bp, synthetic construct
  source 1..120: mol_type = other DNA
ttgttaaaaagagcctggcaacttcctaagctctctgttcctctcttaccgtgtgatctctgcacataccagctcccctttgccttctgccatgagtgggagcagcctgaggccctcacc

SEQ ID NO: 21586 - DNA, 120 bp, synthetic construct
  source 1..120: mol_type = other DNA
cacaggtatgtgtctctggcattcagcccccattctcaagatatccagggtccgctcagccatgagtcctctcatcaatattctaactcttatcactcaagagattctaaggtttttagg

SEQ ID NO: 21587 - DNA, 120 bp, synthetic construct
  source 1..120: mol_type = other DNA
agtctcattcagtcattcaaaattagaacagttcaccatcctctcgtatgaatatgtctcccagaatgaagtcactcaggtttgcagacaccactcaaccttaccaggctccaaaaacaa

SEQ ID NO: 21588 - DNA, 120 bp, synthetic construct; identical to SEQ ID NO: 6479
  source 1..120: mol_type = other DNA

SEQ ID NO: 21589 - DNA, 120 bp, synthetic construct
  source 1..120: mol_type = other DNA
actagtgggggccatctgaccaccaggctatatagctctatttactgttaatcctgactttgccagatgaaatgaaggcatagcaccatctttgagttgcttgagaattcttatataaag

SEQ ID NO: 21590 - DNA, 120 bp, synthetic construct
  source 1..120: mol_type = other DNA
gtagtcattattccagcatcctctccccttcagaagaattgtatgtatagtcataacagcatcatcctgatccatcaggtaaaagagaggaagctatctagaggagtcactcttgcagcc

SEQ ID NO: 21591 - DNA, 120 bp, synthetic construct
  source 1..120: mol_type = other DNA
ttttctatcaaagttttcttctgaggaggacatctccctgtgcattgttagccatttgaggctgtaaagtgtgttttcttgcgtaaagaaatgggactcagcagtccacattggtgcaat

SEQ ID NO: 21592 - DNA, 120 bp, synthetic construct; identical to SEQ ID NO: 6480
  source 1..120: mol_type = other DNA

SEQ ID NO: 21593 - DNA, 120 bp, synthetic construct
  source 1..120: mol_type = other DNA
gaagactctgaaaaacctgaagtcaataagttagaccacttagataaaatggacagattcatacaaagatagaaattgccaaaactgactcaaaaataactagaaaacctgaaataagga

SEQ ID NO: 21594 - DNA, 120 bp, synthetic construct
  source 1..120: mol_type = other DNA
ttctctatgtgaatgataaaaccccatcttcacaagaggagatgggttatgctgtttgttggattagtgaattaagccccgtgttcccccttaaagagaaataaaaagagcatagtaaag

SEQ ID NO: 21595 - DNA, 120 bp, synthetic construct
  source 1..120: mol_type = other DNA
tgggaggtcatgaaggagctaaacccaatgctcccttaaatccttatccaaacttgaggaaagaattagaacaatgtaaggaaggacaaacctgataaaaacaagcaatggggaaaggat

SEQ ID NO: 21596 - DNA, 120 bp, synthetic construct
  source 1..120: mol_type = other DNA
agacctaaaactgtaaaaaccctagaagaaaacctaggcaataccattcaggacataggcatgggcgaagacttcatgactaaaacacaaaaagcaatggcaacgaaagccagaattgac

SEQ ID NO: 21597 - DNA, 120 bp, synthetic construct; identical to SEQ ID NO: 6481
  source 1..120: mol_type = other DNA

SEQ ID NO: 21598 - DNA, 120 bp, synthetic construct
  source 1..120: mol_type = other DNA
gagaggatgtggagaaataggaacgcttttacactgttggtcggagtgtaaattagttcaaccatcgtggaagataatgtggcaattcctcaaggatctagaaccagaaataccatttga

SEQ ID NO: 21599 - DNA, 120 bp, synthetic construct
  source 1..120: mol_type = other DNA
accaatccaaatgcccatcaatgatagactgaataaagaaaatgtggcacatatacaccatggaatactatgcagccataaaaaggatgagttcatgtcctttgcagggacatggatgaa

SEQ ID NO: 21600 - DNA, 120 bp, synthetic construct
  source 1..120: mol_type = other DNA
tgagaacacatggacacagggaggggaacatcacacactggggcctgtctgagggtagggggctaggggagggatagcattaggagaaatacctaatgtagatgatgagttgatgggtgc

SEQ ID NO: 21601 - DNA, 120 bp, synthetic construct; identical to SEQ ID NO: 6482
  source 1..120: mol_type = other DNA

SEQ ID NO: 21602 - DNA, 120 bp, synthetic construct
  source 1..120: mol_type = other DNA
aaattcccaaatgcagatcctggatgggataataatgaccccagggatcgggtccaaatgcaagaccatagggagctaataattagagggattatgcagtccactcataggacacaaaac

SEQ ID NO: 21603 - DNA, 120 bp, synthetic construct
  source 1..120: mol_type = other DNA
ggccttttaaaggttaattttgtaactaaaagctgatgtaatattactaagaaactgcaaaagattaacggatggaataaaaaaccaattaaggaaatactgagggaagctcagaaagtt

SEQ ID NO: 21604 - DNA, 120 bp, synthetic construct
  source 1..120: mol_type = other DNA
gtgtgtggcagctggcttctaaaagctgttgataaaggttactgctgagtcatttccgcagagctgcctgtttttgcagacagacaaggggagccagggcacagcacggctcggctcatg

SEQ ID NO: 21605 - DNA, 120 bp, synthetic construct; identical to SEQ ID NO: 6483
  source 1..120: mol_type = other DNA

SEQ ID NO: 21606 - DNA, 120 bp, synthetic construct
  source 1..120: mol_type = other DNA
taatgggttgcctacagcaaaaactagatggctgtttatcaggaggtggtcaaaaggattcaagttatggaagagtaaatgaataagataacattaaggttttgttgttgttttagtgag

SEQ ID NO: 21607 - DNA, 120 bp, synthetic construct
  source 1..120: mol_type = other DNA
ataaaaaggagggctgcagggctgggtgggaactgtggcggctgctcagctcttcttacagtgctggcactgtgttttcagattgtctgctttgtcagaggacaaaattctgacttttta

SEQ ID NO: 21608 - DNA, 120 bp, synthetic construct
  source 1..120: mol_type = other DNA
ctgccaaaatgctttaaggtggaatgtgtaaaagttctgtttcccagagtcgggctgggccaggggaggatccttgcagcccaggaggaggaaaagccactaagtcccctcccagggctg

SEQ ID NO: 21609 - DNA, 120 bp, synthetic construct; identical to SEQ ID NO: 6484
  source 1..120: mol_type = other DNA

SEQ ID NO: 21610 - DNA, 120 bp, synthetic construct
  source 1..120: mol_type = other DNA
tcgggaggtgactaaactaacaccagccagtttcttatgaaaaggagaggagaataagaaggcgtcagagtataactgtttagatatcacagagtatcaaactaaagttagtaccaaacc

SEQ ID NO: 21611 - DNA, 120 bp, synthetic construct
  source 1..120: mol_type = other DNA
ggctgtgctgtcatgaacaaaaacaaacaatccttatgtgaaaaagttaaattactcaataactggtcagcccaaacctgtaaattttatgcttttaaccaaaccctaaagctcctagaa

SEQ ID NO: 21612 - DNA, 120 bp, synthetic construct
  source 1..120: mol_type = other DNA
gggcctagaaaatagcagggcaaaataattggtacatggggaacaagttttagaaagcctcctgtttccagcagagacagccatagttcatgtaaatggccatcagaaaagaaacactat

SEQ ID NO: 21613 - DNA, 120 bp, synthetic construct; identical to SEQ ID NO: 6485
  source 1..120: mol_type = other DNA

SEQ ID NO: 21614 - DNA, 120 bp, synthetic construct
  source 1..120: mol_type = other DNA
taacacagtgaaaccctgtctctactaaaaatacaaaaaagtagccggggcgtggttgtgggtgcctgtagttccagctactcgggaggctgaggcaggagaatggcatgaacccaagag

SEQ ID NO: 21615 - DNA, 120 bp, synthetic construct
  source 1..120: mol_type = other DNA
gggtccccaggacatgtgtgatgaaatactaaagaattatgggtgtatagaaatgtatgccctggctaaacaagtgtgtgggaattgtgtgaactcccaggaaacaacttaaggttaaaa

SEQ ID NO: 21616 - DNA, 120 bp, synthetic construct
  source 1..120: mol_type = other DNA
caagtgaggcagctgtacaaacagctgatcaggggtggacacattacactcgggtcaagaaactggttaaaaaaaaaaacggaaggtaaattggaagtgtatagatcacctaagaaaccc

SEQ ID NO: 21617 - DNA, 120 bp, synthetic construct
  source 1..120: mol_type = other DNA
ggaaggtaaattggaagtgtatagatcacctaagaaaccctttaagctaattctaaggaaaacctaaaagtaagccataagcaggctccatcactgggggctgatatggttagaattaat

SEQ ID NO: 21618 - DNA, 120 bp, synthetic construct; identical to SEQ ID NO: 511
  source 1..120: mol_type = other DNA

SEQ ID NO: 21619 - DNA, 120 bp, synthetic construct
  source 1..120: mol_type = other DNA
tttaaaaattaaaacaggatatagagacataaatgcctgtgttaaatgggtgaaattttcagcacaagccctcgataaaagtaactgttatgcatgtgctgctggtcaacctcaggcaca

SEQ ID NO: 21620 - DNA, 120 bp, synthetic construct
  source 1..120: mol_type = other DNA
tcccactttgcagagatcagatcctaaagcaatcccctcattctctatagggaatataaatcactcctgttgtcactctagacagaaggtgaggttcgataaacctgtgggaaaactcgc

SEQ ID NO: 21621 - DNA, 120 bp, synthetic construct
  source 1..120: mol_type = other DNA
accgtccaattggaccgggacttgtgctttagtacaattggccattccgttcaccctgtcattccatgaaacagctaaaaatacacatggtcatagagatcagagtaatttagcaattta

SEQ ID NO: 21622 - DNA, 120 bp, synthetic construct; identical to SEQ ID NO: 6487
  source 1..120: mol_type = other DNA

SEQ ID NO: 21623 - DNA, 120 bp, synthetic construct
  source 1..120: mol_type = other DNA
ttcatcaattacacgcaaaatgcccttaagggagtagccagacaactaaatgccactagctaaatggcttgggaaaacagaattacactggacataatattagcagagaaaggtgatata

SEQ ID NO: 21624 - DNA, 120 bp, synthetic construct
  source 1..120: mol_type = other DNA
gggactaacaactctagtcaacgagctggcagaaaacacaggagtaaatgacctttttactaactggttagaaggttggtttgaaaaatggaaaggaatggtaccttcaattcttacatc

SEQ ID NO: 21625 - DNA, 120 bp, synthetic construct
  source 1..120: mol_type = other DNA
ttaattaaagcagctattagtaaacaaatgcccctaatgtcccaacagaatgacttactattattaaaagccaaactaaacttctcctcctataatgaagaaagtaaaaaacttccagaa

SEQ ID NO: 21626 - DNA, 120 bp, synthetic construct
  source 1..120: mol_type = other DNA
acttacatgtgaagaaggttcattttcataagtgccttagaatatgtttaagcaggccacatggaaacaaagagataaagaagcaaaatatactaagccacaatcccctccttcctgctt

SEQ ID NO: 21627 - DNA, 120 bp, synthetic construct; identical to SEQ ID NO: 6488
  source 1..120: mol_type = other DNA

SEQ ID NO: 21628 - DNA, 120 bp, synthetic construct
  source 1..120: mol_type = other DNA
caaaaagaccctaaagaacatacctgaagtcttaatacaactaccaataggtgatgcccaggaagactataaccccgtagtactcagctaatgaggaattggggaagggacttgcacact

SEQ ID NO: 21629 - DNA, 120 bp, synthetic construct
  source 1..120: mol_type = other DNA
tgggtttgaatgggtgagtttctttctcacagggatgtagatggcaacgtggctctcattcccctcccaaataccccaactttcatcgcctgttccagaagccttgtcacctacaagcct

SEQ ID NO: 21630 - DNA, 120 bp, synthetic construct
  source 1..120: mol_type = other DNA
aggacacagagaataataatactactaataatactaatgatgatgaaagcagcaacagcagcaacatatggaatggctggtcatcaactctgaagcaccagggccatccctgaaaaaaag

SEQ ID NO: 21631 - DNA, 120 bp, synthetic construct
  source 1..120: mol_type = other DNA
agtgctgtgattcctgctgtatcccatggagcagatgaccctctgctcctctccttggggaatcctgcaggccacctctgtgtggtaggtcccatcccattggacagaacaccccaagac

SEQ ID NO: 21632 - DNA, 120 bp, synthetic construct; identical to SEQ ID NO: 6489
  source 1..120: mol_type = other DNA

SEQ ID NO: 21633 - DNA, 120 bp, synthetic construct
  source 1..120: mol_type = other DNA
gggatccctgcattgatgctgaggaggggaatgtcagggctgggctcctggtacatggggccagagggaactcttagggatgggcaggctgggaagcagatggggcagccttggccctgg

SEQ ID NO: 21634 - DNA, 120 bp, synthetic construct
  source 1..120: mol_type = other DNA
ctaacaggagagaaaaatcaggatataacacaccaacagaaaacacatgcatccatagcacaaggagggtttccctggacagagttgggggtcggggtgactctagtggaataggggaga

SEQ ID NO: 21635 - DNA, 120 bp, synthetic construct
  source 1..120: mol_type = other DNA
agcatcttccttctagaaatttgtgatgttcatagcaaaggtctgagttctggaggactgggatactgtccattcctgagtctccaggttgagagagaggaagagctacccataagagta

SEQ ID NO: 21636 - DNA, 120 bp, synthetic construct; identical to SEQ ID NO: 6490
  source 1..120: mol_type = other DNA

SEQ ID NO: 21637 - DNA, 120 bp, synthetic construct
  source 1..120: mol_type = other DNA
ccattctctgtcaagtcctcagtctctgtgtcccaggtctcagctcccagaactgcttctgcccactgtccccgggacccagccctgcctttctgcctgttgaagagcaggaagggctga

SEQ ID NO: 21638 - DNA, 120 bp, synthetic construct
  source 1..120: mol_type = other DNA
tcctggaagtaacttcacattgatgtttaacacacaggtctgctgtctcaacctttctgaggaggcaggaaatgtacatatgcaaagggacaagaatgaggatttcagatacaaggaaaa

SEQ ID NO: 21639 - DNA, 120 bp, synthetic construct
  source 1..120: mol_type = other DNA
ccaaggcagggtggctacaggccacctaagggtatagggaggaggccaaggagagaggctgccctgcagtggtgagggaggagcacgaaggcagtggtggaaggaaggtcttgccagagg

SEQ ID NO: 21640 - DNA, 120 bp, synthetic construct; identical to SEQ ID NO: 6491
  source 1..120: mol_type = other DNA

SEQ ID NO: 21641 - DNA, 120 bp, synthetic construct
  source 1..120: mol_type = other DNA
acataggttttgacaacacttttatggatataacaccaaagcacagacaacaaagaaaaaattgataagttggacccatcaaaataaaaaaaattgagcattaaaaaacacaatctgcag

SEQ ID NO: 21642 - DNA, 120 bp, synthetic construct
  source 1..120: mol_type = other DNA
tgtaggcaaagaatttgaatagccaattctccgaagaagacatacaaatggccaatagacacatgaaaagatgctcaacatctgtagttattagggaaatgcaaatcaaaactgcaatgg

SEQ ID NO: 21643 - DNA, 120 bp, synthetic construct
  source 1..120: mol_type = other DNA
ctggaacatttgtgtagtacattgggaaagacaaagtggggcacctgctatggaaatcagtgtgttgcttcctccaaaaactaaaaaattaattactatgtaatccagaaattctacatc

SEQ ID NO: 21644 - DNA, 120 bp, synthetic construct
  source 1..120: mol_type = other DNA
aataaccaaattcatagagacagaaagtagaaccagtggttccaggggccagggggaaggaggaatggggagctactgtttagtaggcacagagtttcaggatgcacaaaaatgtgaatg

SEQ ID NO: 21645 - DNA, 120 bp, synthetic construct; identical to SEQ ID NO: 6492
  source 1..120: mol_type = other DNA

SEQ ID NO: 21646 - DNA, 120 bp, synthetic construct
  source 1..120: mol_type = other DNA
gattttggatatgaagtctaggaactgacagcccaccggggtcaaggaaccgaaagaggatgagggtcaaggagccgttggactagagcctgttttgggtctgggtgggggtgaggagat

SEQ ID NO: 21647 - DNA, 120 bp, synthetic construct
  source 1..120: mol_type = other DNA
gtgagaacttgctgagggccgaaggcagctggtcaagaggtgggaacagcataaggtcccaaggcagagaggggcagagggaccagggagggatggtccagcacctgagggtttcagggt

SEQ ID NO: 21648 - DNA, 120 bp, synthetic construct
  source 1..120: mol_type = other DNA
ctaaggcccaactttcattagcaccagggctccccttaagtggcctggaggggagtgggatggagggaagactcccccgacaaaaggcagcaccagaaagttagggtcagggacagctgg

SEQ ID NO: 21649 - DNA, 120 bp, synthetic construct; identical to SEQ ID NO: 6493
  source 1..120: mol_type = other DNA

SEQ ID NO: 21650 - DNA, 120 bp, synthetic construct
  source 1..120: mol_type = other DNA
caggaagaatcctctgcctggagccggcaggctccaacccctcagcttgagagtcaggagccccatagtccccacagcaataggaagcaccagctcctggtcccgaaaaaaggagggccc

SEQ ID NO: 21651 - DNA, 120 bp, synthetic construct
  source 1..120: mol_type = other DNA
gagctggaagggccctcgaatgccattcacaggaacagcccaggaacccagggacttcagaagggctggtttgtccgaaaagtgagaggaggcggaggagaggtgaggagagcaagtgca

SEQ ID NO: 21652 - DNA, 120 bp, synthetic construct
  source 1..120: mol_type = other DNA
aggagtggcggcaaccggcagcgtccagctcccgcacctcgctgcacatcgcacctgagccccgccgcgaccgcatcgcgctcgctgcgacccattcagaccccccagaaacgccaagcc

SEQ ID NO: 21653 - DNA, 120 bp, synthetic construct
  source 1..120: mol_type = other DNA
cgtccagctgtcatttaccatctggtaccaacccccattagacaatgaaccatccatgatcacgaactgtgtcccttccatcttcgtcagctttaggagcattttttttcccaatggaac

SEQ ID NO: 21654 - DNA, 120 bp, synthetic construct; identical to SEQ ID NO: 6494
  source 1..120: mol_type = other DNA

SEQ ID NO: 21655 - DNA, 120 bp, synthetic construct
  source 1..120: mol_type = other DNA
cagttccagcaaaggatctcattcagctcacccccaagaagacttttaatacttcaatgacgatgatactaataataatatgcaaagtttgttccaacgcatttagaggtgatcgcgaca

SEQ ID NO: 21656 - DNA, 120 bp, synthetic construct
  source 1..120: mol_type = other DNA
cttttctgtccaaagccctccccctctaccctacctccagctccttctgctctgagccatcaactacgttttctccctcagcactcgccttagattcctggacttaccagcacaaaggtg

SEQ ID NO: 21657 - DNA, 120 bp, synthetic construct
  source 1..120: mol_type = other DNA
ggactgcggcccggagttcactgcgaggactgggatcacccatcaccccgccctggtctacggaaaatgacaagtgtttactgatatagaaacggaataacggcgctgtgggctggggag

SEQ ID NO: 21658 - DNA, 120 bp, synthetic construct; identical to SEQ ID NO: 6495
  source 1..120: mol_type = other DNA

SEQ ID NO: 21659 - DNA, 120 bp, synthetic construct
  source 1..120: mol_type = other DNA
ggaccaggaaaaagcctctcagggtcgcgcgccttcagtgaggatcctaatttacaccccgagtgtggccccgtcaaagactagagcgaaggtcactgaaatgacacaagatcagcgagg

SEQ ID NO: 21660 - DNA, 120 bp, synthetic construct
  source 1..120: mol_type = other DNA
atgcagagaatggagaaaggagggaaggatggggggacatttcgaggaaaggaagggagagggagaaaaggggagagaaaaggtgaaggtgagaataatatctgaaagatgtagttttat

SEQ ID NO: 21661 - DNA, 120 bp, synthetic construct
  source 1..120: mol_type = other DNA
cctgcgaggtcaagctgcagagaacatgagcttctacctccagatgtgccagggtgcatctcgtgggtgcaagaacaagggttttgttttgttttacaaaatcaaagtacaaatctcaaa

SEQ ID NO: 21662 - DNA, 120 bp, synthetic construct; identical to SEQ ID NO: 6496
  source 1..120: mol_type = other DNA

SEQ ID NO: 21663 - DNA, 120 bp, synthetic construct
  source 1..120: mol_type = other DNA
tatatattttaagtaggggaaaacatggaggattattccccaaaattttgacagggaccccagggactgggataacgttgtgactttcaccttctctgaaatgttggaattttatattac

SEQ ID NO: 21664 - DNA, 120 bp, synthetic construct
  source 1..120: mol_type = other DNA
cactccagcctgggtgacagcaagagatcttgtctcagaaataaataaataaaatttaaaaataaaaataataaacttggatttgtgtggtggttaagaaaaaatatttgtttgaaaata

SEQ ID NO: 21665 - DNA, 120 bp, synthetic construct
  source 1..120: mol_type = other DNA
ttctcaaagtatctttgatagagccgtttttagtgcagtagagagatgtgtaacaattttacaaaaggggcgggctgtaataaaaagggaaaggcaaaatccagtgtggacacactgtcc

SEQ ID NO: 21666 - DNA, 120 bp, synthetic construct; identical to SEQ ID NO: 6497
  source 1..120: mol_type = other DNA

SEQ ID NO: 21667 - DNA, 120 bp, synthetic construct
  source 1..120: mol_type = other DNA
ctactttaaagttcatatggaaccaaaaaagagcctgcatcaccaagtcaatcctaagccaaaagaacaaagctggaggcatcacgttacctgacttcaaactatactacaaggctacaa

SEQ ID NO: 21668 - DNA, 120 bp, synthetic construct
  source 1..120: mol_type = other DNA
acaagcaatggggaaaggattccctatttaataaatggtgctgggaaaactggctatccctatgtagaaagctgaaactggatcccttccttacatgttatacaaaaattaattcaagat

SEQ ID NO: 21669 - DNA, 120 bp, synthetic construct; identical to SEQ ID NO: 6498
  source 1..120: mol_type = other DNA

SEQ ID NO: 21670 - DNA, 120 bp, synthetic construct
  source 1..120: mol_type = other DNA
aagacatttatgcagccaaaagacacatgaaaaaatgctcatcatcactggccatcagagaaatgcaaatcaaaaccacaatgagataccatctcacaccagttagaatggcaatcatta

SEQ ID NO: 21671 - DNA, 120 bp, synthetic construct
  source 1..120: mol_type = other DNA
atctaggactagaaataccatttgacccagccatcccattactgggtatatacccaaaggactataaatcatgctgctataaagacacatgcacacgtatgtttattgcggcactattca

SEQ ID NO: 21672 - DNA, 120 bp, synthetic construct
  source 1..120: mol_type = other DNA
ttgtaggaacatggatgaaattggaaatcatcattctcagtaaactatcgcaaggacaaaaaaccaaacaccacatgttctcactcatagatgggaactgaacaatgagaacacatggac

SEQ ID NO: 21673 - DNA, 120 bp, synthetic construct; identical to SEQ ID NO: 6499
  source 1..120: mol_type = other DNA

SEQ ID NO: 21674 - DNA, 120 bp, synthetic construct
  source 1..120: mol_type = other DNA
caccagtgagtcagaggccaaaggaggatttctggccccagcgcgcaggatgtgctttgttatagtggggttgggatagcggagcggaggcaaggacactctgggaataaatggcgagaa

SEQ ID NO: 21675 - DNA, 120 bp, synthetic construct
  source 1..120: mol_type = other DNA
caaaggggcgttgcgcgccccacgcaaggcttctggcactcttctcctagctactactgatgagttcaaactagcaggagactaagacgtgtcctttgcaatgtagactccatatcttgc

SEQ ID NO: 21676 - DNA, 120 bp, synthetic construct
  source 1..120: mol_type = other DNA
cttgccccgccccctccgctttgtctccacttctccatccctgtccatctctggaccccgctcctgagtatctccccccttcttcagaggacttcccctcatggagtacagactcctcca

SEQ ID NO: 21677 - DNA, 120 bp, synthetic construct; identical to SEQ ID NO: 6500
  source 1..120: mol_type = other DNA

SEQ ID NO: 21678 - DNA, 120 bp, synthetic construct
  source 1..120: mol_type = other DNA
tgcttttatttcaggagctgagacaattgtattaatcagatgtgcagagagccaagggccccacgctggaaagcatcagagaggagggtgagattggaggagcccctgactccaagtctc

SEQ ID NO: 21679 - DNA, 120 bp, synthetic construct
  source 1..120: mol_type = other DNA
agcaaaacttccatgtcacagttttaagcctgcacaatgactcaaatagaaccaataccaaaaaaacaaattcctagctcaggtgaggtcagtgaagttggctgtcaggtgtaaaggaaa

SEQ ID NO: 21680 - DNA, 120 bp, synthetic construct
  source 1..120: mol_type = other DNA
tctccattcaatagtgcagggtgaggacattttgggggagaaatatagactgtccttagacccctggggtttgtacatttactttctgactttttagctgttgacttcatttttgaacaa

SEQ ID NO: 21681 - DNA, 120 bp, synthetic construct; identical to SEQ ID NO: 6501
  source 1..120: mol_type = other DNA

SEQ ID NO: 21682 - DNA, 120 bp, synthetic construct
  source 1..120: mol_type = other DNA
gttcaagcgattctcctgcctcagcctccccagtagctgggattacaggggcccgccaccacgcttggctaatttctgtatttttagtagagatggggtttcaccgtgttggccaggatg

SEQ ID NO: 21683 - DNA, 120 bp, synthetic construct
  source 1..120: mol_type = other DNA
tggtttgttgtagtaagccatctggaatcaactgtggaaataaatgaatggttctctattaaataactgctgagaccatctgaaaaatgtattaaccccaaaaccaatcacttcacactc

SEQ ID NO: 21684 - DNA, 120 bp, synthetic construct
  source 1..120: mol_type = other DNA
gctttcgaatgggaattagagcccatcctcaccaccacatcccagagacactccagcctcttcccttcctctctccatttcctattagcccctcaacacggggcccctctggccattctg

SEQ ID NO: 21685 - DNA, 120 bp, synthetic construct; identical to SEQ ID NO: 6502
  source 1..120: mol_type = other DNA

SEQ ID NO: 21686 - DNA, 120 bp, synthetic construct
  source 1..120: mol_type = other DNA
aaaacatattatttgaggccaggaccttgtccagccaccacttgtatccctagcatctagaacataccagtacagaggaggggcttaacaaataagaggtgaatgatgggtgaatataat

SEQ ID NO: 21687 - DNA, 120 bp, synthetic construct
  source 1..120: mol_type = other DNA
cagcctgaccaacatggtaaaaccccgtcttttctaaaaataaaaaaattagccaggtgtggtggtgcacgccagtaatcctagctactcgggaggctgagacacaagaatgacttgacc

SEQ ID NO: 21688 - DNA, 120 bp, synthetic construct
  source 1..120: mol_type = other DNA
tatatttgagaaatctataattctacaatgaaatgcaaaatatagaagaatctttaggtataaggatattaatcagatattatttacaataaggaagaagaacttgtaaaagaagagtag

SEQ ID NO: 21689 - DNA, 120 bp, synthetic construct
  source 1..120: mol_type = other DNA
attgataataataaaatttgaaaagcaagattcaaaataactcatacagtgtgactgcactaagtcatcctgcacagacaccacatgcacagaaaccaggggtggaaactcagggggcag

SEQ ID NO: 21690 - DNA, 120 bp, synthetic construct; identical to SEQ ID NO: 6503
  source 1..120: mol_type = other DNA

SEQ ID NO: 21691 - DNA, 120 bp, synthetic construct
  source 1..120: mol_type = other DNA
ctctcacccaggttgtagtgcagtgagttgatcatagttcactgccgccttgagctcctgggttcaagtgatcctgctgcctcagtctccagagtagccaagactacaggaaagccccaa

SEQ ID NO: 21692 - DNA, 120 bp, synthetic construct
  source 1..120: mol_type = other DNA
aacatgggtgagccactgtgctcagtcctaacttagcttgaagcaaagtctcctctccatgtcatagggcaaaaactccagctgatggagccttcagaaagaagaaataaactcttcctc

SEQ ID NO: 21693 - DNA, 120 bp, synthetic construct
  source 1..120: mol_type = other DNA
actgattgtcatttaattttaattccaccacacctgagagagtgggatggattctttcttttattatgatttgagcatctgagtcccttccatcctgaacatctgacatgggtgcttcaa

SEQ ID NO: 21694 - DNA, 120 bp, synthetic construct; identical to SEQ ID NO: 6504
  source 1..120: mol_type = other DNA

SEQ ID NO: 21695 - DNA, 120 bp, synthetic construct
  source 1..120: mol_type = other DNA
tagaaatgtaaacaccccctaatcttaaagccacccaatatcactcatagtgacaccgcagtaggataagctcttaactcccaccaaattagcctcagagttgtagtttttgtttgttag

SEQ ID NO: 21696 - DNA, 120 bp, synthetic construct
  source 1..120: mol_type = other DNA
agaggtgaacgccacaagccccagctaatgttttgtgttttttgtagagatggggttgtgccatgttgcccaggctggtctctaaggcctgggctcaagtgatctgctgccccggcctcc

SEQ ID NO: 21697 - DNA, 120 bp, synthetic construct
  source 1..120: mol_type = other DNA
aagtgcgattaggtggaccttggtggggaagcatagatgtttctggtgagaagagaacaagatagatgggaagcttctaaaagtgaacatcagtgggccctgtgctcacacagcactggg

SEQ ID NO: 21698 - DNA, 120 bp, synthetic construct; identical to SEQ ID NO: 6505
  source 1..120: mol_type = other DNA

SEQ ID NO: 21699 - DNA, 120 bp, synthetic construct
  source 1..120: mol_type = other DNA
tgcaacttgctttgcggatgcacatgtagaccatctgctctgaccaaggagtcacagaagcttcataagacacaacatttgagctgcgttttgaggtataaataggagtctgacaggcat

SEQ ID NO: 21700 - DNA, 120 bp, synthetic construct
  source 1..120: mol_type = other DNA
tatatgactatccagaagtcacagctgctcaatattgagtcttgagacagagagagagaggcctgatttgaaatgcagaattctgctgggggcccgttaaaatgcagtttctgattcagt

SEQ ID NO: 21701 - DNA, 120 bp, synthetic construct
  source 1..120: mol_type = other DNA
ttgagaatcaccaccctaaggcaatccatattgatttctaatatcagaagagggctgacaggcaaaggtataggataaactagaccatgcatgggccatcttggagagcaccccacccaa

SEQ ID NO: 21702 - DNA, 120 bp, synthetic construct
  source 1..120: mol_type = other DNA
cttcacaagtggcccccacacccccaatccttcccaccccttatgaaactgacctacgagtcttgctctgctgtcctgggctgtttgggcctgggatgtgagctctgactataccttctg

SEQ ID NO: 21703 - DNA, 120 bp, synthetic construct; identical to SEQ ID NO: 6506
  source 1..120: mol_type = other DNA

SEQ ID NO: 21704 - DNA, 120 bp, synthetic construct
  source 1..120: mol_type = other DNA
atttgtgaagtaaccatgctctcattttgacttttaatgaatgaaagacagacacacacataaagaaagatagtgcaatgaaaaagaaaacaacatactgaattaaagtgacaggaaaca

SEQ ID NO: 21705 - DNA, 120 bp, synthetic construct
  source 1..120: mol_type = other DNA
ttgttttgtctgccttggaattatcttttattttatgttttgacttggctcaaaactcaaaaagttaaaagtctctctcttatgctaccccatcttgacaggcagctatttatatcagtt

SEQ ID NO: 21706 - DNA, 120 bp, synthetic construct
  source 1..120: mol_type = other DNA
acacaaattttagcaaactacatatgctttcctgcaccttgccttttcccttcacattgtatcacaaagaccatcacatgaagaaataccaagagcttagctacatctttgtttgaaatt

SEQ ID NO: 21707 - DNA, 120 bp, synthetic construct; identical to SEQ ID NO: 6507
  source 1..120: mol_type = other DNA

SEQ ID NO: 21708 - DNA, 120 bp, synthetic construct
  source 1..120: mol_type = other DNA
gaacatagattcatgtcatagaacatgttaactgaaaaagcaagcaaatgaatgataaaattagccagaaacaatttataagaagtctaaaagcaaagccaggcaaggtggtgtacactt

SEQ ID NO: 21709 - DNA, 120 bp, synthetic construct
  source 1..120: mol_type = other DNA
aaaaccctctctccaagaaatacaaaaattagcccggcatggtggagcatagctatacccccagctacttgggtggctgaggtaggtgtatcgcttgagcctgggaggttgaggtacagt

SEQ ID NO: 21710 - DNA, 120 bp, synthetic construct
  source 1..120: mol_type = other DNA
ggcatacactaaattcaagtcacacatcctcttgcaattcttgatttgctcagtacagtactgactgaaacatgtgcatatcagagctgtgaaaaatcaaggctatctacatatatttct

SEQ ID NO: 21711 - DNA, 120 bp, synthetic construct; identical to SEQ ID NO: 6508
  source 1..120: mol_type = other DNA

SEQ ID NO: 21712 - DNA, 120 bp, synthetic construct
  source 1..120: mol_type = other DNA
ttgagtaggccagactgggaagcgtggatggattctaaacattccactttaggtctagcacttagagaaagagaaatcatgtttatttagctccttccacaatctttagagaaatcttct

SEQ ID NO: 21713 - DNA, 120 bp, synthetic construct
  source 1..120: mol_type = other DNA
aagcacttattagaatggctgaaatttaagtgattaataaatataaatgttgtcaaggatgtgaaacagtctcatccactgcctataagaatataaaacagccactctgaaaatcacttt

SEQ ID NO: 21714 - DNA, 120 bp, synthetic construct
  source 1..120: mol_type = other DNA
agattatgtccaagaatccctgtacaataatgtccatagttcatttgtaacaataaaaaaccgtgaatacccccaaaatgtacaaaaaaattgtgactcagtgatacaatgcaatactac

SEQ ID NO: 21715 - DNA, 120 bp, synthetic construct; identical to SEQ ID NO: 6509
  source 1..120: mol_type = other DNA

SEQ ID NO: 21716 - DNA, 120 bp, synthetic construct
  source 1..120: mol_type = other DNA
taaaaaatagtaattgaaaatattagcaacaaaatccaacaacagatcaaaacaatacaccataatcacgtgagttttatacccaggatgcaaggattgtttgacatatgtgaatcaaaa

SEQ ID NO: 21717 - DNA, 120 bp, synthetic construct
  source 1..120: mol_type = other DNA
cctctgacaaaggaaccaagaatatacactggggaaagaacagtctcttaaataaatggtgctgggaaaatgctaccagatgcagaagaatgtaactagacccctgtctctcaccatata

SEQ ID NO: 21718 - DNA, 120 bp, synthetic construct
  source 1..120: mol_type = other DNA
aagcacaggcaaaaaaagtaaaaatagacaaatgagactatattaagctaaaaagcttctgcacagcaaaggaaacatccaacagaatgaagcaataacctgttgaatcgtgaaaatatt

SEQ ID NO: 21719 - DNA, 120 bp, synthetic construct; identical to SEQ ID NO: 6510
  source 1..120: mol_type = other DNA

SEQ ID NO: 21720 - DNA, 120 bp, synthetic construct
  source 1..120: mol_type = other DNA
ccattatgggaaacagtagagtgatctctcaaaaaaactgaaactattaatagaactactatctgatgcaacaattctacttctgagtatttatccaaaggaaatgaagtcaatatatca

SEQ ID NO: 21721 - DNA, 120 bp, synthetic construct
  source 1..120: mol_type = other DNA
atgcaattcagccataaaaaaagagtgaaatcctgtcagttgcagcaacatggatggaaccagaggtcatgttaggtgaaatgagccaggcaaggaaacacaaatatcacatgttgtcac

SEQ ID NO: 21722 - DNA, 120 bp, synthetic construct
  source 1..120: mol_type = other DNA
gtacagttatataaaaaaaaaagttctaatgttctatagcacagcaggccaactaaagctaacaattatgtatatttaaaacagctagaagagtggattttaaatgttcccaacacaagg

SEQ ID NO: 21723 - DNA, 120 bp, synthetic construct; identical to SEQ ID NO: 6511
  source 1..120: mol_type = other DNA

SEQ ID NO: 21724 - DNA, 120 bp, synthetic construct
  source 1..120: mol_type = other DNA
cacctcttcttggggtctggggttacccagatgtagggagggttcaccttctgggaaaaactaaacgttggttcttgttcttttttgttcttattgcaagaccaaaaattgagaaaacca

SEQ ID NO: 21725 - DNA, 120 bp, synthetic construct
  source 1..120: mol_type = other DNA
ttttagaatatccactaccaaggatgatccacgctgttatgagacgaattgtgtccctccccaaccgaaattcatatgttggagtcctatgttgagaagacagaagtggccatctacaag

SEQ ID NO: 21726 - DNA, 120 bp, synthetic construct
  source 1..120: mol_type = other DNA
tatggtagccctagcaaattaaaacagaaatattaccttttctactctgtcctatgtatgaacatgagactttttaagaatatgaattacctgggattccaaaacatagagtgagtcaat

SEQ ID NO: 21727 - DNA, 120 bp, synthetic construct
  source 1..120: mol_type = other DNA
tcacaaactgtgtttaatttatttgagacattgagtgagctagttttgccctaattttatagaaagatgatgaacaatcataattactaaaccaaagaggctttttggcaggggatggca

SEQ ID NO: 21728 - DNA, 120 bp, synthetic construct; identical to SEQ ID NO: 6512
  source 1..120: mol_type = other DNA

SEQ ID NO: 21729 - DNA, 120 bp, synthetic construct
  source 1..120: mol_type = other DNA
aacctgagaaggagaatgcacctcaggtgactaacagtttttgctcttctgtacttgtctgagaatgaccccaaaagatttttaaaggccaattctttggctaccaaccctattttgccc

SEQ ID NO: 21730 - DNA, 120 bp, synthetic construct
  source 1..120: mol_type = other DNA
ttttctgtatcttttcacacttcacttcttcattcctccctctggctgtcttccctctttggggtcttctagtcctaacctctgtctccttccaggtgactagagcaggctggtttggaa

SEQ ID NO: 21731 - DNA, 120 bp, synthetic construct
  source 1..120: mol_type = other DNA
catgaaacccttagttcctccctattccttactgtgtcttcaatcccatcatgtaggtcatgggcacttaacgcataatgaacaattgactgcttcatgccccctggccgttgatgctgt

SEQ ID NO: 21732 - DNA, 120 bp, synthetic construct; identical to SEQ ID NO: 6513
  source 1..120: mol_type = other DNA

SEQ ID NO: 21733 - DNA, 120 bp, synthetic construct
  source 1..120: mol_type = other DNA
tcagaatttttaatgtaactaaacatgaaacacaagtgcatctgcattatgtgtgggtgctctctccctttattgtatttggggtaagattattttagggcatggtccagggtaaattcc

SEQ ID NO: 21734 - DNA, 120 bp, synthetic construct
  source 1..120: mol_type = other DNA
gagaggctgggatgtttctgatcctggggctcctggtggatggtgcgcagtatttccagggatggagggtgctgtgggcactggtgggaagcttgagtgtctccacccaggctttcttgg

SEQ ID NO: 21735 - DNA, 120 bp, synthetic construct
  source 1..120: mol_type = other DNA
ctcagctgtgttgggggctcatggccctggtgagggggagtggtggagggagcatcagccagggcagggggctgaggcccttggaacctgtattgcagggtctggctgtaaatgaggaat

SEQ ID NO: 21736 - DNA, 120 bp, synthetic construct; identical to SEQ ID NO: 6514
  source 1..120: mol_type = other DNA

SEQ ID NO: 21737 - DNA, 120 bp, synthetic construct
  source 1..120: mol_type = other DNA
gtggtgcagggtgggatttagaggatttcccctgactcctgtgctgatccccttcacgtcctccacccccacccttggtgtccgtcaacatgctggggtgacctcatcttcccactgtcc

SEQ ID NO: 21738 - DNA, 120 bp, synthetic construct
  source 1..120: mol_type = other DNA
ctggaagagaaaggaccatggtagctgaggcagggagcagtctgagttgcctagaagacaccaagagttcgctccctccaggccttggctttgcttcagcacctggtgctgcataggccc

SEQ ID NO: 21739 - DNA, 120 bp, synthetic construct
  source 1..120: mol_type = other DNA
gagtactggtgcccagccttccacaggtcttgtgtctgtttttcttggcactgggtttcttctcacttattcttctgaattggcaaggcaggaattacatcactagtttgcagatgagga

SEQ ID NO: 21740 - DNA, 120 bp, synthetic construct; identical to SEQ ID NO: 6515
  source 1..120: mol_type = other DNA

SEQ ID NO: 21741 - DNA, 120 bp, synthetic construct
  source 1..120: mol_type = other DNA
caacctggtctccctgaggacacgaccccctccaaagtcctcccacatgggggagttttcccagggacttgtacccctgggttcagaggtgaggtggggtccttgctcctcactgtggtt

SEQ ID NO: 21742 - DNA, 120 bp, synthetic construct
  source 1..120: mol_type = other DNA
tgtagctcctggttcactgtcaccctctccagcagtgcgtctccttgactcttggtgacttcaacatacgcagatgtggtgggctgagtaatggtccccaaagatgtccaggcttaatcg

SEQ ID NO: 21743 - DNA, 120 bp, synthetic construct
  source 1..120: mol_type = other DNA
atgagccattaaaagcagagaaactgccctggctggagtcagattctgcagaagaggaaacagaggagaagctggagagaggaggtcagatgttccaagcaggaggactggatgtgcctt

SEQ ID NO: 21744 - DNA, 120 bp, synthetic construct; identical to SEQ ID NO: 6516
  source 1..120: mol_type = other DNA

SEQ ID NO: 21745 - DNA, 120 bp, synthetic construct
  source 1..120: mol_type = other DNA
tggactctcagatcctgtaactcctctcctccatgaccttctcctctctctgcctgaatctcatgcccttgtcatcccctaggcctcatcacggccaagaaccccagcccttccatactc

SEQ ID NO: 21746 - DNA, 120 bp, synthetic construct
  source 1..120: mol_type = other DNA
actatcattttatcatatgctgtgatgtaatatcaatgaaccactcatttcctatgtgcctgcattccaggcttggagtccaccctgtggtacatcaattccaacaatccttccagccca

SEQ ID NO: 21747 - DNA, 120 bp, synthetic construct
  source 1..120: mol_type = other DNA
ttgaattctacagtaaataatttcaatccctcccttgcctctcccttgcattgtcatactcacctggcaaaactacacagctggtgggttccacctctgtctatgctgcacctgccccat

SEQ ID NO: 21748 - DNA, 120 bp, synthetic construct
  source 1..120: mol_type = other DNA
accctcagcctcctcttggcctgggtgactcctagacaccttctctctgtgctcacacatccaacccttcttccccattcttacctcagctgacaaccttgcctcctacctcactgagaa

SEQ ID NO: 21749 - DNA, 120 bp, synthetic construct; identical to SEQ ID NO: 6517
  source 1..120: mol_type = other DNA

SEQ ID NO: 21750 - DNA, 120 bp, synthetic construct
  source 1..120: mol_type = other DNA
cagctcttgaagcttgaaatctattgccacatttgctctgatcccacacctgccccctgatcttttccagccaatgattgaggaaagcagggcagaaactaaggcaggaatatttctcct

SEQ ID NO: 21751 - DNA, 120 bp, synthetic construct
  source 1..120: mol_type = other DNA
agttgcagtgtggtctgatggctctcccagtgttttctgtctctctcctgaatttctctcacaagtatttccctgaataaatccttgcacatttactaccgtattgggctctgctcctca

SEQ ID NO: 21752 - DNA, 120 bp, synthetic construct
  source 1..120: mol_type = other DNA
gggacacagaaagtccatggcataaggtgcagctgaggtgctgtggtctcctcagtgctgagctgagaagatgccctggttaggggaagctatggcaggtgaggtgatagaatgccctac

SEQ ID NO: 21753 - DNA, 120 bp, synthetic construct; identical to SEQ ID NO: 6518
  source 1..120: mol_type = other DNA

SEQ ID NO: 21754 - DNA, 120 bp, synthetic construct
  source 1..120: mol_type = other DNA
gaatgcagaggaggctcaccattatctaataatggttcccacttcctacgctggaagatgctgcaaaagcctcacccccgtgattctgcgggaatcctactcagcagctttgcaggaatt

SEQ ID NO: 21755 - DNA, 120 bp, synthetic construct
  source 1..120: mol_type = other DNA
tctcaaggcatgggtttgtcaaacaccccaggactttgataagtggagctaaacccaccgctggggtgaatccatatagattggaaaaaaagatgcccaactctcaacaaggtagacatg

SEQ ID NO: 21756 - DNA, 120 bp, synthetic construct
  source 1..120: mol_type = other DNA
gcctcaggaacatgatggtgaaagggacctgcatcactaagtataggggtgttgtcctctgcaggctgcaggtgatggtaataaagatggtcccagagttgcatttatccatatccctgg

SEQ ID NO: 21757 - DNA, 120 bp, synthetic construct; identical to SEQ ID NO: 6519
  source 1..120: mol_type = other DNA

SEQ ID NO: 21758 - DNA, 120 bp, synthetic construct
  source 1..120: mol_type = other DNA
tatatgctggcacaattccctcaatcatttggcaaaggaacctatagacatttacttgggtggttgtacactggggaaaggaaacacgcagaactggagggattattgacactgggtgtg

SEQ ID NO: 21759 - DNA, 120 bp, synthetic construct
  source 1..120: mol_type = other DNA
ggacaaattatggcccacaatgggaccactgggccaacagacccaacgctggatatctttcaattccctgagtgcatgattgacactgctgcactgctaagtggagtcacccccacactg

SEQ ID NO: 21760 - DNA, 120 bp, synthetic construct
  source 1..120: mol_type = other DNA
aatcaaaaaccatagtgtgtcccagggtgggtcttgtggaagacactgaaagtattatggggtcgcaccaacattagagagctgaaggatgtggggtggtgttggggctgtctattgtct

SEQ ID NO: 21761 - DNA, 120 bp, synthetic construct
  source 1..120: mol_type = other DNA
taggagttataattgcagcttttatgttgtctggttatcactggtagagcaggttaataaagccccgggcacacagtgtgccgctgtggatttggtgagtgcattcctttccactccaat

SEQ ID NO: 21762 - DNA, 120 bp, synthetic construct; identical to SEQ ID NO: 6520
  source 1..120: mol_type = other DNA

SEQ ID NO: 21763 - DNA, 120 bp, synthetic construct
  source 1..120: mol_type = other DNA
ggaaggaagaggatatggagtgattcacattcatgtggaatcaacgacacatttatttattgtttgcctcagggctattgtaacacctgtgccctctatagtataggcttaagactgtac

SEQ ID NO: 21764 - DNA, 120 bp, synthetic construct
  source 1..120: mol_type = other DNA
caggaagaaagtgcactgtagtcctttgcaaaacacacgcaccccacaaggtgaagataaaccttatacagcttcaaaggtgggcactgaagtgaagttttatgggtgaacaagtgccaa

SEQ ID NO: 21765 - DNA, 120 bp, synthetic construct
  source 1..120: mol_type = other DNA
cacattccacatctagacattttgctttggcccacagtctaggtgacataggaggatgccagcttcaagtggggcctacacaggaaaggaccctgcagcagatccaggccatggtacaag

SEQ ID NO: 21766 - DNA, 120 bp, synthetic construct; identical to SEQ ID NO: 6521
  source 1..120: mol_type = other DNA

SEQ ID NO: 21767 - DNA, 120 bp, synthetic construct
  source 1..120: mol_type = other DNA
tgaagtggcactgaactaccaaacagacaaatggcagttagccagctttcaccatgggtcagcccaggcctggtaggatgagtgcatgaatggagcaaccacagtggcaggcatgaggct

SEQ ID NO: 21768 - DNA, 120 bp, synthetic construct
  source 1..120: mol_type = other DNA
tttacatgactacccactaagtaacaagttgactacatttagctacttccaacctggaagggccagagtttcatcttcacagggttaggtaccgattctatgggtgggttttcctgtcct

SEQ ID NO: 21769 - DNA, 120 bp, synthetic construct
  source 1..120: mol_type = other DNA
gtttccacggctgtgggttccactaatcctatcaccatctgcactacccaggagctgccagccacaaggaaggctggacaggtcttctacaggcacaactcagtgccagcctggaggaag

SEQ ID NO: 21770 - DNA, 120 bp, synthetic construct; identical to SEQ ID NO: 6522
  source 1..120: mol_type = other DNA

SEQ ID NO: 21771 - DNA, 120 bp, synthetic construct
  source 1..120: mol_type = other DNA
taataaatagatcctcatccccaggagaaggcatggctgtttcacacaagggtagaagtgtgtgtggaaaccagagatccacctgggagccttctggtttcccttgccccattgtaagtg

SEQ ID NO: 21772 - DNA, 120 bp, synthetic construct
  source 1..120: mol_type = other DNA
ctgacatcctcagtacattggtgctgaggccctcttcccatgggctgttcccaacgactgatgggtcataccagtgacactaaggcaggacattcctaggagacaggggactcctctgat

SEQ ID NO: 21773 - DNA, 120 bp, synthetic construct
  source 1..120: mol_type = other DNA
ggaaacctctcctggatttctgatcattggaaactgtgggagatgaggaatatttgttgttctgagctgctaagttttacataatttgttatgcatagtaaataactaatacattttcac

SEQ ID NO: 21774 - DNA, 120 bp, synthetic construct; identical to SEQ ID NO: 6523
  source 1..120: mol_type = other DNA

SEQ ID NO: 21775 - DNA, 120 bp, synthetic construct
  source 1..120: mol_type = other DNA
aattataagacattaaacatgtaacttagttttaaaaggaaaggagaagttccatggctgaagaggatgtattttattatcgttcacaatgatcactttacttgaacttcaatttccaac

SEQ ID NO: 21776 - DNA, 120 bp, synthetic construct
  source 1..120: mol_type = other DNA
tgtgtcccaattaaacacaaaaggaagattcatcccttgctagagtgattctatgatggccccaacaaccacctcctggtcattcaccttcccccagttattcaaccaactctaatgtag

SEQ ID NO: 21777 - DNA, 120 bp, synthetic construct
  source 1..120: mol_type = other DNA
ctgagcatagagattcacagtgtgagagggattcagcatgaggggtttcctccactgtgggctttgaaaatgaaggggctgtgtaggaaacaacactggtgggcaccaggaattgagtac

SEQ ID NO: 21778 - DNA, 120 bp, synthetic construct
  source 1..120: mol_type = other DNA
acctctgtataagcctaaaggaggattcaaaatgaagactcagatttgggaagcctggaacagagattccatctacatcatgcccagatttctgactaaggtactataaacagataaatg

SEQ ID NO: 21779 - DNA, 120 bp, synthetic construct; identical to SEQ ID NO: 6524
  source 1..120: mol_type = other DNA

SEQ ID NO: 21780 - DNA, 120 bp, synthetic construct
  source 1..120: mol_type = other DNA
taaagccaatgtttgtgataattttttacacagtcttataaaattcatacacaggctcaacagactaatggaatgaactgatgaattgatatatacactagttacataaaataaaatctt

SEQ ID NO: 21781 - DNA, 120 bp, synthetic construct
  source 1..120: mol_type = other DNA
caaaaattaatttagtccctacaatgaaccaggtatcccctcatatgctcacgtgcctgacattctagaagcttcacaagaccaaggtggagccactggagtgttttaggtggagaaatg

SEQ ID NO: 21782 - DNA, 120 bp, synthetic construct
  source 1..120: mol_type = other DNA
ggggctgagtgataagagggacggagggaagggctggagaagcagtaggtgaggaaaaggagtagagggatagaattcaaaagcagcacaactcttaggtttgaacactttttttaatgg

SEQ ID NO: 21783 - DNA, 120 bp, synthetic construct; identical to SEQ ID NO: 6525
  source 1..120: mol_type = other DNA

SEQ ID NO: 21784 - DNA, 120 bp, synthetic construct
  source 1..120: mol_type = other DNA
caagcgggagtcacagataccttgtttgcaaaagtgaaacttaggagctttgtgagtcctgttgtaatgcttttagacactttatatatcaaggggccaaagtcacatgtttttaccgat

SEQ ID NO: 21785 - DNA, 120 bp, synthetic construct
  source 1..120: mol_type = other DNA
aaaaagaaaaaagaaataaaagaaaaaaacctctgtctctacacctccattcccagggagagctccctctctggcaccaagctccctggggtgagttttctttttgaagagtccagggga

SEQ ID NO: 21786 - DNA, 120 bp, synthetic construct
  source 1..120: mol_type = other DNA
tggaccaagactcagggaacattgagacagagcgtttgtcacaggaggagcggggtcagggcgaagtcccagagccccaggcatggctctcagggtctcaggccccgaaggcggtgcatg

SEQ ID NO: 21787 - DNA, 120 bp, synthetic construct; identical to SEQ ID NO: 6526
  source 1..120: mol_type = other DNA

SEQ ID NO: 21788 - DNA, 120 bp, synthetic construct
  source 1..120: mol_type = other DNA
gcaggacccggggagccgcgccgggaggagggtcgggcgggtctcagcccctcctcgcccccaggctcccactccatgaggtatttcagcaccgccgtttcctggccgggccgcggggag

SEQ ID NO: 21789 - DNA, 120 bp, synthetic construct
  source 1..120: mol_type = other DNA
tgggacctacagacactgggcgccaaggcccaggcacagactgaccgagtgaacctgcggaccctgctccgctactacaaccagagcgaggcgggtgagtgaccccggcccggggcgcag

SEQ ID NO: 21790 - DNA, 120 bp, synthetic construct
  source 1..120: mol_type = other DNA
cctttacctggtttcatcttcagttgaggccaaaatctccgcaggttgctaggggccgggccagggctcggtgggcggggctgaccgcgggaactgggccagggtatcacatcctccagg

SEQ ID NO: 21791 - DNA, 120 bp, synthetic construct; identical to SEQ ID NO: 6527
  source 1..120: mol_type = other DNA

SEQ ID NO: 21792 - DNA, 120 bp, synthetic construct
  source 1..120: mol_type = other DNA
tccctcctgtcctgacggagaggaatcctcctgggtttccagatcctgtatcagagattgactctgagggcccaccctgctcttcctgggacaattaagggatgaagtctctgagggagt

SEQ ID NO: 21793 - DNA, 120 bp, synthetic construct
  source 1..120: mol_type = other DNA
tctgactccagctcctctgagtcccttggcctccactcagatcaggaccagaagtccctgctaccctgctcagagactagaactttccaaggaataggagattatcccaggcgcctgtgt

SEQ ID NO: 21794 - DNA, 120 bp, synthetic construct
  source 1..120: mol_type = other DNA
ctcttcctttcagaccccccccaagacacacgtgacccacccccctctctgaacatgaggcataacgaggtcctgggttctgggcttctaccctgcggagatcacattgacctggcagcg

SEQ ID NO: 21795 - DNA, 120 bp, synthetic construct; identical to SEQ ID NO: 6528
  source 1..120: mol_type = other DNA

SEQ ID NO: 21796 - DNA, 120 bp, synthetic construct
  source 1..120: mol_type = other DNA
actggagctgtggtcactgctgtgatgtggaggaagaagagctcaggtggggaaggggtgaggagtcgggtttgagttttcttgtcccactgggggtttcaagctccaggtagaaatgtg

SEQ ID NO: 21797 - DNA, 120 bp, synthetic construct
  source 1..120: mol_type = other DNA
tgtaagcacctgtgacaatgaaggacagatttctcaccttgatgattgtagtgatggggatctgaccccagtaatcacaggtcaggggaaggtccctgctgaggacagaccttaggaggg

SEQ ID NO: 21798 - DNA, 120 bp, synthetic construct
  source 1..120: mol_type = other DNA
atggccctgctaccttcctggcctctcacaggacgttttcttcccgcagatagaaaaggagggagctactctcaggctgcaagtaagtatgaaggaggctgatccctgagatccttggga

SEQ ID NO: 21799 - DNA, 120 bp, synthetic construct; identical to SEQ ID NO: 6529
  source 1..120: mol_type = other DNA

SEQ ID NO: 21800 - DNA, 120 bp, synthetic construct
  source 1..120: mol_type = other DNA
gtgagacagctgccttgtgtgggactgagaggcaagatttgttcatgccttccctttgtgacttcaagaaccctgacttctctttctgcaaaggcatctgaatgtgtctgtgtccctata

SEQ ID NO: 21801 - DNA, 120 bp, synthetic construct
  source 1..120: mol_type = other DNA
tccccgatcacctttcctgttccagagaagtggtgctgggatgtctccatctctgtctcaacttcatggtgcactgagctgtaacttcttacttccctattaaaattagaatctgagtat

SEQ ID NO: 21802 - DNA, 120 bp, synthetic construct
  source 1..120: mol_type = other DNA
ttcttgtgctgatttgttgcaggggaggagagtagatggggctgtgcccagtgtgtgctcaggccaccatgggctttatgtggtcacagctcacctgggtcatctttgctgctccactgt

SEQ ID NO: 21803 - DNA, 120 bp, synthetic construct
  source 1..120: mol_type = other DNA
catcgaagtccttccggtatgaagagacaaattttcagtcccctgtatcttttgccctccttccaggtctctttcctggattgtattttccatctttttccccagccttcttaaaggaag

SEQ ID NO: 21804 - DNA, 120 bp, synthetic construct; identical to SEQ ID NO: 6530
  source 1..120: mol_type = other DNA

SEQ ID NO: 21805 - DNA, 120 bp, synthetic construct
  source 1..120: mol_type = other DNA
gcactgatgttggtgtgagatgatgttgttctttagctacgttaataaagatattgcctttagaatacagaggtgctctacagtgatcattcattcaactgacatttgttgtctgctagg

SEQ ID NO: 21806 - DNA, 120 bp, synthetic construct
  source 1..120: mol_type = other DNA
ggcccgggacagctttgaatgtaagaagtttttttgcttatctgtggtagcaaatatcatgaaaattatgcacgcacatgtttttcttttttctattctttctgctcatcagctgtcatt

SEQ ID NO: 21807 - DNA, 120 bp, synthetic construct
  source 1..120: mol_type = other DNA
aggcagatgatagatatagtataagcagagtaggaacagaaaatgcttgagttagaaggtggcaagtgctgtgtggcaggtgatccagagggtgggctgtggggacaggaaggtggctgt

SEQ ID NO: 21808 - DNA, 120 bp, synthetic construct
  source 1..120: mol_type = other DNA
aggatgtctgggaaagttcttttcaggcaggggaaccttcagtgcagatgcactagggcaggaaattgtctgtgttcctggaaggaggaagaggccagaagggctggacacagagaaact

SEQ ID NO: 21809 - DNA, 120 bp, synthetic construct; identical to SEQ ID NO: 6531
  source 1..120: mol_type = other DNA

SEQ ID NO: 21810 - DNA, 120 bp, synthetic construct
  source 1..120: mol_type = other DNA
ttgctaatggatgtgagaagaagaatcaaggacacccacagtattggactgagtgagcagaagggtggagctgctgtcagtggagatagggagactctggcaggagtacacagaggagag

SEQ ID NO: 21811 - DNA, 120 bp, synthetic construct
  source 1..120: mol_type = other DNA
cagagccagagcactgattctcccctgggctgtgggcacaggtaggtgaaagtcagggaagttgtggtctgctattggttataataagtcacagatcattatgctttctcagataattaa

SEQ ID NO: 21812 - DNA, 120 bp, synthetic construct
  source 1..120: mol_type = other DNA
aaggcagcaaatgacaatggacagacttaaacccaatgaggtcaataattacattaaacataatggactcagacactccaattacaagacaaatagtgcaggggggtaaaaataaataac

SEQ ID NO: 21813 - DNA, 120 bp, synthetic construct; identical to SEQ ID NO: 6532
  source 1..120: mol_type = other DNA

SEQ ID NO: 21814 - DNA, 120 bp, synthetic construct
  source 1..120: mol_type = other DNA
aagcctgtgccgccacacctggctataatgtctcattttctcatttgctgtggtgtgaacaaggaaacaataccatgccatgtatttgacttgcagcaggcacacaacaaatgtcaggtg

SEQ ID NO: 21815 - DNA, 120 bp, synthetic construct
  source 1..120: mol_type = other DNA
gtaaagtaaaataaattgatttacatcatccagagcagaatcgagaacacattccctgtgctaaaggaatcagagctctactaagggtcatagcagatatcatgcaagtcacatatgtta

SEQ ID NO: 21816 - DNA, 120 bp, synthetic construct
  source 1..120: mol_type = other DNA
gaagaaaatggatttgtttaaaagatggttagaatctttaaagaaacaacatttttttaaagtggccttatgtggaccaaagcagagatgaactcaagtgtcaggtgggaaaatgcctaa

SEQ ID NO: 21817 - DNA, 120 bp, synthetic construct
  source 1..120: mol_type = other DNA
agtggggtgttgctggcaaacctcccacaatgcacaggacagaccactccacaagattctctgtcccaaattgttaatagtgctgctgttgagaaacccgccccagaggtaaatgctgta

SEQ ID NO: 21818 - DNA, 120 bp, synthetic construct; identical to SEQ ID NO: 6533
  source 1..120: mol_type = other DNA

SEQ ID NO: 21819 - DNA, 120 bp, synthetic construct
  source 1..120: mol_type = other DNA
atttccagccacgacttacgctcagaaaaaataacgtccaccttaattatctctccaaccctgtttttccctgtcccggctagttccctcccttgactccatcaacatcggcacctgcca

SEQ ID NO: 21820 - DNA, 120 bp, synthetic construct
  source 1..120: mol_type = other DNA
ctcttaacctggggtccaggaacccactttcctatgacactgcgtgaagaagtgatgttacacgcacacatgacttcactacaggacattggatattaatattcatcagatcagctagag

SEQ ID NO: 21821 - DNA, 120 bp, synthetic construct
  source 1..120: mol_type = other DNA
tgcaaggtactcaacctgctctggggatacagcaggaaagcagagtgtttacggatttcacattccatcaaagaaaatccattttgacaaaatatccaagtcacttttctaagccccagg

SEQ ID NO: 21822 - DNA, 120 bp, synthetic construct; identical to SEQ ID NO: 6534
  source 1..120: mol_type = other DNA

SEQ ID NO: 21823 - DNA, 120 bp, synthetic construct
  source 1..120: mol_type = other DNA
agcagaaaaccagggactggttatgtgagctatcaccccactctgtggctctcttaagcaataagcataagagattgtgggccaacagaatttgtagcaaggtaaacataacccttcatt

SEQ ID NO: 21824 - DNA, 120 bp, synthetic construct
  source 1..120: mol_type = other DNA
agtctgtcagtgaaagccttctcaaaacaactgtgaagtaaagacaggtaaataaatgcatggtgctcccatgtattaatgctcactgcatcttacaaatgtgtcagccccactgcaaca

SEQ ID NO: 21825 - DNA, 120 bp, synthetic construct
  source 1..120: mol_type = other DNA
gaactaatcttaagaattgaacctgtaaaaccctcaagaaaatactgaggaaaatcttatggacattagaattggtagtggtttcttggctggtgaccaatagtacaagtaatataagaa

SEQ ID NO: 21826 - DNA, 120 bp, synthetic construct; identical to SEQ ID NO: 6535
  source 1..120: mol_type = other DNA

SEQ ID NO: 21827 - DNA, 120 bp, synthetic construct
  source 1..120: mol_type = other DNA
aaccccgtctgtaccaaaaaaatacaaatattagttgggcatggtggcaggtacctgtagtcccagctactcaggaggctgaggtaggagaatcacttgaacctgggaagtggaggttac

SEQ ID NO: 21828 - DNA, 120 bp, synthetic construct
  source 1..120: mol_type = other DNA
caagtgttggtgaagatatggagaaactggaacacttgtacactgctggtgagagtatacagtggtgcagccaccatggaaaacagaatagtgattcctcaagaaagtaaaaatagaatt

SEQ ID NO: 21829 - DNA, 120 bp, synthetic construct
  source 1..120: mol_type = other DNA
agcaaccgagtgtccatcagaggatgactggataaacaacccacggtgcacataagcatggaatattattcagccttaaaagtgaatgaaattctaattggatgagccttgaaaacacta

SEQ ID NO: 21830 - DNA, 120 bp, synthetic construct; identical to SEQ ID NO: 6536
  source 1..120: mol_type = other DNA

SEQ ID NO: 21831 - DNA, 120 bp, synthetic construct
  source 1..120: mol_type = other DNA
tccaatcacagctctcatcgagtttttttatactggtgtttcaacaagcacattgccgctgtggaggggaggggtccttggagttcttatgccaccatgttctttggtgtcacttctcag

SEQ ID NO: 21832 - DNA, 120 bp, synthetic construct
  source 1..120: mol_type = other DNA
aggagggggcttccaggtcacagatagatgagagacaaatggttgcattcttttgagtttccgattagcctttccaaatgagggaatcagacatgtgtttatctcagtgagcagaggggc

SEQ ID NO: 21833 - DNA, 120 bp, synthetic construct
  source 1..120: mol_type = other DNA
acagaaaaaaaaaaaccctgaatgtacacaaacctctataccaaactaccaatttacagaaaatacaggtaatagaaatacattaaaccacaccttggcgtgcaatccacaaaatgcaaa

SEQ ID NO: 21834 - DNA, 120 bp, synthetic construct; identical to SEQ ID NO: 6537
  source 1..120: mol_type = other DNA

SEQ ID NO: 21835 - DNA, 120 bp, synthetic construct
  source 1..120: mol_type = other DNA
tgtatcagctattgcccaagtttccactttacaaaagtgccatgcatacatgcaacaacatagtgccttctccatgcatcccttaagagatgaactgcatgctatcttagggccagtaca

SEQ ID NO: 21836 - DNA, 120 bp, synthetic construct
  source 1..120: mol_type = other DNA
ctgataatgcttggtacttagatgcattgagccaaggtaaccctgtgtatggacagtagtagctgcacaaccacagacagtatctggtttgagatgggaatgcaacagagcagtcaatgg

SEQ ID NO: 21837 - DNA, 120 bp, synthetic construct
  source 1..120: mol_type = other DNA
taagggtcttacaatttggcttgcccaaagggcctgagatgattggtatataatttaaaaatccttatggggagctgatatgtggaaagacatttggaaaagtctacaggaacccactgt

SEQ ID NO: 21838 - DNA, 120 bp, synthetic construct
  source 1..120: mol_type = other DNA
agaaacatggaggcagacatcctagcaaaaattagaatactgagctagttgattaggtacatatcacagtggggatttcagtgcatgaatgggctgccaaatagcaaagggagcaggatt

SEQ ID NO: 21839 - DNA, 120 bp, synthetic construct; identical to SEQ ID NO: 6538
  source 1..120: mol_type = other DNA

SEQ ID NO: 21840 - DNA, 120 bp, synthetic construct
  source 1..120: mol_type = other DNA
ttcaccagacacggtgtccaagactggatgcatgaaagggacatagactgggtatttcacttactgtatactcccccaagcaacagggttgattgaaaggaaaaatggtattttgaaggc

SEQ ID NO: 21841 - DNA, 120 bp, synthetic construct
  source 1..120: mol_type = other DNA
tagttgagacaaatatggtgctggcaccacaccaatgactcaggaccaccacagagatggatccattaaccataatagtaaagaaagtccaaccagatgcatctctgacctgagcagata

SEQ ID NO: 21842 - DNA, 120 bp, synthetic construct
  source 1..120: mol_type = other DNA
caacttcccctatgttggatagagcatttctttccagacagcaaggaattccctaccaactaaagtggtctccattgatcctgctgaagtctgggccaaaacactccacataccaataaa

SEQ ID NO: 21843 - DNA, 120 bp, synthetic construct
  source 1..120: mol_type = other DNA
tactcccagcccacaatcctatgttcctaatcaacagagatggagctaccagtaattctgtttaatggggaagaactgccccaccaaatacctactaaacatttttaattccacccatag

SEQ ID NO: 21844 - DNA, 120 bp, synthetic construct; identical to SEQ ID NO: 6539
  source 1..120: mol_type = other DNA

SEQ ID NO: 21845 - DNA, 120 bp, synthetic construct
  source 1..120: mol_type = other DNA
ctgattcccactttatttaccatccctattgtaagaacatgtcaaccttgatgttatacaaattctaggctatgacacattagcattcttacctgttctggacagtagtagcctttgtct

SEQ ID NO: 21846 - DNA, 120 bp, synthetic construct
  source 1..120: mol_type = other DNA
aataaaacactctttactgacaactagatttgtctgtcttgttccttggtttattggctcctttggcatttggggggcactttgcatagatggccctttcatggaacagagggtctgtgt

SEQ ID NO: 21847 - DNA, 120 bp, synthetic construct
  source 1..120: mol_type = other DNA
ctgaagtaacgctatggaagagcaggccagtaacagctgaagagcttcagaaactcccacttctaacaaggtcacttcctctaagagggactactgttgtatcatagtacacagctgtct

SEQ ID NO: 21848 - DNA, 120 bp, synthetic construct; identical to SEQ ID NO: 6540
  source 1..120: mol_type = other DNA

SEQ ID NO: 21849 - DNA, 120 bp, synthetic construct
  source 1..120: mol_type = other DNA
actgttttgcatttgtgagcaggaatacaactgctggacaacagatattccatcagccaacagaaactgtgactggctttaaagaaaatgggcttcccttggtcttgggaacacaagact

SEQ ID NO: 21850 - DNA, 120 bp, synthetic construct
  source 1..120: mol_type = other DNA
ctctgctgtagcagtgatggcagcagtgtggagaacacagcctcagggaacaaccaaggtccaggatcactagcaaaggttatgagaaactatgacttcctttagaaaaaaaaaaaaggg

SEQ ID NO: 21851 - DNA, 120 bp, synthetic construct
  source 1..120: mol_type = other DNA
catgccaagtggggaggttgcttgggtcagactatattaaaggacagcatctccaccctcccctagaggtctcagaatgtccactgactgtggctttagtggtccttgaacagaaatttg

SEQ ID NO: 21852 - DNA, 120 bp, synthetic construct
  source 1..120: mol_type = other DNA
aacaacatataaagaaacaagttaataccatgagaatgtcattagccaaactcagaatgtggatcattctacaggacaagtaacctggcttttttggggaaacagaagcataggagagcc

SEQ ID NO: 21853 - DNA, 120 bp, synthetic construct; identical to SEQ ID NO: 6541
  source 1..120: mol_type = other DNA

SEQ ID NO: 21854 - DNA, 120 bp, synthetic construct
  source 1..120: mol_type = other DNA
gagcacccacacatagacatttaacttagcttttatgtagattaaacccctacattagaagagtttacaacaaagatggtgcattcttccttttgctttctgaggacacctactctgtat

SEQ ID NO: 21855 - DNA, 120 bp, synthetic construct
  source 1..120: mol_type = other DNA
aatactcttttggggtcgggatcgggacctgtttttctggtaacagtttctccaacaaatcaaagccttgagaaaaaaaaaataggtagggtgggtggtatggtatagaagaacagagaa

SEQ ID NO: 21856 - DNA, 120 bp, synthetic construct
  source 1..120: mol_type = other DNA
gaactgttgttaattttgttagtgtgagaatagcatggctttatgttttttaaaaaccctattctgtgaaagatgcatgctgaactatttaactgtgaaattgtatgtaaaggatttgct

SEQ ID NO: 21857 - DNA, 120 bp, synthetic construct; identical to SEQ ID NO: 6542
  source 1..120: mol_type = other DNA

SEQ ID NO: 21858 - DNA, 120 bp, synthetic construct
  source 1..120: mol_type = other DNA
attgtcacagccaagaggagcctaaggaggcatgacaaccccatgtaatagggtatcttgaatgggaccttggagtagaaaaatattattaggtaaaactcaaggacacctgagtaatgt

SEQ ID NO: 21859 - DNA, 120 bp, synthetic construct
  source 1..120: mol_type = other DNA
tgttctagaactgaagtctattttttaaaattctcctggaaaaaagtggaaacatatgaaatatgatggacaaatgttagtaattattgaatgtgatgatggataatgagaattcattat

SEQ ID NO: 21860 - DNA, 120 bp, synthetic construct
  source 1..120: mol_type = other DNA
atgtagtgagaccccatctctaccaaaaaacagaaaaattagccaggtgtggtgggcttgcacctgtagtcctagctactcaggaggctgaggtgagaggatcacttgagcccagaaggc

SEQ ID NO: 21861 - DNA, 120 bp, synthetic construct; identical to SEQ ID NO: 6543
  source 1..120: mol_type = other DNA

SEQ ID NO: 21862 - DNA, 120 bp, synthetic construct
  source 1..120: mol_type = other DNA
acctccattctacattctgtctatgaatcttactaaactaggtgaatcatgtaagtggattcatacaatatttttccttttcagtctgatttatttaatctagcttcatgtcttcaaggt

SEQ ID NO: 21863 - DNA, 120 bp, synthetic construct
  source 1..120: mol_type = other DNA
agttgtgaataatgttgttataaacatgatgtacaaatatctgcttggtctctgctttaacttcttttgggtctgtacccagaagaggaattgctggatcatatgtcaattctatgttta

SEQ ID NO: 21864 - DNA, 120 bp, synthetic construct
  source 1..120: mol_type = other DNA
gaaccatttttaaataatatatgataaaaatgaagtaaagtatgcaataaaactcatcttgtgctaagtactggagatacatggagggagccctcagtcctctgggggaagaacctggtt

SEQ ID NO: 21865 - DNA, 120 bp, synthetic construct; identical to SEQ ID NO: 6544
  source 1..120: mol_type = other DNA

SEQ ID NO: 21866 - DNA, 120 bp, synthetic construct
  source 1..120: mol_type = other DNA
tcctctcttttgaatctcatagcctgacattttctcttcatcttgaagaccatattcaggagggaccctaggaactctgtatctcagcatgtgaggcttcaggccaaggggtgctaattt

SEQ ID NO: 21867 - DNA, 120 bp, synthetic construct
  source 1..120: mol_type = other DNA
aagctttacagataggtgtgtctcagtgatgctgtgcagagtaacctgtggcctaagtcaagtcagaaaatgcttttgactctatatttctcaaaaatgtaagtcttaaaatttggctat

SEQ ID NO: 21868 - DNA, 120 bp, synthetic construct
  source 1..120: mol_type = other DNA
gcagcttacaaatgatgaaaagagctgagacgtttaaaaaaactttccaagtgtcaggtcctggtactttacatttattctacctcctaatccttatactaggtcaaagctcattttatg

SEQ ID NO: 21869 - DNA, 120 bp, synthetic construct; identical to SEQ ID NO: 6545
  source 1..120: mol_type = other DNA

SEQ ID NO: 21870 - DNA, 120 bp, synthetic construct
  source 1..120: mol_type = other DNA
ttcagcagaaaaatagacatctttctcacaatgttcataaataaagaaccagagaagatgacctttggaccaatacctgttgttatggagatgtggtacagtgtgggaaactctgattgg

SEQ ID NO: 21871 - DNA, 120 bp, synthetic construct
  source 1..120: mol_type = other DNA
gtacagtgtgatattttgatacatgtatacaatgtgtaataagcaaataagggtatttagcctatgcatcacatcaaacgtttaccatttctttgtgatggaaacattcaaaatcatatc

SEQ ID NO: 21872 - DNA, 120 bp, synthetic construct
  source 1..120: mol_type = other DNA
atcatctcaatagatgcaaaaaaaacattcaacaaaatctggcatcctttatgattaaagctctcagcaaaatcggcatacaaggaacatacctcaatgtaatcaaagccatctatgaga

SEQ ID NO: 21873 - DNA, 120 bp, synthetic construct; identical to SEQ ID NO: 6546
  source 1..120: mol_type = other DNA

SEQ ID NO: 21874 - DNA, 120 bp, synthetic construct
  source 1..120: mol_type = other DNA
tcccttttacgacagctgtaaaaaaaaaaaaaaaaaaaacaaacttagaaatatacctagcctaaggaggtgaaagacctctacaaggaaaactacaaaactctgctgaaagaaatcaca

SEQ ID NO: 21875 - DNA, 120 bp, synthetic construct
  source 1..120: mol_type = other DNA
cgaacattcttcacagaactagaaaaaaaatcttaaaattcatataaaacccaaaaaaagcctgcatagcaaaagcgagactaagcaaaaagaacaaatcttgaggcatcacattacctg

SEQ ID NO: 21876 - DNA, 120 bp, synthetic construct; identical to SEQ ID NO: 6547
  source 1..120: mol_type = other DNA

SEQ ID NO: 21877 - DNA, 120 bp, synthetic construct
  source 1..120: mol_type = other DNA
catgaccaagaacccaaaagcaaaatgcaacaaaaacaaagataaatagctgggacccaatgaaactaaagagtgtttgcacggcaaaagaacagtcagcagagtaaacagacaacccac

SEQ ID NO: 21878 - DNA, 120 bp, synthetic construct
  source 1..120: mol_type = other DNA
aggacatgagtagacaattctcaaaagaagatatacagctggccaacaaacatatgaaaaaatgctcaacatcactaatgatcagggaaacgtaaatcaaaacgccaatgtgataccacc

SEQ ID NO: 21879 - DNA, 120 bp, synthetic construct
  source 1..120: mol_type = other DNA
ctttttttttttttttttttttttttttgagacggagtctggctctgtagcccaggctggagtgcagtggcgcaatctcggctcactgcaagctccgcctcccaggttcacaccattctc

SEQ ID NO: 21880 - DNA, 120 bp, synthetic construct; identical to SEQ ID NO: 6548
  source 1..120: mol_type = other DNA

SEQ ID NO: 21881 - DNA, 120 bp, synthetic construct
  source 1..120: mol_type = other DNA
tgtggaaccaacccaaatgcccatcaatcaatgagtggataaagaaactactcagccacaaaaaggaatgaattaatggcattcacagcaacctggatgcgattgaagattattattcca

SEQ ID NO: 21882 - DNA, 120 bp, synthetic construct
  source 1..120: mol_type = other DNA
gggagggaagaaggtgagggacaaaaagctacaatttgggtgcagtgtgtactgcgtgggtgatgggtgcacatttgctccttttaaaatgatactattattattttgctgttgtttgag

SEQ ID NO: 21883 - DNA, 120 bp, synthetic construct
  source 1..120: mol_type = other DNA
tttgatgtagtcccattcatacatttttgcttctcttgcctgtgctttcaaggtcttaatcacaaaatctttcctgcgtccaacactctaaagtgttttctgcatgttttctcccagtag

SEQ ID NO: 21884 - DNA, 120 bp, synthetic construct; identical to SEQ ID NO: 6549
  source 1..120: mol_type = other DNA

SEQ ID NO: 21885 - DNA, 120 bp, synthetic construct
  source 1..120: mol_type = other DNA
ggcaggagaatcgcctgaactcagtaggtggaggttgcagtgagccgagatcgcaccactgcactccagcctgggtgacagagcgagactccgtctcaaattaaaaaaaaagaaaaaaga

SEQ ID NO: 21886 - DNA, 120 bp, synthetic construct
  source 1..120: mol_type = other DNA
agtcaggtactgtgatacttccagctttgttctttttgctcaagattgttttagctattcagggtcttttgtggttccatacaaattttaagatttctttttctatttctataaagaatg

SEQ ID NO: 21887 - DNA, 120 bp, synthetic construct
  source 1..120: mol_type = other DNA
cttttctatttgtttcattagtattttatagttttcattacatacttggttaaatttattcccatgcttttttatagttactgtgaatgagatttctttcttgatttttcatcattttga

SEQ ID NO: 21888 - DNA, 120 bp, synthetic construct; identical to SEQ ID NO: 6550
  source 1..120: mol_type = other DNA

SEQ ID NO: 21889 - DNA, 120 bp, synthetic construct
  source 1..120: mol_type = other DNA
tcttgcctaattgctctgggtcggaccagtactatgtgtttttgttgttgtcattgctgtaatcttttaaaattttctatccatttccataggaatcagtctagtactatgttaaatttg

SEQ ID NO: 21890 - DNA, 120 bp, synthetic construct
  source 1..120: mol_type = other DNA
atttcatctatacctagttggttgagagtttttaatcatgaagtgatgttgaattttaccaaatgctttttctgcatctagagatgatcattttatttttgtccttcattctgttgatat

SEQ ID NO: 21891 - DNA, 120 bp, synthetic construct
  source 1..120: mol_type = other DNA
gttaatttttgcatctgtgtttatcagcgtgtagtttttttgttgttgtatccttccctggttttgataacaaggtaatgcttgcttcctagaataaatttgaaagaactccttccccct

SEQ ID NO: 21892 - DNA, 120 bp, synthetic construct; identical to SEQ ID NO: 6551
  source 1..120: mol_type = other DNA

SEQ ID NO: 21893 - DNA, 120 bp, synthetic construct
  source 1..120: mol_type = other DNA
actgaattgtataagcaaaatatctccaagtagccttgaattagtaacaaatcaatcttttgtttaccagtcttgtttgcttaattagcaaatgtggggagggaagaattttagctgttt

SEQ ID NO: 21894 - DNA, 120 bp, synthetic construct
  source 1..120: mol_type = other DNA
agcctaacttttataaacatttatttttttttcttttatgttactaatttttcaattaagtgtttcattattgtacacagttgttagggaaacctaaatttatatttataaaaggtgtca

SEQ ID NO: 21895 - DNA, 120 bp, synthetic construct
  source 1..120: mol_type = other DNA
aatacaaaaaattagccgggtgtggtggcgggcacctgtagtcccagctactcaggaagctgaggcaggagaatggtgtgaacccgggaggcggcgcttgcagtgagcccagatcaggcc

SEQ ID NO: 21896 - DNA, 120 bp, synthetic construct; identical to SEQ ID NO: 6552
  source 1..120: mol_type = other DNA

SEQ ID NO: 21897 - DNA, 120 bp, synthetic construct
  source 1..120: mol_type = other DNA
acatttcaaaccaattaatacatcattgtatttgtgtgacaacaaattccatacagaagctcttacagcactactttcagatgaaagcaagtctggattcatcgtaatagatggtagtgg

SEQ ID NO: 21898 - DNA, 120 bp, synthetic construct
  source 1..120: mol_type = other DNA
aaagtgacctaacaatgttcagaaagtagcagagactgctgtgcagctgtttatttctggggacaaagggaaggtggctggtctagttttagctggatccgctgactttaaaactgaact

SEQ ID NO: 21899 - DNA, 120 bp, synthetic construct
  source 1..120: mol_type = other DNA
cacgaggtcaggagatcgagaccatcctggctaacacggtgaaaccctgtgtctactaaaaatacaaaaacaaaattagctgggcgtggtggcgggtgcctgtggtcccagctacttggg

SEQ ID NO: 21900 - DNA, 120 bp, synthetic construct; identical to SEQ ID NO: 6553
  source 1..120: mol_type = other DNA

SEQ ID NO: 21901 - DNA, 120 bp, synthetic construct
  source 1..120: mol_type = other DNA
tgccaaggcacaaaagaggagaaaattctctaactccagagcaagaacaggataaatctcatttcacagacaaagagaccaggcaggaacatgcgcttatcaagagcatgcccctgttga

SEQ ID NO: 21902 - DNA, 120 bp, synthetic construct
  source 1..120: mol_type = other DNA
aagtggatttccaaagaatggaataccaaggaggagacgatgaatttttttaccttgatgactactaggtagtcgacatgggtccggcaaaacatgcctcactctccagcatccaaccca

SEQ ID NO: 21903 - DNA, 120 bp, synthetic construct
  source 1..120: mol_type = other DNA
tacactttggtttgtcacggtgtcagcgtagcagcctacaactaagttcctaaatgccactttggactaatttaaaaaagaatcccagtttttacttttactcgatggtgaaattggctg

SEQ ID NO: 21904 - DNA, 120 bp, synthetic construct; identical to SEQ ID NO: 6554
  source 1..120: mol_type = other DNA

SEQ ID NO: 21905 - DNA, 120 bp, synthetic construct
  source 1..120: mol_type = other DNA
actcatgaagcatttgggccagtgcactgtttacttccatctgtttgcagacacatttgtgcccggtgtttgggagctctttgtatcaatgttccgacaagggtcccaataaccttaacc

SEQ ID NO: 21906 - DNA, 120 bp, synthetic construct
  source 1..120: mol_type = other DNA
ttgcctgattccatgtctccctccaattaccgccccatttctctgacactccttatagaataattccttagtcaattgtctcatgatgtttttaatatatcaaatggatttatggacagt

SEQ ID NO: 21907 - DNA, 120 bp, synthetic construct
  source 1..120: mol_type = other DNA
gttacatctgtgcctccaaatagtgtgttatagtgccgttttgtttttcactcttatgtatcatccttagtgtatagctccctttcatatacccctctcctctcaatatagttattttat

SEQ ID NO: 21908 - DNA, 120 bp, synthetic construct; identical to SEQ ID NO: 6555
  source 1..120: mol_type = other DNA

SEQ ID NO: 21909 - DNA, 120 bp, synthetic construct
  source 1..120: mol_type = other DNA
agtcatgagcgcagagccctcatgaacaaattaatatcattattatggcagtgagcccataataataatattgtcctctctcttgcccttgacccacttgccatgtgaagacacagcaag

SEQ ID NO: 21910 - DNA, 120 bp, synthetic construct
  source 1..120: mol_type = other DNA
aactaagacagtctccatgaatatattcaaccatgccccgtgttctaccaacctcatctttgtgaagacacttcccttggtcctgccacacgtggactggtgcatgcacatctgggctga

SEQ ID NO: 21911 - DNA, 120 bp, synthetic construct
  source 1..120: mol_type = other DNA
atttcatctgtgttcctaagggaacatggaaagtaaaatctgaaagcctaagcttctgaaaatgtcttcgggctaccctagcacttattccaacctggacttggtatggaattctgtatt

SEQ ID NO: 21912 - DNA, 120 bp, synthetic construct; identical to SEQ ID NO: 6556
  source 1..120: mol_type = other DNA

SEQ ID NO: 21913 - DNA, 120 bp, synthetic construct
  source 1..120: mol_type = other DNA
gcaggaaatccttgactgatagcctagtattcgtatagtttttctgtctttcttgacattgtttttccatttttaatatttagtggtagtacaaatttactcttccaagtgatctattga

SEQ ID NO: 21914 - DNA, 120 bp, synthetic construct
  source 1..120: mol_type = other DNA
ggtattattgagaatagtggtagtggacctgttagatctcctggttatctgctttcatggtaccatgaacttttcttcaccacacttagctcagcagtaattttatatttctctttgtaa

SEQ ID NO: 21915 - DNA, 120 bp, synthetic construct
  source 1..120: mol_type = other DNA
aatacatgctgaatgaggaaatataagtgtggttaggcagggaaatcagacttccttgatcaattgccccttgatgttctcctgagcactgtatctcatgacctcctgtcatagaacatt

SEQ ID NO: 21916 - DNA, 120 bp, synthetic construct; identical to SEQ ID NO: 6557
  source 1..120: mol_type = other DNA

SEQ ID NO: 21917 - DNA, 120 bp, synthetic construct
  source 1..120: mol_type = other DNA
gaacatatattttttagaatgtgtgcagttatcttcttaggaaaaattcttgaaagagaaatatatgcattgaaatgtaagtccatttatattgttaacatgtttcgcaaaagtcccctc

SEQ ID NO: 21918 - DNA, 120 bp, synthetic construct
  source 1..120: mol_type = other DNA
cgcctcctgggttcacaccattctcctgcctcagcctcccaagtagctgggactacaggcgcctgccaccacgcccagctaattttttttttaatatttttagtagagacgggtttcacc

SEQ ID NO: 21919 - DNA, 120 bp, synthetic construct
  source 1..120: mol_type = other DNA
gccttcatgacagtgtattttccctacctctggataatatgcttatcatttactttcacatatgccaaactgacagattttaattttcattcgcatttctaatgtcatgttctcattttt

SEQ ID NO: 21920 - DNA, 120 bp, synthetic construct; identical to SEQ ID NO: 6558
  source 1..120: mol_type = other DNA

SEQ ID NO: 21921 - DNA, 120 bp, synthetic construct
  source 1..120: mol_type = other DNA
ctgctggctaatatgagtgacggctgtttctttaccagccacaactttatccttgctctgctctgcatttattatgggtaagatttattgagacagtcgtagaaatgttcctgctttttg

SEQ ID NO: 21922 - DNA, 120 bp, synthetic construct
  source 1..120: mol_type = other DNA
ctcttgtgacaatgagtaataaaccccagttgttcagctatagatgttcctggtggtctttggctgaaagacattgaaatatgctaccttttgtctttccaattatttatgtgtctttga

SEQ ID NO: 21923 - DNA, 120 bp, synthetic construct; identical to SEQ ID NO: 589
  source 1..120: mol_type = other DNA

SEQ ID NO: 21924 - DNA, 120 bp, synthetic construct; identical to SEQ ID NO: 6559
  source 1..120: mol_type = other DNA

SEQ ID NO: 21925 - DNA, 120 bp, synthetic construct
  source 1..120: mol_type = other DNA
aatatgtctacaaagcctataagatattttatatggcaacttcaataaatactttctcttgggctaagtaatgacttatatacctccttgtgttcaccaggttatagaaaacagtaacac

SEQ ID NO: 21926 - DNA, 120 bp, synthetic construct
  source 1..120: mol_type = other DNA
atacatattgaactttcttgggcctgctgtattttagggatatgtctaagacccacatagccaaatccatgggttctatgtgaaggtaattttaatgtatttcaatctgggagtcacaag

SEQ ID NO: 21927 - DNA, 120 bp, synthetic construct
  source 1..120: mol_type = other DNA
actctttatcacactagccacattccaagtgctcaataaccacatgtaactagtggctcccatattggacagtgcagatatagatcaatttcatcatcacagaatgttctattgaacagc

SEQ ID NO: 21928 - DNA, 120 bp, synthetic construct; identical to SEQ ID NO: 6560
  source 1..120: mol_type = other DNA

SEQ ID NO: 21929 - DNA, 120 bp, synthetic construct
  source 1..120: mol_type = other DNA
ggtatttttgttatagcagcctgatggattaagataactgctcttggtgctatgtgggcctcaagtcaagtgcattagacacatctaaaatgaaagggtgactggttgtggtgacttacg

SEQ ID NO: 21930 - DNA, 120 bp, synthetic construct
  source 1..120: mol_type = other DNA
ctacaaaatatataatttttaaaattagctggacatgctggcaagtgcctgtagttccaacagcttaagagtctgaggtgggaggatggcttgagccccccgagagttcgccactacagt

SEQ ID NO: 21931 - DNA, 120 bp, synthetic construct
  source 1..120: mol_type = other DNA
aggagtgaaatctctattttgtgcttttaggcgcaaaccattcccagctccaaaatggaaacacatttgccacctctgttcccagactaaggacactctctgcatccaatttacaggtga

SEQ ID NO: 21932 - DNA, 120 bp, synthetic construct
  source 1..120: mol_type = other DNA
aagaactctccacagcttacccagaacaggatttctcaaagtgcaatctgtggaacccttgtgggctgctgaaaccccttcatagatccacaaggttaaaagtatttttataatacaatg

SEQ ID NO: 21933 - DNA, 120 bp, synthetic construct; identical to SEQ ID NO: 6561
  source 1..120: mol_type = other DNA

SEQ ID NO: 21934 - DNA, 120 bp, synthetic construct
  source 1..120: mol_type = other DNA
tattaaatctctatcccagaatccacagtttaatatatcttaaatgagtaagtgggaagtacgcataaggtatttctactacattccaaattaggatgtttgaggccaggcgcagtggct

SEQ ID NO: 21935 - DNA, 120 bp, synthetic construct
  source 1..120: mol_type = other DNA
tagccaggcatggtggtgcgcacctgtagtcccagctactagggaaactgagtcacaacaatcacttgaacccgggaggtggaggtttcagtgagccaaaatcatgccactgcactccag

SEQ ID NO: 21936 - DNA, 120 bp, synthetic construct
  source 1..120: mol_type = other DNA
ttgaaagaatgaatgacagaaatgattatcatttagacttgaatatttggctgacactttctcaaaaacgaacataaccctgtcccttccacataatcaactgatggtattattcccaat

SEQ ID NO: 21937 - DNA, 120 bp, synthetic construct; identical to SEQ ID NO: 6562
  source 1..120: mol_type = other DNA

SEQ ID NO: 21938 - DNA, 120 bp, synthetic construct
  source 1..120: mol_type = other DNA
gaacatccagttttctaaaaatgttattaaaaacattcctggcctagcgaggtgacttatacctgtaatcccagcattttgggaggccaaggcaggagaatcatttgagcctaggagttc

SEQ ID NO: 21939 - DNA, 120 bp, synthetic construct
  source 1..120: mol_type = other DNA
ccaggaattcgaggctgccgtgtgctatgatcacaccactacactcaagcctgggtgatagcatgagaccaaaagaaacaaacaaacaaacaaaaccccccaacaaaacccaaaacaaga

SEQ ID NO: 21940 - DNA, 120 bp, synthetic construct
  source 1..120: mol_type = other DNA
tgagacacataagaaaaggatttacaaacatacaaaatgtaaaaagatgcactcttctcactatactgtttactttgggaaatactgactttgcataaaaatatttctaacatgcaatgc

SEQ ID NO: 21941 - DNA, 120 bp, synthetic construct; identical to SEQ ID NO: 6563
  source 1..120: mol_type = other DNA

SEQ ID NO: 21942 - DNA, 120 bp, synthetic construct
  source 1..120: mol_type = other DNA
gttcattgttttgttttgacagaagactatgcctgttcttcttcttgtatctgagttctggtctccaagtctccaatctcctctaggacagccgtaggagttactttttctgtcattgtc

SEQ ID NO: 21943 - DNA, 120 bp, synthetic construct
  source 1..120: mol_type = other DNA
gtccttccagggctgtttcctggactattcttcgcatcttttccccaatctttttcaggaaatcaaattctggaattagagatcatatctcggtttctcaccttagataaactcctgtta

SEQ ID NO: 21944 - DNA, 120 bp, synthetic construct
  source 1..120: mol_type = other DNA
gttggttggaaaatagggtccataagcctaggatcattttttttttctgaaaagggaactataattgtctgctgtggtatatgaggattggtgtgggagggaggcgagaacagcatttgt

SEQ ID NO: 21945 - DNA, 120 bp, synthetic construct; identical to SEQ ID NO: 6564
  source 1..120: mol_type = other DNA

SEQ ID NO: 21946 - DNA, 120 bp, synthetic construct
  source 1..120: mol_type = other DNA
aggtgatccagattgtgggtgtgtggggacagggaagatggctgttttactagggtggtctatggtctcactgggaatgtgaccttaagagaaaagatgaattatctatgaggacgtctg

SEQ ID NO: 21947 - DNA, 120 bp, synthetic construct
  source 1..120: mol_type = other DNA
agagatttggggagatcatgtaggcttgaggatactggaagggttctgactttgctctgagtgagatgggggagacacaaacagctgtcagcagagtagagacttggcacatcttttaaa

SEQ ID NO: 21948 - DNA, 120 bp, synthetic construct
  source 1..120: mol_type = other DNA
ggggtgtgagcagagaaaagagtgggaagtgattggatttcagacacattctcaatatggacttcacagtacttcctaatagattaagtctggggtatgaaaaagaggagtcaaagagga

SEQ ID NO: 21949 - DNA, 120 bp, synthetic construct; identical to SEQ ID NO: 6565
  source 1..120: mol_type = other DNA

SEQ ID NO: 21950 - DNA, 120 bp, synthetic construct
  source 1..120: mol_type = other DNA
tgacagcagactgcacagttctaacaccacatctagaaagtaagtaaatctgagaatctcaaattttagtgtgcgtaggaatcacctggacaactttctaagattcaggtggtctggagt

SEQ ID NO: 21951 - DNA, 120 bp, synthetic construct
  source 1..120: mol_type = other DNA
gtggcttgttattcctgggatccatgttccacttctgagatggtgggtatggggaaaggcctgagtatttttgtaaaaaatctacaaggaatcctggtgatcagccagattgggaaccac

SEQ ID NO: 21952 - DNA, 120 bp, synthetic construct
  source 1..120: mol_type = other DNA
cattaggctggtgtttattttattttgggaaggtctgtgagaataggcttaaagctacatagctagaagcagcatctataatcccatcctaggtggagtctcacataggaatcactgccc

SEQ ID NO: 21953 - DNA, 120 bp, synthetic construct; identical to SEQ ID NO: 6566
  source 1..120: mol_type = other DNA

SEQ ID NO: 21954 - DNA, 120 bp, synthetic construct
  source 1..120: mol_type = other DNA
ggtgtctgcttcctacaatgactctttaagtatgaaattctttaagtatgaaatcatactctttaagtatgaaattctccctaacatggagagggttcaggtgctgggacacaggaagat

SEQ ID NO: 21955 - DNA, 120 bp, synthetic construct
  source 1..120: mol_type = other DNA
caactttcaatttatttccttgatagtctgttatgaagtacaactttttcctgatcagtttatactcagataagtagagtggcactgtgggatggtgaaatgattgctcaaaacttatct

SEQ ID NO: 21956 - DNA, 120 bp, synthetic construct
  source 1..120: mol_type = other DNA
tatttctttgtatatgcacatattttctggaaagaatatctgtgacatttatgtttttgtaaccctattttaggaaaccctctctcaaaccacattttccctctgctctcataccacaac

SEQ ID NO: 21957 - DNA, 120 bp, synthetic construct; identical to SEQ ID NO: 6567
  source 1..120: mol_type = other DNA

SEQ ID NO: 21958 - DNA, 120 bp, synthetic construct
  source 1..120: mol_type = other DNA
caccaacctccaaaaacctccacttgttcagctacctggaagctccctgaacccagttctcctgggtttttatggaagcttcgtgacaccagcattccttctcccaatgtatagtgtggg

SEQ ID NO: 21959 - DNA, 120 bp, synthetic construct
  source 1..120: mol_type = other DNA
gaacacacccaatattattacaaaagaccgaaacaagggaatataggagctaggaaccaggaactgtggccaaaaaccaatctataacaccacacacccccactgtcttagtccactcag

SEQ ID NO: 21960 - DNA, 120 bp, synthetic construct
  source 1..120: mol_type = other DNA
gcccctttcctgtttcataaacgtatatcttctccaagtggcctcacatggcagaaaggtgaagagaactgcctggggtctttctgataaaggcagtgatcccattcatgggggctctgc

SEQ ID NO: 21961 - DNA, 120 bp, synthetic construct; identical to SEQ ID NO: 6568
  source 1..120: mol_type = other DNA

SEQ ID NO: 21962 - DNA, 120 bp, synthetic construct
  source 1..120: mol_type = other DNA
tctcccaaaaaggagaaaggaacactgcccaacatattctataaggtatgttctataaggctggtaccaaaagcagacaaaacaatcacaaaaaaactacagatcgctattcatgaatat

SEQ ID NO: 21963 - DNA, 120 bp, synthetic construct
  source 1..120: mol_type = other DNA
caattaatgtaatatattatatcaatagaataaaaacccacaattatctcaatagatgcagaaaaaggttttgatcaaattcgatactctttcataatagaaacagtcaacaggtgggca

SEQ ID NO: 21964 - DNA, 120 bp, synthetic construct
  source 1..120: mol_type = other DNA
agagtcaacaaactgggaattgaaaggaactttctcagccggataaagggcatctataaaaaagctacagctaacatcatactcgtattagtccatttatgcattgctttaaagaaatac

SEQ ID NO: 21965 - DNA, 120 bp, synthetic construct
  source 1..120: mol_type = other DNA
agttagtacatcttacatggctgaagcaggaagaagagagaagggggaggtggcacacatgtttaaaaagccaaatctcactacaaaatctcaacgaaaattcactatcatgagaacagc

SEQ ID NO: 21966 - DNA, 120 bp, synthetic construct; identical to SEQ ID NO: 6569
  source 1..120: mol_type = other DNA

SEQ ID NO: 21967 - DNA, 120 bp, synthetic construct
  source 1..120: mol_type = other DNA
gcaaggataaaggatataacaccagtatacaaaaatcaattgtatttctaaacccttgcaatgacaaatccagaaatgaaattaagaaaacaattccatttgtaatagctttaaaggaac

SEQ ID NO: 21968 - DNA, 120 bp, synthetic construct
  source 1..120: mol_type = other DNA
atttccaaactgatagattcagcacaatccctatcagattcctaaatgacttcttcgtagaaatttgcaaactaattgtaaatttataaagaaattaaagggacgcagactatgcaaaca

SEQ ID NO: 21969 - DNA, 120 bp, synthetic construct
  source 1..120: mol_type = other DNA
aacacagcaagatcctgtctctacaaaaaataaaaattagcggggcatggtggtacacacctgtcatcccagctacttgggaggctgaggcagggggattgctttagcctagaaggttga

SEQ ID NO: 21970 - DNA, 120 bp, synthetic construct; identical to SEQ ID NO: 6570
  source 1..120: mol_type = other DNA

SEQ ID NO: 21971 - DNA, 120 bp, synthetic construct
  source 1..120: mol_type = other DNA
tgtactccgaaaggtttgtctaagacctgaccaccagtacctgtgaacgtgaacttatttagaaatggtgtctttgtatatgaaattaagttcaggttcccaagaaaagatcatcctgga

SEQ ID NO: 21972 - DNA, 120 bp, synthetic construct
  source 1..120: mol_type = other DNA
atgtatctccaagccaatggagcaacaactaccaacagctaccagaagttaggaaagaatcatggaatgaactttcccccagagcctccagaagaaactaatcctgccaacacctggatt

SEQ ID NO: 21973 - DNA, 120 bp, synthetic construct
  source 1..120: mol_type = other DNA
tacaaaaataagctcaaaatggaagaaagatctaaatgttagtggtgaaattacaaaattcttggaggaaaacctaggtgataaatctttatgaactggccgggtgcggtggctcatgcc

SEQ ID NO: 21974 - DNA, 120 bp, synthetic construct
  source 1..120: mol_type = other DNA
ggtggtgcacacctataatcccagctactcagaaggctgaggcaggagaatggcttgaacccaggaggcagaggttgcagtgagccgagatcacaccactccactccagcctgggcaaca

SEQ ID NO: 21975 - DNA, 120 bp, synthetic construct; identical to SEQ ID NO: 6571
  source 1..120: mol_type = other DNA

SEQ ID NO: 21976 - DNA, 120 bp, synthetic construct
  source 1..120: mol_type = other DNA
aacaagagatgtttctagaatatataacaatctcctacaacttaattgcaaaacacacataatcccaattttaaaatgagcaaaggagtccgagcgcagtggctcacgcctgtaatctca

SEQ ID NO: 21977 - DNA, 120 bp, synthetic construct
  source 1..120: mol_type = other DNA
ctccactaaaaatacaaaattagctgggtgtggtggcacacacctgtagtcccagctacttgggaggctgggacacaagaatcgcttgaacccaagagacgggggttgcagtaagccaag

SEQ ID NO: 21978 - DNA, 120 bp, synthetic construct
  source 1..120: mol_type = other DNA
ccaataagttcataaaaaagatgatcgacattattagggaaatgcaatttaaaaccacagtgaaggctgggcatggtggctcacacctgtaattccagcactttgggaggccaaggtggg

SEQ ID NO: 21979 - DNA, 120 bp, synthetic construct; identical to SEQ ID NO: 6572
  source 1..120: mol_type = other DNA

SEQ ID NO: 21980 - DNA, 120 bp, synthetic construct
  source 1..120: mol_type = other DNA
ataagtattgttaaggatatgcaggaatgagaaccctcagacactgctggcaggaatgtgtaattatgtagtcactttggaaggagtcaggctgtggctcaactgattaaaaatgaagat

SEQ ID NO: 21981 - DNA, 120 bp, synthetic construct
  source 1..120: mol_type = other DNA
atagatgcattatttgtattagccaaaagacagaaacaatccagatgtctataaaccgataaataaacaaatgtgatacatctatggaatacagtattatttggccataaaaagcaatga

SEQ ID NO: 21982 - DNA, 120 bp, synthetic construct
  source 1..120: mol_type = other DNA
caggtaggacatagattaactcttgcttagggtttggggtgatggggaagggggaataagagagtaatagctatagggcatggggtttctttttcaggcgatgataatattctaaaattg

SEQ ID NO: 21983 - DNA, 120 bp, synthetic construct; identical to SEQ ID NO: 6573
  source 1..120: mol_type = other DNA

SEQ ID NO: 21984 - DNA, 120 bp, synthetic construct
  source 1..120: mol_type = other DNA
acgttcgtacccattaacctacctctcttcatcacccccctcacacacccacaaacacacacacacacacacacacacccttcccagcctctggatactatctttctgctgtttacctcg

SEQ ID NO: 21985 - DNA, 120 bp, synthetic construct
  source 1..120: mol_type = other DNA
aagattccattctttttatagctaaatagtattccattgtgtatatatgccgtatctttttaatccattcatccattgatggacagttaggttgattccctgtctttgctattgtaaata

SEQ ID NO: 21986 - DNA, 120 bp, synthetic construct
  source 1..120: mol_type = other DNA
atctccatactgttttccatagtggctgtactaattcaccttcccaccaaccgtgtgtaagagtttgtctttatatcctagctaccatttttgtctttttaataatagctattctagcta

SEQ ID NO: 21987 - DNA, 120 bp, synthetic construct; identical to SEQ ID NO: 6574
  source 1..120: mol_type = other DNA

SEQ ID NO: 21988 - DNA, 120 bp, synthetic construct
  source 1..120: mol_type = other DNA
ccaatgttcttgagcatttcccctatattctcttttagtagtttcatagtttcggatctatcatttaagcctttaatccatttttggttgattttttaatatggtaagagatatgagcct

SEQ ID NO: 21989 - DNA, 120 bp, synthetic construct
  source 1..120: mol_type = other DNA
gttctctattctttccattggtctatgtgtctgttttaggccggtaccatgatgatttggtttctactataacagttacaaagctattactatagcttaactattggatggggctctttt

SEQ ID NO: 21990 - DNA, 120 bp, synthetic construct
  source 1..120: mol_type = other DNA
tcctgcctcagccccctaagtagctgggactacatgcacatgccaccacacccagctaatttttgtaatttttgtagacatttcaccaggaacaaatagaaaacttgaacagaccaacaa

SEQ ID NO: 21991 - DNA, 120 bp, synthetic construct; identical to SEQ ID NO: 6575
  source 1..120: mol_type = other DNA

SEQ ID NO: 21992 - DNA, 120 bp, synthetic construct
  source 1..120: mol_type = other DNA
cacacacaaatcaacagacattaacattttttaatcttatttgaaaaggtggataaaactgaatttggaattggaagatttgttttgggtccccactctgccatttccaaactcagtact

SEQ ID NO: 21993 - DNA, 120 bp, synthetic construct
  source 1..120: mol_type = other DNA
gagactccttgtctccttctctggggacccttttgttcagaaataaaactttcgtgctgcaggtgccttgaggagacgacatgtgggtgatcttttctagaaggcagtggagtgaaagtt

SEQ ID NO: 21994 - DNA, 120 bp, synthetic construct
  source 1..120: mol_type = other DNA
acctcaactgaaatataagcataaacagaggttgactatgattgtacctggacaagatgagtaaaaagctaaagtggtctgttatcagctatttatgtattttgggcctgtctccagcag

SEQ ID NO: 21995 - DNA, 120 bp, synthetic construct
  source 1..120: mol_type = other DNA
gctaacatgtgccagactctacagaacaggcttacaggcataatgccacaaaggaacagaaatctaacaggcttcaagatcaggcctgtcaaataaatgtaccacaatttatatatcata

SEQ ID NO: 21996 - DNA, 120 bp, synthetic construct; identical to SEQ ID NO: 6576
  source 1..120: mol_type = other DNA

SEQ ID NO: 21997 - DNA, 120 bp, synthetic construct
  source 1..120: mol_type = other DNA
gatatgaatgagagcatacgaggctcctgggatgtagtaatgttccatttctcagtctgagcaacgggcacctggacatttattattgttcttctaaatatacattttcatttgtgtatt

SEQ ID NO: 21998 - DNA, 120 bp, synthetic construct
  source 1..120: mol_type = other DNA
tggatgcaggtttggacaaactgagttcctgaaacatagacttttattcttagccgtattaggtgtgaaattgccctgagagcaccagttgcttttatgctagatttggaggggaaagag

SEQ ID NO: 21999 - DNA, 120 bp, synthetic construct
  source 1..120: mol_type = other DNA
cctactgatttgcacttctaagtcttctgcctgttgcattctgatgatccatttctatgcaaaacatagaatctaaagctgagacatagcaatagaggaccagagaacagacacagcaac

SEQ ID NO: 22000 - DNA, 120 bp, synthetic construct; identical to SEQ ID NO: 6577
  source 1..120: mol_type = other DNA

SEQ ID NO: 22001 - DNA, 120 bp, synthetic construct
  source 1..120: mol_type = other DNA
taaatttaaatgaaattcaattaaacattccattccacagctgcaccagccacattttaaatgcctcaacagccacgtgtagcaagggctactgtactgaggagcacagacacagaacat

SEQ ID NO: 22002 - DNA, 120 bp, synthetic construct
  source 1..120: mol_type = other DNA
atttgcttctctgcttaccaactctgaacccctgctttcccaactttctggtatctgggaagaaaataaactgactagaaaacacaaatttcattctgcttgacaactgtaattctcact

SEQ ID NO: 22003 - DNA, 120 bp, synthetic construct
  source 1..120: mol_type = other DNA
agtggatccaagcattaggaaggtcttgcttaagtgggtgataggaagtgacaaaaaaagctggaagaaacatgacagactataatactcccttccctaaccttcctccttttcaccctg

SEQ ID NO: 22004 - DNA, 120 bp, synthetic construct; identical to SEQ ID NO: 6578
  source 1..120: mol_type = other DNA

SEQ ID NO: 22005 - DNA, 120 bp, synthetic construct
  source 1..120: mol_type = other DNA
acaattctttattcaccaccattgcccaaccccggtctttccaagtggggaaactaacatttatgaaacaactaatacatacctacacttcacaaaaaaaacagtccttccataaatgcc

SEQ ID NO: 22006 - DNA, 120 bp, synthetic construct
  source 1..120: mol_type = other DNA
tgtatctgatacaaatgggaatattcactgaaccctggagagaacgagcatttgaaaaaaaaaagggttcacttaagagatatgattttatcataacagcattgaaactttaatctctta

SEQ ID NO: 22007 - DNA, 120 bp, synthetic construct
  source 1..120: mol_type = other DNA
tccgacttctactgcatggttggaaaagaagatacgcaataactctttcaaactcctttatctcttttactctctcatgcttctcatatgtaagtagctggctctggcttcttctcaaga

SEQ ID NO: 22008 - DNA, 120 bp, synthetic construct; identical to SEQ ID NO: 6579
  source 1..120: mol_type = other DNA

SEQ ID NO: 22009 - DNA, 120 bp, synthetic construct
  source 1..120: mol_type = other DNA
ttattttattataataagactctgctttggcaagccagtagtcaagagaaacagcttgctccctacagagtatttcacactcctcctgatatttctgcattatcaactgtcttgctgctg

SEQ ID NO: 22010 - DNA, 120 bp, synthetic construct
  source 1..120: mol_type = other DNA
aagctacatgctctttactttagcttagttgttattttattcccatcactcccaggtgagcctgggagctctgaaagtattaagtactcaccaccacaaatcagtaactaggtttaaaaa

SEQ ID NO: 22011 - DNA, 120 bp, synthetic construct
  source 1..120: mol_type = other DNA
acctaagattccttctctgtgtagttccaaactgtatgatgtgaagataatttacttaccaagatctttttttccagtggagactgctgacctgcagcaatcctaggatctttagatgat

SEQ ID NO: 22012 - DNA, 120 bp, synthetic construct; identical to SEQ ID NO: 6580
  source 1..120: mol_type = other DNA

SEQ ID NO: 22013 - DNA, 120 bp, synthetic construct
  source 1..120: mol_type = other DNA
caagtacatctatgtcagtctgctcagtcctcaagcctcctttgtgttctgagacgattgtaggttctagttttctagacgattctaggtttctagttttctcttcctgcagtttcttga

SEQ ID NO: 22014 - DNA, 120 bp, synthetic construct
  source 1..120: mol_type = other DNA
cttcactctaaatccattatgagactattccctgttgaacccctcaggatggcaatttgtggttactctgggtttatttatagaggaggctgatggcaacacaaatgaaaactatcatct

SEQ ID NO: 22015 - DNA, 120 bp, synthetic construct
  source 1..120: mol_type = other DNA
tatgtcttttataccatttagagttcaaaggatggtctttacagtctgacagagctagatctgaaatctaattctaccacttcctaggtgtgtgactcagggcaagtaacttctgtcagc

SEQ ID NO: 22016 - DNA, 120 bp, synthetic construct
  source 1..120: mol_type = other DNA
gagcttggtaagttctcaataaattctatctatctgtccttcacaggtcaagctcctgattataaagtctttccagtctactctgtcagtgatcttcccttcctctaaatacttgacata

SEQ ID NO: 22017 - DNA, 120 bp, synthetic construct; identical to SEQ ID NO: 6581
  source 1..120: mol_type = other DNA

SEQ ID NO: 22018 - DNA, 120 bp, synthetic construct
  source 1..120: mol_type = other DNA
ctcaaaattaatgatttgctgattgctgatgatccttgacacataatatctgagcatcttttttaaatatctgccataacattgtatctatttttattaagccatttcccagtcttcctt

SEQ ID NO: 22019 - DNA, 120 bp, synthetic construct
  source 1..120: mol_type = other DNA
atttcaactttgcaggctcagcctcagctcaaaacctggcatagttgctcaataaatctttactgattagactgtgagcttttgttgggaaaaggatatgccttttaatgctttgttcct

SEQ ID NO: 22020 - DNA, 120 bp, synthetic construct
  source 1..120: mol_type = other DNA
ctacgacaatcagctcaacaacacgtctccctttgtaagacagaataacaagcaatttcacagttaaatgatagggcttgtcactcttcagcagtttgctgagttttaaccctttcacta

SEQ ID NO: 22021 - DNA, 120 bp, synthetic construct; identical to SEQ ID NO: 6582
  source 1..120: mol_type = other DNA

SEQ ID NO: 22022 - DNA, 120 bp, synthetic construct
  source 1..120: mol_type = other DNA
ataatgaattaagagttcgataggcggcaggcacaactaaaagccaaactcgacctaagtcttatgaaatcctacttaatgagctttcttgactactgctagcctcacttatctggcagg

SEQ ID NO: 22023 - DNA, 120 bp, synthetic construct
  source 1..120: mol_type = other DNA
ggccttcactctcaccacttgctgtccctcaaaaagccgactcacccctttccaagcgcagtgaaccgtccgcaaagcacgaggccggttgcgagctgcagaaagcccacgctcgccagc

SEQ ID NO: 22024 - DNA, 120 bp, synthetic construct
  source 1..120: mol_type = other DNA
aaagaaatcattatttggcaacgtacggttttcagggggatataccccgcgactgcgttcctgtaggatgtgagacaaagagaataaatatcccaggattgggtgctggtgggaaaattt

SEQ ID NO: 22025 - DNA, 120 bp, synthetic construct; identical to SEQ ID NO: 6583
  source 1..120: mol_type = other DNA

SEQ ID NO: 22026 - DNA, 120 bp, synthetic construct
  source 1..120: mol_type = other DNA
tcgggttatatactcctaggtcctgggacagaatagttacgacctctgggacaggaactcttctctcttttgttaataaacttccaactccctcctcagacccgaccgcatgtctgtcat

SEQ ID NO: 22027 - DNA, 120 bp, synthetic construct
  source 1..120: mol_type = other DNA
gggctcaggatacggtcacctgtattcgctgtggcttcaacatcaacgttcggggtgagaggcttgtacgcaggggtcctggcggagggcgcagggtcggaagcttggggaactcaagat

SEQ ID NO: 22028 - DNA, 120 bp, synthetic construct
  source 1..120: mol_type = other DNA
aggtttccggtgtcagctctctctggttgtctccataaccagttcttacttgcctgtgcagactttgaggggaaggttgtgaagacttcggttgtgttccaccaactggggacagccatg

SEQ ID NO: 22029 - DNA, 120 bp, synthetic construct; identical to SEQ ID NO: 6584
  source 1..120: mol_type = other DNA

SEQ ID NO: 22030 - DNA, 120 bp, synthetic construct
  source 1..120: mol_type = other DNA
gaagggcaaactgtcttctacacctgtaccaactgcaagtgagtattctttcccctccctctgctcagtctgtttgctaactaaacaaatccagtgatttatttttttgtacgaaatggc

SEQ ID NO: 22031 - DNA, 120 bp, synthetic construct
  source 1..120: mol_type = other DNA
ttttaggatttttttttttttttttttttttttttgacagggtgtcgctctgtcacctagcctggagtgcagcgaggcaatcttggctcactgcaacctccgcctcctgggctcaggtaa

SEQ ID NO: 22032 - DNA, 120 bp, synthetic construct
  source 1..120: mol_type = other DNA
ttttttttgtatttttagtagagatggggtttctctatgtttcccaggctggtcttgaacttctgagctcaagtgatccacccacctcagcatcccaaagtgctgggattacaggcatga

SEQ ID NO: 22033 - DNA, 120 bp, synthetic construct; identical to SEQ ID NO: 6585
  source 1..120: mol_type = other DNA

SEQ ID NO: 22034 - DNA, 120 bp, synthetic construct
  source 1..120: mol_type = other DNA
ttatcagccatcatctcttttaatattctctttcccccatgttctcagtcctcacattctggacctcgaattagttactagaaagaggtttctctcttctgtcctccatttctctcacct

SEQ ID NO: 22035 - DNA, 120 bp, synthetic construct
  source 1..120: mol_type = other DNA
ttgttattattttgagttctatttaattacttttcaaatctccttaatttttaaataattatcagttctttaatcatattttaaattgttccttttattattctttaaatatatatttaa

SEQ ID NO: 22036 - DNA, 120 bp, synthetic construct
  source 1..120: mol_type = other DNA
ttgtgatttttgactataaattcgagttttttagaacttgaactgtaggaattctttgaggccttgggcgagtgctgtattctcagcatttgtgtttcttttctaggtgccttgaagcac

SEQ ID NO: 22037 - DNA, 120 bp, synthetic construct; identical to SEQ ID NO: 6586
  source 1..120: mol_type = other DNA

SEQ ID NO: 22038 - DNA, 120 bp, synthetic construct
  source 1..120: mol_type = other DNA
gcaccatagtgtcactgtcacgtttcatagggacattagttttaacttccctgtctggatttctggttttacagaacttttaaccagtgtgcagattgcctttactttcttgccatctca

SEQ ID NO: 22039 - DNA, 120 bp, synthetic construct
  source 1..120: mol_type = other DNA
cccagcgtgtggcttgcctattttcttaaccctctttaaatgagcagaagttttaagtttttataaggttcagcttatccttttttttttcttttacagctagtgctttctgtgtcctaa

SEQ ID NO: 22040 - DNA, 120 bp, synthetic construct
  source 1..120: mol_type = other DNA
taaaagtccttccttgattatttgattgcatatcttatcttatactactagaaactcatcttttggtgaatataacaagtcctttctttcctcataggttccaggagaaggaagactctt

SEQ ID NO: 22041 - DNA, 120 bp, synthetic construct; identical to SEQ ID NO: 6587
  source 1..120: mol_type = other DNA

SEQ ID NO: 22042 - DNA, 120 bp, synthetic construct
  source 1..120: mol_type = other DNA
agagtcaggaatgaggctaatataaacaaaaagcaattgtaagtattgccatactatttaaatctatttggttcctgagtttaggttaagaaaaactaggaatttggatagtgagacatt

SEQ ID NO: 22043 - DNA, 120 bp, synthetic construct
  source 1..120: mol_type = other DNA
caatacacagttgacccttgaacaacacaggtttgaactgcttgagtctacatatatgtggattttcttctacttctgagacccataagatagcagcacatttaagccctccttttcctc

SEQ ID NO: 22044 - DNA, 120 bp, synthetic construct
  source 1..120: mol_type = other DNA
atatgtattataagtatataatacatatacaaaatatgtgttaatcaacggtttatgttattggtaaggcatctggtcaacagtaaagttttgggggagtcaaaagttatatatggattt

SEQ ID NO: 22045 - DNA, 120 bp, synthetic construct; identical to SEQ ID NO: 6588
  source 1..120: mol_type = other DNA

SEQ ID NO: 22046 - DNA, 120 bp, synthetic construct
  source 1..120: mol_type = other DNA
aacaaatgcatactcaggtcccgcattccttggctcaaatagtgatcaaggggttactgtaataattatcatataattgtgtggccctttatatatattcagagctctcaaacatagcta

SEQ ID NO: 22047 - DNA, 120 bp, synthetic construct
  source 1..120: mol_type = other DNA
actttcctgacccactcctgaaatctgaaacaaacctgttcatgtttctaccctactttaagcctttctctggcccataacagtgattggattaagcttaatttcttagcaaagcataca

SEQ ID NO: 22048 - DNA, 120 bp, synthetic construct
  source 1..120: mol_type = other DNA
cctgtagtgcacacatctacaactttttaagctgctcttctaaaaaaacctacttgtcggccttcctggttcttgttttaccactttcttttgctctctaagaaacgtgcatatattttt

SEQ ID NO: 22049 - DNA, 120 bp, synthetic construct
  source 1..120: mol_type = other DNA
cagtatgtaactacattcagatttacaaatcagacatggcatttgttaatgccccagtgtttcatatttttgttagttttcagcatgcctgtctttcctactagagctaaaaggcagggt

SEQ ID NO: 22050 - DNA, 120 bp, synthetic construct; identical to SEQ ID NO: 6589
  source 1..120: mol_type = other DNA

SEQ ID NO: 22051 - DNA, 120 bp, synthetic construct
  source 1..120: mol_type = other DNA
cccatctgggcgcccctcctgcttcctctaggctgtgagtacgcgtgctgccccagactctccctcctccacccacacccgcagtgacaccccttccgccaaatttgtttctctttcttt

SEQ ID NO: 22052 - DNA, 120 bp, synthetic construct
  source 1..120: mol_type = other DNA
gagccggaagtggggttagccaggttatccccaggggtggagaagcggaggcccaggaggagggggaataaagaaggtggaggatcctggctaccactctgaatccgataccgcttctct

SEQ ID NO: 22053 - DNA, 120 bp, synthetic construct
  source 1..120: mol_type = other DNA
acggttaccgtgacaaccgagcccgtgagaaaggcgggggggcggtgctgtttaggggtctgggagatactgggagggaggggacagggattagaagagttgttggaggagctaggccta

SEQ ID NO: 22054 - DNA, 120 bp, synthetic construct; identical to SEQ ID NO: 6590
  source 1..120: mol_type = other DNA

SEQ ID NO: 22055 - DNA, 120 bp, synthetic construct
  source 1..120: mol_type = other DNA
agtggcaggaatgaggaaacaagaaaaggagatgaaaagaggtattttgagaaatcagagagcaaagatgtaaatggagaaacaagaagtatttatccaaaaacatgttaagttgccttc

SEQ ID NO: 22056 - DNA, 120 bp, synthetic construct
  source 1..120: mol_type = other DNA
agggagggctggagcttgagaatgagagaggttttgtttgtttttttaagagaaaaagaataggggatctggaaaaaggaagggagatcaaagattaggtgctggggactgaaaaataat

SEQ ID NO: 22057 - DNA, 120 bp, synthetic construct
  source 1..120: mol_type = other DNA
tgctgggacctttcctaggttaggaattgtgtcttctcttatactggtggtataagaacaggaaataatacttattcctcaagggactatctgaggtaaaagacctgttctgttttatct

SEQ ID NO: 22058 - DNA, 120 bp, synthetic construct
  source 1..120: mol_type = other DNA
gggaaaggttagtaagaggggactagataggtatgctcatccttaaccttctaggagaaccggagccttaccatcaaacttcggaaacggaagccagagaaaaaggtagaatggacaagt

SEQ ID NO: 22059 - DNA, 120 bp, synthetic construct; identical to SEQ ID NO: 6591
  source 1..120: mol_type = other DNA

SEQ ID NO: 22060 - DNA, 120 bp, synthetic construct
  source 1..120: mol_type = other DNA
gaattttcactgagtttgagtgggaatggaactgactatatatcttacccttcctcctctttaactgggctcctccctctaaatctaggctgctgtatttatgagaaacctcgggccttt

SEQ ID NO: 22061 - DNA, 120 bp, synthetic construct
  source 1..120: mol_type = other DNA
ccccagcctcctgacccttcccagccccctccagggccaatgcagcactaaatccctctctcctccagcattcctgtgtctgtctggccctaaatgtatccatgtggctacttctccagc

SEQ ID NO: 22062 - DNA, 120 bp, synthetic construct
  source 1..120: mol_type = other DNA
tttttcctcccaatacccacccttctctctcgagggatctaggcaccttggtcccagtgtcttccttttgttctcactgccaaactgcctgtcctgggatctagttatcttggccctgca

SEQ ID NO: 22063 - DNA, 120 bp, synthetic construct; identical to SEQ ID NO: 6592
  source 1..120: mol_type = other DNA

SEQ ID NO: 22064 - DNA, 120 bp, synthetic construct
  source 1..120: mol_type = other DNA
atggaaaatggaataagaaataatcatatcctttcttcccacccttctcctgttatttaggatttctgacaaagctggcttgagattggtcacttagagccgactgtctcctctgccttt

SEQ ID NO: 22065 - DNA, 120 bp, synthetic construct
  source 1..120: mol_type = other DNA
ttacttcctagactttgatttctccggcagcccagatgttcagttctcttggcccctctctaccccttactgggatccggttttcattttccggtccttttgccatacacagttacagag

SEQ ID NO: 22066 - DNA, 120 bp, synthetic construct
  source 1..120: mol_type = other DNA
gagactatacacaaggatgagtttggagatgtctgaagtattcccaggttgaggaggagagaggggaaatagcaccattggttcctttccgtgagtatgtgcggggagaagtttcaagaa

SEQ ID NO: 22067 - DNA, 120 bp, synthetic construct; identical to SEQ ID NO: 6593
  source 1..120: mol_type = other DNA

SEQ ID NO: 22068 - DNA, 120 bp, synthetic construct
  source 1..120: mol_type = other DNA
aggaagtactgtagtagctgtaggggagagaagattctgagagccagaaggcaggaatggatttggttttgagcagggacgtggaaacgtggagaccaggtgaggtctcattattttggg

SEQ ID NO: 22069 - DNA, 120 bp, synthetic construct
  source 1..120: mol_type = other DNA
agttggagacgagactcagctttccgctggtacaatgcggagcggagcacgagggtcgcaggtgcagaacagcgggaagatgcgctcccccagggggccaggcgcctggaaggcgtaaag

SEQ ID NO: 22070 - DNA, 120 bp, synthetic construct
  source 1..120: mol_type = other DNA
ggcccacaggcggccgccgcggccctccacggcccacacggcccccgcagggcacagccttacgcagcccttgcgttgcactgattccccggccgcgcccactgcatagtggctctcctc

SEQ ID NO: 22071 - DNA, 120 bp, synthetic construct; identical to SEQ ID NO: 6594
  source 1..120: mol_type = other DNA

SEQ ID NO: 22072 - DNA, 120 bp, synthetic construct
  source 1..120: mol_type = other DNA
caaaaggcgactgcaggaccaaaaagaaggaaggcatatgaagagcagacctgggcaatatcagaccttgtactgatgcaccacttctgtagaattggacctggggaaggatcatactgg

SEQ ID NO: 22073 - DNA, 120 bp, synthetic construct
  source 1..120: mol_type = other DNA
gcatcatctggggtggggcatgggagctgggtcagcaaaatggggaaggttcatctaaagagaaagtcgtactgatactggaacctcaagtaatgggaggggcacagggaggaatccaag

SEQ ID NO: 22074 - DNA, 120 bp, synthetic construct
  source 1..120: mol_type = other DNA
aagaaccattggccttatatgtatggggtgctttgaagaaaaatttctggattaggggtgtcagaagcaatctggactgggcaagatggtggatgaccaagatggtggaccaccttctct

SEQ ID NO: 22075 - DNA, 120 bp, synthetic construct; identical to SEQ ID NO: 6595
  source 1..120: mol_type = other DNA

SEQ ID NO: 22076 - DNA, 120 bp, synthetic construct
  source 1..120: mol_type = other DNA
ggctctaatccagattgctgacttacaaaaagaggaaatttggacacagagacaaatgcatacaaaagaaaatgtgcagacctatcacccaaagaacatgtgaggctaccagaggctagg

SEQ ID NO: 22077 - DNA, 120 bp, synthetic construct
  source 1..120: mol_type = other DNA
actttgcggtgcttcattagagcagtactaggaaactaatgcagacatcaaaaaggacctgatcactttttagggctaaaaggaagaaaatctaacacagactttcattcaattcccttc

SEQ ID NO: 22078 - DNA, 120 bp, synthetic construct
  source 1..120: mol_type = other DNA
gatgaggggaagggtcaggaaatcagccctctgatcctaatgcccccacgcataccccactcacatctctggaggaagaagggatgagactataccccagaaaacctgcctattaatggg

SEQ ID NO: 22079 - DNA, 120 bp, synthetic construct; identical to SEQ ID NO: 6596
  source 1..120: mol_type = other DNA

SEQ ID NO: 22080 - DNA, 120 bp, synthetic construct
  source 1..120: mol_type = other DNA
tttccactccccaagggttctcaattctcttttcccaggctcgtccgtgactgtttcttgtcctcagagcccttgccttccttgctgcctcctcagtcccattctctgtctctttcagcg

SEQ ID NO: 22081 - DNA, 120 bp, synthetic construct
  source 1..120: mol_type = other DNA
cttacaataaagctgcttcccctcttgcaataaaagcccagtggcatttattgggccctttgctttgtgtctctggaccctggccagggaggcagctagacttgaatgtgtcccaaaagg

SEQ ID NO: 22082 - DNA, 120 bp, synthetic construct
  source 1..120: mol_type = other DNA
atggtggagcgggggagagagaaacaatttgcataattgtgccaattactttcagactaattaggtctatgaagacttcaaagggcagaagcaagacccaagaccagcttggctgctggg

SEQ ID NO: 22083 - DNA, 120 bp, synthetic construct; identical to SEQ ID NO: 6597
  source 1..120: mol_type = other DNA

SEQ ID NO: 22084 - DNA, 120 bp, synthetic construct
  source 1..120: mol_type = other DNA
cgcccccaacccaccagcccagcctcctgctcccgctcctctaagcaggttctgccctcgcccaccatcctcccaggacccctcctcaccctcagctgggtcggctctcccttccgcccg

SEQ ID NO: 22085 - DNA, 120 bp, synthetic construct
  source 1..120: mol_type = other DNA
cccttctctgcctccccagtctcttctctccagcccctctcacaaggctcaggcatcggtccagcctcctcccctgtggaccaagtgtcaactccatccatcgtccttccgggcgcctct

SEQ ID NO: 22086 - DNA, 120 bp, synthetic construct
  source 1..120: mol_type = other DNA
aacctcccgcttccaccaacaactccgcgacgcgcgcccagcctcacctctccgggcaggtccaggcagcccatggtggggatgcgcccccctcggcgtctccccgcacgggccccaggc

SEQ ID NO: 22087 - DNA, 120 bp, synthetic construct; identical to SEQ ID NO: 6598
  source 1..120: mol_type = other DNA

SEQ ID NO: 22088 - DNA, 120 bp, synthetic construct
  source 1..120: mol_type = other DNA
ccgcccctgctgcttgctgtgtagatgcccttctctccgactcccgcattaacttttgccgctttccgcccctctcctgggattgcctctctcttcaaccagagtctcagtctcgtcaaa

SEQ ID NO: 22089 - DNA, 120 bp, synthetic construct
  source 1..120: mol_type = other DNA
gaggggagaatagcacacctggttcccagagcctaggaggcggtcactagagggcgctctggggcggggtagccctgtgtggggagggtagccccctgtgaccccccgaagagccccaat

SEQ ID NO: 22090 - DNA, 120 bp, synthetic construct
  source 1..120: mol_type = other DNA
gggctgggggccggaagcacagatcctggtttgtgtggctttggcaagcctctgagtgttgatgtgtggttttcattcctggtgcctctcgcctttccatcttccttccttacctattaa

SEQ ID NO: 22091 - DNA, 120 bp, synthetic construct; identical to SEQ ID NO: 6599
  source 1..120: mol_type = other DNA

SEQ ID NO: 22092 - DNA, 120 bp, synthetic construct
  source 1..120: mol_type = other DNA
ctaccctggtcttctgacttgtgttcttgctgtgagtcaaccctgcctttttcagttgcagatccctgggaccccctcctgcttcctgatttttttctggtgttcctttgtgccttcatt

SEQ ID NO: 22093 - DNA, 120 bp, synthetic construct
  source 1..120: mol_type = other DNA
tactcatgggggtttgtgcataagtaaacatccagatgtctacaactatgatcacccacactgttatataacatgtgtctgcatccatcagtgtccaaatgcccaaatgtgcacaaactt

SEQ ID NO: 22094 - DNA, 120 bp, synthetic construct
  source 1..120: mol_type = other DNA
tgctcaaagaaaacaggcaaagagacagatactctatcatcagttttattattaataagaataacagtataacagcagtaagtctttatggagcagcaggactttattaggcaccccctc

SEQ ID NO: 22095 - DNA, 120 bp, synthetic construct; identical to SEQ ID NO: 6600
  source 1..120: mol_type = other DNA

SEQ ID NO: 22096 - DNA, 120 bp, synthetic construct
  source 1..120: mol_type = other DNA
caaaagacgagggaatggattctctagcagaccattcagaaggaacctagcactgctgacaccttaatttttgcccagtaagacccatttcagactctgaactacagaataataaagtaa

SEQ ID NO: 22097 - DNA, 120 bp, synthetic construct
  source 1..120: mol_type = other DNA
tttctcctccagtctctgactctctgagtctgtttgcacttctgtgttgttgcaccttccagtttgtcatattttctggatgtctctgcctctcttgaccttcttttcagtctcatgtta

SEQ ID NO: 22098 - DNA, 120 bp, synthetic construct
  source 1..120: mol_type = other DNA
gagaaatgtctctgagactcctcaagaacctcaattgtcaccaatccaagtgccttgctatggccctcatgggcttgtcagcggttaacagcttcagttgcacattagaattatctggga

SEQ ID NO: 22099 - DNA, 120 bp, synthetic construct
  source 1..120: mol_type = other DNA
cttttaaaagctttccagatggttgcagtgtttagctaacaggagaaccatggtcttgaatgacggctgttcatgtgggctggtcactccattttgctccttgtgctctggctgcagtgc

SEQ ID NO: 22100 - DNA, 120 bp, synthetic construct; identical to SEQ ID NO: 6601
  source 1..120: mol_type = other DNA

SEQ ID NO: 22101 - DNA, 120 bp, synthetic construct
  source 1..120: mol_type = other DNA
tggcacacagtcagccttaataaacttaggtccagttgttgaattgctcattacactgattggacaacctgagagggtcatttgattgactctgcttagaccttcttatccttctcaacc

SEQ ID NO: 22102 - DNA, 120 bp, synthetic construct
  source 1..120: mol_type = other DNA
accagatggtgaggattcctgctaacaaagcatcagctcaacctttacgtccaggttacaatgagttcatacctaatggttccaggacaccagtaagggaaaaggcatttggagacagac

SEQ ID NO: 22103 - DNA, 120 bp, synthetic construct
  source 1..120: mol_type = other DNA
gtggatgtgattttacgtgtgtcagcttggcttggcttgatccagttgaccatgacgggatcctgtctctctgctaggatccacatcttccttccttaatgtaggtgtctcctaaataac

SEQ ID NO: 22104 - DNA, 120 bp, synthetic construct; identical to SEQ ID NO: 6602
  source 1..120: mol_type = other DNA

SEQ ID NO: 22105 - DNA, 120 bp, synthetic construct
  source 1..120: mol_type = other DNA
attactgaattagggtgtgtaagaaggcagataaagtgtatccatcatcaacctaaatctgtcattaccaaattttaaaggtgcagtgacgggggaagagtgagggaggattctgttgac

SEQ ID NO: 22106 - DNA, 120 bp, synthetic construct
  source 1..120: mol_type = other DNA
catctctggggagaaaactggattgggaaaagaagggctaggaggtaagaaatcaaaatgaaggagaccataattctttctcaattcccactcactatgcccttcccaaagattttcttc

SEQ ID NO: 22107 - DNA, 120 bp, synthetic construct
  source 1..120: mol_type = other DNA
ctctgagtaaaacttgccctgatgggggaggcagttttaggaggggtggcttgaggcagggatagaggaagaatatccagccagattaatccaatcaatcttgatactcaaatacatgac

SEQ ID NO: 22108 - DNA, 120 bp, synthetic construct; identical to SEQ ID NO: 6603
  source 1..120: mol_type = other DNA

SEQ ID NO: 22109 - DNA, 120 bp, synthetic construct
  source 1..120: mol_type = other DNA
cccatccttcaagttcatgtaggtgctcacttattctctttccttccaacaacccacctatcaatgtcactaatatttctatccatcatttaaattctcccctaaatgttcactatttgt

SEQ ID NO: 22110 - DNA, 120 bp, synthetic construct
  source 1..120: mol_type = other DNA
cccaccaactcgtcatctagcattaggtatacctcccaatgctatccctcccccctgccctcaccccacaacagtccccagagtgtgatgttccccttcctgtgtccacgtgttctcatt

SEQ ID NO: 22111 - DNA, 120 bp, synthetic construct
  source 1..120: mol_type = other DNA
ttttttatgactgcatagtattccatggtgtatatgtgccacattttcttaatccagtctatcattgttggacatttgggttggttccaagtctttgctattgtgaataatgccacaata

SEQ ID NO: 22112 - DNA, 120 bp, synthetic construct; identical to SEQ ID NO: 6604
  source 1..120: mol_type = other DNA

SEQ ID NO: 22113 - DNA, 120 bp, synthetic construct
  source 1..120: mol_type = other DNA
ttcatgtccttcgcccattttttgatggggttgtttgtttttttcttgtaaatttgtttgagttcattgtagattctggatattagccctttgtcagatgagtaggttgcgaaaattttc

SEQ ID NO: 22114 - DNA, 120 bp, synthetic construct
  source 1..120: mol_type = other DNA
ttagacatgaagtccttgcccatgcctatgtcctgaatggtaatgcctaggttttcttctagggtttttatggttttaggtctaacatttaagtctttaatccatcttgaattaattttt

SEQ ID NO: 22115 - DNA, 120 bp, synthetic construct
  source 1..120: mol_type = other DNA
aagatcagatacttgtagatatgcggccttatttctgagggctctgttctgttccattgatctatatctctgttttggcaccagtaccatgctgttttggttactgtagccttgtagtat

SEQ ID NO: 22116 - DNA, 120 bp, synthetic construct; identical to SEQ ID NO: 6605
  source 1..120: mol_type = other DNA

SEQ ID NO: 22117 - DNA, 120 bp, synthetic construct
  source 1..120: mol_type = other DNA
agttcactcatgatttggctctgtgtttgtctgttgttggtgtataagaatgcttgtgacttttgtacattgattttgtatcctgagactttgctgaagttgcttatcagcttaaggaga

SEQ ID NO: 22118 - DNA, 120 bp, synthetic construct
  source 1..120: mol_type = other DNA
ctggccagaccttccaacactatgttgaataggagtggtgagagagggcatccctgtcttgtgccagttttcaaagggaatgcttccagtttttgcccattcagtatgatattggctgtg

SEQ ID NO: 22119 - DNA, 120 bp, synthetic construct
  source 1..120: mol_type = other DNA
ataatcatgtggtttttgtctttgattctgtttatatgctggattacatttattgatttgtgtatattgaaccagccttgcatcccagggatgaagcccacttgatcatggtggataagc

SEQ ID NO: 22120 - DNA, 120 bp, synthetic construct; identical to SEQ ID NO: 6606
  source 1..120: mol_type = other DNA

SEQ ID NO: 22121 - DNA, 120 bp, synthetic construct
  source 1..120: mol_type = other DNA
gtgtatgtgtcaaggaatttatccatttcttctagattttctagtttatttgcatagaggtgtttgtagtattctctgatggtagtttctgtttctgtgggatcggtgatgatatcccct

SEQ ID NO: 22122 - DNA, 120 bp, synthetic construct
  source 1..120: mol_type = other DNA
atcctttcaaaaaaccagctcctggattcattaattttttggagggtttttttgtgtctctatttccttcaattctgctctgattttagttatttcttgccttctgctagcttttgaatg

SEQ ID NO: 22123 - DNA, 120 bp, synthetic construct
  source 1..120: mol_type = other DNA
tgcgtcccagagattctagtatgttgtatctttgttctcgttggtttcaaagaacatctttatttctgccttcatttcgttatgtacccagtagtcattcaggagcaggttgttcagttt

SEQ ID NO: 22124 - DNA, 120 bp, synthetic construct
  source 1..120: mol_type = other DNA
actttcaagtatgtggtcaattttggaataggtgtggtgtggtgctgaaaaaaatgtatattctgttgatttggggtggagagttctgtagatgtctattaggtctgcttggtgcagagc

SEQ ID NO: 22125 - DNA, 120 bp, synthetic construct; identical to SEQ ID NO: 6607
  source 1..120: mol_type = other DNA

SEQ ID NO: 22126 - DNA, 120 bp, synthetic construct
  source 1..120: mol_type = other DNA
gtctctgcacgtgaaatgggtttcctgaatacagcacactgatgggtcttgactctttatccaatttgccagtctgtgtcttttaattggagcatttagtccatttacatttaaagttaa

SEQ ID NO: 22127 - DNA, 120 bp, synthetic construct
  source 1..120: mol_type = other DNA
ctggtactggttgttcctttccatgtttagtgcttccttcaggagctcttttagggcaggcctggtggtgacaaaatctctcagcatttgcttgtctgtaaaggattttatttctccttc

SEQ ID NO: 22128 - DNA, 120 bp, synthetic construct
  source 1..120: mol_type = other DNA
tgttagtctgatgggcttccctttgagggtaacccgacctttctctctggctgttcttaacattttttccttcatttcaactttggtgaatctgacaattacgtgtcttggagttgctct

SEQ ID NO: 22129 - DNA, 120 bp, synthetic construct
  source 1..120: mol_type = other DNA
attctccccgtcactttcaggtacaccaatcagatgtagatttggtcttttcacatagtcccatatttcttggaggctttgctcgtttctttttattcctttttctctaaacttcccttc

SEQ ID NO: 22130 - DNA, 120 bp, synthetic construct; identical to SEQ ID NO: 6608
  source 1..120: mol_type = other DNA

SEQ ID NO: 22131 - DNA, 120 bp, synthetic construct
  source 1..120: mol_type = other DNA
tccagtttttctgctctgttttttccccatctttgtggttttatctacttttggtctttgacgatggtgatgtacagatggtttttttgtgtggatgtcctttctgtttgttagttttcc

SEQ ID NO: 22132 - DNA, 120 bp, synthetic construct
  source 1..120: mol_type = other DNA
cccacttgaggaggcagtctgcccgttctcagatctccagctgcgtgctgggagaaccactgctctcttcaaagctgtcagacagggacatttaagtctgcagaggttactgctgtcttt

SEQ ID NO: 22133 - DNA, 120 bp, synthetic construct
  source 1..120: mol_type = other DNA
gttcgagcttcccggctgttttgtttacctcagcaagcctgggcaatggcgggcgcccctcctccagcctcgctgccaccttgcagtttgatctcagactgctgtgctagcaatcagcga

SEQ ID NO: 22134 - DNA, 120 bp, synthetic construct; identical to SEQ ID NO: 6609
  source 1..120: mol_type = other DNA

SEQ ID NO: 22135 - DNA, 120 bp, synthetic construct
  source 1..120: mol_type = other DNA
ctcctccccccatcttctcagttttctcaaggccttcttgttctccaagcccttagcagtttccatttttttttttttgtttgtttgtttgtttgtgacagagtctcgctctgtcaccag

SEQ ID NO: 22136 - DNA, 120 bp, synthetic construct
  source 1..120: mol_type = other DNA
aatttttgtatttttagtagagatggggttttgtcatgtttgccaggctggtcttgaactccttacctcaggtgatctgcctgcttcagcctaccaaagtgctaggattacaggtgtgag

SEQ ID NO: 22137 - DNA, 120 bp, synthetic construct
  source 1..120: mol_type = other DNA
ggaagagtggagagcaagccagccatagtcccttgtcctctggtaatttagattccattgaaaaaggccaacaataagcaagtaaacaaataaattaacaagataattatagattgtgat

SEQ ID NO: 22138 - DNA, 120 bp, synthetic construct; identical to SEQ ID NO: 6610
  source 1..120: mol_type = other DNA

SEQ ID NO: 22139 - DNA, 120 bp, synthetic construct
  source 1..120: mol_type = other DNA
aagtgtgatatttacgtggtctaatggattgattgattgattgattgattgtagagatgggatccggctgtgttgcccaggctgatctcaagctcctggcttcaatcaatcctcccactt

SEQ ID NO: 22140 - DNA, 120 bp, synthetic construct
  source 1..120: mol_type = other DNA
cctattccccttcacattatttacattcaagacgatcatctcatttccatgtccacttccccatcggggagaataggtcttccaaacaaggtatttattaacctgtacaaggatcgctag

SEQ ID NO: 22141 - DNA, 120 bp, synthetic construct
  source 1..120: mol_type = other DNA
ttacaacatggataagaaaattgattcccagagagatgatcttgctggtgtgtaagtagggaaaactttcggatcctcatctgtcaagaatgcaggagcaggttccttcctgtcttttag

SEQ ID NO: 22142 - DNA, 120 bp, synthetic construct
  source 1..120: mol_type = other DNA
ggccaacatggtgaaaccccgtctctactaaaaatacaaaagttagctgggcatggtggcacatgatgtagtcacagctacttaggaggctgaggcaggagaattgcttgaactcaggag

SEQ ID NO: 22143 - DNA, 120 bp, synthetic construct; identical to SEQ ID NO: 6611
  source 1..120: mol_type = other DNA

SEQ ID NO: 22144 - DNA, 120 bp, synthetic construct
  source 1..120: mol_type = other DNA
ttaattcatgtccagaatcctagctccaaaaattctgagaaatagagttttttacttttcaatctcttcaatagaaaggaaatgaggtcattccatatatgtaggtttggcagataaaat

SEQ ID NO: 22145 - DNA, 120 bp, synthetic construct
  source 1..120: mol_type = other DNA
agatttaaatggacatcctgtacttttatttgataaatctgacattttgacaaatctccagcacagagactgagagcagaagtccttaatttagatgggggacattgaggaaggcccatc

SEQ ID NO: 22146 - DNA, 120 bp, synthetic construct
  source 1..120: mol_type = other DNA
gcacaggtaacagctttgcaacagcctagaggcaagaacaatttgggctaatttaagcaaagttgacacatgatgagttaggagtaaagatggcacaagataataatgaagacgtaggca

SEQ ID NO: 22147 - DNA, 120 bp, synthetic construct
  source 1..120: mol_type = other DNA
aagagagaaaactatgccagtaatttaggtgagaaaggatgatggcttgagatagtgggatccagtggagctgaaaatgagcaggccaatttgaagtgtattttgtagatagaattgaca

SEQ ID NO: 22148 - DNA, 120 bp, synthetic construct; identical to SEQ ID NO: 6612
  source 1..120: mol_type = other DNA

SEQ ID NO: 22149 - DNA, 120 bp, synthetic construct
  source 1..120: mol_type = other DNA
ctgtcctttctttctgttctgtagtcatcctatttccttgacagaatcgaagcctcagccagtgagatagatggagtgtaggcagctagaaatggaaaggattcctgtgcttctgtgatt

SEQ ID NO: 22150 - DNA, 120 bp, synthetic construct
  source 1..120: mol_type = other DNA
gagcaggtatcatcctccagcaaatgggcaatccattagtccaaactcctcattttaaaattgaaaaaactgaagcctttgcccattttgactaaaccagataagaaattatacagtatg

SEQ ID NO: 22151 - DNA, 120 bp, synthetic construct
  source 1..120: mol_type = other DNA
gtaatttatacttattcgttcaaaagtacttattaaggacctactatgtgcagatacagtgttgaaagctagggactcagtggagatcaacacagacaggaacctggcctcatgggaatt

SEQ ID NO: 22152 - DNA, 120 bp, synthetic construct; identical to SEQ ID NO: 6613
  source 1..120: mol_type = other DNA

SEQ ID NO: 22153 - DNA, 120 bp, synthetic construct
  source 1..120: mol_type = other DNA
actcatcatgcgtcaactttgcttaaattagcccaaattgttcttgcctctaggttgatgcaaagctgttacctgtgcctgggatgcccttctctcctctctgagcatgatgatctctta

SEQ ID NO: 22154 - DNA, 120 bp, synthetic construct
  source 1..120: mol_type = other DNA
ttgaaggtggtaagagaagtcgtcaagtgcttatctgaaggaaggatcatccagatgaaaggaaaggcagaggcaaaggctgtgatgctgaagctgctgatgtgtttgagatttaacatg

SEQ ID NO: 22155 - DNA, 120 bp, synthetic construct
  source 1..120: mol_type = other DNA
cctaccaggggttggagttggtgggaaggggctgacttctggacgtgagttactgcattggttgtggagtgtgagagcaaaggaggaggcaggaagctctaacgaatttggccccaccat

SEQ ID NO: 22156 - DNA, 120 bp, synthetic construct; identical to SEQ ID NO: 6614
  source 1..120: mol_type = other DNA

SEQ ID NO: 22157 - DNA, 120 bp, synthetic construct
  source 1..120: mol_type = other DNA
tgcttcctccccaacagtattagaacaccaactcccaggagcacagagacttgaagagagtgtccgggtcgtggactatgagtcagagaaaccaagccaggggcatgcaaggcagcacga

SEQ ID NO: 22158 - DNA, 120 bp, synthetic construct
  source 1..120: mol_type = other DNA
gactctccctccctcccttccttcctctcctctggtgaccagtagctaaaacatcactggcacgctgctggcatccagcctgccaattagttcaggagccactccctctgactgcctcct

SEQ ID NO: 22159 - DNA, 120 bp, synthetic construct
  source 1..120: mol_type = other DNA
catccagcccctccctgcgcagaacatggcatctcgtgcccttttatctgccatttctggccacctttgcaagcgtccttgaaaccagcgcttggtagagttatccacgcccatgtgagg

SEQ ID NO: 22160 - DNA, 120 bp, synthetic construct; identical to SEQ ID NO: 6615
  source 1..120: mol_type = other DNA

SEQ ID NO: 22161 - DNA, 120 bp, synthetic construct
  source 1..120: mol_type = other DNA
ctgtctctactaaaaatacaaaattagctgggtatggtggtgcatgtctgtaatcccagctactcagtgaggctgaggcaggagaatcgcttgaacccgggaggcggaggttgtggtgag

SEQ ID NO: 22162 - DNA, 120 bp, synthetic construct
  source 1..120: mol_type = other DNA
ggagagacatgatcttacagaacgggctggacctggggagaggattttgtcagaactatggaaagtttgaaatgaggttgaagaaggagtgatggtaatactttttacatttttagaaca

SEQ ID NO: 22163 - DNA, 120 bp, synthetic construct
  source 1..120: mol_type = other DNA
aaggtacattctcctctataccacagagcacctcttctgtgtgtggcatattacatagaaaaatgagattagacatttagaagttgaggattctcatcccgcaaacacttatggggcact

SEQ ID NO: 22164 - DNA, 120 bp, synthetic construct; identical to SEQ ID NO: 6616
  source 1..120: mol_type = other DNA

SEQ ID NO: 22165 - DNA, 120 bp, synthetic construct
  source 1..120: mol_type = other DNA
gagttgagatccacaaaagagggatgtgtagggagctggatggaaaagctaaagaaataatggggagaatagtgatattaattaaatttgtgatctgtttaaaaccattgcatagggcaa

SEQ ID NO: 22166 - DNA, 120 bp, synthetic construct
  source 1..120: mol_type = other DNA
atactaaatgtttttaaaaggcacaatgcatagctgtaataacagttgaggaggaatcttacaactacagtgttaaaggagacaaagggtgtttcttcattatgttgcggtgatggaaac

SEQ ID NO: 22167 - DNA, 120 bp, synthetic construct
  source 1..120: mol_type = other DNA
gggttgacatgagaagatctataagatcgtggttaaaagaaaaagtcagtgcagaacattatgtactataaattatgacccatagtaaagaaacacatacaggggaagggttttggtcag

SEQ ID NO: 22168 - DNA, 120 bp, synthetic construct; identical to SEQ ID NO: 6617
  source 1..120: mol_type = other DNA

SEQ ID NO: 22169 - DNA, 120 bp, synthetic construct
  source 1..120: mol_type = other DNA
actgggctgaggaaatgagtgggtgacagatcttcacatggctggtagggggaaaaaaaaggaacacagaacacaattagattattttcaggattttcatcgcagttatatatgcaaata

SEQ ID NO: 22170 - DNA, 120 bp, synthetic construct
  source 1..120: mol_type = other DNA
atattattactatttgctcttctaattttaggcattatctattattgatttgctgttatcaaagatatagctttttcttgtaaccacaacctcacttgatcccacaaacacatatcctca

SEQ ID NO: 22171 - DNA, 120 bp, synthetic construct
  source 1..120: mol_type = other DNA
tatgtgtataaaacacagatatgtaaatacacacaaacatgtcctgaaggatcaaatcaaactaggattcaggaagatcatagctaaagaagactttcggcttgcacggtggctcacacc

SEQ ID NO: 22172 - DNA, 120 bp, synthetic construct
  source 1..120: mol_type = other DNA
aaaaccccatctctactaaaagtacaaaaaattagctgggtgtggtggtgggcacctgtaatcccagctacctaagagactgaggcaagagaagcccttgaacccgggaggctgaggttg

SEQ ID NO: 22173 - DNA, 120 bp, synthetic construct; identical to SEQ ID NO: 6618
  source 1..120: mol_type = other DNA

SEQ ID NO: 22174 - DNA, 120 bp, synthetic construct
  source 1..120: mol_type = other DNA
agacagaagcaccagactgaaggaaaaaagatcacagccccatatccttagagagtatcagagacctcagatgccaggcatctgccatgctgttgttttactctgcagtgagtcactgga

SEQ ID NO: 22175 - DNA, 120 bp, synthetic construct
  source 1..120: mol_type = other DNA
acaaagaattcatatctaataggttttcctcagggctcagatgagtaggtttgggagttactgggaggctgtgataccaggcaggatgacaaacaaaaacagtcagccaagaaaacaagc

SEQ ID NO: 22176 - DNA, 120 bp, synthetic construct
  source 1..120: mol_type = other DNA
tggggtgtgtgactgcgggaggctgaaagtgtcagcactgtgacctggaaatatatgcctggattggggaggtggacaccttggaaataaactccagacttcctctatttgaaaaatttt

SEQ ID NO: 22177 - DNA, 120 bp, synthetic construct; identical to SEQ ID NO: 6619
  source 1..120: mol_type = other DNA

SEQ ID NO: 22178 - DNA, 120 bp, synthetic construct
  source 1..120: mol_type = other DNA
tttttgcattgaactggattctgcacatatctatacacatgctccaatcccactaattcatcttttttcccaatgcccaacctaaacactgagagaaaaaaaaagagcagcctctgacat

SEQ ID NO: 22179 - DNA, 120 bp, synthetic construct
  source 1..120: mol_type = other DNA
aagtttactcctagaccttgataaagtgagacaatgcaaggctgcttcacaagtttttctgagcacagatccaaaaaaagacactgtgccacccacaaaataccaaacaccccttctctt

SEQ ID NO: 22180 - DNA, 120 bp, synthetic construct
  source 1..120: mol_type = other DNA
tatttgggtattcattcacaggatctgctctgctttctaacagcattaatccagagcaaacccccacttccttagacctttccccaaatcacctaaccaaaacccaaaccctatcatagg

SEQ ID NO: 22181 - DNA, 120 bp, synthetic construct
  source 1..120: mol_type = other DNA
agcatgtttaatgacagttatgttcctggggggtctttggctggaaaacacgggtaacagtgttctttgcttccttcttaactctctgggatctacattgaagacctggccccatgttgt

SEQ ID NO: 22182 - DNA, 120 bp, synthetic construct; identical to SEQ ID NO: 6620
  source 1..120: mol_type = other DNA

SEQ ID NO: 22183 - DNA, 120 bp, synthetic construct
  source 1..120: mol_type = other DNA
agctaagaagaaggaacaatgaaagagggtcagggagatgtaaacagtgtggtgagtggggaattttaggcaatttggcctttctggagtgaaaaatgggaagcaggtgggggcaggggt

SEQ ID NO: 22184 - DNA, 120 bp, synthetic construct
  source 1..120: mol_type = other DNA
tgcaacttactttaaaatgcataaaattataagatggatagaaggatgaaggaatgggtcgatggaaacatatttgataaagcaagtacagtaaaatgctaatgagaaaatgtaggtggt

SEQ ID NO: 22185 - DNA, 120 bp, synthetic construct
  source 1..120: mol_type = other DNA
ctttggcctgggtaatggaagatggattgggcagaataagtctggaggcagggaaatgagaaaggcagctgtcataatccaggtgagggctgatctagacagtgctaggaggaagatggg

SEQ ID NO: 22186 - DNA, 120 bp, synthetic construct; identical to SEQ ID NO: 6621
  source 1..120: mol_type = other DNA

SEQ ID NO: 22187 - DNA, 120 bp, synthetic construct
  source 1..120: mol_type = other DNA
cagctcttccaccctcctaatgacttctccactcctgccatgctttttcctcttttagcttttgaaaaccatctttctcctttctctggttttccaagccagatactcaaatttgaccct

SEQ ID NO: 22188 - DNA, 120 bp, synthetic construct
  source 1..120: mol_type = other DNA
tcctgtgggtgacagattatggagttgtgggttgaattttgtctgccaaggacatattgaagtcctagccccaggtacctacgtatgtggctttattcaaaaatagggtcttggccagat

SEQ ID NO: 22189 - DNA, 120 bp, synthetic construct
  source 1..120: mol_type = other DNA
aaaaattagccaggcatggtgctgtgtgcctgtagtcccacatgctgtgtgcctgtagtcccacctactcgggaggctgatgtgggaagatcacttgagccagtgaggtggaggttgcag

SEQ ID NO: 22190 - DNA, 120 bp, synthetic construct; identical to SEQ ID NO: 6622
  source 1..120: mol_type = other DNA

SEQ ID NO: 22191 - DNA, 120 bp, synthetic construct
  source 1..120: mol_type = other DNA
agccaaagaatgccacggattgccagcaaacaccaggagctagaagaggcaatgaagcattttttcctagagcctttggagagagcatggctctgctgacaccttgacttcagacttctt

SEQ ID NO: 22192 - DNA, 120 bp, synthetic construct
  source 1..120: mol_type = other DNA
acgtgtgtgtgtgtccgtctgtgtagggaaataccgtggaaagttactatttgttatagccattttatcatatattttatgagattttatcttttcaagtcaactttgcatgtgctttgt

SEQ ID NO: 22193 - DNA, 120 bp, synthetic construct
  source 1..120: mol_type = other DNA
gttcaacattgtaaacatgctgttagtagtatcataactgtgtgaagaagcagaaaacactttggactgggggatggaaatcttggccagggttcagtattcacttgacttcccggccat

SEQ ID NO: 22194 - DNA, 120 bp, synthetic construct
  source 1..120: mol_type = other DNA
cggctgagaagagtgtgatcatcgtttaaggttaaggtccaggttggaagacctccccaaatttaaaccttgctacaaagtattctttcatttactttgaacccttccttcatttacatc

SEQ ID NO: 22195 - DNA, 120 bp, synthetic construct; identical to SEQ ID NO: 6623
  source 1..120: mol_type = other DNA

SEQ ID NO: 22196 - DNA, 120 bp, synthetic construct
  source 1..120: mol_type = other DNA
ggaggtgaggtggagctggtccacgaaaattgagtgggatttccaagacatcagtctttcgcgggaaaagagaaattagggcatggttttaatttagtaaatatttattaatcaagtacc

SEQ ID NO: 22197 - DNA, 120 bp, synthetic construct
  source 1..120: mol_type = other DNA
aggaaacaaggtaaaaggcgcgaagtccatgaccatgacgagggctgtgagaactgtaaatagggatttgggcagtcccggctgattctgaataaaagtccggaggggcgttactttcgg

SEQ ID NO: 22198 - DNA, 120 bp, synthetic construct
  source 1..120: mol_type = other DNA
gctgactgagcgcccctggaatccgtgctccgggcgttggctcactcccgccccgacacctgggcccgccctcccgctgcgcagccacgcgccgggcagcagcgtgggctggcgggcgac

SEQ ID NO: 22199 - DNA, 120 bp, synthetic construct; identical to SEQ ID NO: 6624
  source 1..120: mol_type = other DNA

SEQ ID NO: 22200 - DNA, 120 bp, synthetic construct
  source 1..120: mol_type = other DNA
attaattttggtttctgagtattacgaagaactagaaaagttttgcgtatgtcggttttcaggatggggttcagatgggtcaaagccctgtgcaggtccacgggggctgcaggaggtaaa

SEQ ID NO: 22201 - DNA, 120 bp, synthetic construct
  source 1..120: mol_type = other DNA
ttcgtttccagtcttatcctgttaccaactgtgctgcaatgaacagccttgtgtatagccttttagtgtatttgagcctttcttttcgacccaggcatattgtaaggagagaggaactga

SEQ ID NO: 22202 - DNA, 120 bp, synthetic construct
  source 1..120: mol_type = other DNA
acatcccaaactggggcgagaagcgagtgaggaggagatgcagaggaaggcaaagaacaactctagcgacccagggtgatccgggtgccggaaaacagaagctggaaaaaggagatctgc

SEQ ID NO: 22203 - DNA, 120 bp, synthetic construct; identical to SEQ ID NO: 6625
  source 1..120: mol_type = other DNA

SEQ ID NO: 22204 - DNA, 120 bp, synthetic construct
  source 1..120: mol_type = other DNA
ccgcttctgcgaaccgccctgggatgcgaggttcagcgtcactatctcatcctgggaaaggatgagatccgggtgggccgaggctgcgtccagtgtcacaggggctgtgtgaagatgagg

SEQ ID NO: 22205 - DNA, 120 bp, synthetic construct
  source 1..120: mol_type = other DNA
ctttgtggtccccagagaagtcttaggcccggcaccgcctcctcctcctcaaagttaatccctaaatttcacaatgtgttgttctgtgggcgcagagagaagttcttcattggtggtggt

SEQ ID NO: 22206 - DNA, 120 bp, synthetic construct
  source 1..120: mol_type = other DNA
acaagaattgagtctagtataagagggtcaaggctcagactttctgagggccagtaattttctaaagtggagttcctcaaacacagggatgagtgaaagtgttggaatacaaaaggagga

SEQ ID NO: 22207 - DNA, 120 bp, synthetic construct; identical to SEQ ID NO: 6626
  source 1..120: mol_type = other DNA

SEQ ID NO: 22208 - DNA, 120 bp, synthetic construct
  source 1..120: mol_type = other DNA
ggggactgctgcagggacttcctttttccactaggcggcaccacagccaaagtgataagaagtcaagcgtggggcgggtggctggagattgtctcttcccctccttttgctcaagaattc

SEQ ID NO: 22209 - DNA, 120 bp, synthetic construct
  source 1..120: mol_type = other DNA
actccttcgacccaattccactaagtcaagaaccgtggtcggtctcagccactcactcagcgccactctatgctccgaagtccgtgtagcaccaccgctccccgtgttctctgagctggc

SEQ ID NO: 22210 - DNA, 120 bp, synthetic construct
  source 1..120: mol_type = other DNA
ttgaccagaaatctcatcataagaggccaggagacatactggaaaagtgactttcccagcagacgaggcccgaaacagggagtgggatggggctgaagagtggtgatttggtggccccga

SEQ ID NO: 22211 - DNA, 120 bp, synthetic construct; identical to SEQ ID NO: 6627
  source 1..120: mol_type = other DNA

SEQ ID NO: 22212 - DNA, 120 bp, synthetic construct
  source 1..120: mol_type = other DNA
cattttatgattatttttctgtaacaagccccctaaaaattggggagagaaaacctatttggtcttgataaccagaagctgcaaattaaaaacaaaaacaagcaccctgccatcatcaat

SEQ ID NO: 22213 - DNA, 120 bp, synthetic construct
  source 1..120: mol_type = other DNA
gggcctgggatactaagcatttaacagggcaaaagtcatggagcataacaaagatggcctttctaaacaccggtagctccttttgtggagaaatgctggtggaataggatccctaaatcc

SEQ ID NO: 22214 - DNA, 120 bp, synthetic construct
  source 1..120: mol_type = other DNA
catggacctcactgtaagttgcagataataacacctatcttggaggatagttgtggggttttgaaatattagatgcgcacatagtggtcctttaagaaatggtacttctactgttattgt

SEQ ID NO: 22215 - DNA, 120 bp, synthetic construct; identical to SEQ ID NO: 6628
  source 1..120: mol_type = other DNA

SEQ ID NO: 22216 - DNA, 120 bp, synthetic construct
  source 1..120: mol_type = other DNA
ggaatcggcattcacttatatctggccttcatgtaatcatagagacacaattcttccccttttctcactttccccaaatggcagaagcaaccaaccatcatttctcacttacagctcttc

SEQ ID NO: 22217 - DNA, 120 bp, synthetic construct
  source 1..120: mol_type = other DNA
aatgggatgaaatggtgagagtccagaggggttgagcaaagaactcactatcacacagcaaggcactaatttgaaatgcctgggagaagtagaagctgcatttgactctcatattcttat

SEQ ID NO: 22218 - DNA, 120 bp, synthetic construct
  source 1..120: mol_type = other DNA
ttatatatttttaaattttctagtagtcacatttaaaaagtagaaagaaactagtaaaattaactttaattatatattttatttaactcaatattctcaaaatgttatttcaacatgtat

SEQ ID NO: 22219 - DNA, 120 bp, synthetic construct; identical to SEQ ID NO: 6629
  source 1..120: mol_type = other DNA

SEQ ID NO: 22220 - DNA, 120 bp, synthetic construct
  source 1..120: mol_type = other DNA
cagagctcctgcaaggggaggccgagtgccttcatctcccagttcacccctgccagaagagactccttttgcaggtagaggatgagcccagaagctggggacaatggcccattcctggcc

SEQ ID NO: 22221 - DNA, 120 bp, synthetic construct
  source 1..120: mol_type = other DNA
gacagcctggggctaggtagtgggacaagcgtgggtagcttccctgagagccaccagcccagtcatggggactgctcaggggagacgcgggggccctcttaggaggggtctgcaaaccta

SEQ ID NO: 22222 - DNA, 120 bp, synthetic construct
  source 1..120: mol_type = other DNA
caaccctcataataagaactgtggagattggacctgtggtataagtagactccctaccacctcctgtatttcctaggctttaatagggccaggtggccattgtgccttcttctttggggt

SEQ ID NO: 22223 - DNA, 120 bp, synthetic construct; identical to SEQ ID NO: 6630
  source 1..120: mol_type = other DNA

SEQ ID NO: 22224 - DNA, 120 bp, synthetic construct
  source 1..120: mol_type = other DNA
taaaaatacaaaaaactagctgggcatggtggtgtgcgcctgtaacaccagcgacttgggaagctgaggcaggagaatcgcttgaaaccagaaggcggaggttgcagtgagccgagattg

SEQ ID NO: 22225 - DNA, 120 bp, synthetic construct
  source 1..120: mol_type = other DNA
tagacaaagcagagcagttagtggacaaaagaaaagctcagacaacaaaattaagaataaaacaaaacatgctttcctgtttatgtctgccgagtggagattcccggctgaatgggtgga

SEQ ID NO: 22226 - DNA, 120 bp, synthetic construct
  source 1..120: mol_type = other DNA
agattccatctagctgtctttatgcccaccttagaccaacacagtcttcacattaaggggagtccttacaaatactaacccttcttcctagttgcaaacacagaaaggtttatgaaaaat

SEQ ID NO: 22227 - DNA, 120 bp, synthetic construct; identical to SEQ ID NO: 6631
  source 1..120: mol_type = other DNA

SEQ ID NO: 22228 - DNA, 120 bp, synthetic construct
  source 1..120: mol_type = other DNA
catatcacaaagacagaatataagaaatgcctgggaggaggcatactgatgcgtggaaagtactcagccagaagcctggcactagaagggcccagggattgttggcatgtatgagtcaca

SEQ ID NO: 22229 - DNA, 120 bp, synthetic construct
  source 1..120: mol_type = other DNA
ttttgcttcactgagttttttctccagttccagaggaacaggggttgggttgagaaactgaaactcttcacttctaggaagatgtggttgagctggttggtgagatcaggggatgaggtg

SEQ ID NO: 22230 - DNA, 120 bp, synthetic construct
  source 1..120: mol_type = other DNA
atcacctgaggtcaggagttcaagactagcctggccaacatggtaaaacctggtctctactaaaaatatgaaaattagccaggcttggtggcaagcgcctgtagtctcagctacttggga

SEQ ID NO: 22231 - DNA, 120 bp, synthetic construct; identical to SEQ ID NO: 6632
  source 1..120: mol_type = other DNA

SEQ ID NO: 22232 - DNA, 120 bp, synthetic construct
  source 1..120: mol_type = other DNA
gctgagaaaacagctggtttctttaacaaccaaccacgtgctaatatggttggcataggcattccccggctgcagcctaaatgtatgaatgcagagttagaggtgggtgggtatttctga

SEQ ID NO: 22233 - DNA, 120 bp, synthetic construct
  source 1..120: mol_type = other DNA
agaaagagaaacagcacagcctcagcacttggctgattcccaggagccaaggaggagatacagagcctgctgggtgtggggcagagcaggaggagtaagaacccctccaagtctctctta

SEQ ID NO: 22234 - DNA, 120 bp, synthetic construct
  source 1..120: mol_type = other DNA
tagaagatgaatttggctctgagactgaacaagggagcctgctagccagggcaggagaaaggctagaatggctttgcatgatctttcttaaaataaataaataggtttttgaacctgtgg

SEQ ID NO: 22235 - DNA, 120 bp, synthetic construct; identical to SEQ ID NO: 6633
  source 1..120: mol_type = other DNA

SEQ ID NO: 22236 - DNA, 120 bp, synthetic construct
  source 1..120: mol_type = other DNA
gacttgggcctaggaggcggaagttgtagtgcgccaaaatcgcgccactgtactccagcctgggcaacagagcaagattccatctcaaaaaataaaataaaataaatagaagaagggtaa

SEQ ID NO: 22237 - DNA, 120 bp, synthetic construct
  source 1..120: mol_type = other DNA
aagactcagtgtaaaaaaaaaaaaaaaaaaaaccaccaaaaacccagaatgtgaaatatctcattaatacttttaaaatattcattacaggctgaaaggataatatttcagatatattga

SEQ ID NO: 22238 - DNA, 120 bp, synthetic construct
  source 1..120: mol_type = other DNA
atatttatgaattacatatgtggctcacattttcattctaatacatgcggctcacatattgctattggacagcactgggctagaggtaggatggttggggcaatctcaggtattctgcca

SEQ ID NO: 22239 - DNA, 120 bp, synthetic construct; identical to SEQ ID NO: 6634
  source 1..120: mol_type = other DNA

SEQ ID NO: 22240 - DNA, 120 bp, synthetic construct
  source 1..120: mol_type = other DNA
actttattcagccattaattttattaagtttgtgtggaattcccaaccagagcaatgtgccagggcagacctggaagaaaggaaaggagaggagaacaaacttctaaaagcacctactac

SEQ ID NO: 22241 - DNA, 120 bp, synthetic construct
  source 1..120: mol_type = other DNA
acttgccttcaaggaactgtctaatacaattccagaaggcttttcagtttataatctttcatatagattttattcctttcacgcacacaggaaaataggtaagtggggtcacaatgtctt

SEQ ID NO: 22242 - DNA, 120 bp, synthetic construct
  source 1..120: mol_type = other DNA
tactttcacctcccagcctctctagtagctgggactacaggcgtgtgctaccacgcccggctagttttctttctttttttttttaattaagaggagagtctcgctatgttgcccaggctg

SEQ ID NO: 22243 - DNA, 120 bp, synthetic construct; identical to SEQ ID NO: 6635
  source 1..120: mol_type = other DNA

SEQ ID NO: 22244 - DNA, 120 bp, synthetic construct
  source 1..120: mol_type = other DNA
ttccagagatcgtgggatggagtttttcttaccgtgaagacatcgaccctgtgtacaccttgtgccttcacttgtactgtctccttctccttttgctgcaagacttggatctgctcttga

SEQ ID NO: 22245 - DNA, 120 bp, synthetic construct
  source 1..120: mol_type = other DNA
ttattaaggactcgcctttctcaagctggcggggaaaggggttgctgagaagggagaaatctggagcctaagtgacctaaatgaccagaacatagttatttatgactaactaggactatg

SEQ ID NO: 22246 - DNA, 120 bp, synthetic construct
  source 1..120: mol_type = other DNA
taaagtgattccttgcaggttgtacagtaaactcacaagactgggcttgagcccaaaccttctgagtcaaattttcacatcctttccattctccattgcaccttgatttagagagtcagc

SEQ ID NO: 22247 - DNA, 120 bp, synthetic construct; identical to SEQ ID NO: 6636
  source 1..120: mol_type = other DNA

SEQ ID NO: 22248 - DNA, 120 bp, synthetic construct
  source 1..120: mol_type = other DNA
ttctccaccagattccgcaacagcgagttgaacctgattgcgttcttccttacggaagttttgcagaggggacatttgaaaaatccacatgatgtttccccaatctgagtgatgcatttg

SEQ ID NO: 22249 - DNA, 120 bp, synthetic construct
  source 1..120: mol_type = other DNA
cagggctgtttcaagactgtaggaagctgtgccaagtctgtaggagccccggagtccactgtggatactgtttctaggaagggagaagggagtcagagaaagtggaggtcagagattctg

SEQ ID NO: 22250 - DNA, 120 bp, synthetic construct
  source 1..120: mol_type = other DNA
agtcctaccttgctacctcttgagaacaaatggatactttgaatgtgtaataggctgcttataaagtgaaataagttgtcctgaactttggactaaaggtatgtttgtatggtggttgac

SEQ ID NO: 22251 - DNA, 120 bp, synthetic construct; identical to SEQ ID NO: 6637
  source 1..120: mol_type = other DNA

SEQ ID NO: 22252 - DNA, 120 bp, synthetic construct
  source 1..120: mol_type = other DNA
ttcctttctaaagagttgttctttgtttttgcactttgctcttgcccctggtgatcttctgtctccccacaacacctgtagtagtctgtcctctgttgattttttctctgtatgtctcca

SEQ ID NO: 22253 - DNA, 120 bp, synthetic construct
  source 1..120: mol_type = other DNA
tgatccctgacttgccttctatggcttttgttatgactaggaatatatcaaccagtgttacatacattcccttctgtacattcatgtcctaaccttccctccttgcctcttgtcttaagg

SEQ ID NO: 22254 - DNA, 120 bp, synthetic construct
  source 1..120: mol_type = other DNA
ccccagcaagaagtacaccattaatttttgtctgatcttaatcttaggtcaaacagggcttgtggatgattattataataatagccagagtgatcatacactctgctttgcctggaacca

SEQ ID NO: 22255 - DNA, 120 bp, synthetic construct
  source 1..120: mol_type = other DNA
ctttcagaaatgttatacctccagacctttctttttgtttgttttagggttaaattaaaacagtctaacatctgtaaattgttttacttacactcctaaactgctggcccctagaagcag

SEQ ID NO: 22256 - DNA, 120 bp, synthetic construct; identical to SEQ ID NO: 6638
  source 1..120: mol_type = other DNA

SEQ ID NO: 22257 - DNA, 120 bp, synthetic construct
  source 1..120: mol_type = other DNA
tggtggagcctgatgattgacatcttaagcaaattctctggagaagtcgatgctcctgatggaggctcacacattgataacccctggtttagagacactactaattgttccagctcatcc

SEQ ID NO: 22258 - DNA, 120 bp, synthetic construct
  source 1..120: mol_type = other DNA
aaatattttaaaagaacattggtatttcaatgaagctgggcaacccagcagagagaatgaaaatactcatatgaacaccactggagagtttcaaagaactgtcaccaaacaggtactgat

SEQ ID NO: 22259 - DNA, 120 bp, synthetic construct
  source 1..120: mol_type = other DNA
gatatatatatacatatattttttttctttcttctttcttttttttttttttgagacagagtttcactattattgcccagactggagtgcaatggcgtgatctcggttcactacaacctc

SEQ ID NO: 22260 - DNA, 120 bp, synthetic construct
  source 1..120: mol_type = other DNA
aattttttgtatttttaatagagacggggtttcaccacgttggccaggctggtcttgaactcctgacctcagatgacccacctgcctcagcctcccaaagtgctgggattacaggcgtga

SEQ ID NO: 22261 - DNA, 120 bp, synthetic construct; identical to SEQ ID NO: 6639
  source 1..120: mol_type = other DNA

SEQ ID NO: 22262 - DNA, 120 bp, synthetic construct
  source 1..120: mol_type = other DNA
aatgttacataagcctccctgcatcacgattccagctacagaagcttcccctgcctcaggattcacatttccgggcctatgtgaattggtagaatgtctatggaggaaaataatgtgata

SEQ ID NO: 22263 - DNA, 120 bp, synthetic construct
  source 1..120: mol_type = other DNA
gcaaaatattagaaaacaatctaaatgtacatcagtatggaaatgtttaaataaattatagcccagctttataacagaatagaaataaaaaagaatcagggagttccttatttacatatg

SEQ ID NO: 22264 - DNA, 120 bp, synthetic construct
  source 1..120: mol_type = other DNA
ataagttctttctggaaggataagaatttaataactaacaatggttgtctctaaggagagggactgactagccagggaacaggggtggaagagaggcttttctttgtatgacatattaca

SEQ ID NO: 22265 - DNA, 120 bp, synthetic construct; identical to SEQ ID NO: 6640
  source 1..120: mol_type = other DNA

SEQ ID NO: 22266 - DNA, 120 bp, synthetic construct
  source 1..120: mol_type = other DNA
ggcatggtggcacacacctatagtcccagcttcttggaaggctgatgcaggaggattgcatgaacctgcgagatcgaggctgcagtgagccgtgatcatgccactgcactttagccgccc

SEQ ID NO: 22267 - DNA, 120 bp, synthetic construct
  source 1..120: mol_type = other DNA
atcttaagtttaagtctggaatatcaaatatagccaaggacatggagaaataggtactcctataccctactggtgagagtataaattacaataatttaaaaatatttagtagaatttaaa

SEQ ID NO: 22268 - DNA, 120 bp, synthetic construct
  source 1..120: mol_type = other DNA
tttgcgtattaactcatttatatagagaagtattattattcccattttgaggacaagtcaacggagatcaagagagattaagcaatttgccccaaaggtcattcagtaagtaaatagtgg

SEQ ID NO: 22269 - DNA, 120 bp, synthetic construct
  source 1..120: mol_type = other DNA
tgggtgcggtggctcccgcctgtaatcccagcactttgggaggctgaggcgggcggatcacgaggtcaggagatcaagaccatcctggctaacccggtgaaaccctgtctccactaaaaa

SEQ ID NO: 22270 - DNA, 120 bp, synthetic construct; identical to SEQ ID NO: 6641
  source 1..120: mol_type = other DNA

SEQ ID NO: 22271 - DNA, 120 bp, synthetic construct
  source 1..120: mol_type = other DNA
gaccaaatgtccctgggggacaaaacctctgatggaaaaccagtgatctgtatgtagtcatatggctaggtctcaaaacagtaatgagtatgtggtgatttatatacacttagaaacaca

SEQ ID NO: 22272 - DNA, 120 bp, synthetic construct
  source 1..120: mol_type = other DNA
agagaggaatggaactaagaagagaactaaatggacagagggattctcaaatttttttgagattaaaatttaaaaaattaaatctgtaatatttaatttttaaaaatctgaggcaaacat

SEQ ID NO: 22273 - DNA, 120 bp, synthetic construct
  source 1..120: mol_type = other DNA
atgttgaaaatgaacaatggatagaaataaaaatagaaattcagaggaattctaaaataaattctaaaattaagaaaaagttcaactcctttcctactactcaggaaaatacaaataatg

SEQ ID NO: 22274 - DNA, 120 bp, synthetic construct; identical to SEQ ID NO: 6642
  source 1..120: mol_type = other DNA

SEQ ID NO: 22275 - DNA, 120 bp, synthetic construct
  source 1..120: mol_type = other DNA
aagtcaagggacagcttacacagagataccctataaccagtctcccaacaagagagctagattttatttagttaaaaatagaaattagaaacaggaggtagtaaaaacagggttttcttc

SEQ ID NO: 22276 - DNA, 120 bp, synthetic construct
  source 1..120: mol_type = other DNA
ctttttcttttcttttcttttcgagacagagttttgctttggttgcccaggctggggtgcaatggtgcaatctcagctcactgcaacctccgcctcccaggttcaagcgattctcctgcc

SEQ ID NO: 22277 - DNA, 120 bp, synthetic construct
  source 1..120: mol_type = other DNA
agtgatcagcccgccttggcctcccaaagtgctgggattacaggcatgagtcacagcacttagccataaaaaagttctgtttaaaataccagaatgattaaaatgtttgctttctgtttg

SEQ ID NO: 22278 - DNA, 120 bp, synthetic construct; identical to SEQ ID NO: 6643
  source 1..120: mol_type = other DNA

SEQ ID NO: 22279 - DNA, 120 bp, synthetic construct
  source 1..120: mol_type = other DNA
caacttaggagcaagggcagggggaagaagctgaaaaggcctggccttcacttgactcagttatccagattatttaaattattggattggccggtggaatggttaattttatatgtcaac

SEQ ID NO: 22280 - DNA, 120 bp, synthetic construct
  source 1..120: mol_type = other DNA
aggatctaaatgcccccatcagaacacatcagactatgtaatattcttgtaccacagaagtacggtgtccagagcctaacacagagctcttggtaactcactctgggaagcgcattttaa

SEQ ID NO: 22281 - DNA, 120 bp, synthetic construct
  source 1..120: mol_type = other DNA
agagtgctgccttccagatgcggggaggtttgtggtggatgtctgtctctcccatggtctcaacacttctatgcagatttccgcgggctgaattgtgtccctctcacccactgctccaaa

SEQ ID NO: 22282 - DNA, 120 bp, synthetic construct; identical to SEQ ID NO: 6644
  source 1..120: mol_type = other DNA

SEQ ID NO: 22283 - DNA, 120 bp, synthetic construct
  source 1..120: mol_type = other DNA
gttgagtttatctgaagacctgggatcaatggaaaggaaatgtctgggttgagataaagaactgtggagagaaaagagaaaagttcctttttttttttttttttttttgagacaaggtct

SEQ ID NO: 22284 - DNA, 120 bp, synthetic construct
  source 1..120: mol_type = other DNA
cacctcgcctggctaattttttgtatttttagtagagatgggatttctccatgttggtcaggctggtctcgaactcccgacctcaggtgatctgtctgcctcggcctcccaaagtgctgg

SEQ ID NO: 22285 - DNA, 120 bp, synthetic construct
  source 1..120: mol_type = other DNA
ccagactcttgattatctcctggacctgaaaaaaagggaaaaggggattctctatagaatgtagatttttcccccacaagagacaactttgcagggcaatttcaagatatggcaaggaaa

SEQ ID NO: 22286 - DNA, 120 bp, synthetic construct; identical to SEQ ID NO: 6645
  source 1..120: mol_type = other DNA

SEQ ID NO: 22287 - DNA, 120 bp, synthetic construct
  source 1..120: mol_type = other DNA
agcggcctcacaggcaacaaccttgatcttggactttcagcctccagaactttgagaaaataaattgctgttgctagagccacccagcctgtggtactttgttacggaggtcctggcaaa

SEQ ID NO: 22288 - DNA, 120 bp, synthetic construct
  source 1..120: mol_type = other DNA
agcagtgctcatctcctcttctctctattgcaaacttcagtgcaggcactccacaatcctgcagctgcaatgtgagccagtttagcccctctggactgtgtgtgggcaatatacaccaaa

SEQ ID NO: 22289 - DNA, 120 bp, synthetic construct
  source 1..120: mol_type = other DNA
aagccttaatcagactgcactttgactcacttccttgaaaccaaaagtcatgtaacactagacactgaccagtcatatccccattgttgctctaggtaggatttctgacataagaatcag

SEQ ID NO: 22290 - DNA, 120 bp, synthetic construct; identical to SEQ ID NO: 6646
  source 1..120: mol_type = other DNA

SEQ ID NO: 22291 - DNA, 120 bp, synthetic construct
  source 1..120: mol_type = other DNA
ctctttctctgctgcaaccaggtttcagcttactgactttctgtgcctgttgggcaacaaatctgttatggttacataaggaagtaatcaaaagcatatatagtcagagaaaagaaacca

SEQ ID NO: 22292 - DNA, 120 bp, synthetic construct
  source 1..120: mol_type = other DNA
aataaagtatacagaagccccacccactgagagccaggcagtaaatcagctaaccaaatgaatcatacattaggaggaaattttttttttcacattaaggttctaaggaggaaataaata

SEQ ID NO: 22293 - DNA, 120 bp, synthetic construct
  source 1..120: mol_type = other DNA
aggcttgagaaggtgaaaactggcatcaacttgcaggcagttaacagtaaggtgccaatagttgttattgctggttggtgaaattatgggtaattatattcttttatacttttctgtgct

SEQ ID NO: 22294 - DNA, 120 bp, synthetic construct; identical to SEQ ID NO: 6647
  source 1..120: mol_type = other DNA

SEQ ID NO: 22295 - DNA, 120 bp, synthetic construct
  source 1..120: mol_type = other DNA
gcatcgtatgtttttcctgacaatgtgacaagtgatcttccttcccctgtgctggaataatctcttttccatctttccaaatttttccagctaatcagagggtggggaggagggatggat

SEQ ID NO: 22296 - DNA, 120 bp, synthetic construct
  source 1..120: mol_type = other DNA
tggatcacctgaggtcagggggttcaagaccagcctggccaacatggtgaaaccttgtctctactaaaatacaaaaattagctggatgtggtggcgcatgcctgtagtcccagttactcg

SEQ ID NO: 22297 - DNA, 120 bp, synthetic construct
  source 1..120: mol_type = other DNA
agaaaaaaaaagatattcctggggagtagatgggtggtggagggcgggggaacaagggtggggtattgttaaaacatcgtaaaagggctccttttttgatcttgaattatgactttccta

SEQ ID NO: 22298 - DNA, 120 bp, synthetic construct; identical to SEQ ID NO: 6648
  source 1..120: mol_type = other DNA

SEQ ID NO: 22299 - DNA, 120 bp, synthetic construct
  source 1..120: mol_type = other DNA
agttgatccctgagtcagactgggcctgtctcaaggtcagctcacatctgaaatcaagcctctgctgagtctgtggagtaaaaggctgatactcccttctctcctgcaagacagctgtgt

SEQ ID NO: 22300 - DNA, 120 bp, synthetic construct
  source 1..120: mol_type = other DNA
acattacagaaggacgggaagcagtgggatgcggtacccaggggtagcagtctaatccctcccaaagccaaattctagaaaaattttccaaatttaaaaaatggaaaagggaaaaatgga

SEQ ID NO: 22301 - DNA, 120 bp, synthetic construct
  source 1..120: mol_type = other DNA
tgacatcctcagcacttaccatggtacctggcacaaaacagctaatttttcagttgccatactgaacagccattgtatacaggctctctatattccaatgacaacaatctttaggcaaca

SEQ ID NO: 22302 - DNA, 120 bp, synthetic construct; identical to SEQ ID NO: 6649
  source 1..120: mol_type = other DNA

SEQ ID NO: 22303 - DNA, 120 bp, synthetic construct
  source 1..120: mol_type = other DNA
aaaactcaactgaaaaataggaagctattctctccatttctctctgtggtcacatagccgctcacgtttaattctttctaagctcacagattgaccaacacagccaccatacttgagttt

SEQ ID NO: 22304 - DNA, 120 bp, synthetic construct
  source 1..120: mol_type = other DNA
gctataatttctagctctctgccaaatgtttcacacatagcttttatccttttgaagatagcatatacattgttatatagtctatgcccaataaccccagagtctggaagccccatgggt

SEQ ID NO: 22305 - DNA, 120 bp, synthetic construct
  source 1..120: mol_type = other DNA
tgcttcccaagcgcaagccgtccatccacttcagccaccctagtagctgggactacaggtgtgcaccaccacacccaactgacttttgcattttttgtagaaacggagtttcaccatgtt

SEQ ID NO: 22306 - DNA, 120 bp, synthetic construct; identical to SEQ ID NO: 6650
  source 1..120: mol_type = other DNA

SEQ ID NO: 22307 - DNA, 120 bp, synthetic construct
  source 1..120: mol_type = other DNA
gaacagaagcgaccccagttgcaggctcacctccatgttcctttcctttcccaaattttggcccagcaattcctcactaacctttgaatatttaagtaagatacttaaaaatattttacc

SEQ ID NO: 22308 - DNA, 120 bp, synthetic construct
  source 1..120: mol_type = other DNA
aggccttagtttttcagtagtttgctcttctctgggccttagctttcagaaagattctcttgtctgtagtagtaaagtctgtataaagtctgcatggacttttcttgcgtacacacattg

SEQ ID NO: 22309 - DNA, 120 bp, synthetic construct
  source 1..120: mol_type = other DNA
gtcctcttcactgagctcagaaacaaaaccctgcttgtgcatatattcaggctgggacctctaaaatgcagacacctaagtgctccagctttgagaattctagcttcagtgtgacaacgg

SEQ ID NO: 22310 - DNA, 120 bp, synthetic construct; identical to SEQ ID NO: 6651
  source 1..120: mol_type = other DNA

SEQ ID NO: 22311 - DNA, 120 bp, synthetic construct
  source 1..120: mol_type = other DNA
ctagcatttggagaccactctcaggggctttggggcgtacgactttcggggctctggtcctctgtttccctatccgtagaatggagacggctactctgtgagaagcccgaggtgcgcagg

SEQ ID NO: 22312 - DNA, 120 bp, synthetic construct
  source 1..120: mol_type = other DNA
ggcccaggtgctgtgatgggtttcgtgcgcagagaggcctgacagcctctgcatcagtgaccgggcgaagagtggggcagctcggacggtggttggggaacgttagggagattggcgcgc

SEQ ID NO: 22313 - DNA, 120 bp, synthetic construct
  source 1..120: mol_type = other DNA
atcctgattacactgtcccaatttcagttgaggtgggcttttaaaagaaatcccaattcacacattcgatcaggttagttacaagaaaggctgggaggaggtggggctggaaacaccaga

SEQ ID NO: 22314 - DNA, 120 bp, synthetic construct; identical to SEQ ID NO: 6652
  source 1..120: mol_type = other DNA

SEQ ID NO: 22315 - DNA, 120 bp, synthetic construct
  source 1..120: mol_type = other DNA
caggtttgtggggcttgaaagcttacacagtgttgtgtcttttcaagaaaaaggatacagccgggcacggtggctcacgcctgtaatcccggtactttgggtggccgaggtgggtggatc

SEQ ID NO: 22316 - DNA, 120 bp, synthetic construct
  source 1..120: mol_type = other DNA
gagccaggagaatctcttgaaccagggaggcggaggttgcagtgaggcagtgagccaagatcgttgccactacactcaggtctggcgacagagcaacactccgtctcaaaataaaaaaat

SEQ ID NO: 22317 - DNA, 120 bp, synthetic construct
  source 1..120: mol_type = other DNA
ctgacatatcacaaacatcaaaaaatccccccaaaattctaataactgcttgaaccacccctatattttcccatttatattttttgattccctcttcattcgacaacacttttgtaatgt

SEQ ID NO: 22318 - DNA, 120 bp, synthetic construct; identical to SEQ ID NO: 6653
  source 1..120: mol_type = other DNA

SEQ ID NO: 22319 - DNA, 120 bp, synthetic construct
  source 1..120: mol_type = other DNA
ttatgtggttaattcttcatcaagtgattgtcaaacaatctaggcatctattctatttaaaatgtatcccttcccttcaataaattgctggttttggctggaaccaaactttttttcttc

SEQ ID NO: 22320 - DNA, 120 bp, synthetic construct
  source 1..120: mol_type = other DNA
taaagaagagagcttccattttgactagactttgatgagactgagtaatacgcttataattttctacatctaggggttaaaaggatttattggcttcactgtccacagacttctggtgcc

SEQ ID NO: 22321 - DNA, 120 bp, synthetic construct
  source 1..120: mol_type = other DNA
tgggtggtggttcctgtaagccacttctacactgagacgggtagcaataacttgactatacatgaaagtgcttatgaaccacatatcctagtaatctcaaacaatgtaatcccaacttaa

SEQ ID NO: 22322 - DNA, 120 bp, synthetic construct; identical to SEQ ID NO: 6654
  source 1..120: mol_type = other DNA

SEQ ID NO: 22323 - DNA, 120 bp, synthetic construct
  source 1..120: mol_type = other DNA
tgcatttgcttaccctttttgattcttccctgtgcctcagtttggagttggaagctcataaattcccctattatagggaagtggctgattgtgtaaccctatccttttgttgaaataggt

SEQ ID NO: 22324 - DNA, 120 bp, synthetic construct
  source 1..120: mol_type = other DNA
ctcaagatcagctgttttgtaggacttgaaataaggattccttaacaacctggtgaatgcctaatagcctcaatacatttcaggctgttttagttttgtttatttggttttcgtgttttg

SEQ ID NO: 22325 - DNA, 120 bp, synthetic construct
  source 1..120: mol_type = other DNA
actttgtatcctttgaccaacccatccccatgcccaccacgcccagactttggtaaccaccattgtattaatactgtctgcttctaccagttaacctttttacactctaagtgaggtcat

SEQ ID NO: 22326 - DNA, 120 bp, synthetic construct; identical to SEQ ID NO: 6655
  source 1..120: mol_type = other DNA

SEQ ID NO: 22327 - DNA, 120 bp, synthetic construct
  source 1..120: mol_type = other DNA
gaggacacaatctcagagcagacaacttaagtttcagtattaggcatttccgttcttaaacattccttcactatttctgcccaagacatttctcactggtaaactttccttgttggttac

SEQ ID NO: 22328 - DNA, 120 bp, synthetic construct
  source 1..120: mol_type = other DNA
tagctttccacagccagatgtttcttgccctgaggaattatgctatcagtttttaagccaccgtttaaaagacggttgccagtgccctagagtcttggcaacaatgctccaccttccgga

SEQ ID NO: 22329 - DNA, 120 bp, synthetic construct
  source 1..120: mol_type = other DNA
atccaggcaagaataattcgaaggtacattgaacttgaggtggtgatggaacacttaagaatgcacagaagtttaaactcaatagggatagtaataccaagctggcatcgggcctcaggg

SEQ ID NO: 22330 - DNA, 120 bp, synthetic construct; identical to SEQ ID NO: 6656
  source 1..120: mol_type = other DNA

SEQ ID NO: 22331 - DNA, 120 bp, synthetic construct
  source 1..120: mol_type = other DNA
ataggagagtatggaaagacagaaagacatagtcctatccctcatgaagctaaatgtgagccaaagccagggaagttggcaaaaatcaaatggtaataaatgagacggtgatttaggaaa

SEQ ID NO: 22332 - DNA, 120 bp, synthetic construct
  source 1..120: mol_type = other DNA
tctgggctaggtctcagcccccattcatcagaatgaagactgacttgttaggaaagtttcattcaggaaactgggacttgagctgggcttccactgatgtgaagggtttggagcagctgt

SEQ ID NO: 22333 - DNA, 120 bp, synthetic construct
  source 1..120: mol_type = other DNA
agacaaaaatcacctgactcttggctccagtatttttaaagcatgagaaattagataagatcactcctttaaaacagttactgagcacctaatatattcaaggagctatgccgaataggc

SEQ ID NO: 22334 - DNA, 120 bp, synthetic construct
  source 1..120: mol_type = other DNA
ttgtccactttcttgtaaaggaggctgaagttgtggctgcccctgaacatgaagctacaaatctccacaattaggaccataatccagattctttgactagtccagaattcctttcattct

SEQ ID NO: 22335 - DNA, 120 bp, synthetic construct; identical to SEQ ID NO: 6657
  source 1..120: mol_type = other DNA

SEQ ID NO: 22336 - DNA, 120 bp, synthetic construct
  source 1..120: mol_type = other DNA
atttatttttattttttaaaatcagtaatctatgtgtccaaagcataaaccaggcatgggcatagaccagaagccaagctgggataaacagggggttgctttgttcctgtctgatgtgag

SEQ ID NO: 22337 - DNA, 120 bp, synthetic construct
  source 1..120: mol_type = other DNA
cattctcctacttcagcctcccgagtagctgggactacaggcacccgccaccatgcccggctaatgagacagggtttcaccatgttagccaggatggtctcgatctcctgacctcgtgat

SEQ ID NO: 22338 - DNA, 120 bp, synthetic construct
  source 1..120: mol_type = other DNA
atcaatttatgttggagattattccaatagcaaaagttcccttccacaccccaccccctactaatggctgcacaatgttctattgtatgaatgtagctagtttatttagcttaacttccg

SEQ ID NO: 22339 - DNA, 120 bp, synthetic construct
  source 1..120: mol_type = other DNA
tttcacatatgcatgaatatatatgtaaaatttctaacatcagaattgctggctcaaagagaatgtacatttgtaatcttggaggaaattctcaaattcctactcctctaaaggaggagt

SEQ ID NO: 22340 - DNA, 120 bp, synthetic construct; identical to SEQ ID NO: 6658
  source 1..120: mol_type = other DNA

SEQ ID NO: 22341 - DNA, 120 bp, synthetic construct
  source 1..120: mol_type = other DNA
ttttcttcttccaatggtatttcgtcatttgtctcttgacattgcacttacggttttttttcccccatgcaggtcttttttaatgtggctgaatttatctttctttccttttatggtttc

SEQ ID NO: 22342 - DNA, 120 bp, synthetic construct
  source 1..120: mol_type = other DNA
tatagtcagtactataagttggtacaaagtgctgtttcttcatctgtctatccatacatctaattatcaatctatctttccatctgtccattaatccatccatttatcaagcttttactg

SEQ ID NO: 22343 - DNA, 120 bp, synthetic construct
  source 1..120: mol_type = other DNA
tggccttgggcaggttacttaatctgtccacatttttgtttcttatactatttcatgagatacgacaggaacgtagattgtggaggggtcaaggattgaaggttaaaaaacagacattgt

SEQ ID NO: 22344 - DNA, 120 bp, synthetic construct; identical to SEQ ID NO: 6659
  source 1..120: mol_type = other DNA

SEQ ID NO: 22345 - DNA, 120 bp, synthetic construct
  source 1..120: mol_type = other DNA
ccaacctggaatctctccaaacctctttgttcaggatcttacagaggttccattatttaggtatgattgatcaaatcactggctgttggtgattaactcagtccctgggctcctctcccc

SEQ ID NO: 22346 - DNA, 120 bp, synthetic construct
  source 1..120: mol_type = other DNA
aggccaaggcaggcaggtaacctgaggtcaggagttcgagaccagcctggccaacatggtgaaaccccgtctctactaaaaatacaaaatattagctgggcatggtggtgtgcacctgta

SEQ ID NO: 22347 - DNA, 120 bp, synthetic construct
  source 1..120: mol_type = other DNA
gttgctctccagcttgggcaacaagagtgaaactctgtctcaaaaaaaaaaaaaaaaaaagaaagaaagaaagaaagatcccaccctctaatcacatggttcttctgccaaccagccccc

SEQ ID NO: 22348 - DNA, 120 bp, synthetic construct
  source 1..120: mol_type = other DNA
ctcatcagaacataaccatgtggtaagttgaggtgcatcaggaattaagatgattcaacttaaaatttttgactttatgatgggtttactggggtattgagtacactttcaccttacaat

SEQ ID NO: 22349 - DNA, 120 bp, synthetic construct; identical to SEQ ID NO: 6660
  source 1..120: mol_type = other DNA

SEQ ID NO: 22350 - DNA, 120 bp, synthetic construct
  source 1..120: mol_type = other DNA
atcttgagtgggtgccattattctgtgacacctggatcctggggttccataagctggggttctaggatgtccattcttagttgagtctcatttcctgtcatatcgacgtcaaaggcccaa

SEQ ID NO: 22351 - DNA, 120 bp, synthetic construct
  source 1..120: mol_type = other DNA
caccccccgccctgagatttactgacatatgaacacatatgattggcatgatataagaaccactcatctgctggccatctctccaggtctggagccagagaagatgatctgaaattgtag

SEQ ID NO: 22352 - DNA, 120 bp, synthetic construct
  source 1..120: mol_type = other DNA
acttctttctttgggtcatctttggtggtgatttgacaggaaggaacaaagtggcttcaaacattatacaagtctctagtctgttctgtgtcctgttttctttctcattctttcagtgtg

SEQ ID NO: 22353 - DNA, 120 bp, synthetic construct; identical to SEQ ID NO: 6661
  source 1..120: mol_type = other DNA

SEQ ID NO: 22354 - DNA, 120 bp, synthetic construct
  source 1..120: mol_type = other DNA
tatgaaaaataatttcaagtttaacaaacacaaggaaaccgcagggtccatgtcaaagctgatgagctatttctgaaactcgtgcagaattgtggtttgtgtggtctatgtcacggcacc

SEQ ID NO: 22355 - DNA, 120 bp, synthetic construct
  source 1..120: mol_type = other DNA
ccgaagaccagtgaagaaggaggccctgcaaacaggaggctgacagggtaggaacgaggccatgatccctttgcagaaggacaaccaggaggagggtgtctgccccatctgccaggagag

SEQ ID NO: 22356 - DNA, 120 bp, synthetic construct
  source 1..120: mol_type = other DNA
ttctgaggaggtgctagggacaggctatatctgccccaaccaccagaagagggtgtgcaggttctgtgaggagagcagacttcttctatgtgtggaatgcctggtgtcccctgaacacat

SEQ ID NO: 22357 - DNA, 120 bp, synthetic construct; identical to SEQ ID NO: 6662
  source 1..120: mol_type = other DNA

SEQ ID NO: 22358 - DNA, 120 bp, synthetic construct
  source 1..120: mol_type = other DNA
taactaatgcaaaaccctttcaggactaaaactgtgtgaactcctggttgatagtactagaaacttggctagaaatgtaatcaggttttatatacactagtaattatcctgcaaatatat

SEQ ID NO: 22359 - DNA, 120 bp, synthetic construct
  source 1..120: mol_type = other DNA
atcacaaaagttacatgctgtaggtaataaattcagaaagcactgaaaggtataaagtcaagactaaaaatttgtcttcctttctccctccattcatagtcctcagaggtaaccattgtt

SEQ ID NO: 22360 - DNA, 120 bp, synthetic construct
  source 1..120: mol_type = other DNA
tatctaaaagtgtggcttgaacattttctcatcagcatgtatagatcttctgaattattttcaagaactgtgtggtattaaattctatgaatgtaccataaattggcagacattgggtca

SEQ ID NO: 22361 - DNA, 120 bp, synthetic construct
  source 1..120: mol_type = other DNA
aatatccaagatatattttggtgagagcataaggtagaaatctaactttagtttttccaagttataatcaatttgtcctatcaccatttgttgaatgattcatatagtttccccattgat

SEQ ID NO: 22362 - DNA, 120 bp, synthetic construct; identical to SEQ ID NO: 6663
  source 1..120: mol_type = other DNA

SEQ ID NO: 22363 - DNA, 120 bp, synthetic construct
  source 1..120: mol_type = other DNA
aatagtgaaggctgaacttccaaagctgaggtagctttgagatacttgacttttggagaacatgttatgatacagaatgagaaagtggggagtccagattaaaagtgactacagaaaggt

SEQ ID NO: 22364 - DNA, 120 bp, synthetic construct
  source 1..120: mol_type = other DNA
agtggggagggattcctcacctgccgatgaagcagcataagatggagaaatttatttcctcactaaatgattttttcaggtctgtcctttgtgttagatgtcatgctaggcattgtagaa

SEQ ID NO: 22365 - DNA, 120 bp, synthetic construct
  source 1..120: mol_type = other DNA
gtgtgtgagaaactgcagcatgtgctaggaatcaatgaagacagatgccattccttctgccaggagtttgcagtgtagtaagggagacacaaataagtaatcaaagaactgtaacttttt

SEQ ID NO: 22366 - DNA, 120 bp, synthetic construct
  source 1..120: mol_type = other DNA
tcactgcaacctccgtctcccaggttcaagcaattctttgcctcagcctcccgagtagctgggattacaggcacccaccaccaggcctagctaatttttgtatttttagtagaaacaggg

SEQ ID NO: 22367 - DNA, 120 bp, synthetic construct; identical to SEQ ID NO: 6664
  source 1..120: mol_type = other DNA

SEQ ID NO: 22368 - DNA, 120 bp, synthetic construct
  source 1..120: mol_type = other DNA
acagatgcccacacctgagaagtcttgttatatttgaagaatttatcattagagtttgaatcgacaggacttactgagagattagaagtgggttctttgtaagaaaaaaacaaccccatc

SEQ ID NO: 22369 - DNA, 120 bp, synthetic construct
  source 1..120: mol_type = other DNA
atgagataccatctctgccagttagaatggcaatcattaaaaagtcagtaaacaacagattctggagacgaagtggagaaataggaacgcttttacactgttggtgggagtgtaaattag

SEQ ID NO: 22370 - DNA, 120 bp, synthetic construct
  source 1..120: mol_type = other DNA
aagacacatgcacacgtatgtttattgtggcatggttcacaatagcaaagacttggaaccaacccaaatgcccatcaacgatagactggataaagaaaatatggcacatatacaccatgg

SEQ ID NO: 22371 - DNA, 120 bp, synthetic construct
  source 1..120: mol_type = other DNA
cactcgtaagtgagagttgaacaatgagaacacgtggacacagggaggggaatatcacacaccagggcctgtgaggggatggggggtaggggagggatagcattaggagaaatacctaac

SEQ ID NO: 22372 - DNA, 120 bp, synthetic construct; identical to SEQ ID NO: 6665
  source 1..120: mol_type = other DNA

SEQ ID NO: 22373 - DNA, 120 bp, synthetic construct
  source 1..120: mol_type = other DNA
atcttacatacgcagctggatcacaaatttagatctccagagtcttattcctagaacctagaacaaagatccatccaggcaaagacaatatttaaatccaagaaaagcgggcacggtggc

SEQ ID NO: 22374 - DNA, 120 bp, synthetic construct
  source 1..120: mol_type = other DNA
acacagtgagatactatctctagaacaacaacagcaacaacaaagtgaaattaacaggatttaaaaaaaagaacgtgacaatttggggctgggtgcagtggctcacgcctgtggtcccag

SEQ ID NO: 22375 - DNA, 120 bp, synthetic construct
  source 1..120: mol_type = other DNA
gaaacaaacaaccaagaaaccaaggaaactgatgtaattgcctcaaaagaggctagacagaaaaagaagttttggggtaaggttctgggaaaggccgtcatttagatgtaggcagaggag

SEQ ID NO: 22376 - DNA, 120 bp, synthetic construct
  source 1..120: mol_type = other DNA
aagggtattttaagagattataatagattgcattgaacaatgctaacacttcagtaagatggtggcagaggcatgagagctgagttgggaggaggcacacttcttccatagtaataacag

SEQ ID NO: 22377 - DNA, 120 bp, synthetic construct; identical to SEQ ID NO: 6666
  source 1..120: mol_type = other DNA

SEQ ID NO: 22378 - DNA, 120 bp, synthetic construct
  source 1..120: mol_type = other DNA
caaacaagaaggtgatggtacattttaccatggataaggagttgtctgaaaagtaacacagagagggagggtaagggagttgagtatatttctgaagaagtgattataatggtggacctt

SEQ ID NO: 22379 - DNA, 120 bp, synthetic construct
  source 1..120: mol_type = other DNA
tgttcttttaaaagaatcatataatccctgactgtactctaaaaagaccgaaaaatttataaaatctacaaattcttatttgtatacctgtttcctcactgaccagtcaatgtcagtgtc

SEQ ID NO: 22380 - DNA, 120 bp, synthetic construct
  source 1..120: mol_type = other DNA
tagtagtggtgaggcttttatccatgaagactcgctgtctgcattttcccctagaatcagggcataaattctacatgattgcatcaaaatagtttatcttttggataatgagctccatta

SEQ ID NO: 22381 - DNA, 120 bp, synthetic construct; identical to SEQ ID NO: 6667
  source 1..120: mol_type = other DNA

SEQ ID NO: 22382 - DNA, 120 bp, synthetic construct
  source 1..120: mol_type = other DNA
gttttttttttactctagtccattgattattctttctgttatatagttttgacaacatgttactttatggtttatttttaaatctagcagcatttttgccatttaataattttattacct

SEQ ID NO: 22383 - DNA, 120 bp, synthetic construct
  source 1..120: mol_type = other DNA
tttgggggtttagttagtcttctcaaccagtaccaagatacatcactaacggctttccactatgtatctgaatcagatattaaattgtctttacttaaacctcatgtgccctgactctat

SEQ ID NO: 22384 - DNA, 120 bp, synthetic construct
  source 1..120: mol_type = other DNA
tcatgtatttaccatacatttttaaaaattttctgacattttctagatcataattgtgtgagtgatgttgtttttaattcatatttttggacacagttctgtaaggagcatgcattttga

SEQ ID NO: 22385 - DNA, 120 bp, synthetic construct; identical to SEQ ID NO: 6668
  source 1..120: mol_type = other DNA

SEQ ID NO: 22386 - DNA, 120 bp, synthetic construct
  source 1..120: mol_type = other DNA
acccattaaatacctttatgcaaaaattggtgaaaaagtactttttagaaacagaggactttaccttactcattttgaatattgtaaacaatatgacagtattatcttcagtcattctat

SEQ ID NO: 22387 - DNA, 120 bp, synthetic construct
  source 1..120: mol_type = other DNA
actgccagatgataggactgtggctttttgaactggaccttaataggcctgactttgacaggcagaaaaataaagcactcctgacagagagaagtaaaaggccatgaggaggtgtggctg

SEQ ID NO: 22388 - DNA, 120 bp, synthetic construct
  source 1..120: mol_type = other DNA
ggtgaaggagtttgggcttatctttgttgctgagaagccattttgaagggaggactaacatcaacaaaggtgaaatgtgacagatttcaagctgaatggcaggcagaatggcagtcccaa

SEQ ID NO: 22389 - DNA, 120 bp, synthetic construct; identical to SEQ ID NO: 6669
  source 1..120: mol_type = other DNA

SEQ ID NO: 22390 - DNA, 120 bp, synthetic construct
  source 1..120: mol_type = other DNA
ggctggagatctcaggtgactttggagagagaggctttaaaggagtgatgagaaacaaggcggctggctgaggaatgacgacagtgaggaggtgaagacagcaacaccaaacaacttgac

SEQ ID NO: 22391 - DNA, 120 bp, synthetic construct
  source 1..120: mol_type = other DNA
atgagcgacatccatgatgcccatttattacttcccactcctatgacttttttatttcgtctctgctgggaaatgcctgcaggaaacacccagtgacgtgacacgtttttagtaactttg

SEQ ID NO: 22392 - DNA, 120 bp, synthetic construct
  source 1..120: mol_type = other DNA
tttgaccttgatttcaccaggaaattctcaggctggaaagaactttcagttgtcttcaccatcccctgacttctacctgtacatctccaaaatctcctcaaaaaagattaaaaaaaaaaa

SEQ ID NO: 22393 - DNA, 120 bp, synthetic construct; identical to SEQ ID NO: 6670
  source 1..120: mol_type = other DNA

SEQ ID NO: 22394 - DNA, 120 bp, synthetic construct
  source 1..120: mol_type = other DNA
ccaggcagcagaggtagcagagggttgccatttcctctttaaggcaattccctccagactggctccatgtgttactgtaaaatagtaagaagtgctagaagactgtcatataacttttgt

SEQ ID NO: 22395 - DNA, 120 bp, synthetic construct
  source 1..120: mol_type = other DNA
ataaataaactctcaagtcccttactccaaccatgatgctctaaaagcatttctttttaggcagaattttacattagttgcattctgggatcaggccccctaccgtgttccattgactcc

SEQ ID NO: 22396 - DNA, 120 bp, synthetic construct
  source 1..120: mol_type = other DNA
ggctcagcaggagaagaaactgcaggctctgcaggtgggtttttcgggttcctgggaaggactccctggagtgttctcaggagcccttacttaactattctggacatctgtctgtccctg

SEQ ID NO: 22397 - DNA, 120 bp, synthetic construct; identical to SEQ ID NO: 6671
  source 1..120: mol_type = other DNA

SEQ ID NO: 22398 - DNA, 120 bp, synthetic construct
  source 1..120: mol_type = other DNA
cgagtactgggactacaggcacttgccaccacgcccagctaattttttctatattttagtagagatggggtttcaccatgttagccaggatggtctcgatctcctgacctcgtgatccgc

SEQ ID NO: 22399 - DNA, 120 bp, synthetic construct
  source 1..120: mol_type = other DNA
gacagtctacctttctattcctcttggtcacatggcatctgtagatattcagagagtgaggtggaaaggtgaggtgtccctgcctttatgagaatcaaagctgcttctgctatacctgtg

SEQ ID NO: 22400 - DNA, 120 bp, synthetic construct
  source 1..120: mol_type = other DNA
ttcctgtagtttcaggtagaccacgggaaccacaggctggaggctgggccggagagccagcaccaaaccagggaacagctgggtgccctccctcagcagtggctgggccagctggagcac

SEQ ID NO: 22401 - DNA, 120 bp, synthetic construct; identical to SEQ ID NO: 6672
  source 1..120: mol_type = other DNA

SEQ ID NO: 22402 - DNA, 120 bp, synthetic construct
  source 1..120: mol_type = other DNA
aaggaatttggaggtgataggaacctgagaaccaattatgattctcactttttctctctcctagaatgctggtgacttactgaacaggtacgagctgtcccttcttctttcccacatgtg

SEQ ID NO: 22403 - DNA, 120 bp, synthetic construct
  source 1..120: mol_type = other DNA
taatctatgaaagatttctttgtttctaggagtgctccacagaaattagaggttatttatccccagttggagaaaggagtcagtgaattgcttcttcagccccctcagaagctctgacct

SEQ ID NO: 22404 - DNA, 120 bp, synthetic construct
  source 1..120: mol_type = other DNA
atgtcaccatttcttcatgtccacagtcatcacctgatgcctgaccctctgactcttggacgatagccagcctccttccaggacaggctcatgcttggggctgccactgtggaggtcggg

SEQ ID NO: 22405 - DNA, 120 bp, synthetic construct; identical to SEQ ID NO: 6673
  source 1..120: mol_type = other DNA

SEQ ID NO: 22406 - DNA, 120 bp, synthetic construct
  source 1..120: mol_type = other DNA
ttctaatgaatggaataaggcaaaggtgatagggtgtcactctggcaactgtgttgcattgtatagaactcctccttgctggcccacccttttagagcccctcctaggagccaagagcag

SEQ ID NO: 22407 - DNA, 120 bp, synthetic construct
  source 1..120: mol_type = other DNA
tccagccaacaccttgattatagtcttgtgagtacctaagctgaggacccagtgaagctgtgccaaaatttcccacccacagaaacagtgtgacaataaatgtgtgtgtgtttttttgtt

SEQ ID NO: 22408 - DNA, 120 bp, synthetic construct
  source 1..120: mol_type = other DNA
ccctaatagctagggattataggcgcccgccaccacacccggctaattttttgtgtttttagtagagacagggtttaaccatgttggccaggctggccttgaacttctgacctcaggtga

SEQ ID NO: 22409 - DNA, 120 bp, synthetic construct; identical to SEQ ID NO: 6674
  source 1..120: mol_type = other DNA

SEQ ID NO: 22410 - DNA, 120 bp, synthetic construct
  source 1..120: mol_type = other DNA
ttaccttataatcagtatttattgagcctttgccaaagtagtcaataccatactgagaggtataaggaataaaacatggccacaattataaaacaagccacgtggtggtgcaaagagtga

SEQ ID NO: 22411 - DNA, 120 bp, synthetic construct
  source 1..120: mol_type = other DNA
ctctgaacctctgtactcccccctctaaaataagggttatggtacctgtggcctgggattgttgtcaaaattaaatacatgctgagtgtctgctaaagtgtctaaaacgtaaacattcaa

SEQ ID NO: 22412 - DNA, 120 bp, synthetic construct
  source 1..120: mol_type = other DNA
tacatgtgccatgttggtgtgctgcacccattaacttgtcatttacattgggtatttctcctaatgctatccctcccccctccccccaccccaaaacaggccctggtgtgtgatgttccc

SEQ ID NO: 22413 - DNA, 120 bp, synthetic construct; identical to SEQ ID NO: 6675
  source 1..120: mol_type = other DNA

SEQ ID NO: 22414 - DNA, 120 bp, synthetic construct
  source 1..120: mol_type = other DNA
aaacagcgagcctgggaaagtcagggtaggttttgtgggggaggtggggattggacaagtgggagaggaaggtgagaacattctaggtcacaataaccacatgaatgaaagcatagaggt

SEQ ID NO: 22415 - DNA, 120 bp, synthetic construct
  source 1..120: mol_type = other DNA
agaagtcaacaggctaaatggatgacaccaagacatagtgaggtttctgagtcaggaatgaagggagaagtggtgtttaatgaaagccagtctggatcgtttgcacaagaaggactggga

SEQ ID NO: 22416 - DNA, 120 bp, synthetic construct
  source 1..120: mol_type = other DNA
taagagcaagacattagccaaggaaagaacacccctgaaagtgacagctagcaatttctgcatcccagatggagttaatgtcaccaagagaacttgtactaggagtaggaggagactgac

SEQ ID NO: 22417 - DNA, 120 bp, synthetic construct; identical to SEQ ID NO: 6676
  source 1..120: mol_type = other DNA

SEQ ID NO: 22418 - DNA, 120 bp, synthetic construct
  source 1..120: mol_type = other DNA
gtcttcacgcttctttggacttcgagcccacttcttaccggtaggtcctgggcatacaacataccactgcataatggtcatgagcacagactcgggagccaaaccacaagacttcaaatg

SEQ ID NO: 22419 - DNA, 120 bp, synthetic construct
  source 1..120: mol_type = other DNA
ttaatatatacaaatatttattatggtgtttggccaaaataagttctatgtgtgtgattgttatcagcatttttggaatctctagttcttcctacaggaacgagtggtgaccccaccaac

SEQ ID NO: 22420 - DNA, 120 bp, synthetic construct
  source 1..120: mol_type = other DNA
aaacttacctatcatttgaactaacttgagtgggtctcagttctttgcaatagaaagggttgctaccatgtaagctttgaaaaatgaggtgtaaactgtggatgttacaaatgtgcaaca

SEQ ID NO: 22421 - DNA, 120 bp, synthetic construct; identical to SEQ ID NO: 6677
  source 1..120: mol_type = other DNA

SEQ ID NO: 22422 - DNA, 120 bp, synthetic construct
  source 1..120: mol_type = other DNA
aaattgtatttctgaatccaagtcacctgtgggggtgtagccagcattaaaataatcgccaggacccatgcaggcatctatctctgaatgaggcagtgcagcatagcagttaagagctct

SEQ ID NO: 22423 - DNA, 120 bp, synthetic construct
  source 1..120: mol_type = other DNA
gttaccaagataaagtgacacaaggtgtgtaaagctcccgagctgcaagccaggatcttcatacacatacattttagaggataatagtcctttcaaaagacacagctaaagccaataaaa

SEQ ID NO: 22424 - DNA, 120 bp, synthetic construct
  source 1..120: mol_type = other DNA
gatactgcacactcccagggaaagcaattcaatctctaatccctggcttctgatctccacctcttttctacctgctgaggtaaggatgaacaacagaacttctcaattgaattctaagct

SEQ ID NO: 22425 - DNA, 120 bp, synthetic construct; identical to SEQ ID NO: 6678
  source 1..120: mol_type = other DNA

SEQ ID NO: 22426 - DNA, 120 bp, synthetic construct
  source 1..120: mol_type = other DNA
tttgtgacccatttgctcccactatctcatttcttgacctcagatggtaatcaactgatcaggaagacaatttccctagggttgagtgtggtccctgggttatgatttatggctatacct

SEQ ID NO: 22427 - DNA, 120 bp, synthetic construct
  source 1..120: mol_type = other DNA
gagacaacccagtgctccagagtcacaggtcatccagccagttctctgctgtttcctcttcttaagatgcttcttcccctcttttccctattgaccataggcatcctttagaccaccctt

SEQ ID NO: 22428 - DNA, 120 bp, synthetic construct
  source 1..120: mol_type = other DNA
tggacttcccgtaacacccaccacactgtgctgtaatttcctctttatgtttctctgtcttcccaagagctctttcagatatagagcaggttttttttttctctatattttcaagtcacc

SEQ ID NO: 22429 - DNA, 120 bp, synthetic construct; identical to SEQ ID NO: 6679
  source 1..120: mol_type = other DNA

SEQ ID NO: 22430 - DNA, 120 bp, synthetic construct
  source 1..120: mol_type = other DNA
agcagtcatttctattccaagtcatccaggtgattcagccagggatcaagtccacatggtacttgggttgatatgagtcctgtacttagaggagagtaggtaactgctccttctcaggag

SEQ ID NO: 22431 - DNA, 120 bp, synthetic construct
  source 1..120: mol_type = other DNA
cccacctcatagtcaagagacaccctcacctgccggggctgctccttcagggtcagccgtgtggggaaggagcccagagccgagacgaagccccaagccagcctcacagcccacaccccc

SEQ ID NO: 22432 - DNA, 120 bp, synthetic construct
  source 1..120: mol_type = other DNA
atgccagtgtgggccagaacacaggtggcccggtcaaaacgttgggggttgtctggtgagttctgccatttgtaggagaactgagctcgctggtggtcctcggacaagaggagcttgggg

SEQ ID NO: 22433 - DNA, 120 bp, synthetic construct; identical to SEQ ID NO: 6680
  source 1..120: mol_type = other DNA

SEQ ID NO: 22434 - DNA, 120 bp, synthetic construct
  source 1..120: mol_type = other DNA
cgtgccagcttggatctcctggggctgatataccacattctcccctcctcccatctctatcccacagtgcagcgacatttctcccttcagtccaaacttcatgattcctccctgttttcc

SEQ ID NO: 22435 - DNA, 120 bp, synthetic construct
  source 1..120: mol_type = other DNA
accaccaaaaactgctgcagagccttgcgttttgttacttttagtattcataaattgagaagcttccataaatttaggtccatctgtgggttagagaaccccctccaacaactccgtgac

SEQ ID NO: 22436 - DNA, 120 bp, synthetic construct
  source 1..120: mol_type = other DNA
aagcaggggttccttacgttctaaagaggtgattataaacccagatcaaagtcccctttatccagaaagcattcccagatggactttatcccattctgcattaatctttctatctactcg

SEQ ID NO: 22437 - DNA, 120 bp, synthetic construct
  source 1..120: mol_type = other DNA
ggactttatcccattctgcattaatctttctatctactcgacatgcgcagatcaggatgtgagcttcataccacgaatgtagtatgtgtatgtgcttgtcctttcttcatgtttctcctg

SEQ ID NO: 22438 - DNA, 120 bp, synthetic construct; identical to SEQ ID NO: 6681
  source 1..120: mol_type = other DNA

SEQ ID NO: 22439 - DNA, 120 bp, synthetic construct
  source 1..120: mol_type = other DNA
cttaatgatgagaaaactgaggccaagaagagggaagggacaagaagaagaatgtaagctggaatcctctagaccagtggttccaagcttgcatcagaatcatctggagctcttgttaaa

SEQ ID NO: 22440 - DNA, 120 bp, synthetic construct
  source 1..120: mol_type = other DNA
acagggaccatgactgccttgctcacctctgtacccgcagagcccaggacatagtaaatgctcaagaaatatctgcttagtgaatagagaaatgggttcatttatttattattccacttg

SEQ ID NO: 22441 - DNA, 120 bp, synthetic construct
  source 1..120: mol_type = other DNA
gcaggaaatggaattatgggaaaagtccttctagggtgacataactgtgggtgggtcatttcaaaattggtgtcatcattcattctgtcatggttagtgaggaggtggttggcagagagc

SEQ ID NO: 22442 - DNA, 120 bp, synthetic construct; identical to SEQ ID NO: 6682
  source 1..120: mol_type = other DNA

SEQ ID NO: 22443 - DNA, 120 bp, synthetic construct
  source 1..120: mol_type = other DNA
aaatattcacctttattctctttcttcattgtcacaatatcctaataggcagattttataaaaatctgcaaataaggaaatcaaggcacaggaaggaataaggcttgccaaagtcacacc

SEQ ID NO: 22444 - DNA, 120 bp, synthetic construct
  source 1..120: mol_type = other DNA
tacccagaaacatcttcatctccctctgcagcgggagggcctgctggggaaagtcccgaatcctctggcccagctctggcgacacagccaccggtttccggcactttctggtttcacatc

SEQ ID NO: 22445 - DNA, 120 bp, synthetic construct
  source 1..120: mol_type = other DNA
gcatgatggcgctagttcctgcaggcagacgtacttcctctaggatgaatcccactgcccatttttgggcatctatggatatacctgagaaggcatttgggtatatagaggtttatatgt

SEQ ID NO: 22446 - DNA, 120 bp, synthetic construct
  source 1..120: mol_type = other DNA
ggaaaaagaaaagagagaaactatattgcttaccttattagagtgcttctgatgtcctaggagaaagagataccagaaattcagtttccagcttctcctttccatttttctttcctttct

SEQ ID NO: 22447 - DNA, 120 bp, synthetic construct; identical to SEQ ID NO: 6683
  source 1..120: mol_type = other DNA

SEQ ID NO: 22448 - DNA, 120 bp, synthetic construct
  source 1..120: mol_type = other DNA
atctctgtggatcagagcccaaagcctttattttttagataaagatggtgaagtgaccttcccctgctcactggaggcaaagtaagtctcataccaaggtctcctgtttctcagtcctaa

SEQ ID NO: 22449 - DNA, 120 bp, synthetic construct
  source 1..120: mol_type = other DNA
tagaccaggacaaacttcctgactggtggttggtgacatttaggttatagagaatggtttgcaacttacttaatactttttcaaagtgctactttcacttccatcttactgttggatcct

SEQ ID NO: 22450 - DNA, 120 bp, synthetic construct
  source 1..120: mol_type = other DNA
gaattgagactttctggtcctctgacccacctcccatctgggatacagagatgtgtgagtcagggagacatggcttaggcaagacaaagatgcaagagtcacaggacagcacaggtgggg

SEQ ID NO: 22451 - DNA, 120 bp, synthetic construct; identical to SEQ ID NO: 6684
  source 1..120: mol_type = other DNA

SEQ ID NO: 22452 - DNA, 120 bp, synthetic construct
  source 1..120: mol_type = other DNA
cttttcacttgtcatcccatttcgagaagcaagactcacagtgttgtctcagcaccatctgctgcagcttctaaaaggggtagggcttacaggaggtgtaggaggaggtggtggggacac

SEQ ID NO: 22453 - DNA, 120 bp, synthetic construct
  source 1..120: mol_type = other DNA
tttacagataagtaaactgaagttggagagttgcttgaggtcatagagttagtgtcagagtcaggatttaaactcataataacttcaaagccctataatctatgttgcctcagtttcagg

SEQ ID NO: 22454 - DNA, 120 bp, synthetic construct
  source 1..120: mol_type = other DNA
tagacatttaagacacttatggatttgttcctggggagaaggaacataaaatactcaagatggaaaatgatttgttcaggtttgtctggtcatctgaccctctgcctccaggaatgaaat

SEQ ID NO: 22455 - DNA, 120 bp, synthetic construct; identical to SEQ ID NO: 6685
  source 1..120: mol_type = other DNA

SEQ ID NO: 22456 - DNA, 120 bp, synthetic construct
  source 1..120: mol_type = other DNA
tcatcccaaaggaacatgtgtaaataacaaccctcccttgttactgaaatcaattatctgtgtatgactccagaggggagaagaaacttgggtaatgtaaaaataattgataaattgttt

SEQ ID NO: 22457 - DNA, 120 bp, synthetic construct
  source 1..120: mol_type = other DNA
cacagacttgtactaaaacataattcataagcacaatgcataaacaactaaaaccagcacacattcatttaatgacagataaaatggcatgccacatacatttacccagcctgaatatat

SEQ ID NO: 22458 - DNA, 120 bp, synthetic construct
  source 1..120: mol_type = other DNA
aaacacaccagacacacttctaaacatgcaaacattaacacatatacacactgtttgtacaatcattccctcaaatgcaaacttcagacacacctgatccatggcacagacacacacact

SEQ ID NO: 22459 - DNA, 120 bp, synthetic construct
  source 1..120: mol_type = other DNA
tcaaaaaaacataaaacataaacacaattttccatgcctgggtctattgcctgggtgatcatgtaagtaaggagaaagaatttggcctccgggtggcctaaataatccacaactctgctg

SEQ ID NO: 22460 - DNA, 120 bp, synthetic construct; identical to SEQ ID NO: 6686
  source 1..120: mol_type = other DNA

SEQ ID NO: 22461 - DNA, 120 bp, synthetic construct
  source 1..120: mol_type = other DNA
ggtaaggcaggcccggcagaagttgtggccgcagtcgatagtgaccggctccctcagggtaccctgacagatggggcagttgacttcatctgccaggctggtcacagaggcagcagaggc

SEQ ID NO: 22462 - DNA, 120 bp, synthetic construct
  source 1..120: mol_type = other DNA
aaatatgcaccagcacccatatcgtcacacacttgcatctctggcagccagggttctattctcctgccaacagcagagatgggaaatagcagaggagaggaaggaagaggggctcacagc

SEQ ID NO: 22463 - DNA, 120 bp, synthetic construct
  source 1..120: mol_type = other DNA
attcttttgggggcaagtgggagactgggtcacagagtggagatgccattccagcctttctgccatatggccagctgtctccaaagagattggaggtatcagccagcccagggcttgccc

SEQ ID NO: 22464 - DNA, 120 bp, synthetic construct; identical to SEQ ID NO: 6687
  source 1..120: mol_type = other DNA

SEQ ID NO: 22465 - DNA, 120 bp, synthetic construct
  source 1..120: mol_type = other DNA
agcttgccctaggcacacaagtaagaaggtgagtgaccataaataatttgctgtcagatctgtcttccgagcaatgctattcaacataaacgcaaagtgagccacatatgcaatttaaaa

SEQ ID NO: 22466 - DNA, 120 bp, synthetic construct
  source 1..120: mol_type = other DNA
attaataagatattttacatttttaaatttgtgaaaagcctttgaaatccggtgtgttggccgggcgcggtggctcacgcctgtaatcccagcactttgggaggcctaggcgggcggatc

SEQ ID NO: 22467 - DNA, 120 bp, synthetic construct
  source 1..120: mol_type = other DNA
tgaggcaggagaatggtgtgaacccgggaggaggagcttgcagtgagccaagatcgcgctactgcactccatcccgggagacagagcgagactccatttcaaaaaaaaaaaaaaagaaaa

SEQ ID NO: 22468 - DNA, 120 bp, synthetic construct; identical to SEQ ID NO: 6688
  source 1..120: mol_type = other DNA

SEQ ID NO: 22469 - DNA, 120 bp, synthetic construct
  source 1..120: mol_type = other DNA
tggtcttggcatgaggtgtgggaggagcgtagggctttaagccaggagactgggatcgtccttaacgtgatactttctagctttgtgacctttggaaagtcactttacatttggaaagtc

SEQ ID NO: 22470 - DNA, 120 bp, synthetic construct
  source 1..120: mol_type = other DNA
tgactaatcgttttctaatgtgtatcaacataaatcatttgcattatggtttcttgccttctccccgctacagtaaaaataaataaataaataaataaataaataaataaataaataaat

SEQ ID NO: 22471 - DNA, 120 bp, synthetic construct
  source 1..120: mol_type = other DNA
aggggacccgatgagcaatccttacaccctacctgcagtgtcgaaacagcgtcccgcccacacacttccggcagaatctcccgaagtccacacctctcactccagcctggactttgatgc

SEQ ID NO: 22472 - DNA, 120 bp, synthetic construct; identical to SEQ ID NO: 6689
  source 1..120: mol_type = other DNA

SEQ ID NO: 22473 - DNA, 120 bp, synthetic construct
  source 1..120: mol_type = other DNA
cttgcagccgtttccctctgcgattcatgtaagtgtgactcgatttcagggaaagggaactcgcgtgggctgaggagaccggagtggacgggctggggaaggcaccgtgatgcccgcaac

SEQ ID NO: 22474 - DNA, 120 bp, synthetic construct
  source 1..120: mol_type = other DNA
ccagatgggggcccaatcctcgggcaagatcctgctctgcccgctctgccaagaggaggagcaggcagagactcccatggcccctgtgcccctgggcccgctgggagaaacttactgcga

SEQ ID NO: 22475 - DNA, 120 bp, synthetic construct
  source 1..120: mol_type = other DNA
gccctaccgggtaagaagtgtagctttacctagggcctgtttggggcaggatgatgtcctgttatgaggggaggaaatcgggcggggatctggatgaaaggcttccacatcagggaaccc

SEQ ID NO: 22476 - DNA, 120 bp, synthetic construct; identical to SEQ ID NO: 6690
  source 1..120: mol_type = other DNA

SEQ ID NO: 22477 - DNA, 120 bp, synthetic construct
  source 1..120: mol_type = other DNA
gtgagaattccccatctggccttggggcactttcctgtcagcctctcagatctctctcttgtcatccagtcaccaggtctggaagtggttaccttagaaacatctcccaaatctttaatt

SEQ ID NO: 22478 - DNA, 120 bp, synthetic construct
  source 1..120: mol_type = other DNA
caccctttccagtcaccttccaatctgctgggagacagatcctcctaaaacacaaagtcactcatctgcacaaaatcctcccatgtatacctagtgcccaaagaaagtccaaggtcttta

SEQ ID NO: 22479 - DNA, 120 bp, synthetic construct; identical to SEQ ID NO: 6691
  source 1..120: mol_type = other DNA

SEQ ID NO: 22480 - DNA, 120 bp, synthetic construct
  source 1..120: mol_type = other DNA
ctacattaggtatttctcctaatgctatccctcccctagtcccccaagccctgacaggccccgatgtgtgatgttcccctccctgtgtccatgtgttctcattgttcacctcccacttat

SEQ ID NO: 22481 - DNA, 120 bp, synthetic construct
  source 1..120: mol_type = other DNA
ctgcaaaggacatgaacacatcttttttatgcctgcatagtattccatggcatatatgtgccatattttctttatccagtctatcattgatggacatttgggttggttccaagtctttgc

SEQ ID NO: 22482 - DNA, 120 bp, synthetic construct; identical to SEQ ID NO: 6692
  source 1..120: mol_type = other DNA

SEQ ID NO: 22483 - DNA, 120 bp, synthetic construct
  source 1..120: mol_type = other DNA
gtcttcttttgagaagtgtctgttcatatccttcacctactttttgatggggctgtttgtttttttcttgtaaatttgtttaagttctttgtagattttggatattagccctttgtcaga

SEQ ID NO: 22484 - DNA, 120 bp, synthetic construct
  source 1..120: mol_type = other DNA
tgttgccattgcttttggtgttctagtcatgaagtctttgcccatgcctatgtcctgaatggtattgcctaggttttcttctagggtttttatggttttaggtcttacgtttaagtcttt

SEQ ID NO: 22485 - DNA, 120 bp, synthetic construct
  source 1..120: mol_type = other DNA
cccaacaccatttattaaatagggaatcctttccccattgcttgtttttgtcaggtttgtcaaagatcagatggttgtagatgtgtggtgttatttctgaggcccttcttctgttccatt

SEQ ID NO: 22486 - DNA, 120 bp, synthetic construct
  source 1..120: mol_type = other DNA
tggctatgtgggctctttattggttccatatgaaatataaagtagttttttctaattctgtgaagaaagtcaatggtagcttgatagggataacactgaatctataaattactttgggca

SEQ ID NO: 22487 - DNA, 120 bp, synthetic construct; identical to SEQ ID NO: 6693
  source 1..120: mol_type = other DNA

SEQ ID NO: 22488 - DNA, 120 bp, synthetic construct
  source 1..120: mol_type = other DNA
gggccttttccacctttgaacccctcagcactcaacagtgtgcccaggatgtgatagttaataattgtgagttgaattattaattcagtcacctctatccacccattcttctccccacag

SEQ ID NO: 22489 - DNA, 120 bp, synthetic construct
  source 1..120: mol_type = other DNA
ttttcctttgaaggttttcttaagagactctggggaaacccgttggctggtatctgtttcctggctgaaaagaactgacaaactgttctcgttcaccttcctgtggctgcacaaaggcat

SEQ ID NO: 22490 - DNA, 120 bp, synthetic construct
  source 1..120: mol_type = other DNA
gagcagaaaacttaggaccagaaaagcaatgctcccaaggccacatagcaaagctgaagttcatgaggaacctggatttcttgacccttaattcattgttctttccatcctagtctgttt

SEQ ID NO: 22491 - DNA, 120 bp, synthetic construct; identical to SEQ ID NO: 6694
  source 1..120: mol_type = other DNA

SEQ ID NO: 22492 - DNA, 120 bp, synthetic construct
  source 1..120: mol_type = other DNA
gactccaatcacaacttccttttgcctctaagaaattattacagtcttccccacctaactctaagaaggcatagtagggttatgatggtattgtagttgtggaaatatttttgaaaagtt

SEQ ID NO: 22493 - DNA, 120 bp, synthetic construct
  source 1..120: mol_type = other DNA
aatggaatgagtcttggaccagttgctccctatccctgttaatcaataataagtatatagatgatcatcctggaagctatctctgagccccttcctaaccatgtctgccttttatccctt

SEQ ID NO: 22494 - DNA, 120 bp, synthetic construct
  source 1..120: mol_type = other DNA
ttggaaggagagggatgaatatatcacaaaggtctctgaggaagtcacccggcttggagcccaggtcaaggagctggaggagaagtgtcagcagccagcaagtgagcttctacaagtgag

SEQ ID NO: 22495 - DNA, 120 bp, synthetic construct; identical to SEQ ID NO: 6695
  source 1..120: mol_type = other DNA

SEQ ID NO: 22496 - DNA, 120 bp, synthetic construct
  source 1..120: mol_type = other DNA
cttggcatgattcctgatatacagaaagaactcaataactggtgtctgctatggttatgaatatgtgatcctggctcacatcaggtccagctgataactgaaggcaggcccctgctctct

SEQ ID NO: 22497 - DNA, 120 bp, synthetic construct
  source 1..120: mol_type = other DNA
aatctaatgagtaggtaattaaacaggacaactctctgcagaaggagagttttgagttcatattttaagggaaaagtgatgtacagaatccctgacaggaaggacttatggaaactaaat

SEQ ID NO: 22498 - DNA, 120 bp, synthetic construct
  source 1..120: mol_type = other DNA
actgccacccactttgccaggaaagcaaaggcactctggcagacacactgtctcattcaactgtgcacaaacagtccaaactcactaaagatttgcgttctaaaggttcatttttaaatt

SEQ ID NO: 22499 - DNA, 120 bp, synthetic construct; identical to SEQ ID NO: 6696
  source 1..120: mol_type = other DNA

SEQ ID NO: 22500 - DNA, 120 bp, synthetic construct
  source 1..120: mol_type = other DNA
atgaagagaggtgtagtgactagggaacaattgtcacgtgctttgtgcctattcccgtgcagggaggataaacccagggtccatgaatcaggaagtgtctccaaacatgcttttcaaaga

SEQ ID NO: 22501 - DNA, 120 bp, synthetic construct
  source 1..120: mol_type = other DNA
tcaaggtaatgcagcaagtgtctaatgaggactgagctgggaccagaatcaggagtttttttcattgcaatatatattttcgttgatcctttttttttcttcccttctagcctcttttcc

SEQ ID NO: 22502 - DNA, 120 bp, synthetic construct
  source 1..120: mol_type = other DNA
tctcctaaaggggcttacctccaattcttgagaagtgattatccttagttcctcttaggtttaactgaaatgcctactattttagtaactacacatttccagcaaaagtaaagaaatgat

SEQ ID NO: 22503 - DNA, 120 bp, synthetic construct; identical to SEQ ID NO: 6697
  source 1..120: mol_type = other DNA

SEQ ID NO: 22504 - DNA, 120 bp, synthetic construct
  source 1..120: mol_type = other DNA
ttcccttagtgatctcaatttattcaggggcactattcccagagcatctcctccactccctaaggacaggtgcaggactgagagtccaggagggtgaggacccttctcctccactagacc

SEQ ID NO: 22505 - DNA, 120 bp, synthetic construct
  source 1..120: mol_type = other DNA
aaaacttggcgcatcatctggaaatagattcaggtaaacagcttgggatttggggagtcattcttccattcatccattcaatccatggcagcaaacagagcaataaaatgcatgaattct

SEQ ID NO: 22506 - DNA, 120 bp, synthetic construct
  source 1..120: mol_type = other DNA
acctgtcccataagtagctgtgaggacaaaataaattaatacatgcaaagagcttagtatattacctgactcatagtaagtgctcaattaatgtcatctacttgtgtagatattactcgt

SEQ ID NO: 22507 - DNA, 120 bp, synthetic construct; identical to SEQ ID NO: 6698
  source 1..120: mol_type = other DNA

SEQ ID NO: 22508 - DNA, 120 bp, synthetic construct
  source 1..120: mol_type = other DNA
agaagcaaatccttaacagcaccacttgctgattaggtagaagggcggttcagagaagtggcccaatggcaggctgcccaagtccagtactccttctgcctcccacgtgcgttgcctgct

SEQ ID NO: 22509 - DNA, 120 bp, synthetic construct
  source 1..120: mol_type = other DNA
agtgaggtacacccggcagaagaagagcctgccagacagccccctgcgcttcgacggcctcccggcggttctgggcttcccgggcttctcctccgggcgccaccgctggcaggttgacct

SEQ ID NO: 22510 - DNA, 120 bp, synthetic construct
  source 1..120: mol_type = other DNA
gtgctgggccagcacctccccgggcaccgacctgccgctgagcgagatcccgcgcggcgtgagagtcgccctggactacgaggcggggcaggtgaccctccacaacgcccagacccagga

SEQ ID NO: 22511 - DNA, 120 bp, synthetic construct; identical to SEQ ID NO: 6699
  source 1..120: mol_type = other DNA

SEQ ID NO: 22512 - DNA, 120 bp, synthetic construct
  source 1..120: mol_type = other DNA
ccaacctaggagccagcgggctttcggggaaaaaaaagaaaaagacatctaaaataaaatgtttaaactgtttcaaaataattatcttgggaaaaatcagggttttgctggacttgcact

SEQ ID NO: 22513 - DNA, 120 bp, synthetic construct
  source 1..120: mol_type = other DNA
ctggtcatttctctggacttgtagagaatgtcctaagaaagtgtgactcacagacctctggattccatgtgtccaattagcgctgatgggactggagaaaggcttaaatccaatgggatc

SEQ ID NO: 22514 - DNA, 120 bp, synthetic construct
  source 1..120: mol_type = other DNA
atgacagacagtgggacaatcaccaggccccattgtttaagaaaacgaggcttttgctcaggtctaactaacctctcaaatatttgttattactgcagttattatttggacacagaaaca

SEQ ID NO: 22515 - DNA, 120 bp, synthetic construct; identical to SEQ ID NO: 6700
  source 1..120: mol_type = other DNA

SEQ ID NO: 22516 - DNA, 120 bp, synthetic construct
  source 1..120: mol_type = other DNA
ttaaaaatataaaaattagctgggcgagatggcaggcgcctgtaatcccagctgctcaggaggctgaggcaggagaatcacttaaaccagggaggcggaggttgcagtgagctaagatca

SEQ ID NO: 22517 - DNA, 120 bp, synthetic construct
  source 1..120: mol_type = other DNA
tcaggagtttgagcctggccaacatggtgaaaccccatctccactaaatatacaaaaattagctgggtgtggtggcagaccagctacttgggaggctgaagcaggggaatcacttgaacc

SEQ ID NO: 22518 - DNA, 120 bp, synthetic construct
  source 1..120: mol_type = other DNA
gcgtaagccctgctcctaaagcatgggtcagatgttttaaaagcactcaaagagtttggaccatatgtgaattttatttaaaaattgtaacatgaatcaatgtgatgtgaataattaacc

SEQ ID NO: 22519 - DNA, 120 bp, synthetic construct
  source 1..120: mol_type = other DNA
aaaattgtaacatgaatcaatgtgatgtgaataattaaccctaacttgactgttggggaaatagaggttcttgatataaaagaagccagacaatgtggggtttcttctgccccccagtgt

SEQ ID NO: 22520 - DNA, 120 bp, synthetic construct; identical to SEQ ID NO: 6701
  source 1..120: mol_type = other DNA

SEQ ID NO: 22521 - DNA, 120 bp, synthetic construct
  source 1..120: mol_type = other DNA
attggtcaaatttgttttaattatatcttcatttgaaccttacaacaagcctgtgaaatacataagacctattttgtttttctcatgtggtggttgagaaaactggcacacagttaaatg

SEQ ID NO: 22522 - DNA, 120 bp, synthetic construct
  source 1..120: mol_type = other DNA
catttccaccacactcagacttctaaaacagacacatcccaatggggctatgtttcatttgctacccattgaattcatgttttagacagggcatttttggtttcatatgaaacagaaaaa

SEQ ID NO: 22523 - DNA, 120 bp, synthetic construct
  source 1..120: mol_type = other DNA
atattaataaattgttctgcataagaaaggaaagagaaatttagaagccaaaagaaatttgggagtggctaagacctcagggtgaggactgagagctgcctgaaggaaaagcagaggaaa

SEQ ID NO: 22524 - DNA, 120 bp, synthetic construct; identical to SEQ ID NO: 6702
  source 1..120: mol_type = other DNA

SEQ ID NO: 22525 - DNA, 120 bp, synthetic construct
  source 1..120: mol_type = other DNA
cagatgcattgtctctctggtcggcttactttgctctggatgtggggcccattctcctgtctataaggaagcttcctagctctactcatggcctttattttctttttcattttcagttct

SEQ ID NO: 22526 - DNA, 120 bp, synthetic construct
  source 1..120: mol_type = other DNA
tgcaaggtcttctggtttcatttgtattttctcctctctccccaatttttattcccattctcctcactcccaaaggcagctactccctaatgtttttcttttttaaaaaatttttcaact

SEQ ID NO: 22527 - DNA, 120 bp, synthetic construct
  source 1..120: mol_type = other DNA
tattcttcctgatcctctccctcctcccacccccgccctccaacagggcccagtgtgtgttgttccccccgcctcctgccatgtgtccatatgttctcattatttagatcctacttataa

SEQ ID NO: 22528 - DNA, 120 bp, synthetic construct
  source 1..120: mol_type = other DNA
attccatggtatatgtgtaccacattttctttatccagtctatcattgatgggcatttagtttgatttcatatctttgctattgtgaatactactgcaatgaacatacacatgcatgtat

SEQ ID NO: 22529 - DNA, 120 bp, synthetic construct; identical to SEQ ID NO: 6703
  source 1..120: mol_type = other DNA

SEQ ID NO: 22530 - DNA, 120 bp, synthetic construct
  source 1..120: mol_type = other DNA
gagtatttgttctttgtgctcaggatttctttggctatttgggctttttttgggaggggggggttggtccatatgaattttaggatttttttttcaaattctgtgaagaatgatgttgat

SEQ ID NO: 22531 - DNA, 120 bp, synthetic construct
  source 1..120: mol_type = other DNA
tttctctcaacagtattttgtagttttccttgtaaagatcttttgcctccttggttaaattcaatcctaaattgtttttggtagcaaaaatttctaaatgagattgccttcttgatttct

SEQ ID NO: 22532 - DNA, 120 bp, synthetic construct
  source 1..120: mol_type = other DNA
attgtgtttctttcttttgcctgatccttatagctaggattttagtactatgttgaataagagtattgagagtagacatccttgccttgttccagtgcttagaggaaaagctttccactt

SEQ ID NO: 22533 - DNA, 120 bp, synthetic construct; identical to SEQ ID NO: 6704
  source 1..120: mol_type = other DNA

SEQ ID NO: 22534 - DNA, 120 bp, synthetic construct
  source 1..120: mol_type = other DNA
aattttctttttgttggtgttgtggtgtatctgtctggttttagtattagggtgatgctgacctcatataattagttagggaaaattccttcctctttgacttgtttgaacagtttcagg

SEQ ID NO: 22535 - DNA, 120 bp, synthetic construct
  source 1..120: mol_type = other DNA
ctgctcaggttttctatttttttctgattcagtcttggtaggttgtgtgtttccaggaatttatccacttcctctagattttccaattttatctagttgtttataaccgtctctgatgat

SEQ ID NO: 22536 - DNA, 120 bp, synthetic construct
  source 1..120: mol_type = other DNA
caaagaaccaatttttcatctcattgatcctttgtatttctttaagtctctactttctgctctgatctttattatttcttttcttctgctaatttggggtttggtttgttcttgcttttc

SEQ ID NO: 22537 - DNA, 120 bp, synthetic construct; identical to SEQ ID NO: 6705
  source 1..120: mol_type = other DNA

SEQ ID NO: 22538 - DNA, 120 bp, synthetic construct
  source 1..120: mol_type = other DNA
gcctgccaccacgcccagctaatttttttgtatttttcacagagacagggtttcaccatgctggccaggctggtctcgaacttctgacctcaggtgatccatccgcctcagccacccaaa

SEQ ID NO: 22539 - DNA, 120 bp, synthetic construct
  source 1..120: mol_type = other DNA
tcctcttggtattgatttctcattttattctattgcagtctgagaaaatatttgatatgattttaatttttaaaaatttattgagacttgttttgtcacctaatatatggtctatgttgg

SEQ ID NO: 22540 - DNA, 120 bp, synthetic construct
  source 1..120: mol_type = other DNA
tttctgtctagataatctgtctaatgctgagcatgaggtgctaaagtcccccactattattgtattccaatctgtctctctctttagagctagtaatatttgctttatgaatgtgggtgc

SEQ ID NO: 22541 - DNA, 120 bp, synthetic construct; identical to SEQ ID NO: 6706
  source 1..120: mol_type = other DNA

SEQ ID NO: 22542 - DNA, 120 bp, synthetic construct
  source 1..120: mol_type = other DNA
cctgtcatattgttgttttctgattgttttatatattctttgttcctttcttcttgtttgtcattgtggtttggtggatttctgtagaggcaccatttgagtcctttctcttcttccttt

SEQ ID NO: 22543 - DNA, 120 bp, synthetic construct
  source 1..120: mol_type = other DNA
aacaaattccctcagtatttgcctgtctgggaaagactttatttctttttcctttatactttaatttggctggatctaatattcttggctgacagttattttctttcatcattttgtata

SEQ ID NO: 22544 - DNA, 120 bp, synthetic construct
  source 1..120: mol_type = other DNA
ctttattttgactttagacagtctaattataatgtgctatggagaagaccctttgcattgcatctgcctgggaaacattgagcctcctatacctgcatgtccaaatcccttgctaggctt

SEQ ID NO: 22545 - DNA, 120 bp, synthetic construct; identical to SEQ ID NO: 6707
  source 1..120: mol_type = other DNA

SEQ ID NO: 22546 - DNA, 120 bp, synthetic construct
  source 1..120: mol_type = other DNA
tttctcattcatatcctacattattatcttttttctttctattgtttttcagaattctcttatatatcactgagtttctttttttttttttttttttttttttttttttttttttttttg

SEQ ID NO: 22547 - DNA, 120 bp, synthetic construct
  source 1..120: mol_type = other DNA
acaggcacccaccaccacacccagctaattttttctatttttagtagagacggggtttcaccgtgttagccaggatggtctcaatctcctgacgtcgtgatccacccacctcggccttcc

SEQ ID NO: 22548 - DNA, 120 bp, synthetic construct
  source 1..120: mol_type = other DNA
ggagaggtattgtgttcctttgttggtgtcatatttctttgttctttagttttctgtgtccttacattgatatctgcacatttagttgcaacagtcacttcttccatttttgaaattgct

SEQ ID NO: 22549 - DNA, 120 bp, synthetic construct; identical to SEQ ID NO: 6708
  source 1..120: mol_type = other DNA

SEQ ID NO: 22550 - DNA, 120 bp, synthetic construct
  source 1..120: mol_type = other DNA
gccaattattgggccttcaggtgacttgctcagatgctagcagtggcagcagtgggccagacatgtgggcaacttctcaggctcctgggcagctggtgtgaaatgggtaatggcagtagc

SEQ ID NO: 22551 - DNA, 120 bp, synthetic construct
  source 1..120: mol_type = other DNA
ggtggtattggtagattgagttggactgacctcagatcctgacaggaatgattcagatgccagtggtggtagattgggctgggcaatttccgggcccctggatgatgtgcttgtgtactg

SEQ ID NO: 22552 - DNA, 120 bp, synthetic construct
  source 1..120: mol_type = other DNA
ggctggctgtggtggctgcactgtagtcctgcaaccagggaaggcagggccactctcagctggcgcatcatgagcaagtagctgtgggaagtgtcatctgctcacacctttgtccacacc

SEQ ID NO: 22553 - DNA, 120 bp, synthetic construct; identical to SEQ ID NO: 6709
  source 1..120: mol_type = other DNA

SEQ ID NO: 22554 - DNA, 120 bp, synthetic construct
  source 1..120: mol_type = other DNA
gcgccacatcagtccggcctcaggtcaagacttatgtgataggcattattctgggtacttgggatgcatcagtttttaaaaagtttctttttaaagctcatgcctgtaatcccagcactt

SEQ ID NO: 22555 - DNA, 120 bp, synthetic construct
  source 1..120: mol_type = other DNA
ctgtagtcccaggtacttgggaggctgaggcaagagaatcgcttgaacctgggcagcggaggttgccagtaagccaagatcatgccaccgcactccagcctgggcaacagagcgagactc

SEQ ID NO: 22556 - DNA, 120 bp, synthetic construct
  source 1..120: mol_type = other DNA
agctgatgtgatcttagaccttccctctcaccattctgatttcagctctcatgccatcttttcagggaactcccttctgatcacacattataaaatagatactaggtcactatctatcac

SEQ ID NO: 22557 - DNA, 120 bp, synthetic construct; identical to SEQ ID NO: 6710
  source 1..120: mol_type = other DNA

SEQ ID NO: 22558 - DNA, 120 bp, synthetic construct
  source 1..120: mol_type = other DNA
catcactagagcctaggtgacagagtaagaccatgtctctaaaataataaaaattcagccagttgtggtggctcacacctgtaatcccagcaaggcaaacacaaaatagtttgctgaaag

SEQ ID NO: 22559 - DNA, 120 bp, synthetic construct
  source 1..120: mol_type = other DNA
taaaaaataaaaagggaaaatttacatgagcccacaacttagagaacagagaggaaatatgctctttgccactagcgtaattttacaggtagtttcgtataatcctcccttttccatctt

SEQ ID NO: 22560 - DNA, 120 bp, synthetic construct
  source 1..120: mol_type = other DNA
ggctaacatggtgaaaccccgtctctactaaaaatacaaaaaaattagccgggcgtgatggcgggcgcctgtagttccagctactcgggaggctgaggcaggagaatggcgtgaacccgg

SEQ ID NO: 22561 - DNA, 120 bp, synthetic construct; identical to SEQ ID NO: 6711
  source 1..120: mol_type = other DNA

SEQ ID NO: 22562 - DNA, 120 bp, synthetic construct
  source 1..120: mol_type = other DNA
gtaggctctttttgagggacttccagaaatgacagcatgtgtgcagagaacagaaagcaaagttacactgttacagaaggcacagaaggaaaaccttcggctactgctatcagtggaatt

SEQ ID NO: 22563 - DNA, 120 bp, synthetic construct
  source 1..120: mol_type = other DNA
gcactgcactaggtgccatgagaatacaagagtagtataagatgttatccgccctccaggagcttacaaaactagaggcagaaataagatgtacatgtgactcaggcagcatgtgacaca

SEQ ID NO: 22564 - DNA, 120 bp, synthetic construct
  source 1..120: mol_type = other DNA
ggtggaggacttaaaacttggatgaacaggggctggcagagcacttggaatgggtaaggacaagactgggagatcaatttggctggagcaggggagcttgtgttaaactgtgatgatgag

SEQ ID NO: 22565 - DNA, 120 bp, synthetic construct
  source 1..120: mol_type = other DNA
tgtggcctcctgctgccttcctttccctgtcttcccatctccactctctcctaggaaagtggaacctggatgctggtagggccagagacagaggcttaacaccctgctggggaacccggt

SEQ ID NO: 22566 - DNA, 120 bp, synthetic construct; identical to SEQ ID NO: 6712
  source 1..120: mol_type = other DNA

SEQ ID NO: 22567 - DNA, 120 bp, synthetic construct
  source 1..120: mol_type = other DNA
cctgggaagcctcagtggattttgtttattttcagcattgccatgtatgcttaactctgagttggggtggggtaggtctgtttaaaatgccagggaaggtgggcagcagagtggatttgt

SEQ ID NO: 22568 - DNA, 120 bp, synthetic construct
  source 1..120: mol_type = other DNA
ctgggcaagaaaatgctgcatcgggcccttattccagagagtgcagagctggggccaaggtcgtggtcaaaaaggaaaggagccctcatggactccagggtcagaagttccctcgggaaa

SEQ ID NO: 22569 - DNA, 120 bp, synthetic construct
  source 1..120: mol_type = other DNA
ccaggtgcttaggccaggcatcccgtccccccattgagagtcctggaattccaaagaagtgaagcatctgagggttggggctgggggcagatgtcagggctcagggtcttagcaggaggc

SEQ ID NO: 22570 - DNA, 120 bp, synthetic construct; identical to SEQ ID NO: 6713
  source 1..120: mol_type = other DNA

SEQ ID NO: 22571 - DNA, 120 bp, synthetic construct
  source 1..120: mol_type = other DNA
cgtccgtttcccagtcgtcatatccatccccatagccggcctcctcttcctcctcctcctcttctccctcttcctcctcatccccctcttcttcatcctcagaccagccctccctctcca

SEQ ID NO: 22572 - DNA, 120 bp, synthetic construct
  source 1..120: mol_type = other DNA
acttccagtcctctgacagctgcaggtacccactggccgactgtgggtccagggtgacgctcactgtggggacaagggaaaaaaaaaaaaacagcatcactgttttgttttgttttttaa

SEQ ID NO: 22573 - DNA, 120 bp, synthetic construct
  source 1..120: mol_type = other DNA
ccttaatttggtataagtgtgacacattttctggctttgtattctgctaaatcaccataactaaactgctttataaacatgatatactgaaatttaacttgactgttttcgcttacgctc

SEQ ID NO: 22574 - DNA, 120 bp, synthetic construct; identical to SEQ ID NO: 6714
  source 1..120: mol_type = other DNA

SEQ ID NO: 22575 - DNA, 120 bp, synthetic construct
  source 1..120: mol_type = other DNA
caattactgcactggggttctacaagcttcaagagcatctgtttcatgtctctgccacagcttgcatctataacaacattttcaatttcctgaataatttcttccatatcagtccttcct

SEQ ID NO: 22576 - DNA, 120 bp, synthetic construct
  source 1..120: mol_type = other DNA
accaacctgaagaatatctgcccttgtaacctgtccatttgttcctctgatctccaggttatgataaagctctcccagaaagggtacaaatgcatgaaattgttttggagtaacttcatc

SEQ ID NO: 22577 - DNA, 120 bp, synthetic construct; identical to SEQ ID NO: 6715
  source 1..120: mol_type = other DNA

SEQ ID NO: 22578 - DNA, 120 bp, synthetic construct
  source 1..120: mol_type = other DNA
gctgaggcaggagaatggcgtgaacctgggaggcggggctcgcagtgagctgagatcacaccactacactccagcctggaagacaaagcaagactccatctcaaaaaaaaaaaaaaaaaa

SEQ ID NO: 22579 - DNA, 120 bp, synthetic construct
  source 1..120: mol_type = other DNA
aaaaatacaaaaaattagccgggcgaggtggcgggcgcctgtagtcctagctactcgggaggctgaggcaggagaatggcgtgaaccccaggaggcggagcctgcagtgagccgagattg

SEQ ID NO: 22580 - DNA, 120 bp, synthetic construct
  source 1..120: mol_type = other DNA
tctgttgtaacacaagcattcagggtctctgtaaactgttcaatttcagtttcaaaactaccagcctgctctgtaagatggttcaagaaaccctgaacaggtactgacagagtgggataa

SEQ ID NO: 22581 - DNA, 120 bp, synthetic construct; identical to SEQ ID NO: 6716
  source 1..120: mol_type = other DNA

SEQ ID NO: 22582 - DNA, 120 bp, synthetic construct
  source 1..120: mol_type = other DNA
tggttggtatgcagtgtacaacctaactgcagggctgagagggggcacaatagtggggcctgtggtggatatggcctctggtcttaggttgcccctgctgtttgctctgaatataggagc

SEQ ID NO: 22583 - DNA, 120 bp, synthetic construct
  source 1..120: mol_type = other DNA
ggcctctactgcagactaaagagtaggctgattagaaagtgcaaagagggaggggggcttctattgtgcagctgggaaattcttcctgttgcaaaaggggctacctgggggaaaagtgag

SEQ ID NO: 22584 - DNA, 120 bp, synthetic construct
  source 1..120: mol_type = other DNA
acagcaatgactcaagtcccgaaaatttatgagcccatttcttgctcgggcagtatcaatttcctgatagggatccatgtctaagacaagaggccctcagaagagtgaggatcgacaagg

SEQ ID NO: 22585 - DNA, 120 bp, synthetic construct; identical to SEQ ID NO: 6717
  source 1..120: mol_type = other DNA

SEQ ID NO: 22586 - DNA, 120 bp, synthetic construct
  source 1..120: mol_type = other DNA
ggcttcagaacatcagtagactccacatccagggcgctctgtctactaagccatgtttctaacctctctgctctgtcccacctcaaataaggccagtgggccaaggagctggggctacac

SEQ ID NO: 22587 - DNA, 120 bp, synthetic construct
  source 1..120: mol_type = other DNA
ttcaaatgcacctggtcagaagcgggggaacataaacaagggggatgaggtacgccatggagaggagactcttttacctgtttaggaagtctctcgtgtcctagaagggaaagaaaaaag

SEQ ID NO: 22588 - DNA, 120 bp, synthetic construct
  source 1..120: mol_type = other DNA
caaaacaaatgtggtcccttttttatggagctgacattccagtggggtcactgcataaaacaacaagaaaacaaacaaaatcggcacaatgacagaagccacaatggctgggagatgaca

SEQ ID NO: 22589 - DNA, 120 bp, synthetic construct; identical to SEQ ID NO: 6718
  source 1..120: mol_type = other DNA

SEQ ID NO: 22590 - DNA, 120 bp, synthetic construct
  source 1..120: mol_type = other DNA
ctgggaagactacattttccagatcccctacgacaaggtctggtcatgagactaagttccagccaatggaatgtgatagaaagcaatgaccataattctgggcattgtcctttaaaaaaa

SEQ ID NO: 22591 - DNA, 120 bp, synthetic construct
  source 1..120: mol_type = other DNA
aagtaacccagtcccttggataagcttatgtacagctactgtgatagctctagaccctgcacctctgaactgttaactgaggcagaaataaacttctattctgtttgcgtcactgtacag

SEQ ID NO: 22592 - DNA, 120 bp, synthetic construct
  source 1..120: mol_type = other DNA
aaagatggcctgaactaaggtggtggcagtagggagaaaaagagagaagcaatacattccaggtattttagagacagattcaactggacatactggtcaaggataaacaagaacagagca

SEQ ID NO: 22593 - DNA, 120 bp, synthetic construct
  source 1..120: mol_type = other DNA
acagacaggtggtagggcagggtgagtgggaagagggctattctgacatgctcagattcccttttgtgagtcaaaagcctccttaataccctgtattaattgatttttgccttcctttca

SEQ ID NO: 22594 - DNA, 120 bp, synthetic construct; identical to SEQ ID NO: 6719
  source 1..120: mol_type = other DNA

SEQ ID NO: 22595 - DNA, 120 bp, synthetic construct
  source 1..120: mol_type = other DNA
gaataagacaagaagtcagaggcacatcccaaccccccgctatgaagcaagtgcccagagactggtagcacatttctggccaagtcctctaacatgcccctcaaaacatgtaagtccaag

SEQ ID NO: 22596 - DNA, 120 bp, synthetic construct
  source 1..120: mol_type = other DNA
ggcatatttcctgacatggaagttcctagaacagtagaaagggagagaatcatacaggagaaagaagagtcctctaaaggttaaaggttgtgagcagcccagagagggtgggtcccgaga

SEQ ID NO: 22597 - DNA, 120 bp, synthetic construct
  source 1..120: mol_type = other DNA
acccaagacatctgaagctgtcatgaaacaggcagagccgagcagtggggctgcggcaatgagtcatggcaagctcccggaggggatgtgcccggttactaagagagagcatcaagaaag

SEQ ID NO: 22598 - DNA, 120 bp, synthetic construct; identical to SEQ ID NO: 6720
  source 1..120: mol_type = other DNA

SEQ ID NO: 22599 - DNA, 120 bp, synthetic construct
  source 1..120: mol_type = other DNA
ggtgtgaatcaccacaccagcctcacctgtatttctctatcagacttctggaccctattttaggtctttttcttactatactttgacagccaaataatctctgggaaaatattaatgcta

SEQ ID NO: 22600 - DNA, 120 bp, synthetic construct
  source 1..120: mol_type = other DNA
ttattaaagagactgtcccttccccattgtatgttcttggttcctttgttgaaaatcagttggctgtaaatatgtgaatttatttctgagttctctactctgttccattggtctatgtgt

SEQ ID NO: 22601 - DNA, 120 bp, synthetic construct
  source 1..120: mol_type = other DNA
atgtgtgtgtgtgtgtgtgtgtgtgtgtatatatatatatatatatatttttttttttttttttttaatggagtctcactctattgcccaggctggaatgcagtggcacaatctcggctc

SEQ ID NO: 22602 - DNA, 120 bp, synthetic construct
  source 1..120: mol_type = other DNA
cacgcccagctaatttttgtatttttagtagagatggggtttcaccatgttggtcaggctggtctcaaactcctgacctcgtgatccgcctgtctcggcctcacaaagtgctgggattac

SEQ ID NO: 22603 - DNA, 120 bp, synthetic construct; identical to SEQ ID NO: 6721
  source 1..120: mol_type = other DNA

SEQ ID NO: 22604 - DNA, 120 bp, synthetic construct
  source 1..120: mol_type = other DNA
ggtctttcacctccttggttaacttcattcccaggtattttattttacttttgtagctattgtaaatggggttgctttcttgatgtcttttttagctagtttgttattggtgtattaaaa

SEQ ID NO: 22605 - DNA, 120 bp, synthetic construct
  source 1..120: mol_type = other DNA
aaaacagtatgagagtttctcaaaaaactaaaaatagaactaccatatgatccagcaatctcattactaggtatttatccaaagaaaagaaaatcagtatatcaaagggatacctgcaca

SEQ ID NO: 22606 - DNA, 120 bp, synthetic construct
  source 1..120: mol_type = other DNA
taaatttgagttcatggaagtaagacagtagaatagtaatgattagaggttgggaagggggctggggagaggagggtggggagaagttggttaacagatacaaagttatagctacatggg

SEQ ID NO: 22607 - DNA, 120 bp, synthetic construct; identical to SEQ ID NO: 6722
  source 1..120: mol_type = other DNA

SEQ ID NO: 22608 - DNA, 120 bp, synthetic construct
  source 1..120: mol_type = other DNA
tcccagctatttgggaggctgaggcaggagaatcgcttgaacccaggagacagaggttgcagaggcaggagaattgcttcaacccaggaggcggagattacagtgagctgagatcacgcc

SEQ ID NO: 22609 - DNA, 120 bp, synthetic construct
  source 1..120: mol_type = other DNA
caaaaaaagaaacctaccagtaccaataacatttcctatactagtttcaagctgacaccattttctctcccttcccttgaccttatcccaccccagggagagctgcaatctgagtgctct

SEQ ID NO: 22610 - DNA, 120 bp, synthetic construct
  source 1..120: mol_type = other DNA
tgttccacacagtaggcattcacacatggcaggggcgtgaggagaggaaggagaagagaaacgggcaaaaggagatgcagaaaatgacccagtcaaagagtatgacgagagaaatctgag

SEQ ID NO: 22611 - DNA, 120 bp, synthetic construct; identical to SEQ ID NO: 6723
  source 1..120: mol_type = other DNA

SEQ ID NO: 22612 - DNA, 120 bp, synthetic construct
  source 1..120: mol_type = other DNA
tagagatcctgggtggctctgctgctgacagacagacccagccaccctaaacagtgcaagtgggggaataccatcagagagcccctcccctcccagcctatgagagcaggaaggttgagc

SEQ ID NO: 22613 - DNA, 120 bp, synthetic construct
  source 1..120: mol_type = other DNA
ctccctttctcactatcaaagccccctcctctaggaggtgccccgaggcccccttgtctgctttccatcttgttctctgtgtggtaatcccatgggccaaagaaaacctggccatctctg

SEQ ID NO: 22614 - DNA, 120 bp, synthetic construct
  source 1..120: mol_type = other DNA
aagtgtctgccaatgacttgttaagagggcttgtgatggcagtgatgaggatggaggatggtaaatgatattaataatcttcccttccattttctactataccatttagttttttgaaca

SEQ ID NO: 22615 - DNA, 120 bp, synthetic construct; identical to SEQ ID NO: 6724
  source 1..120: mol_type = other DNA

SEQ ID NO: 22616 - DNA, 120 bp, synthetic construct
  source 1..120: mol_type = other DNA
tccctgccctccgtgagctcctgctccagcttcgccagctgttccagcaggtgttcctcccgctccctcaggaactgatgaccctgctcaaactcagccacaatgtactgcctctggtcc

SEQ ID NO: 22617 - DNA, 120 bp, synthetic construct
  source 1..120: mol_type = other DNA
attctacaggatctggagtgggaggagctacagagggttcctggtccacactccgcttctcaaagaagactccagtaatgaattagttcagttcaccccaccactatatggtcaaaaccc

SEQ ID NO: 22618 - DNA, 120 bp, synthetic construct
  source 1..120: mol_type = other DNA
tctgtcacctcttccaggaagttttgcttgattaatgtcatctaagcctgaccagccctctcttcagcaccccactgttcagtctaaaatatctatatgtaccccacccctgccatgtaa

SEQ ID NO: 22619 - DNA, 120 bp, synthetic construct; identical to SEQ ID NO: 6725
  source 1..120: mol_type = other DNA

SEQ ID NO: 22620 - DNA, 120 bp, synthetic construct
  source 1..120: mol_type = other DNA
actacagttgtcccttggtatcagtgggtgatgggttccaggatctccctccccaaggataccaaaatccaaggatgctcaagttcttatgtaaaatggaataatagttacataaaatct

SEQ ID NO: 22621 - DNA, 120 bp, synthetic construct
  source 1..120: mol_type = other DNA
gttcagtagagacgctttttcttttttctgaatatttctgatccatggttgggtaaattcgccgctacggaacccacagatatggaggaggtcccactgtactggcaaccatgatcctgg

SEQ ID NO: 22622 - DNA, 120 bp, synthetic construct
  source 1..120: mol_type = other DNA
ctcaggcaaccttgtctctctctctctctttgaaaggaagaatgaagccacaccttcttcagtcccctggcagaagagaaccagcagctggacatgggccctgccttcaaggtgacagtc

SEQ ID NO: 22623 - DNA, 120 bp, synthetic construct; identical to SEQ ID NO: 6726
  source 1..120: mol_type = other DNA

SEQ ID NO: 22624 - DNA, 120 bp, synthetic construct
  source 1..120: mol_type = other DNA
caagcagtggcaacaggtggatgctctgggctggggcaggaagggagactcaggctgagtcctctgaggactgcaaggtggagcatccagagaaggtggcaaggcaccctcgggggtgaa

SEQ ID NO: 22625 - DNA, 120 bp, synthetic construct
  source 1..120: mol_type = other DNA
gcagcttctctcggtgtcgctcgcacaactttgcatcctgctgctcccgggtcacctctcccggctgcctgcccttgtccaccttcagccgctcaatgttctccaccaggctggccagtt

SEQ ID NO: 22626 - DNA, 120 bp, synthetic construct
  source 1..120: mol_type = other DNA
caatggtcacagggtcccgcaggtaatcaagacagatggagcaggtcacctcctcttccaggctccgtagtggggctgacgtggccatggtatccttagttcagagaggtctccgttcac

SEQ ID NO: 22627 - DNA, 120 bp, synthetic construct; identical to SEQ ID NO: 6727
  source 1..120: mol_type = other DNA

SEQ ID NO: 22628 - DNA, 120 bp, synthetic construct
  source 1..120: mol_type = other DNA
gtaatgcaccaactgtaataaaaaatctctcactacctgctgggaaactcataatgatacacatataaatctacaatgtctactgtggacacagtgctccttcactcaactgtgcaaagc

SEQ ID NO: 22629 - DNA, 120 bp, synthetic construct
  source 1..120: mol_type = other DNA
gcgtgatctcagctcactgcaacctccgcctcccaggttcacaccattctcctgcctcagcctcccgagtagctgggactacaggcacccaccaccacacctggctaattttttgtattt

SEQ ID NO: 22630 - DNA, 120 bp, synthetic construct
  source 1..120: mol_type = other DNA
aagagaccccttttgtttgctcctcaaggtttcaggtttcaagaactaagagagggcaatgtgacatggctcaccctgtaaatccaacactttgggtggctgaggcaggaggatcacttg

SEQ ID NO: 22631 - DNA, 120 bp, synthetic construct; identical to SEQ ID NO: 6728
  source 1..120: mol_type = other DNA

SEQ ID NO: 22632 - DNA, 120 bp, synthetic construct
  source 1..120: mol_type = other DNA
gggctgttctatagtttgggtttaatttgcttcccctagaaggctggactctaaacacagccctccagaggagcacagcttagcctcagtggacttgttcttggctgtaactgcctcgtc

SEQ ID NO: 22633 - DNA, 120 bp, synthetic construct
  source 1..120: mol_type = other DNA
gttccaggctgaggttatgagcctcagcacatctaacccaagagcagcctcctgcccctgactctgtgtgacaatacagaagtcacttaagtactgagcctcagtgtatccatctgtaaa

SEQ ID NO: 22634 - DNA, 120 bp, synthetic construct
  source 1..120: mol_type = other DNA
ctggtttccaaatccagtgagtgtccaaaccacaaacaaagagttaaattcaaaagtggcagcaaaagaggaagtgagcagaaccagccacagtgacacacgtgctacagagttcaacaa

SEQ ID NO: 22635 - DNA, 120 bp, synthetic construct; identical to SEQ ID NO: 6729
  source 1..120: mol_type = other DNA

SEQ ID NO: 22636 - DNA, 120 bp, synthetic construct
  source 1..120: mol_type = other DNA
atagtgctgataataaattccaactggaagcactaatggatctaggtatgtgtgactttaagagacataatgaggggaaaatcaagcaccttcaaagctcaaatgaaggattcaaggaat

SEQ ID NO: 22637 - DNA, 120 bp, synthetic construct
  source 1..120: mol_type = other DNA
caggtgaatcacaatgtcaggagattgagaccatcctggctaacacggtgaaaccccatctctactaaaaatacaaaaattatccaggtgtggtagcatgcacctgtagtcccagctact

SEQ ID NO: 22638 - DNA, 120 bp, synthetic construct
  source 1..120: mol_type = other DNA
aaaaagaaagaaatgctaggaattgcctggtccaactccttggctttactgttgaggaaataagcctggctcagcagtttttcagttgtaacatactgcaagtgtttggaaagaggaaaa

SEQ ID NO: 22639 - DNA, 120 bp, synthetic construct; identical to SEQ ID NO: 6730
  source 1..120: mol_type = other DNA

SEQ ID NO: 22640 - DNA, 120 bp, synthetic construct
  source 1..120: mol_type = other DNA
attacagaagaataaccttctgtaagattaatcagcaaataagtagaagagggataacagaattagaaaatcattttgcgactgccattataatagcacaaggatcatcaatagatgcta

SEQ ID NO: 22641 - DNA, 120 bp, synthetic construct
  source 1..120: mol_type = other DNA
gtgaccaaatccagcgtcatcagcagacggggcaaagtggcatgtgctttctggcatggcactatatgaatcacacaacattacctatgaagtgtttgtgccaaaaatgtttgacttgaa

SEQ ID NO: 22642 - DNA, 120 bp, synthetic construct
  source 1..120: mol_type = other DNA
ctgaaaaagtaccgatggaggaattaaaccacaccataaggaaagaaccagataaatccagaatgctggacattgcacatggcaactggcctagtcttttaaaaagtcaatgtcataaaa

SEQ ID NO: 22643 - DNA, 120 bp, synthetic construct
  source 1..120: mol_type = other DNA
aagagaaataataaccaaatgcaatacgtgaaccttgattggatcctgtaaaaagaaaaaaaaggttataaaaatagtcttggaactattgtgggaaatttgtaagtaggctgggtgtta

SEQ ID NO: 22644 - DNA, 120 bp, synthetic construct; identical to SEQ ID NO: 6731
  source 1..120: mol_type = other DNA

SEQ ID NO: 22645 - DNA, 120 bp, synthetic construct
  source 1..120: mol_type = other DNA
gttatgtatgagaatgcctatacttcttatttatttattaatatatttatttatttttgagatggagtttttctcttgttgcccaggctggagtgcaatggcgcaatctggctcactaca

SEQ ID NO: 22646 - DNA, 120 bp, synthetic construct
  source 1..120: mol_type = other DNA
caggttggccaggctggtctcaaactcctgacctcaggtgatccacctgccttggcttcccaaagtgctgggattacaggtgtgagccaccgcgcccggctgagaatacctgtatttcta

SEQ ID NO: 22647 - DNA, 120 bp, synthetic construct
  source 1..120: mol_type = other DNA
ttggctcactgcaaagcaaaataaaaagctagaaaagttttctggggagggagctacagttttctatcacattcttaaagaggtctgtagtaaccatcaaaaatggttaaatcactgata

SEQ ID NO: 22648 - DNA, 120 bp, synthetic construct; identical to SEQ ID NO: 6732
  source 1..120: mol_type = other DNA

SEQ ID NO: 22649 - DNA, 120 bp, synthetic construct
  source 1..120: mol_type = other DNA
tggggtctaataccagctcctttgttaggaagctcagatgaggtcatctacatggaagggctttgtaagcggagtaatgctgacaaaagaaagggggcatatattctgctgatactgacc

SEQ ID NO: 22650 - DNA, 120 bp, synthetic construct
  source 1..120: mol_type = other DNA
gaaatgaggttgagtatgagagatgtgagcagaccagaataaccgctccccttccccatacacaattctgtcaggtccaatgcaaaattcaccctctccaaaaactcttccccaacttac

SEQ ID NO: 22651 - DNA, 120 bp, synthetic construct
  source 1..120: mol_type = other DNA
agaaaccaaaatcagagccaaaaaaaaaaaacctcagagatgacccactccacccccactccctttactcagatgagaattctgaacctgaagaagtcacttcatgaactcccttgcacc

SEQ ID NO: 22652 - DNA, 120 bp, synthetic construct
  source 1..120: mol_type = other DNA
tggatcacctgagatcgggagtttgagaccagcctgaccaacaaggagaaaccccatctctactaacaatacaaaattagccaggtgtggtggcgcatgcctataatcccagctactggg

SEQ ID NO: 22653 - DNA, 120 bp, synthetic construct; identical to SEQ ID NO: 6733
  source 1..120: mol_type = other DNA

SEQ ID NO: 22654 - DNA, 120 bp, synthetic construct
  source 1..120: mol_type = other DNA
aagtctctggatctcataaatacctaatctgcatatgtcaacagactggtcaaggtgacaccatgtaatttcaagatgtggatgcatgcacgattattggctccaagaataatcactatg

SEQ ID NO: 22655 - DNA, 120 bp, synthetic construct
  source 1..120: mol_type = other DNA
agtgagacattgtctccaaaaaaagaaattagctgaattagctgggtgcgatggcacatgcctatagttccagctacttaggaagttgaggcaggaggatctcccgagcccgggaagttg

SEQ ID NO: 22656 - DNA, 120 bp, synthetic construct
  source 1..120: mol_type = other DNA
actctggggcccaagaaagtaaatggagaggcctgggttttcatcctggcctccagggtaccagttcaggcctctcttgagtatcccaagctgcttctcaagcatatgtctggacctcca

SEQ ID NO: 22657 - DNA, 120 bp, synthetic construct
  source 1..120: mol_type = other DNA
gggtcccagattaatccccatattttaatctgagataagcaaactctccatggggtaaacttccgtgagacacctctaacaaacctggagaggccagaattcggggcaaaaagcaagtga

SEQ ID NO: 22658 - DNA, 120 bp, synthetic construct; identical to SEQ ID NO: 6734
  source 1..120: mol_type = other DNA

SEQ ID NO: 22659 - DNA, 120 bp, synthetic construct
  source 1..120: mol_type = other DNA
ctggtcttgtggctgacccacaggggaaaattgagggttcttcatatttgtgccagaatatctgtctaatgttgaatcatgaaccaagctctcttgtctaaaatattcctaagtgtcact

SEQ ID NO: 22660 - DNA, 120 bp, synthetic construct
  source 1..120: mol_type = other DNA
aactgacttaggatctccagaggtggcccaggctctggtattaaaaaacaaacttcccaggagattctaaagtctatccaggactgtgaatcactagaaccccttatttacagaggagga

SEQ ID NO: 22661 - DNA, 120 bp, synthetic construct
  source 1..120: mol_type = other DNA
catacactgcactttggtgcctggaaaatgaactcttccctgcccatatggagtgctgtggagggttagcctcacaggcagaggaaatcatccgccggagaaagggtagcggtgaatttg

SEQ ID NO: 22662 - DNA, 120 bp, synthetic construct
  source 1..120: mol_type = other DNA
caagactgtgacccaggttaagaattttggactttatcctaacagccctgggaagccattgagggtttaagcagcaggatgttgaaagttattcaacagctagcagatgtttattaggtg

SEQ ID NO: 22663 - DNA, 120 bp, synthetic construct; identical to SEQ ID NO: 6735
  source 1..120: mol_type = other DNA

SEQ ID NO: 22664 - DNA, 120 bp, synthetic construct
  source 1..120: mol_type = other DNA
caatggctttctggtgctccaggaataaagtcaaaactcctgtccttcctttcttctgtgaggaggctgtcccaggagatcctagctggattcccagataatcatggcccagcctgtgtc

SEQ ID NO: 22665 - DNA, 120 bp, synthetic construct
  source 1..120: mol_type = other DNA
ctagaacaccatccctttcccacttagcaaatgccttttctagcttgaagtctcagctgaaagccacctcctctggcaattctttcctgacctgtcagattgggtccacatgtagtctag

SEQ ID NO: 22666 - DNA, 120 bp, synthetic construct
  source 1..120: mol_type = other DNA
gtgtctgtcttatcaccagaatctacatattacttggcacagagtagacaataaaaactgactgagaaaacaaagcacaagcacagagtatctgacacaaagaagatgcttcctacacat

SEQ ID NO: 22667 - DNA, 120 bp, synthetic construct; identical to SEQ ID NO: 6736
  source 1..120: mol_type = other DNA

SEQ ID NO: 22668 - DNA, 120 bp, synthetic construct
  source 1..120: mol_type = other DNA
atgtatttgggtggggggctgtcaacatgtttgtgaggctcatccatgtgattatgagctgattttacttaattgctgctctctaactatacaatttttaatgcagtctactgatagcca

SEQ ID NO: 22669 - DNA, 120 bp, synthetic construct
  source 1..120: mol_type = other DNA
tcagtgaatatttctgcatacatgttctagcacacacaggcaagatgtaccctcaatttgactaagcaggccaaactgtttccaaagtgactatagtgctatgtagtctgctcagcaggc

SEQ ID NO: 22670 - DNA, 120 bp, synthetic construct
  source 1..120: mol_type = other DNA
gtgtgtgtgtgtgtgtatttaactccccaaaaggaaacagcatgagacaggcccaataacaggccaaggaatcctatagcagcagaccagatattgtgctcctcgacccaaccagtaaat

SEQ ID NO: 22671 - DNA, 120 bp, synthetic construct
  source 1..120: mol_type = other DNA
ctatgagttagtgagatggagacatcctaaccattaatccagggaaagggaggaatctaagccatcagcaagggagttagtgcttttcatcaaatttgagacacctgtgacatcacattt

SEQ ID NO: 22672 - DNA, 120 bp, synthetic construct; identical to SEQ ID NO: 6737
  source 1..120: mol_type = other DNA

SEQ ID NO: 22673 - DNA, 120 bp, synthetic construct
  source 1..120: mol_type = other DNA
agcaacagaaaatggattaagacaaatagcatcttagatttggtgagatgtggcatatttcctaaaaagtgctgccaggatcatccttctagcacacaggatctcatccttgttattctc

SEQ ID NO: 22674 - DNA, 120 bp, synthetic construct
  source 1..120: mol_type = other DNA
atagggagagactgtctctaaaataaaataaataaataaaaataaaaataaaaataaaaacaaacacaccaaaaaaactcctactagctgaggtcaaaactgcacaggtggccgggcacg

SEQ ID NO: 22675 - DNA, 120 bp, synthetic construct
  source 1..120: mol_type = other DNA
ttagccgggcatggtggcacgcgcctgtagtcctagctactcgggaggctgaggcaggagaatcgcttgaacccaggaggcggaggttgcagtgagctgagatcacgccactgcactcca

SEQ ID NO: 22676 - DNA, 120 bp, synthetic construct; identical to SEQ ID NO: 6738
  source 1..120: mol_type = other DNA

SEQ ID NO: 22677 - DNA, 120 bp, synthetic construct
  source 1..120: mol_type = other DNA
tgcagctttgcatacactgtatttctacaatagcactatcacagtgcttcatacagtagcaccccccatccgctaaagatacattcatacaggagtcccctcaatcctcaggagatgcat

SEQ ID NO: 22678 - DNA, 120 bp, synthetic construct
  source 1..120: mol_type = other DNA
ccgtaataaaagttatatgcatgtggtctctctctctctcaaactatcttgtactgtacttacccttcttgtgatgaaggaacagtgggagggcaagagatttcatcatgctactcagaa

SEQ ID NO: 22679 - DNA, 120 bp, synthetic construct
  source 1..120: mol_type = other DNA
taattgatatttttatctgtcttctctcccaccagaatgtgaacccaaaggtcatgcctcactgacctttttatctccaatatctggcacaaagtagggggtctgcaaatgtttgtgaaa

SEQ ID NO: 22680 - DNA, 120 bp, synthetic construct; identical to SEQ ID NO: 6739
  source 1..120: mol_type = other DNA

SEQ ID NO: 22681 - DNA, 120 bp, synthetic construct
  source 1..120: mol_type = other DNA
gtccaagtctgaagtcattccaagaagcctcaatacagaccatggactctcttcgggggtttgcagtgtcttctgtggtggtcacacacaatctgagtccaacctgttactcccctgcag

SEQ ID NO: 22682 - DNA, 120 bp, synthetic construct
  source 1..120: mol_type = other DNA
gtttaccaggctatttgaggttgaggcaaggtcacataagtacgagtgtctcattagcaaaaagctctataaaaatactatgaaagagcacaggagccaatgtgaaaagagctcccaaca

SEQ ID NO: 22683 - DNA, 120 bp, synthetic construct
  source 1..120: mol_type = other DNA
ggaagagagaaacaaatcttccatgcagaataactgcaaacaataatatgtagatacttgccctcaagaagggggaatataactcttggctccctaggtatgggctgcacttagtgactt

SEQ ID NO: 22684 - DNA, 120 bp, synthetic construct; identical to SEQ ID NO: 6740
  source 1..120: mol_type = other DNA

SEQ ID NO: 22685 - DNA, 120 bp, synthetic construct
  source 1..120: mol_type = other DNA
gaaacagaaaaagtactgaggtaaaaactaaggaaatctgaacacactatggactttggtcaataataatgtattgatattggttaactgcaacaaatgtaccacactgaggtaagatgt

SEQ ID NO: 22686 - DNA, 120 bp, synthetic construct
  source 1..120: mol_type = other DNA
gaaacataaaaagcctattttttttaaaggtgatttttttgaacttggggaaaaacatgttagggattatgatttcagctaagagttaaaaacaggaggttaaggcatgcataaacgaat

SEQ ID NO: 22687 - DNA, 120 bp, synthetic construct
  source 1..120: mol_type = other DNA
cccatttactccacagagttaaatttacactttttttctaaggccaaatagggagaaaatcagtaagaaaaatgctaatgagctggaaggagtgaaagcacagctccaagtatttgtggc

SEQ ID NO: 22688 - DNA, 120 bp, synthetic construct; identical to SEQ ID NO: 6741
  source 1..120: mol_type = other DNA

SEQ ID NO: 22689 - DNA, 120 bp, synthetic construct
  source 1..120: mol_type = other DNA
ggcccggcggctgcgttgggtcgccccaaacccggtgagcgtacgagactgttgcttcgctgtatgtctcatgtgcaccccctactcaccggtcccgagctccgggccgcgaatcccggc

SEQ ID NO: 22690 - DNA, 120 bp, synthetic construct
  source 1..120: mol_type = other DNA
ccgtaatctcccggctattcggggcccttcgccgagatttctcccggaccagccccgggattggctcctgccgaacttcgccatccaatgggaaccttagtctcttttacgtcactgatc

SEQ ID NO: 22691 - DNA, 120 bp, synthetic construct
  source 1..120: mol_type = other DNA
gggtggcctgttacacggtctaagggagtaaatgctaaggcttaggagtcacctacgtaggactcttgagagggcaataatcccctttccacctctcgagacccctcactgcccaactct

SEQ ID NO: 22692 - DNA, 120 bp, synthetic construct
  source 1..120: mol_type = other DNA
gcaggattttagcaagcaaatactctcagagacctatttacgaaaattattacttcctaggtaaaataacgttcaaccagacagccattgtcgccattcgacggaaggaaaaactgaggt

SEQ ID NO: 22693 - DNA, 120 bp, synthetic construct; identical to SEQ ID NO: 6742
  source 1..120: mol_type = other DNA

SEQ ID NO: 22694 - DNA, 120 bp, synthetic construct
  source 1..120: mol_type = other DNA
cagccaggcggcagcggcattcagctcgtgcactgggctggcagcaggctgagaagaggcggcgcaggttctccgggtcagccagtgccctgctcctaagggtagagatctagctgggga

SEQ ID NO: 22695 - DNA, 120 bp, synthetic construct
  source 1..120: mol_type = other DNA
tagaccctaaaacctgctgaatcttcacccctcctccgctgggggtagggaaatttgcactgcatttaagcaatgtatagtggagtgggtgggacattcagaagaaaccacgcccacatt

SEQ ID NO: 22696 - DNA, 120 bp, synthetic construct
  source 1..120: mol_type = other DNA
acaactctggcgggcctgtgctctggaggtggtctcagcacctacctagaccctcttgatacctgcttttttagttggtggtgtgggaagaaagtgtgtttaacatgctccttaaataat

SEQ ID NO: 22697 - DNA, 120 bp, synthetic construct
  source 1..120: mol_type = other DNA
ctactaaaaatacaaaaattagccgggcgtggtggcgcgcacctgtagtcccagctactcaggaggctgaggcaagagaatcgcttgaacccgggaggcggaggttgcagtgagccgaga

SEQ ID NO: 22698 - DNA, 120 bp, synthetic construct; identical to SEQ ID NO: 6743
  source 1..120: mol_type = other DNA

SEQ ID NO: 22699 - DNA, 120 bp, synthetic construct
  source 1..120: mol_type = other DNA
ttgtcagtcatgtctacatctcagaaaggtcttcctccctcacccagttgaaaccagttccccatcatgcattattctgtttccctttcttcatgcatttgttgccatttgaaagcacct

SEQ ID NO: 22700 - DNA, 120 bp, synthetic construct
  source 1..120: mol_type = other DNA
ccccctcagtgtacgccccaagagagttgagacaacacctgtcttccatgcacatggcttccatgtaaataaatgtttgttaaatgaaatgagctcagtgtgggcatttctttttctttt

SEQ ID NO: 22701 - DNA, 120 bp, synthetic construct
  source 1..120: mol_type = other DNA
caccccacaacagcccctggtgtgtgatgttccccttcttgtgtccatgtgttctcattgttcaattccccagtgtgggcatttctaaagctgcctggccctgcttggctgggtatcagt

SEQ ID NO: 22702 - DNA, 120 bp, synthetic construct; identical to SEQ ID NO: 6744
  source 1..120: mol_type = other DNA

SEQ ID NO: 22703 - DNA, 120 bp, synthetic construct
  source 1..120: mol_type = other DNA
atggaagtagctagatctgcttcgtacggttattatgaggcttaaatgtaaagctttgaaatagtgaatcagtgctgactaggccaaagggtatggtataattatttgcatttgaaataa

SEQ ID NO: 22704 - DNA, 120 bp, synthetic construct
  source 1..120: mol_type = other DNA
atgccaccccaaaatatggcaccttggaaattgagaaaatagcagaaacaggaaggtttctctgacctcttgctcctttctgccctgaagcaggccatagaaactagagttcccctcgcc

SEQ ID NO: 22705 - DNA, 120 bp, synthetic construct
  source 1..120: mol_type = other DNA
agggactgccacacaggtatgccaagaagaaactgaatagacaggcctttccaacttctcagtttatcaccgttagctcatacacttttgtccttgcaatcatacatctgcctgactgtc

SEQ ID NO: 22706 - DNA, 120 bp, synthetic construct; identical to SEQ ID NO: 6745
  source 1..120: mol_type = other DNA

SEQ ID NO: 22707 - DNA, 120 bp, synthetic construct
  source 1..120: mol_type = other DNA
aggataccttggtattagggccagaatgaataaatgaatatctgtaaaggaaaaggtaaaagttacatcaatgaaacaattttaagccaacatttctgttttctggtagaggcataagct

SEQ ID NO: 22708 - DNA, 120 bp, synthetic construct
  source 1..120: mol_type = other DNA
tagcattaactactgggttttgaacagaaagcgtaggctgaaccaatctcttatatgacttgggatgtcatttaaaatactttgtattccaaatttggtgacttttaaatgtctattagc

SEQ ID NO: 22709 - DNA, 120 bp, synthetic construct
  source 1..120: mol_type = other DNA
aatcatggctcactacagcctcgacctcctgagctaatgcaattctcccacctcagcctcctgagtagctgggacagatgtgtgccaccatgcccggctaatttttgtattttttgtaca

SEQ ID NO: 22710 - DNA, 120 bp, synthetic construct; identical to SEQ ID NO: 6746
  source 1..120: mol_type = other DNA

SEQ ID NO: 22711 - DNA, 120 bp, synthetic construct
  source 1..120: mol_type = other DNA
aatgaattttgttcagtggaggtatagaagatgtatgtccagtgtatgtatattcaatcttccaaattctctttgaactagttctttttttactagtctcttgttagtacatctttgata

SEQ ID NO: 22712 - DNA, 120 bp, synthetic construct
  source 1..120: mol_type = other DNA
attttcattccattaatttgctggagaagccagttcatttatcccatagaatgttcccagtactggatttggttgattgcttcctcatggtatcaattaacttgttcctctatttcctgt

SEQ ID NO: 22713 - DNA, 120 bp, synthetic construct
  source 1..120: mol_type = other DNA
tctttcaccatatgtccctaacccagatactactagtccgtctctctctgctatagaggtaagcatcactctgcatttctgtgataatcattccttagcttttatttttatttacttaaa

SEQ ID NO: 22714 - DNA, 120 bp, synthetic construct
  source 1..120: mol_type = other DNA
gtgattctcctgcctcagtctcctgagtagctaagattacaggtgcccgccgctatgccaggctaatttttgtatttttagtagaaacggggtttcacaatgttggaccaggctggtctc

SEQ ID NO: 22715 - DNA, 120 bp, synthetic construct; identical to SEQ ID NO: 6747
  source 1..120: mol_type = other DNA

SEQ ID NO: 22716 - DNA, 120 bp, synthetic construct
  source 1..120: mol_type = other DNA
attgtcagcctgatccctccattccccagtttgtgagttatggatttactgcctctcagctccaaaaatgatcctgaatcttttaattatgttttctttgccatctggccctgaagcttt

SEQ ID NO: 22717 - DNA, 120 bp, synthetic construct
  source 1..120: mol_type = other DNA
acccaaaacttacctagtgtccagttacttcagtcacagtcagcaacacccagcagtgagcagcttccttaggcacccctcctgaaggggttttatactggagtgtctctggtatgaaca

SEQ ID NO: 22718 - DNA, 120 bp, synthetic construct
  source 1..120: mol_type = other DNA
gactaaccatctataaatatctactctcctgcttcagcaaattttttttaccgtttcactgaattattctcatgagcatacaaacatgttataatatatcgctttaaaaaccaaaacaag

SEQ ID NO: 22719 - DNA, 120 bp, synthetic construct
  source 1..120: mol_type = other DNA
gtttcaagtgattctcctgcttcagcctccccagtagctgggattgcaggcgccccccaccaccactcccggctaattttgtatttttagtagagacggggtttcaccatgttggccagg

SEQ ID NO: 22720 - DNA, 120 bp, synthetic construct; identical to SEQ ID NO: 6748
  source 1..120: mol_type = other DNA

SEQ ID NO: 22721 - DNA, 120 bp, synthetic construct
  source 1..120: mol_type = other DNA
tcatcggtcactctaagcaatcgaatatttccaatatcttttattacgtgctcctaaccaatagatcactctccctctctctttgctagagctgcatttttttgtgataatcattcccta

SEQ ID NO: 22722 - DNA, 120 bp, synthetic construct
  source 1..120: mol_type = other DNA
cctcagcctcctgagtagctgggactacaggcacgtgccaccactcccagcaaatttttttgtatttttagtagagacagggtttcaccgtgttagccaggatggtctcaatctcctgac

SEQ ID NO: 22723 - DNA, 120 bp, synthetic construct
  source 1..120: mol_type = other DNA
agtggcacaattatagctcactgcagcatgtgaactcccgagcccaagggatcttcccacctcagctacaggctcataccaccacacctagtgagcttttcttttcgtttggtttcactt

SEQ ID NO: 22724 - DNA, 120 bp, synthetic construct
  source 1..120: mol_type = other DNA
caaacaattctcctgcctcagcctcccaaggtagctgggattacaggtgcccgccaccacgcccagctaatatttttgtatttttagttgagacggggtttcaccatgttggccaggcta

SEQ ID NO: 22725 - DNA, 120 bp, synthetic construct; identical to SEQ ID NO: 6749
  source 1..120: mol_type = other DNA

SEQ ID NO: 22726 - DNA, 120 bp, synthetic construct
  source 1..120: mol_type = other DNA
gggggatgtggcagggtcataggataatagtggagagaaggtcagcagataaacacgtgaacaaaggtctctggctttcctaggcagaggtccctgcagccttccacagtgtttgtgtcc

SEQ ID NO: 22727 - DNA, 120 bp, synthetic construct
  source 1..120: mol_type = other DNA
atgtttcagagagcgcagggccgggggtaaggttatagattaacagcatcccaaggcagaagaatttttctcagtacagaacaaaatggagtctcctgtgtctacttctttctacacaga

SEQ ID NO: 22728 - DNA, 120 bp, synthetic construct
  source 1..120: mol_type = other DNA
acacctcccagacggggcagccgggcagaggcgctcctcacttcccagacggggcgggtgggcagaggtgctcctcacatcccagacgatgggcggccaggcagagatgctcctcacttc

SEQ ID NO: 22729 - DNA, 120 bp, synthetic construct; identical to SEQ ID NO: 6750
  source 1..120: mol_type = other DNA

SEQ ID NO: 22730 - DNA, 120 bp, synthetic construct
  source 1..120: mol_type = other DNA
ctggagaccagcccggtcaacacggcgaaactccgtctccaccaaaaatacaaaaaccagtcaggcattgcagcgcatgcctgcaatcccaggcactcggcaggtcaaggcaggagaatc

SEQ ID NO: 22731 - DNA, 120 bp, synthetic construct
  source 1..120: mol_type = other DNA
cttttctttatacttccttgatacatgtatgtatccctaaacaggatattgtctagttttgcctatttttaaactttgtatacgtggaattgtaatgtatgtgttcttctgtgacttgtc

SEQ ID NO: 22732 - DNA, 120 bp, synthetic construct
  source 1..120: mol_type = other DNA
aagtcccatgtttttttcttctccattttactattcttagaacttggtttgtcttcatagttttgctgttatgaccaatgatgctatgaacattctcatacatgtaccctggcacatacc

SEQ ID NO: 22733 - DNA, 120 bp, synthetic construct; identical to SEQ ID NO: 6751
  source 1..120: mol_type = other DNA

SEQ ID NO: 22734 - DNA, 120 bp, synthetic construct
  source 1..120: mol_type = other DNA
atttctctttctgtatagtgtcttttatgttttttatactttcttctattggctatttttagttttcttttggatttgttaccaaaatgccaagggtttggtctaggttgctcactgcac

SEQ ID NO: 22735 - DNA, 120 bp, synthetic construct
  source 1..120: mol_type = other DNA
cagtcttaactctgtctcctcttttcaacagattaaaattaagggtttatagagcagggaagaaaggtaactacatatgggaaaacaggaattagggaggggtaaggaagaggagttggt

SEQ ID NO: 22736 - DNA, 120 bp, synthetic construct
  source 1..120: mol_type = other DNA
ttcctgagaaaggaactcagataagacaaatgtaagtttctcaagttttaagacttgtagggtaaatttctatgtttattaaaagaaaaaaaacataatcagtcctatgggacaaatggg

SEQ ID NO: 22737 - DNA, 120 bp, synthetic construct; identical to SEQ ID NO: 6752
  source 1..120: mol_type = other DNA

SEQ ID NO: 22738 - DNA, 120 bp, synthetic construct
  source 1..120: mol_type = other DNA
tggggcctttgggaggtgattaggtcatgagatcagagcactactgaatgggatttgtgcccttatgacagagaccccaaagagctcccttgtctcttccaccatgtgaagacacaatga

SEQ ID NO: 22739 - DNA, 120 bp, synthetic construct
  source 1..120: mol_type = other DNA
agtctatggtatttttgtcatagaggcctgaacaactgagacatttgcctttcatatgtaaatctttatatatctggaattaatttttgtgtttagagcaaaatatatatttgtttcccc

SEQ ID NO: 22740 - DNA, 120 bp, synthetic construct
  source 1..120: mol_type = other DNA
gctctgtcatatgttatatatccatccatgccttcaccaatactcattgagcatctactttatgctaagtgctcttctgggtcctgggaataaagcagtgacaaaacagacaaaaatccc

SEQ ID NO: 22741 - DNA, 120 bp, synthetic construct
  source 1..120: mol_type = other DNA
tggatcacgaggtcaggagatcaagaccatcctggctaacatggtgaaaccctgtctctactaaaaatacaaaaaattggctgagcgtggtggcacacacttgtagtcccaggtacttgg

SEQ ID NO: 22742 - DNA, 120 bp, synthetic construct; identical to SEQ ID NO: 6753
  source 1..120: mol_type = other DNA

SEQ ID NO: 22743 - DNA, 120 bp, synthetic construct
  source 1..120: mol_type = other DNA
caagtataaggagcagtagggatgccagtgtgtctggaccagagtgaaggaggggtgaagtgcaggacatgaggtcatcaggtgaagtgcaggacattagctcaacagaagtgagcgggt

SEQ ID NO: 22744 - DNA, 120 bp, synthetic construct
  source 1..120: mol_type = other DNA
taatttctctggctcctctgttgaaaatagaaccaaggaaacaagaatggaggtagcaacatctgtcagaaggccattgaaataaactaggcaagtgatgatgggggttgtgggaaatag

SEQ ID NO: 22745 - DNA, 120 bp, synthetic construct
  source 1..120: mol_type = other DNA
ggaaagacttgatagagggtaggggcgtgggcagggacagaccaggggagaggatttggatctgattttggatatgctaattttgagatgtctattagacatgcaaaatgtagaccagac

SEQ ID NO: 22746 - DNA, 120 bp, synthetic construct; identical to SEQ ID NO: 6754
  source 1..120: mol_type = other DNA

SEQ ID NO: 22747 - DNA, 120 bp, synthetic construct
  source 1..120: mol_type = other DNA
aaatcattgttcacaatttttttgggtcacagtttttggcaaatgaagcatggtataggatgcctgggactgtggagtttcccaggacacaggactttccacgcaaaaccagaaaggttc

SEQ ID NO: 22748 - DNA, 120 bp, synthetic construct
  source 1..120: mol_type = other DNA
ggaaggtggtcctgttacaggaaagaggtcccaatccagaccccaagagagggttcttggatctcgtgcaagaaagaattcagggcaagtctgctggagtgcacagcaaaagcaagttca

SEQ ID NO: 22749 - DNA, 120 bp, synthetic construct
  source 1..120: mol_type = other DNA
tatgataaaagaagatcatgggaagatgtgctctgctacaagagtttgtgataaaggattaatttccttaattactatgttttgcaagaatcaatattattatctttaaagcaaaattag

SEQ ID NO: 22750 - DNA, 120 bp, synthetic construct; identical to SEQ ID NO: 6755
  source 1..120: mol_type = other DNA

SEQ ID NO: 22751 - DNA, 120 bp, synthetic construct
  source 1..120: mol_type = other DNA
aatattattaatctattcccttaaccataaatgtctagaggctaggaatacctatatttctggaaatgcaccccgccaagttgcagcctcattttcctagctctcactcaaaatggcgtc

SEQ ID NO: 22752 - DNA, 120 bp, synthetic construct
  source 1..120: mol_type = other DNA
ctcccctcagaagctttcaacatccactccattcccctaaactggggaccgaggacattgcagcttctttggtgcttctagggaccagaacatagcttcttttagttatggattaggttt

SEQ ID NO: 22753 - DNA, 120 bp, synthetic construct
  source 1..120: mol_type = other DNA
ttgagagtgagtccaaaataagactaggcaaaggagtttattgcaaagtgaaagtacactctgagaggcagagtgggctgctcaaagctagctcaaagctagaggcagtagttagtgcct

SEQ ID NO: 22754 - DNA, 120 bp, synthetic construct; identical to SEQ ID NO: 6756
  source 1..120: mol_type = other DNA

SEQ ID NO: 22755 - DNA, 120 bp, synthetic construct
  source 1..120: mol_type = other DNA
tttcccaggctgtatagggtatcaagaacttgtaaccacctggcagaatcctgcaggactgcttgtcttgcaaaagacttcagtgctgatgcaggagggtgcaagtgaaaagaattcact

SEQ ID NO: 22756 - DNA, 120 bp, synthetic construct
  source 1..120: mol_type = other DNA
cagtgtggttgcatctctttttgaaggctttaggggaaaatttgtttctgttcattctggttgcttgcagaactcaattccttgtagttggaggactaggttcctgtctttttactggct

SEQ ID NO: 22757 - DNA, 120 bp, synthetic construct
  source 1..120: mol_type = other DNA
acagttggttatgtccatctcatgtcctatctctctgagctacattctgcttcttcttctttccacttttattaaagattggtgtgattagattggacctcatacggcctaataacctcc

SEQ ID NO: 22758 - DNA, 120 bp, synthetic construct; identical to SEQ ID NO: 6757
  source 1..120: mol_type = other DNA

SEQ ID NO: 22759 - DNA, 120 bp, synthetic construct
  source 1..120: mol_type = other DNA
atgtggaacaaaaaaatagcacacatatttttgtacctgcctggtaaaaattcccaaagctttgcttaattctattcaggttgttgaacaaaatttacattagcaacaaataccagggaa

SEQ ID NO: 22760 - DNA, 120 bp, synthetic construct
  source 1..120: mol_type = other DNA
taggttcaggggtacatatgcaggtttgttacatgaataaattgtgtgtcacaggggtttgttgtacagattatttcatcacccaggtaataagcgtagtacctgatgggtagttttttg

SEQ ID NO: 22761 - DNA, 120 bp, synthetic construct
  source 1..120: mol_type = other DNA
ggttttctgttcctacattaatttacttaggataatggccctccagttccatccatattgctgcaaaggacacgatctcattcttttttatggctgcatagtattccatggtgtatatgt

SEQ ID NO: 22762 - DNA, 120 bp, synthetic construct; identical to SEQ ID NO: 6758
  source 1..120: mol_type = other DNA

SEQ ID NO: 22763 - DNA, 120 bp, synthetic construct
  source 1..120: mol_type = other DNA
ctatgttgttgagtgtataaatagtccattcctttttattgccatatagtagtttattgtatggatgtactacaatgtgtctattcattcaaatgttgatggaaatttagattgtttcca

SEQ ID NO: 22764 - DNA, 120 bp, synthetic construct
  source 1..120: mol_type = other DNA
caagattgagaaatgcttttatatttcagataacaggaaatatggctttagttgcttgtgttaggccaaataatgactgtccccccaccaaaatgtccacattctagtccccagaatctg

SEQ ID NO: 22765 - DNA, 120 bp, synthetic construct
  source 1..120: mol_type = other DNA
agaagatctttcccagctgcagtaagagagagacatgtgatgatgggacaaagggtcagagagatgtgttatattgctgattttgaaggtggagaaacagggccataagccaaagaatgc

SEQ ID NO: 22766 - DNA, 120 bp, synthetic construct; identical to SEQ ID NO: 6759
  source 1..120: mol_type = other DNA

SEQ ID NO: 22767 - DNA, 120 bp, synthetic construct
  source 1..120: mol_type = other DNA
ttcccaaaggccttgtattaaggcaaacagaaggacagacgcctaaggaaacaattagattaaaggagttttcttcccactcaaagttgttaccattaaattaagagtgacatgagtcat

SEQ ID NO: 22768 - DNA, 120 bp, synthetic construct
  source 1..120: mol_type = other DNA
ccaaggaagccataaagcctaacataaaaaagcctgtggttaagcttaaaataactcataggccctcaaattgcaaccacagaagtcaggctgcaaaatctgtacggggcaatcctaaga

SEQ ID NO: 22769 - DNA, 120 bp, synthetic construct
  source 1..120: mol_type = other DNA
accagtgatagtcagatggactaagcttggaacttactccattgagagggcaaggataatttaggattcctacccagtaagatttaatcattgctgtgggccaatgattgtgtgtttctg

SEQ ID NO: 22770 - DNA, 120 bp, synthetic construct; identical to SEQ ID NO: 6760
  source 1..120: mol_type = other DNA

SEQ ID NO: 22771 - DNA, 120 bp, synthetic construct
  source 1..120: mol_type = other DNA
gccggaccacatttcctagccctctttgcagttagatgtagccatgtgactagggtcttgacaaaggaatataagttgtgataaatgaaacagtcacctcacagattaaagagaccttga

SEQ ID NO: 22772 - DNA, 120 bp, synthetic construct
  source 1..120: mol_type = other DNA
cactcaccatcttgataaacctacccaggactgttgagatggaaataaactattttgtttgagtcatctcatttacagttttctccattattacagttttgttttctaccctaacatgca

SEQ ID NO: 22773 - DNA, 120 bp, synthetic construct
  source 1..120: mol_type = other DNA
ggaatgaacttactttgaaatgtgtgatacctatatgtaacaaacacttaaatactttaaaaacctgaaatatttctcgaatacatacattgatcatcataaagttatcatccctccggg

SEQ ID NO: 22774 - DNA, 120 bp, synthetic construct
  source 1..120: mol_type = other DNA
caacctctgtctcccgggctcaagcgattctcctgcctcagcctcctgagtagctgcgattacaggcacacaccaccaccccagctattttttgtattttagtagagatggggtttcacc

SEQ ID NO: 22775 - DNA, 120 bp, synthetic construct; identical to SEQ ID NO: 6761
  source 1..120: mol_type = other DNA

SEQ ID NO: 22776 - DNA, 120 bp, synthetic construct
  source 1..120: mol_type = other DNA
gaaaagatagatgaccattcaataaatgcttttgagataactggataactacatgggaaataatatttaaagttgggcacaattccaactgtatagcatgataaactccaaatgggtcaa

SEQ ID NO: 22777 - DNA, 120 bp, synthetic construct
  source 1..120: mol_type = other DNA
aaagcagttccgagtagcagaaaatatcataaaaaatcaaaagacaaatgaaaaacttatagaaatattttcatgcatatcacatccaaagaaatgacctctttagcaattaaaatgcac

SEQ ID NO: 22778 - DNA, 120 bp, synthetic construct
  source 1..120: mol_type = other DNA
tctgtctgctgaaatcctttttccttttttctgtctcgggaactgtgaagaaactcagaaaaggaaacaaaaatagttattaaacacatgaaaaaacacttaaccttgcttttaccagag

SEQ ID NO: 22779 - DNA, 120 bp, synthetic construct; identical to SEQ ID NO: 6762
  source 1..120: mol_type = other DNA

SEQ ID NO: 22780 - DNA, 120 bp, synthetic construct
  source 1..120: mol_type = other DNA
cacgaacaatggaatattatgcaatgaaaatctaatcacaacgcaggaggtctctgtgtgcttttggtaagatctccaagatatattgtgaagtgagagaatgaggtgaagaacgttgta

SEQ ID NO: 22781 - DNA, 120 bp, synthetic construct
  source 1..120: mol_type = other DNA
aaactggacagattgtggacaggattctgagtgagatccttcactgttcagtctcctttgcatcagtaagtgtctcttaaagtaaatggacaagtagaggaatggtgtcagcataatgtg

SEQ ID NO: 22782 - DNA, 120 bp, synthetic construct
  source 1..120: mol_type = other DNA
acaatgctgtgcacaatgccgttgactccttctccactttactcattttagctacattctctatcctgaagtgcttactaagtagttcccccaattttcatgcactttttctgaactatt

SEQ ID NO: 22783 - DNA, 120 bp, synthetic construct; identical to SEQ ID NO: 6763
  source 1..120: mol_type = other DNA

SEQ ID NO: 22784 - DNA, 120 bp, synthetic construct
  source 1..120: mol_type = other DNA
ttatcctctatagcttctcatggtgatgtccctccaccttgtctccataaagcagcagcttccatctttccttatccccttgtatctttagttccccctttatttattttattttatttt

SEQ ID NO: 22785 - DNA, 120 bp, synthetic construct
  source 1..120: mol_type = other DNA
tgcctcagcctcctgggtagctgggactacaggcacgtgccaccatgcctggctaattttttgtatttttagtagagacggggttttaccgtcttaggcaggatggtcttgatctcctga

SEQ ID NO: 22786 - DNA, 120 bp, synthetic construct
  source 1..120: mol_type = other DNA
gtgcagtggtgagatctcggctcactgcaacctctgcctcccaggttcaagcgattctcttgcctcagtctcccgagcagctgggactaccggcgcgcaccaccatgcccagctaatttt

SEQ ID NO: 22787 - DNA, 120 bp, synthetic construct; identical to SEQ ID NO: 6764
  source 1..120: mol_type = other DNA

SEQ ID NO: 22788 - DNA, 120 bp, synthetic construct
  source 1..120: mol_type = other DNA
ttccatatgaattcaaggacctgcttttccatatctgtttaaaaggctgttgaaattttgatagagattaattgagtctgtagatcactttggatattattgacaacttaacaattttaa

SEQ ID NO: 22789 - DNA, 120 bp, synthetic construct
  source 1..120: mol_type = other DNA
ttctcggtctctggtaaccgctattctcctcttcccttctatgagatcagcttttgcagttccacatatgagtgaaatcatgtgccatttgttcttcattgcttggcttacttaatataa

SEQ ID NO: 22790 - DNA, 120 bp, synthetic construct
  source 1..120: mol_type = other DNA
actttggttaatttcatatcttggctattgtgaatagcgctgcagtgaacatgggagtgcatgtatctctttgacgtaccaatttcatttcctttggatatatatccattagtgagattg

SEQ ID NO: 22791 - DNA, 120 bp, synthetic construct
  source 1..120: mol_type = other DNA
agatagtggatttggatgtgtgagtttaaggtgcaagattcaagtggtggttcagtaggccttggtagctccccagagtttgcatctgtaggtagaggtcactgttagtgataaagttgt

SEQ ID NO: 22792 - DNA, 120 bp, synthetic construct; identical to SEQ ID NO: 6765
  source 1..120: mol_type = other DNA

SEQ ID NO: 22793 - DNA, 120 bp, synthetic construct
  source 1..120: mol_type = other DNA
tctgtgtgtgcatatgcatgtatattagactgggacatgagtgacttttttactgtgatgtttcaaaacatgtttgaaaaaaattagtttaaaccatgatgaagagatttctcaggcagt

SEQ ID NO: 22794 - DNA, 120 bp, synthetic construct
  source 1..120: mol_type = other DNA
gctccgccccccgggttcacgccattctcctgcctcagcctcccgactacctgggactacaggcgcccgccatcacgcccggctaatttttgtatttttagtagagacggggtttcaccg

SEQ ID NO: 22795 - DNA, 120 bp, synthetic construct
  source 1..120: mol_type = other DNA
tagctctcatgttttcagatgagttttaagatacaggcccaaattttgttagttcttattctctacttttgaattatttacaggaaatatattttactgagctgatctactgagaggtgg

SEQ ID NO: 22796 - DNA, 120 bp, synthetic construct
  source 1..120: mol_type = other DNA
gaggccaaggcgggcagatcacgagatcaggagatcgaaaccatcctggctaacacggtgaaaccccgtctctactcaaaacacaacaaattagccggacaaggtggccggcgcctgtag

SEQ ID NO: 22797 - DNA, 120 bp, synthetic construct; identical to SEQ ID NO: 6766
  source 1..120: mol_type = other DNA

SEQ ID NO: 22798 - DNA, 120 bp, synthetic construct
  source 1..120: mol_type = other DNA
attaaactcacaacttctttgttttcttcatgtcttcttagaaagtgatttctcactttgagagtgaactctttgcaggacttgagcatagtgatcacaactgctgcctcccctctgaga

SEQ ID NO: 22799 - DNA, 120 bp, synthetic construct
  source 1..120: mol_type = other DNA
attacattgttctctgtgcaagccagcttttaagaaaaaatatctgccatgtgtggcagatggccaacctgatggagaacatttggagaatgaaggtagatgaggagagacaacccagag

SEQ ID NO: 22800 - DNA, 120 bp, synthetic construct
  source 1..120: mol_type = other DNA
acaagcaccatgctgctgttctcctagaaaaggctgcacagcctcgtcgggtaagaatcgtgttggaccccagctctgttcttttagccagaaagttctatggtaccttcaggataaggt

SEQ ID NO: 22801 - DNA, 120 bp, synthetic construct
  source 1..120: mol_type = other DNA
ttgtagatgagtatacacctctgaaaccatcatcacagcaaaaacacgtctatcactttccaaactttccacacaccctctttattgttattattttgtgtgtgtgataagaacacttag

SEQ ID NO: 22802 - DNA, 120 bp, synthetic construct; identical to SEQ ID NO: 6767
  source 1..120: mol_type = other DNA

SEQ ID NO: 22803 - DNA, 120 bp, synthetic construct
  source 1..120: mol_type = other DNA
atgttgttaccaatggcagaatttccttctctttaaggctgaataatattgcattgtatgtatataccacattttctttattcatccatcagtgaacatttagggttttttaaatcttgg

SEQ ID NO: 22804 - DNA, 120 bp, synthetic construct
  source 1..120: mol_type = other DNA
tagttctgtttttaattatttgaggagcttcttactgtttttataatggctgtaccagtttgcatttccaccaacagcgtatcagggttcccctttctccacatcctcaccaacgcttct

SEQ ID NO: 22805 - DNA, 120 bp, synthetic construct
  source 1..120: mol_type = other DNA
tatatcttttatggaagtaagtctatcacattgccttgatggtttcatctctgaggttcagatcaagtcttatcagctatacagaataccagcactcctgatagctctcgtagtatatag

SEQ ID NO: 22806 - DNA, 120 bp, synthetic construct
  source 1..120: mol_type = other DNA
gagaccatcctggcacacacagtgaaatcctgtctctactaaaaatacaaaaaattagccgggcgtggtggcgggcgcctgtagtcccagctactcgggaggctgaggcaggagaatggc

SEQ ID NO: 22807 - DNA, 120 bp, synthetic construct; identical to SEQ ID NO: 6768
  source 1..120: mol_type = other DNA

SEQ ID NO: 22808 - DNA, 120 bp, synthetic construct
  source 1..120: mol_type = other DNA
ggcatggtggcatgcacctgtaatcccagctacttgggaggctgaggcaagagaatcgcttgaacccaggaagcggagcttgcagtgagccaagattgtgccattgcactccagcctggg

SEQ ID NO: 22809 - DNA, 120 bp, synthetic construct
  source 1..120: mol_type = other DNA
aatctggagttgctgccaggtgtggtggctcatgcctgtaatcccaacactttgggaagccaaggcaggaggatagcttgagaacaggagaccagcctgggctatagcaagaccccatct

SEQ ID NO: 22810 - DNA, 120 bp, synthetic construct
  source 1..120: mol_type = other DNA
cactatgttgccaaggtatgccctcaaagacttgggctcaagagatacttcacccttattttcccaaatagctgggactacaggcacataccactgcacccaccttctatttttgtttta

SEQ ID NO: 22811 - DNA, 120 bp, synthetic construct
  source 1..120: mol_type = other DNA
acttctaagaaattgctctaggccattgtatcactcaatggatcttccttattaactagaatggaaattgttccacacaaccattattaaactacacatggtcaaatgcagttggatttc

SEQ ID NO: 22812 - DNA, 120 bp, synthetic construct; identical to SEQ ID NO: 6769
  source 1..120: mol_type = other DNA

SEQ ID NO: 22813 - DNA, 120 bp, synthetic construct
  source 1..120: mol_type = other DNA
cgactcactgcaacctccgcctccaaggttcaactgattctcctgcctcagcctcccaagtagttggaattacaggtgctcaccaccatgcccagctaatttttgtattttttagtagag

SEQ ID NO: 22814 - DNA, 120 bp, synthetic construct
  source 1..120: mol_type = other DNA
atccttgtttattttcatagggcaaaattctaaaccatcggaagattctgaagggatacaaggatagcattcagaattctcaatctatgggagaagatgagattcaggccctggtggtaa

SEQ ID NO: 22815 - DNA, 120 bp, synthetic construct
  source 1..120: mol_type = other DNA
ttgaggaatggggagggggagagtgatcaaagagatttctgttctgaactcatcctcagaagatctcacacatgttctggtgttccctagcctctcaaaaaggtcacttttctctttctg

SEQ ID NO: 22816 - DNA, 120 bp, synthetic construct
  source 1..120: mol_type = other DNA
catttactgtagacaacatttcagaaccacaggcaagacattgtatcagtgtttgaatagggccatcggtttttgagagaaagggaacagtacctgttggagcagctggtagggctagag

SEQ ID NO: 22817 - DNA, 120 bp, synthetic construct; identical to SEQ ID NO: 6770
  source 1..120: mol_type = other DNA

SEQ ID NO: 22818 - DNA, 120 bp, synthetic construct
  source 1..120: mol_type = other DNA
aaataatctgatgttaaatcttccagtcagattggatgccacaagaattctggaaacagctagtgtttagtcagagaagccttcaaagaagaggcttttgatgttggccttgaaggaaac

SEQ ID NO: 22819 - DNA, 120 bp, synthetic construct
  source 1..120: mol_type = other DNA
agtgattctcctgcctcagcctcctgagtagctgggactacaggcacccatcaccacgcccagctaagtaagatttagattgtcagaaaggagctaaacattccacttggtagggggtgg

SEQ ID NO: 22820 - DNA, 120 bp, synthetic construct
  source 1..120: mol_type = other DNA
gaagataggagtaggaagactgataagaaggggacatagaatgaaggtagctacctttctggaagagtcagattaagtgagggagaagtgaaaattatgatggggccaactgagttgagg

SEQ ID NO: 22821 - DNA, 120 bp, synthetic construct; identical to SEQ ID NO: 6771
  source 1..120: mol_type = other DNA

SEQ ID NO: 22822 - DNA, 120 bp, synthetic construct
  source 1..120: mol_type = other DNA
ggcgtgaacccgggaggcggagtttgcagtgagccgagattgtgccactgcactccagcctgggcgacagagccagactccatctcaaaaaaaaaaagaaagaaactgcaggctgggagt

SEQ ID NO: 22823 - DNA, 120 bp, synthetic construct
  source 1..120: mol_type = other DNA
attagccggacatggtggcaggtgcctgtaatctcagctactctggaggctgaggcaggagaatcgcttgaacccgggagacagaggttgcagtgagccaagatcacaccactgcactcc

SEQ ID NO: 22824 - DNA, 120 bp, synthetic construct
  source 1..120: mol_type = other DNA
aggtccgggtccatcagaataattctctgttcagtcctggtgtatacccatttctcaatgatcccacagtagagaatgatgacggctcctgagaactatttttatgacaatgtctgtgtt

SEQ ID NO: 22825 - DNA, 120 bp, synthetic construct; identical to SEQ ID NO: 6772
  source 1..120: mol_type = other DNA

SEQ ID NO: 22826 - DNA, 120 bp, synthetic construct
  source 1..120: mol_type = other DNA
attatagaaaagtattggagaaaatttagaatccatgttcatttctaaaactagtttcctttcattcttccccttcctacatggttcccagcctccactcctggccacagtttctcccat

SEQ ID NO: 22827 - DNA, 120 bp, synthetic construct
  source 1..120: mol_type = other DNA
catgtctttcatttgagttctagactgtcctccgcaggacattcctcagcagtgggtctgaggaatatgttaaacatttaacattgacagttttcaaaatcatacccacatgatacagag

SEQ ID NO: 22828 - DNA, 120 bp, synthetic construct
  source 1..120: mol_type = other DNA
actgagcatttcctgtgggcaaaacactgggtagaaaggcgtgtgatgagataggttaccagattatggctggggataccagatagacacatatgagagatgaataatgatataaaaaat

SEQ ID NO: 22829 - DNA, 120 bp, synthetic construct
  source 1..120: mol_type = other DNA
attagtgttcacatggcatttctttttctgtcctttaattctcaaactttctgtgttttttaaaaatgtctcttataagcaacataaattttgttctgtttttaaataaatccattctga

SEQ ID NO: 22830 - DNA, 120 bp, synthetic construct; identical to SEQ ID NO: 6773
  source 1..120: mol_type = other DNA

SEQ ID NO: 22831 - DNA, 120 bp, synthetic construct
  source 1..120: mol_type = other DNA
ctatgttggccaggctggtctcgaactcctgaccttgtgatctgctcgcctcagcctcccaaagtgctgggattacaggcatgagccaccacgcccgcccccctctttcttttcttttct

SEQ ID NO: 22832 - DNA, 120 bp, synthetic construct
  source 1..120: mol_type = other DNA
atactgccacactcagctgtgtagttctattttatctcttctatttgcctgtcccttttttccctcctacttttatggattgttgagccctgcttttacaaagtaccataatttctagca

SEQ ID NO: 22833 - DNA, 120 bp, synthetic construct
  source 1..120: mol_type = other DNA
aagaagctatttgtcagtgatatgctgagtttttttctaataggtctttttgtttcatagttttcaagtcttgtgataagaaaagtttgctatgtctactttttggactttttttgaggc

SEQ ID NO: 22834 - DNA, 120 bp, synthetic construct; identical to SEQ ID NO: 6774
  source 1..120: mol_type = other DNA

SEQ ID NO: 22835 - DNA, 120 bp, synthetic construct
  source 1..120: mol_type = other DNA
caagtgattctcctgcctcagcctcccgagtagctgggattataggtgtgcaccaccacacccagctaatttcggtatttttagtagagacagggtttcaccatgttggccaggctggtc

SEQ ID NO: 22836 - DNA, 120 bp, synthetic construct
  source 1..120: mol_type = other DNA
atgttctttttctacatgacttttaaggaaagttgtatcttaattgtgaattataatcttgttttaaaaaacagagacagagttttaaaaaaccgagactcgctcagtcacccagactag

SEQ ID NO: 22837 - DNA, 120 bp, synthetic construct
  source 1..120: mol_type = other DNA
aaaataattgttttagaggggttctcactgttactcagtctgatcttgaactcctggcctcaagtgattctcctgccttggactcccaaagtactgggattataggcataagccatagca

SEQ ID NO: 22838 - DNA, 120 bp, synthetic construct; identical to SEQ ID NO: 6775
  source 1..120: mol_type = other DNA

SEQ ID NO: 22839 - DNA, 120 bp, synthetic construct
  source 1..120: mol_type = other DNA
ttagcaaaaatcctgaatacaatacaccatttttattatttttttaatttatttttttgagacaaggtctcactctgtcacccaggccggagtgtagtggcgcgatcttggctcactgca

SEQ ID NO: 22840 - DNA, 120 bp, synthetic construct
  source 1..120: mol_type = other DNA
ggctggtctcgaactccttggccttaagtgatctgcccacctcggcctcccaaagtgctgggataacaggcgtgagccgtcatgcctggcctacaatgccctgatattagctatagttgg

SEQ ID NO: 22841 - DNA, 120 bp, synthetic construct
  source 1..120: mol_type = other DNA
ctatttctgtatatttgactttttaaaaaattctacatatatgtaaaataatgcaatagttttcattttgtatctggcaggttttatcttaattttcatttaatctgatatatatcccca

SEQ ID NO: 22842 - DNA, 120 bp, synthetic construct; identical to SEQ ID NO: 6776
  source 1..120: mol_type = other DNA

SEQ ID NO: 22843 - DNA, 120 bp, synthetic construct
  source 1..120: mol_type = other DNA
atctgtacatcaccatcatcaaagaccaaaagtagataaaaccacaaagatggggaaaaaacagagcagaaaaactggaaaatctaaaaagcagagcgcctctcctcctccaaaggaatg

SEQ ID NO: 22844 - DNA, 120 bp, synthetic construct
  source 1..120: mol_type = other DNA
agaagttgaaaacttcgaaaaaaatttagaagaatgcataactagaataaccaatacagagaagtgcttgaaggagctgatggagctgaaaaccaaggctcgagaactacgtgaagaatg

SEQ ID NO: 22845 - DNA, 120 bp, synthetic construct
  source 1..120: mol_type = other DNA
aagcctccaagaaatatgggactatgtgaaaagaccaaatctacgtctgattggtgtacctgaaagtgacggggagaatggaaacaagctggaaaacactctgcaggatattatccagga

SEQ ID NO: 22846 - DNA, 120 bp, synthetic construct
  source 1..120: mol_type = other DNA
tgaaatgaaggaaaaaatgttaagggcagccagagagaaaggtcgggttaccctcaaagggaagccgatcagactaacagcggatctctcggcagaaactctacaagccagaagagggtg

SEQ ID NO: 22847 - DNA, 120 bp, synthetic construct; identical to SEQ ID NO: 6777
  source 1..120: mol_type = other DNA

SEQ ID NO: 22848 - DNA, 120 bp, synthetic construct
  source 1..120: mol_type = other DNA
acacagactggcaaattggatcaagagtcaagactcatcagtatgctgtattcaggaaacccatctcacgggcagagacacacataggctcaaaataaaaggatggaggaagatctacca

SEQ ID NO: 22849 - DNA, 120 bp, synthetic construct
  source 1..120: mol_type = other DNA
tcaacaagaagagctaactatcctaaatatatatgcacccaatacaggagcacccagattcataaagcaagtcctgagtgacctacaaagagacttagactcccacacattaataatggg

SEQ ID NO: 22850 - DNA, 120 bp, synthetic construct
  source 1..120: mol_type = other DNA
ccaccccaaatcaacagaatatacatttttttcagcaccacaccacacctattccaaaattgaccacatacttggaagtaaagctctcctcagcaaatgtaaaagaacagaaattataac

SEQ ID NO: 22851 - DNA, 120 bp, synthetic construct
  source 1..120: mol_type = other DNA
cgaaatgaaggcagaaataaagatgttctttgaaaccaacgagaacaaagacacaacataccagaatctctgggacacattcaaagcagtgtgtagagggaaatttatagcactaaatgc

SEQ ID NO: 22852 - DNA, 120 bp, synthetic construct; identical to SEQ ID NO: 6778
  source 1..120: mol_type = other DNA

SEQ ID NO: 22853 - DNA, 120 bp, synthetic construct
  source 1..120: mol_type = other DNA
aaaatctagaagaaatggataaattcctggacacatacactctcccaagactaaaccaggaagaagttgaatctctgaatagaccaataacaggatctgaaattgtggcaataatcaata

SEQ ID NO: 22854 - DNA, 120 bp, synthetic construct
  source 1..120: mol_type = other DNA
cctccctaactcattttatgaggccagtatcatcctgataccaaagcctggcagagacacaacaaaaaaaagaattttagaccaatatccctgatgaacatcgacacaaaaatcctcaat

SEQ ID NO: 22855 - DNA, 120 bp, synthetic construct
  source 1..120: mol_type = other DNA
catataaacagaaccaaagacaaaaaccacatgattatctcaatagatgtagaaaaggcctttgacaaaattcaacagcccttcatgctaaaaactctcaataaattaggtattgatggg

SEQ ID NO: 22856 - DNA, 120 bp, synthetic construct
  source 1..120: mol_type = other DNA
ccactcctattcaacatagtgttggaagttctggccagggcaatcaggcaggagaaggaaataaagggtattcaattaggaaaagaggaagtcagattgtctctgtttgcagatggcatg

SEQ ID NO: 22857 - DNA, 120 bp, synthetic construct; identical to SEQ ID NO: 6779
  source 1..120: mol_type = other DNA

SEQ ID NO: 22858 - DNA, 120 bp, synthetic construct
  source 1..120: mol_type = other DNA
gccatccccatcaagctaccaatgactttcttcatagaactggaaaaaactactttaaagttcatatggaaccaaaaaagagcctgcatcgccaagtcaatcctaagccaaaagaacaaa

SEQ ID NO: 22859 - DNA, 120 bp, synthetic construct
  source 1..120: mol_type = other DNA
ataataccacacatctacaaccatctgatctttgacaaacctgacaaaaacaagaaatgaggaaaggattccctatttaataaatggtgctgggaaaactggctagccatatgtagaaag

SEQ ID NO: 22860 - DNA, 120 bp, synthetic construct
  source 1..120: mol_type = other DNA
gacattggcatgggcaaggacttcatgactaaaacaccaaaagcaatggcaacaaaagccaaaattgacaaatgggatctaattaaactgaagagcttctgcacagcaaaagaaactacc

SEQ ID NO: 22861 - DNA, 120 bp, synthetic construct; identical to SEQ ID NO: 6780
  source 1..120: mol_type = other DNA

SEQ ID NO: 22862 - DNA, 120 bp, synthetic construct
  source 1..120: mol_type = other DNA
aactagttcaaacattgtggaagacagtgtggcgattcctcagggatctagaactaggaataccatatgacccagccatcccattactgggtatatacccaaaggattataagtcatgct

SEQ ID NO: 22863 - DNA, 120 bp, synthetic construct
  source 1..120: mol_type = other DNA
ccatggaatactacgcagccataaaaaaggatgagttcatgtcctttgtagggacacagatgaagctggaaaccattattctcagcaaactatcccaaggacaaaaaaccaaacaacgca

SEQ ID NO: 22864 - DNA, 120 bp, synthetic construct
  source 1..120: mol_type = other DNA
acctcatgtaaatgacgagttaatgtttgcagcacaccaacatggcacatgtatacatatgtaacaaacctgcacattgtgcacatgtaccctagaacttaaagtataataaaaatatat

SEQ ID NO: 22865 - DNA, 120 bp, synthetic construct; identical to SEQ ID NO: 6781
  source 1..120: mol_type = other DNA

SEQ ID NO: 22866 - DNA, 120 bp, synthetic construct
  source 1..120: mol_type = other DNA
gcaagccacatagtctatggtattcttttataactgcccagattgactaagacagatgatgatgaaaatactaccaagtattggaaattaacatcaaaattctaaatgacaatttattca

SEQ ID NO: 22867 - DNA, 120 bp, synthetic construct
  source 1..120: mol_type = other DNA
gctgaagtagtactagagaaaaaaccaatacccttaaatgcctatattaagaaagaaggtaggtctcaaattagtaaattagcttctgctataagaaacaaagaaaaacaaattaaacca

SEQ ID NO: 22868 - DNA, 120 bp, synthetic construct
  source 1..120: mol_type = other DNA
agctagactgatcaagacaaaaagatgcacattaacaatgtcaagaaaaaacgaacatcagtgcacactctctagatctcaaaaagaaatattgataatctcatgtcaataagtttgaca

SEQ ID NO: 22869 - DNA, 120 bp, synthetic construct; identical to SEQ ID NO: 6782
  source 1..120: mol_type = other DNA

SEQ ID NO: 22870 - DNA, 120 bp, synthetic construct
  source 1..120: mol_type = other DNA
cacagctccactgggcagtgccctaataggaactctgtgtgggggctccagccccctatttcccctccacactgctctagcagaggttctccgtgagggccctgcccctgcagcaaactt

SEQ ID NO: 22871 - DNA, 120 bp, synthetic construct
  source 1..120: mol_type = other DNA
aaagcttgcaccctctggagccatgggccaagctgtaccaagcttggccccttttagcagccgtgggagcagttgggacccagggcaccaagtccctaagctgcacacagcatgggaacc

SEQ ID NO: 22872 - DNA, 120 bp, synthetic construct
  source 1..120: mol_type = other DNA
acatttggctctttgttacttacgcaaatttctgcagccagcttgagtttctcctcaaaaaaattggtttttctttctattgcatcgtcaggctgtaaattttctgaacttttatcctct

SEQ ID NO: 22873 - DNA, 120 bp, synthetic construct
  source 1..120: mol_type = other DNA
agatctctagggcaggggcaaaatgccaccagtctctttgctaaaacgtaacaagagtcacctttgctccagttcccaacaagttcctcatctccatctgagaccacctcagcctggacc

SEQ ID NO: 22874 - DNA, 120 bp, synthetic construct; identical to SEQ ID NO: 6783
  source 1..120: mol_type = other DNA

SEQ ID NO: 22875 - DNA, 120 bp, synthetic construct
  source 1..120: mol_type = other DNA
agatgcaaaagcagaaacccctgataaaaccatcagatctcatgagacttattcactaccacgagaacagtatgggggaaaccaaccccatgattcaaattatctcccactgggtcccct

SEQ ID NO: 22876 - DNA, 120 bp, synthetic construct
  source 1..120: mol_type = other DNA
cacaagaaaaagaatcaagaacaaatattcctcttgaacacagactcacaattcaatacaaaacgttatccaattaagatatacataaaatgaataatatgccatgccatattggttttt

SEQ ID NO: 22877 - DNA, 120 bp, synthetic construct
  source 1..120: mol_type = other DNA
aaatcaagaccatttcatgacaaaatagctcagcaaacaaaatcgaaaggaatatcttcaatgtggttaaggacacccacgaaaagtttacagctaccctcatattcaattatgaaaggc

SEQ ID NO: 22878 - DNA, 120 bp, synthetic construct; identical to SEQ ID NO: 6784
  source 1..120: mol_type = other DNA

SEQ ID NO: 22879 - DNA, 120 bp, synthetic construct
  source 1..120: mol_type = other DNA
gtctctggaagtaataattaaatttgcaaaattgttcacaaaagatatgtaataagtctcttagacaaacatgacaagatagcaacaatactagtcatcaaagaagtgcaagttaaaacc

SEQ ID NO: 22880 - DNA, 120 bp, synthetic construct
  source 1..120: mol_type = other DNA
tggaaaaaataaaaatctcttatattgttggtaggaacgcaaaaaaaagttgcagtcagtttgtaaaataatatggcaatttcttaaacagctacccatccatttaccatatcacccaac

SEQ ID NO: 22881 - DNA, 120 bp, synthetic construct
  source 1..120: mol_type = other DNA
tatcagctggagaatagagaaaccaacgaataaactggaattccaacaatactcagcagctactcagtgacaaaaatgaatgaaatattattactcttaactacatggaaaaatctcaaa

SEQ ID NO: 22882 - DNA, 120 bp, synthetic construct; identical to SEQ ID NO: 6785
  source 1..120: mol_type = other DNA

SEQ ID NO: 22883 - DNA, 120 bp, synthetic construct
  source 1..120: mol_type = other DNA
aaaattcatttcctagggatcttgtactacgtataattttgaaggaagttcttcaggctgaagggaaatgatactagatggtgacctagatatatagaaagggataattaacaacagaaa

SEQ ID NO: 22884 - DNA, 120 bp, synthetic construct
  source 1..120: mol_type = other DNA
agaatagcacaatggtaggttacatgaaactacactcttacaagtgtcctttattttgctggatgcagcttaatattacctgaacttcaccatgaaaagtcaaggaatcgggtttcaatt

SEQ ID NO: 22885 - DNA, 120 bp, synthetic construct
  source 1..120: mol_type = other DNA
aagatacgagacaaattgaaaacatacagcaaaatggtagaccaaaacccaaccattgtaagtgaagaaatgacacgacctgagtcacattagcagaactgctgagcactgtggggagaa

SEQ ID NO: 22886 - DNA, 120 bp, synthetic construct; identical to SEQ ID NO: 6786
  source 1..120: mol_type = other DNA

SEQ ID NO: 22887 - DNA, 120 bp, synthetic construct
  source 1..120: mol_type = other DNA
attcataaaaacaagcagtgcttaagcattgatgataggcattttgacttcagtgcaattttgaggctccttgttacaatatacagtaacaaatcctgcttctttgtattgagatgtcct

SEQ ID NO: 22888 - DNA, 120 bp, synthetic construct
  source 1..120: mol_type = other DNA
ggaaagtaaacttagaagctttgtgactcgaattgcaatgctgtttggatacacttatatatgaagcaggcaaaatcaggtcttttacagattagaatcctgatcattcaggggttagat

SEQ ID NO: 22889 - DNA, 120 bp, synthetic construct
  source 1..120: mol_type = other DNA
caacttcaccaggtttaaagagaaaacccctttctctacaccgccattcccaaggcgagctcactctctggcatcaaagttccctggggtgagttttcttctaggatagtccaaggggag

SEQ ID NO: 22890 - DNA, 120 bp, synthetic construct
  source 1..120: mol_type = other DNA
actcaggcagtcagtgtgacaaagaggctggcgtaggaaaagagaggtcaggacaaagtcccaggccccaggcgtggctctctgggtctcaggccccaagagcgatgactgcactgggga

SEQ ID NO: 22891 - DNA, 120 bp, synthetic construct; identical to SEQ ID NO: 6787
  source 1..120: mol_type = other DNA

SEQ ID NO: 22892 - DNA, 120 bp, synthetic construct
  source 1..120: mol_type = other DNA
aggagggtcgggcgggtctcagcctctcctcgcctccaggctcccactccttgaggtatttcagcaccgcagtgtcccagcccggccgcggggagccccggttcatcgccgtgggctacg

SEQ ID NO: 22893 - DNA, 120 bp, synthetic construct
  source 1..120: mol_type = other DNA
agggccacgcgcagatttaccgagtgaacctgcggaccctgctccgctattacaaccagagcgaggccggtgagtgaccctggcccggggcgcaggtcacgatccctccccatcccccac

SEQ ID NO: 22894 - DNA, 120 bp, synthetic construct
  source 1..120: mol_type = other DNA
taggccaaaatccccgcgggttggtcggggcgggagcggggctcggtgttcggggctgacggcgggggcgaggccatggttctcacaccatccagaggaagcatggctgcgacgtgggcc

SEQ ID NO: 22895 - DNA, 120 bp, synthetic construct; identical to SEQ ID NO: 6788
  source 1..120: mol_type = other DNA

SEQ ID NO: 22896 - DNA, 120 bp, synthetic construct
  source 1..120: mol_type = other DNA
tcctgggtttccagatcctgtaccagagagtaactctgagagcccaccctgctctctgggacaattaagggatgaagtccctgaggaaatggaggagaagacagtccctggaatactgat

SEQ ID NO: 22897 - DNA, 120 bp, synthetic construct
  source 1..120: mol_type = other DNA
ggcctccactcaggtcaggaccagaagtccctgctcccccatcagagactcgaactttccaaggaataggagattatcccagattcctgtgtccaggctggtgtctgggttctgtgctcc

SEQ ID NO: 22898 - DNA, 120 bp, synthetic construct
  source 1..120: mol_type = other DNA
cacatgtgacccagcaccccatctctgaccatgaggccaccctgaggtgctgggccctgggcctctaccctgcggagatcacactgacctggcagcaggatggggaggaccagacccagg

SEQ ID NO: 22899 - DNA, 120 bp, synthetic construct; identical to SEQ ID NO: 6789
  source 1..120: mol_type = other DNA

SEQ ID NO: 22900 - DNA, 120 bp, synthetic construct
  source 1..120: mol_type = other DNA
aagctcaggtagggaaggggtgagaggtggggtctgggttttcttgttccactgtgggtttcaagccacaggtagaattgtgacttgcttcatcactgggaagcaccgtcgacacacagg

SEQ ID NO: 22901 - DNA, 120 bp, synthetic construct
  source 1..120: mol_type = other DNA
tcacaagggaagatccctactgaggacagacctcaggagggcagttggtccagtcaccacacctgctttcctcatgtttcctgatcctgccctgggtctgcagtcacagttctggaaatt

SEQ ID NO: 22902 - DNA, 120 bp, synthetic construct
  source 1..120: mol_type = other DNA
gttagtatgggggattagagggctgctccctgagatcgttgggacagtgtagacaagattcctcctttagccacatctcctgtgggctctgaccagttcctatttttgttctaccccagg

SEQ ID NO: 22903 - DNA, 120 bp, synthetic construct; identical to SEQ ID NO: 6790
  source 1..120: mol_type = other DNA

SEQ ID NO: 22904 - DNA, 120 bp, synthetic construct
  source 1..120: mol_type = other DNA
ccattgtaatttcaagagctcctgacttctatatctgcacttgacacgtgaatatatctatgtgtctgtgttccagttagcataatgtgaggaaatgggctactggtccaccactgccac

SEQ ID NO: 22905 - DNA, 120 bp, synthetic construct
  source 1..120: mol_type = other DNA
tactccactattcaaaataagaacctggatatgaatttttcaaattcttgccatgaggttgggttgattgttcaatgaaaggagagcaagactcttaaaacttgagagaggaagtaaaac

SEQ ID NO: 22906 - DNA, 120 bp, synthetic construct
  source 1..120: mol_type = other DNA
gagtgtggacagcctatgctcagttcatcatggaatttgacgtggtcattcattgggttggtcatcttcactgctccattgtttgtgtcccttcagtagaaccttgtttcaccaggacct

SEQ ID NO: 22907 - DNA, 120 bp, synthetic construct
  source 1..120: mol_type = other DNA
cagtctatggtctggccctaatattttgtatcattatttttggtttctttgtttctgtagaggactatgcctgttcctgttctggtgtctgcgttctgatctctttctcccctgggtgtc

SEQ ID NO: 22908 - DNA, 120 bp, synthetic construct; identical to SEQ ID NO: 6791
  source 1..120: mol_type = other DNA

SEQ ID NO: 22909 - DNA, 120 bp, synthetic construct
  source 1..120: mol_type = other DNA
ttagatttatatttgtttggaaattgggattcatagtcaaagattgttctttcctaagagggaaatataattgcatgctgcagtgtgcagagggttggtgtgaaggagggatgcagggag

SEQ ID NO: 22910 - DNA, 120 bp, synthetic construct
  source 1..120: mol_type = other DNA
ataaagatactgcctttagaataggaggtgctctacagtgatgattcattcagccgacatttgctgtctgccagacatatgacagaatgtttttgcatctggggaaagtcattgaagtaa

SEQ ID NO: 22911 - DNA, 120 bp, synthetic construct
  source 1..120: mol_type = other DNA
gacagaatgtttttgcatctggggaaagtcattgaagtaaaatcagaaaaatctctagccttgtggagcatgtgttccagtgggaagaggcagacggtacatacactctaatatatgcag

SEQ ID NO: 22912 - DNA, 120 bp, synthetic construct
  source 1..120: mol_type = other DNA
ggtgacctttgatgaaatatttgaaggacataaaggaatttgtcatgagggtatctggaagaagttttttctagggagtaggaaccttcagtgtcagtgtaccagggcaggatcatgtct

SEQ ID NO: 22913 - DNA, 120 bp, synthetic construct; identical to SEQ ID NO: 6792
  source 1..120: mol_type = other DNA

SEQ ID NO: 22914 - DNA, 120 bp, synthetic construct
  source 1..120: mol_type = other DNA
cgcattttctaatggactaaatctggggtatgagaaagaagagtaaaggataccaaaaatgtcagactgtgactaaaaagagttgccatcagctgagaatgagaagactagcaggagcat

SEQ ID NO: 22915 - DNA, 120 bp, synthetic construct
  source 1..120: mol_type = other DNA
gagaaatagacttgggaggtgatgtcatataacagttatttaaagccttgagtctgaatgacgtctccaagggagtgattggctgtagaagagaacaggaacaaggactgaacactaggc

SEQ ID NO: 22916 - DNA, 120 bp, synthetic construct
  source 1..120: mol_type = other DNA
tggacatcaccttaagtctaagctgatctggaatcgagaatgagatttcctacttatataatgttgctgttggcgctgatgctgctggtcttcagatcccacttttggtagcaagaacac

SEQ ID NO: 22917 - DNA, 120 bp, synthetic construct; identical to SEQ ID NO: 6793
  source 1..120: mol_type = other DNA

SEQ ID NO: 22918 - DNA, 120 bp, synthetic construct
  source 1..120: mol_type = other DNA
gaagtggctcacagctcagcagaatgaaaaaatatctgaatgctgctttctgaaactactctccagaatgatttcacactcactccttggagcaaacaatgacttgcaaatttttctaat

SEQ ID NO: 22919 - DNA, 120 bp, synthetic construct
  source 1..120: mol_type = other DNA
aaaagaggtttaattggacttacagttccatttggctggggaggcctcagaatcatggtgggaggcgaaaggcacttcttacatggtggtggcaagagaaaatgaggaagaagcaaatgc

SEQ ID NO: 22920 - DNA, 120 bp, synthetic construct
  source 1..120: mol_type = other DNA
ggaattctgggagatacaattcaagttgagatttgggtggggacacagccaaaccacattggacacagaaccaggtttgaagctacacagccaggaacataatccacagccaccctaatt

SEQ ID NO: 22921 - DNA, 120 bp, synthetic construct; identical to SEQ ID NO: 6794
  source 1..120: mol_type = other DNA

SEQ ID NO: 22922 - DNA, 120 bp, synthetic construct
  source 1..120: mol_type = other DNA
gccttctaataagactcttcaacataggaagagaattcagttgctggaggtagaggggtgagggatggaaaaagaatgacaaatttcaattcctagaatcatgttctgagactagaactt

SEQ ID NO: 22923 - DNA, 120 bp, synthetic construct
  source 1..120: mol_type = other DNA
agatacgtggagaagcattgtgtgatggtaaaatgtttacttgaaagcctttttccctatctttgtctcttgctaggattaaaaacccgtatctgtaagacatcagaggatccatgtata

SEQ ID NO: 22924 - DNA, 120 bp, synthetic construct
  source 1..120: mol_type = other DNA
aatttagatgccattttactcaaactattgtatgaacagctgataaccatactgtttttagaagacccagtgacatggtataaatgctcatcttttgcttgactgttactagtctgggat

SEQ ID NO: 22925 - DNA, 120 bp, synthetic construct; identical to SEQ ID NO: 6795
  source 1..120: mol_type = other DNA

SEQ ID NO: 22926 - DNA, 120 bp, synthetic construct
  source 1..120: mol_type = other DNA
aaagggaagttgcttttatcttgagggcgtttgccaaatctggaaaaatcttagctttggttttctcagcttcatatggtatagtgcaaaggaggtaattctcagaacttgtttgtatag

SEQ ID NO: 22927 - DNA, 120 bp, synthetic construct
  source 1..120: mol_type = other DNA
aatctgtttcatcccccagcacaagagtattctaaagaaatttgcctttgagtcagcaaaacctgtttttgagaatttacaaccaccagccagcactcctgcagatttgttgcccaaact

SEQ ID NO: 22928 - DNA, 120 bp, synthetic construct
  source 1..120: mol_type = other DNA
taacccatatgtcaaagaatttgcccaaataattctacaaggaaaaagctgctcagagcatgaactgtataaagtacaagtggagaaaagtcagtctgattgagaaccagtggaaacaat

SEQ ID NO: 22929 - DNA, 120 bp, synthetic construct
  source 1..120: mol_type = other DNA
gggaggctgaggcaggcggatcacctgaggctgggagtttgagaccagcctgaccaacatagaaaaaccccgtctctactaaaaatagaaaattagctgggcgtggtggcacatgcctgt

SEQ ID NO: 22930 - DNA, 120 bp, synthetic construct; identical to SEQ ID NO: 6796
  source 1..120: mol_type = other DNA

SEQ ID NO: 22931 - DNA, 120 bp, synthetic construct
  source 1..120: mol_type = other DNA
tactctcatgccttaagcacaacaaactcaaaataatatatgaaaaaatagctatgtactcagatactagacagcaggtatcccagagactgtgatctctgggagaaggggaatggaaaa

SEQ ID NO: 22932 - DNA, 120 bp, synthetic construct
  source 1..120: mol_type = other DNA
attccaggacatccagaatatgcaaagatgaaggcacatagaaaagacagctgatgataaaaagcactgtaagtctgcaggaggtacccctcaaattttcagttaatcagcatattatat

SEQ ID NO: 22933 - DNA, 120 bp, synthetic construct
  source 1..120: mol_type = other DNA
atttgctgagcattggatagagtattctgaagggtcttatgtcagcagtggtaaataattagccctggactaaacactttttgtttttttgctaaaagatattaaaagacttaaaatgat

SEQ ID NO: 22934 - DNA, 120 bp, synthetic construct
  source 1..120: mol_type = other DNA
tgggagttcgagaccagcctgaccaacatggagaaatcccgtctctactaaaaatacaaaattagctgggcatggtggcgcatgcctataatcccagctactcgggaggctgagacagga

SEQ ID NO: 22935 - DNA, 120 bp, synthetic construct; identical to SEQ ID NO: 6797
  source 1..120: mol_type = other DNA

SEQ ID NO: 22936 - DNA, 120 bp, synthetic construct
  source 1..120: mol_type = other DNA
ataaaacatcaaaatcaaacttccaaagatgaaaatgtcagacataaaatacactggatgtgaggtgagattaatggtaaactttatgctgtagattaaacagtgactttgaagacatag

SEQ ID NO: 22937 - DNA, 120 bp, synthetic construct
  source 1..120: mol_type = other DNA
acatcatactcaatggcgaaagttgcatacttttcctgtaagatcaggaacaagacaatgatgcccactctggccacatctattcaacattgtactgataattctaggcagagtaattag

SEQ ID NO: 22938 - DNA, 120 bp, synthetic construct
  source 1..120: mol_type = other DNA
ggaaaccccaaacactccaccaaaatactactggcactgaaaaaaaaaatcagtgaagttgcagcatacaaaatcagcatacaaaaattagtggtacttttatatacttaccaaaaactg

SEQ ID NO: 22939 - DNA, 120 bp, synthetic construct; identical to SEQ ID NO: 6798
  source 1..120: mol_type = other DNA

SEQ ID NO: 22940 - DNA, 120 bp, synthetic construct
  source 1..120: mol_type = other DNA
atttaacatgatactacaaagctatattaatgaaaacagtatggtactggcataaaaacagcacatagaataatggaatagaacagaaagctcagaaataaatccatgcatatacaatta

SEQ ID NO: 22941 - DNA, 120 bp, synthetic construct
  source 1..120: mol_type = other DNA
ccatatgcaaaatcaactccgaatagattaaagatgtaaatgtaagacctgaaaccacaaaacttggagaagaaagcaggtgaaaagctccgagacattggccttggcaatgattttttt

SEQ ID NO: 22942 - DNA, 120 bp, synthetic construct
  source 1..120: mol_type = other DNA
gaaaatatttgcaaaccttatattcactaatgggttaatatgtaaagtctatagactccatagaacttaatagcaaaaaacagataacccagttcaaatatgggcaaaagacccgaatag

SEQ ID NO: 22943 - DNA, 120 bp, synthetic construct; identical to SEQ ID NO: 6799
  source 1..120: mol_type = other DNA

SEQ ID NO: 22944 - DNA, 120 bp, synthetic construct
  source 1..120: mol_type = other DNA
cacaatggccaagatatagaaacaaagtaagtgtttattgattaatggatgaataaagacattgtgatacacacacatacacacacacacgaatattattcagacatgaaaaggaaggaa

SEQ ID NO: 22945 - DNA, 120 bp, synthetic construct
  source 1..120: mol_type = other DNA
ttcagagaaacagaggtagaaacagtcagttgaattaacttaactttgacctgaggctgcctgtgtacctaagtaagtaggtaaacaaatcaaaacctaagttaggagtataactgttag

SEQ ID NO: 22946 - DNA, 120 bp, synthetic construct
  source 1..120: mol_type = other DNA
gtgcacactcctgggtggagctttctgaccctctcctggttctgagtgctgccaaatttgtaaattattttttgcttaaataaactcttctaaatttagtttgtctaaagttgatggaat

SEQ ID NO: 22947 - DNA, 120 bp, synthetic construct; identical to SEQ ID NO: 6800
  source 1..120: mol_type = other DNA

SEQ ID NO: 22948 - DNA, 120 bp, synthetic construct
  source 1..120: mol_type = other DNA
cttgaatgtatataattcttgtttgtcaattatgcttcaataaagctagggaaaaataaaatacttagaaataaatgtaataaaagaagtacgaaatttatactacaaaaaaaccgacaa

SEQ ID NO: 22949 - DNA, 120 bp, synthetic construct
  source 1..120: mol_type = other DNA
atcaaaatcccagctgactgctttgcagaaactgacaagatgatattaaaatttatatggaaattcagtgaactacaaaagttacaaaacttttgacaaagaacagagtttgaggaacta

SEQ ID NO: 22950 - DNA, 120 bp, synthetic construct
  source 1..120: mol_type = other DNA
ggtcaattaaatttcaaaaatactgccaaggcaattcagtgggggaaagaaaaatcttttcgagaaattatacacaactcaatagcaataaaacaaataacctaattcaaaaatggacaa

SEQ ID NO: 22951 - DNA, 120 bp, synthetic construct; identical to SEQ ID NO: 6801
  source 1..120: mol_type = other DNA

SEQ ID NO: 22952 - DNA, 120 bp, synthetic construct
  source 1..120: mol_type = other DNA
tcagtatctcaaagaaatatttgcacccatatgtttatcacagcattatttcctggaaataacctgaatgtctgtcaactgatgaatggattaaacatatgttttactctattttatgct

SEQ ID NO: 22953 - DNA, 120 bp, synthetic construct
  source 1..120: mol_type = other DNA
catcatcacatggctgaaggtagaagggcaagtaaagtacagagaacacactcctggaagcccttttataaaggcattaaaaccacccccaagggtggaaccctcatggtccaatcacct

SEQ ID NO: 22954 - DNA, 120 bp, synthetic construct
  source 1..120: mol_type = other DNA
gagtccaggagttcaagaccagcctgggcaacatagtgagaccccatctctacaaatatatatatacttcaacccatgttgaaatataaatgggttgaaacaacatgggttttggagggg

SEQ ID NO: 22955 - DNA, 120 bp, synthetic construct; identical to SEQ ID NO: 6802
  source 1..120: mol_type = other DNA

SEQ ID NO: 22956 - DNA, 120 bp, synthetic construct
  source 1..120: mol_type = other DNA
taatcatacaatgtatatgtgtattaaattatcatgatgtatgccatgcacaactttgtcaattaaatgttttttaaatatgaaatggccaatggttaaaaaaaattgtgctgatgtaac

SEQ ID NO: 22957 - DNA, 120 bp, synthetic construct
  source 1..120: mol_type = other DNA
tgtatgcaaaaaccttcatgacctcggattaagcagtgttttttaaatatgacaccaaaacacaagtaacaataaaccaaacagataaattctatctcaacaaagtttaaaactctgtgt

SEQ ID NO: 22958 - DNA, 120 bp, synthetic construct
  source 1..120: mol_type = other DNA
aattagtatatagaacacacaaactcttacaagtcaaaaattaaaagacaaataatacaagtaaaaaatgaacaaagggctgaatagatacttctccacaggagatagaaagatggctaa

SEQ ID NO: 22959 - DNA, 120 bp, synthetic construct; identical to SEQ ID NO: 6803
  source 1..120: mol_type = other DNA

SEQ ID NO: 22960 - DNA, 120 bp, synthetic construct
  source 1..120: mol_type = other DNA
aagcagcattattctcaatggctgaagagtggaaacaatacagatgcccaggaacaaatgaatgaataagatatggtcaatctatggaacggaatatttggccataaaaagaaatgcagt

SEQ ID NO: 22961 - DNA, 120 bp, synthetic construct
  source 1..120: mol_type = other DNA
ttgtagagagaaagtagattagtggttgcctaggactgaggaaatgttggagggaaaaatggggatgactgcctgagaataaatatacatgggtgatgaaaatgttctaaaaatagtttt

SEQ ID NO: 22962 - DNA, 120 bp, synthetic construct
  source 1..120: mol_type = other DNA
tgaaaaatgatggctcacatgaaataaaatcgatgtgccagagctgccatggcagattgtggagaaagagaccaaaaggctcagagcagtgagcatgctggcatagatagatacactcta

SEQ ID NO: 22963 - DNA, 120 bp, synthetic construct
  source 1..120: mol_type = other DNA
gcaggtgaacggggtattaacctaattttgtcctttgtgggctggagctgactctatgagatgatattggagaacttggtgccctagcaacaataggacagtaggattccagaaagctag

SEQ ID NO: 22964 - DNA, 120 bp, synthetic construct; identical to SEQ ID NO: 6804
  source 1..120: mol_type = other DNA

SEQ ID NO: 22965 - DNA, 120 bp, synthetic construct
  source 1..120: mol_type = other DNA
accataagtgtgtacagtagacactttctacacccttccctaaagggatcaatggccatttactcaggtatcaagacactgataaaggggaatgtccagatattttcaggtctattggat

SEQ ID NO: 22966 - DNA, 120 bp, synthetic construct
  source 1..120: mol_type = other DNA
ctgaaaataatttcctgtctcaggtccacccgtatctccgtggattctctgtgtccacacatctgcttggtggttatttttctggtttccaaatatgtaattgatggatttattttgtac

SEQ ID NO: 22967 - DNA, 120 bp, synthetic construct
  source 1..120: mol_type = other DNA
acaatgtagtatttgaggggcaatgaaataaactgtcactcaaagacataaaagatgcaggggttgtggtttcatcatcaactattgaatttaccactccagttctagcaaaaattggat

SEQ ID NO: 22968 - DNA, 120 bp, synthetic construct; identical to SEQ ID NO: 6805
  source 1..120: mol_type = other DNA

SEQ ID NO: 22969 - DNA, 120 bp, synthetic construct
  source 1..120: mol_type = other DNA
catttatcctttgagttacaaaccattcaattacactatttttaaatgtgcattattgactatagtccccctattgtgctatcaaatagtaggtcttattcttctaaatttttttttacc

SEQ ID NO: 22970 - DNA, 120 bp, synthetic construct
  source 1..120: mol_type = other DNA
gagaacatgccatgtttgcctttctgtgcctggcttatttcatttaacataatgatctccacttccatccatgctgttgcaaatgactggatctcattcctttttatggctgaatagtac

SEQ ID NO: 22971 - DNA, 120 bp, synthetic construct
  source 1..120: mol_type = other DNA
cttccatatactgattttcttttttgagacagggtcacactttgtcacccaggctggagtgcagtggcatgatcttggctcactgcaacctccacctcctaggttcaagtgatcctacct

SEQ ID NO: 22972 - DNA, 120 bp, synthetic construct; identical to SEQ ID NO: 6806
  source 1..120: mol_type = other DNA

SEQ ID NO: 22973 - DNA, 120 bp, synthetic construct
  source 1..120: mol_type = other DNA
tttgttattgcctgtcttttggatataagccattttaactggggtgagattatatctcattgcagttttgatttgcatttctctgaggatcaataatcatcagcaccttttcatatgcct

SEQ ID NO: 22974 - DNA, 120 bp, synthetic construct
  source 1..120: mol_type = other DNA
atcctcccatctcagcttcctaagtagctgggactacaggtgtgcaccaccactcccagctattttttatttttgtattttgcagaattggggtttgaccatattgctcagtctggtctc

SEQ ID NO: 22975 - DNA, 120 bp, synthetic construct
  source 1..120: mol_type = other DNA
ttttttttttttgtgagacggagtctcactttgttgcccaggctggagtgcagtggtgtgatctcggcttactgcaacctctgtctcccaggtttaagcgattctcctgcctcagcctcc

SEQ ID NO: 22976 - DNA, 120 bp, synthetic construct; identical to SEQ ID NO: 6807
  source 1..120: mol_type = other DNA

SEQ ID NO: 22977 - DNA, 120 bp, synthetic construct
  source 1..120: mol_type = other DNA
tttattgattgtatcctttgctttgtagaagcttttaaacttgatgtgatactatttgtccagttttattttggttgcctgtgcttgtggggtattgctcaagaaatttttggccagact

SEQ ID NO: 22978 - DNA, 120 bp, synthetic construct
  source 1..120: mol_type = other DNA
tcgccaggctggagtgcagtggcacaatctcagctcactgcaacctccacctcctgggttcaagcgattctcctgccccagcctcctgagtagctaggactgcaggcacatgccatcacg

SEQ ID NO: 22979 - DNA, 120 bp, synthetic construct
  source 1..120: mol_type = other DNA
tacaggtgtaagccaccatgcctagccttgatttgacttttgtctacagtgagaggtaggggtctagtttcattcttctgcatatggatatccagttttcccagcaccatttcattgaag

SEQ ID NO: 22980 - DNA, 120 bp, synthetic construct; identical to SEQ ID NO: 6808
  source 1..120: mol_type = other DNA

SEQ ID NO: 22981 - DNA, 120 bp, synthetic construct
  source 1..120: mol_type = other DNA
caatattgattcttccaatccataaagatggaattttttccattttttttgtgtcctcttcaatttctttcatcaatgttttataattctcctcatagatatcttgcacatttttggtta

SEQ ID NO: 22982 - DNA, 120 bp, synthetic construct
  source 1..120: mol_type = other DNA
tttgtgtcctgcaactttactgaatttattgattctaatagttttcctgtggagcctttaggttttttccaaatataagttcatatcatctgcaaactagggtaatttaacttctccctt

SEQ ID NO: 22983 - DNA, 120 bp, synthetic construct
  source 1..120: mol_type = other DNA
aagtctttcactttttccccattcagtatgatactagctgtgggtctgtcatatctggctattacgttgaggtatatttcttttatacagttttttgagggtttttatcatgaagggatg

SEQ ID NO: 22984 - DNA, 120 bp, synthetic construct; identical to SEQ ID NO: 6809
  source 1..120: mol_type = other DNA

SEQ ID NO: 22985 - DNA, 120 bp, synthetic construct
  source 1..120: mol_type = other DNA
tgaactcctgacctcaggtgatctgcccacctcggcctcccaaagtgctgggattagaggcttaagccactgcacccgaccctgatgaatgatctttttaatgtattgttgaatttagtt

SEQ ID NO: 22986 - DNA, 120 bp, synthetic construct
  source 1..120: mol_type = other DNA
tgactttggaaatattctctcctcctctatttttcaatagcttgagtgggattggtattagttcttctttaaatgtttggtagaattcaacagtgaagccatcgggtccttggttttctt

SEQ ID NO: 22987 - DNA, 120 bp, synthetic construct
  source 1..120: mol_type = other DNA
tctagattttccaatttattggcatagagttgctcatagtagcccctaatgatcctttgaatttctgcagtgtcagttgtaatgtctttttcatttctgatttgtatcttgtctcttttt

SEQ ID NO: 22988 - DNA, 120 bp, synthetic construct; identical to SEQ ID NO: 6810
  source 1..120: mol_type = other DNA

SEQ ID NO: 22989 - DNA, 120 bp, synthetic construct
  source 1..120: mol_type = other DNA
cattcaggagcatattgtttaattttcatgtatttgtagtttcaaaaattcctcttgttattagtttctagttgtattccactgtggtcagagaagatgcttgatggtattcaacttttt

SEQ ID NO: 22990 - DNA, 120 bp, synthetic construct
  source 1..120: mol_type = other DNA
atttgatctacagtgcagattaagtctgatgtttcttttttattttctgtctggaagatctgtccagtgctgaaaatgtggtgttgaagtctccagctattattgtattggggtcactct

SEQ ID NO: 22991 - DNA, 120 bp, synthetic construct
  source 1..120: mol_type = other DNA
actgctataaagaaatacccgagactgggtaatatatagagaaaagaggtttaattggctcacagttctgcaggctgtacaggaagcatggctggggaggcctcagaacacttacaatca

SEQ ID NO: 22992 - DNA, 120 bp, synthetic construct; identical to SEQ ID NO: 6811
  source 1..120: mol_type = other DNA

SEQ ID NO: 22993 - DNA, 120 bp, synthetic construct
  source 1..120: mol_type = other DNA
taattcaaaagtccaaagtccagagtctcaacctgagacaaggcaagtctctcccacctgtgagcttacaaaataaaaaaacagttagttacttccaacatacagtgggggtacaggaat

SEQ ID NO: 22994 - DNA, 120 bp, synthetic construct
  source 1..120: mol_type = other DNA
ttgactccatatctcacatccagggcacactggtgcaaggggtgggctcccaaggccttgggcagctcagcccctgggactttgcagggtaagccactgtcactgctttcacgggctggc

SEQ ID NO: 22995 - DNA, 120 bp, synthetic construct
  source 1..120: mol_type = other DNA
ggaagctgtgtgggaactccaaccccaaatttcccctccacactaccctagtagaggttctccatgagggctctgtccctgcagctggcttctgcctggacatccaggctttcccacaca

SEQ ID NO: 22996 - DNA, 120 bp, synthetic construct; identical to SEQ ID NO: 6812
  source 1..120: mol_type = other DNA

SEQ ID NO: 22997 - DNA, 120 bp, synthetic construct
  source 1..120: mol_type = other DNA
aattttctgcagctagcttgaattcctctccagaaaatggtttttttcttttctacaacatggccaggctgcaaattctccaaacttttacactctgcttcctttttaaatataagttcc

SEQ ID NO: 22998 - DNA, 120 bp, synthetic construct
  source 1..120: mol_type = other DNA
tcaagttcaaagttccacagattcctagggcaggggcacaatgtctccaaccacaatgtcctaacaaaagtgaccttcactccaggtcccaataagtccctcatctccatctgagacctc

SEQ ID NO: 22999 - DNA, 120 bp, synthetic construct
  source 1..120: mol_type = other DNA
ccaacctctgtctatttcccagttccactgctgtttccacattttcaggtatctttctagcaatgcctcactcctctttaccaattttctgtattattctgttctcacactgctataaag

SEQ ID NO: 23000 - DNA, 120 bp, synthetic construct; identical to SEQ ID NO: 6813
  source 1..120: mol_type = other DNA

SEQ ID NO: 23001 - DNA, 120 bp, synthetic construct
  source 1..120: mol_type = other DNA
gtggggcacaaatggaaaccatattaacccctttatcattgtatagtgactttatttgtctcatagtttttgtatcaaaatcaatactccttctctttttcctggtttccattggcatgg

SEQ ID NO: 23002 - DNA, 120 bp, synthetic construct
  source 1..120: mol_type = other DNA
tttgattggagagtttagtccatatttccattcaatgtattatcgataagtaaagacttactcctgccttgttatttatttgttttctggttgttttgtggtcttcttctttcttttctt

SEQ ID NO: 23003 - DNA, 120 bp, synthetic construct
  source 1..120: mol_type = other DNA
tattttgtaacccattattttaacctggtaacactgtttgcattaacaaacaaaaaactaataaaaactctacatcttaacttcatccccccactttttaactttttgttgtttctaatt

SEQ ID NO: 23004 - DNA, 120 bp, synthetic construct; identical to SEQ ID NO: 6814
  source 1..120: mol_type = other DNA

SEQ ID NO: 23005 - DNA, 120 bp, synthetic construct
  source 1..120: mol_type = other DNA
atatgtcatgtcactctctcctggcttgtaaggtttccactgaaaaatatactgccagatgtattggagctccattgtatgttatctgtttcttttctcttgctgcttttaggatccttt

SEQ ID NO: 23006 - DNA, 120 bp, synthetic construct
  source 1..120: mol_type = other DNA
ggaagttctatgttattatccctttcaacaaactttctattcctatctctttctctatctcttctttaaggccaataactcctagatttgcccttaagaagttattttctagatcctgtg

SEQ ID NO: 23007 - DNA, 120 bp, synthetic construct
  source 1..120: mol_type = other DNA
tgatctcggctcactgcaacctctgcctcctgggttcaagcaattctcctgccttggcctcccaagtagctgggattacaggcatgagccaccacacctggctaattttgtatttttagt

SEQ ID NO: 23008 - DNA, 120 bp, synthetic construct; identical to SEQ ID NO: 6815
  source 1..120: mol_type = other DNA

SEQ ID NO: 23009 - DNA, 120 bp, synthetic construct
  source 1..120: mol_type = other DNA
ttttttgtagccatcctgactggcagatgatatctcatcatggttttgattttgcatttctctaatgatcagtgataattgaggttttctttaacacgctagttggctgtatgtatgtct

SEQ ID NO: 23010 - DNA, 120 bp, synthetic construct
  source 1..120: mol_type = other DNA
agtttgcaaaaattttctgtcatttggtagattgtctgccctgttgtttattttgctatgaaaaagctcttaaatccaatttgtccatttttgcttttgttacaattgcttttggtgtct

SEQ ID NO: 23011 - DNA, 120 bp, synthetic construct
  source 1..120: mol_type = other DNA
ggggtccagttacgatcttctgcatatggccagccagttatcccagcaccatttattgaatagggagacctttccccattgcttgtttttgtcaactttgttgaagatcagatggctgta

SEQ ID NO: 23012 - DNA, 120 bp, synthetic construct; identical to SEQ ID NO: 6816
  source 1..120: mol_type = other DNA

SEQ ID NO: 23013 - DNA, 120 bp, synthetic construct
  source 1..120: mol_type = other DNA
cgtttgtgattctcattgtagagatcctttacttccttggttagctgcattcctgggtattttattcttttttgtggcaattatgaatgggattgtgctcctgatttggctcttggcttg

SEQ ID NO: 23014 - DNA, 120 bp, synthetic construct
  source 1..120: mol_type = other DNA
tcatactgtctgcaaacaaggatagtttgacttcctctcttcctatttggatgccctttattatttctgttgcctgactgctgtgatcaggactttcaacactatattgaataggagtgg

SEQ ID NO: 23015 - DNA, 120 bp, synthetic construct
  source 1..120: mol_type = other DNA
tccttcaacacaagatgggaagctccccaaatccacatctcttgcttgtgggggagccatcctcagcacatcggccctacccaacccacagtagataccaacatccctatgatggatgag

SEQ ID NO: 23016 - DNA, 120 bp, synthetic construct; identical to SEQ ID NO: 6817
  source 1..120: mol_type = other DNA

SEQ ID NO: 23017 - DNA, 120 bp, synthetic construct
  source 1..120: mol_type = other DNA
cagatgtacccccaaggactctccctcatggtgtctgctcctctgccccacccttctgatctcacagcttctccttaggtgacattcacactttagacaaagttgtttggtcccctgatt

SEQ ID NO: 23018 - DNA, 120 bp, synthetic construct
  source 1..120: mol_type = other DNA
tttagtcaagttgtttaacctccactctgttcatcttgtatatatgggtggggggtgaagactatgagcccacaggtctgcttctgtgctcactgtaacagattcctaagtgcaagtccc

SEQ ID NO: 23019 - DNA, 120 bp, synthetic construct
  source 1..120: mol_type = other DNA
tgcaaaccttaacattaacaagtaccaaacctctgctgaaaaatcctctaatgaatttcaaggttaaatataaataaactgtgggattgttctgcctagagtagccacaccctcctcggg

SEQ ID NO: 23020 - DNA, 120 bp, synthetic construct; identical to SEQ ID NO: 6818
  source 1..120: mol_type = other DNA

SEQ ID NO: 23021 - DNA, 120 bp, synthetic construct
  source 1..120: mol_type = other DNA
tggaaagtctcattttcttcatctactcaaatcatacacatccctcgggttccatgcaaagttccatctcattcatgaaactccctgaccactgggatatctggcccatgaacttgagca

SEQ ID NO: 23022 - DNA, 120 bp, synthetic construct
  source 1..120: mol_type = other DNA
gctctttgaggatacacactaggttatacttttctggttctccaccctaagcacccaaaaggcagatggtaggtacatctcagctccaaagagactgctgaagactgaatgaattaatga

SEQ ID NO: 23023 - DNA, 120 bp, synthetic construct
  source 1..120: mol_type = other DNA
cactgcagcctgaggccacaggtagcagtgttgctgggttgctgcattctttactgtgagatttagaaaaactgtcattatcattatcctaatattgtcaaaacttgtaggcagcctatt

SEQ ID NO: 23024 - DNA, 120 bp, synthetic construct; identical to SEQ ID NO: 6819
  source 1..120: mol_type = other DNA

SEQ ID NO: 23025 - DNA, 120 bp, synthetic construct
  source 1..120: mol_type = other DNA
actcacagatggcttattattgctagcaatgtaaatattggatgcaaatcatgctcaaaagctgtgtgaatagccaaaagtgctaagcacattctgtcagtgctcataattcaaggaaaa

SEQ ID NO: 23026 - DNA, 120 bp, synthetic construct
  source 1..120: mol_type = other DNA
ccaaatgtgtaattaaatagagcattttacatcattaagtagaggcttttaaacaattatacatagtgcatatcattgcagtatagattaatggttctgctggttgcaaaccatattcta

SEQ ID NO: 23027 - DNA, 120 bp, synthetic construct
  source 1..120: mol_type = other DNA
aggaaaatgggtttttgttgatctgaggaacttataccaaccttactcatcagtgcccaagaaaaatagctttaatgtgagacagttgtatgatggtacagatagtgccagtatatgcaa

SEQ ID NO: 23028 - DNA, 120 bp, synthetic construct; identical to SEQ ID NO: 6820
  source 1..120: mol_type = other DNA

SEQ ID NO: 23029 - DNA, 120 bp, synthetic construct
  source 1..120: mol_type = other DNA
tgattgcctgtgggggaaaaagaaacttttttggatagaacagtctggatggactctaacacagtaaaaagtgaaggcagtgcattcttcagaagggcggcagatggggcaccacgcatc

SEQ ID NO: 23030 - DNA, 120 bp, synthetic construct
  source 1..120: mol_type = other DNA
agacttgggataggaggagtgagtgcgctggtaaaaccaattacttagctaaacctttggctaaaactctaggaagggaggcacaaaatgggaaagtgtgggttttttttttttgcttct

SEQ ID NO: 23031 - DNA, 120 bp, synthetic construct
  source 1..120: mol_type = other DNA
tcctcccaggctaaatccttcatgttgcaggagacagagaatcccaggtgagacccggactttttctcctccctcccttccttttttcaccgtgttcaggataaattatcttggttttgt

SEQ ID NO: 23032 - DNA, 120 bp, synthetic construct
  source 1..120: mol_type = other DNA
gcagaggggtgggaacaattaacattgctttatgggctttagaatggagaaaaaataattcccactcttttttcttttacccaaatccaacttcagttttctctccaactctctaaaacc

SEQ ID NO: 23033 - DNA, 120 bp, synthetic construct; identical to SEQ ID NO: 6821
  source 1..120: mol_type = other DNA

SEQ ID NO: 23034 - DNA, 120 bp, synthetic construct
  source 1..120: mol_type = other DNA
aagaacaacaaaaagcaaacaaaacagatttacatgtaatacctaatttaatcccttcataactctgtgaagtgggtcagtattgacgggtcagcttaactaacagatattaggaatgag

SEQ ID NO: 23035 - DNA, 120 bp, synthetic construct
  source 1..120: mol_type = other DNA
gacccttacaatgttgatattctccatgctttctcagagcaagtggctgaatctctttcgtgacagagaactcaccacctaccaaggcagcccattttattaagtctaacttttaaaaaa

SEQ ID NO: 23036 - DNA, 120 bp, synthetic construct
  source 1..120: mol_type = other DNA
atctctagtcatagccagatatattgcatcaaaataaatggctattttctgcaggagggttggtccaaatgtcctagcctaccattacctgaagcaagaagtcctccctattttttgaag

SEQ ID NO: 23037 - DNA, 120 bp, synthetic construct; identical to SEQ ID NO: 6822
  source 1..120: mol_type = other DNA

SEQ ID NO: 23038 - DNA, 120 bp, synthetic construct
  source 1..120: mol_type = other DNA
tgaaatgggagatgtgataggaatgttgtgaggattgtttgagtgaatacatgcaaaggacttaggacaagcctggcacatagttaatgctcaatcaatgttttctctcgcaactggagg

SEQ ID NO: 23039 - DNA, 120 bp, synthetic construct
  source 1..120: mol_type = other DNA
cctctctggccgcagcatgtaaaggaatgggaggggattagaatgtgtgtgcacggactaggtgggagctaactgcagggccagcatctgtggcacagattatctctcttcatcctgaac

SEQ ID NO: 23040 - DNA, 120 bp, synthetic construct
  source 1..120: mol_type = other DNA
gcccatgactggcaacctgctgggagaggtggcctgcagtgtgtctggagtacatgggggaccccgggagcatcttctgtgtctgtggcccctggcaggcctgcatcacttggtgctatg

SEQ ID NO: 23041 - DNA, 120 bp, synthetic construct; identical to SEQ ID NO: 6823
  source 1..120: mol_type = other DNA

SEQ ID NO: 23042 - DNA, 120 bp, synthetic construct
  source 1..120: mol_type = other DNA
tctgtccttttgctgtcttgtctacaccagagaacctttggttgacttgctttaatattggcttcagtcctattacaaaacaacaacaaattattgtattctaaacacagttctaaatgc

SEQ ID NO: 23043 - DNA, 120 bp, synthetic construct
  source 1..120: mol_type = other DNA
agaaacttccatgtcactagaggatttcacaatccatatatgaatcccctgaagacttcttggtgtgaaggaaacatcactggacacaacactgaaaatggcaatagtccaggcatggtg

SEQ ID NO: 23044 - DNA, 120 bp, synthetic construct
  source 1..120: mol_type = other DNA
tagccaggtgtggtggtgcatgcctgtagtcccagctaccagcgaggctgaggcaggagaatcacttgaatcccgtaggctgaggttctggtgagctgagatcacgccactgcactccag

SEQ ID NO: 23045 - DNA, 120 bp, synthetic construct
  source 1..120: mol_type = other DNA
cctagaaaaattatagaaatctaacttaaccttgtcaacatggggattcattatcttatttagcaaactaaaggaacaataatgtaactgcacctcaggtacaactggaaccagggattt

SEQ ID NO: 23046 - DNA, 120 bp, synthetic construct; identical to SEQ ID NO: 6824
  source 1..120: mol_type = other DNA

SEQ ID NO: 23047 - DNA, 120 bp, synthetic construct
  source 1..120: mol_type = other DNA
cctagattatgctgcaatgatatacaactcccgtatctcactggtataaaccaaaaagatttcttttacatgctacctgttcatcaggagttgctgagggggtcacttggagatccaggc

SEQ ID NO: 23048 - DNA, 120 bp, synthetic construct
  source 1..120: mol_type = other DNA
gcagttaaattcccagtccagaagaaatacatatcacccctactaacacctcattacagggcacagatgatgacaataatgacctctcaggcttaaggacccttcaactctgagagaggg

SEQ ID NO: 23049 - DNA, 120 bp, synthetic construct
  source 1..120: mol_type = other DNA
agcatttcagaggtcagaagggtgtttgctgttacgactcttgctctcacttctacctgacaagagagaagaatttgtatagactgttagacatgttactattttttgaaagcactaggt

SEQ ID NO: 23050 - DNA, 120 bp, synthetic construct; identical to SEQ ID NO: 6825
  source 1..120: mol_type = other DNA

SEQ ID NO: 23051 - DNA, 120 bp, synthetic construct
  source 1..120: mol_type = other DNA
gatctaacaacgacagcatccatcagtgaactctgagtctaccaaacagaaattgctcttaatgggttcatctaatggcagggccggctcaaggcaaaattttttgcccccatccctctt

SEQ ID NO: 23052 - DNA, 120 bp, synthetic construct
  source 1..120: mol_type = other DNA
gggactatgggcgcatgccaccatacctgctaatgtttaaaatttttgtaaagatggggtctcactatgttccctaagatggtctcaaattcctggcctcaagcaatcctcctgccgcaa

SEQ ID NO: 23053 - DNA, 120 bp, synthetic construct
  source 1..120: mol_type = other DNA
acatgtgtaggttcgttatatgggtaaattacaatgttgtgggggttgtgtatacagataattttgtcgcccaggtaatcagcataatacccaaaaggtagtttttaagtcttcaccctc

SEQ ID NO: 23054 - DNA, 120 bp, synthetic construct; identical to SEQ ID NO: 6826
  source 1..120: mol_type = other DNA

SEQ ID NO: 23055 - DNA, 120 bp, synthetic construct
  source 1..120: mol_type = other DNA
ccttgagtagctgggattacaggcacctgccaccatgtccagctaatttttgtatttttagtagagacaaggtttcaccatgttggccaggctggtctcaaactcctgacctcgccgaac

SEQ ID NO: 23056 - DNA, 120 bp, synthetic construct
  source 1..120: mol_type = other DNA
gtgtgtctttaggtagaactatttatattcctttggggatatacccagtaaagggattgctgggttaaacggtagttttaagttctctgagaaatttccagactgctttccacaatggct

SEQ ID NO: 23057 - DNA, 120 bp, synthetic construct
  source 1..120: mol_type = other DNA
ctcattgtggttttgatttgcattcccctaattagggatattaagcattttttttcttatgtttcttttgaaaagtgttcatgtcctttgcccattttttaatggggttcttttttgctt

SEQ ID NO: 23058 - DNA, 120 bp, synthetic construct; identical to SEQ ID NO: 6827
  source 1..120: mol_type = other DNA

SEQ ID NO: 23059 - DNA, 120 bp, synthetic construct
  source 1..120: mol_type = other DNA
cagcaccatttattgaatagggagttctttccccattgcttgttattgtcaattttgtcaaagatcagatggttttaggtatgtggctttatttctgagttctctaatctgctccattag

SEQ ID NO: 23060 - DNA, 120 bp, synthetic construct
  source 1..120: mol_type = other DNA
ttgggctccttcttggttccatatgaatttttgaattttttttcctaactctgtgaaaaatgtcattggtagtttgacactgaatctgtaaattgctttgactagtatggcagttttaac

SEQ ID NO: 23061 - DNA, 120 bp, synthetic construct
  source 1..120: mol_type = other DNA
tgtattcctaggtattttattcttcttgaggctactgtgaatgaaactgcattcttcacttggttctcggtttagatgttattggtgtatagaaatgctactgatttttgtaaacttatt

SEQ ID NO: 23062 - DNA, 120 bp, synthetic construct; identical to SEQ ID NO: 6828
  source 1..120: mol_type = other DNA

SEQ ID NO: 23063 - DNA, 120 bp, synthetic construct
  source 1..120: mol_type = other DNA
gaatgtttaattttaccaaaagccttttctgcatctattaaggtatcatgtggtttttgtttttagttctctttatgtgatgaatcacatttattgatttgggtaagttgagccaactct

SEQ ID NO: 23064 - DNA, 120 bp, synthetic construct
  source 1..120: mol_type = other DNA
tgaagttctttttttctgttgtgtctctgccaggttctggtatcagaatgatgctggtctcacagactgagttagggaggtgtccctctttctcaattttttggaatagtttcggtagga

SEQ ID NO: 23065 - DNA, 120 bp, synthetic construct
  source 1..120: mol_type = other DNA
tgtttggggtttcaatttctggttcaatcttgggaggttgtatgttcccaggaatttatccattcttctaggttttctagtttgtgtgcagaggtgttcataatagtctccaagcggttt

SEQ ID NO: 23066 - DNA, 120 bp, synthetic construct; identical to SEQ ID NO: 6829
  source 1..120: mol_type = other DNA

SEQ ID NO: 23067 - DNA, 120 bp, synthetic construct
  source 1..120: mol_type = other DNA
tttatctttgttttcattagttgtaaacaatttcttgatttctgccttaatttctctttgtttacccaagtcattcaggagtagattaatttccacttaattatatggttttgagagatc

SEQ ID NO: 23068 - DNA, 120 bp, synthetic construct
  source 1..120: mol_type = other DNA
tcagctcactgcaacctcctcctcccaggttcaagcaattctcgtgactcaacctccgaagtagctgggattacaggcgcatgccaccatgcacggctaatttttatattttttagaaga

SEQ ID NO: 23069 - DNA, 120 bp, synthetic construct
  source 1..120: mol_type = other DNA
tcaggtttcttgaatttgttgagaattgctttctggccaataaagcaattgtggtcgattttaagagtatgtaccatgtgcagctgaaaagaatgtatattctgtttttgttggacagag

SEQ ID NO: 23070 - DNA, 120 bp, synthetic construct; identical to SEQ ID NO: 6830
  source 1..120: mol_type = other DNA

SEQ ID NO: 23071 - DNA, 120 bp, synthetic construct
  source 1..120: mol_type = other DNA
aacagcccaaggtgaagctcacttggcagctgagagtgagttcacaccatgtactctaaaatgaggaggtgctcttttcttctcactctaattaaagaagactgagaagcccttcagcac

SEQ ID NO: 23072 - DNA, 120 bp, synthetic construct
  source 1..120: mol_type = other DNA
gagagaacagctttcttgaggtcctaaggatacctgagaatcattctcagagttaatggaatcttctatattttctgtggattttgattatctactttttttctaacttctgtgagatta

SEQ ID NO: 23073 - DNA, 120 bp, synthetic construct
  source 1..120: mol_type = other DNA
aactaaagggaaaataagagaagaacttaaagaatatttgggagttttagggaggtcataactgtaatgagctaatgtcatccatatgtccaagggaaagtgaatctgaatttacagggc

SEQ ID NO: 23074 - DNA, 120 bp, synthetic construct; identical to SEQ ID NO: 6831
  source 1..120: mol_type = other DNA

SEQ ID NO: 23075 - DNA, 120 bp, synthetic construct
  source 1..120: mol_type = other DNA
agagggaccatcagggccattggcactgttgggtgatagaagttgtaaatacggggtaaggtacatggatgacaccatctccatatgtgtatgtgatagagtggcaggccagaagttaat

SEQ ID NO: 23076 - DNA, 120 bp, synthetic construct
  source 1..120: mol_type = other DNA
aaaaggagaaattgggagacagaggtttacaaaaggaaatttataatggggtcatatcaagataattcaagagggaaaataagacaaggtggctccttccctgaattggtgacacaacac

SEQ ID NO: 23077 - DNA, 120 bp, synthetic construct
  source 1..120: mol_type = other DNA
tagaattggccattgccccactgcagggtgtgtgcccagcacactttgacagcttccctctctgttcagtcttgagaaaaaaataacactaaataaggaaggtgaagctacagaaagtcc

SEQ ID NO: 23078 - DNA, 120 bp, synthetic construct; identical to SEQ ID NO: 6832
  source 1..120: mol_type = other DNA

SEQ ID NO: 23079 - DNA, 120 bp, synthetic construct
  source 1..120: mol_type = other DNA
tggaagctacaggtctgtttcagatggatctattctttttcctgggttcagtgaagttatttggccataaagccctaagccatgtatgatcataacattttaagaaatagaagccaggta

SEQ ID NO: 23080 - DNA, 120 bp, synthetic construct
  source 1..120: mol_type = other DNA
tatagcaatgggggtttcaggacaatttacctcttgaacataagtagatatgctcaagaaagctatcccaaggacagggttgcatgcacgaagagacgagaccaagttaagttccacagt

SEQ ID NO: 23081 - DNA, 120 bp, synthetic construct
  source 1..120: mol_type = other DNA
agagtaggaaaagtgagattctccagttaagttactaataattcagacttaagactttttagaaagatgatcatcttttatttctttcaggagccatggctatcaacctggagagaggcc

SEQ ID NO: 23082 - DNA, 120 bp, synthetic construct; identical to SEQ ID NO: 6833
  source 1..120: mol_type = other DNA

SEQ ID NO: 23083 - DNA, 120 bp, synthetic construct
  source 1..120: mol_type = other DNA
taaagacgccaccatttttggttttcaggatttcacagggaaaatagtcccattatttggcctctattagccagaggcccagatgaccctgtgtccctgagataggacatggctttccca

SEQ ID NO: 23084 - DNA, 120 bp, synthetic construct
  source 1..120: mol_type = other DNA
ctgcaacctccacctcctgggttcaagtgtttctcctgtcttagcctcctgagtagctggaattataggcaaccccaccacgcccagctaattttgtatttttagtagagatggggtttc

SEQ ID NO: 23085 - DNA, 120 bp, synthetic construct
  source 1..120: mol_type = other DNA
accagagtcagtggttcctgtcattgattgagcttactgactggacaatgagagggtcatatgtggctgtctccagccattacattaaggtgacacttgagcatgacacgaggtctgcat

SEQ ID NO: 23086 - DNA, 120 bp, synthetic construct; identical to SEQ ID NO: 6834
  source 1..120: mol_type = other DNA

SEQ ID NO: 23087 - DNA, 120 bp, synthetic construct
  source 1..120: mol_type = other DNA
agacgtttaaaaacttggtgcaggcctgaaattctgcactcatatgttctcccagagaagctaaagctgctggtccttttggccacactttgagtcaccagaacccaaaggatttccggc

SEQ ID NO: 23088 - DNA, 120 bp, synthetic construct
  source 1..120: mol_type = other DNA
ggggtactgctctgccttgtgtgccctcagtttccctttatggaactctgttctgatctcaagcttccactagacctgctattagaagtgctgaacactgattttctgtgagtataaagt

SEQ ID NO: 23089 - DNA, 120 bp, synthetic construct
  source 1..120: mol_type = other DNA
cattccccaagattgttgttcaaagatcctcccaagtttgagacctcaaattctttcaggtgatattcatatcatttactctttttttttttaaacttagaaagtgagttgcagcaaatt

SEQ ID NO: 23090 - DNA, 120 bp, synthetic construct; identical to SEQ ID NO: 6835
  source 1..120: mol_type = other DNA

SEQ ID NO: 23091 - DNA, 120 bp, synthetic construct
  source 1..120: mol_type = other DNA
gtactggttgaaacaataccaataaataccttaggttctgtggtgaacacagatcagtaaataaatgttgggcaatcttccagtctctcagtgtcccacggtatatctgttcccccatag

SEQ ID NO: 23092 - DNA, 120 bp, synthetic construct
  source 1..120: mol_type = other DNA
tcagaacttggagctggttgggggcctccgatgccctgtgctgacaagctggcctggggcttctccccactagagtcttctctatatctcaaggtatgcacatctcttcctgggcacaca

SEQ ID NO: 23093 - DNA, 120 bp, synthetic construct
  source 1..120: mol_type = other DNA
ttctaacactggagtggtggttcccaatctcttcaccatcaaggaggcttaatttcttccctctctattttaatacggttttaactaccaaacaggatcctctaagtgatcatttgtttt

SEQ ID NO: 23094 - DNA, 120 bp, synthetic construct; identical to SEQ ID NO: 6836
  source 1..120: mol_type = other DNA

SEQ ID NO: 23095 - DNA, 120 bp, synthetic construct
  source 1..120: mol_type = other DNA
gcacaaaaatctgtccacagataacacctcaaggaggtagggcctgcccacctgaatcactgttgtctacataatgcaacttaaccatcctgttctgcgtttagctattcaagacttttg

SEQ ID NO: 23096 - DNA, 120 bp, synthetic construct
  source 1..120: mol_type = other DNA
ctcctacgtggcaatgggtgccagatacccttcctcagctaggatataggggtccagatttccataatatctatagattgatttacttaaaacttatttgttgtcaaaatacaaataccc

SEQ ID NO: 23097 - DNA, 120 bp, synthetic construct
  source 1..120: mol_type = other DNA
agatatattatacatatcactccatgtaatcctcccaacaaaatgatgtcatctaagagatgagaaactgggacccagaccagtgaagccccatggcataagtcacacaggcaagaaatg

SEQ ID NO: 23098 - DNA, 120 bp, synthetic construct; identical to SEQ ID NO: 6837
  source 1..120: mol_type = other DNA

SEQ ID NO: 23099 - DNA, 120 bp, synthetic construct
  source 1..120: mol_type = other DNA
gaggggaattaagaagattctggataggtttgtaggagaggcaaggtgtgtagggtatatgtggggacaaagggagcaattgtatcctagactgtatccaataattttctgggacaaaag

SEQ ID NO: 23100 - DNA, 120 bp, synthetic construct
  source 1..120: mol_type = other DNA
ggactgcagaagttcaagaatgatgagaactgaggaaacgaagataaacacagagataaacacagacaacttcactgcagcgaaagagaagatggtgttacacaggtaagcaggatcaag

SEQ ID NO: 23101 - DNA, 120 bp, synthetic construct
  source 1..120: mol_type = other DNA
cctggttcaagtctcctgcctcagcctcccgagtagctgggattacatgcacgcgccaccatgcctggctaatttttgtatttttagtagagatggggttttgccaccttggctaggatg

SEQ ID NO: 23102 - DNA, 120 bp, synthetic construct; identical to SEQ ID NO: 6838
  source 1..120: mol_type = other DNA

SEQ ID NO: 23103 - DNA, 120 bp, synthetic construct
  source 1..120: mol_type = other DNA
cagacataagccatcgtgccaggccaagaaatggcttttaaaaatgctgatttgaaagcaaaagagaaggaagtagaggagagatttatgattttaagaaaaaggaggaatatgaaggat

SEQ ID NO: 23104 - DNA, 120 bp, synthetic construct
  source 1..120: mol_type = other DNA
cttcctcacaagtctctcatccataaccttagtccagcccaatggacaaaaccatgaggaacctcaaacacccttccaaaaagatttagattttactcaagaggtgaaggagaatcatta

SEQ ID NO: 23105 - DNA, 120 bp, synthetic construct
  source 1..120: mol_type = other DNA
agggaggcaattgttatagtccagaactgaaataggacagtggaagtggaaatggagggaggggacaacaaagacatgtttagagatatcagaaattgaccattaaaataggcatacagg

SEQ ID NO: 23106 - DNA, 120 bp, synthetic construct; identical to SEQ ID NO: 6839
  source 1..120: mol_type = other DNA

SEQ ID NO: 23107 - DNA, 120 bp, synthetic construct
  source 1..120: mol_type = other DNA
tgatcgatgataacactgtgttgatcccagagatgacaaaggggctgagtgtgagataatggagttcctgaaacccctacgatgaatatgtccacccttccttttcatcagctgctagtc

SEQ ID NO: 23108 - DNA, 120 bp, synthetic construct
  source 1..120: mol_type = other DNA
tgactcaacaagacagccacaggaggcagggcaaggtggctcacgcttgtaatcccagcactttggaaggccgaggcaggcagatcacgaggtcgagattgagaccatcctggccaacgt

SEQ ID NO: 23109 - DNA, 120 bp, synthetic construct
  source 1..120: mol_type = other DNA
gcagtgagccgagatcatgccactgcactccagcctggcgatagagcaagacaatgtcaaaaaaaaaaaaaaaaaaaaaaaaagacagccaaaggaaagggactagaagagagaggaatg

SEQ ID NO: 23110 - DNA, 120 bp, synthetic construct; identical to SEQ ID NO: 6840
  source 1..120: mol_type = other DNA

SEQ ID NO: 23111 - DNA, 120 bp, synthetic construct
  source 1..120: mol_type = other DNA
acaccatcacctgggtagttccctccattctcctatgacttccaataagtcattagcagatcacctatcatctctttaatttcttcaaaaacaaataaaatctcaaacttgcatttggga

SEQ ID NO: 23112 - DNA, 120 bp, synthetic construct
  source 1..120: mol_type = other DNA
ccagcaagactgctgaggaaatgtgacacctcaacatgctgatgagggaaaggataaataaagggctatatagtcatcaatggagagtgttcagggaaggtatgaagactcaggctacaa

SEQ ID NO: 23113 - DNA, 120 bp, synthetic construct
  source 1..120: mol_type = other DNA
tagtcaagaggagccctgggccctacagaatgcctagtccaacttcctaatactctgagccagagaaggacattctctacacctacattacaacttccctcttcagacattgatttttaa

SEQ ID NO: 23114 - DNA, 120 bp, synthetic construct
  source 1..120: mol_type = other DNA
tttcacaaaggtaaaatatctcatcaaggtagagtaacacaagagctgttgacccagtattagtccttggacatcctgacttctgtgcagtgtttttctctttgtagttggtaagtggct

SEQ ID NO: 23115 - DNA, 120 bp, synthetic construct; identical to SEQ ID NO: 6841
  source 1..120: mol_type = other DNA

SEQ ID NO: 23116 - DNA, 120 bp, synthetic construct
  source 1..120: mol_type = other DNA
agacattagatttaggaaaccatcaataatttagttttgatggatggcaatggtggtggggagagacatggggtaatgaaacctatcatatactgatgttgtggaagtccaatgagtcac

SEQ ID NO: 23117 - DNA, 120 bp, synthetic construct
  source 1..120: mol_type = other DNA
cccttcctaaagaaatagagccagtttgagaaacaggaaaatcaagttccatactttcctagcctatgaaataccagtcaagaggtaaaagtgcttcctctgtcaatatcctgattcttc

SEQ ID NO: 23118 - DNA, 120 bp, synthetic construct
  source 1..120: mol_type = other DNA
caagcaaggtggtaacataagagtcagacttgataaaagtccatttcccaggaccacttgacaataagggcacagaaaagtgctctgaggaataatcttcatgctattaccattttcaac

SEQ ID NO: 23119 - DNA, 120 bp, synthetic construct; identical to SEQ ID NO: 6842
  source 1..120: mol_type = other DNA

SEQ ID NO: 23120 - DNA, 120 bp, synthetic construct
  source 1..120: mol_type = other DNA
aattaagggtggacccttaattcaatgactagtttccttgtaagagggacacttggatgcaaagagacccacccatagagaatgtgatgtgatgatggagggagagattgtagtgacaag

SEQ ID NO: 23121 - DNA, 120 bp, synthetic construct
  source 1..120: mol_type = other DNA
gacttctggcctccagaattttgaccaaataaatttctgttgttttaaaccacccagtttttggtagcttgttaaagcagccctaggaaataaatgcataccaccaccactccatctatt

SEQ ID NO: 23122 - DNA, 120 bp, synthetic construct
  source 1..120: mol_type = other DNA
actgagcagaacagcaggagaatgaacaattagtatcagattagcaacttcacaggtaaggtaaagggcatgggaatttacttctcaaggctctataatatgagactctttaaaaaccct

SEQ ID NO: 23123 - DNA, 120 bp, synthetic construct; identical to SEQ ID NO: 6843
  source 1..120: mol_type = other DNA

SEQ ID NO: 23124 - DNA, 120 bp, synthetic construct
  source 1..120: mol_type = other DNA
cagccccagctgatatcgactggaaccacattagactctgagccagagccactcagctatgccatttccagattcctaaccacgcaaactgtgagacaatacaagtttattgttttcaac

SEQ ID NO: 23125 - DNA, 120 bp, synthetic construct
  source 1..120: mol_type = other DNA
ataagaacctttaacatagtcttcaagtcctagtaagtactcttcctgcctacaagacacccgctatgtgatttcttcctgcctctaacatacctctgaaacaagtgcaattccaaatcc

SEQ ID NO: 23126 - DNA, 120 bp, synthetic construct
  source 1..120: mol_type = other DNA
gaatgcgctaagaaagggagaatcacgagtggaatccagtatcagtagctgggagcaaaagacacttgcggtaagggtcctcgggtttttcactgcaagacttttacctgtcaaaaaaat

SEQ ID NO: 23127 - DNA, 120 bp, synthetic construct
  source 1..120: mol_type = other DNA
caaataggttttgtaacagaagctactgctgtaccatttatattcccttagaccaagatctggctacagaatttgtgaatccctgtgcaaaacaaaaacgtggggtcccttgttcaagaa

SEQ ID NO: 23128 - DNA, 120 bp, synthetic construct; identical to SEQ ID NO: 6844
  source 1..120: mol_type = other DNA

SEQ ID NO: 23129 - DNA, 120 bp, synthetic construct
  source 1..120: mol_type = other DNA
attccttaagattacctctaaaataaactacttatactcacattcttatctcacagtctgcttcttggtaaacccaaaccatgacatctttcatctttcaagccaactctaacttggaat

SEQ ID NO: 23130 - DNA, 120 bp, synthetic construct
  source 1..120: mol_type = other DNA
accttgtgtttggactttgagacaaaaagctgttaatgaaggctgttaagcagcagttacagggtcttattttagagctacttctttccgtaatgtacaagtggatcaaagtgtggcaag

SEQ ID NO: 23131 - DNA, 120 bp, synthetic construct
  source 1..120: mol_type = other DNA
aagaataaatcaatctgtgtcacataagtggccacaagtactgggatcacctacccattgagcccctgaatttaactagcaaggagtgggaaatgaagaaggccaaggggccgatgatga

SEQ ID NO: 23132 - DNA, 120 bp, synthetic construct; identical to SEQ ID NO: 6845
  source 1..120: mol_type = other DNA

SEQ ID NO: 23133 - DNA, 120 bp, synthetic construct
  source 1..120: mol_type = other DNA
gtctgctgcacactggaatcacttgatttttttaaacaatgatgtctggcttccaccctgagacattctcatttgattggtacacatggtgtgacctgggaaccgggatttttaaaagtt

SEQ ID NO: 23134 - DNA, 120 bp, synthetic construct
  source 1..120: mol_type = other DNA
agcaaggggcatgaaccagaagctgcacacaccatctctgctcacccttactggccagtcacatggccatacctggttgcataagatgctgaaaaatgtaacttgtattcagccagccat

SEQ ID NO: 23135 - DNA, 120 bp, synthetic construct
  source 1..120: mol_type = other DNA
gcttgtctttttcaaacagaagcagcccaatctggcaaaagtaccgatccttagatctggagacaaaactcaacaacgggcttctctgacttttgtcagacatcttgcacatcacatgta

SEQ ID NO: 23136 - DNA, 120 bp, synthetic construct; identical to SEQ ID NO: 6846
  source 1..120: mol_type = other DNA

SEQ ID NO: 23137 - DNA, 120 bp, synthetic construct
  source 1..120: mol_type = other DNA
ctagatatgcttggtgctgcctttgcattcaagtcctgttttccagacgaaatacagacataatccaattgtaatttcatcaccatgcatcttggatgctgcagttagcctaaatgaaat

SEQ ID NO: 23138 - DNA, 120 bp, synthetic construct
  source 1..120: mol_type = other DNA
tcacttaatgacactctagtattatatactgtttacagattaaaaacttaagtttaaaaaggtaatttgtttgaagtcacatagctagtaaactactagttataacttaattaagagtac

SEQ ID NO: 23139 - DNA, 120 bp, synthetic construct
  source 1..120: mol_type = other DNA
agctatattactttgcagggtttttatgtctaagttattttctcctcctgttccacttccaccctcccattcactctcttctctcctagtagacaaagtccttacctgtctgccagtccc

SEQ ID NO: 23140 - DNA, 120 bp, synthetic construct; identical to SEQ ID NO: 6847
  source 1..120: mol_type = other DNA

SEQ ID NO: 23141 - DNA, 120 bp, synthetic construct
  source 1..120: mol_type = other DNA
gatcaccagaagctccctactatcaacacaaattggaaaatctctggtgtgattatgaggagaccattcagtattttctttgacactattaaacaacattgagtttgcctaatgtcagta

SEQ ID NO: 23142 - DNA, 120 bp, synthetic construct
  source 1..120: mol_type = other DNA
tgtttacttaggtaaagcatatacaggaagatgcgggaatcataataaatgcttatgaagcaaaactaaatgcacctgtactgctacatccagattcacatacaaacgacaaagagctta

SEQ ID NO: 23143 - DNA, 120 bp, synthetic construct
  source 1..120: mol_type = other DNA
acagtggcttctgcttctgaggaggcctcaggaaatttacaatcatggccgaaggtgaacagaaagcaggcacatcttaaatgacaggagtaggagcaagagagagagtggggaggtgct

SEQ ID NO: 23144 - DNA, 120 bp, synthetic construct; identical to SEQ ID NO: 6848
  source 1..120: mol_type = other DNA

SEQ ID NO: 23145 - DNA, 120 bp, synthetic construct
  source 1..120: mol_type = other DNA
atagagtcaagggtgattattccccagctttgagatttaatgtctgccctcttaggctttggacttgcttggggcttattaaccctttcttttggcctacttttcccttttcaaatggga

SEQ ID NO: 23146 - DNA, 120 bp, synthetic construct
  source 1..120: mol_type = other DNA
ggggattaagtatagttgtatgtgagaagaacatgggtttgggggaccacaggcagaatgcaatggtttgaatgtttgtcccctccaaaactcatgttgaaacttaaccttcaatgtggc

SEQ ID NO: 23147 - DNA, 120 bp, synthetic construct
  source 1..120: mol_type = other DNA
tgtgatgccccataccacctcaggattctgcagagttcccatgagtaaggaggctctgaccagatgcatccccttgaccttggacttcccagcctctggaactgtcagaaatgaatgtta

SEQ ID NO: 23148 - DNA, 120 bp, synthetic construct; identical to SEQ ID NO: 6849
  source 1..120: mol_type = other DNA

SEQ ID NO: 23149 - DNA, 120 bp, synthetic construct
  source 1..120: mol_type = other DNA
tctaacaagggagggcaagaaaaaacaacagttctctttggtgggtgtagatcttaggcagataaagaaacttcaacttatttgagagaggaggtaggggatggggaggtcacagagaac

SEQ ID NO: 23150 - DNA, 120 bp, synthetic construct
  source 1..120: mol_type = other DNA
attccaaagacttagtatacaaaagaacataaaatatcttatttgtaattgtttaaaactgattacatgttaaaatgataatattttaaatataatgggttaggttggtaaaataaaata

SEQ ID NO: 23151 - DNA, 120 bp, synthetic construct
  source 1..120: mol_type = other DNA
gtcacccagtttggagtacagtcgcgcgatctgggcttactgcaacctctgcctcccgggttcaagcgattctcctgcctcagcctcccaagtagctggaatgaattacaggcatgagcc

SEQ ID NO: 23152 - DNA, 120 bp, synthetic construct; identical to SEQ ID NO: 6850
  source 1..120: mol_type = other DNA

SEQ ID NO: 23153 - DNA, 120 bp, synthetic construct
  source 1..120: mol_type = other DNA
cacacggatagggcaagcacacatacatgtgtgcatatgtatgagactgataaacaatccaataggaaaaatgggcaaaggatagaattgaaaatgcacagaaaatctgaatggcaaaca

SEQ ID NO: 23154 - DNA, 120 bp, synthetic construct
  source 1..120: mol_type = other DNA
gagcaggatcatacattgttgtaaggaaatgtaaaggttaacagcctactgagaaagcaatatggcaacatccatcaaattagaaacatgccatatccttcgacccagaaacctttctca

SEQ ID NO: 23155 - DNA, 120 bp, synthetic construct
  source 1..120: mol_type = other DNA
aggttaaaaacattacctgcaaaacaagacctgttatggaattattaaggattataaataaaaatatcagcaaatttttaaaaatatgaaaatatcaggaatggcaccactgtaggaaaa

SEQ ID NO: 23156 - DNA, 120 bp, synthetic construct; identical to SEQ ID NO: 6851
  source 1..120: mol_type = other DNA

SEQ ID NO: 23157 - DNA, 120 bp, synthetic construct
  source 1..120: mol_type = other DNA
tcttagcaaactcagcatttaaaaaatttccttaagtcaagaacttttaccttttcacttaaaagaagcactttatggcttctcttttgtatatccaagttgccatcattagtactcctg

SEQ ID NO: 23158 - DNA, 120 bp, synthetic construct
  source 1..120: mol_type = other DNA
aggctattaagtgactaataggcaggctgcatatacactgtggatactgggcaaagggatgatgcaaatcctggggagggatggagtggtatggcatgagatttcatcatgttcatcaga

SEQ ID NO: 23159 - DNA, 120 bp, synthetic construct
  source 1..120: mol_type = other DNA
tgagaaatgaaaccgaggataaggggaggactactgtatttcatgatatgctggtgtggataaaaataggtgcaaccttactgaagttgaccatgaggttgatcacctgttgaccactga

SEQ ID NO: 23160 - DNA, 120 bp, synthetic construct; identical to SEQ ID NO: 6852
  source 1..120: mol_type = other DNA

SEQ ID NO: 23161 - DNA, 120 bp, synthetic construct
  source 1..120: mol_type = other DNA
ccatgcctagacagagtcaattcatcgagacaggggaattgtgatagagaaagagtacttcacgcagaaccagctgtgtgggagatcagtctccccgagcacgggggagcagagttttaa

SEQ ID NO: 23162 - DNA, 120 bp, synthetic construct
  source 1..120: mol_type = other DNA
taatcagatgagccactttgggcagccaaagtgagtggatcaccggaggtcgggaattggaaaccagcctggccaacattgtgaaaccctgtctctactaaaaaacaaaaaaaaaaaaac

SEQ ID NO: 23163 - DNA, 120 bp, synthetic construct
  source 1..120: mol_type = other DNA
tgcactccagcctgggcgacaagagcaagactccgtctccaaaaaaaaaaaaaaaaaaaaaaagagccagtttattgatgtgggtagtgccagctgacccatcaagtacggggtctgcaa

SEQ ID NO: 23164 - DNA, 120 bp, synthetic construct; identical to SEQ ID NO: 6853
  source 1..120: mol_type = other DNA

SEQ ID NO: 23165 - DNA, 120 bp, synthetic construct
  source 1..120: mol_type = other DNA
atggtaaattcattttaccaacctgcgagttgaccacttcccggtgccagggctctgacaccttgccaggcacttacggaaagataattgtaaaaatctaatagaattttaaatttccat

SEQ ID NO: 23166 - DNA, 120 bp, synthetic construct
  source 1..120: mol_type = other DNA
aaccttaaatgtctactcaaaattgttgaataaatcacatgtctacaaaatgaataatgcagactttaaaaagagtgaggtagctctatgtcaccaaactggaacaataaaagccactat

SEQ ID NO: 23167 - DNA, 120 bp, synthetic construct
  source 1..120: mol_type = other DNA
agatatattgccttttcatgagtaagaatctcacaagtcttggacaattaaaccccgccttcatccctcccatctcatcatatctgacctcaaccagtttcctacctacactgcttatat

SEQ ID NO: 23168 - DNA, 120 bp, synthetic construct; identical to SEQ ID NO: 6854
  source 1..120: mol_type = other DNA

SEQ ID NO: 23169 - DNA, 120 bp, synthetic construct
  source 1..120: mol_type = other DNA
ttgttttcactctctcccaattactatcgcttgaaaaataccggatatttcattattatcctgtccggagtcggcaaactacggtctactatctgtcttcgtatacgtcaaaagctaaga

SEQ ID NO: 23170 - DNA, 120 bp, synthetic construct
  source 1..120: mol_type = other DNA
acacagccatgctcatttagcttttgtttgtttttggagacagagtctcgctctgtcgcccaggctggagtgcagtggcgagatctcggctcactgcaacctctgcctcctgctttcaag

SEQ ID NO: 23171 - DNA, 120 bp, synthetic construct
  source 1..120: mol_type = other DNA
aggctggtctcaaactcctgacctcaggtgatccacccgcctcggcctcccaaagtgataggattacaggcgtgagccaccgcgcccagccttcatttagtactgtctaatgatgttttc

SEQ ID NO: 23172 - DNA, 120 bp, synthetic construct; identical to SEQ ID NO: 6855
  source 1..120: mol_type = other DNA

SEQ ID NO: 23173 - DNA, 120 bp, synthetic construct
  source 1..120: mol_type = other DNA
acaaattaacaaatcaaaaccaaatctctctctccctccgaagccacggctaaggaggctcactgcccagttagtggctttcaaactacccttacaagtgagacatcttgtgaattagaa

SEQ ID NO: 23174 - DNA, 120 bp, synthetic construct
  source 1..120: mol_type = other DNA
gacaactgtaattagcatgtgtgatcccaaatctttataccttagatactggattatattttcagcaagtaaatagtttctggctcccaagatgagaggttaaataatgcagggtgtttg

SEQ ID NO: 23175 - DNA, 120 bp, synthetic construct
  source 1..120: mol_type = other DNA
ggagcaagctatcttttctaccagccgtgtcacacccctcctagcactaacccctcctcctcagccttttcacacctctacccactactagcccctccccagccccatcacctcttcccg

SEQ ID NO: 23176 - DNA, 120 bp, synthetic construct; identical to SEQ ID NO: 6856
  source 1..120: mol_type = other DNA

SEQ ID NO: 23177 - DNA, 120 bp, synthetic construct
  source 1..120: mol_type = other DNA
tttcgccaagcaggggcaggacaaagagtatttgaagtctaccgcggggagaacttacctaatccttgaatgttaaaaggctaaaaactccactagtcggaagtgacgtgccagcttagc

SEQ ID NO: 23178 - DNA, 120 bp, synthetic construct
  source 1..120: mol_type = other DNA
ctttcagctgcaccgggaggcggcggcgcctggccagagccggggcctggagcctggactagacagcctcgccggccggggcgccagtccagcgccctgcgggcaatgggcttcagcgct

SEQ ID NO: 23179 - DNA, 120 bp, synthetic construct
  source 1..120: mol_type = other DNA
catcgccagccctcctcctccttcttccgcaggcaccgctagacccggccgcggccgcccgccgacaccccagcttccactgacacgagcctcggcgcggcttccgcttccggcgagtat

SEQ ID NO: 23180 - DNA, 120 bp, synthetic construct; identical to SEQ ID NO: 6857
  source 1..120: mol_type = other DNA

SEQ ID NO: 23181 - DNA, 120 bp, synthetic construct
  source 1..120: mol_type = other DNA
tctcggcagcgtcatagcggcgggcatcccatctgcacgtcacacctctttctcacctggacacgcatcccttcctaccctgccagccacgacgtttcctctttcccctctccaatgccc

SEQ ID NO: 23182 - DNA, 120 bp, synthetic construct
  source 1..120: mol_type = other DNA
cctgaagtttgcccttcagctgagacacaaggagtagaggaagaggaaggactaacgcagaggcactcaaggtctcactatgactgtagttgagagtcctctcccttcttccctaaccct

SEQ ID NO: 23183 - DNA, 120 bp, synthetic construct
  source 1..120: mol_type = other DNA
gtaggatcaccacaagtcaaagttggattcccacagatagaaatcatctgactgaacttctctcctattgctgacagaagaaattcaaatccaaagaagttatcagttcctactccaaat

SEQ ID NO: 23184 - DNA, 120 bp, synthetic construct; identical to SEQ ID NO: 6858
  source 1..120: mol_type = other DNA

SEQ ID NO: 23185 - DNA, 120 bp, synthetic construct
  source 1..120: mol_type = other DNA
tgagggagatctcattgcctcttttgtgtctcttaattcgcaaccactccaggacctataagttggagacacactatgcccagggtgttagttatcaatagctatattgaaagattccag

SEQ ID NO: 23186 - DNA, 120 bp, synthetic construct
  source 1..120: mol_type = other DNA
ttatcagttttcagcagttctgagtgtccagatgaacacaagagaaatggaatgttgcgtgaaatgtcattccaagaagagagcagatttcctttaggctagtctgatggataaaaggaa

SEQ ID NO: 23187 - DNA, 120 bp, synthetic construct
  source 1..120: mol_type = other DNA
tctaaccctttcaatatgaggactctctttgcttatctgtggtggctgataaaaattatgcatggaccttctgtggtggtgatagaacaaaagttatgcatggacttttttttttttaag

SEQ ID NO: 23188 - DNA, 120 bp, synthetic construct
  source 1..120: mol_type = other DNA
gagaatcaagcttagactccagtggattaatcataaagctcttataacattaaactttaaaatatggttaatttaagaaatgttaatatttttatgacttttttacttctcagattcctt

SEQ ID NO: 23189 - DNA, 120 bp, synthetic construct; identical to SEQ ID NO: 6859
  source 1..120: mol_type = other DNA

SEQ ID NO: 23190 - DNA, 120 bp, synthetic construct
  source 1..120: mol_type = other DNA
gaaaaaacctccaattaatatttttattttctctgtcctcttccccactcccaagttaaattatggcagagacaagtctgttagaggctggggcctctgcagcctctacagctgcggctt

SEQ ID NO: 23191 - DNA, 120 bp, synthetic construct
  source 1..120: mol_type = other DNA
aacttctgcaaagcttgcatcacccgctggtgggaggacctagagagggacttcccttgtcctgtctgtcgaaagacatcccgctaccgcagtctccgacctaatcggcaactaggcagt

SEQ ID NO: 23192 - DNA, 120 bp, synthetic construct
  source 1..120: mol_type = other DNA
ttgatatgtgcaatttcccacacccaccgggcccacaccgttgtgccactggacgatgctacacaggagtacaaggtggggaagcagacacacgatgtcagtgtgggtaaaaagggagaa

SEQ ID NO: 23193 - DNA, 120 bp, synthetic construct; identical to SEQ ID NO: 6860
  source 1..120: mol_type = other DNA

SEQ ID NO: 23194 - DNA, 120 bp, synthetic construct
  source 1..120: mol_type = other DNA
cacactggttattgggcataggtaatatcgcttgagactgatacctaccggactaagctgaaccattcaattgtttgcagcttctctaggtaatgggtaacatggcatatcatttaactt

SEQ ID NO: 23195 - DNA, 120 bp, synthetic construct
  source 1..120: mol_type = other DNA
gtataataaccatgtttttattgtaggtggacagaggtggatgggaggacaggtttaaagagagatattagggtacagaaggttgcttggatggtaataggcagttgcctcagtaagaaa

SEQ ID NO: 23196 - DNA, 120 bp, synthetic construct
  source 1..120: mol_type = other DNA
aaagttgacatcccaaatgacaggcaaggaaggaagtcagatcaagaggcagtaagatggctaggaagcaaataaatggtttaaaacaaatggtttaatctctgaatggtaggtatacca

SEQ ID NO: 23197 - DNA, 120 bp, synthetic construct; identical to SEQ ID NO: 6861
  source 1..120: mol_type = other DNA

SEQ ID NO: 23198 - DNA, 120 bp, synthetic construct
  source 1..120: mol_type = other DNA
cctgtctttactaaaaacaaaaaattagccgggcatggtggcacatgcctgtagtcccagcgacttgggcggctgaggcaggagaattgcttgaacctgggaggcggaggttgcagtgag

SEQ ID NO: 23199 - DNA, 120 bp, synthetic construct
  source 1..120: mol_type = other DNA
attaggcttgattgtcattaaacattgtacttaaattacttgtcatgaattaagtattaagagggatttaagagatgaagaacagacagaatatcttacatctggtgagctgagagagtt

SEQ ID NO: 23200 - DNA, 120 bp, synthetic construct
  source 1..120: mol_type = other DNA
ggacttgaagagaggagaatatggaagattcactggggagaaagggaaaaggagctgaccaagagtctcagaagaactatctaatgacattaggaccacattcttaaaactcaagtaagc

SEQ ID NO: 23201 - DNA, 120 bp, synthetic construct
  source 1..120: mol_type = other DNA
ttcctatgcagcctttcctgacccttcagaaattaacattcttaattttcatacaattttgcacctcttttatagcattgccttatttgtagcatggtattttggtgtctgtctgtcttc

SEQ ID NO: 23202 - DNA, 120 bp, synthetic construct; identical to SEQ ID NO: 6862
  source 1..120: mol_type = other DNA

SEQ ID NO: 23203 - DNA, 120 bp, synthetic construct
  source 1..120: mol_type = other DNA
gactagtccaagatcataaagccagtaagtggcaaaaccaggaatactagttcttcgtgaatcagtaaatatttgttaagctcctggtttaggccaaacccggtatttgacactggggaa

SEQ ID NO: 23204 - DNA, 120 bp, synthetic construct
  source 1..120: mol_type = other DNA
cagctgcaagttcataagaagacaacatagaaatttggcctcattaaaggtttcccgaagaagtaatgagtttttaagagttgacatgtagagatcaccagaagctaaatccaagttttg

SEQ ID NO: 23205 - DNA, 120 bp, synthetic construct
  source 1..120: mol_type = other DNA
attttggttagaaatgtgaacttttaaagttttttgttcttttagaggccttccaagaaacctaaaaatatgaaaatggtgcttattgctagtcattaactttcttcttcatgttgatca

SEQ ID NO: 23206 - DNA, 120 bp, synthetic construct; identical to SEQ ID NO: 6863
  source 1..120: mol_type = other DNA

SEQ ID NO: 23207 - DNA, 120 bp, synthetic construct
  source 1..120: mol_type = other DNA
gtagctggttatatgcttgcccctatatgtgtcattatcagcaacgccataaatacaaattcagactgagatggatgtgtgccaatatgattgaaataccataagtagcttagctcttgg

SEQ ID NO: 23208 - DNA, 120 bp, synthetic construct
  source 1..120: mol_type = other DNA
tgtgtttatactatataaaatggcattcaagcccaggcctatgtttttgtttttgtggttttttttttttttttttttttgagacggcgtctcgctctgtcatccaggctggagtgcagt

SEQ ID NO: 23209 - DNA, 120 bp, synthetic construct
  source 1..120: mol_type = other DNA
tatttttagtagagacagggtttcaccgtgttatccaggatggtctcgatctcctgaccttgtgatctgcccacctcggcctcccaaagtgctgggattacaggcgtgagccaccgtgcc

SEQ ID NO: 23210 - DNA, 120 bp, synthetic construct; identical to SEQ ID NO: 6864
  source 1..120: mol_type = other DNA

SEQ ID NO: 23211 - DNA, 120 bp, synthetic construct
  source 1..120: mol_type = other DNA
ggctgtgttttattgagggcaaatgtgagaatatattttgttcagatgtacactgagaaggcagtggtggaaagtgaagcagcaagtggccctaaactagaagagctagtcagcctctgc

SEQ ID NO: 23212 - DNA, 120 bp, synthetic construct
  source 1..120: mol_type = other DNA
cagtctctgcttctcactttgcttcatcatcagtcacatgatgcttggggaattctttagggagatcactatttgttgtagtggagatgcagaagagaggatgtgctgataattctcaga

SEQ ID NO: 23213 - DNA, 120 bp, synthetic construct
  source 1..120: mol_type = other DNA
gaaagcatgtttcaaatttcaagaaactaaattactaacaaacttctgtaacctgttcctggggtaggaattgccagttctctgaagtgacttgaaacaatttaacaagttcagccctga

SEQ ID NO: 23214 - DNA, 120 bp, synthetic construct; identical to SEQ ID NO: 6865
  source 1..120: mol_type = other DNA

SEQ ID NO: 23215 - DNA, 120 bp, synthetic construct
  source 1..120: mol_type = other DNA
atttttttttctttttagttgaaacaaggtctcactatgtttcctaggttggtcttggcctcaagtgatcctctcacctgggcctcctaagcactaagtttacaggcatgagccaccatg

SEQ ID NO: 23216 - DNA, 120 bp, synthetic construct
  source 1..120: mol_type = other DNA
cttaaattaaaacaaatatatatatccgcagtggtcttcactaccaagtcatcagtaggggggtgatagtgatggagccattctttacagaaggaaattccaatggaataaaaaatgagt

SEQ ID NO: 23217 - DNA, 120 bp, synthetic construct
  source 1..120: mol_type = other DNA
tggtgcaacaatttcagcttactccaacctctgccttctttgctcaagccatcatcccacctcagcctctccagtagctgggactacaggcatgcaccaccagactcagctaattttttg

SEQ ID NO: 23218 - DNA, 120 bp, synthetic construct; identical to SEQ ID NO: 6866
  source 1..120: mol_type = other DNA

SEQ ID NO: 23219 - DNA, 120 bp, synthetic construct
  source 1..120: mol_type = other DNA
gacattctgcagcgactccgagaaaatgctgctcaccttggggacaagcgccgggacctggcccacttggctgccgaggtggagggcaagtgcttacagtcaggcttcgagatgcttaag

SEQ ID NO: 23220 - DNA, 120 bp, synthetic construct
  source 1..120: mol_type = other DNA
tgccaggtgtactcaaagggtctttgctacggaaaagtgatttctcccatccccttctaaccatttttgtgttcttatctctggtcagcaattatgtgcttaatctgttccaaagaaaag

SEQ ID NO: 23221 - DNA, 120 bp, synthetic construct
  source 1..120: mol_type = other DNA
aaaaggacagaaacatagtttaaaggatacaggcatacctcagagatattgtgggttcagttccataccacttcaataaagcgagtatcttgataaagcaagtcacattaattgttgggt

SEQ ID NO: 23222 - DNA, 120 bp, synthetic construct; identical to SEQ ID NO: 6867
  source 1..120: mol_type = other DNA

SEQ ID NO: 23223 - DNA, 120 bp, synthetic construct
  source 1..120: mol_type = other DNA
ggcatctagaatggtgaatccttaccagaaagccttcaatttactttgcctagatctatcagaaaaatcactatttatagcagctttatgaaatacatttattaagacttgaaagtccaa

SEQ ID NO: 23224 - DNA, 120 bp, synthetic construct
  source 1..120: mol_type = other DNA
agtaatattttgaaaggaatctttttttctgagcagtaggtctcaacttaaaattttcagtaaagggttgggcacggtggcttacacctgtaatcctatcactttgggaggccaaggcag

SEQ ID NO: 23225 - DNA, 120 bp, synthetic construct
  source 1..120: mol_type = other DNA
tcgggaggctgagggaggagaatcgcttgaacccgagaggcagaggttgcagtgagccaagatcatgcagttgcactcctgcctgggtgacaagagtgaaactccatccccccaaaaaaa

SEQ ID NO: 23226 - DNA, 120 bp, synthetic construct; identical to SEQ ID NO: 6868
  source 1..120: mol_type = other DNA

SEQ ID NO: 23227 - DNA, 120 bp, synthetic construct
  source 1..120: mol_type = other DNA
ccaggcattgacttctctcgaactgtgaaagccctggatagcaccttcttcaatagaaggctgtttgttgacattgaaaatgtgttgtttagtgtagccaccttcatcagtaatcttggc

SEQ ID NO: 23228 - DNA, 120 bp, synthetic construct
  source 1..120: mol_type = other DNA
tctgcagcttccttacctctctcagctttcatagaactgaaggagttaacagccttgctctggattgggctttggcttaagggaatcatgtgatcttatatccagatcactaaaattttc

SEQ ID NO: 23229 - DNA, 120 bp, synthetic construct
  source 1..120: mol_type = other DNA
aagaggcctagctttcagcccatcttggctttcaatgtgcctttctcactaagcttaaacatttttaggttttgatttaaagtgagagacatgtgattcttctttcacatgaacacttag

SEQ ID NO: 23230 - DNA, 120 bp, synthetic construct; identical to SEQ ID NO: 6869
  source 1..120: mol_type = other DNA

SEQ ID NO: 23231 - DNA, 120 bp, synthetic construct
  source 1..120: mol_type = other DNA
tctgaaaaacatacaatgtcaacaaaacacaataaagcgaggtgcaataaaatgaggtatgcctgaaattgtttaaataatatattgcttttgatatgtatatattaataatacctctaa

SEQ ID NO: 23232 - DNA, 120 bp, synthetic construct
  source 1..120: mol_type = other DNA
ttatttttatgttacgtattgcttggtatttgttcctatggcctttcatgtatgtgtgttctgccttccatattaaactgggaaatccttgtgggacagagatttgtcttctttgtcttc

SEQ ID NO: 23233 - DNA, 120 bp, synthetic construct
  source 1..120: mol_type = other DNA
tcggctcactgcaacctttgcctcctgtgttcaagcgattctcctgcctcagcctcctgagtagctggggttacaggcgcacaccaccacacctggctaatttttgtatttttagtaaag

SEQ ID NO: 23234 - DNA, 120 bp, synthetic construct; identical to SEQ ID NO: 6870
  source 1..120: mol_type = other DNA

SEQ ID NO: 23235 - DNA, 120 bp, synthetic construct
  source 1..120: mol_type = other DNA
gacaagcataaaagaaatcattgggaagtgatataaatgaccaagcttcatgatgaccagaagttgaaagtagggattaggttgggagaagtgcattcaggtcccgctggagctcttctt

SEQ ID NO: 23236 - DNA, 120 bp, synthetic construct
  source 1..120: mol_type = other DNA
aggaccactgaataccaggaccaatattgctttcttttctccttccttctaggatgtcaaaagtaccctggaaaagtaagtgattgttgtatctctctgagtgagttaggtcttggctta

SEQ ID NO: 23237 - DNA, 120 bp, synthetic construct
  source 1..120: mol_type = other DNA
tattgggaataataatcccttttcccctttgaacatcaggacttcttgagaaggagaatgataaggtagaatcagattctacttgtgccagtgggtggaattgtgtccaaacaagatggc

SEQ ID NO: 23238 - DNA, 120 bp, synthetic construct
  source 1..120: mol_type = other DNA
cttggattagtaaaagaaatcaacaggtgagcttttcagggaggaggaagaaagtgggaagatggagaattttaatttctccctaaaaatgttaacatctgaatagtcacttggctggag

SEQ ID NO: 23239 - DNA, 120 bp, synthetic construct; identical to SEQ ID NO: 6871
  source 1..120: mol_type = other DNA

SEQ ID NO: 23240 - DNA, 120 bp, synthetic construct
  source 1..120: mol_type = other DNA
cagaacttggagtgagaggaagccttaagcgttatctactcttaggtccattcttttctaaatagagacccagaaaggttaaataatttgccaaagtcatcgggtagagtggttatataa

SEQ ID NO: 23241 - DNA, 120 bp, synthetic construct
  source 1..120: mol_type = other DNA
tggccaacacggtgaaaccccatctctactaaaaatataaaaattagccagatgtggtgttgggcgcctgtaatcccagctcctctggaggctgaggcaggagaactgcttgaacctggg

SEQ ID NO: 23242 - DNA, 120 bp, synthetic construct
  source 1..120: mol_type = other DNA
tgtgaatatgcagggaaaatagtcataaaccaggccagttcctggaaaacacacatggtcaccctatccctagaccatatgctgtcttgctcggcatccttcttaacactttccgttttt

SEQ ID NO: 23243 - DNA, 120 bp, synthetic construct; identical to SEQ ID NO: 6872
  source 1..120: mol_type = other DNA

SEQ ID NO: 23244 - DNA, 120 bp, synthetic construct
  source 1..120: mol_type = other DNA
cagctcatcctaacctagtcctgtcagaggatcgtaagagcgtcaagttcgtggagacaagactccgggatctccctgacacaccaaggcgtttcaccttctacccttgcgtcctggcta

SEQ ID NO: 23245 - DNA, 120 bp, synthetic construct
  source 1..120: mol_type = other DNA
gactccgtgagccgaaagggcgagttgactccactccctgagactggctactggcgggtgcggctatggaatggggacaaatatgcagccaccaccacaccttttacccctttgcacatc

SEQ ID NO: 23246 - DNA, 120 bp, synthetic construct
  source 1..120: mol_type = other DNA
tcatatctacaccttcactgatacttttactgagaaactttggcccctcttctacccaggcatccgggctggacggaagaatgctgcaccacttaccatcaggcccccaacagattggga

SEQ ID NO: 23247 - DNA, 120 bp, synthetic construct; identical to SEQ ID NO: 6873
  source 1..120: mol_type = other DNA

SEQ ID NO: 23248 - DNA, 120 bp, synthetic construct
  source 1..120: mol_type = other DNA
acagaaacccctgcacatctttttagggggttctttgacccaggatagtcttgcttcttgaggtagatcacaggggtctgtgtacctctgaattcatgagagatgaatgacagatgctct

SEQ ID NO: 23249 - DNA, 120 bp, synthetic construct
  source 1..120: mol_type = other DNA
aaaggaacagattcctagagattaatgaagaggagggaggtttctttggtcttctattccaagggtaaggttgcgattatgggtaagattggccagaggtaggaatgtggggagaaggag

SEQ ID NO: 23250 - DNA, 120 bp, synthetic construct
  source 1..120: mol_type = other DNA
aagagatcctgcaagacacatctatcctttcacagtgttcccaagggaacttggaaaggagagtcaggtattagaggaaagagaagggtatttgtatacaaagccctggccttaaagaat

SEQ ID NO: 23251 - DNA, 120 bp, synthetic construct; identical to SEQ ID NO: 6874
  source 1..120: mol_type = other DNA

SEQ ID NO: 23252 - DNA, 120 bp, synthetic construct
  source 1..120: mol_type = other DNA
tgcatgccaaaccaaactaaaccaatttggattatctgctattcgggtaatcttcacagaaatgactgagagaagaatctgcagtttactgagggcatttcagttcctcctaccacctca

SEQ ID NO: 23253 - DNA, 120 bp, synthetic construct
  source 1..120: mol_type = other DNA
aaaataatatggaacaaaggatccactgaagtgatctctgtgttgtgtggtaatttggtgacagccttgtactgatgtgtaagaatcactgggtgttagacatgcatgttcctgggtctc

SEQ ID NO: 23254 - DNA, 120 bp, synthetic construct
  source 1..120: mol_type = other DNA
cgcctcccaggttcaagcaattctcctgcctcagcctccagagtagctgggattactatggactatagccatgcaccaccacacccggctaattttagtggagacagggttttgccatgt

SEQ ID NO: 23255 - DNA, 120 bp, synthetic construct
  source 1..120: mol_type = other DNA
gccaccgtgcccagcctacatctacattttaaacacaccactctcatttgagtccgaaaacccttgtgaaactagttccagaggaggtttcagccatgtccttcctcccagctggagccc

SEQ ID NO: 23256 - DNA, 120 bp, synthetic construct; identical to SEQ ID NO: 6875
  source 1..120: mol_type = other DNA

SEQ ID NO: 23257 - DNA, 120 bp, synthetic construct
  source 1..120: mol_type = other DNA
gtgctgtacctaagcctaggagttagaaaccattcactcagaaagtgaggatcacctactgtgtgtccagcactgcataacaggaagtgtgtttctttggtaggtggaatagtaggagta

SEQ ID NO: 23258 - DNA, 120 bp, synthetic construct
  source 1..120: mol_type = other DNA
caccagtgcttttttttaatgtattacctctgtgccttccgtctgtagatcttacaggcatctgcctcggacctcaggagagtagggcagaagctctagctgggtataaattgcacataa

SEQ ID NO: 23259 - DNA, 120 bp, synthetic construct
  source 1..120: mol_type = other DNA
gacaaaagcactgaaaattcataaagggaccctgggcatggattgctggggttgtgtttagaaaccgatgagtttgtgaggcctccgggaggctcccgagggcgcggggactacgtttcc

SEQ ID NO: 23260 - DNA, 120 bp, synthetic construct; identical to SEQ ID NO: 6876
  source 1..120: mol_type = other DNA

SEQ ID NO: 23261 - DNA, 120 bp, synthetic construct
  source 1..120: mol_type = other DNA
gcgggcgccagaccactatcctcctccgcccccagggatccctcggtgaagaggactctctgtcgaggctgctcttccctcctcgtcccgggcctcacctgcacccagcgccagagacgt

SEQ ID NO: 23262 - DNA, 120 bp, synthetic construct
  source 1..120: mol_type = other DNA
attcgcaggagtcttccttcttcgggtttggattaagttcctaacgccacttgcacaaactagggtttgggctcggctgttttttttttttttcttccagtgtgggcaataaataataac

SEQ ID NO: 23263 - DNA, 120 bp, synthetic construct
  source 1..120: mol_type = other DNA
tgctagattcattattctcattgaaattacggtctgatgggacagactaagaaacaaaatggtgtagaaaaagattaactgggggagtagaatgctcacttactcatgccagtggtggcg

SEQ ID NO: 23264 - DNA, 120 bp, synthetic construct; identical to SEQ ID NO: 6877
  source 1..120: mol_type = other DNA

SEQ ID NO: 23265 - DNA, 120 bp, synthetic construct
  source 1..120: mol_type = other DNA
cagcaagagaccgttacttctaaacgtggacagtctttttcccatgttcaccctaggctgcaggggacagcgctggaccgtacagacctgcctaacatgccagcgcagccaacgcttcct

SEQ ID NO: 23266 - DNA, 120 bp, synthetic construct
  source 1..120: mol_type = other DNA
agagtgaagaggacacatggacaggttctgggttggtgtgagaagtaccacagtcagaaaactaattctgtttctctgattctgctcatttactcagattccaaaccactacaacccttg

SEQ ID NO: 23267 - DNA, 120 bp, synthetic construct
  source 1..120: mol_type = other DNA
catgattctgttctgtgggtatttcaactcttaattccattttcttctgtttctgtctgtgtttcttggtcacctttgtaatcccaccatgcagggagatcgtgatttccatagaccact

SEQ ID NO: 23268 - DNA, 120 bp, synthetic construct; identical to SEQ ID NO: 6878
  source 1..120: mol_type = other DNA

SEQ ID NO: 23269 - DNA, 120 bp, synthetic construct
  source 1..120: mol_type = other DNA
cagacattttgcaattatgtcccataggtaaactctcagagttttcttaagaataaacaactaaaatgttttcttcgatatccctagaaagcctactgaagtacagaattcttagactga

SEQ ID NO: 23270 - DNA, 120 bp, synthetic construct
  source 1..120: mol_type = other DNA
tgtataaaaaaatcacttcatcatgttggagcttaaaacataatgatttattatttcctctggttctgtgaactaggaattctgaaagactttggctgggtggttctcctgttacatatg

SEQ ID NO: 23271 - DNA, 120 bp, synthetic construct
  source 1..120: mol_type = other DNA
cacctcattgcttctccaagtagccttgctccctcgctagctttgatgttcccacagcatggctgactcagggtagttgtatttcttacatcccctctggcttctacaaaagcatcccaa

SEQ ID NO: 23272 - DNA, 120 bp, synthetic construct
  source 1..120: mol_type = other DNA
agttcaggagtttgagaccagcccggacaacatggtggaaccctgtctgtacttaaaatacaaaaaaattagcagggcgtggtagcaggcacctgtaattccagctactcgggaggctga

SEQ ID NO: 23273 - DNA, 120 bp, synthetic construct; identical to SEQ ID NO: 6879
  source 1..120: mol_type = other DNA

SEQ ID NO: 23274 - DNA, 120 bp, synthetic construct
  source 1..120: mol_type = other DNA
ggagggatgggccagcattactgcctgagtaatcagtggcagcattagattcacataggagcatgaaccctactgtgaactgcgcatgcaagggatctgggttgcatgctccttatcata

SEQ ID NO: 23275 - DNA, 120 bp, synthetic construct
  source 1..120: mol_type = other DNA
aggttggggatcactcatctaccacattcttgttttgcctttgtccctgacttggtctctccactgcctccttcacatgtcagtaaattatttgcgtagaaaatactaaacagtgtacat

SEQ ID NO: 23276 - DNA, 120 bp, synthetic construct
  source 1..120: mol_type = other DNA
gtcctttgcatcctcagctcaccttccatggctcctccagtaagtttaatttgggatgactgagctcgactcttgcacacttaatctgatctttggctaagtttgtcttgagtgtgttat

SEQ ID NO: 23277 - DNA, 120 bp, synthetic construct; identical to SEQ ID NO: 6880
  source 1..120: mol_type = other DNA

SEQ ID NO: 23278 - DNA, 120 bp, synthetic construct
  source 1..120: mol_type = other DNA
ataaagatatataatgtgatagtggcatattatatgcaaaaatggatttcctagatgaaagatgaaaataaactgaatccctggaatgcagtagctttctcaagtgtttctagaagttca

SEQ ID NO: 23279 - DNA, 120 bp, synthetic construct
  source 1..120: mol_type = other DNA
tagtcactccctgaacattaagttcatttagcactttcaaaactagtgaaaaccagtatcgttattgtcaggaggcaaaagagagaaggattgagagactgttattttgaattcaagtag

SEQ ID NO: 23280 - DNA, 120 bp, synthetic construct
  source 1..120: mol_type = other DNA
ttagtaactgcttaataaattttcaaaactattttgaaatatagattcactggaagctgcaaagagcatactgaaatgtcccctacatcctcacccagtgccccccagtggttcctcttt

SEQ ID NO: 23281 - DNA, 120 bp, synthetic construct; identical to SEQ ID NO: 6881
  source 1..120: mol_type = other DNA

SEQ ID NO: 23282 - DNA, 120 bp, synthetic construct
  source 1..120: mol_type = other DNA
tcatccgtgctgtagcaaatgtcagtatttcattcctttctatggctgaatagtagccgattatatggatataccacattttgtttatccattcagccatcaatggacacttccgttatt

SEQ ID NO: 23283 - DNA, 120 bp, synthetic construct
  source 1..120: mol_type = other DNA
tattttaactttttgaggaactaccaaactgctcttcatggctgctgcaccattttgcactcccaccagcaatgcacatggttctaatttctctccatcctaatctacacttactttcag

SEQ ID NO: 23284 - DNA, 120 bp, synthetic construct
  source 1..120: mol_type = other DNA
gttctctaatgagtaatgatgttgagcatcttatgtgtttgttggctatttgtatattttctttggaaaaaggtcctttcaagacctttgcccatttaaaaaaaataggttgcctttatg

SEQ ID NO: 23285 - DNA, 120 bp, synthetic construct; identical to SEQ ID NO: 6882
  source 1..120: mol_type = other DNA

SEQ ID NO: 23286 - DNA, 120 bp, synthetic construct
  source 1..120: mol_type = other DNA
actcttagagtagatgtgggtatctgagtttctcttcctaaaatcctttccttcttagagcgatcaatgagccctgttgaatggcctatggaagggaaatgaatgttctaaatttcctct

SEQ ID NO: 23287 - DNA, 120 bp, synthetic construct
  source 1..120: mol_type = other DNA
ggtgctgggccctgggcttccaccctgaagagatcacattgatctggcagcaggatggggaggactatacctaggacatggagcttgcagagaccattttatctttttgacaactttttt

SEQ ID NO: 23288 - DNA, 120 bp, synthetic construct
  source 1..120: mol_type = other DNA
ccgcctcccaggttgatgccattctcctgcctcagcctcctgaatagctgggactacaggcacccgccaccatgcccggctaattttttgtatttttagtagagacggggtttcaccgtg

SEQ ID NO: 23289 - DNA, 120 bp, synthetic construct
  source 1..120: mol_type = other DNA
ccaccgcacccggctgacaacgttttttaagctctctgtactgtatatacatctaattcagtgttttggactgccatagattatgcttttaaaacattttgtttatcccttttcttatgg

SEQ ID NO: 23290 - DNA, 120 bp, synthetic construct; identical to SEQ ID NO: 6883
  source 1..120: mol_type = other DNA

SEQ ID NO: 23291 - DNA, 120 bp, synthetic construct
  source 1..120: mol_type = other DNA
ttttctctttctttgaactgcctattcaaatgtttccccctatttttccactagatttcatggtgttcttttctttttgctttgaagggtgttatgggctaaatgtttgtgttcccccaa

SEQ ID NO: 23292 - DNA, 120 bp, synthetic construct
  source 1..120: mol_type = other DNA
tttaagaagagggagattggagctctctttccctaccttgtgaggacaccgaaagaaggcagtcatctgtatgccaggaagaggatcctcactggaactgaatctgctgtcacctccaaa

SEQ ID NO: 23293 - DNA, 120 bp, synthetic construct
  source 1..120: mol_type = other DNA
gtaatggaaaagaattcttttagagttttacctggtacatttgtgcctttaatacattttgagttgatttctacagattgtgtgaagtaatctgctggttctctaaggcttcagtgaatg

SEQ ID NO: 23294 - DNA, 120 bp, synthetic construct; identical to SEQ ID NO: 6884
  source 1..120: mol_type = other DNA

SEQ ID NO: 23295 - DNA, 120 bp, synthetic construct
  source 1..120: mol_type = other DNA
tgggtcattctgaaattacccgtttcagcccagtggaatttaaccagaactgtgggattgaaactgtctcttgaagaggaactgtggggaaaatgaacaaaccaacattcaggctcagtt

SEQ ID NO: 23296 - DNA, 120 bp, synthetic construct
  source 1..120: mol_type = other DNA
tgagtccaggctctgacattggccagctgtgcgactgggcaatattttgtttcactctctagcctcattttcaataggtaatacatgcaagtagcaggaaattcagaaagtatgcaaata

SEQ ID NO: 23297 - DNA, 120 bp, synthetic construct
  source 1..120: mol_type = other DNA
atatatataaacaagttggtattgatttaaatttttctttcatacaaatggtagaatactattctatgggtcatatactgctttttatttagcaaaaaaacttagtgctcttaccatttt

SEQ ID NO: 23298 - DNA, 120 bp, synthetic construct; identical to SEQ ID NO: 6885
  source 1..120: mol_type = other DNA

SEQ ID NO: 23299 - DNA, 120 bp, synthetic construct
  source 1..120: mol_type = other DNA
cctgactaacatggagaaaccccatctctactaaaaatacaaaattagcctggcttggtggcacatgcctgtaatcctagctactcaggaggctgaggcaggagaatcgcttgaacccgg

SEQ ID NO: 23300 - DNA, 120 bp, synthetic construct
  source 1..120: mol_type = other DNA
tcagcaaaactccagatacaaaagaacacatattgtatgattccatttatgtactgttcaaaaacaataaaatatgaatatacatacagacatataatttattatttagtgatttcttct

SEQ ID NO: 23301 - DNA, 120 bp, synthetic construct
  source 1..120: mol_type = other DNA
ttgctggagtagaggcacctgggctgccagcaacgtttaatttctcaagtaagatagtaggtacattgcatgtatgcttcatttagctgtacttttttgcatttatgtcatgttattgtt

SEQ ID NO: 23302 - DNA, 120 bp, synthetic construct; identical to SEQ ID NO: 6886
  source 1..120: mol_type = other DNA

SEQ ID NO: 23303 - DNA, 120 bp, synthetic construct
  source 1..120: mol_type = other DNA
gtgtacagaagtaactctttcaagtggtcaggctccagtgggtgggaaacacctttataaaaaaattgagaaattttgtagtcttattccagcctaatgtaaaaaaaaaaaaatcaagaa

SEQ ID NO: 23304 - DNA, 120 bp, synthetic construct
  source 1..120: mol_type = other DNA
ctctgacccaaattgtccttgctgtgcttcaagggggacctaggcaaggatgtgggtcaggggcagatggactgaaaacgtgtgcagtgagtgagccaatcatgttttaggaagattaaa

SEQ ID NO: 23305 - DNA, 120 bp, synthetic construct
  source 1..120: mol_type = other DNA
ctatgttcttgggcatcaaacgtaattttgcttcagagctcaagggcagtgcagcctaaggaaaacttgtaagaattcctcagtcttgaagtcctttgcctgaaaccaaggagagatcaa

SEQ ID NO: 23306 - DNA, 120 bp, synthetic construct; identical to SEQ ID NO: 6887
  source 1..120: mol_type = other DNA

SEQ ID NO: 23307 - DNA, 120 bp, synthetic construct
  source 1..120: mol_type = other DNA
gttacaaaattgtcaggacttgtatgtggttggatgctattgtttttatcttctttcattcactgttttctgcagtatcacttttgcccaaatatatttaaagaaaagaattgtatctct

SEQ ID NO: 23308 - DNA, 120 bp, synthetic construct
  source 1..120: mol_type = other DNA
tagcactttggggggctgaggctaaagaatcgcttgaggccaggagtttagaaccaatctgggcaacatattgaggcgctatctctataaaaattaaaaaaaaaatcagccgggcctagt

SEQ ID NO: 23309 - DNA, 120 bp, synthetic construct
  source 1..120: mol_type = other DNA
atcccgtctttaaaaataagaaaaactaatctgtcattctgccaaataaagatgcctctgggaaatccaactctgagtgatgtctcagctatcttctacacatcagttctcaagtgaacc

SEQ ID NO: 23310 - DNA, 120 bp, synthetic construct
  source 1..120: mol_type = other DNA
atttacaggacaacctccacaataaagagttatgtggcctgaaacatcaagtactcactgtaacgctgaggttgagaatccctgctctacacagatcctctgagcctgatgctccaggca

SEQ ID NO: 23311 - DNA, 120 bp, synthetic construct; identical to SEQ ID NO: 6888
  source 1..120: mol_type = other DNA

SEQ ID NO: 23312 - DNA, 120 bp, synthetic construct
  source 1..120: mol_type = other DNA
taacatgattacatccattttatacataagttaattaatgcttagataatttacatgacgtgtctaagatctcatgactggacagcggactagttgagactctcgcacaacttatctgac

SEQ ID NO: 23313 - DNA, 120 bp, synthetic construct
  source 1..120: mol_type = other DNA
caaggaggccggatcacttgaggtcaggagttcgagactagcctggccaacatgatgaaaccccgtctctactaaaaacacaaaaatcagccgggcgtggtggcgcatacctgtagtccc

SEQ ID NO: 23314 - DNA, 120 bp, synthetic construct
  source 1..120: mol_type = other DNA
aaaagagaaaaagaaagaccatgacagacgcctctgccttcaaggtggccaactgggcacaaaatctttcctccttgactcttaagatattgttaaaacgttattaggggaactgaaatc

SEQ ID NO: 23315 - DNA, 120 bp, synthetic construct; identical to SEQ ID NO: 6889
  source 1..120: mol_type = other DNA

SEQ ID NO: 23316 - DNA, 120 bp, synthetic construct
  source 1..120: mol_type = other DNA
gtcgcgttatctaggcagaagcgctgaccccgcatccctcccgtcgggaccccacgcgctgccccagtgaaatgaaatcctggtgcttgtggcgtgcgctgcgcggttccactccgctgt

SEQ ID NO: 23317 - DNA, 120 bp, synthetic construct
  source 1..120: mol_type = other DNA
tcaagcgccattccagtctcaacctttatcttttacaatttaaaatttatttattatccatgtaaggagaataactggtacactcagcgcagttctgcatatatataggccataaaagga

SEQ ID NO: 23318 - DNA, 120 bp, synthetic construct
  source 1..120: mol_type = other DNA
tgcaaacctccttcagcaaacactgagtaaatctgggagtgctgagacatagtacaatgcgagttttcagtgtaattgaaaaaattgaaaaaattgaaaaaaaaataactaaattaagat

SEQ ID NO: 23319 - DNA, 120 bp, synthetic construct; identical to SEQ ID NO: 6890
  source 1..120: mol_type = other DNA

SEQ ID NO: 23320 - DNA, 120 bp, synthetic construct
  source 1..120: mol_type = other DNA
gaaaccctatttatcctcatgtgaagtttgagatttgtttgtaattttttttaaattaatgcaggagagaagtgcgtcgttgaaacaaccacctcgagtaaaacagcatttcttctcacc

SEQ ID NO: 23321 - DNA, 120 bp, synthetic construct
  source 1..120: mol_type = other DNA
tatagaaaatactttttttccaggaataagttgctatatcttaattactaagtaaccccaattcctattgcttttagaacttcccagtttgcttcagagttcaacggcccagtgtgcaaa

SEQ ID NO: 23322 - DNA, 120 bp, synthetic construct
  source 1..120: mol_type = other DNA
tgtggtgcctgatgagagacttatgcttttggcaattgcatacttagatacgtcaccctgtagagccttcactgcttcccaatccacccctcactcccacctaatctctgaccaggagta

SEQ ID NO: 23323 - DNA, 120 bp, synthetic construct; identical to SEQ ID NO: 6891
  source 1..120: mol_type = other DNA

SEQ ID NO: 23324 - DNA, 120 bp, synthetic construct
  source 1..120: mol_type = other DNA
ctatgtaggaaggctgaccacttccacctggagccatagctcaggaaggaggcagatgaagcagatgaataatcaccagcgtgtctggaaagagtgagacactctggagactcaagggac

SEQ ID NO: 23325 - DNA, 120 bp, synthetic construct
  source 1..120: mol_type = other DNA
gctagaaaagagagaccaaatacagtcgaaaaagcagagaaatgtatttttcctcaagttcttctgctgtcactttcactgcagatctcagctttgctcttccagagtccctcctttggc

SEQ ID NO: 23326 - DNA, 120 bp, synthetic construct
  source 1..120: mol_type = other DNA
agagcttaatccccgcaaacctagtttgcgtgacagtgccccaagccgggagacccacagctcctttccctctggacctctaactgacctgcagcagcgggcttagtactcagctcagca

SEQ ID NO: 23327 - DNA, 120 bp, synthetic construct; identical to SEQ ID NO: 6892
  source 1..120: mol_type = other DNA

SEQ ID NO: 23328 - DNA, 120 bp, synthetic construct
  source 1..120: mol_type = other DNA
caccctttctgataaaaacattcaacaacctaggaatagaaggaaactacctcaacacaataaaggcgatatatgagcagcccatcactaacatcatattcaaggagaaagaatgaggaa

SEQ ID NO: 23329 - DNA, 120 bp, synthetic construct
  source 1..120: mol_type = other DNA
agagtaactaggcaagaaaaataaagtaaaacacccaaaatggaaaggaagaagtagaattatctttgttagaagacagcatgatcatatatgcagaaaaccctaaggattacacacaca

SEQ ID NO: 23330 - DNA, 120 bp, synthetic construct
  source 1..120: mol_type = other DNA
atacaaaatcaatatgtagcagtcagttgtatttctataccatgccttgcaacatggtgtttcttctagtcctgaagaggcaagttgacccagtccaggtagagcaccgacttagaaaga

SEQ ID NO: 23331 - DNA, 120 bp, synthetic construct
  source 1..120: mol_type = other DNA
aacgaaatgtactttctcatagtaatacagtatttctaagttctgctcagatactgttactgtgtatgtttctagaaaacacagccccaaatgtgcatagtcttgaatacaaaagaatca

SEQ ID NO: 23332 - DNA, 120 bp, synthetic construct; identical to SEQ ID NO: 6893
  source 1..120: mol_type = other DNA

SEQ ID NO: 23333 - DNA, 120 bp, synthetic construct
  source 1..120: mol_type = other DNA
cccaatataatcacagtggtccttatcagaggaggcaggaagtgtcagagtcagaggagaagggaatgtgatgatgccaggagagactgaagtgattcattttgaaggtggaggaagggc

SEQ ID NO: 23334 - DNA, 120 bp, synthetic construct
  source 1..120: mol_type = other DNA
accagcccatctgacatcttgattttagtccactgaaagtaattttgagtgaactgaagtccactcaaaattattttaatttgctgatttcaagagcggtaagtgaatacatatgtttta

SEQ ID NO: 23335 - DNA, 120 bp, synthetic construct
  source 1..120: mol_type = other DNA
actattactttatatgacaaaagagtgaatattactttgtatggcaaaagatatgattaatttaagaatgttgagaggatgagctagcctggagtatctgggtgagccctaaatgcaatg

SEQ ID NO: 23336 - DNA, 120 bp, synthetic construct; identical to SEQ ID NO: 6894
  source 1..120: mol_type = other DNA

SEQ ID NO: 23337 - DNA, 120 bp, synthetic construct
  source 1..120: mol_type = other DNA
gtgagaagatagatttctgttgttttaaaccatcaagtttatggcaatttgttgcagcaaccacaggaaactaatacaactatcacaatctaatgtttaaaaagcaattaattggatggt

SEQ ID NO: 23338 - DNA, 120 bp, synthetic construct
  source 1..120: mol_type = other DNA
atctaaaagtataaattgcgttctatctgcatcaccatatgttaacaagacaatgcaaagctcaaaatgtaattttgtattattttaagtatttgtgaaacattatacaaattaaataac

SEQ ID NO: 23339 - DNA, 120 bp, synthetic construct
  source 1..120: mol_type = other DNA
ctgtagtaaacagagctatttgttcctgaaaactaacttttagggtttgtaccggtgagaactttctccttcaggagcctgcagtatgtgtgggcaaaatcagattctatgatgcctggt

SEQ ID NO: 23340 - DNA, 120 bp, synthetic construct; identical to SEQ ID NO: 6895
  source 1..120: mol_type = other DNA

SEQ ID NO: 23341 - DNA, 120 bp, synthetic construct
  source 1..120: mol_type = other DNA
tgtcagtgtcacccccagtgctggtggtgctcaatggttgttatggaaaccagggattaggtaatgttctctagtttctacataggaaaactgatcacattcaactgaggaaacattgct

SEQ ID NO: 23342 - DNA, 120 bp, synthetic construct
  source 1..120: mol_type = other DNA
caacagagtaaaatatgcccctgggattctctcaagattgctcaaggctttgctttggtatgtcatcattttatgcatcattgttggaagcgagaaaagttttaacaattgtcatgttat

SEQ ID NO: 23343 - DNA, 120 bp, synthetic construct
  source 1..120: mol_type = other DNA
accttataaagtcagggctttgaagtgtactttaaaatagatttcccatcctctgaagtacacaaacatctttccaaaggcacctaacccacaaggattcctcttgatagaaccagatgt

SEQ ID NO: 23344 - DNA, 120 bp, synthetic construct
  source 1..120: mol_type = other DNA
agtcattttctctgtgggtttgggtgttaggaagaatccactgtgactccattgtggatccatcctcactcaacattcagaaaatcagcagcacatttggtcaacacggcatctttccct

SEQ ID NO: 23345 - DNA, 120 bp, synthetic construct; identical to SEQ ID NO: 6896
  source 1..120: mol_type = other DNA

SEQ ID NO: 23346 - DNA, 120 bp, synthetic construct
  source 1..120: mol_type = other DNA
ggtcatagttgtcagtgactcagggagaccaggaggtggcaggcaagtgaggggaacccagaagtagccagtacctgttcaatgccagaaaaacctggccaggacatgcccttcagtatt

SEQ ID NO: 23347 - DNA, 120 bp, synthetic construct
  source 1..120: mol_type = other DNA
acagactgcttccaggctctctgtggtcacaatcacaattagaattggattataattaaatccaagtctctctgagcattatattgtcacagtctatcactgtctctagaggagattaaa

SEQ ID NO: 23348 - DNA, 120 bp, synthetic construct
  source 1..120: mol_type = other DNA
ttcccattttcctgttcttctcagggtgtttctgggaccttcagtagaaattctcaactccaggttttcagctgtttctgcacagaggacatagtcctgtcccaaactctctagtgtcac

SEQ ID NO: 23349 - DNA, 120 bp, synthetic construct; identical to SEQ ID NO: 6897
  source 1..120: mol_type = other DNA

SEQ ID NO: 23350 - DNA, 120 bp, synthetic construct
  source 1..120: mol_type = other DNA
aatcaattacagagtagaccaaatgcctgcaagtgtgcagaggttctgagccaggggttattgtcttgtgcatcttctagctactttggatttaccttcccctacatgactcccacaacc

SEQ ID NO: 23351 - DNA, 120 bp, synthetic construct
  source 1..120: mol_type = other DNA
cctagtgccagaaacatggaaaatcccagcccaggggctcccttgttcactcccattctgccccttcactggggtgtgcaggtgttagacctctcctctgctccacaagtgggagcttca

SEQ ID NO: 23352 - DNA, 120 bp, synthetic construct
  source 1..120: mol_type = other DNA
cttcaaaatctcccaactcattttattgcctccagtcttgctctgacccaagcaagacttgggtcagtgccctacaattgcaggaatcctgctgaaacaaaaatccacttttgtttcttt

SEQ ID NO: 23353 - DNA, 120 bp, synthetic construct
  source 1..120: mol_type = other DNA
gaacaggaccttgcacacttttccaattttctctctctctcctcttgcactagccagtgattctgcttacagtttcacaaacatgctgcaaagcctttcattttttggtcggactaggtg

SEQ ID NO: 23354 - DNA, 120 bp, synthetic construct; identical to SEQ ID NO: 6898
  source 1..120: mol_type = other DNA

SEQ ID NO: 23355 - DNA, 120 bp, synthetic construct
  source 1..120: mol_type = other DNA
attctgggccttcaagctgtatttgttggatagatgaaaaatagggattcttacagtaacaatgcacactgagagtgtctctccatagtgagagttcaagagacaacacatacaaattta

SEQ ID NO: 23356 - DNA, 120 bp, synthetic construct
  source 1..120: mol_type = other DNA
aacagtctacgtttgatccctgtttgttgaaatagtgattcacataaaatggatgagaaaatggagacacagagaagtgaaggactctgtctagaatcacacagctgtcaaactctcggg

SEQ ID NO: 23357 - DNA, 120 bp, synthetic construct
  source 1..120: mol_type = other DNA
ctaatttgttattgcttaaaaaggaaaaaatggaaagtgagctgatggagaatgaaatatggacagaggaagatgatgggaagctttgaagggctgcccttgactctgtgtgtgtgtgcg

SEQ ID NO: 23358 - DNA, 120 bp, synthetic construct; identical to SEQ ID NO: 6899
  source 1..120: mol_type = other DNA

SEQ ID NO: 23359 - DNA, 120 bp, synthetic construct
  source 1..120: mol_type = other DNA
agtgactgtgtgagttgctagaagcaatcttatactttcatagccaccccacacttcacagtgatactcatctctaagaaattattcaaattaagagagaaagctacacatataaacaat

SEQ ID NO: 23360 - DNA, 120 bp, synthetic construct
  source 1..120: mol_type = other DNA
tagtcaggctattctagacagctcctgtgagccactaggattcagagaatacaacacatcttttccaatttaaatatgtagttctagaaaaaaactattttaaggtcaggcttggtggct

SEQ ID NO: 23361 - DNA, 120 bp, synthetic construct
  source 1..120: mol_type = other DNA
aaataaaattacccaggtgtggtgacacatgcctgtaatctcagctacttgggaggctgaggcataagaattgcttgaacctgggaggtggagtttacagtgagcccagatcatgccact

SEQ ID NO: 23362 - DNA, 120 bp, synthetic construct
  source 1..120: mol_type = other DNA
tcctaagcaaaaagaacaaagctggaggcattatgctatctgacttcaaactatactgcagtgctacaataaccaaaacagcatggtattggtacataaacagacacatagaccaatgga

SEQ ID NO: 23363 - DNA, 120 bp, synthetic construct; identical to SEQ ID NO: 6900
  source 1..120: mol_type = other DNA

SEQ ID NO: 23364 - DNA, 120 bp, synthetic construct
  source 1..120: mol_type = other DNA
cacagcaaagaaaactagcaacagagtaaatagacaacctacccaatgggagaaaagttttgcaaactatgcatctgacagagatctaatatccagcatctataaggaacttaaagaaat

SEQ ID NO: 23365 - DNA, 120 bp, synthetic construct
  source 1..120: mol_type = other DNA
aaatcaaaaccacaatgaaataccatctcacaccagtcataatggttattattaaaaagtcaaaaaataacaggtgctggccaggttgctgagaaaaaggaacgcttatacactgttggt

SEQ ID NO: 23366 - DNA, 120 bp, synthetic construct
  source 1..120: mol_type = other DNA
aatcattctgttataaagacatatacatgtgtatgttcattgcagcactattcacaacagcaaagacgtggaatcaacctaaatgcctaccaatggtagactagataaagaaaatgtggt

SEQ ID NO: 23367 - DNA, 120 bp, synthetic construct; identical to SEQ ID NO: 6901
  source 1..120: mol_type = other DNA

SEQ ID NO: 23368 - DNA, 120 bp, synthetic construct
  source 1..120: mol_type = other DNA
aaaaaaacataaaggtctagctggatcagtgggcttctaggatccttcttcagtaatactgaggtaaatagcacaaaccatgagtttactcttttcataatccatgacacatcacactta

SEQ ID NO: 23369 - DNA, 120 bp, synthetic construct
  source 1..120: mol_type = other DNA
tgcaggattgtgtcttatcaaatcagcagccaccttctctgccgagaagcaaggagtatgtctcccagaatccccttccctgtgtagttccgattcacattttccaatcagagaaacttg

SEQ ID NO: 23370 - DNA, 120 bp, synthetic construct
  source 1..120: mol_type = other DNA
tgtcaggttctcagtggcttctgtgctaggccaaagacccatctgctttgcctgtgcagaccgagatgaatggtgggagctttctcagaggttctggagaatgacagcaatctcccagca

SEQ ID NO: 23371 - DNA, 120 bp, synthetic construct; identical to SEQ ID NO: 6902
  source 1..120: mol_type = other DNA

SEQ ID NO: 23372 - DNA, 120 bp, synthetic construct
  source 1..120: mol_type = other DNA
ttgacctctgattctgttgtcacatctccctctccaattctcactctgctgctacctttttcacttataacgaccattgtgattgtattggacctgcctgaataatacaggataatcttc

SEQ ID NO: 23373 - DNA, 120 bp, synthetic construct
  source 1..120: mol_type = other DNA
aacatgacttcaccaatatttgctctcctagattttccaacattagtataggctctaattcctatattgaacacgttattcctaaaatgttatactagagtgtggtggttttcctggaaa

SEQ ID NO: 23374 - DNA, 120 bp, synthetic construct
  source 1..120: mol_type = other DNA
ggcgcgatctcggctcactgcaagctccacctcctgggttcactccattctcctgcctcagcctcccaagtagctgggactacaggcgcccgccaccatgcctggctaattttttttttt

SEQ ID NO: 23375 - DNA, 120 bp, synthetic construct; identical to SEQ ID NO: 6903
  source 1..120: mol_type = other DNA

SEQ ID NO: 23376 - DNA, 120 bp, synthetic construct
  source 1..120: mol_type = other DNA
cctacataaacccagtcatttctgagtctccaagagtgttttataggattcatgtccacttcttggctctgtcatcttctctctaccttgtcttatagctccgcgcttacattttcttct

SEQ ID NO: 23377 - DNA, 120 bp, synthetic construct
  source 1..120: mol_type = other DNA
cacctactgctatagtcctgccttgattcttcagccattgtcctctttttaccttgtgtatgcttaagccaattctccaagaagaaattccagatggctctttattgctgtttgtttgtt

SEQ ID NO: 23378 - DNA, 120 bp, synthetic construct
  source 1..120: mol_type = other DNA
attttaaaatatcttctatctctaaatctatgcccactttactaaggtaatttatgttatcaatctactctctatgtgtctactttctccattttcatacaaacataggcacctatatta

SEQ ID NO: 23379 - DNA, 120 bp, synthetic construct
  source 1..120: mol_type = other DNA
attatatacaagtcagtggtttttagtatattcacatagttgtgccaacattatcattatcaattccagaacattttcatcaccccacaaaaaaccccatacccattggcagccactcct

SEQ ID NO: 23380 - DNA, 120 bp, synthetic construct; identical to SEQ ID NO: 6904
  source 1..120: mol_type = other DNA

SEQ ID NO: 23381 - DNA, 120 bp, synthetic construct
  source 1..120: mol_type = other DNA
atgctgtatacctaggaggggatagctgggtcatatgctaacttagtgtttgacattttgaggaagtgctggcctgttttctaaaggggcttcacctctttatattcccaccagcagtat

SEQ ID NO: 23382 - DNA, 120 bp, synthetic construct
  source 1..120: mol_type = other DNA
actaagggaaaaaatcaaactttaaagaattaacttagttttatttggaaatcttactgaggactatagacggaggcctacaacccaagaacagccctttagagaggctctatcagactg

SEQ ID NO: 23383 - DNA, 120 bp, synthetic construct
  source 1..120: mol_type = other DNA
acattaaagcagaatcacatcaaagtttggaagcaggaatacgtccagtgtagattacagaagcatgatcactatgcccgtcagacattatcttatgtgcagggaaaagcaagggcattc

SEQ ID NO: 23384 - DNA, 120 bp, synthetic construct; identical to SEQ ID NO: 6905
  source 1..120: mol_type = other DNA

SEQ ID NO: 23385 - DNA, 120 bp, synthetic construct
  source 1..120: mol_type = other DNA
gagttataaccggttttatatattatagacaaaattttctcttttaccatatgtatgatttgcaaaaattttctcccattctgtggggtttttttttttcactttcttgatggcatctgt

SEQ ID NO: 23386 - DNA, 120 bp, synthetic construct
  source 1..120: mol_type = other DNA
tttatgcctatgttttattttctttctttctttcttttttcttcttcctctcttcctcccttccttcctccctcccttccttccttctttccttccttccttccttactttctttccttt

SEQ ID NO: 23387 - DNA, 120 bp, synthetic construct
  source 1..120: mol_type = other DNA
taggtgaaactacaggtgcatgccaccacacccggctaaattttgtattttttgtagagacagggttttgccatgctgcccagtttggtctaccaactcctgggctcaagcaatctgccc

SEQ ID NO: 23388 - DNA, 120 bp, synthetic construct; identical to SEQ ID NO: 6906
  source 1..120: mol_type = other DNA

SEQ ID NO: 23389 - DNA, 120 bp, synthetic construct
  source 1..120: mol_type = other DNA
cattgtagcaaaaaattcaactattctatttataatgccctgttacttgatgttttttatttatattgtgaacatctcaccaatttcatagagaaagcttgagctcatcattttaaaccc

SEQ ID NO: 23390 - DNA, 120 bp, synthetic construct
  source 1..120: mol_type = other DNA
ccatcccagagttttctgatttcccacagcactacatgatagtggttaatctgatgatctaactgactagctaggcagactgactgactgacaatcccattgcttctgtatataaagtca

SEQ ID NO: 23391 - DNA, 120 bp, synthetic construct
  source 1..120: mol_type = other DNA
aatttctctgtccctgaaaccacccttgtactccagcccaagagcgcttgcaaacaggtagaaggtatcatctggagaaggtaagtaagagacttatctccattcccttcatatctaatt

SEQ ID NO: 23392 - DNA, 120 bp, synthetic construct
  source 1..120: mol_type = other DNA
ctcttttcatacctcagtcttattcaaatatttaatttatcaagctcacttataaatgccaagcctctcatttggccacctctgaccctacagctccaaagcccctcccattttgagaac

SEQ ID NO: 23393 - DNA, 120 bp, synthetic construct; identical to SEQ ID NO: 6907
  source 1..120: mol_type = other DNA

SEQ ID NO: 23394 - DNA, 120 bp, synthetic construct
  source 1..120: mol_type = other DNA
gtaactatttctggccctctcctaggcctacagaatcaatctccggaagcagaacacttcactcttaaaaattcttgggggattgtgagcagctagtcaatggatctggggttggtgtcc

SEQ ID NO: 23395 - DNA, 120 bp, synthetic construct
  source 1..120: mol_type = other DNA
caaacattcctctacattcttagccccactggtctcccctcacttatggaccttttatcattttatctaacggataaaggtttgtgtttatgttcttgcttatgcttccttccatccctt

SEQ ID NO: 23396 - DNA, 120 bp, synthetic construct
  source 1..120: mol_type = other DNA
tatttaaaaaaccactgcatcggggtgacagaataaggttttaaaattctaatattagactgtccactacattgtctcagtctatctttctgttcagtcagttaattattaggataagaa

SEQ ID NO: 23397 - DNA, 120 bp, synthetic construct; identical to SEQ ID NO: 6908
  source 1..120: mol_type = other DNA

SEQ ID NO: 23398 - DNA, 120 bp, synthetic construct
  source 1..120: mol_type = other DNA
tgtttttcatttcattttaaaataagcatatctgagtatgatgagttctaaggattcctttcagggcaaaaattgaggctaccccattgcagttgtccagtctttccacaggatggcaaa

SEQ ID NO: 23399 - DNA, 120 bp, synthetic construct
  source 1..120: mol_type = other DNA
agacatctataaaatacttttgcaaaaatacctaatacatcaaatgtgtgctcaccacatctcatcaaagcaaagtgtaaaacgttctcagggacctgtagagctaaaatgtcaccttct

SEQ ID NO: 23400 - DNA, 120 bp, synthetic construct
  source 1..120: mol_type = other DNA
cttcccatttgacttggaggatggtgttggccagaggtccttttttgcggaggcctttaaagatatttattcagaagaatgtaccacatgaggcatttgactaataaaaacactgttatt

SEQ ID NO: 23401 - DNA, 120 bp, synthetic construct; identical to SEQ ID NO: 6909
  source 1..120: mol_type = other DNA

SEQ ID NO: 23402 - DNA, 120 bp, synthetic construct
  source 1..120: mol_type = other DNA
atgaaaaagaaagtcctcaatgtattacatggaaaataacgatagcaacaactataataataatagtggctgcatttaaagggcacttgctgtattccaggcattggcttaagtacctac

SEQ ID NO: 23403 - DNA, 120 bp, synthetic construct
  source 1..120: mol_type = other DNA
ggccgaggagggcggatcacctgaggtcaagagttcgagacaagcctggctaacatggtgaaatcctgtctctactaaaaatacaaaattagctgggcttggtggcgggtgcctgtaatt

SEQ ID NO: 23404 - DNA, 120 bp, synthetic construct
  source 1..120: mol_type = other DNA
aagaaagaaagaaggaaggagggagggagggaaggaaggaaggaaggaaggaaggaaggaaggaaggaaggaaggaagtaagtcaagaagtctacaaagtataggtaacttgctcaagaa

SEQ ID NO: 23405 - DNA, 120 bp, synthetic construct; identical to SEQ ID NO: 6910
  source 1..120: mol_type = other DNA

SEQ ID NO: 23406 - DNA, 120 bp, synthetic construct
  source 1..120: mol_type = other DNA
catcccaggacgtgtagaactgtccatggttctgaaagacaaactagcaggtcccaccacctttacaaatggcaatcttactgtggaaaactgcactagtgaaaactctacatatgactt

SEQ ID NO: 23407 - DNA, 120 bp, synthetic construct
  source 1..120: mol_type = other DNA
ccctatactaaaatgtacaaagcaaaatcaaattagacaacactatgatttagaagtttatcttgaaattttagatcagaatgtaaagaaaagaaatccagcattattgtatggacaaga

SEQ ID NO: 23408 - DNA, 120 bp, synthetic construct
  source 1..120: mol_type = other DNA
gtatttatgttttcttttatcttgtatcttccaaccaggatttcgccttttgcctgaagcatattctttagaactcccttcagtaaaagcgtgtttgtgtcaaattgtctttgcttggaa

SEQ ID NO: 23409 - DNA, 120 bp, synthetic construct; identical to SEQ ID NO: 6911
  source 1..120: mol_type = other DNA

SEQ ID NO: 23410 - DNA, 120 bp, synthetic construct
  source 1..120: mol_type = other DNA
agaggatttgtgtttgttttgcgtgttatttgcgtttgttttttgacaggttccttggagcctggcccactataaactgaattcacaacttgatgattgccagacaatccaggtagtgag

SEQ ID NO: 23411 - DNA, 120 bp, synthetic construct
  source 1..120: mol_type = other DNA
aacttaggggtcccagcaaaatggaggagatcatcctaggagatttcccactttgagtgctacttgagacttgcctcctattccaaattccttatgaggccatggaaactaaagcttaac

SEQ ID NO: 23412 - DNA, 120 bp, synthetic construct
  source 1..120: mol_type = other DNA
gataacccattttttgttagcatgagagtaggcgtagatacctaatatgccacattagtggttcacaccttatccttaaagctccttatcacaaaccttcccatcttgttcctttgaagt

SEQ ID NO: 23413 - DNA, 120 bp, synthetic construct
  source 1..120: mol_type = other DNA
tgaacttccagatggtctgattgaaaatcttcctgctggaggtactttcctttccactcttctttatgacaattcctgaaaagggctgtaatgctgcaaagtacacttttgggtattcaa

SEQ ID NO: 23414 - DNA, 120 bp, synthetic construct; identical to SEQ ID NO: 6912
  source 1..120: mol_type = other DNA

SEQ ID NO: 23415 - DNA, 120 bp, synthetic construct
  source 1..120: mol_type = other DNA
cttggtcatttgctgtatcatgatcatggcattcagaatctaccagggctcagtagcaagccaggaactgttatttagtagaagaataaagaataaagcttttcttcgaagccctggaac

SEQ ID NO: 23416 - DNA, 120 bp, synthetic construct
  source 1..120: mol_type = other DNA
atttaggccaaatggcagatatgtttgatgcctgcctggatcagaatgacatttccatttcttatggaatgttttgaacttgtactaacttaccggattttggtgcagagaaatcccctc

SEQ ID NO: 23417 - DNA, 120 bp, synthetic construct
  source 1..120: mol_type = other DNA
tatcttcattaacgtttaataacaccggtgcagttatttttcaaagagcttgtactccaatcttggaggaattccttgagttgaaaagcccagggcctgaataatgagggagtctcattt

SEQ ID NO: 23418 - DNA, 120 bp, synthetic construct
  source 1..120: mol_type = other DNA
cagtgcttgtttcacacttaactgaactacttccttggcctccactcaaatttaactgcagcattggtgacttgatttacagagtcagaaatttcctaggtatggaatgtgctgtcttaa

SEQ ID NO: 23419 - DNA, 120 bp, synthetic construct; identical to SEQ ID NO: 6913
  source 1..120: mol_type = other DNA

SEQ ID NO: 23420 - DNA, 120 bp, synthetic construct
  source 1..120: mol_type = other DNA
cactggaaaacaaacaaaggcgagcagaaatgtaatagtgctttgatcttgagactatctattgggtaaaagctgcaagttggtggcctttcctccttacctatgagtttgctccaaact

SEQ ID NO: 23421 - DNA, 120 bp, synthetic construct
  source 1..120: mol_type = other DNA
atctgctgaagaattcagattcaaaatctgaatacaaactatgctcacatccctggttgaacactaaactccccatgggtgtgggacactcaggggaacctggggaaaaatcagaaagaa

SEQ ID NO: 23422 - DNA, 120 bp, synthetic construct
  source 1..120: mol_type = other DNA
atcttactggactgaggggtgaaaaggcaggatgcaggacaatttagaggggattccagaagcaaaacaaacacagagaagctgaattgcaaaatcttagcagaaatagccccagtactt

SEQ ID NO: 23423 - DNA, 120 bp, synthetic construct; identical to SEQ ID NO: 6914
  source 1..120: mol_type = other DNA

SEQ ID NO: 23424 - DNA, 120 bp, synthetic construct
  source 1..120: mol_type = other DNA
aaccccatccttactaaaaatacaaaaattagcttggcatggtggcatgtgcctgtagtcccagctactcaggaggctgaggcagaagaatcacttgaacccaggaggtggaggttgcag

SEQ ID NO: 23425 - DNA, 120 bp, synthetic construct
  source 1..120: mol_type = other DNA
ggcaccaagccattcatgagggatctacccccatgacccaaacagcttccactaggccccacctgcagcattggggattacatttcaacatgaggtttggcagggacaaatattacaaag

SEQ ID NO: 23426 - DNA, 120 bp, synthetic construct
  source 1..120: mol_type = other DNA
gggaaagttaaccacgttcactgaggggcaggggtggtggtggtgggagaattgccatctttagagagattgttgtagattccagactctctaaaacaaaacatataatgtccactttat

SEQ ID NO: 23427 - DNA, 120 bp, synthetic construct
  source 1..120: mol_type = other DNA
tggtgggagaattgccatctttagagagattgttgtagattccagactctctaaaacaaaacatataatgtccactttatcaaataggatcagacatagaaagaaaagaaagaaatgtgt

SEQ ID NO: 23428 - DNA, 120 bp, synthetic construct; identical to SEQ ID NO: 6915
  source 1..120: mol_type = other DNA

SEQ ID NO: 23429 - DNA, 120 bp, synthetic construct
  source 1..120: mol_type = other DNA
aaaccctcagaaaatataaagcaggtaaacaggtgaccaattggagtcccaaaagaagatagacacaggatcagaaaaaaaattcaaaaaaatctatggctgaaagattcccaaatttga

SEQ ID NO: 23430 - DNA, 120 bp, synthetic construct
  source 1..120: mol_type = other DNA
tgtggtgtggtgcagggtgccagtgcctggtgggaccagagagctcccagcacagcctttgggcaggtgggaccgccgatcattttaaaataattttttattgatttaacttatattttg

SEQ ID NO: 23431 - DNA, 120 bp, synthetic construct
  source 1..120: mol_type = other DNA
ctctccctcctcccagcctccactctctggtaggccccagtgtgtgcagttcccttctatatgtccatgtgttctcatcatttagctcccacttataagtgagaacatgtggtattcggt

SEQ ID NO: 23432 - DNA, 120 bp, synthetic construct; identical to SEQ ID NO: 6916
  source 1..120: mol_type = other DNA

SEQ ID NO: 23433 - DNA, 120 bp, synthetic construct
  source 1..120: mol_type = other DNA
aggggacatcaatactccactgatagctctagacagatcatcaagacacaaagtcaacaaagaaacaatgatcttaaaccatatcctacaacaaatggacttaacagatatttacagaac

SEQ ID NO: 23434 - DNA, 120 bp, synthetic construct
  source 1..120: mol_type = other DNA
tataaagtatcttcacagaccagagtggaataaaactggaaatcaactccaaaatgaaacttaaaaactgtatgagtacatggaaattaaataacctattcttggatgatttttcagtta

SEQ ID NO: 23435 - DNA, 120 bp, synthetic construct
  source 1..120: mol_type = other DNA
gtgctgacttaaaaaagcctgaaagagcccgggcacagtggcttatgcctgtaatcccagcactttgagaggctgaggcaggtggatcagttaaggtcaggggtttgagaccagcctgac

SEQ ID NO: 23436 - DNA, 120 bp, synthetic construct; identical to SEQ ID NO: 6917
  source 1..120: mol_type = other DNA

SEQ ID NO: 23437 - DNA, 120 bp, synthetic construct
  source 1..120: mol_type = other DNA
aaaaagttgggtctttgaaaaggtaaacaaaatcaatagaccattggtgaggttaaccaagaaaaggagagaagatccaaataagctcaattagaaaacaaactggagatattacaacta

SEQ ID NO: 23438 - DNA, 120 bp, synthetic construct
  source 1..120: mol_type = other DNA
aagaaatagaaatcatgagcagaccaataacaagcagtgagactgaaacagtaataaaaaaaactgtcaacaaaaaaaagcctaggaccagatgggttcccagacaaattccattagaca

SEQ ID NO: 23439 - DNA, 120 bp, synthetic construct
  source 1..120: mol_type = other DNA
acaaaaaagaaaaatacagacaaatatccccaatgaacatacatgcaaaaatgttcaacacaatactagctaaccaaatccagtagcctatcaaaaaaataatacaccatgttgaagtgg

SEQ ID NO: 23440 - DNA, 120 bp, synthetic construct; identical to SEQ ID NO: 6918
  source 1..120: mol_type = other DNA

SEQ ID NO: 23441 - DNA, 120 bp, synthetic construct
  source 1..120: mol_type = other DNA
aatgggcatccaaattagaaaagaggaagtcaaactgtccctgttcactgatgatatgatcgtatacctagaaaatactaagactcatccaaaagacccatagatctgataaacaaattt

SEQ ID NO: 23442 - DNA, 120 bp, synthetic construct
  source 1..120: mol_type = other DNA
acaacaacaacaacaacaaaaacctccaaaaaaacaacaccccccaaaacctaggaatatacttaaccaaggaggtgaaagatctctgcaaggaaaactaaaaaacactgctgaaagaaa

SEQ ID NO: 23443 - DNA, 120 bp, synthetic construct
  source 1..120: mol_type = other DNA
taccatcatcattcttcacagaactggagcaaacaaccccaaaattcatgtggaaccaaaaaagagcccacgtatccaaagcaatactaagcaaaaataacaaatctggaagcgacccat

SEQ ID NO: 23444 - DNA, 120 bp, synthetic construct; identical to SEQ ID NO: 6919
  source 1..120: mol_type = other DNA

SEQ ID NO: 23445 - DNA, 120 bp, synthetic construct
  source 1..120: mol_type = other DNA
aaataagataaaataaaaaataggcgcttagaccaatggaatggaatagacaatccagaaataaagccagatgccaacagctaactgatctttgacaaagcatacaaaaacataaattgg

SEQ ID NO: 23446 - DNA, 120 bp, synthetic construct
  source 1..120: mol_type = other DNA
aacctaaaacctaaaacctaaaaccataaaaatcttagaagataacatgataacattaaaaaactcttctggacattggcttaggcaaaaaattcatgactaagaccccgaaaacaaaca

SEQ ID NO: 23447 - DNA, 120 bp, synthetic construct
  source 1..120: mol_type = other DNA
atacatccaacaaaggactaatatccagaatctacaaggaacgcaaagaaatcagcaagaaaaaaacaaataatcccatcaaaaactgggcaaaggacatgaattgacagttctcaaaag

SEQ ID NO: 23448 - DNA, 120 bp, synthetic construct; identical to SEQ ID NO: 6920
  source 1..120: mol_type = other DNA

SEQ ID NO: 23449 - DNA, 120 bp, synthetic construct
  source 1..120: mol_type = other DNA
gcaatgacatgaaaacaaagtaagtgtccatcgaccaacaagtggacaaagaaaatgtggtatatgtacaccatggagtattacttagccataacaaggaacaaaataatgtgttttgca

SEQ ID NO: 23450 - DNA, 120 bp, synthetic construct
  source 1..120: mol_type = other DNA
gagcgatataatggactttggggactcaagggacaggctgagaggggagtgagataaaagactacatattgggtacagtgtatattgcttgggtgacaggtgcactaaagtctcagaatt

SEQ ID NO: 23451 - DNA, 120 bp, synthetic construct
  source 1..120: mol_type = other DNA
aaatcatacaaaaaatatttaagatctctgaaatccaagacactagaaatcaagagacactgtggaaagagtacatagaagacctaaataaatagatcccctgttcatggggagcaagat

SEQ ID NO: 23452 - DNA, 120 bp, synthetic construct; identical to SEQ ID NO: 6921
  source 1..120: mol_type = other DNA

SEQ ID NO: 23453 - DNA, 120 bp, synthetic construct
  source 1..120: mol_type = other DNA
ttgtccgggttagtcttgaactcctgggctcaaggtgtcctcccatctcagtctcttgagtagctgagactacaggcatgttatcatagtcagtacaatttaagtaatttctaaaaagat

SEQ ID NO: 23454 - DNA, 120 bp, synthetic construct
  source 1..120: mol_type = other DNA
accttgggcttagtggatttcccaggaaagaaatgcttccaccaaataagaacctcagctggccattttatatttccataaaatatagtggtatgagggttctaatttctgcttatcttt

SEQ ID NO: 23455 - DNA, 120 bp, synthetic construct
  source 1..120: mol_type = other DNA
atgatgttgagtatcttttcctgtgtatattggcggtttatgtatcttctttgaagaaatgacttttcaatttctttgcccattttgtaatgggattatttgtcattttgttattgatgt

SEQ ID NO: 23456 - DNA, 120 bp, synthetic construct
  source 1..120: mol_type = other DNA
tgccttttcactgtattgatagtgttctctgatgcataaaagttttggtttgatgaagttcaatttatctattcgactctataaccatacccagggcaggatcaggaaaacaaggacagg

SEQ ID NO: 23457 - DNA, 120 bp, synthetic construct; identical to SEQ ID NO: 6922
  source 1..120: mol_type = other DNA

SEQ ID NO: 23458 - DNA, 120 bp, synthetic construct
  source 1..120: mol_type = other DNA
agctcttcttccgcttcatcgcaagtgtagccaccacagctcaagtaaccacatctccaatgaaatttgatagtgcataccagagtatcttagtttttaatctccctaaaagtataccat

SEQ ID NO: 23459 - DNA, 120 bp, synthetic construct
  source 1..120: mol_type = other DNA
ttgaacaactacagtgtatagacatcaaccaaaatatgaattatcagttcatagtatcaagtcttcataaatgcacatcactgttgccaatccatgtctatatttcactggaaatctggc

SEQ ID NO: 23460 - DNA, 120 bp, synthetic construct
  source 1..120: mol_type = other DNA
caaaaattataaaataattaaaccttacaatcccatcgcattagtaatctttacttttccacaacttgaaacaattctatgtccttcaactctcggacccctttcctcatcgtctcttcc

SEQ ID NO: 23461 - DNA, 120 bp, synthetic construct; identical to SEQ ID NO: 6923
  source 1..120: mol_type = other DNA

SEQ ID NO: 23462 - DNA, 120 bp, synthetic construct
  source 1..120: mol_type = other DNA
ttataatatttgggcttcagctggtatttcaagtttccctgggatttaattaattagtagttatgactgaatgatgacacagagaggtctatgccactgaaaaaagagtttattacccac

SEQ ID NO: 23463 - DNA, 120 bp, synthetic construct
  source 1..120: mol_type = other DNA
aagcagtgtagacatgttcagtattgatgagtctgaataatcttggtgactctgaggcatagggattgtctctagttgtctgatacctgtctctcagattattaagacaggagaatattg

SEQ ID NO: 23464 - DNA, 120 bp, synthetic construct
  source 1..120: mol_type = other DNA
ggaatagactagtcttgggaggggagtcctcacaatcagtgaggactcagatgccagagcatgagaataaggaaaaaaagaaaatacagataacacagttgagaaattctattttatttt

SEQ ID NO: 23465 - DNA, 120 bp, synthetic construct; identical to SEQ ID NO: 6924
  source 1..120: mol_type = other DNA

SEQ ID NO: 23466 - DNA, 120 bp, synthetic construct
  source 1..120: mol_type = other DNA
cagaccagctcctggcaacactgatgcccagctgtgccagacaagttcccagatattaggggctgctttttcttgattaaattcaatatttaaaaatatcagcattacgtttgagaaatg

SEQ ID NO: 23467 - DNA, 120 bp, synthetic construct
  source 1..120: mol_type = other DNA
ttaaaatccatcagcttggcaaagacagaagtaaatgatggtagtattgatcagagtacagggaaaatgtactgttacgaagactgatggcattgaaaagtggtacaaaacttctaaagg

SEQ ID NO: 23468 - DNA, 120 bp, synthetic construct
  source 1..120: mol_type = other DNA
tgggttcaagcgattctcctgcctcagcctcccgcgtagctgggactacaggtgcgtgccaccacgcccagctaatttttgtaattttagtagaaatggggtttcaccatgatggccagg

SEQ ID NO: 23469 - DNA, 120 bp, synthetic construct; identical to SEQ ID NO: 6925
  source 1..120: mol_type = other DNA

SEQ ID NO: 23470 - DNA, 120 bp, synthetic construct
  source 1..120: mol_type = other DNA
gaggcagaagaattgcttgaacccgggaggtggaggttgcagtgagctgcgatcatgtcactgcacttcagcctgggtgacaggtcgagactctgtcccaaaacaaaaacaaaaaaacca

SEQ ID NO: 23471 - DNA, 120 bp, synthetic construct
  source 1..120: mol_type = other DNA
aaaataatgccatggctttacatagagagtcagatttaatcctcaatgcaaacccatggggaactcaatatgtgatcctttgtacagacagggaaggagagaggtaaagaaggtggtggg

SEQ ID NO: 23472 - DNA, 120 bp, synthetic construct
  source 1..120: mol_type = other DNA
acacaagtgaactgttttgatgtcccagaatgttctatggacaggaggccactggctcagagctcaggaagacaagaagggcaatgacttaactgccaaattcacgcagaagtccgttca

SEQ ID NO: 23473 - DNA, 120 bp, synthetic construct; identical to SEQ ID NO: 6926
  source 1..120: mol_type = other DNA

SEQ ID NO: 23474 - DNA, 120 bp, synthetic construct
  source 1..120: mol_type = other DNA
aactgaaatgaaagttgtgtgctgcaaggtagtacaaaataaaaacgtgatgccaagcatgatagaactttaagaatattatactatcaattaaggaattccagcagtctcataatataa

SEQ ID NO: 23475 - DNA, 120 bp, synthetic construct
  source 1..120: mol_type = other DNA
cccacaccaagactcatgacaacaaaatttcagagagtgaaagacagagcaagaccaatggacaaaggaatggcaggaggtctggtcgtgtgtgtgcatttcctccttcccgtctgtcat

SEQ ID NO: 23476 - DNA, 120 bp, synthetic construct
  source 1..120: mol_type = other DNA
tggatgagccttctggagactgtctcagggttttctgagaacttctttaaaacctggtctacgggcatgcattaccccagttattttttccctaagtgaaaaatcaaccagaggagatga

SEQ ID NO: 23477 - DNA, 120 bp, synthetic construct
  source 1..120: mol_type = other DNA
acttctttaaaacctggtctacgggcatgcattaccccagttattttttccctaagtgaaaaatcaaccagaggagatgatttattttaatagccttattgcaggagaggaaggtgaaaa

SEQ ID NO: 23478 - DNA, 120 bp, synthetic construct; identical to SEQ ID NO: 6927
  source 1..120: mol_type = other DNA

SEQ ID NO: 23479 - DNA, 120 bp, synthetic construct
  source 1..120: mol_type = other DNA
gggtcccaactttatacccagaggtaaggacagatgcttccagctccatcttataacttccacatgaaatttgaggtcaggaacttctcttaactcgtcttaaagggcctcatacttaca

SEQ ID NO: 23480 - DNA, 120 bp, synthetic construct
  source 1..120: mol_type = other DNA
aacccagtttattttcagatactgagtgggattgaaaagctgaattgtctgttttcctgcagggcacacagaggaactggctgtcccacaccactctgacatttccagagaagcaccgtc

SEQ ID NO: 23481 - DNA, 120 bp, synthetic construct
  source 1..120: mol_type = other DNA
caagaccctgcattttccgaagtacttgtttactgagcaagtgtttctgcttgttgcattatgtcaggggatatggaagccacttttcatccagccaaacacagatgcaaatgagatgtt

SEQ ID NO: 23482 - DNA, 120 bp, synthetic construct; identical to SEQ ID NO: 6928
  source 1..120: mol_type = other DNA

SEQ ID NO: 23483 - DNA, 120 bp, synthetic construct
  source 1..120: mol_type = other DNA
tcagcacccagtgtggcatgtggcaagacctcagcaaacacatcagttggctggatgaaggagggcaggtgtgagccgacaaggaaaatcttgtgatttttgttgggaaatgaatgtaaa

SEQ ID NO: 23484 - DNA, 120 bp, synthetic construct
  source 1..120: mol_type = other DNA
gtgtttctatctctgttctgcctttctgttttgtctctggctctgtctgtatctgccattgtcccttcacaaccatgccttcactattatcagtaacatcttttacctggtcttatagga

SEQ ID NO: 23485 - DNA, 120 bp, synthetic construct
  source 1..120: mol_type = other DNA
cccagggagacaggggctgcgcctcactgcaaagtcgatcctgctgaacacagaggggaaacgcgctcagacagccctgcccgtgctgatcagaagggagggttgcgcctccagatcctt

SEQ ID NO: 23486 - DNA, 120 bp, synthetic construct; identical to SEQ ID NO: 6929
  source 1..120: mol_type = other DNA

SEQ ID NO: 23487 - DNA, 120 bp, synthetic construct
  source 1..120: mol_type = other DNA
gttggattctataagaaccgcattcgcggtgagaattctagagccagatcttgctgctccacaattgcctcacgttgcaagacaagcaaatctagcctgagtctgtggattccagggctg

SEQ ID NO: 23488 - DNA, 120 bp, synthetic construct
  source 1..120: mol_type = other DNA
cccgtgtggccacagggacgaggacagaggaccggaccccgctcccctttctcaccaaccaggacctccgaggctctccctctgctcccagcacctggacagggctctgcactcaaggag

SEQ ID NO: 23489 - DNA, 120 bp, synthetic construct
  source 1..120: mol_type = other DNA
gggcaaaacagtgggatcagatgtggggatgacacacccccaaatccttgctgccacaggacccagtccctcagcctccagatggggccttggcctcccgtcccctcctttgttcctgct

SEQ ID NO: 23490 - DNA, 120 bp, synthetic construct; identical to SEQ ID NO: 6930
  source 1..120: mol_type = other DNA

SEQ ID NO: 23491 - DNA, 120 bp, synthetic construct
  source 1..120: mol_type = other DNA
ctgggaatttcagggtcccgctttctgagctaggatcttaaggccctatcagagtccacccccaggaagcctgcagtcatagcactgggctagctggacggctgcctcttctttgccttt

SEQ ID NO: 23492 - DNA, 120 bp, synthetic construct
  source 1..120: mol_type = other DNA
gtctgaaggtggtcatgggttacaaaggggttacaaagagctcagcggtgagcctggcccaagcttctgacccctttctttggatctcaagggctgaccatggattctcaatggatctca

SEQ ID NO: 23493 - DNA, 120 bp, synthetic construct
  source 1..120: mol_type = other DNA
aacctgaactccaggaccctgcagccccaccccaaaattgcttgataatacagtgattctattttcagtgttttgaaaactctgtatactgttttttacagttgctgtactagttttaca

SEQ ID NO: 23494 - DNA, 120 bp, synthetic construct; identical to SEQ ID NO: 6931
  source 1..120: mol_type = other DNA

SEQ ID NO: 23495 - DNA, 120 bp, synthetic construct
  source 1..120: mol_type = other DNA
ggttttctttgctgcgcagaagcgttttagtttattatagtcccatttgtctattttgtttgggttgtctgtgcttctgaagtcttagccataaaatcgttacccagaccaatgtcctag

SEQ ID NO: 23496 - DNA, 120 bp, synthetic construct
  source 1..120: mol_type = other DNA
ctgcatgtggatatccaatttccccagcaccatttattgaagagggtgtcctttccccaaatgtatgttcttggcacctttgtcaagaatcagttggctgtaaatatatggatttatttc

SEQ ID NO: 23497 - DNA, 120 bp, synthetic construct
  source 1..120: mol_type = other DNA
gtgctgggattacaggagtgagccacagtacctggcctttgtgctgtgttttgattcatcgttatctcctaagccctttcccagcattgatattttactaaacaccctatgattaaatta

SEQ ID NO: 23498 - DNA, 120 bp, synthetic construct; identical to SEQ ID NO: 6932
  source 1..120: mol_type = other DNA

SEQ ID NO: 23499 - DNA, 120 bp, synthetic construct
  source 1..120: mol_type = other DNA
tgtccatacacaaagctagatgatatagcctactgcacacctacgctatatcataaagcctattgctcctaggctacaaacttggatagcacattactatactgagtactgtaggcaatt

SEQ ID NO: 23500 - DNA, 120 bp, synthetic construct
  source 1..120: mol_type = other DNA
cttacaggactggaagttgctctgggtgagtcagcaagtgagtggtgagtgaactgaaggcctaggccattactgtgcactactgtagattttataaatgctgtacacttaggttacact

SEQ ID NO: 23501 - DNA, 120 bp, synthetic construct
  source 1..120: mol_type = other DNA
cttaaaagaccaacatgttacaaagctgtacaaaaatattgttccttatattttcattctagaaacttatttctatttaattttttttttacttttaaatcttttctgttaaaaaaaaaa

SEQ ID NO: 23502 - DNA, 120 bp, synthetic construct; identical to SEQ ID NO: 6933
  source 1..120: mol_type = other DNA

SEQ ID NO: 23503 - DNA, 120 bp, synthetic construct
  source 1..120: mol_type = other DNA
acaaacatatcattaatgcattgtactatgatgtacagtgtcacctacaatgtcactacagagaagaaacccccaaaatctgcactcctaagctgcatatgctttaggtgatactctaag

SEQ ID NO: 23504 - DNA, 120 bp, synthetic construct
  source 1..120: mol_type = other DNA
gtgaagcactatgagtgaggacccttgccttggagtaaggaccgcactgaactagactcatgttaacaaaggctaaaatcaagcctaagcagaatcaaagtgggtctgatttttatgata

SEQ ID NO: 23505 - DNA, 120 bp, synthetic construct
  source 1..120: mol_type = other DNA
gataaaataatcaacagaagccgactcagatgatctggatactgaagccagcgagcaaggacattcttcaatatatttatgattaatatgttaaggataatagaggaaatcatgggcaaa

SEQ ID NO: 23506 - DNA, 120 bp, synthetic construct; identical to SEQ ID NO: 6934
  source 1..120: mol_type = other DNA

SEQ ID NO: 23507 - DNA, 120 bp, synthetic construct
  source 1..120: mol_type = other DNA
atccttttgggctgggttctaggacccctgtggataccaaaatctgtggattctctggtcccatgtataaaatggcctactatatgcctactacctatgcatatcatcccatatacttta

SEQ ID NO: 23508 - DNA, 120 bp, synthetic construct
  source 1..120: mol_type = other DNA
accactgtcagtaggcctaactacagagtacacaacagcagcaacataacatttccaatcctcaggtagttgaattcacagatgtggaacacacagacatggaggacagactgtcttata

SEQ ID NO: 23509 - DNA, 120 bp, synthetic construct
  source 1..120: mol_type = other DNA
tgaaacctcatctctactaaaaatacaaaaaaattagctgggcgtgatgacaggtgcctgtaatcccagctactcaagagactaaggcaggagaatcgcttgaacctgataattgctagg

SEQ ID NO: 23510 - DNA, 120 bp, synthetic construct; identical to SEQ ID NO: 6935
  source 1..120: mol_type = other DNA

SEQ ID NO: 23511 - DNA, 120 bp, synthetic construct
  source 1..120: mol_type = other DNA
tgatggcctggccatataattaagagagcaatggaaaactggcctatgaaaagaatacccgtataggacacagtcctgtggaaatcactatggtaatttgaggggtgcattaatgtaagg

SEQ ID NO: 23512 - DNA, 120 bp, synthetic construct
  source 1..120: mol_type = other DNA
atgaatcgtttagtaccattccctcagaatagttcaattagttcaatgcccctcagaataaccctcctccaggtttggaaggtgattgaaatcaacaagcatttatttctaagtgatttc

SEQ ID NO: 23513 - DNA, 120 bp, synthetic construct
  source 1..120: mol_type = other DNA
gcaacttttgagtccagggaaaaatatcaataccacatctcaaaaaaatccacgtttgcttgtggtgatcacctgggtccgtgaaataagtagacactgagggctgcagcaatgcagaga

SEQ ID NO: 23514 - DNA, 120 bp, synthetic construct; identical to SEQ ID NO: 6936
  source 1..120: mol_type = other DNA

SEQ ID NO: 23515 - DNA, 120 bp, synthetic construct
  source 1..120: mol_type = other DNA
tgggagaaaggaaggcgtttatttgcaaggcaccaagcaaggagaatcgggcagctcacacttaagacctaacctccccaatggcttacaagcaagagtttttaaggcaggagtaaattt

SEQ ID NO: 23516 - DNA, 120 bp, synthetic construct
  source 1..120: mol_type = other DNA
ttctctgatttgtgattggataaggagccaaagctttgtctacacacttaggggcagtagggaggaatgttcaggtctgctctgtggacctgactctttccaggcccctcaggaaaaaat

SEQ ID NO: 23517 - DNA, 120 bp, synthetic construct
  source 1..120: mol_type = other DNA
taagatgttctctttagtttctatagagaatcaaacatcttgggactctaacttccttggctattgtttaagctatttttacctgcttgcttataaggtcactcacttgcttttcagggc

SEQ ID NO: 23518 - DNA, 120 bp, synthetic construct; identical to SEQ ID NO: 6937
  source 1..120: mol_type = other DNA

SEQ ID NO: 23519 - DNA, 120 bp, synthetic construct
  source 1..120: mol_type = other DNA
ccagacatgagtgtggaaaaaggagtgtccccactagagagtatcctcttttttcctgctggatcagggaaaggtgctagtatgacctgacatacgatttttcccatgacaagaggacac

SEQ ID NO: 23520 - DNA, 120 bp, synthetic construct
  source 1..120: mol_type = other DNA
agtgccaaaacaggaattattcctaagcaagaaagtgtaaatatattttaaaaccattatgcaagaattcctcagggcctggaggagtaggttgtgccttcactgcatctggcaaagttg

SEQ ID NO: 23521 - DNA, 120 bp, synthetic construct
  source 1..120: mol_type = other DNA
ttgctcccttcagtctaggccagcacagtagcagaacttaatgtttcttccaaaactgttaatgtttggtataaatgaagtagaaggaggaatagtagctgagggtaaatgaatgaataa

SEQ ID NO: 23522 - DNA, 120 bp, synthetic construct; identical to SEQ ID NO: 6938
  source 1..120: mol_type = other DNA

SEQ ID NO: 23523 - DNA, 120 bp, synthetic construct
  source 1..120: mol_type = other DNA
gagcctgtgagttcgacctcttactccctctagctctcaccctctcttgcgcttctcccttctgccagatacattcccttgattttggaattcccatcctcgacaaccatgagccaatta

SEQ ID NO: 23524 - DNA, 120 bp, synthetic construct
  source 1..120: mol_type = other DNA
agaccgcacagcaggaggtgaagggtgggcgagaaagcatgagcatgaccgcctgagctccgcctctggtcagatcagtggtggcattagattctcatgggagcacgaaccctattgtaa

SEQ ID NO: 23525 - DNA, 120 bp, synthetic construct
  source 1..120: mol_type = other DNA
tcagtggaaaagttttattccatgaaaccagtacttggtgccaaatatgttgaggtaagctatgattaccgctgatttaagctatgacaataataaactgcaatactgagtgtgaaagaa

SEQ ID NO: 23526 - DNA, 120 bp, synthetic construct; identical to SEQ ID NO: 6939
  source 1..120: mol_type = other DNA

SEQ ID NO: 23527 - DNA, 120 bp, synthetic construct
  source 1..120: mol_type = other DNA
ctgagcacaagatgaatgcatagttgactgtttttccccttctgcctgctctttcccctgtaagtactgaagtcctcaaaacccttttaggaaaaagcgtgggccacagatgctagtgat

SEQ ID NO: 23528 - DNA, 120 bp, synthetic construct
  source 1..120: mol_type = other DNA
ggaacgacgactgaccagagtcatgctgacatcaacccccataacatggggactgatcaagaaaaccacacaggaagctgagaaactgctggagtgccagggtgtcaccttttgctggaa

SEQ ID NO: 23529 - DNA, 120 bp, synthetic construct
  source 1..120: mol_type = other DNA
agttgcagaagacagaccttcatccttctgcaacccttaggattaagcgtcctcttgtaaaaagggaagggggagatatgtaagaagcattcaaaccacagcaactctattttgaataag

SEQ ID NO: 23530 - DNA, 120 bp, synthetic construct; identical to SEQ ID NO: 6940
  source 1..120: mol_type = other DNA

SEQ ID NO: 23531 - DNA, 120 bp, synthetic construct
  source 1..120: mol_type = other DNA
ttctaagcagcaaagcattcaaagagtgacttgggtgctcctaaaagcattccattttcaaagggaaacagagcataaaagttcagaaaatttacagcctgacaatgcagtagaaaagaa

SEQ ID NO: 23532 - DNA, 120 bp, synthetic construct
  source 1..120: mol_type = other DNA
atggcagcccctctcatcacagacccagaagcataggaggaaaaaatggtttcatgggcagggcccagggtccccatgctatgtacagcctagggacttggtgccctgcatcccagatgc

SEQ ID NO: 23533 - DNA, 120 bp, synthetic construct
  source 1..120: mol_type = other DNA
ggaggtttgggaacctccacctagatttcagaagatgtatggaaatgctaggatgcccaggcaaaagtttgctgcaggggcagggccctcatggagaacctctgctagggcaatgtggaa

SEQ ID NO: 23534 - DNA, 120 bp, synthetic construct; identical to SEQ ID NO: 6941
  source 1..120: mol_type = other DNA

SEQ ID NO: 23535 - DNA, 120 bp, synthetic construct
  source 1..120: mol_type = other DNA
atttctcccatttggaatggctgtatttacccaatacctgtacccccattgtatctcgtaagtaactagcttggttttgattttacaggttaataggtgggagggacttgccttgtctca

SEQ ID NO: 23536 - DNA, 120 bp, synthetic construct
  source 1..120: mol_type = other DNA
ggtggaatgatatggtttggctctgtgtccccacccaaatctcatcttgaattatactcccataattcttacatgttgtaggagggacccagtgggagataatatgaatcatggaggcag

SEQ ID NO: 23537 - DNA, 120 bp, synthetic construct
  source 1..120: mol_type = other DNA
tcacctcctgccatgattctgagaccatcgagccatgtggaattgtaagtccaattaaacttctttttcttcccagtcttgagtatgtgtttatcagcagtgtgaaaacggactaatata

SEQ ID NO: 23538 - DNA, 120 bp, synthetic construct; identical to SEQ ID NO: 6942
  source 1..120: mol_type = other DNA

SEQ ID NO: 23539 - DNA, 120 bp, synthetic construct
  source 1..120: mol_type = other DNA
gatgttctctcttttattgctgaccttgttaatgtgtatgtttttgtcttgatcagtctggctagaaatttataaggtgtacgatttttccctatagaaccaatatttggattcattaat

SEQ ID NO: 23540 - DNA, 120 bp, synthetic construct
  source 1..120: mol_type = other DNA
ttcttacaggagaaactaatttactaatttgagacctaccttctttcttaatataggcatttaaggatatcagttttttcttcagtactgcttgttgggaacaaatgctcagtgttgtaa

SEQ ID NO: 23541 - DNA, 120 bp, synthetic construct
  source 1..120: mol_type = other DNA
ttataatctcttaatgcagcttgtccctgtaactgtgtcttgtctccattggctggagctggactgcacaatctaagctgaacctggctggctaacttgaaaagtgcaggaatgtggtta

SEQ ID NO: 23542 - DNA, 120 bp, synthetic construct; identical to SEQ ID NO: 6943
  source 1..120: mol_type = other DNA

SEQ ID NO: 23543 - DNA, 120 bp, synthetic construct
  source 1..120: mol_type = other DNA
ttccaatccttggtattttcatgatcgtccgtcttagtcaatctgggcagttataaaagaattccatagtctatgtggcttgcatacaacagaaatctatttctcacagttccggaggct

SEQ ID NO: 23544 - DNA, 120 bp, synthetic construct
  source 1..120: mol_type = other DNA
ccttttataagggcattcattttattaatgagggttttgccttcactgcatgatcactttctaatggcacaacctccaaacaccatcacattagagattaggtttcaattatgagtttaa

SEQ ID NO: 23545 - DNA, 120 bp, synthetic construct
  source 1..120: mol_type = other DNA
tggcctgaaatatggtttctcctggtaaatgtatcattcatacttcagataatttgtgtttttcattgatgtgcatatgcatataaataaattaagtctgggtgcttgataatgcttttc

SEQ ID NO: 23546 - DNA, 120 bp, synthetic construct; identical to SEQ ID NO: 6944
  source 1..120: mol_type = other DNA

SEQ ID NO: 23547 - DNA, 120 bp, synthetic construct
  source 1..120: mol_type = other DNA
catgcagatgtatgttcattgcagcacttgtcacaatagaaaagacatggaatcaacctaaatgcccatcaatggtgaactggataaagaaaatgtggcacatatgcaccatggaacatt

SEQ ID NO: 23548 - DNA, 120 bp, synthetic construct
  source 1..120: mol_type = other DNA
tgagtgggagctaaatgatgagaacatatggacatatagaagggaacaacacacaccggggcctacttgaaggcaacgggtggaaggagggagaggatcaagaaaaataatgaatgggtg

SEQ ID NO: 23549 - DNA, 120 bp, synthetic construct
  source 1..120: mol_type = other DNA
aatacttaaaataaaaatagttgtattagacataaaatatagatatggttatgtataaatattactaatcattagtttatgacattactctttattccaatattataataatctttgttc

SEQ ID NO: 23550 - DNA, 120 bp, synthetic construct; identical to SEQ ID NO: 6945
  source 1..120: mol_type = other DNA

SEQ ID NO: 23551 - DNA, 120 bp, synthetic construct
  source 1..120: mol_type = other DNA
tggctcagccttctaaatagcagtagcaaaaattagtgaaagtactaaagtctttgaaatacatagaagaaataatgacataaactgtcccctctctctctccgcctcggctaccgaaca

SEQ ID NO: 23552 - DNA, 120 bp, synthetic construct
  source 1..120: mol_type = other DNA
cattcgaggccactatcagtctccgtgccttggtggtagtggtcccctgggcccaactctcttttcttctctttgtcttgtgtctttatttctacactctctcatctccacacacaaaga

SEQ ID NO: 23553 - DNA, 120 bp, synthetic construct
  source 1..120: mol_type = other DNA
aaataaagttcatgtcttgaaaagagcatatggttgggttattttttttaatccagtcacagaatctctgcccttaattggagtgctgatttatgtaggtttttgtcattattgatatga

SEQ ID NO: 23554 - DNA, 120 bp, synthetic construct; identical to SEQ ID NO: 6946
  source 1..120: mol_type = other DNA

SEQ ID NO: 23555 - DNA, 120 bp, synthetic construct
  source 1..120: mol_type = other DNA
taaaagcaaatgataccaggtggaaaatgagattatcagaaaagatgaagaatgtgagaagtggtaaatattaagtgcgaaaggctatcttgctcccccacccccatttaatcttacttc

SEQ ID NO: 23556 - DNA, 120 bp, synthetic construct
  source 1..120: mol_type = other DNA
tatctatggcataaaagatggacgttttatagaggataaatggttgcaagatttctatatttatgtgaactagtacattattaactgaaagtgggctgtgaaatgttaagaatgagttaa

SEQ ID NO: 23557 - DNA, 120 bp, synthetic construct
  source 1..120: mol_type = other DNA
agataggctgatagctagactaataaggaagaaaagagaggcgatcccaataagcataattagaaatgacaaaacagatgttaccactgactctgcagaagtaaaaataaccatcaaaag

SEQ ID NO: 23558 - DNA, 120 bp, synthetic construct
  source 1..120: mol_type = other DNA
aaattaaatctgtaataaatagcctactaaccaaaaaaagccctgaacctgatggattcacagctgaattctaccagatggacgaagaagagctggtaccattcctactgaaactattcc

SEQ ID NO: 23559 - DNA, 120 bp, synthetic construct; identical to SEQ ID NO: 6947
  source 1..120: mol_type = other DNA

SEQ ID NO: 23560 - DNA, 120 bp, synthetic construct
  source 1..120: mol_type = other DNA
caataaactaggtattgcaggaacatacctcaaaataataagagccatctatgacaaacaaacagccaacatcataccaaatgggggaagcattccccttgaaacccagcacaagacaaa

SEQ ID NO: 23561 - DNA, 120 bp, synthetic construct
  source 1..120: mol_type = other DNA
ccagtgaatgttcccttaaggctcacaggctcttatatcagcttgtggtgagtgctgctaactagtctttaatggattaaaatgtataatgtgtttcacttgtgtattagtatgttttca

SEQ ID NO: 23562 - DNA, 120 bp, synthetic construct
  source 1..120: mol_type = other DNA
agtcacatcttgtgtggatggcagcaggcaagaagagagagctcgtgcaggaaaactcccatttttttaaaaccattagatctcatgagactcattcgctatcacaagaacagtgcagga

SEQ ID NO: 23563 - DNA, 120 bp, synthetic construct; identical to SEQ ID NO: 6948
  source 1..120: mol_type = other DNA

SEQ ID NO: 23564 - DNA, 120 bp, synthetic construct
  source 1..120: mol_type = other DNA
tgacagacagaaaggcagggcaggggccctgtggacagttggcagaagcagtcctgggagctgagacctgggacacagagaccgaggacttgacagagaatgggcaggacctcaggagga

SEQ ID NO: 23565 - DNA, 120 bp, synthetic construct
  source 1..120: mol_type = other DNA
ctggctgagggtgggctgagaaataggggtcagtggggctcagcagggaggtgagccggcactcagcccacacagggagacatggaggagggccagggaggggtcccagctgggctgagt

SEQ ID NO: 23566 - DNA, 120 bp, synthetic construct
  source 1..120: mol_type = other DNA
ccggcatttctactatgatggggagctcttcctctcccaaaacctggagactcaggaatggacagtgccccagtcctccagagctcagaccttagctatgaatatcagaaatttctggga

SEQ ID NO: 23567 - DNA, 120 bp, synthetic construct; identical to SEQ ID NO: 6949
  source 1..120: mol_type = other DNA

SEQ ID NO: 23568 - DNA, 120 bp, synthetic construct
  source 1..120: mol_type = other DNA
gaggaagccctcagggctagggctgccccctctgcctcccagcctgcccatcccagagagttccctcctggcctcatgacccaggagtccaatcctgacatccctccccttcagcatcaa

SEQ ID NO: 23569 - DNA, 120 bp, synthetic construct
  source 1..120: mol_type = other DNA
cagagtgagaacactggagaggagcagccctgttccctgagtctcccttagagggagcggggcttggccatgtgcctcactggctctgccctttcctatccagtgcctaccatggtgaat

SEQ ID NO: 23570 - DNA, 120 bp, synthetic construct
  source 1..120: mol_type = other DNA
gtgggtgtcctgcccaatgggaatgggacctaccagacctgggtggccactaagattccccaagaagaggagcagagggctacctgctatgtgggacacagcaggaatcacagcacttac

SEQ ID NO: 23571 - DNA, 120 bp, synthetic construct; identical to SEQ ID NO: 6950
  source 1..120: mol_type = other DNA

SEQ ID NO: 23572 - DNA, 120 bp, synthetic construct
  source 1..120: mol_type = other DNA
tttggaacagggtttggaagttggggtatttgggaggggaataggagctacaatttcatctagacccctaagtcctgcccaagccagggccgggccaaagccctcgaatgtccatctgtg

SEQ ID NO: 23573 - DNA, 120 bp, synthetic construct
  source 1..120: mol_type = other DNA
gaatcatgtgctgattgctgagggcctggatgatgatggcttcagagggggcaaatagtaaagacggctgtgatctggggagggctagaaactggagaggaatatgaggagaggtggtgc

SEQ ID NO: 23574 - DNA, 120 bp, synthetic construct
  source 1..120: mol_type = other DNA
ccttgtaacagggagggttctgagtgcacacagccatctttgtccactttgtagctccccacgcgcctcctccaggagctgtctcgggggtgtcgtgtctcctggatcactcgaggccat

SEQ ID NO: 23575 - DNA, 120 bp, synthetic construct; identical to SEQ ID NO: 6951
  source 1..120: mol_type = other DNA

SEQ ID NO: 23576 - DNA, 120 bp, synthetic construct
  source 1..120: mol_type = other DNA
atgatttcccccacagtcagttgtttgaggggaaagtaaaagagaaaacaggaagttttgtgtttctgcaaagacagaggcagtgcaggggacagtgagaggctgggtgtccaggaaact

SEQ ID NO: 23577 - DNA, 120 bp, synthetic construct
  source 1..120: mol_type = other DNA
tcccctgccctgcagcaagagggccccgtccaggaggcacccacagcaggggcagtgcaggtttgtggtcgctcctgctttcacctgcactgtctcctatagaggggttgtcacttctgg

SEQ ID NO: 23578 - DNA, 120 bp, synthetic construct; identical to SEQ ID NO: 1011
  source 1..120: mol_type = other DNA

SEQ ID NO: 23579 - DNA, 120 bp, synthetic construct; identical to SEQ ID NO: 6952
  source 1..120: mol_type = other DNA

SEQ ID NO: 23580 - DNA, 120 bp, synthetic construct
  source 1..120: mol_type = other DNA
cgtgtttttgtgccgagcccccaggcttcttgatgggctctgcagttaggggctggctgctcagggctcggagggtggaacgctgagctgcaggtggagcggggagcccagtgtgcaggg

SEQ ID NO: 23581 - DNA, 120 bp, synthetic construct
  source 1..120: mol_type = other DNA
ttggggaggtttcccactgtgtctaggctggtggggcttgggaggaggggagggccccgggttccctcctggatctgattcttgtcctttagtcatgaggccctttcattccccacatgg

SEQ ID NO: 23582 - DNA, 120 bp, synthetic construct
  source 1..120: mol_type = other DNA
aaagggtgaatctgatttcggagtttctgaggagggagaaatcctcagggaatgaaaagcagcactctgcacccagtggagcatttactgtttctctcttttctccagagcacatgagcc

SEQ ID NO: 23583 - DNA, 120 bp, synthetic construct; identical to SEQ ID NO: 6953
  source 1..120: mol_type = other DNA

SEQ ID NO: 23584 - DNA, 120 bp, synthetic construct
  source 1..120: mol_type = other DNA
attgtatgtgcagtaattacatgcacaaaagcacatatgtgcctttaaacacattgtatgtgcataaaagctttatgagtgtgtgtcctgttgacggttcctcctggcaagcctgggacc

SEQ ID NO: 23585 - DNA, 120 bp, synthetic construct
  source 1..120: mol_type = other DNA
cctgtgctttatttcatgcatctgggaagagtagaatacaaggttcaggggaaaaggagaggtctgtctcaatgccttgacacagcatgaagaaatctctccctcttcctacctctccct

SEQ ID NO: 23586 - DNA, 120 bp, synthetic construct
  source 1..120: mol_type = other DNA
ttggatccttcatgtgatgatgttgagctgaagtgtaatatcagagatgggggcagagagggctttgagtttccctggtattgaagaataggagtcagactgcttctggggtgaagcgac

SEQ ID NO: 23587 - DNA, 120 bp, synthetic construct; identical to SEQ ID NO: 6954
  source 1..120: mol_type = other DNA

SEQ ID NO: 23588 - DNA, 120 bp, synthetic construct
  source 1..120: mol_type = other DNA
gatcaacatggtgaaaccccatctctactaaaacgacaaaaattagctgggcatggtggcacatgtctgtaatcccagctactcaggaggctgaggcaggcgattctcctgaacctggga

SEQ ID NO: 23589 - DNA, 120 bp, synthetic construct
  source 1..120: mol_type = other DNA
ccaacacagaggagtagttttcaatatttttctcattaattttgactttagatagaggtatttcttttttataaataactttattagcttaaggaagttctcttttatttctggtttatt

SEQ ID NO: 23590 - DNA, 120 bp, synthetic construct
  source 1..120: mol_type = other DNA
tcacatttctcttataaatcccattcagtcccattgtacattatcctctccatatattacttgcttctattttctaatattttagatggaattttggtggctgtgttcatcagttcattc

SEQ ID NO: 23591 - DNA, 120 bp, synthetic construct; identical to SEQ ID NO: 6955
  source 1..120: mol_type = other DNA

SEQ ID NO: 23592 - DNA, 120 bp, synthetic construct
  source 1..120: mol_type = other DNA
tgggaggatgtgcataggtaataagcaaatactagaccattttatacatgggacctgagcattcatagattttggtatccacagggggccctagatcccatcccaaaaggataccaagag

SEQ ID NO: 23593 - DNA, 120 bp, synthetic construct
  source 1..120: mol_type = other DNA
tataggactacttatattttctattcagttttctgttggcttgttcaattgtcgttttcaagaactcatttcattgcacctaaattttaaaaggtattgtcaggaagttgtgtctaatat

SEQ ID NO: 23594 - DNA, 120 bp, synthetic construct
  source 1..120: mol_type = other DNA
tccctctattttccttaacatattaatcataaatactttgagaatgttcttgcttgcctgcttcaatatccacatcaactcttagcctgattttttttattatactttaagttttagcgt

SEQ ID NO: 23595 - DNA, 120 bp, synthetic construct
  source 1..120: mol_type = other DNA
cccaccccacaacagtccccggtgtgtgatgttccccttcctgtgtccacgtgttctcattgttcaattcccacctatgagtgagaacacgaggtgtttggttttttctccttgcgatag

SEQ ID NO: 23596 - DNA, 120 bp, synthetic construct; identical to SEQ ID NO: 6956
  source 1..120: mol_type = other DNA

SEQ ID NO: 23597 - DNA, 120 bp, synthetic construct
  source 1..120: mol_type = other DNA
atactttaagttttagggtacatgtgcacaatgtgcaggttagttacataggtatacatgtgccatgctggtgtgctgcacccactaacttgtcatctagcattaggtatatctcccaat

SEQ ID NO: 23598 - DNA, 120 bp, synthetic construct
  source 1..120: mol_type = other DNA
gttcaattcccacctatgagtgagaatatgcggtgtttggttttttgttcttgcgttagtttactgagaatgatgatttccaatttcatccatgtccctacaaaggacatgaactcatca

SEQ ID NO: 23599 - DNA, 120 bp, synthetic construct; identical to SEQ ID NO: 6957
  source 1..120: mol_type = other DNA

SEQ ID NO: 23600 - DNA, 120 bp, synthetic construct
  source 1..120: mol_type = other DNA
actggtgtgagatgatatctcatagtggttttgatttgcatttctctgatggccagtgatggtgagcattttttcatgtgttttttggctgcataaatgtcttcttttgagaaatgtctg

SEQ ID NO: 23601 - DNA, 120 bp, synthetic construct
  source 1..120: mol_type = other DNA
cccatgttgtaggttgcctgctcactctgatggtagtttcttttgctgtgcagaagctctttagtttaattagatcccatttgtcaattttggcttttgttgccattgcttttggtgttt

SEQ ID NO: 23602 - DNA, 120 bp, synthetic construct
  source 1..120: mol_type = other DNA
ataaggtgtaaggaaaggatccagtttcagctttctacatatggctagccagttttctcagcaccatttattaaatagggaatcctttcccaaggcttgattttagactttgctactttg

SEQ ID NO: 23603 - DNA, 120 bp, synthetic construct; identical to SEQ ID NO: 6958
  source 1..120: mol_type = other DNA

SEQ ID NO: 23604 - DNA, 120 bp, synthetic construct
  source 1..120: mol_type = other DNA
aagtgccaagcctgaactctgatctctgattcctttgctactgagattgattctctctgcttgggttccatttcccttcattgaattttgaaaaaaatcctcttagaaagaaagctgatg

SEQ ID NO: 23605 - DNA, 120 bp, synthetic construct
  source 1..120: mol_type = other DNA
tgggaggatgagttttaaatgagctagtctatcacagttcaagtcagaagacctctaatccttcaatagtcattgcatttgaaaatctgaatagggtaatttgacaattcacaggcaaag

SEQ ID NO: 23606 - DNA, 120 bp, synthetic construct
  source 1..120: mol_type = other DNA
aatgatgtttctgtcaatgattgatcacgtatacgactgtcatcctattaaacggagctgaaaaattcctatcacctagtgacattgtagccattgtaatgtcataacacaatgcattaa

SEQ ID NO: 23607 - DNA, 120 bp, synthetic construct; identical to SEQ ID NO: 6959
  source 1..120: mol_type = other DNA

SEQ ID NO: 23608 - DNA, 120 bp, synthetic construct
  source 1..120: mol_type = other DNA
tctttgtttttaccaaaaaagattaaaaggttaaaaaattaagtagaaatagtttctagaatgagaatataaggaaaaatatttttgtatagctgaataatgtgctggtgttttaagcta

SEQ ID NO: 23609 - DNA, 120 bp, synthetic construct
  source 1..120: mol_type = other DNA
cccaaaaacaacagaatatacattcttctcattgctacacagcacctactctaaaattggtcacataatcaaaagtaaaacactcctcagcaaatgcaaaaagaactgaaatcataataa

SEQ ID NO: 23610 - DNA, 120 bp, synthetic construct
  source 1..120: mol_type = other DNA
aaattaaggcagaaatcaataagttatttgaagctaatgagaatgaagagacaatgtatcagaatctttgggacacagctacagcagtgtaaagagggaaatttatagcactaaatgcct

SEQ ID NO: 23611 - DNA, 120 bp, synthetic construct; identical to SEQ ID NO: 6960
  source 1..120: mol_type = other DNA

SEQ ID NO: 23612 - DNA, 120 bp, synthetic construct
  source 1..120: mol_type = other DNA
aagttgataaattcctgcccacatacaccctcccaagactgaaccaggaagaaattgaaactcttagcaggccagtaatgagttctgaagttgaggcaataaatagcctaccaaccaaaa

SEQ ID NO: 23613 - DNA, 120 bp, synthetic construct
  source 1..120: mol_type = other DNA
tttaaaaggccagcatcatcctgataccaaaacttggcagagatataacaaaaaaagaaaacttcgggccatgcatgatgaacatcaatgcaacaatcctcaataaaattctggcaaacc

SEQ ID NO: 23614 - DNA, 120 bp, synthetic construct
  source 1..120: mol_type = other DNA
aagaaaaaaaccacatgattatctcaatagatgcagaaaaggcacttgataaaattcaatatactttcatgttaaaaactcttaataaactaggtgttgaaggaagagatctcaaaataa

SEQ ID NO: 23615 - DNA, 120 bp, synthetic construct; identical to SEQ ID NO: 6961
  source 1..120: mol_type = other DNA

SEQ ID NO: 23616 - DNA, 120 bp, synthetic construct
  source 1..120: mol_type = other DNA
tacaaacaaataggataacattccatgttcatggataggaagaatccatatcatgaaaatggccatactgcccaaagtaatttgtagatgtgatgctattcccattaaactatcatagac

SEQ ID NO: 23617 - DNA, 120 bp, synthetic construct
  source 1..120: mol_type = other DNA
caggttcaagcgattctcctgcctcaacctcccaagtagctgggattgcaaatgcgcaccaccacgcccagctaatttttgtatttttagtagagatggggtttcacaatgttggccagg

SEQ ID NO: 23618 - DNA, 120 bp, synthetic construct
  source 1..120: mol_type = other DNA
tggaaccaaaaaaagagcctgaatagccaagacaattctaagcaaaaagaacaaaactggaggcatcacattacctgacttcaaactatactacaaggttacaatactaaaacagcatgg

SEQ ID NO: 23619 - DNA, 120 bp, synthetic construct; identical to SEQ ID NO: 6962
  source 1..120: mol_type = other DNA

SEQ ID NO: 23620 - DNA, 120 bp, synthetic construct
  source 1..120: mol_type = other DNA
gactaatggaattaattaaactaaagagcttctgcacagcaaaggaaactatcagcagagtgaatagacaacctgcagaataggagaagatttttgcaatctatacatctgacaaaggtc

SEQ ID NO: 23621 - DNA, 120 bp, synthetic construct
  source 1..120: mol_type = other DNA
acaaacatatgagaaaagttgaacatcactgataattagagaaatgcaaataaaaaccacaatgagataccagagtggctattaataagtcaaaaaacaagagatgctggtgaagtcaca

SEQ ID NO: 23622 - DNA, 120 bp, synthetic construct
  source 1..120: mol_type = other DNA
tggatacatacccaaaggaatataaatcattctattataaagatatatacacgcatatgttcattgcagcactattcacaatagcaaagacatggaatcaacataaatgcccatcaatga

SEQ ID NO: 23623 - DNA, 120 bp, synthetic construct; identical to SEQ ID NO: 6963
  source 1..120: mol_type = other DNA

SEQ ID NO: 23624 - DNA, 120 bp, synthetic construct
  source 1..120: mol_type = other DNA
tgcacattctgtacatgtacccctgaacttaaaaaaagggtggagaaaaaaagattaaaaagttacagtaagctaagattaatttattattaaagaaagaaaatgatttttaaaattaat

SEQ ID NO: 23625 - DNA, 120 bp, synthetic construct
  source 1..120: mol_type = other DNA
ttcatggtaagtgctctagacaaatgtgccagtttttaaaaaatcttttaaccacatttttgtggcaaaattttgtgggaaaattcaaagtcttttttctactgttcttacaccccaaca

SEQ ID NO: 23626 - DNA, 120 bp, synthetic construct
  source 1..120: mol_type = other DNA
tccctggagataattttagatcccgcaagttgatggctcagtcctcacgactgtcaccctctcacttctgatgacaatctcaagccccagattattttgcctgtgttgctaactcactga

SEQ ID NO: 23627 - DNA, 120 bp, synthetic construct
  source 1..120: mol_type = other DNA
ctataaatcagggttcccaaaacccaccctcaggtttgattgatttgctagaatggctcatagcatgccaggaaacacttacatacattaaccagtttatttaaaaggatattttaaagg

SEQ ID NO: 23628 - DNA, 120 bp, synthetic construct; identical to SEQ ID NO: 6964
  source 1..120: mol_type = other DNA

SEQ ID NO: 23629 - DNA, 120 bp, synthetic construct
  source 1..120: mol_type = other DNA
aaagtggcaagatgcaaaatcaacatgcaaaaatcaatataatgtctacacattagtaatgaagtagctaagaaagaaatttaaaagcagtcccatttatgatagcgacaaaaacccccc

SEQ ID NO: 23630 - DNA, 120 bp, synthetic construct
  source 1..120: mol_type = other DNA
gtgagccatgcagaagatgggtgatttctgcatatccaactgaggtaccagggtcatctcactggggcttgtcggacagtgggtgcagaacagtgggtgcagtgcaccgagcataagctg

SEQ ID NO: 23631 - DNA, 120 bp, synthetic construct
  source 1..120: mol_type = other DNA
gcgcttctccaatggtctgagcaaatggcacaccaggggattatatcctgcacctggctcggagggtcccaagcccatggagcctccctcattgctagcacagcagtctgagatcaaact

SEQ ID NO: 23632 - DNA, 120 bp, synthetic construct; identical to SEQ ID NO: 6965
  source 1..120: mol_type = other DNA

SEQ ID NO: 23633 - DNA, 120 bp, synthetic construct
  source 1..120: mol_type = other DNA
ctctgagacaaaacttccacaggaacgatcaggcagcaacatttgctgttcagcaatattcactgttctgcagcctctgctgctgatacccaggcaaacagggtctggagtggacctcca

SEQ ID NO: 23634 - DNA, 120 bp, synthetic construct
  source 1..120: mol_type = other DNA
ataaaaccacaaagatggggaaaaaacagagcagaaaaattgaaaattctaaaactcagagtgcctctcctcctccaaaggaatgcagctcctcaccagcaacggaacaaagctagacgg

SEQ ID NO: 23635 - DNA, 120 bp, synthetic construct
  source 1..120: mol_type = other DNA
ggctaactagaataaccaatgcagagaagtccttaaaggacctgatggagctgaaaaccatggcaggagaactacgtgatgcgtgcacaagattcagtagccgattcaatcaactggaag

SEQ ID NO: 23636 - DNA, 120 bp, synthetic construct
  source 1..120: mol_type = other DNA
caaatctacgttggcttggtgtacctgaaagtgacagggagaatggaaccaagttggaaaacactctgcaggatattatccaggagaacttccccaacctagcaaggcagaccaacattc

SEQ ID NO: 23637 - DNA, 120 bp, synthetic construct; identical to SEQ ID NO: 6966
  source 1..120: mol_type = other DNA

SEQ ID NO: 23638 - DNA, 120 bp, synthetic construct
  source 1..120: mol_type = other DNA
ctcctgaaggaagcactaaacatggaaaggaacaactggtaccagccactgcaaaaacatgccaaattgtaaagaccatcgatgctaggaagaaactgcatcaactaacaagcaaaataa

SEQ ID NO: 23639 - DNA, 120 bp, synthetic construct
  source 1..120: mol_type = other DNA
ccatcagtgtgctgtattcaggaaacccatctcatgtgcagagacacacataggctcaaaataaagggatggaggaagatctaccaagcaaatggaaaacaaaaaaaggcaggggttgca

SEQ ID NO: 23640 - DNA, 120 bp, synthetic construct
  source 1..120: mol_type = other DNA
gcacccaatacaggagcacccagatccataaagcaagtcctgagtgacctacaaagagacttagactcccacacaataataatgggagactttaacaccccactgtcaacattagacaga

SEQ ID NO: 23641 - DNA, 120 bp, synthetic construct; identical to SEQ ID NO: 6967
  source 1..120: mol_type = other DNA

SEQ ID NO: 23642 - DNA, 120 bp, synthetic construct
  source 1..120: mol_type = other DNA
accaatgagaacaaagacacagcataccagaatctctgggacacatttaaagcaatgtgtagagggaaatttatagcactaaatgcccacaagagaaagcaggaaagatctaaaattgac

SEQ ID NO: 23643 - DNA, 120 bp, synthetic construct
  source 1..120: mol_type = other DNA
acccttcaaaaaatcaatgaatccaggaggtggttttttgaaaagatcaacaaaattgatagaccgctagcaagactaataaagaagaaaagagagaagaatcaaatagacacaataaaa

SEQ ID NO: 23644 - DNA, 120 bp, synthetic construct
  source 1..120: mol_type = other DNA
acatacaccctcccaagactaaaccaggaagaagttgaatctctgaatagaccaataacaggctctgaaattgagtcaataattaatagcttaccaaccaaaaaaagtccaggaccagat

SEQ ID NO: 23645 - DNA, 120 bp, synthetic construct
  source 1..120: mol_type = other DNA
ttctgataccaaagcctggcagagacacaacaacaaaaaaaagaattttagaccaatatccctgatgaacatcaatgcgaaaatcctcaataaaatactggcaaactgaatccagcagca

SEQ ID NO: 23646 - DNA, 120 bp, synthetic construct; identical to SEQ ID NO: 6968
  source 1..120: mol_type = other DNA

SEQ ID NO: 23647 - DNA, 120 bp, synthetic construct
  source 1..120: mol_type = other DNA
tctggccagggcaatcaggcaagagaaagaaataaagggtattcaattaggaaaagaggaagtcaaattgtccctgtttgcagatgacatgattgtatatctagaaaaccccatcatctc

SEQ ID NO: 23648 - DNA, 120 bp, synthetic construct
  source 1..120: mol_type = other DNA
gagtgaactcccattcacgattgctgcaaagagaataaaatacctaggaatccaacttacaaaggatatgaaggacctcttcaaggagaactacaaaccactgctcaacaaaataaaaga

SEQ ID NO: 23649 - DNA, 120 bp, synthetic construct
  source 1..120: mol_type = other DNA
gactttcttcacagaattggaaaaagctactttaaagttcatatggaaccaaaaaaaaagcctgcattgccaatacaatcctaagccaaaagaacaaagctggaggcatcacgctacttg

SEQ ID NO: 23650 - DNA, 120 bp, synthetic construct
  source 1..120: mol_type = other DNA
atctgatctttgacaaacctgacaaaaacaagaaatggggaaatgattccgtatttaataaatggtgctgggaaaactggctagccatatgtagaaagctgaaacaggatcccttcctta

SEQ ID NO: 23651 - DNA, 120 bp, synthetic construct; identical to SEQ ID NO: 6969
  source 1..120: mol_type = other DNA

SEQ ID NO: 23652 - DNA, 120 bp, synthetic construct
  source 1..120: mol_type = other DNA
aggatataaacagacacttctcaaaagaagacatttatgcagccaatagacacatgaaaaaatgctcatcatcactggtcatcagagaaatgcaaatcaaaaccacaatgagatagcatt

SEQ ID NO: 23653 - DNA, 120 bp, synthetic construct
  source 1..120: mol_type = other DNA
aagtcagtgtggcaattcctcaaggatctagaactagaaataccatttgacccagtgatcccattactgggtatatacccaaaggattataaatcaggctactataaagacacatgcaca

SEQ ID NO: 23654 - DNA, 120 bp, synthetic construct
  source 1..120: mol_type = other DNA
ataaaaaaggatgagttcatgtcctttgcagggacatggatgaagttggaaaccatcattctgaggaaactatcacaaggacagaaaaccaaacactgcatattctcactcataggtgga

SEQ ID NO: 23655 - DNA, 120 bp, synthetic construct; identical to SEQ ID NO: 6970
  source 1..120: mol_type = other DNA

SEQ ID NO: 23656 - DNA, 120 bp, synthetic construct
  source 1..120: mol_type = other DNA
atactaagagggaagtttatagctataagtagctacatcaaaaaaaaaagaaaaacttcaaataaacaatacaacaatgcatcttaaatagctagaaaagcaagggaaaaccaaacccaa

SEQ ID NO: 23657 - DNA, 120 bp, synthetic construct
  source 1..120: mol_type = other DNA
gacaaatcattagccagactaacagaaaaagacagaagacccaaataaataaaatcaaacatgaaaaaagagacattacaactgatactgcagaaattcaaaggatcatcagtggctact

SEQ ID NO: 23658 - DNA, 120 bp, synthetic construct
  source 1..120: mol_type = other DNA
agtaatcagataaaagtcataacaaaaagtctcccagcaaagaaaagccctgatggcttcactgctgaattctaccaaacatttaaagaaaaactaataccaatcctgttcaaactgttc

SEQ ID NO: 23659 - DNA, 120 bp, synthetic construct; identical to SEQ ID NO: 6971
  source 1..120: mol_type = other DNA

SEQ ID NO: 23660 - DNA, 120 bp, synthetic construct
  source 1..120: mol_type = other DNA
caaaaaactgagtatagaaggaacataccttaacataataagccattatgtacaacaaacccacagctagtatcatactaaatgaatggggaaaaattgaaggcctttcctctaagatca

SEQ ID NO: 23661 - DNA, 120 bp, synthetic construct
  source 1..120: mol_type = other DNA
ataatcttatatttggaaaaatctacaagactccaccaaagaactattagaactgataaacaaattcagtaaagttgcataatacaaaatcaacatacaaaaatcagtagtagccaggta

SEQ ID NO: 23662 - DNA, 120 bp, synthetic construct
  source 1..120: mol_type = other DNA
aaaaaattgtaattagctgagtgtggtgacatgtgcctgtggtcccaactacttggcaggctgaggttgtaggttgagactgcagtaagttgtagtcatgccactgcactccagcctggg

SEQ ID NO: 23663 - DNA, 120 bp, synthetic construct; identical to SEQ ID NO: 6972
  source 1..120: mol_type = other DNA

SEQ ID NO: 23664 - DNA, 120 bp, synthetic construct
  source 1..120: mol_type = other DNA
tactgagcattggtttcttaatatataaactgggagtaatatccccaattaataacaatgggacatagcaggatggggttgcccttttcacccttttcatccctcctctcactcactgga

SEQ ID NO: 23665 - DNA, 120 bp, synthetic construct
  source 1..120: mol_type = other DNA
tttaagatgcctactctaaagatatgaagagctaggaaaatggtaattgctgcccttaagcaagcacttggtgcagtggcagaacaaagttggaattttggggttggggtagacaaggaa

SEQ ID NO: 23666 - DNA, 120 bp, synthetic construct
  source 1..120: mol_type = other DNA
caaaacagtacagagataggtaaatcatgctgtggactgtgagtatattcttgatcagccagtgattattccactctctactgcctttaattggagatctacattaagctacacacacaa

SEQ ID NO: 23667 - DNA, 120 bp, synthetic construct; identical to SEQ ID NO: 6973
  source 1..120: mol_type = other DNA

SEQ ID NO: 23668 - DNA, 120 bp, synthetic construct
  source 1..120: mol_type = other DNA
ctcagttctttgtctgtaaatactttcttttgtgtgaaaattaaattaaatagcaatagggcttgtaacacatttgacacaattgctggtactgcaatttgtggtgctaatgacaacgtt

SEQ ID NO: 23669 - DNA, 120 bp, synthetic construct
  source 1..120: mol_type = other DNA
cttttgagtccctctaaaaacagagcatgtgagtagttggtatggggatccgagttgggttggggaaagaggcaattatttttattcccttcagtatgttctatcctctctgatatttct

SEQ ID NO: 23670 - DNA, 120 bp, synthetic construct
  source 1..120: mol_type = other DNA
acaaatttaaactatcccatgatccttacagcagagatatgtggtttcatttccttctagtcagttatatattttcctgctgctgccccattactggatgtgtgccattctctctctctc

SEQ ID NO: 23671 - DNA, 120 bp, synthetic construct; identical to SEQ ID NO: 6974
  source 1..120: mol_type = other DNA

SEQ ID NO: 23672 - DNA, 120 bp, synthetic construct
  source 1..120: mol_type = other DNA
aagatcaatccttccttcccctatatcatcaatttccactctctactggcccatcatttctacaggcagacgtgctgtaatatctccccccaaaaaaacaaacaaaactggactaaacaa

SEQ ID NO: 23673 - DNA, 120 bp, synthetic construct
  source 1..120: mol_type = other DNA
tctgatcccatgtctccctgcaactactgccctatactatggcagtcttcataggacaatctctgagtctattcttcatgtagtcttttgaaacattgcattttttgttgtttgtttgtt

SEQ ID NO: 23674 - DNA, 120 bp, synthetic construct
  source 1..120: mol_type = other DNA
acttggcctgatagtataatgttcttacactttttctttcttttttgcaaacatttttccattttattatgacttttgtcttccaaattatctaatgaattgttcatttctatgattctg

SEQ ID NO: 23675 - DNA, 120 bp, synthetic construct
  source 1..120: mol_type = other DNA
gggacttgttgggtctccttgttatcttctttcacgatattatgaaattttctctcagaattcataaatgtagtggtttcacatttatcttggtaatttttgctaaatgtccgtctctct

SEQ ID NO: 23676 - DNA, 120 bp, synthetic construct; identical to SEQ ID NO: 6975
  source 1..120: mol_type = other DNA

SEQ ID NO: 23677 - DNA, 120 bp, synthetic construct
  source 1..120: mol_type = other DNA
attaggtgtctgagagaagatctcctggcttcaatccagcttcaccacctcctcaacctctctgagtcacatagtagattcctgatgggttttctctgatgattaaattatatattgtct

SEQ ID NO: 23678 - DNA, 120 bp, synthetic construct
  source 1..120: mol_type = other DNA
aggaatattcttgttatatatttttaaaaacgtgtgattttcttcttaggctacatttttagaagataagttttttgcatcaacatgatcttcttgagacattttccaaaaatgctcttt

SEQ ID NO: 23679 - DNA, 120 bp, synthetic construct
  source 1..120: mol_type = other DNA
actacaggagggtgccaccatgcctaattttttttgtattttttgtagagatggggtttcgccatgttgccctggctggtctggaactcctggactcaagcaatctgcccacctcagctt

SEQ ID NO: 23680 - DNA, 120 bp, synthetic construct; identical to SEQ ID NO: 6976
  source 1..120: mol_type = other DNA

SEQ ID NO: 23681 - DNA, 120 bp, synthetic construct
  source 1..120: mol_type = other DNA
aagaaaacaagaagcctctgatatctaggaactgatctgacacttatggctgggactccttgttatatgaagctggcccaatgttcattgttaagccatgttattctcctattggaccac

SEQ ID NO: 23682 - DNA, 120 bp, synthetic construct
  source 1..120: mol_type = other DNA
ttgtctaccaattacagctttattctgctctagtccaccctcactagagctaagatttgttgagacattcaattacagaattgcccctgcttcctgacgagtacccaatctagagtgaag

SEQ ID NO: 23683 - DNA, 120 bp, synthetic construct
  source 1..120: mol_type = other DNA
accagtaataaacccaacttcttcacccactaggatatgttcctagtggactttggaagaaagcttcggacgcattattattttgtctataaattttttatgtgtctttgaggttgatta

SEQ ID NO: 23684 - DNA, 120 bp, synthetic construct; identical to SEQ ID NO: 6977
  source 1..120: mol_type = other DNA

SEQ ID NO: 23685 - DNA, 120 bp, synthetic construct
  source 1..120: mol_type = other DNA
ggatacttatcttctccttgtattcacctggttaaagcaaacaataacaacagaattccagtgcaatatagacaatgattagccctggcaatgggcatttttgaacacttaaaatgttga

SEQ ID NO: 23686 - DNA, 120 bp, synthetic construct
  source 1..120: mol_type = other DNA
gtgacttctcgatgaagataatttaatatatattcaatctgagagtcccaccatatattttgggggagattgaaaactatgagcactctagatatgcactgttaaatatggtaactactg

SEQ ID NO: 23687 - DNA, 120 bp, synthetic construct
  source 1..120: mol_type = other DNA
ggtttcaggttgtatctaacctttaagaaattatcacttgctaggacttccagtactatgttgaaagaagtggtgaaagtgggcgtcctcgtcttgttccagttctcagggggaatgctt

SEQ ID NO: 23688 - DNA, 120 bp, synthetic construct; identical to SEQ ID NO: 6978
  source 1..120: mol_type = other DNA

SEQ ID NO: 23689 - DNA, 120 bp, synthetic construct
  source 1..120: mol_type = other DNA
cccctcccttcctcctcctgctccactgatccctactcaggcttctttcgctgaagaattccagaagggacagaactaaggatgaagtgtggcatttgaacagggtttacggctagatcc

SEQ ID NO: 23690 - DNA, 120 bp, synthetic construct
  source 1..120: mol_type = other DNA
gtttggtcagggagaccctgtgatcaccccagtgcccagagaaggaaactgaagcccagggttctgcagaggcttgcccaggctacacagatcttcagctagattcgaatagttaaaaat

SEQ ID NO: 23691 - DNA, 120 bp, synthetic construct
  source 1..120: mol_type = other DNA
ggagtatcctgggcccagggcccacgaaaatggctttcactgttggaggggatcttgaatccagaatctgttcccaaaaaagagaaagaaaagcagatttgggtgacctcaaaagtttca

SEQ ID NO: 23692 - DNA, 120 bp, synthetic construct; identical to SEQ ID NO: 6979
  source 1..120: mol_type = other DNA

SEQ ID NO: 23693 - DNA, 120 bp, synthetic construct
  source 1..120: mol_type = other DNA
aattaaaaccattatgagatattactacacccctatcagaatgaataaaataagaaatagaaataacaccacatgctggatgtggagaaaatggctgaatcactcattgctggtgggaat

SEQ ID NO: 23694 - DNA, 120 bp, synthetic construct
  source 1..120: mol_type = other DNA
cagcatacagcatataaaggttcgtagcagagcagagacctgagcaggaaaaaaaaaaaaaaaaaaaaaacccactgtcacagccagacagaatcagttctggaaactcccaaaagaact

SEQ ID NO: 23695 - DNA, 120 bp, synthetic construct
  source 1..120: mol_type = other DNA
agaccaaaattgagaagcaatcttttaatcacagtgtttgcaaacacatagccaggaaagaatgttagcacagaggtcagaaaggcagtcactcatggagctaggaaagggaagaggtgt

SEQ ID NO: 23696 - DNA, 120 bp, synthetic construct; identical to SEQ ID NO: 6980
  source 1..120: mol_type = other DNA

SEQ ID NO: 23697 - DNA, 120 bp, synthetic construct
  source 1..120: mol_type = other DNA
gtgatacaacatgagggaccccacctcaccccccaaaataggtactgaacaaaggttcctattcccagaaaccccctcttccatctttggattcatccctgagattgcagaatgcttctg

SEQ ID NO: 23698 - DNA, 120 bp, synthetic construct
  source 1..120: mol_type = other DNA
cttcttcagagaggaactcttaatgaagctgacccaatttgctctggagagcactggaggcacctgctaagcctctcccttcagtggagagaaattccagtggaatcccagagacccttg

SEQ ID NO: 23699 - DNA, 120 bp, synthetic construct
  source 1..120: mol_type = other DNA
ctagcttactaggcaagtaaccacagtgtgcctccattaattaataaatccccaaaacactggtcttatgaacagtgtattgatcagggctctccacagaagcagaatgaataggcgaca

SEQ ID NO: 23700 - DNA, 120 bp, synthetic construct; identical to SEQ ID NO: 6981
  source 1..120: mol_type = other DNA

SEQ ID NO: 23701 - DNA, 120 bp, synthetic construct
  source 1..120: mol_type = other DNA
gggaaatttagttgtggaaattgaattttgttattttatttttgtctttgcttttctgtgtgagtgaaggagtataaggcaaatttctgagcacacggggcatgcactaaaggggtttca

SEQ ID NO: 23702 - DNA, 120 bp, synthetic construct
  source 1..120: mol_type = other DNA
aaatttctgagcacacggggcatgcactaaaggggtttcatttggcatttggagccagttttgtcacactataggaaaactaaaccgttatttaagaacttccctgccagctctcacgtt

SEQ ID NO: 23703 - DNA, 120 bp, synthetic construct
  source 1..120: mol_type = other DNA
acagaagcctccctctacttcacagaagatgactaggacatgctcatccctgggatagaaaatccattggacttggagactcagtgagttgtattcccgatctcaccactggagggaggt

SEQ ID NO: 23704 - DNA, 120 bp, synthetic construct
  source 1..120: mol_type = other DNA
ggaatgacaaagcctgcctggggtcacaggaaaagaggagagaggcagactgaaggaagcccaagactacaaagtgaaagaaaatgccttttagtcactcaagacattgtcagacacaga

SEQ ID NO: 23705 - DNA, 120 bp, synthetic construct; identical to SEQ ID NO: 6982
  source 1..120: mol_type = other DNA

SEQ ID NO: 23706 - DNA, 120 bp, synthetic construct
  source 1..120: mol_type = other DNA
gctacatgtgggcttccaaaggtaatcccaggtgccacctctcctccatacttactaggaatcccaggcccttccctgaagtgacaccatcctgcattctttgtacctctctttccactt

SEQ ID NO: 23707 - DNA, 120 bp, synthetic construct
  source 1..120: mol_type = other DNA
agtcccatagttcagaaaggaacagaaatgccagctgaataaaaatttatttcgtgctctctgggcatgtatttgagaacaataacattgtttccggtctcaatgcactttcaccacatc

SEQ ID NO: 23708 - DNA, 120 bp, synthetic construct
  source 1..120: mol_type = other DNA
ccagaacaggatcttgcaagggccctaagagtcagagaagacagcagcccctcgtgttggattctcctgcctgcccaggaaactgggtgggaaccattcagattcttcctgcatgaaaag

SEQ ID NO: 23709 - DNA, 120 bp, synthetic construct; identical to SEQ ID NO: 6983
  source 1..120: mol_type = other DNA

SEQ ID NO: 23710 - DNA, 120 bp, synthetic construct
  source 1..120: mol_type = other DNA
gaagatgaccttgacaagagccaccataagtttaaaggtatggagaagacatttactcaactaagggacagttggtgaattcatttgttaaggttcatggaaagtaagaaaatgaaaacg

SEQ ID NO: 23711 - DNA, 120 bp, synthetic construct
  source 1..120: mol_type = other DNA
gagtagcattcacgtaagtcagtaattttaactctggctctcaatgcactcaaaatctccacctgcctacatgaggaggatgaaaatgtgtgtgctgtggaaggtactatggactgaagg

SEQ ID NO: 23712 - DNA, 120 bp, synthetic construct
  source 1..120: mol_type = other DNA
ataaagaacaacatatgaagtaaaaggcttctatgtggttgtttgccaggaagctggtggctaggaaggattgagagggagtagaggggagaccatgttttgtaacaggggaaatgaaag

SEQ ID NO: 23713 - DNA, 120 bp, synthetic construct
  source 1..120: mol_type = other DNA
gagtctactgaaatgtgggcagggagaagaggaggccttcggaccttttacctgagcagcctggtttactctaggctctgtcttgtttcctgtccagagattaatgcaacaaactgtctc

SEQ ID NO: 23714 - DNA, 120 bp, synthetic construct; identical to SEQ ID NO: 6984
  source 1..120: mol_type = other DNA

SEQ ID NO: 23715 - DNA, 120 bp, synthetic construct
  source 1..120: mol_type = other DNA
agcatttccttacttcacagcaagtgcaaacatgatgggaaggcatagagaaaaaggaagaaattatagggaaatgtgcttatttagggggaggcaatactgcgggaggggtacaacaga

SEQ ID NO: 23716 - DNA, 120 bp, synthetic construct
  source 1..120: mol_type = other DNA
ttatactttgtcattggaatttaagggaaaagaaaggaaattaataaataaaaacaggctgcatgtggtaaaatcaatagtcagccctgggacttgtgtttgcaaaatgctttatccagg

SEQ ID NO: 23717 - DNA, 120 bp, synthetic construct
  source 1..120: mol_type = other DNA
ctgtgcctgcagatgagaaactgcagtttgcaccactagcctccagcacagagattccatcccagctcagtatttagtatttagagatgtagtatttagtatttagagattcctaaacac

SEQ ID NO: 23718 - DNA, 120 bp, synthetic construct; identical to SEQ ID NO: 6985
  source 1..120: mol_type = other DNA

SEQ ID NO: 23719 - DNA, 120 bp, synthetic construct
  source 1..120: mol_type = other DNA
ctgaaaaactaagctgaagtactaagtacattcagctttcactaagctgaaacagcaaagcgctgaaacagcaaaccgcaggcataacagaaaaacctcaacttaaatagtgctgagctg

SEQ ID NO: 23720 - DNA, 120 bp, synthetic construct
  source 1..120: mol_type = other DNA
agcggtggccccgggctcagggaaccagcgctgcttctctccgaggctcgcggcctgagaaaccttccgctccgaatgcgggctggcctctccgggaagccttgaaactcaactcctggg

SEQ ID NO: 23721 - DNA, 120 bp, synthetic construct
  source 1..120: mol_type = other DNA
gcacttggtgactagagaccccatgagcccccaccctccagcctggggcgggatagcccaatcggatgctggggggtccgtttggaaaccactctctgctttgaggacacgcgcggagct

SEQ ID NO: 23722 - DNA, 120 bp, synthetic construct; identical to SEQ ID NO: 6986
  source 1..120: mol_type = other DNA

SEQ ID NO: 23723 - DNA, 120 bp, synthetic construct
  source 1..120: mol_type = other DNA
ctccacctccctgcctctcttaaggaggacctggcccattaggaagcccggggcgttctgtggactgggtggtcaaaaatggtgtgtggaggagggagtcaattgagattagacgtgaaa

SEQ ID NO: 23724 - DNA, 120 bp, synthetic construct
  source 1..120: mol_type = other DNA
gcaagaggaaggaagattgagtcgcagttgacttgtggattttatcggttttagtccctgtgtgaccgccagaagtctgcagctttatccttgatgagttctgaaggcccctgaggagag

SEQ ID NO: 23725 - DNA, 120 bp, synthetic construct
  source 1..120: mol_type = other DNA
ggagtgagggtatctgaaaatattcacatgagaaaaggtcaagtccatttttgctatcctgtactgaacacagatcaattaactggtcccaggattgatagcaacaggcctataactggt

SEQ ID NO: 23726 - DNA, 120 bp, synthetic construct
  source 1..120: mol_type = other DNA
tgtcaacacctggagcgcagtgcaggaagaatgcaggggcgcttggtggggaggtgagtgagtgcagagggtctccgggaactccttgggcctttggggtagctccctctcagactgtcc

SEQ ID NO: 23727 - DNA, 120 bp, synthetic construct; identical to SEQ ID NO: 6987
  source 1..120: mol_type = other DNA

SEQ ID NO: 23728 - DNA, 120 bp, synthetic construct
  source 1..120: mol_type = other DNA
ctgcagaccccgctcctcctgcgaggccccagacgaagcccgacccccagctgcctgcgcagcctccaggcaggggtcgcggggtgcttcgacgagagagtctgggccaaagcgccaaaa

SEQ ID NO: 23729 - DNA, 120 bp, synthetic construct
  source 1..120: mol_type = other DNA
atcagggaatggagatggcaggggacgaggcctaagagatgtagacagcaggtcctgtctgcttaggtcgcaaaggggaagaaggggcgggactcggggtcctggactggggctgggaag

SEQ ID NO: 23730 - DNA, 120 bp, synthetic construct
  source 1..120: mol_type = other DNA
agacatccttgtaacccaatatagttacagctccgacgccatgttcttcctgggtccagctccaacgccatgtccttcctgggtccctccaaagtagggttggaggatcaactagtggat

SEQ ID NO: 23731 - DNA, 120 bp, synthetic construct; identical to SEQ ID NO: 6988
  source 1..120: mol_type = other DNA

SEQ ID NO: 23732 - DNA, 120 bp, synthetic construct
  source 1..120: mol_type = other DNA
ttgggccacacgggggcgctgccgctctgcgctcggattctgatgagccgctctggagaggatggggcggtggtctgagtaagacacagattgttgatccagaaaggatgtatcaatgag

SEQ ID NO: 23733 - DNA, 120 bp, synthetic construct
  source 1..120: mol_type = other DNA
cctccttgcaaaccctccctccagccttttcatggcaacactccaggaaaatggaaagttgatcatttttttcttccactccttaatcctttcctgactgctacttttaaataattttat

SEQ ID NO: 23734 - DNA, 120 bp, synthetic construct
  source 1..120: mol_type = other DNA
tgttaacatctctcattactatggtccatttgtcacagctaatgaagccattttcataccttattattactaaactgcagactttatttggagttcattagcgttcccctaatgtccttt

SEQ ID NO: 23735 - DNA, 120 bp, synthetic construct
  source 1..120: mol_type = other DNA
attgggaagtactgaccagatatattgtaaaatgtccctcaaactgaatttagttggggtgtagatcatggttagactatggttatgggtgtttagatgaggtgaagtgctattctccaa

SEQ ID NO: 23736 - DNA, 120 bp, synthetic construct; identical to SEQ ID NO: 6989
  source 1..120: mol_type = other DNA

SEQ ID NO: 23737 - DNA, 120 bp, synthetic construct
  source 1..120: mol_type = other DNA
gctctaagagcaaatccattccttgagtcctccagctctggcagctgcagggcattggtcagcgttctttggcttgtagccccattgctctagtctctgcctcattcttcacatcacctt

SEQ ID NO: 23738 - DNA, 120 bp, synthetic construct
  source 1..120: mol_type = other DNA
tgcaaagaccctttttttccaaacaacttgacattcacagctgctgggcactaagacagaaacatatctttatggggtccaccattcaacccactacatctggctaagctaatatttcca

SEQ ID NO: 23739 - DNA, 120 bp, synthetic construct
  source 1..120: mol_type = other DNA
tgatcctgaagaaagattatctttggaagagacttatactgagtttgttgcttgatttttcctctgcttctgaatatcttttgagagcaaaatttactttctaaaatggtaaggatgagt

SEQ ID NO: 23740 - DNA, 120 bp, synthetic construct; identical to SEQ ID NO: 6990
  source 1..120: mol_type = other DNA

SEQ ID NO: 23741 - DNA, 120 bp, synthetic construct
  source 1..120: mol_type = other DNA
ctcttctgggactcctgtcagctatatgttcaaaaattattgtcagtggctcatgcctgtaatcccagcaccttgggaggccgaggtggaaagattgcttaagctcatgagtttgaaacc

SEQ ID NO: 23742 - DNA, 120 bp, synthetic construct
  source 1..120: mol_type = other DNA
gagttggaggccaacctgaccaacatggagaaaccccgtgtctaataaaaatacaaattcagccagatgtggttgcgcatacctgtaatcccagctactcgggaggctgcggcaggagta

SEQ ID NO: 23743 - DNA, 120 bp, synthetic construct
  source 1..120: mol_type = other DNA
aaattaaggtcgtctcttgtgtactttttaaaatcaatggatagagtatagcaaagttaatttggatcttcaatggccatccttggggtcttttgagttccccaaacttgtctttcttaa

SEQ ID NO: 23744 - DNA, 120 bp, synthetic construct
  source 1..120: mol_type = other DNA
tctctactaaaaacacaaaaaaattagctgggcatggtggcaggtgcctgtagtcccagctactctgggaggctgaggcagaagaatggtgtgaatccgggaggcggagcttgcagtgag

SEQ ID NO: 23745 - DNA, 120 bp, synthetic construct; identical to SEQ ID NO: 6991
  source 1..120: mol_type = other DNA

SEQ ID NO: 23746 - DNA, 120 bp, synthetic construct
  source 1..120: mol_type = other DNA
tgcagtctcgactcactgaaacctccacctcctgggttcaagcaattatcctgcctcagcctcccgagtagctgggattacaggtgcccaccaccatgcccagctaattttttgtatttt

SEQ ID NO: 23747 - DNA, 120 bp, synthetic construct
  source 1..120: mol_type = other DNA
tgctatcttgtgttaggctgttcttgcattgctataaagaatacatgagactgggtaatttataaagaaaaatgagtttaattggctcacagttctgcaggctttatgggaagcacggtg

SEQ ID NO: 23748 - DNA, 120 bp, synthetic construct
  source 1..120: mol_type = other DNA
catagcgaaagcaggaacgagagagagagtgggaggggaaggacgccacacacttttaaacaaccagctctcactatttcaaagacagcaccaaggggacggtgctaaaccattcctgag

SEQ ID NO: 23749 - DNA, 120 bp, synthetic construct; identical to SEQ ID NO: 6992
  source 1..120: mol_type = other DNA

SEQ ID NO: 23750 - DNA, 120 bp, synthetic construct
  source 1..120: mol_type = other DNA
acaactgggattaaaggtttgctcaggaattctgagcaataaactatatagtgattccaagacatcagtggttccaaatccctatatctcattaaactcacaacctattgataggaggtt

SEQ ID NO: 23751 - DNA, 120 bp, synthetic construct
  source 1..120: mol_type = other DNA
tggaaggccaacaattcacctggacagtaatgcctcttgcttttactgaaaacccttcctgtgtttttcaaatattaaaggaacacttggaggagatagtttctccttaaggttccacct

SEQ ID NO: 23752 - DNA, 120 bp, synthetic construct
  source 1..120: mol_type = other DNA
tgcagctagtgaaaactcagaagaaatatttgggacacttaacttcagaaaatggattacatttagacccagattggcactttgtaatttcttcagtcaagaaccaagtgccacagaaaa

SEQ ID NO: 23753 - DNA, 120 bp, synthetic construct; identical to SEQ ID NO: 6993
  source 1..120: mol_type = other DNA

SEQ ID NO: 23754 - DNA, 120 bp, synthetic construct
  source 1..120: mol_type = other DNA
ttgtgacactgcactccaggctgggtgacagagtgagatcctcatctaaaaaaagacatagatggtataagaagatataaatagaaacaacaaaaagttaaaaagaaagaggatggagtt

SEQ ID NO: 23755 - DNA, 120 bp, synthetic construct
  source 1..120: mol_type = other DNA
aaaaaatgcaacagatatacaaaaaataaacaacaggaaattaaatcatatcaccagagaatcaccttcactaaaaggaagacataaaggaaggaaagaaggaagagaaaacaagcaaaa

SEQ ID NO: 23756 - DNA, 120 bp, synthetic construct
  source 1..120: mol_type = other DNA
aggacccaatgatctgttgcctacaagaaacacactcacctataaacacacacatagactgaaaataaagggatggaaaaagattggtcatgccaatggaaatcaaaaaagtgcaggagt

SEQ ID NO: 23757 - DNA, 120 bp, synthetic construct; identical to SEQ ID NO: 6994
  source 1..120: mol_type = other DNA

SEQ ID NO: 23758 - DNA, 120 bp, synthetic construct
  source 1..120: mol_type = other DNA
cttctcaggacatggatcattctcaaagacaggccaaatatttggtcacaaaacaagtcttagaacattcaaaaaattgaaataatatcaaacatcttctctgacaacaatggaatagaa

SEQ ID NO: 23759 - DNA, 120 bp, synthetic construct
  source 1..120: mol_type = other DNA
agggagaggggtggagcaagatggctagatagaagacttcactaaccgtccccctgcaacaaagataccaatctaacaactatctacatttaaaaaaagacaaaatcaccttcactagaa

SEQ ID NO: 23760 - DNA, 120 bp, synthetic construct
  source 1..120: mol_type = other DNA
agcagccctgcagtgtggagaatcatgcacttgggagagggagaacacagcgattgtgacacattgcgttgaactcagtggtgccctgatatagagttatattggaagaatggagcaatg

SEQ ID NO: 23761 - DNA, 120 bp, synthetic construct; identical to SEQ ID NO: 6995
  source 1..120: mol_type = other DNA

SEQ ID NO: 23762 - DNA, 120 bp, synthetic construct
  source 1..120: mol_type = other DNA
ctcctggccaggacccacactcaccccacctaacctctctcttttgatcagtcccatagtttagaaaagaacagaaatgccagctgtggtcaggtgttttaaaaatttattcagtgctct

SEQ ID NO: 23763 - DNA, 120 bp, synthetic construct
  source 1..120: mol_type = other DNA
taggacacctatatggtcaatcaatcaaccagggaaagaaactaaggtccagagccctaaggatgcttgcccaaatcaccctgattttggcagaacaggatcttccaagggccttaagag

SEQ ID NO: 23764 - DNA, 120 bp, synthetic construct
  source 1..120: mol_type = other DNA
gccccagttgttcctgctgggtgtgacatcgatgcccgaatccaaccctgtaaaatagggtgaaattcagatattgcaagtcatgaaaaattttctcctgatagcaaagttgaaggataa

SEQ ID NO: 23765 - DNA, 120 bp, synthetic construct; identical to SEQ ID NO: 6996
  source 1..120: mol_type = other DNA

SEQ ID NO: 23766 - DNA, 120 bp, synthetic construct
  source 1..120: mol_type = other DNA
gaaaatgaaaatactaggcaatgatcaaatcttgaaaacttcagcatatgtggaaagaaaaactaagagagtttaccatgtggctcaggtctgagtagcagtcacgtaagtcagtaattt

SEQ ID NO: 23767 - DNA, 120 bp, synthetic construct
  source 1..120: mol_type = other DNA
aaaatggaaacatttgaagtggcataaatgtatattatcaagagacataaagataaagaacaaaatatgaagtaaaaggcttccatgtggttgcttgccaggaagctggtggctaggaag

SEQ ID NO: 23768 - DNA, 120 bp, synthetic construct
  source 1..120: mol_type = other DNA
catgcagagaacagggttccacgcagtggtccaggatctcagggatttactgtggctgaggccacctgtccccaggacaagcccttggcactgagtctactgaaatgtgaggagggagaa

SEQ ID NO: 23769 - DNA, 120 bp, synthetic construct; identical to SEQ ID NO: 6997
  source 1..120: mol_type = other DNA

SEQ ID NO: 23770 - DNA, 120 bp, synthetic construct
  source 1..120: mol_type = other DNA
cagcgcagagggagaaatctcctaagagtaggaaggaataacagaattaggaagcgtttccttacttcacagtgagtgcaaacatgatgggaaggcatagagaaaaagtaagaaattata

SEQ ID NO: 23771 - DNA, 120 bp, synthetic construct
  source 1..120: mol_type = other DNA
aggtataacgcttgactagagaatggatacttgaggatcagtatagttactagatgaagaggactacatacattttaaggacattgatgtacattatagtgtatcattggaagttaaggg

SEQ ID NO: 23772 - DNA, 120 bp, synthetic construct
  source 1..120: mol_type = other DNA
aaaagaaaagaaacttcataaataaaaacaggctgcatgtggtaaaatcaataatcagccctgggacttgtgttttcaaaacgctttatccaggtgtgacacctctgacatcctggattc

SEQ ID NO: 23773 - DNA, 120 bp, synthetic construct
  source 1..120: mol_type = other DNA
cctaacctttctgaacctcatgcggaaaaaatgtttgcaccactagcctccagcacagagattccatcccagctcagtatttagtatttagagatttagtatttagtatttagagattcc

SEQ ID NO: 23774 - DNA, 120 bp, synthetic construct; identical to SEQ ID NO: 6998
  source 1..120: mol_type = other DNA

SEQ ID NO: 23775 - DNA, 120 bp, synthetic construct
  source 1..120: mol_type = other DNA
agcctctctacactaagctgaaacactaaatacactaagtgttgattaagtagactaggtacactaagtggtaaacttggtaaacttagagcactaagtacactaagtacaataaatggt

SEQ ID NO: 23776 - DNA, 120 bp, synthetic construct
  source 1..120: mol_type = other DNA
tagtgtggagcggccactggtttccgcggctcgtagtcgcgcccgcgaggaaacgccagggaggcttcctgccccgcccagcggtggcccagggcacagggaaccacggctgcttctctc

SEQ ID NO: 23777 - DNA, 120 bp, synthetic construct
  source 1..120: mol_type = other DNA
gccttcttcaaagccgagctgttcgccgccctcgaggcccaggcgagcctggaggagggaccgggtgcgctcagatggggcccttggtgactggcgaccccatgagcacccaccctccag

SEQ ID NO: 23778 - DNA, 120 bp, synthetic construct; identical to SEQ ID NO: 6999
  source 1..120: mol_type = other DNA

SEQ ID NO: 23779 - DNA, 120 bp, synthetic construct
  source 1..120: mol_type = other DNA
ggctaggtcaggccccagattcgggtttgcccagcgggcgctcggcgtccacgctccctctccaccttcttgcctctctaaggaggacctggcccactaggaagcccggggcgttctgtg

SEQ ID NO: 23780 - DNA, 120 bp, synthetic construct
  source 1..120: mol_type = other DNA
aggtgactaagtgaggggcacaggtgcaacagaaagaaagactgatttgcaattgacttgtaggtgtaatcggttttagtccctatttgaccaccagaggtctgcagctctatccttggt

SEQ ID NO: 23781 - DNA, 120 bp, synthetic construct
  source 1..120: mol_type = other DNA
gaaaaaagttacacagagaaaaggtcaagtccatttttgctatcctgtactgaacacagatcaattaactggtcccaggattgatagcaacaggcctataactggtctcctggttcctat

SEQ ID NO: 23782 - DNA, 120 bp, synthetic construct; identical to SEQ ID NO: 7000
  source 1..120: mol_type = other DNA

SEQ ID NO: 23783 - DNA, 120 bp, synthetic construct
  source 1..120: mol_type = other DNA
tatggggtcccttgcatttgcggcaaaatggagagggagatgagaggcaaggagtactggccctcacatggaaacctatagcacactgcccaaagggaatgggaagggaaacacagccac

SEQ ID NO: 23784 - DNA, 120 bp, synthetic construct
  source 1..120: mol_type = other DNA
gactgtgggacactctctgcactcttattcttgtaattctcttctctccggatggcctcctttcccttggagtgcagcagtggccatcagattcttgggctgaaggtcactgggtgactg

SEQ ID NO: 23785 - DNA, 120 bp, synthetic construct
  source 1..120: mol_type = other DNA
aaacataaatggaatgatgtttatggaaccaattgattaacgtggaaaagtatgggcttcccagttttctgcccttcgtgagaacttaatcctgaaacactgatctcatgtcaaccttct

SEQ ID NO: 23786 - DNA, 120 bp, synthetic construct; identical to SEQ ID NO: 7001
  source 1..120: mol_type = other DNA

SEQ ID NO: 23787 - DNA, 120 bp, synthetic construct
  source 1..120: mol_type = other DNA
ggggcttttgtgtcgggtctggcctggctttctgtccgcaagtttttgccctgctccgcggcgctcctccggggcgggagccgcgaggcccgggcgagctcgggcgggaccggaggctgc

SEQ ID NO: 23788 - DNA, 120 bp, synthetic construct
  source 1..120: mol_type = other DNA
gttgatgagtgagttggtcgccattaaagtgaggctcccggcccggagcagcgcagagaccaggacgcgcagcctcgcctgcagcactcggccctacctctaccccgccgctacctctac

SEQ ID NO: 23789 - DNA, 120 bp, synthetic construct
  source 1..120: mol_type = other DNA
tcgaggtaaccgcgctcactaatgaagatctcgtggacccgcttgcgaggtataaagagaaacctagtcctactggagaacaaccaggaagcgatgtgagaaaaaaaccttgaaaccgaa

SEQ ID NO: 23790 - DNA, 120 bp, synthetic construct; identical to SEQ ID NO: 7002
  source 1..120: mol_type = other DNA

SEQ ID NO: 23791 - DNA, 120 bp, synthetic construct
  source 1..120: mol_type = other DNA
agactagagtaaagatcaagcttgagaagacagaaccactaaagggcagagcaaagactccagtaacactgaagaaaagaagacttgagatagtcagagctattctcacgctggaataac

SEQ ID NO: 23792 - DNA, 120 bp, synthetic construct
  source 1..120: mol_type = other DNA
tagacagtgcagtaatttcagagagtgctcccacagctgaaactctaatggcttcaggacacaaaaccttcgttgtcagtaggatgactggaaatttcaagcatgcagctcctattctgc

SEQ ID NO: 23793 - DNA, 120 bp, synthetic construct
  source 1..120: mol_type = other DNA
acaccaacaggaattgctgcagaccagtcaaaggggctacaggcaggccattagaactcactgagttcaggatggcagaatctttttcatctaaatatgttcctaagtgtgttcccttgg

SEQ ID NO: 23794 - DNA, 120 bp, synthetic construct; identical to SEQ ID NO: 7003
  source 1..120: mol_type = other DNA

SEQ ID NO: 23795 - DNA, 120 bp, synthetic construct
  source 1..120: mol_type = other DNA
ttttgaactctggactagcaggagatcacttcatgccatatgaaaatcttttatagctctgaaacttttttgtaggctttttaaaattttttcttctcattgtccaaacccatgcagggt

SEQ ID NO: 23796 - DNA, 120 bp, synthetic construct
  source 1..120: mol_type = other DNA
cacacacacacacacatatatatacatatatacacatatatatacatatatacacacatatatatacatatatacacacatatacatatatacacatatatacatatatacacatatata

SEQ ID NO: 23797 - DNA, 120 bp, synthetic construct
  source 1..120: mol_type = other DNA
tatatatgaaacaagaagggaaaaacatggtaatatagtatgaagttacacatttaaatactttgaattcttacagaaaagagtggaagaattatcttctactgaataaaaactttacag

SEQ ID NO: 23798 - DNA, 120 bp, synthetic construct; identical to SEQ ID NO: 7004
  source 1..120: mol_type = other DNA

SEQ ID NO: 23799 - DNA, 120 bp, synthetic construct
  source 1..120: mol_type = other DNA
ttgcaagaaactggtgtctctgttcccaaaggatatgtggcaaagtgaccagatgaagcttatgcaattgccaaaaaattaggttcaaaagatgttgtgatgaaggcacaggttttagct

SEQ ID NO: 23800 - DNA, 120 bp, synthetic construct
  source 1..120: mol_type = other DNA
tgttccttcacaaatgattaggaaacagttgtttaccaagcaaatgggagaaaagggcagaatatgcaatcaggtattggtctgtgagtgaaaatatcccaagagagagtgctactttgc

SEQ ID NO: 23801 - DNA, 120 bp, synthetic construct
  source 1..120: mol_type = other DNA
tgtagaaggtatcaaagaggaataagctctccagcttgcacagaagatgggatttccatctaatattgtggcttcagcagcagaaaacatgatcaagctttacagcctttttctgaaata

SEQ ID NO: 23802 - DNA, 120 bp, synthetic construct; identical to SEQ ID NO: 7005
  source 1..120: mol_type = other DNA

SEQ ID NO: 23803 - DNA, 120 bp, synthetic construct
  source 1..120: mol_type = other DNA
cagaagcatttaagcctatcacttcagataaaaaggtactggctattctggtcaacatttgtggaggaatcatgcactgtgatattacagcaaagggtatagtcatggcagtaaaaagtt

SEQ ID NO: 23804 - DNA, 120 bp, synthetic construct
  source 1..120: mol_type = other DNA
cttaaaatacttgcttgtgatgatttggtggaagctgctagagtgcttgtaaagctctctgaaatagtgaagcaaagcaagcgcatgtggatgtgaaatttcaattgccaatatgatctg

SEQ ID NO: 23805 - DNA, 120 bp, synthetic construct
  source 1..120: mol_type = other DNA
gtgtggagattgtagttgccatctaggcacacaaacatttaaaagcatttggtttgcatttaattctaccattcagaatggactgtttgtaagaagcatgtataatgcaaatatcttctt

SEQ ID NO: 23806 - DNA, 120 bp, synthetic construct; identical to SEQ ID NO: 7006
  source 1..120: mol_type = other DNA

SEQ ID NO: 23807 - DNA, 120 bp, synthetic construct
  source 1..120: mol_type = other DNA
aggaaacgctgataactgcaagaattcatgattccatggtattaagaagcacctgtaggtttgtttcaaatagaggcatattaaccaagggaaaaaaatagtaatgttattattgtagcc

SEQ ID NO: 23808 - DNA, 120 bp, synthetic construct
  source 1..120: mol_type = other DNA
ctttagagaactgttggctggctgtacatgtttttaaaagctgttagctagctatgaggctacagctgaaaattacactttttatgagaaattgtaaacactggtcttatgtttcatctg

SEQ ID NO: 23809 - DNA, 120 bp, synthetic construct
  source 1..120: mol_type = other DNA
aagcaagtgttaatactctgggcttttttatgtttgtttgtttgtttgttttttgagatggagtctcgctctattgcccaggctggagtgcagtggtgctatctcggctcactgcaagct

SEQ ID NO: 23810 - DNA, 120 bp, synthetic construct; identical to SEQ ID NO: 7007
  source 1..120: mol_type = other DNA

SEQ ID NO: 23811 - DNA, 120 bp, synthetic construct
  source 1..120: mol_type = other DNA
aagcctccaagaagtttgggatcatgttaaatgaccaaacttaagaataattgatgttcctgaggaagaagagaaatctgcaagtttgaaaattttatttgagggaataattgaggaaaa

SEQ ID NO: 23812 - DNA, 120 bp, synthetic construct
  source 1..120: mol_type = other DNA
gatgaaggaaagaatcttaagagttgtgaggcaaaggcatcaagtaacctgtaaaggaaaacctatcggattaacagcagatttatcagcagaaaccctacaagctagaagggattgggg

SEQ ID NO: 23813 - DNA, 120 bp, synthetic construct
  source 1..120: mol_type = other DNA
gtcacccaggctggggtgcagtggcacaatctcagctcactgcaagctccgcctcctgggttcatgccattctcctgcctcagcctcccaagtaactgggactgcaggcgcccaccacca

SEQ ID NO: 23814 - DNA, 120 bp, synthetic construct; identical to SEQ ID NO: 7008
  source 1..120: mol_type = other DNA

SEQ ID NO: 23815 - DNA, 120 bp, synthetic construct
  source 1..120: mol_type = other DNA
aatagaatagtacctcacatctcaatactaacactcaatgtaaatggcctaaatgctccacttgaaagatatggaattgcaaaatggataagaattccccaactaagtatttgctgtctt

SEQ ID NO: 23816 - DNA, 120 bp, synthetic construct
  source 1..120: mol_type = other DNA
atagactttaaagcaacaacagtttaaaaagacaaagagggacattatataatgacaaaaggactagtctgacaggaaaatatcacaatcctaaatatatgtgcacctaatactggagct

SEQ ID NO: 23817 - DNA, 120 bp, synthetic construct
  source 1..120: mol_type = other DNA
aacaaagaaacaatggacttaaactctaccctagaacaaatggatttaacagatatttatagaacactccacccaacaactgcagaatgtacattctattcattagcacatggaacattc

SEQ ID NO: 23818 - DNA, 120 bp, synthetic construct; identical to SEQ ID NO: 7009
  source 1..120: mol_type = other DNA

SEQ ID NO: 23819 - DNA, 120 bp, synthetic construct
  source 1..120: mol_type = other DNA
cttggtgtggtggtgggtacctgtagtcccagctactcaggaggctgagacaggagaattgctttgcttgaacccgggaggtagagattgcagtgaggcgagatggtgccactgcactct

SEQ ID NO: 23820 - DNA, 120 bp, synthetic construct
  source 1..120: mol_type = other DNA
gaggaaagttcatagcattaaatgcctacatcaaaaagtctgaaagagcacaaataaacaatctagggtcgcacctccaggaactagagaaacaagaacaaaccaaacccaaatgagcag

SEQ ID NO: 23821 - DNA, 120 bp, synthetic construct
  source 1..120: mol_type = other DNA
agtaagattaaccaagaaaagaaggaagaagattcaaataagctcaattagaaacaaaacagaagatattacaaccaataccacagaaatacaaaagatcattcaaggctactatgaaca

SEQ ID NO: 23822 - DNA, 120 bp, synthetic construct; identical to SEQ ID NO: 7010
  source 1..120: mol_type = other DNA

SEQ ID NO: 23823 - DNA, 120 bp, synthetic construct
  source 1..120: mol_type = other DNA
atttttttggtggagacggggtttcgctgtgttggccgggctggtctccagctcctaaccgcgagtgatctgccagcctcggcctcccaaggtgccaggattgcagacagagtctcgttc

SEQ ID NO: 23824 - DNA, 120 bp, synthetic construct
  source 1..120: mol_type = other DNA
gccgccaccccatctgggaagtgaggagtgtctctgcctggccgtccatcgtctgggatgtgaggagcccctctgcctggctgcccagtctggaaagtgaggagcgtctctgcccggccg

SEQ ID NO: 23825 - DNA, 120 bp, synthetic construct
  source 1..120: mol_type = other DNA
ccccgtctgggatgtgaggagcgcctctgccctgccgcgaccccgtctgggaggtgaggagcgtctctgcccggccgccccgtctgagaagtgaggagaccctctgcctggcagccgccc

SEQ ID NO: 23826 - DNA, 120 bp, synthetic construct; identical to SEQ ID NO: 7011
  source 1..120: mol_type = other DNA

SEQ ID NO: 23827 - DNA, 120 bp, synthetic construct
  source 1..120: mol_type = other DNA
agacttttcattttgttctgtactaagaaaaattcttctgccttgggatcctgttgatctgtgaccttacccccaaccctgtgctctctgaaacatgtgctgtgtccactcagggttaaa

SEQ ID NO: 23828 - DNA, 120 bp, synthetic construct
  source 1..120: mol_type = other DNA
cgcagagtcctctgcctaggaaaaccagagacctttgttcacttgtttatctgctgaccttccctccactattgtcctatgaccctgccaaatccccctctgtgagaaatacccaagaat

SEQ ID NO: 23829 - DNA, 120 bp, synthetic construct
  source 1..120: mol_type = other DNA
gtttgagaccagcctgaccaacatggagaaactccgtctcttctaaaaatacaaaaaaattagccaggggtggtggtacatgcctggaatcccagctactcgggaggctgaggcaggaga

SEQ ID NO: 23830 - DNA, 120 bp, synthetic construct; identical to SEQ ID NO: 7012
  source 1..120: mol_type = other DNA

SEQ ID NO: 23831 - DNA, 120 bp, synthetic construct
  source 1..120: mol_type = other DNA
cgggcgtggtggctcacacctgtaatcccagcactttgggaggccaaggtgggctgatcacttgaggccaggagttcaagaccagcctgaccaacatggagaaaccccatctctactaaa

SEQ ID NO: 23832 - DNA, 120 bp, synthetic construct
  source 1..120: mol_type = other DNA
tgcattccagcctgggcaacaagagcgaaactccgtctggaaaaaaaaaaaaatgctagctaacagaatccaacagcatatcaaaacaataatccaccatgatcaagtgggtttcctacc

SEQ ID NO: 23833 - DNA, 120 bp, synthetic construct
  source 1..120: mol_type = other DNA
ccagcatccctttatgattaaaaccctcagcagggttgggcatggtggctaacgcctttaatcccagcactttggaagactgaggggggtggatcacgaggtcaggagatcaagaccata

SEQ ID NO: 23834 - DNA, 120 bp, synthetic construct; identical to SEQ ID NO: 7013
  source 1..120: mol_type = other DNA

SEQ ID NO: 23835 - DNA, 120 bp, synthetic construct
  source 1..120: mol_type = other DNA
tattcaacatagtactggaagtcctaaccagagcaatcagacaagagaaagaaataaagtgcatctaaattggtcataaggaagtcaaactgtcgttgtttgctgatgacatgattgtat

SEQ ID NO: 23836 - DNA, 120 bp, synthetic construct
  source 1..120: mol_type = other DNA
aagctgagaatcaaatcaagaactcaaccccttttactttagctgtgacaaaaataaagtacctaggaatatacttaaccaaggaggtgaaagatctctacaaggaaaactacaaaacac

SEQ ID NO: 23837 - DNA, 120 bp, synthetic construct
  source 1..120: mol_type = other DNA
ttttcatcaaaataccatcatcattcttcacagaactagaaaaaataatcctaaaattcatatggaacaaaaaaagaccctgcatagccaaagtaagactaaccaaaaagaacaaatctg

SEQ ID NO: 23838 - DNA, 120 bp, synthetic construct; identical to SEQ ID NO: 7014
  source 1..120: mol_type = other DNA

SEQ ID NO: 23839 - DNA, 120 bp, synthetic construct
  source 1..120: mol_type = other DNA
attgccttaggcaaagacttcatgaccaggaacccaaaagcaaatgcaacaaaaacaaagataaatagatgggatttaattagactaaaagcctctgcacagcaaagaaacaatcagcag

SEQ ID NO: 23840 - DNA, 120 bp, synthetic construct
  source 1..120: mol_type = other DNA
tcaaaaaacgcactaaggacatgaatagaaaattctcaaaagaaatatacaaatagccaacaaacatatgaaaaaaaatgcccaacatcactaatgatcagggaaaggcaaatcaaaacc

SEQ ID NO: 23841 - DNA, 120 bp, synthetic construct
  source 1..120: mol_type = other DNA
actagtacaacaattacggaaaacagtatggagaatccttaaataactaaaagtagatctactgtttgatccatcaatcccaccattggatatctacccagaggaaaagaagtcattata

SEQ ID NO: 23842 - DNA, 120 bp, synthetic construct; identical to SEQ ID NO: 7015
  source 1..120: mol_type = other DNA

SEQ ID NO: 23843 - DNA, 120 bp, synthetic construct
  source 1..120: mol_type = other DNA
ggtactttgtatgctgctcaagtgatgggtgcaccaaaatctcagaaatcaacactgaagaacttattcatgtaaccaaacaccacctgttctcccaaaaacctattgaaataaaaaaaa

SEQ ID NO: 23844 - DNA, 120 bp, synthetic construct
  source 1..120: mol_type = other DNA
aactgacctgtggattaagtgcaattccaatcaaaatcatggcagggctgaacctaaaagtttaaaaaaataaaaaataaaaataaatcctggcaggttttttttaaaaagaaattacca

SEQ ID NO: 23845 - DNA, 120 bp, synthetic construct
  source 1..120: mol_type = other DNA
gaatcaaggttgtgttactggcataaggatagccatgaatcggtggaatagaataaagagtagatgaataaaaccacacatatatgtctctgaaaaatgctttaaggggaaaggatagtg

SEQ ID NO: 23846 - DNA, 120 bp, synthetic construct; identical to SEQ ID NO: 7016
  source 1..120: mol_type = other DNA

SEQ ID NO: 23847 - DNA, 120 bp, synthetic construct
  source 1..120: mol_type = other DNA
tttttctcatacttagtctttcttgaaattattccttagagcctccagggcttagaaattccttaattttacatcctgccatgtcaagatttcttccagttccggggattctaggatttg

SEQ ID NO: 23848 - DNA, 120 bp, synthetic construct
  source 1..120: mol_type = other DNA
caggcaactcaccctgccggcaagctcggggtttcatgaagtgccaggcactggtgggaagtggtcaggagataacacaaaccctgatctccgcaaccagcctcaggaagtccttctgaa

SEQ ID NO: 23849 - DNA, 120 bp, synthetic construct
  source 1..120: mol_type = other DNA
cttcaggactcagctcgcatggcacctctcgggaaatctcactctcatgataataacttcaaattgcacctggctcctttcatcttccgtgccttgcttttctcttaatcatcctttatt

SEQ ID NO: 23850 - DNA, 120 bp, synthetic construct; identical to SEQ ID NO: 7017
  source 1..120: mol_type = other DNA

SEQ ID NO: 23851 - DNA, 120 bp, synthetic construct
  source 1..120: mol_type = other DNA
cctcctgccgcagaggaagacagacccctacggagcctccagggcgcagtctccagggcggagtcccggggcgcttcgggcagggagtctgggccaaagcgccaaaatccgccgctgtcg

SEQ ID NO: 23852 - DNA, 120 bp, synthetic construct
  source 1..120: mol_type = other DNA
atttgagtccagaatcaaggacctttaagcagggattggagatggcagggggccaggattaagggatatagacagcaggtcctgtctgcttaggttgcaaatgggaagaagaggccggat

SEQ ID NO: 23853 - DNA, 120 bp, synthetic construct
  source 1..120: mol_type = other DNA
ccgggtagtggcggaggaaccgccctcgggttcccgatggattggggacaaatgctcagcccagtctgattccagaaatccttgtaacccaatatagtctccagctccgatgccatgtcc

SEQ ID NO: 23854 - DNA, 120 bp, synthetic construct; identical to SEQ ID NO: 7018
  source 1..120: mol_type = other DNA

SEQ ID NO: 23855 - DNA, 120 bp, synthetic construct
  source 1..120: mol_type = other DNA
tgggtgtctctcctcagtccttcggccacacggggccgctgccgctctacgcttgggttctgatgagctgctctggagaggacggggcggtggtctgagtaagacacagattgttgatcc

SEQ ID NO: 23856 - DNA, 120 bp, synthetic construct
  source 1..120: mol_type = other DNA
tgtctctgaggtttccaactcctccttgcaaaccctccctccagccttttcatggcaacactccaggaaaatggaaagttgatcatttttttcttccactccttaatcctttcctgactg

SEQ ID NO: 23857 - DNA, 120 bp, synthetic construct
  source 1..120: mol_type = other DNA
atggtccatttgtcacagctaatgaagccattttcataccttattattactaaactgcagactttatttggagttcattagcgttcccctaatgtcctttctgtgtttcaggattccatg

SEQ ID NO: 23858 - DNA, 120 bp, synthetic construct; identical to SEQ ID NO: 7019
  source 1..120: mol_type = other DNA

SEQ ID NO: 23859 - DNA, 120 bp, synthetic construct
  source 1..120: mol_type = other DNA
agttggcaacttacaacaacagaaaattattctttcacagttctggaggcccagggcattggtcagcgttctttggcttgtagccccattgctccagtctctgcctccttcttcacattg

SEQ ID NO: 23860 - DNA, 120 bp, synthetic construct
  source 1..120: mol_type = other DNA
catctgcaaagaccctttttttccaaacaacttgaaattcacagcttctggggactaggacagaaacatatctttgtggggacaaccattcaacccactacatctggctaagctaatatt

SEQ ID NO: 23861 - DNA, 120 bp, synthetic construct
  source 1..120: mol_type = other DNA
tatcagaagtgatcctgaagaaagattacctttggaagagacttatgctgagttcattgcttgatttcttgcctctgtttctgaacatcttttgagagcaaaatttactttctaaaaaga

SEQ ID NO: 23862 - DNA, 120 bp, synthetic construct; identical to SEQ ID NO: 7020
  source 1..120: mol_type = other DNA

SEQ ID NO: 23863 - DNA, 120 bp, synthetic construct
  source 1..120: mol_type = other DNA
ggattatggaatttttcttttgctgtcgagaaattaataagaggcagaacaggatgccaaaattccaaagcatccaatataggccgtcttctgggactcctgtcagctatatggtcaaaa

SEQ ID NO: 23864 - DNA, 120 bp, synthetic construct
  source 1..120: mol_type = other DNA
ttaaaaattaaaataaataaggaaagaaaaaaaaattaaggtcctctcctgtgtacgttttgaaatcaatgggtagagtacgccaaagttaatttggatcttcaatggccatccttgggg

SEQ ID NO: 23865 - DNA, 120 bp, synthetic construct
  source 1..120: mol_type = other DNA
ggcttagtttacttggtacttcaaagtttcataatgcattcgggattcaaacattgcctccctctaagattctatcacaaaattaactgagaccagcaaacagttaaggaaggacaacaa

SEQ ID NO: 23866 - DNA, 120 bp, synthetic construct; identical to SEQ ID NO: 7021
  source 1..120: mol_type = other DNA

SEQ ID NO: 23867 - DNA, 120 bp, synthetic construct
  source 1..120: mol_type = other DNA
ccaggaggtggaggtggcagtgagccgagatcacgccactgcactccagcctgggtgacagagcgagactccgtctcaaaaaaaaaaaaaaagaaaagaaaagaaaagaaaaaagaagaa

SEQ ID NO: 23868 - DNA, 120 bp, synthetic construct
  source 1..120: mol_type = other DNA
ctatatatatctatatctatatatagatatatagatatataatggaatactacacagtcataaaaagaaaggaaataatggcattcaaagcaacctggatggagctggagaccattattc

SEQ ID NO: 23869 - DNA, 120 bp, synthetic construct
  source 1..120: mol_type = other DNA
ggaagggtgggagggagctgagggatacaagactacacattgtgtacagtgtacactaatcaggtgctggatgcgccaaaatcttggaaatcaccactaaagaacttatccatgtaaaca

SEQ ID NO: 23870 - DNA, 120 bp, synthetic construct; identical to SEQ ID NO: 7022
  source 1..120: mol_type = other DNA

SEQ ID NO: 23871 - DNA, 120 bp, synthetic construct
  source 1..120: mol_type = other DNA
gaccctgtctctaaacaacagcaataataatccttccttcctgagtcagacgggcatggagacgcttctggaaggaacaccgcaatggctgcgcagggacagccccaggtccagttcaaa

SEQ ID NO: 23872 - DNA, 120 bp, synthetic construct
  source 1..120: mol_type = other DNA
cataccaacagaggacctgttaagttcaatgtatgggacacagccggcctggagaaattcagtggactgagagatggctattatatccaagcccagagtaccatcatagtgtttgatgta

SEQ ID NO: 23873 - DNA, 120 bp, synthetic construct
  source 1..120: mol_type = other DNA
gagtggcaacaaagtggatattaaggacaggaaagtgaaggcgaaatccattgtcttccaccgaaagaagaatcttcagtactacgacatttctgccaaaagtaactataactttgaaaa

SEQ ID NO: 23874 - DNA, 120 bp, synthetic construct; identical to SEQ ID NO: 7023
  source 1..120: mol_type = other DNA

SEQ ID NO: 23875 - DNA, 120 bp, synthetic construct
  source 1..120: mol_type = other DNA
ggcttcgcagtgaatgtggcagttcaaaaaataccttcattgtttggacctgcatatttagctgttttggaacacagttgattccttgagtttcaaatatagactgctacagtcacatca

SEQ ID NO: 23876 - DNA, 120 bp, synthetic construct
  source 1..120: mol_type = other DNA
aatatctaaaaacaaaaaatccttcctttttcaactcaatatttgtgtaaggctagattttttaacatatacacttcaatcaaagtaagaaaatggctgggatgcagctggaggccataa

SEQ ID NO: 23877 - DNA, 120 bp, synthetic construct
  source 1..120: mol_type = other DNA
tagagtggagagggtggggacgtgggttgaaaaactacctgtgggtactatgttcactacctgagtgacaggatccataccccaaacctcagcatcagacaacatacccatgtaacaaac

SEQ ID NO: 23878 - DNA, 120 bp, synthetic construct
  source 1..120: mol_type = other DNA
ctgcctcccgggttcaagcgattctcctgcctcagcctcctgagtaggtgggattacaggtatgcgccaccacctccagctaattttgtatttttagtagacatggggtttctccatatt

SEQ ID NO: 23879 - DNA, 120 bp, synthetic construct; identical to SEQ ID NO: 7024
  source 1..120: mol_type = other DNA

SEQ ID NO: 23880 - DNA, 120 bp, synthetic construct
  source 1..120: mol_type = other DNA
aggcggctagtgaggggtgagggggctaaaatgtaggattgctctaatgaaggggttgggcattaaaagtgagggggaggaatattcatatgttttatgggaacaggcagtgaacttctc

SEQ ID NO: 23881 - DNA, 120 bp, synthetic construct
  source 1..120: mol_type = other DNA
catggatgggagcgcaatttagcctggaaacgggattacaatgaagcgtgaggtctttttgaagtcatttggccggctctcttggttgtaacgagtctcagctggtttgactacaaaggc

SEQ ID NO: 23882 - DNA, 120 bp, synthetic construct
  source 1..120: mol_type = other DNA
ctgcaaccaccacctctcgggttcaagcaattctcctatctcagcctccagagttgctggaattacaggcgcgcaccaccacacccggctaatttttgtattgttagtagagacagggtt

SEQ ID NO: 23883 - DNA, 120 bp, synthetic construct; identical to SEQ ID NO: 7025
  source 1..120: mol_type = other DNA

SEQ ID NO: 23884 - DNA, 120 bp, synthetic construct
  source 1..120: mol_type = other DNA
gacagagcaagactctgactcaaaaaaaaaaaaaagttgtttctattaacatgtaatgggttattaatattctcttaaatgaattaatatttttaatattttgttttaatatcttttaat

SEQ ID NO: 23885 - DNA, 120 bp, synthetic construct
  source 1..120: mol_type = other DNA
tcctcctcctgggttcaagtgattctcctgcctcagcctcccaagtagccaggattacagccatgcgccaccacgccggctaattttttggacttttagtagagacagggtttctccata

SEQ ID NO: 23886 - DNA, 120 bp, synthetic construct
  source 1..120: mol_type = other DNA
agagataccgaaacctaaaagtttaagaactgctgattgctgggaaactctgcagtttcccgttcctctcgtaacctggtcatgtgtccttcttcctggatactcatgacgcagactcag

SEQ ID NO: 23887 - DNA, 120 bp, synthetic construct; identical to SEQ ID NO: 7026
  source 1..120: mol_type = other DNA

SEQ ID NO: 23888 - DNA, 120 bp, synthetic construct
  source 1..120: mol_type = other DNA
ggggagccccgcttcatctctgtgggctacgtggacgacacccagttcgtgcgcttcgacaacgacgccgcgagtccgaggatggtgccgcgggcgccgtggatggagcaggaggggtca

SEQ ID NO: 23889 - DNA, 120 bp, synthetic construct
  source 1..120: mol_type = other DNA
gagcaggtcacgacccctccccatcccccacggacggcgcgggtcccctcgaatcttcgggtcccagattcaccccaaggctgcggaacccgcccagaccctagaccggggagagtctca

SEQ ID NO: 23890 - DNA, 120 bp, synthetic construct
  source 1..120: mol_type = other DNA
gtggatgcatggctgcgagctggggcccgacgggcgcttcctccgcgggtatgaacagttcgcctacgacggcaaggattatctcaccctgaatgaggacctgcgctcctggaccgcggt

SEQ ID NO: 23891 - DNA, 120 bp, synthetic construct; identical to SEQ ID NO: 7027
  source 1..120: mol_type = other DNA

SEQ ID NO: 23892 - DNA, 120 bp, synthetic construct
  source 1..120: mol_type = other DNA
tagtctcgctggagattccatccttcagatgaactgatgagcagttctctttgactcccagtattaggaatcacgggggagtttctctcgtgcctgattctcagccccacaccaagagtt

SEQ ID NO: 23893 - DNA, 120 bp, synthetic construct
  source 1..120: mol_type = other DNA
taagaggctatcccagatccctaagtccaggctggtgtcaaggttttgtcctcttctcctactataattgtcctcttccttctcaggatggtcacatgggtgctgctggagtgtcccatg

SEQ ID NO: 23894 - DNA, 120 bp, synthetic construct
  source 1..120: mol_type = other DNA
ccctgcggagatcacactgacctggcagcaggatggggagggccatacccaggacacggagctcgtggagaccaggcctgcaggggatggaaccttccagaagtgggcagctgtggtggt

SEQ ID NO: 23895 - DNA, 120 bp, synthetic construct; identical to SEQ ID NO: 7028
  source 1..120: mol_type = other DNA

SEQ ID NO: 23896 - DNA, 120 bp, synthetic construct
  source 1..120: mol_type = other DNA
ctgggtgtttcaagccctaggtaaaagtgtgtcctgcctcgttactgggaagcaccatccacacacacgagcctacccagcctggggccctgtgtgccagcacctactctttttttttga

SEQ ID NO: 23897 - DNA, 120 bp, synthetic construct
  source 1..120: mol_type = other DNA
acacatgcgtgccaccacacctggctaatttttttttttgtatttttagtggagatggggtttcactatgttggccaggctggtctcgaactcctgactttgtgatctgcctgcctcggc

SEQ ID NO: 23898 - DNA, 120 bp, synthetic construct
  source 1..120: mol_type = other DNA
ctgatcccagcagtcacaggtcacaggggaaggtccctgctgaagacagacctcagaagggcagttgatccaggacccacacctgctttcttcacgtttcctgatcctgccctgggtctg

SEQ ID NO: 23899 - DNA, 120 bp, synthetic construct; identical to SEQ ID NO: 7029
  source 1..120: mol_type = other DNA

SEQ ID NO: 23900 - DNA, 120 bp, synthetic construct
  source 1..120: mol_type = other DNA
gattcagaatttttgagtgtgtggtgggctgttcagagtgtcatcacttaccgtgactgacctgaatttgttcatgactattttcttctgtagcctgagacagctgccttgtgtgcgact

SEQ ID NO: 23901 - DNA, 120 bp, synthetic construct
  source 1..120: mol_type = other DNA
ttagcacaatgtgaggaggtagagaaacagtccacctctgtgtctaccatgacccccttcctcacactgacctgtgttccttccctgttctcttttctattaaaaataagaacctgggca

SEQ ID NO: 23902 - DNA, 120 bp, synthetic construct
  source 1..120: mol_type = other DNA
tacaaaaaattagctgggcgcagaggcacgggcctgtagtcccagctactcaggaggcggaggcaggagaatggcgtcaacccgggaggcggaggttgcagtgagccaggattgtgcgac

SEQ ID NO: 23903 - DNA, 120 bp, synthetic construct; identical to SEQ ID NO: 7030
  source 1..120: mol_type = other DNA

SEQ ID NO: 23904 - DNA, 120 bp, synthetic construct
  source 1..120: mol_type = other DNA
ctgtgccttcattcatgggttaatggattaatgggttatcacaggaatgggactggtggctttataagaagaggaaaagagaactgagctagcatgcccagcccacagagagcctccact

SEQ ID NO: 23905 - DNA, 120 bp, synthetic construct
  source 1..120: mol_type = other DNA
ggacctgaccaccaccaggaccccagaactgtggagtcagtggcagcatgcagcgcccccttgggaaagctttaggcaccagcctgcaacccattcgagcagccacgtaggctgcaccca

SEQ ID NO: 23906 - DNA, 120 bp, synthetic construct
  source 1..120: mol_type = other DNA
gtcaaaagagattattctcttcccacagataccttttctctcccatgaccctttaacagcatctgcttcattcccctcaccttcccaggctgatctgaggtaaactttgaagtaaaataa

SEQ ID NO: 23907 - DNA, 120 bp, synthetic construct
  source 1..120: mol_type = other DNA
ttgtgccttgttgttttaattttttaaccacattcaagctatcctttggcttccaatgccatggtccacccagaactgcattcactggcccatgttctagttctggtcatgccgactttc

SEQ ID NO: 23908 - DNA, 120 bp, synthetic construct; identical to SEQ ID NO: 7031
  source 1..120: mol_type = other DNA

SEQ ID NO: 23909 - DNA, 120 bp, synthetic construct
  source 1..120: mol_type = other DNA
taatactgattataaaagggcttgaggttgaggcaagttcaacctcttgccctcactcacccacttgcctttaccaagagatgatacagcaaaaagactcaccaaatgccgggatcttga

SEQ ID NO: 23910 - DNA, 120 bp, synthetic construct
  source 1..120: mol_type = other DNA
caacacaagatgggcaacctgatacttaggtttcagttagtggtagatatttttatttcaagcattcctactggagtattagtttcttcataagcccagaatctttgcattttagcaaca

SEQ ID NO: 23911 - DNA, 120 bp, synthetic construct
  source 1..120: mol_type = other DNA
tcctgcttcagcctcccaagtagctgggattacaggcgcctgctaccacgcccagctaatttttgtatttttagtagagacagagtttcatcatgttggccagctggtctcgaactcctg

SEQ ID NO: 23912 - DNA, 120 bp, synthetic construct; identical to SEQ ID NO: 7032
  source 1..120: mol_type = other DNA

SEQ ID NO: 23913 - DNA, 120 bp, synthetic construct
  source 1..120: mol_type = other DNA
tgaggtccagggtgggactagggggcgagaaaggttcctgcgctgaaggaatctaagatttagtaacaatgaataaacagacttgaagataactattgtggttagcgctgaaagaaacgt

SEQ ID NO: 23914 - DNA, 120 bp, synthetic construct
  source 1..120: mol_type = other DNA
tcaagcgcgttacctgtattgtggactttatttctattattacattataatacataatgaaataattatacaactcaccataatgtagagtcagtaggagccctgagcttgttttcctgc

SEQ ID NO: 23915 - DNA, 120 bp, synthetic construct
  source 1..120: mol_type = other DNA
ctatgagaatctaaccccactgctgatctgacaggaggcagagctcaggcgctaatgcttggtcacctgccactcacctcctactgtgcagcccagttcctaacaggccatggaccggta

SEQ ID NO: 23916 - DNA, 120 bp, synthetic construct; identical to SEQ ID NO: 7033
  source 1..120: mol_type = other DNA

SEQ ID NO: 23917 - DNA, 120 bp, synthetic construct
  source 1..120: mol_type = other DNA
gattcagtcaagatactgttgggaaaacagcccatgccatgggacttccccatggtcggaaaagtcttgaatagctaaaagcaaaacaggatagttaggctgcattatgtagataatggt

SEQ ID NO: 23918 - DNA, 120 bp, synthetic construct
  source 1..120: mol_type = other DNA
acccaagggaaggaggaacccgagtgatcttgtcctcttttgacatctcatttctagccacaaggttatgaatcatagatctccagaagtcagtggtcctagaggaaaaaagcatctgcc

SEQ ID NO: 23919 - DNA, 120 bp, synthetic construct
  source 1..120: mol_type = other DNA
ggatcttaacgggggctgggacttacttccatatattgtaaatgatgtaaccttgtcttcatgatgaccttaaatatatcttgatgaacagtataagaaagcaaatgaagcctgggcgcg

SEQ ID NO: 23920 - DNA, 120 bp, synthetic construct
  source 1..120: mol_type = other DNA
attagctgggcgtggtggcgcatgcctgtaatcctagctactcaggaggctgaggcaggagaatcgcttgaacccaggaggctgaggttgtgcagtgagccaagatcacaccattgcact

SEQ ID NO: 23921 - DNA, 120 bp, synthetic construct; identical to SEQ ID NO: 7034
  source 1..120: mol_type = other DNA

SEQ ID NO: 23922 - DNA, 120 bp, synthetic construct
  source 1..120: mol_type = other DNA
tggtgactgggccttagaggaaagagatgcttgtccagcccattgcctgtgtgtccaggagagactgtgcccaccttgagagactgagagaagaccctagtgaggagaagcccccaggcc

SEQ ID NO: 23923 - DNA, 120 bp, synthetic construct
  source 1..120: mol_type = other DNA
aatcagcgtccctgcagggtatgtaaaggacctctacctatgctttctatgggggaacaaatatcccatgggacactgaaagactatggaacattgtagaacatgtatttaccaaactgt

SEQ ID NO: 23924 - DNA, 120 bp, synthetic construct
  source 1..120: mol_type = other DNA
atttattgatcattcttgagtgtttatcggagagggggatttagcagggtcataggacaatagtggagggaaggtcagcagataaacatgtgaacaaaggtctctggttttcctaggcag

SEQ ID NO: 23925 - DNA, 120 bp, synthetic construct
  source 1..120: mol_type = other DNA
tgccttcaagcatctgtttaacaaagcacatcttgcaccgcccttaatccatttaaccctgagtggacacagcacatgtttcagagagcacggggttgggggtaaggctatagatcaaca

SEQ ID NO: 23926 - DNA, 120 bp, synthetic construct; identical to SEQ ID NO: 7035
  source 1..120: mol_type = other DNA

SEQ ID NO: 23927 - DNA, 120 bp, synthetic construct
  source 1..120: mol_type = other DNA
ggcggaggggctcctcacttctcagacagggcggcccggcagagacgcccctcacctcccagacggggtggcggtcgggcagagacactcctcagttcccagacggggtcgccgccggac

SEQ ID NO: 23928 - DNA, 120 bp, synthetic construct
  source 1..120: mol_type = other DNA
gctgcagtctcggcactttgggaggccaaggcaggcggctgggaggtggaggctgtagcgagccgagatcacgccactgcactccagcctgggcaagattgagcactgagtgagcgagac

SEQ ID NO: 23929 - DNA, 120 bp, synthetic construct
  source 1..120: mol_type = other DNA
aaaaaaccaaaaaaaaaaccaagtgattctttctgcagaggacatcttggctcttggcactccaccacagacttggtatgagatcctggctgagcacttttttttttttttttttttttt

SEQ ID NO: 23930 - DNA, 120 bp, synthetic construct
  source 1..120: mol_type = other DNA
agtagctgggattacaggcatgtgccatcacgccccggctgattttgtacctttagtaaagacggggtttctccatgttggtcaggctggtctcgaactcccgacctcaggtgatccaca

SEQ ID NO: 23931 - DNA, 120 bp, synthetic construct; identical to SEQ ID NO: 7036
  source 1..120: mol_type = other DNA

SEQ ID NO: 23932 - DNA, 120 bp, synthetic construct
  source 1..120: mol_type = other DNA
gcaaactctgcctcctgggttcatgccattctcctgcctcagcctcctgagtagctgggattacaggtgcatgccaccacgcccagaaaattttttgtatttttagtagagacgaggttt

SEQ ID NO: 23933 - DNA, 120 bp, synthetic construct
  source 1..120: mol_type = other DNA
aagaaaaacctcacctgtaatcccactacttggtacaataatcatacttatttttctttatttccttccagtgtgagcaaggacaatttagctttgggaacccacaaagaaaccatttca

SEQ ID NO: 23934 - DNA, 120 bp, synthetic construct
  source 1..120: mol_type = other DNA
aagttgaatttggataagagaaaaatcaagggcactcactcttcccaaccccagcctgtctgactctctccccatcatcctcctcactactttcaggcagggtggagatagcaccagggg

SEQ ID NO: 23935 - DNA, 120 bp, synthetic construct; identical to SEQ ID NO: 7037
  source 1..120: mol_type = other DNA

SEQ ID NO: 23936 - DNA, 120 bp, synthetic construct
  source 1..120: mol_type = other DNA
agttagtggtggcaaccaaagcgaacagaggacttggcttcctgaaaacagaggcaaagaagtatagctatccaaccttctgagtcttgtctctatatggagatgcccatatggacaaat

SEQ ID NO: 23937 - DNA, 120 bp, synthetic construct
  source 1..120: mol_type = other DNA
aacccttacattccttcagccctgctttcacttgtcctgggtgtcctgactgtcatcttcattcatttatatcaaacaccattcaatcaatacttactacaagcaaactatatgtgagat

SEQ ID NO: 23938 - DNA, 120 bp, synthetic construct
  source 1..120: mol_type = other DNA
agtgacacagttgaaatataaataatttcttaaatagttataacaatttccaaattatttattgatttttaaacattttttgcatttcttaggtggtaattattggttaagtgatatatg

SEQ ID NO: 23939 - DNA, 120 bp, synthetic construct; identical to SEQ ID NO: 7038
  source 1..120: mol_type = other DNA

SEQ ID NO: 23940 - DNA, 120 bp, synthetic construct
  source 1..120: mol_type = other DNA
gtatttttagtaaagagggggtttcaccacgtaggccaagctggtctcaaactcctgacctcaaatgatccacctgcctcggcctcccaaagtgctgggattacaggcatgagccaccac

SEQ ID NO: 23941 - DNA, 120 bp, synthetic construct
  source 1..120: mol_type = other DNA
ctgcctcagcctcctgagtagctgggactacaggcgcctgccaccatgcctggctcattttttgtatttttagtagagacggggtttcaccatgttagccaggatggtctcgatctccta

SEQ ID NO: 23942 - DNA, 120 bp, synthetic construct
  source 1..120: mol_type = other DNA
taataaaagccatctttaataagtaggcttaattgtattgattaaattaaaaattgtcttgatttaattggttacatctatgaagctttgtaaacatccttcatggttgacttaatttaa

SEQ ID NO: 23943 - DNA, 120 bp, synthetic construct; identical to SEQ ID NO: 7039
  source 1..120: mol_type = other DNA

SEQ ID NO: 23944 - DNA, 120 bp, synthetic construct
  source 1..120: mol_type = other DNA
atgtcctaaacacttactactcccatttcacaacttctattaaagtgaatataaaaggtttggtacaattccctaatgctcttggcatcccactattacagagtgcccaaatatgctttc

SEQ ID NO: 23945 - DNA, 120 bp, synthetic construct
  source 1..120: mol_type = other DNA
ataaagtttagtgaggcaaatatttgaagtaatttttcatttaaacattttactgcatcatcctgacatcactgaatacagtaacttatatagtaccaatttaaaatataaagagacttt

SEQ ID NO: 23946 - DNA, 120 bp, synthetic construct
  source 1..120: mol_type = other DNA
ccaagcagctaggactataggtgcatgccaccacgcccagctaatttttgtatttttttgtagagacagggtttcaccatgttggccaggatggtctcaatctcttgacctcgtgatctg

SEQ ID NO: 23947 - DNA, 120 bp, synthetic construct; identical to SEQ ID NO: 7040
  source 1..120: mol_type = other DNA

SEQ ID NO: 23948 - DNA, 120 bp, synthetic construct
  source 1..120: mol_type = other DNA
aggtcaggagatcaagaccatcctggctaacacagtgaaaccccgtctctactaaaaatacaaaaaattagccgggcatggtggcaggcgcctgtagtcccagctgctcgggaggctgag

SEQ ID NO: 23949 - DNA, 120 bp, synthetic construct
  source 1..120: mol_type = other DNA
acataattgaagctttcttggtgatgattgattgcctagatttataaatttactaaaaagttgtctcatcatggtagatatacgttttgtgaccattgtaaccattaatgtagactgcaa

SEQ ID NO: 23950 - DNA, 120 bp, synthetic construct
  source 1..120: mol_type = other DNA
gtatttcaggggatttattatttcaaagacttcattatgtgaagctcattcataatattcttcaaattcttcttattactagtttttccctgaattctgagcaccgacaatatgctagaa

SEQ ID NO: 23951 - DNA, 120 bp, synthetic construct; identical to SEQ ID NO: 7041
  source 1..120: mol_type = other DNA

SEQ ID NO: 23952 - DNA, 120 bp, synthetic construct
  source 1..120: mol_type = other DNA
ctaattttatatttttagtagagacagggtttctccatgttggtcaggctggtctcgaactcccaacctcaggtgattcactcaccttgagctcccaaagtgctgggattacaggcatga

SEQ ID NO: 23953 - DNA, 120 bp, synthetic construct
  source 1..120: mol_type = other DNA
tatcagttgttccaggctgtgattcaatattaataccattggtttcatgatttgtctcagattcagaagagtcatgtttacagtatctaaaagcaatgtttaaaatgtatgtaggcctgg

SEQ ID NO: 23954 - DNA, 120 bp, synthetic construct
  source 1..120: mol_type = other DNA
caaaaatcggctgggcgcggtggctcatgcctgtaatcccagcactttgggaggccaaggcaggtggctcacctgaagtcaggagttcaagaccagcctgaccaacatcgtgaaactccg

SEQ ID NO: 23955 - DNA, 120 bp, synthetic construct; identical to SEQ ID NO: 7042
  source 1..120: mol_type = other DNA

SEQ ID NO: 23956 - DNA, 120 bp, synthetic construct
  source 1..120: mol_type = other DNA
agccgagatcacaccactgcactccagcctgggcaacagagtaagactcttatctcagaaaataagtaaatagataaataaataaaatgtatttaaactttgtcacttcactcttactgt

SEQ ID NO: 23957 - DNA, 120 bp, synthetic construct
  source 1..120: mol_type = other DNA
agttacagcatgtgaggataacaattaactgatgattttcctaaaccacaaaacaatgaatgtacaatggtgacatggctgaaccagccggtggtgccataaatgattctcagatgctgc

SEQ ID NO: 23958 - DNA, 120 bp, synthetic construct
  source 1..120: mol_type = other DNA
ctattttctgtaacaatcagtattggctgtactagtgcacactggctggatgccagtgtgtaagacaatgccataaagggctatatgagcattagctactatgctatgacttttaacatt

SEQ ID NO: 23959 - DNA, 120 bp, synthetic construct; identical to SEQ ID NO: 7043
  source 1..120: mol_type = other DNA

SEQ ID NO: 23960 - DNA, 120 bp, synthetic construct
  source 1..120: mol_type = other DNA
tgcctcagcctcctaggtagctgggattacagggatgtgccaccacacctcgctaattttgtatttttagtagagacgggttttctttttttctttttttttttgggggggatggagtct

SEQ ID NO: 23961 - DNA, 120 bp, synthetic construct
  source 1..120: mol_type = other DNA
ggcgtctgccactgtgcctggctaatttttatatttttgatagagacggggtttcaccatgttggccaggctggtctcaaactcctgacctcaggtgatcagcccaccttggcctcccaa

SEQ ID NO: 23962 - DNA, 120 bp, synthetic construct
  source 1..120: mol_type = other DNA
ctgggattacaggtgtgagccactgcgcccggcctaatttttgtatttttagtagagtagagctgtgatcatgccactgtactctagcctgggtgacagagtgagatgagaccctgtctc

SEQ ID NO: 23963 - DNA, 120 bp, synthetic construct; identical to SEQ ID NO: 7044
  source 1..120: mol_type = other DNA

SEQ ID NO: 23964 - DNA, 120 bp, synthetic construct
  source 1..120: mol_type = other DNA
aatgcatgagtttgttcataaagcataacagtgggcgtgggtaaccaatgaagactgctcggaatatccattaagcacaaattcctgcgaaaatacataagaccacaggcaccagattcc

SEQ ID NO: 23965 - DNA, 120 bp, synthetic construct
  source 1..120: mol_type = other DNA
gaaaacctgattaataatgtccaagccacactccaagacctcttccactcaggctggggtcccaggagcagatggtgggcaaagggcaggaataacctgtgcctcaagctgcaaacagga

SEQ ID NO: 23966 - DNA, 120 bp, synthetic construct
  source 1..120: mol_type = other DNA
ttggggtcaccacctgttgttcaccagggctcaggataaaagccagaatatcgcatgctatgggttaagaaataggcttttgagggaattttcaattcagtgtcagcaagtaaagagaaa

SEQ ID NO: 23967 - DNA, 120 bp, synthetic construct; identical to SEQ ID NO: 7045
  source 1..120: mol_type = other DNA

SEQ ID NO: 23968 - DNA, 120 bp, synthetic construct
  source 1..120: mol_type = other DNA
tgagtttggtatggaccttgtcacttaattctaaccaatggaatatgacaaaggtgaaagtctatcatatccatgagtagacaataagagtttgtggcttttatcttgctagcagactca

SEQ ID NO: 23969 - DNA, 120 bp, synthetic construct
  source 1..120: mol_type = other DNA
caagaggaaccaaaccttcagtcctaccacccttcgtgcttcctaccaacaactaagttagtgagcttggaagctcatcctttcctagttgagtcttcagggaagaccccaactatgatt

SEQ ID NO: 23970 - DNA, 120 bp, synthetic construct
  source 1..120: mol_type = other DNA
ggtgtgttgttttaagccacttattttaggacaatttttatgctgtaatgataactaatatacaggagatgttcaaaaatacaagctacccaggaactggagacctaggggcccatggct

SEQ ID NO: 23971 - DNA, 120 bp, synthetic construct
  source 1..120: mol_type = other DNA
gaagaagagggagccccaggttctaatgagtttgtttttcaggcaacccagaatgacctcccagcatcatttccagacagtgtggctcctgacatcacaaatatagtagaataacaccaa

SEQ ID NO: 23972 - DNA, 120 bp, synthetic construct; identical to SEQ ID NO: 7046
  source 1..120: mol_type = other DNA

SEQ ID NO: 23973 - DNA, 120 bp, synthetic construct
  source 1..120: mol_type = other DNA
ccttggttccctgattagtgctccaggcctctccagggcctgacactcaatcttctcttgggaactaattatggcaatgtaccacgaggtactgttcctcagactaaacgtggttttttg

SEQ ID NO: 23974 - DNA, 120 bp, synthetic construct
  source 1..120: mol_type = other DNA
agcctccccagtagctgggactacaggtgcacgccaccatgccctgctttatttttattattattattattattattatttgtatttttggtagagacgaggtttcaccatgttggccag

SEQ ID NO: 23975 - DNA, 120 bp, synthetic construct
  source 1..120: mol_type = other DNA
tgcccagcgtaaacgtggtttcttatgtttttaaattccccttgaaaatattctcttgtgaccaaaaaagacccttgggtgtacagagaataggttttgtcataactgtaactaatgtga

SEQ ID NO: 23976 - DNA, 120 bp, synthetic construct; identical to SEQ ID NO: 7047
  source 1..120: mol_type = other DNA

SEQ ID NO: 23977 - DNA, 120 bp, synthetic construct
  source 1..120: mol_type = other DNA
ttaagttttcaataataaaaagttaaaaaccaaaaattaaaagaatctgacaggccagatatggtggttcacgcctgtaatactagcactttgggaggctgaggcaggaggatcgcttga

SEQ ID NO: 23978 - DNA, 120 bp, synthetic construct
  source 1..120: mol_type = other DNA
ggcattccggctccttggagaaacggtcgattctaggactggggcatcctatgatgtcagaaagtatttacatgctcgattaaaaggtgagaaccatatcaaagggacacaggagccaac

SEQ ID NO: 23979 - DNA, 120 bp, synthetic construct
  source 1..120: mol_type = other DNA
ttcttaaataaataaatgggaagatgtggcagtactttttcacagaagaattcattagcaaagcctaacggtgtggctagcctgcgtcatgacaatggttgggagaagcagcaaaatagc

SEQ ID NO: 23980 - DNA, 120 bp, synthetic construct
  source 1..120: mol_type = other DNA
gtagtttaaaaagctatgtgcagcacacagggttataactgcttagaagagagacttgagaaggctataggaagctactcctccctgcaactaaatatgaggtctcagaaataaagagaa

SEQ ID NO: 23981 - DNA, 120 bp, synthetic construct; identical to SEQ ID NO: 7048
  source 1..120: mol_type = other DNA

SEQ ID NO: 23982 - DNA, 120 bp, synthetic construct
  source 1..120: mol_type = other DNA
caaaaaggaacctgagcagaaatatctgagcagaaatatctgaagcctcatactgcatactgcaagggaaaaggactccactgaattagtacaggcaagtcactataaaaatatctgaac

SEQ ID NO: 23983 - DNA, 120 bp, synthetic construct
  source 1..120: mol_type = other DNA
tcacccccaagagaaagaaattggaatccagagctagcatatattgtctaaaattttcagttttccaaaaaagttacaaaagggcaaagaaataggaaaatgcaatccatttgcagggag

SEQ ID NO: 23984 - DNA, 120 bp, synthetic construct
  source 1..120: mol_type = other DNA
tggtgaaatctgtctcaataaaaatacaaaaattagctgggcatggtgatgcacacctgtaatcccagctactcgggaggctgaggcaggagaattgcttgaaccacggagtcagaggtt

SEQ ID NO: 23985 - DNA, 120 bp, synthetic construct; identical to SEQ ID NO: 7049
  source 1..120: mol_type = other DNA

SEQ ID NO: 23986 - DNA, 120 bp, synthetic construct
  source 1..120: mol_type = other DNA
acgaggtcaagagttcaagaccagcctggccaacatggtgaaaccccatctctactaagaatataaaaattagctgggtgtggtggtacatgcctgtaatcccagctactcgggaggctg

SEQ ID NO: 23987 - DNA, 120 bp, synthetic construct
  source 1..120: mol_type = other DNA
gacagtaacatatgcaaatttgggggttagtggggagaagctagcaatcaagaattttacatcaagaaaaattatccttcaaaactgaagaccggtacagggacagtggtttgcacccat

SEQ ID NO: 23988 - DNA, 120 bp, synthetic construct
  source 1..120: mol_type = other DNA
accctgtctctgcaaaaaaaaaaaaaaaaaaaaaatttagccatgtgtggtagtgcacacctgtagtcctagctactcaggaggctgaggcaggaggctctcttaggcccgagagattga

SEQ ID NO: 23989 - DNA, 120 bp, synthetic construct; identical to SEQ ID NO: 7050
  source 1..120: mol_type = other DNA

SEQ ID NO: 23990 - DNA, 120 bp, synthetic construct
  source 1..120: mol_type = other DNA
gcaggtggagtctgcagtgagccaagatcacaccactgtagtccagcctgggcaacagagcaagactccatctcaaaaatattacattaaaaaaagtaaaatttgtaaaagaaacaaaca

SEQ ID NO: 23991 - DNA, 120 bp, synthetic construct
  source 1..120: mol_type = other DNA
gagtgcagtggtttgaccatcgctcactgcagcctcaaatcctggactcaagtgatcccctcacctcagcctcctcctgagtagctgggactacagatgcacaccgccatgcctggctcc

SEQ ID NO: 23992 - DNA, 120 bp, synthetic construct
  source 1..120: mol_type = other DNA
aataatggtacaaaggatagggaaaagatggagttacattgaaacaaaggaaccacatcagattgtaagtccaatccacaagaacaaatcatcagaaacactaaataagtttcatacgaa

SEQ ID NO: 23993 - DNA, 120 bp, synthetic construct; identical to SEQ ID NO: 7051
  source 1..120: mol_type = other DNA

SEQ ID NO: 23994 - DNA, 120 bp, synthetic construct
  source 1..120: mol_type = other DNA
gggatacctgtgaaaggaaaataaatcttggggcccgaaaatcactaagctaaagggaaaagtcaagttgggaactgctgagagcaaacctacgtctcattctattcggtcactcctctg

SEQ ID NO: 23995 - DNA, 120 bp, synthetic construct
  source 1..120: mol_type = other DNA
acacctgtaatcctagcactttgggaggccgaggcggatggatcacccgaggccaggagttcgagaccagcctggccaacatggtgaaaccccgtctctactaaaaatacaaaaattagc

SEQ ID NO: 23996 - DNA, 120 bp, synthetic construct
  source 1..120: mol_type = other DNA
tgcaacaggagcgagcctccatctcaaaaaaaaagaaactcaaaagaaagtaaccatttgtctcttatctacctatgacctggaagccccctcgccacttggagttgtcccaccattgct

SEQ ID NO: 23997 - DNA, 120 bp, synthetic construct; identical to SEQ ID NO: 7052
  source 1..120: mol_type = other DNA

SEQ ID NO: 23998 - DNA, 120 bp, synthetic construct
  source 1..120: mol_type = other DNA
ctttttaaatggaaatacggctactcctcaaaggaaggctaggaattttgctctgtgtgaccctagtcgtagttcttcacagagggctccatttcacttgcctttccttctgcttttttc

SEQ ID NO: 23999 - DNA, 120 bp, synthetic construct
  source 1..120: mol_type = other DNA
tttgatttggtttggtttgcttagtctttctattggtaccacttccttatcccaacctcatcatcttccccgatccctaccaacccactgcaggcatatgagccctaaaatctgggaaag

SEQ ID NO: 24000 - DNA, 120 bp, synthetic construct
  source 1..120: mol_type = other DNA
tagatagatagatagatagatgatagatagatatatagttttttttttttttttttttttgagacggagtttcgctcttgccgctgcccaggctatagtgcaatggcgccatctcggctc

SEQ ID NO: 24001 - DNA, 120 bp, synthetic construct; identical to SEQ ID NO: 7053
  source 1..120: mol_type = other DNA

SEQ ID NO: 24002 - DNA, 120 bp, synthetic construct
  source 1..120: mol_type = other DNA
ccccggactccgccccagattgcataacaactgaggggtgggtccctatttcctctctgggatctgtagccaatcattcacgaggtaaacagaacgaccgagtttctctcagccgagaac

SEQ ID NO: 24003 - DNA, 120 bp, synthetic construct
  source 1..120: mol_type = other DNA
atagttatcaaatgtattcaggtttaaattttacttttctagaaaaaatgtaaataatccgttgagaatatttaatgaaaaatgttggtcgtatctttatctggtctgcggctctgtccc

SEQ ID NO: 24004 - DNA, 120 bp, synthetic construct
  source 1..120: mol_type = other DNA
ctggaacagctcacttattgccccagatgtatgtggagtaaccgccttcagtttcctggttctgagtttccgtgttactcaagcaatgcttctgctgaatttgtcttttttttttttttg

SEQ ID NO: 24005 - DNA, 120 bp, synthetic construct; identical to SEQ ID NO: 7054
  source 1..120: mol_type = other DNA

SEQ ID NO: 24006 - DNA, 120 bp, synthetic construct
  source 1..120: mol_type = other DNA
ggaatgcaatggcgtgatctcggctcactgctacctccacgccccaagtttaaacaattctcctgcctcagcctcccgagtagctgggactacaggtgtgcaccaccacatccagctaat

SEQ ID NO: 24007 - DNA, 120 bp, synthetic construct
  source 1..120: mol_type = other DNA
ctgcacctggttgaatttctccttttaattggaggtttcattttatttttctttatttatttttttgagacgaagttgcactcttgttgcccaggctagagtgcagtggcgcgatctggg

SEQ ID NO: 24008 - DNA, 120 bp, synthetic construct
  source 1..120: mol_type = other DNA
ggttttgccatgttggccagggtggtctcaaactcctgagctcgtgatctgcccacctcagcctcccaaagtgctgggattacaggcgtgagccaccgtgcctggtctcgttctttattt

SEQ ID NO: 24009 - DNA, 120 bp, synthetic construct; identical to SEQ ID NO: 7055
  source 1..120: mol_type = other DNA

SEQ ID NO: 24010 - DNA, 120 bp, synthetic construct
  source 1..120: mol_type = other DNA
gggtgggggaggagcgccctctgggctgccggagtgccccactaggcgcggcaaagtcccgggagtgccattgagaggtgaagccagctgggcttctgggtctggtggggacttggagaa

SEQ ID NO: 24011 - DNA, 120 bp, synthetic construct
  source 1..120: mol_type = other DNA
agcactctgtgtctagctaaaagtttgtaaatgcaccaatcaccactctgtgtctagctaatctggtggggatttagagaacttttgtgtctagctaaaggattgtaaactcaccaatca

SEQ ID NO: 24012 - DNA, 120 bp, synthetic construct
  source 1..120: mol_type = other DNA
tgtaaaatagaacaatcagcaggatgtgggtggggccggatgggggaataaaagcaggccacccaagccagcggcggcaacgtgctcgggtcctcttccacaccgtaaaagctgctttgt

SEQ ID NO: 24013 - DNA, 120 bp, synthetic construct; identical to SEQ ID NO: 7056
  source 1..120: mol_type = other DNA

SEQ ID NO: 24014 - DNA, 120 bp, synthetic construct
  source 1..120: mol_type = other DNA
aaggaagaaactctggacacatctgaacatctgaaggaacaaactctggacacaccatctttaagaactgtaacactcaccgcgagggtacacggcttcattcttgaagtcagcgagact

SEQ ID NO: 24015 - DNA, 120 bp, synthetic construct
  source 1..120: mol_type = other DNA
atgccccactaatttttgtatttattgtagagacggtttcagcatgttgcccaggctggtctccaactcctggactcaagtgatcctctccacctaggcctcccacagtgctgggattac

SEQ ID NO: 24016 - DNA, 120 bp, synthetic construct
  source 1..120: mol_type = other DNA
gtagagggtgtggggaaccactcaaattcagaatatcaaaacagaactttattttttgtgtatttgttgccaatctttttccctacatatgtaatgtttgtttgtttgacatgactacca

SEQ ID NO: 24017 - DNA, 120 bp, synthetic construct
  source 1..120: mol_type = other DNA
caggctggagtgcagtggcagatctcagctcactacaacctctgcctgctgggttcaagtgattctccagcctcagcctcccaagtagctgggattacaggtacccgccaccactcctgg

SEQ ID NO: 24018 - DNA, 120 bp, synthetic construct; identical to SEQ ID NO: 7057
  source 1..120: mol_type = other DNA

SEQ ID NO: 24019 - DNA, 120 bp, synthetic construct
  source 1..120: mol_type = other DNA
ctttacatttctctggagggacttttcattttctctggaaaccaactccaagtgcacttttccagaaggcatttttgtaatgcctggttggctgcatgcgacctctggttttcctccttc

SEQ ID NO: 24020 - DNA, 120 bp, synthetic construct
  source 1..120: mol_type = other DNA
tggcagtggggccagtgggctgggaagagttgcaggagaaacccagtgggagagaaagactccaacctgggaacctcggggcatctggtagcgccagaatgactttccaaaattttggtt

SEQ ID NO: 24021 - DNA, 120 bp, synthetic construct
  source 1..120: mol_type = other DNA
aatctcctctgaattttgcaaccctgtgtgttaaaaacaggtatttctggtctttaaagacacttggaaaagacagacttgttgaatacttagaaaggccaagccacagccagaagcttg

SEQ ID NO: 24022 - DNA, 120 bp, synthetic construct
  source 1..120: mol_type = other DNA
aggtacctggttcatctcattgggactagttggacagtgggtgcagcccatggagggcgagccaaagcagggcagggcatcgcctcacctgggaagtgcaaggggtcaggggatttccct

SEQ ID NO: 24023 - DNA, 120 bp, synthetic construct; identical to SEQ ID NO: 7058
  source 1..120: mol_type = other DNA

SEQ ID NO: 24024 - DNA, 120 bp, synthetic construct
  source 1..120: mol_type = other DNA
cagaacaaaaggcagcagacagctttggcagacctaaacgcccctgtctgacagttctgaagagagcagtggttctcccagcatggcatttgagctccgaaaatggacagactgcctcct

SEQ ID NO: 24025 - DNA, 120 bp, synthetic construct
  source 1..120: mol_type = other DNA
gcaatatttgctgttctgcagcctccgctagtgatatccaggcaaacagggtctggagtggacctccagcaaattccaacagacctgcagctgagggtcctgactgttagaaggaaaact

SEQ ID NO: 24026 - DNA, 120 bp, synthetic construct; identical to SEQ ID NO: 7059
  source 1..120: mol_type = other DNA

SEQ ID NO: 24027 - DNA, 120 bp, synthetic construct
  source 1..120: mol_type = other DNA
tagagaagaccttaaatgacctgatggagctgaaacccatggcacgagaactacatgactcatgcacaagcttcagtagctgattcaatcaagtggaagaaagggtatcagtgattgaag

SEQ ID NO: 24028 - DNA, 120 bp, synthetic construct
  source 1..120: mol_type = other DNA
tacctgaaagtgacggggagaatggaaccaagttacaaaatactcttcaggatgttatccaggaggacttccctaacctagcaaggcaggaaaacattcaaatttaggaaatacaaagaa

SEQ ID NO: 24029 - DNA, 120 bp, synthetic construct
  source 1..120: mol_type = other DNA
aaggggagcccatcagactaacagcggatctctcagcagaaaccttacaagccagaagagagtgggggccaatattcaacatttttaagaaaagaattttcaaaccagaatttcatatcc

SEQ ID NO: 24030 - DNA, 120 bp, synthetic construct
  source 1..120: mol_type = other DNA
ggaaaggaacaactggtatcagccactgccactgcaaaaacatgccaaagtgtaaagaccattgacactatgaagaaactgcatcaattaatgggcaaaataaccagctaacatcatagt

SEQ ID NO: 24031 - DNA, 120 bp, synthetic construct; identical to SEQ ID NO: 7060
  source 1..120: mol_type = other DNA

SEQ ID NO: 24032 - DNA, 120 bp, synthetic construct
  source 1..120: mol_type = other DNA
caataagaagaactaactatcctaaatacatatgcaccccaaacaggagcacccagattcataaagcaagtccttggagacctacaaagagatttagactcccacacagtaataatggga

SEQ ID NO: 24033 - DNA, 120 bp, synthetic construct
  source 1..120: mol_type = other DNA
caccccaaatcaacagaatatacattcttctcagcaccacatcacgcttattctaaaattgaccacataattggaagtaaaacactcctcagcaaatataaaagaacagaaatcacaaca

SEQ ID NO: 24034 - DNA, 120 bp, synthetic construct
  source 1..120: mol_type = other DNA
aatgaaggcagaaataaagatgttgtttgaaaccaatgagaacaaagacacaacataccagaatctctgggacacatttaaagcagtgtgtagagggaaatttagagcactaaatgccca

SEQ ID NO: 24035 - DNA, 120 bp, synthetic construct; identical to SEQ ID NO: 7061
  source 1..120: mol_type = other DNA

SEQ ID NO: 24036 - DNA, 120 bp, synthetic construct
  source 1..120: mol_type = other DNA
tctagaagaaatgaataaattcctggacacatacaccctcccaagactaaaccaggaagaagttgaatccctgaatagaccaataacaggctctgaaattgaggcaataattaatagcct

SEQ ID NO: 24037 - DNA, 120 bp, synthetic construct
  source 1..120: mol_type = other DNA
ccctaactcatttcatgagaacagcatcatcctgataccaaagcctggcagagacacaacaaaaaaagaaaatttaagccaatatccctgatgaacatcaatgcaaaaatcctcaataaa

SEQ ID NO: 24038 - DNA, 120 bp, synthetic construct; identical to SEQ ID NO: 7062
  source 1..120: mol_type = other DNA

SEQ ID NO: 24039 - DNA, 120 bp, synthetic construct
  source 1..120: mol_type = other DNA
tcctagtcaacatagtggtggaagttctggccagggcaatcaagcaagagaaagaaataaagggtattcaattaggaaaagaggaagtcaaattgtctctgtttgcagatgacatgactg

SEQ ID NO: 24040 - DNA, 120 bp, synthetic construct
  source 1..120: mol_type = other DNA
acagacaaacagagagccaaatcatgaatggactcccattcacaattactacaaagaaaataaaatacctaggaatccaacttacaagggatgtgaaggacctcttcaaggagaactaca

SEQ ID NO: 24041 - DNA, 120 bp, synthetic construct
  source 1..120: mol_type = other DNA
gccatccccatcaagctaccaatgactttcttcacagaattggaaaaaactactttaaagttcatatggaacaaaaaaagagcccacattgccaagacaatcctaagcaaaaagaacaaa

SEQ ID NO: 24042 - DNA, 120 bp, synthetic construct
  source 1..120: mol_type = other DNA
ataacaccacacatctacaaccatctgatctttgacaaacctgacaaaaacaagcatggggaaaggatttcctgtttaataaatggtgctgggaaaactggctagccatatgtagaaagc

SEQ ID NO: 24043 - DNA, 120 bp, synthetic construct; identical to SEQ ID NO: 7063
  source 1..120: mol_type = other DNA

SEQ ID NO: 24044 - DNA, 120 bp, synthetic construct
  source 1..120: mol_type = other DNA
accccatcaacaagtgggcgaaggatatgaacagacacttctcaaaagaagacatttatgcagccaaaagacatatgaaaaaatgctcatcatcactggtcaccagagaaatgcaaatca

SEQ ID NO: 24045 - DNA, 120 bp, synthetic construct
  source 1..120: mol_type = other DNA
gtaaatcagttcaaccattgtggaagacaatgcagcgattcctcaaggatctagaactagaaataccatttgacccagccatcccattactgggtatatacccaaaggattataaatcat

SEQ ID NO: 24046 - DNA, 120 bp, synthetic construct
  source 1..120: mol_type = other DNA
gtggaatactatgcagccataaaaaaggatgagttcatgtcctttgcagggacatggatgaagctggaaaccatcattctcagcaaactatcacaaggacagaaaaccaaacactacatg

SEQ ID NO: 24047 - DNA, 120 bp, synthetic construct
  source 1..120: mol_type = other DNA
ctaatgtaaatcaccagttgatgggtgcagcaaaccaccatggcacaggtatacctatgtaacaaacatgcatgttgtgcacatgtaccccagatcttaaagtataataaaataaaaaat

SEQ ID NO: 24048 - DNA, 120 bp, synthetic construct; identical to SEQ ID NO: 7064
  source 1..120: mol_type = other DNA

SEQ ID NO: 24049 - DNA, 120 bp, synthetic construct
  source 1..120: mol_type = other DNA
cggaggttgcagtgagccgagatcgcaccactgcactccagcctaggcgacagagtgagactgtgtctcaaaaaagaaaaaaaaagaaaagaaaagaaaaagaaaaaagaatattttgcc

SEQ ID NO: 24050 - DNA, 120 bp, synthetic construct
  source 1..120: mol_type = other DNA
taacaatttgtaatgcagacatttgatggtctggttctatgttgagttcatgttgatacttggtcttaaggacagttagagctgataaaaataacttgtgcatagaccaggcgcggtggc

SEQ ID NO: 24051 - DNA, 120 bp, synthetic construct
  source 1..120: mol_type = other DNA
agccaggtgcggtggcaggcacctgtagtcccagctacttggaaggctgaggcaggagaatggtgtgaaccttgcagtgagccgagatcacgccactgcactacagcctgggcaacagag

SEQ ID NO: 24052 - DNA, 120 bp, synthetic construct; identical to SEQ ID NO: 7065
  source 1..120: mol_type = other DNA

SEQ ID NO: 24053 - DNA, 120 bp, synthetic construct
  source 1..120: mol_type = other DNA
gaaaattaaataaacccatgacatttgtagccagcagctcgggtgttttgtagggttttccctgagaagtggggactaatcgcatgaatcactttttttttctttttagagtcttatcta

SEQ ID NO: 24054 - DNA, 120 bp, synthetic construct
  source 1..120: mol_type = other DNA
gtggctcacgcctgtaatcccagcactttgggaggccgaggcggacggatcacgaggtcaggagatcgagaccatcctggctaacacagtgaaaccccgtctctactaaaaatatgaaaa

SEQ ID NO: 24055 - DNA, 120 bp, synthetic construct
  source 1..120: mol_type = other DNA
agcctgggcgacagagcaagactccgtctcaaaaaaaaaaaaaaaaaaaaaaaaaaaaaaaaaaaaagccaggcatggttggtggctcacacctgtaatctcagaactttgggaaacagg

SEQ ID NO: 24056 - DNA, 120 bp, synthetic construct; identical to SEQ ID NO: 7066
  source 1..120: mol_type = other DNA

SEQ ID NO: 24057 - DNA, 120 bp, synthetic construct
  source 1..120: mol_type = other DNA
tttctcttgcccttgttttcttcctggccacagtcatgccctggatttcagtgtctctaaacatctagcagcctctcacccagcataacccctgttgaggtccagggcacgatggtggga

SEQ ID NO: 24058 - DNA, 120 bp, synthetic construct
  source 1..120: mol_type = other DNA
ggttggatcacctgaggtcaggagtttgagaccagcctggccaacatggtgaaacaacgtctctactaaaaatacaaaaaattagccaggcgtggtggcaggcacctgtaatcccagcta

SEQ ID NO: 24059 - DNA, 120 bp, synthetic construct
  source 1..120: mol_type = other DNA
aaaaaaaagaagaagaacttcttgacttgactcagcaggactttttccatgggtctaaagctaggtgtgaagagagtgagctcgtggtgagaggaacttgttcatcaaaaggagtccatg

SEQ ID NO: 24060 - DNA, 120 bp, synthetic construct
  source 1..120: mol_type = other DNA
ggaagctgctctcttctgttgtctgtggcttctgttggaggatgtgctgtgggaatgcaaggaggagatggaaggaaggtgtcaatatagctttaacaaaggaaaaaaaaatgaaaacac

SEQ ID NO: 24061 - DNA, 120 bp, synthetic construct; identical to SEQ ID NO: 7067
  source 1..120: mol_type = other DNA

SEQ ID NO: 24062 - DNA, 120 bp, synthetic construct
  source 1..120: mol_type = other DNA
tattttttgttttgtttgctttgagacaaggtcttgctctgtcaccaaggctggagtgcagtgatcatagctcactgcagtctctatctcctgggctcaagtgaaccttccacctcagcc

SEQ ID NO: 24063 - DNA, 120 bp, synthetic construct
  source 1..120: mol_type = other DNA
tgtctggctctgttgttcaggctggtctcaaactcctggactcaagcgatcctcctgcctcagcctcccaaactgctggggttacaggcacgagccaccttgcccagctcaggcttttcc

SEQ ID NO: 24064 - DNA, 120 bp, synthetic construct
  source 1..120: mol_type = other DNA
gcagcacccattccctagccacctgcccagcaaactatctttttttttctttttttcttgagactctgtcgcccaggctgtagtgcagtggtgcaatcatggctcacagcagcttcaacc

SEQ ID NO: 24065 - DNA, 120 bp, synthetic construct; identical to SEQ ID NO: 7068
  source 1..120: mol_type = other DNA

SEQ ID NO: 24066 - DNA, 120 bp, synthetic construct
  source 1..120: mol_type = other DNA
ttgggtggttacaacagtatcagcatatacagtagaattgtaatatccatcatataccaactgcaaattaattttaaaagatatattgttaaaaccatataagtgatataagtaatttac

SEQ ID NO: 24067 - DNA, 120 bp, synthetic construct
  source 1..120: mol_type = other DNA
tggagtgcagtggcgcgatctcagcccaccgaaacctctgcctcctgggttcaagcgattctcctgcctcagcctcctgagtagctgggattacaggcgcccgccaccatgcccggctaa

SEQ ID NO: 24068 - DNA, 120 bp, synthetic construct
  source 1..120: mol_type = other DNA
actgcacccagcttaaaacaatgttttaacctcttgttgataagagtgtaaacttatcacctttgggggaagtaatttagtacctattaatattaaacattttcataacctttgatttag

SEQ ID NO: 24069 - DNA, 120 bp, synthetic construct; identical to SEQ ID NO: 7069
  source 1..120: mol_type = other DNA

SEQ ID NO: 24070 - DNA, 120 bp, synthetic construct
  source 1..120: mol_type = other DNA
tctttcttttttttttttttttttaacagatgagggttttctctgtcacccaggtggctggagtgcaatggtgtaagcttggctcactgcagcctcaacctcctgggctcaactgatctt

SEQ ID NO: 24071 - DNA, 120 bp, synthetic construct
  source 1..120: mol_type = other DNA
ggctgaagcagtcctcccacctcggcctcccagatgctgggattacagacgtgagccaccacacccggcccatcccaccgccttgctgtggcagggagagcaatagcctctcttcatctc

SEQ ID NO: 24072 - DNA, 120 bp, synthetic construct
  source 1..120: mol_type = other DNA
gggactacaaacattccattcatggcaactaggaatttatagaaacactccctctagtgtgcaaaaaagtaagtacaagaatttttggggtttttttgttttttgttttgttttgttttg

SEQ ID NO: 24073 - DNA, 120 bp, synthetic construct; identical to SEQ ID NO: 7070
  source 1..120: mol_type = other DNA

SEQ ID NO: 24074 - DNA, 120 bp, synthetic construct
  source 1..120: mol_type = other DNA
ggccaggctggtctcgaactcctgacctcgtgatccacctgcctcagcctcccaaagtgctgggattacaggtgtgagccaccgcgcccagcctaatttttgtattttttgtagagatag

SEQ ID NO: 24075 - DNA, 120 bp, synthetic construct
  source 1..120: mol_type = other DNA
tttgaggcattatgtctactagtgaataatgggggggggggccgtggggggagtaccagaatagttaaagtaggctgtgtatatacaatgaaatatcacagtatcattttgtaaagatct

SEQ ID NO: 24076 - DNA, 120 bp, synthetic construct
  source 1..120: mol_type = other DNA
tttttcaatcttcccctccatccatctttgctgatatataaacaggaaaaagttgggggagagaatacaggaacacggaacaaacagtaaacaatggttatctcatagacgtgattggcg

SEQ ID NO: 24077 - DNA, 120 bp, synthetic construct; identical to SEQ ID NO: 7071
  source 1..120: mol_type = other DNA

SEQ ID NO: 24078 - DNA, 120 bp, synthetic construct
  source 1..120: mol_type = other DNA
tagagggcatttttgctttctgagttagtcagggttctccagagaaatagaatatacatacatacgtacatacatacatacttgcagagagagaaagagagagtgtgacttattttaagg

SEQ ID NO: 24079 - DNA, 120 bp, synthetic construct
  source 1..120: mol_type = other DNA
gaccagaacaaaagagagaggacagccttttgttctaaccaggtcttcaactgattggatgaagcccaccctcattacatttaaagttcaccaatttaaatgtaaatctcatccaaaaac

SEQ ID NO: 24080 - DNA, 120 bp, synthetic construct
  source 1..120: mol_type = other DNA
acatcgtaatgagatctgctgctatctatgaatttatgtttctagtgtatttgtaaggtacatggatcattcctttatttctctctctatatatatagatatatatatactttttataat

SEQ ID NO: 24081 - DNA, 120 bp, synthetic construct; identical to SEQ ID NO: 7072
  source 1..120: mol_type = other DNA

SEQ ID NO: 24082 - DNA, 120 bp, synthetic construct
  source 1..120: mol_type = other DNA
ctgcagattttggatttgccaacccctatgatagcatgaaacagttctttcatctgattggttctaactctctggaacaccctaactaatacagtgctgttataggtactgagaatagag

SEQ ID NO: 24083 - DNA, 120 bp, synthetic construct
  source 1..120: mol_type = other DNA
tggccatagaggaactcatgcaggagaaactcaccttgcctaggttgaaaggaggggaatcaggcacatattcccctctgaggaatatgtcagcagagactggatgtggcaagactacag

SEQ ID NO: 24084 - DNA, 120 bp, synthetic construct
  source 1..120: mol_type = other DNA
agaaacagaaataagaccaggtgctgggaccaggagtcctacactcatcacactcagttactcatggggtgacttcagaagccctaaaagattttgtttcccaatttttttttttttttg

SEQ ID NO: 24085 - DNA, 120 bp, synthetic construct; identical to SEQ ID NO: 7073
  source 1..120: mol_type = other DNA

SEQ ID NO: 24086 - DNA, 120 bp, synthetic construct
  source 1..120: mol_type = other DNA
ctcgaactactgacctcaagtgataacgcccgcctcagcctcccaaaatgctgggattacaggcatgagccactgtgcctggcccaatgcaattttaagatgattttatgtatattgtag

SEQ ID NO: 24087 - DNA, 120 bp, synthetic construct
  source 1..120: mol_type = other DNA
ttggaaataccaatatgaattcatgattttttttaaaccctaaatgtgacttaaagcgatgacacctctgtagcaacgagctctcccagcactaaagaccattcctcactaaaacgaatc

SEQ ID NO: 24088 - DNA, 120 bp, synthetic construct
  source 1..120: mol_type = other DNA
cgggcagatcacaaggtcaggagatcgagaccatcctggcgaacacagtgagaccctgtctctactaaaaatacaaaaaagtagacaggcatggtggtgggcacctgtagtcccagctac

SEQ ID NO: 24089 - DNA, 120 bp, synthetic construct; identical to SEQ ID NO: 7074
  source 1..120: mol_type = other DNA

SEQ ID NO: 24090 - DNA, 120 bp, synthetic construct
  source 1..120: mol_type = other DNA
ggaggcagaggttgcagtgagctgagatcatgccactacacttcagcctgggtgacagagtgagactctgtctcaagaaaaaaaaaggaaagaaagaaagaaaaaagaaaaagaaaaatg

SEQ ID NO: 24091 - DNA, 120 bp, synthetic construct
  source 1..120: mol_type = other DNA
tagcttaaaagggctcccactggggccctctcccaatctagatcattctggccaataaggtgaaaccccgtctgtactaaaaatacaaaaattagctggccatggtggcatgcacctgta

SEQ ID NO: 24092 - DNA, 120 bp, synthetic construct
  source 1..120: mol_type = other DNA
aattaaaaaaaaaaaaaaaggctcccactggacacataaggtacagttcgagcacaaaaaaataatgactgtaaccaattgtgaaatattaaatggatacctggcatggtgtagtcccag

SEQ ID NO: 24093 - DNA, 120 bp, synthetic construct; identical to SEQ ID NO: 7075
  source 1..120: mol_type = other DNA

SEQ ID NO: 24094 - DNA, 120 bp, synthetic construct
  source 1..120: mol_type = other DNA
aaagaaaaaaaataaattttctacctttggagattaatatcataccaataccttattctgaaaactggtaaagggaaataagcatttaccttgccttttagaaggaccctactttggccg

SEQ ID NO: 24095 - DNA, 120 bp, synthetic construct
  source 1..120: mol_type = other DNA
ggaccctactttttccagttggtgagagaaagctccttcctaggtaattatgcccttataaatgtagaagtgggagaattagaaaagcaccttttgtaatttctgatgaaataaccaatt

SEQ ID NO: 24096 - DNA, 120 bp, synthetic construct
  source 1..120: mol_type = other DNA
gatctgaccgtgtccatcctaaccaagcaatcatacttagcatcactgcttgtgggatggcttcatatcatatgccttctgatgtgaggcaatgtgacatatatagcaagtttgaggaat

SEQ ID NO: 24097 - DNA, 120 bp, synthetic construct; identical to SEQ ID NO: 7076
  source 1..120: mol_type = other DNA

SEQ ID NO: 24098 - DNA, 120 bp, synthetic construct
  source 1..120: mol_type = other DNA
atgctataaaaggcattcaaattggagaagtttaatgctagatgacattaaaaattattaactcattaaacatgatgattctattatgattgtgtaagagatgtatatgaagtatttagg

SEQ ID NO: 24099 - DNA, 120 bp, synthetic construct
  source 1..120: mol_type = other DNA
agcaattttcccacctcagcgtcctgagtagctgggatcataggcatgtaccaccatgcccggctaattttttgtatttttagtagagacggggtttcaccatgttggccaggctggtct

SEQ ID NO: 24100 - DNA, 120 bp, synthetic construct
  source 1..120: mol_type = other DNA
tgcaatcccagcactttgggaggccgaaggaggcggatcacctgaggtcaggagtttgaggccaccttggccaacgtggtgtaatctcgtctccactaaaaatacaaaaattagccaggc

SEQ ID NO: 24101 - DNA, 120 bp, synthetic construct; identical to SEQ ID NO: 7077
  source 1..120: mol_type = other DNA

SEQ ID NO: 24102 - DNA, 120 bp, synthetic construct
  source 1..120: mol_type = other DNA
cagcctggccaatatggtgaaaccccatttctactaaaaatacaaaaattagttgggcgtggtggtgggcgcctgtaatcccagctacttgagaggctgaggcaggagaaccgcttgaac

SEQ ID NO: 24103 - DNA, 120 bp, synthetic construct
  source 1..120: mol_type = other DNA
gtctgggtatttactaaagagatttgaaatcagtatgtcgaggagatacctgcactctcatgttcgctgcagcactattaaccacagtgaagttacatagtcaaacgagtgttcatcagc

SEQ ID NO: 24104 - DNA, 120 bp, synthetic construct
  source 1..120: mol_type = other DNA
ggctaacacggtgaaaccccatctctactaaaagtacaaaagaattagctgggcgtggtggcaggcgcctgtagtcccagctactctggaggctgaggcaggagaatcacttcaacctgg

SEQ ID NO: 24105 - DNA, 120 bp, synthetic construct; identical to SEQ ID NO: 7078
  source 1..120: mol_type = other DNA

SEQ ID NO: 24106 - DNA, 120 bp, synthetic construct
  source 1..120: mol_type = other DNA
tggggtaaatggggatatgatggttaaaggttacaaagcttcattggactggaaaaataagcttttctttttctttgagatatactgcacagcaaagtgaatatagtaaataattcttgg

SEQ ID NO: 24107 - DNA, 120 bp, synthetic construct
  source 1..120: mol_type = other DNA
aaacattctcaccacaaaaaaagtaagtatttaaaagtgatagatgttgggccgggtgcagtggctcacgtctgtaatcccagcactttgggaggtggaggtgggtggatcacctgaggt

SEQ ID NO: 24108 - DNA, 120 bp, synthetic construct
  source 1..120: mol_type = other DNA
aagaatcacttgaacccgggaggcggaagttgcagtgagccgagattgcaccactgcactccagcctgggcaacaagagtgaaactccatctcaaaaaaaaaaaagtgatagatgttaat

SEQ ID NO: 24109 - DNA, 120 bp, synthetic construct
  source 1..120: mol_type = other DNA
aggtaatgacaacaaaaaaaatggataagtagacagaaaaatcgattaatacagaagctggcaaaaactagtaaagcaaatatggcaaaatgtagaatttgttgaatctttcagtatttg

SEQ ID NO: 24110 - DNA, 120 bp, synthetic construct; identical to SEQ ID NO: 7079
  source 1..120: mol_type = other DNA

SEQ ID NO: 24111 - DNA, 120 bp, synthetic construct
  source 1..120: mol_type = other DNA
tcaaagtagaagctaaactattcagaagcagtagcaactccatgattccaaggtaatttaaacaggcaatttcagagtgcttcaagatgaaggcgcaaagcagcctctcagcctgcagtg

SEQ ID NO: 24112 - DNA, 120 bp, synthetic construct
  source 1..120: mol_type = other DNA
ttttactgcatattgcagttactcgtatattactgacactggaacagacatgttttaacaaactggttgagccgtatcagtgcgaaccagctgaatgtcagcgctgttccctcctgtgac

SEQ ID NO: 24113 - DNA, 120 bp, synthetic construct
  source 1..120: mol_type = other DNA
tcatcactaagccccaccttccagcattttcacctttctccttcacttgatccttcttcctaacatcgtgttaacacactccaaactaaaaaagttcctcaactgcatatactctgctcc

SEQ ID NO: 24114 - DNA, 120 bp, synthetic construct; identical to SEQ ID NO: 7080
  source 1..120: mol_type = other DNA

SEQ ID NO: 24115 - DNA, 120 bp, synthetic construct
  source 1..120: mol_type = other DNA
tttatatgtttcctgctttcttcctcagccttctctgctccccacacctatatgttgatgatgcccaaatctctgtctccagccacgacctctctttccccaagctccatttgcataaac

SEQ ID NO: 24116 - DNA, 120 bp, synthetic construct
  source 1..120: mol_type = other DNA
gttgccaagtcagaaacaggatgtatactcttgacttgtctctctcccctacacagcaaaacaatcccaagacatgtcaattctatctcctgagcaacccataaaacgatttctcttctt

SEQ ID NO: 24117 - DNA, 120 bp, synthetic construct
  source 1..120: mol_type = other DNA
caaaccagtctccacactgcaaccatagtgatctaaggcacaattctcaccttttcagtcttaggcttaaagttcaacatccctctggatacagtctaaatctttaacacggctgaaaag

SEQ ID NO: 24118 - DNA, 120 bp, synthetic construct
  source 1..120: mol_type = other DNA
agttacagtcttccaaagttgtcatgtttcttgacctttgctgtctcctctgcccagaatgcaatttccctgtctggctaactcctgtccagcatttggcctcagcatggacatctgttc

SEQ ID NO: 24119 - DNA, 120 bp, synthetic construct; identical to SEQ ID NO: 7081
  source 1..120: mol_type = other DNA

SEQ ID NO: 24120 - DNA, 120 bp, synthetic construct
  source 1..120: mol_type = other DNA
ctccaataaattgtgagcgccacaaagaaccatttctatctcacttaccacttggaagtgactggcaggtagtaattgctcaacaaatgttctatgagtgaatgaatccttgggataatt

SEQ ID NO: 24121 - DNA, 120 bp, synthetic construct
  source 1..120: mol_type = other DNA
tagagctattgtattatattattattattctattcctaccctctattgcttgagagtaggatattgccttattcaattttggttattgtcccagaactcagggatatatgtctggcatat

SEQ ID NO: 24122 - DNA, 120 bp, synthetic construct
  source 1..120: mol_type = other DNA
accacacacagctaccctgttccagaagcaggactataatcccatctggaaaaagggaaacttggaagttgacatctaaatgaaattccagcatggatgagagaagccctgatttctctc

SEQ ID NO: 24123 - DNA, 120 bp, synthetic construct
  source 1..120: mol_type = other DNA
gcccttggtttcctgtgtctttgtagtcagttctaacctcagcctcaggcactggtgttggggccctattcatcctcatctgcacgtccctcagttcttttcctgttgctattatcctat

SEQ ID NO: 24124 - DNA, 120 bp, synthetic construct; identical to SEQ ID NO: 7082
  source 1..120: mol_type = other DNA

SEQ ID NO: 24125 - DNA, 120 bp, synthetic construct
  source 1..120: mol_type = other DNA
tttccttttctatcagtgaggccaaagagccccagatgggagacaggtggatttttctctcagctgggaccttttctctttcttgtctagcacattttgggaaaccttcaagtacattct

SEQ ID NO: 24126 - DNA, 120 bp, synthetic construct
  source 1..120: mol_type = other DNA
aagcaatatgtggccaaacaccttagcctctttaaatatactttcctttgctccttggttaacagggtctgtctgctcgcattagagaaactgcccagtgactcagatcctgaaaggatc

SEQ ID NO: 24127 - DNA, 120 bp, synthetic construct
  source 1..120: mol_type = other DNA
caatacagacaacactggcagtcaataaaaaagctcattctcccatttctaaaagaattcaatctaggagtctagctgctggcttaacaaagggatatacagcaaagcctaaggtgccct

SEQ ID NO: 24128 - DNA, 120 bp, synthetic construct
  source 1..120: mol_type = other DNA
agagtaaatggaattcaggaggctggttctgtgcccgcccctatgtacctcaaatactcgtagctgccaagcttttaaacaatgaaacttaacactgtacttaaagggctgttctgctca

SEQ ID NO: 24129 - DNA, 120 bp, synthetic construct; identical to SEQ ID NO: 7083
  source 1..120: mol_type = other DNA

SEQ ID NO: 24130 - DNA, 120 bp, synthetic construct
  source 1..120: mol_type = other DNA
acaattcctgtaaaaatctcattaagagacatcagcttgggacacagttcctctcttactgttccttctcccagaagctcctggaatgagcaggtctggcggcagggggcacacagggct

SEQ ID NO: 24131 - DNA, 120 bp, synthetic construct
  source 1..120: mol_type = other DNA
ttcagagactgagaacctactaaactcctaagagaactttcccttgcaaagagaatgcatgaaaaaagaagggagaagaggagagaagcctcccacagctgttagcctggaacagccgct

SEQ ID NO: 24132 - DNA, 120 bp, synthetic construct
  source 1..120: mol_type = other DNA
gcgctgggcgaggaactcagcactcatcctcacccagcagggcataagggtttcggccagccaggctggaccctggagccgaggttggggtctcctcatccccttctccctcctcatccg

SEQ ID NO: 24133 - DNA, 120 bp, synthetic construct; identical to SEQ ID NO: 7084
  source 1..120: mol_type = other DNA

SEQ ID NO: 24134 - DNA, 120 bp, synthetic construct
  source 1..120: mol_type = other DNA
ttaccctcagtttgcagatcaggaaaatatcacagatgttaagtaacagagctagccaacaggtacagaatccaggtttgaccctctctctggccacaaagcccacacccttttacctac

SEQ ID NO: 24135 - DNA, 120 bp, synthetic construct
  source 1..120: mol_type = other DNA
gctctgtacacatcattccgagccgccttggctgtcttgtaaccacgtttctctgcccaggctggaggaagaaaagaataatggaaagggaaagcattaaccaggtaccagttatactcc

SEQ ID NO: 24136 - DNA, 120 bp, synthetic construct
  source 1..120: mol_type = other DNA
gaggagaggaaaggagacagggaagggtaaaaggcgaggcaggtaaggaagagcagctgaaaccaggtggggcgaagccaggcacatggaactcaccttcacagatgtcccaggcacacc

SEQ ID NO: 24137 - DNA, 120 bp, synthetic construct; identical to SEQ ID NO: 7085
  source 1..120: mol_type = other DNA

SEQ ID NO: 24138 - DNA, 120 bp, synthetic construct
  source 1..120: mol_type = other DNA
attgatcagcgaggactttcccacattagggaaacctgaggaaggcaaggaaaattaacgtttaacaggtttctactctgtgatgggacttggtgctatacctataggtaaaaggggaac

SEQ ID NO: 24139 - DNA, 120 bp, synthetic construct
  source 1..120: mol_type = other DNA
acttaccagctttgtgatgtcagggcaactaactttctgagcctctgtttcttcattttacagtgtggacacctccctacctcagggtggtcaggattaaatgagataaccaatacaact

SEQ ID NO: 24140 - DNA, 120 bp, synthetic construct
  source 1..120: mol_type = other DNA
gaggccaaggcgggtggatcacctgaggtcaggacttcaagaccagcctggccaacatggtgaaaccccatctctactaaaaatacaaaaattagctgggcgtggtggtgggcgcctgta

SEQ ID NO: 24141 - DNA, 120 bp, synthetic construct; identical to SEQ ID NO: 7086
  source 1..120: mol_type = other DNA

SEQ ID NO: 24142 - DNA, 120 bp, synthetic construct
  source 1..120: mol_type = other DNA
ccctgacaactcatctttccagctcacttactctggttactccatgccagtaagtctttgacccctgaccttaacacagtaacactatgcaatacccaactcgtgtcctcaatttccttc

SEQ ID NO: 24143 - DNA, 120 bp, synthetic construct
  source 1..120: mol_type = other DNA
ctctatcttactcacctggcaaaatcccaaccctgtaaaatccagctctgcccattcagcactgctcctgggcagctgactgtggctaagaaaagatgtaccactgtgctcactctttac

SEQ ID NO: 24144 - DNA, 120 bp, synthetic construct
  source 1..120: mol_type = other DNA
ctacttttttcaccatttcttcctgctatcttctttgtaactgtaaactacaacatacaaaaaaatgcacagaacatacatgtgcagcctgatgaaccccataccacccaatgtgtgaca

SEQ ID NO: 24145 - DNA, 120 bp, synthetic construct; identical to SEQ ID NO: 7087
  source 1..120: mol_type = other DNA

SEQ ID NO: 24146 - DNA, 120 bp, synthetic construct
  source 1..120: mol_type = other DNA
ccgccactcatccttcttgatcataatcctctccctctatacatgcaagctttatccttttaaggaaatcaactccttacatttctctttagtttatgacctgtgtatctctcaacaatg

SEQ ID NO: 24147 - DNA, 120 bp, synthetic construct
  source 1..120: mol_type = other DNA
cagcttaattttgcagctttcaaacttgatagaactgaaattgtgcagtatggatgctattgggtcagactcttttcacacaatgttatgtgaagttgttgcaccttctctcatgggcct

SEQ ID NO: 24148 - DNA, 120 bp, synthetic construct
  source 1..120: mol_type = other DNA
ctttcctcttcaaacaccttcttcatttgacttctgggacgctcccttggttttcctccttctcactgtcctttgcccaactaaatgctggcttgtcctaaggctcagtccttgacctcc

SEQ ID NO: 24149 - DNA, 120 bp, synthetic construct
  source 1..120: mol_type = other DNA
tcaccgtaacctctgcctccaggattcaagcaattctcctgcctcaccctcctgagtatctgggactacaggcacgcaccaccacacacggctaattttctgtattttttggtagagaca

SEQ ID NO: 24150 - DNA, 120 bp, synthetic construct; identical to SEQ ID NO: 7088
  source 1..120: mol_type = other DNA

SEQ ID NO: 24151 - DNA, 120 bp, synthetic construct
  source 1..120: mol_type = other DNA
acaaaaacctggaagtccttctttatcctcactttccttcacgtgccaactgcaagccatcagcgatctcattttctctaccttcaaaatatatcatgcttccggccctgtctcaccacc

SEQ ID NO: 24152 - DNA, 120 bp, synthetic construct
  source 1..120: mol_type = other DNA
aggtaaacttataagaaacaaaatcagatcctatcattcccctgttcaaaacctacccttggcttctcatgagacttggaataaaatccaaaatggctgtcacagcctcagggctctaca

SEQ ID NO: 24153 - DNA, 120 bp, synthetic construct
  source 1..120: mol_type = other DNA
accctttccccacagttctgaatggctcacttcatctcatcatccagttctctcctcagggaggttttccctgagcacctctcctctcagtcactctctatcccctttcattgctttatt

SEQ ID NO: 24154 - DNA, 120 bp, synthetic construct; identical to SEQ ID NO: 7089
  source 1..120: mol_type = other DNA

SEQ ID NO: 24155 - DNA, 120 bp, synthetic construct
  source 1..120: mol_type = other DNA
agcaatcactcagcagtaaggcaggttcttccaaagacaaaaaggacacagagataagtcagggcacttccaaggaacccaactacctactccacactcccaaatttattctgggttggg

SEQ ID NO: 24156 - DNA, 120 bp, synthetic construct
  source 1..120: mol_type = other DNA
gtgagctgagacaaagcccttaagaggagattctccttggcaacaaacttaaagggttaaaacctagaagaatactaattcttgctgagctcctactatgatttgataatcactgtacta

SEQ ID NO: 24157 - DNA, 120 bp, synthetic construct
  source 1..120: mol_type = other DNA
ctgagttttaacaataataattgttattattgttatcactatttgtcaggcattcttacactctcttaacactattcccatcattcctcacatccattctttttttttaaagacagggtc

SEQ ID NO: 24158 - DNA, 120 bp, synthetic construct; identical to SEQ ID NO: 7090
  source 1..120: mol_type = other DNA

SEQ ID NO: 24159 - DNA, 120 bp, synthetic construct
  source 1..120: mol_type = other DNA
gtaactaagactcagagtagcaaaatcacttactcaagacctcacagctgagaagaggtggaatttaactcaggctgtcatgatccttccactgcagcagacgcctcttctgccttgccc

SEQ ID NO: 24160 - DNA, 120 bp, synthetic construct
  source 1..120: mol_type = other DNA
cacttccttacccacacagccgatggtcaccaccccatccttgtagcgctcttgggttgggccagttggctccattgctgaatcagtctgctgctccaccaggactgctgggccatcctc

SEQ ID NO: 24161 - DNA, 120 bp, synthetic construct
  source 1..120: mol_type = other DNA
cccagggctgctgtgcatgatggcacatactgtgccctgcacagattatgtaactggcaccctctggagttgtacagtgccaacctaaataagagcaggtcagagaatctcccaaaagtc

SEQ ID NO: 24162 - DNA, 120 bp, synthetic construct; identical to SEQ ID NO: 7091
  source 1..120: mol_type = other DNA

SEQ ID NO: 24163 - DNA, 120 bp, synthetic construct
  source 1..120: mol_type = other DNA
aagactgagatcagagggcacaaaaggatgggcacacgggcttaggcctctcatctctcccaccacccttaggcccaagaccaggtgcccccttgtcaataagcctctctgttctcccct

SEQ ID NO: 24164 - DNA, 120 bp, synthetic construct
  source 1..120: mol_type = other DNA
ggggatagtgttgatggaaataatgcttccaggcaaccacaagagctggcggggccagatccaccttgttcaaaaccagcaccagggccagtccaagttctccagtcacatactcataaa

SEQ ID NO: 24165 - DNA, 120 bp, synthetic construct
  source 1..120: mol_type = other DNA
ctggtggtagcagactctgggctaaaaactataaaccagacaaactgaaaaacaaagacaaaacaggggttagtaatacttctgagtctcagagggcttcctataggtcatgattagaga

SEQ ID NO: 24166 - DNA, 120 bp, synthetic construct; identical to SEQ ID NO: 7092
  source 1..120: mol_type = other DNA

SEQ ID NO: 24167 - DNA, 120 bp, synthetic construct
  source 1..120: mol_type = other DNA
attcacacagggcagtccagcagcagtctacagccttaactactactctagcattccaggtgggttctgtagcaactgatgtggcagtgctagagaaatgagataaggaagaaagggcat

SEQ ID NO: 24168 - DNA, 120 bp, synthetic construct
  source 1..120: mol_type = other DNA
agagtgagctggccaagggaggaatgacaggctataagagaataaaaaactgagttcctaactgcggacatcagcactaggtagagattagaaagacaggaagatagatacctctctgtc

SEQ ID NO: 24169 - DNA, 120 bp, synthetic construct
  source 1..120: mol_type = other DNA
tctctaacacccgccacagctgcctccatgtctaaaaagacaggatcaggaagagaaactgaaaacagagtccctctccagcctgatcccaaaccaatttgaccataggtcactatgccc

SEQ ID NO: 24170 - DNA, 120 bp, synthetic construct; identical to SEQ ID NO: 7093
  source 1..120: mol_type = other DNA

SEQ ID NO: 24171 - DNA, 120 bp, synthetic construct
  source 1..120: mol_type = other DNA
aactcagcactgaccggctgtagaacttgctcccgggctgctctctttctcctctctacctcctccctgctgtctctctcaaaatgcagtcggtatctaagggaacagggaccgagacat

SEQ ID NO: 24172 - DNA, 120 bp, synthetic construct
  source 1..120: mol_type = other DNA
ttctttcaggcaatactcagccttctccttctaaaagcccaactctctccagcccctctggaaaggaagactgtggcccgctgtggggagccgagtggctagcggagaactgtggcatcc

SEQ ID NO: 24173 - DNA, 120 bp, synthetic construct
  source 1..120: mol_type = other DNA
ggacccagcccctgagaaggctgctggttaagcctgcggatatgatgggtcacagactccccgtccgaggtgtcggtctgttcctctcgccgctcccggctcccgctgcggctgttggaa

SEQ ID NO: 24174 - DNA, 120 bp, synthetic construct; identical to SEQ ID NO: 7094
  source 1..120: mol_type = other DNA

SEQ ID NO: 24175 - DNA, 120 bp, synthetic construct
  source 1..120: mol_type = other DNA
gtgcagcgggcacacccctccttccagatgtgcggaagcccgagccccgccccctcctcccgctcccgcactgacctctcttccgctcccgtttgtcctgcaactgcttcttcttctgct

SEQ ID NO: 24176 - DNA, 120 bp, synthetic construct
  source 1..120: mol_type = other DNA
accctagaggaggcggggctagcaggtgacgtcagcgggcgggcccgacagaattaccgccgcggcggcgatggaaggcggacgggggagatatagtcacttccctccaggagcgaggcg

SEQ ID NO: 24177 - DNA, 120 bp, synthetic construct
  source 1..120: mol_type = other DNA
aactcgcgttcggaggagggggggcgcgtgtcatcactaccttgcgctcccgggagaacctaccactcacctggagggggcggcggagcggagggcggggcctactacctaggggagagg

SEQ ID NO: 24178 - DNA, 120 bp, synthetic construct; identical to SEQ ID NO: 7095
  source 1..120: mol_type = other DNA

SEQ ID NO: 24179 - DNA, 120 bp, synthetic construct
  source 1..120: mol_type = other DNA
ggcccgagagcctgttgactctgtgacacactctgaggagctggttgtggtgttttccagcgagggaagaaaagagtaattttttcaaagcatttatagaaacgcagcaaagggaaggtg

SEQ ID NO: 24180 - DNA, 120 bp, synthetic construct
  source 1..120: mol_type = other DNA
caccgaccccccggaagcggaaacagaatccccgcgtgccccttcctcactaccctccaaatcccgctgcagccattgccgcagacacgatgccgaaacgaaagaagcagaatcatcacc

SEQ ID NO: 24181 - DNA, 120 bp, synthetic construct
  source 1..120: mol_type = other DNA
gggcaaggggctaggggctaataaggtgcgaaggagggggctgtaacggaaggaggaagggcgcacgcgctggggagggatggaagtggggctctcccaaatggagccttgaaccaggag

SEQ ID NO: 24182 - DNA, 120 bp, synthetic construct; identical to SEQ ID NO: 7096
  source 1..120: mol_type = other DNA

SEQ ID NO: 24183 - DNA, 120 bp, synthetic construct
  source 1..120: mol_type = other DNA
cagctttgcagaaaaaagggcagatagatggggtgagaactcccaagactgctgaaaatatacctgactttactggttgaattaagaaataagtaatacaagaaaaacacctaagaacag

SEQ ID NO: 24184 - DNA, 120 bp, synthetic construct
  source 1..120: mol_type = other DNA
aggaggaaggggccctgatccttgtattaggtcgtagagaagacagcaagggaggggataaaacccaggaaggacttaaaaataaaagatcagggattccatccctaaatgaatggagag

SEQ ID NO: 24185 - DNA, 120 bp, synthetic construct
  source 1..120: mol_type = other DNA
cattattatagggaaatgcaaaatatcaaggcgactatcaagacaatcttgaagtgggagggcttactatgaatatcaagatttgtaagctgggcatggtggcacacgcctgtagtccca

SEQ ID NO: 24186 - DNA, 120 bp, synthetic construct; identical to SEQ ID NO: 7097
  source 1..120: mol_type = other DNA

SEQ ID NO: 24187 - DNA, 120 bp, synthetic construct
  source 1..120: mol_type = other DNA
tagatctaagtataaaaggtaagagaataattattctagaaagtaaatgtattttctaagagtagctaagagttcttaaacagacaagaaatgcacgtatacacactaaccataaaggaa

SEQ ID NO: 24188 - DNA, 120 bp, synthetic construct
  source 1..120: mol_type = other DNA
gaccagcctgaccaacatggtgaaacccctgtctctactaaaaatacaaaaattagccgggcatggtggtgtgtgcctgtaatcccagctactgaggaggctgagacaggagaatcgctt

SEQ ID NO: 24189 - DNA, 120 bp, synthetic construct
  source 1..120: mol_type = other DNA
cattaagaaattaacaggaagccatacaatagaagatatttgcaataaatataacaaataaagatcctgtatctataatatataaagaactcttccagacaagccatttgaaaaattgac

SEQ ID NO: 24190 - DNA, 120 bp, synthetic construct; identical to SEQ ID NO: 7098
  source 1..120: mol_type = other DNA

SEQ ID NO: 24191 - DNA, 120 bp, synthetic construct
  source 1..120: mol_type = other DNA
atgttcatagcagcagtattcacaataacaaagaggtggaagcaacccacatgtccactgatggaaggataaatgtggcgtgtacatacaatggaatattattcagccttatgaaggaag

SEQ ID NO: 24192 - DNA, 120 bp, synthetic construct
  source 1..120: mol_type = other DNA
gcttcacgcctgtaatcccagcactttgggaggccaaggcaggcagatcacttgaggtcaggagttcgagaacagcctggccaatatggcaaaaccctgtctctactaaaaatagaaaaa

SEQ ID NO: 24193 - DNA, 120 bp, synthetic construct
  source 1..120: mol_type = other DNA
gcctggatgacagagcaagattgtcaaaacaaaaaataaaaataaagtcaacttcaaagaaacagtagaatgatggttaccagaggctgggggaaggaagctggaggaaggggagttttg

SEQ ID NO: 24194 - DNA, 120 bp, synthetic construct
  source 1..120: mol_type = other DNA
aattcaagaccagcctggccaatatggtaaaactccatctctactaaaaatacaaaaattagccaggcgtggtggtgggcgcctgtaatcccagctacttgggaggctgaggcaggagaa

SEQ ID NO: 24195 - DNA, 120 bp, synthetic construct; identical to SEQ ID NO: 7099
  source 1..120: mol_type = other DNA

SEQ ID NO: 24196 - DNA, 120 bp, synthetic construct
  source 1..120: mol_type = other DNA
caaaaaaataaccaccacttttcacactcaccatggcaaaatttaaaaacctaacaattccaagtgttgtcaaggctataggacaactgctggtgagagtgcaaattggtataaccactg

SEQ ID NO: 24197 - DNA, 120 bp, synthetic construct
  source 1..120: mol_type = other DNA
aaaaatgtttatagtggcatttctcgttatagccccaaactggataccacccacatgtccatcatcagtagaatggataaataaattgttgtgtatgcatgcaatgggactacactgcaa

SEQ ID NO: 24198 - DNA, 120 bp, synthetic construct
  source 1..120: mol_type = other DNA
aaacaggcaaaaactaacctatggtgtcaggatagtggttacctttggggaggagggtgggtaatgggaaaaggggcacaaggggaggatcttttgaggtgctaataaggctttatctct

SEQ ID NO: 24199 - DNA, 120 bp, synthetic construct; identical to SEQ ID NO: 7100
  source 1..120: mol_type = other DNA

SEQ ID NO: 24200 - DNA, 120 bp, synthetic construct
  source 1..120: mol_type = other DNA
gccccaggtctagcccatatggtcgtggttggtggggagtcaatgcagaacctccttttccggggccaggccatgggggtcccaccaggggaagctttcacaaggaacagagaaaccctc

SEQ ID NO: 24201 - DNA, 120 bp, synthetic construct
  source 1..120: mol_type = other DNA
tttgttatgcccattactcccagagtgacctaattttcagaagatcattcacaatcttctctgggctttcctttttgcttttgaagcagaagtagacctcaatgttatttctcccaggag

SEQ ID NO: 24202 - DNA, 120 bp, synthetic construct
  source 1..120: mol_type = other DNA
ttgttttctttgttgctcaaatttttaactgttccattttcacttgttcacagacaaatccgaccgccctgtctgccgacattttgccaaaaagggccactgtcgatatgaggacctctg

SEQ ID NO: 24203 - DNA, 120 bp, synthetic construct; identical to SEQ ID NO: 7101
  source 1..120: mol_type = other DNA

SEQ ID NO: 24204 - DNA, 120 bp, synthetic construct
  source 1..120: mol_type = other DNA
tgcatctgtccacctgttccccagtattgccctcaattcctgagagccctggagcggtttcctaccattcccttcttttagctgcttgttttaagtcctttttatgtgacattccctacc

SEQ ID NO: 24205 - DNA, 120 bp, synthetic construct
  source 1..120: mol_type = other DNA
ttctctgtcagtagcatgatccccaccgctatggtctatctatgatcaccgtgctttgtgaaactgtgcatccccttgtagcctttctcagtgtccgtggcatttttgtgacttcccagc

SEQ ID NO: 24206 - DNA, 120 bp, synthetic construct
  source 1..120: mol_type = other DNA
cttctcctgttggttattctgagtctgacacagacccatgacatgtcttataaagcctccaatggctttatcctacctagatcccttccagcccattttaattagactatgtcattgtga

SEQ ID NO: 24207 - DNA, 120 bp, synthetic construct; identical to SEQ ID NO: 7102
  source 1..120: mol_type = other DNA

SEQ ID NO: 24208 - DNA, 120 bp, synthetic construct
  source 1..120: mol_type = other DNA
agtcatctctggagttgcagatgaagctgttctcacctggtggagtcagcttattctttagttcatacacactagtgatggggaatgacaaagcttaaggttcttccaggctgaaaaaaa

SEQ ID NO: 24209 - DNA, 120 bp, synthetic construct
  source 1..120: mol_type = other DNA
ggaaaggccaggtgtccgtggagttatttttaaatattttactttgcagagtttgtgtttatggagtggtaatgatgaaggagtctttcagcagcaatttgcagaatgcctgtgggccag

SEQ ID NO: 24210 - DNA, 120 bp, synthetic construct
  source 1..120: mol_type = other DNA
tcacaaatagcatgtaaagttaaacctgtcaaaagtgctgggaagaagacagggaagaaaagagggtgaaagagagttgtgtaataaagggagtcagggtaggagatgcaactgagacaa

SEQ ID NO: 24211 - DNA, 120 bp, synthetic construct
  source 1..120: mol_type = other DNA
aagaggagttagaccactcagggccttggaaaacatgaagatttggctcttttcttagaacagaagcctttgaagaattttagacaggagtatcatggcttaggctggcttttcaaaaaa

SEQ ID NO: 24212 - DNA, 120 bp, synthetic construct; identical to SEQ ID NO: 7103
  source 1..120: mol_type = other DNA

SEQ ID NO: 24213 - DNA, 120 bp, synthetic construct
  source 1..120: mol_type = other DNA
ctaacatggtgaaaccccatctctactaaaaatagaaaaaaaattagccaggcgtggtggccggcgtctgtagtcccagctactcgggaggctgacgcaggagaatggcgtgaacccagg

SEQ ID NO: 24214 - DNA, 120 bp, synthetic construct
  source 1..120: mol_type = other DNA
agatagaagtttatttctctcacaggtcaagaggtggacaatcaacaatccaagatgtgtgacaatgccaccactacaaggtccctgagtattcagaacctcaacccccaactttcagat

SEQ ID NO: 24215 - DNA, 120 bp, synthetic construct
  source 1..120: mol_type = other DNA
tttttttttttttttttttgagacggagtctcagctctgtcgcccaggctggagtgcagtggcatgatcttggctcactgcaagctccgcctcccaggttcacgccattctcctgcctca

SEQ ID NO: 24216 - DNA, 120 bp, synthetic construct; identical to SEQ ID NO: 7104
  source 1..120: mol_type = other DNA

SEQ ID NO: 24217 - DNA, 120 bp, synthetic construct
  source 1..120: mol_type = other DNA
aaagatgactacttcttaatcttatctagaaggagggagaaatgaaatatggctaaagctgtaaggtaaaaaagccaacacattttagctgacagggaactgtgtggtgtttttgtgctt

SEQ ID NO: 24218 - DNA, 120 bp, synthetic construct
  source 1..120: mol_type = other DNA
ggccagctcccagcaacaccaaagcctgccagttattgtcaggccagttcccaattctcagggactgtttttcttaaaagtatgcaaacatataattacaggttgagatgaatcatatga

SEQ ID NO: 24219 - DNA, 120 bp, synthetic construct
  source 1..120: mol_type = other DNA
gcctgaggtcaggaattcgagaccagcctggccaacatggtgaaaccctgtctctactaaaataacaacaactagcgaggcgtggtggtgggcatttataaataatcccagctacttggg

SEQ ID NO: 24220 - DNA, 120 bp, synthetic construct; identical to SEQ ID NO: 7105
  source 1..120: mol_type = other DNA

SEQ ID NO: 24221 - DNA, 120 bp, synthetic construct
  source 1..120: mol_type = other DNA
cttcacatacttttttggggggggagagggggtggttcaagcgattctcctgcctcagcctcccgagtagctggaattacaggtgcccaccaccacacccggctaattttttgtatttta

SEQ ID NO: 24222 - DNA, 120 bp, synthetic construct
  source 1..120: mol_type = other DNA
agctttgcatactttcagtgaacactttagtgcctactgtagggcaagcactgttttaggagctggagctacatcaataaaaaggacaaaatccctgcccatatggagcttacattgctt

SEQ ID NO: 24223 - DNA, 120 bp, synthetic construct
  source 1..120: mol_type = other DNA
aggttagagagtgacaggtggaagagaacaggttgatacaaagagagagctgctttgaggaggtaacacatagagagaaaattaaacgagggaacaaaccatatgaacacacagagaaag

SEQ ID NO: 24224 - DNA, 120 bp, synthetic construct; identical to SEQ ID NO: 7106
  source 1..120: mol_type = other DNA

SEQ ID NO: 24225 - DNA, 120 bp, synthetic construct
  source 1..120: mol_type = other DNA
aaaaaaaaagcccagtgtggctagactgtgggagatgggatcaagatgtttaacagagggcatattgtacagagccctataaactatggtaaagcatttggattttattctggattttat

SEQ ID NO: 24226 - DNA, 120 bp, synthetic construct
  source 1..120: mol_type = other DNA
caacctccacctcccgggttcaagtgattctcctgcctcagcctcccaagtagctgggactacaggcgcccaccaccacgcctggctaatttttgtatttttagtagacacagggtttcg

SEQ ID NO: 24227 - DNA, 120 bp, synthetic construct
  source 1..120: mol_type = other DNA
gtgagccaccgcgattggcccatggatttacattttaaaaccacctctgactgtaggtgtgaaggatagactagagaatgagaatgacagcaggcagaccagttaggaggccagcgcagt

SEQ ID NO: 24228 - DNA, 120 bp, synthetic construct
  source 1..120: mol_type = other DNA
tctcagttgatggcaattacatctttctagttaactcaggccagaaatattggagtcatccttaattctatttgtcaaacatgacctccaatccattaacaaaacttgttggctcttttc

SEQ ID NO: 24229 - DNA, 120 bp, synthetic construct; identical to SEQ ID NO: 7107
  source 1..120: mol_type = other DNA

SEQ ID NO: 24230 - DNA, 120 bp, synthetic construct
  source 1..120: mol_type = other DNA
ctaaaaatacaaaaatgagccaggcatggtgacgcacgcttgtaatcccagctactcaggagactgaggcaggagaattgcttgaacccaggaggcagaggttgcagggagccgagatca

SEQ ID NO: 24231 - DNA, 120 bp, synthetic construct
  source 1..120: mol_type = other DNA
tggtcacaaacccctgggctcaggcaattctcctgcctcagcctcccaaagtactggcattacaggtgtgagccactgcacctggccaggtcatccttttatttattttattttattttt

SEQ ID NO: 24232 - DNA, 120 bp, synthetic construct
  source 1..120: mol_type = other DNA
gctgggactacaggcgcccgccacctcgcccagctaacttttttgtatttttagtagagatggggtttcaccatgttagccaggatggtctcaatctcctgacctcgtgatccacccatc

SEQ ID NO: 24233 - DNA, 120 bp, synthetic construct; identical to SEQ ID NO: 7108
  source 1..120: mol_type = other DNA

SEQ ID NO: 24234 - DNA, 120 bp, synthetic construct
  source 1..120: mol_type = other DNA
ctagaaaggcccttctcctggaaatccatgtggccaaaactaatcttctttaatgatttgcttgaatttcactttactgaggcctcatttaagactaaaatctgtcctcttgatactttt

SEQ ID NO: 24235 - DNA, 120 bp, synthetic construct
  source 1..120: mol_type = other DNA
tacactcaataaatatatttgttgaacagatgaatgaaaaaatgaggcagacttagctggctgatggattgattaggggaggaggaatggagaaagaggatgatgacctttcagttttgg

SEQ ID NO: 24236 - DNA, 120 bp, synthetic construct
  source 1..120: mol_type = other DNA
gctccattttgtacgtatgagagagatttattaaagatctcagagaagatgtcccataagcagttgaattcatgagcctggagctcggggcagaagttgggggccagcaagagaagtttg

SEQ ID NO: 24237 - DNA, 120 bp, synthetic construct; identical to SEQ ID NO: 7109
  source 1..120: mol_type = other DNA

SEQ ID NO: 24238 - DNA, 120 bp, synthetic construct
  source 1..120: mol_type = other DNA
ggagcaccttgctcaagctcccatattaagtggtagagttagaagtgaaccaaagtcttgattgtggtgatagtttactgggtttatgcaggtcaaaacttatttaagtgatactttgca

SEQ ID NO: 24239 - DNA, 120 bp, synthetic construct
  source 1..120: mol_type = other DNA
gttgggctccagttccctgtttacaattgtacacttcgggattttgtgacacatttcaacactggaccgatcagacctctcccttagccattggtctgcactgtcttttctgcccatgac

SEQ ID NO: 24240 - DNA, 120 bp, synthetic construct
  source 1..120: mol_type = other DNA
ccccgatccactcgggctccggcagctgctgcttgggcgccttcggcatcgcggtggcagaactagaaacgagttacagatagaaactagaatatgctttttaaaaaaacaaaaaacaaa

SEQ ID NO: 24241 - DNA, 120 bp, synthetic construct; identical to SEQ ID NO: 7110
  source 1..120: mol_type = other DNA

SEQ ID NO: 24242 - DNA, 120 bp, synthetic construct
  source 1..120: mol_type = other DNA
ggcgcccaagcagcagccgccggagcccgagtggatcggggacggagagagcacgagcccatcaggtgaggctggtaggcaaggaagaaacgagcagagggggaagagagaggagactgc

SEQ ID NO: 24243 - DNA, 120 bp, synthetic construct
  source 1..120: mol_type = other DNA
ttaaaggaaagagatccagatgtcgcacgtgacctaagtgagactgggcgagataaaagaaagagcatatggcaccgagggagagatggggagaaatgggaaaaccttgcttaaaaaatt

SEQ ID NO: 24244 - DNA, 120 bp, synthetic construct
  source 1..120: mol_type = other DNA
caagagagggtgactccttcatggtttctttcttaagacacccctctcactcaactggagcaagagtgtagatttttgatgttggaatgagggttaaggtttacttaaaaagcagcgaaa

SEQ ID NO: 24245 - DNA, 120 bp, synthetic construct; identical to SEQ ID NO: 7111
  source 1..120: mol_type = other DNA

SEQ ID NO: 24246 - DNA, 120 bp, synthetic construct
  source 1..120: mol_type = other DNA
aagaatgttatgggactgtagaagagaggaggagcatctactcagacaggtaagggagtgtcagcaaagcctcccaagaatatgtaatagctgagtatttttttttgaggcacattgtag

SEQ ID NO: 24247 - DNA, 120 bp, synthetic construct
  source 1..120: mol_type = other DNA
accacaccttatttttaaaattttttgtagacacaagatctggctatgttgcctaggctggtctcaaactcctgggctcaagtaattctcctgcctcagcctccaaaagtgctgggatta

SEQ ID NO: 24248 - DNA, 120 bp, synthetic construct
  source 1..120: mol_type = other DNA
tgactggtcccactagagcctggtgactagtgtgatgaagtcagaaagatgctcaggagacagataatgaaaggctttagatgccattccgaggagtttaatcctaaagacattaagaag

SEQ ID NO: 24249 - DNA, 120 bp, synthetic construct; identical to SEQ ID NO: 7112
  source 1..120: mol_type = other DNA

SEQ ID NO: 24250 - DNA, 120 bp, synthetic construct
  source 1..120: mol_type = other DNA
tttctaaaaggaaatggcaagaagagagtttgtttagtcactgtggagagacaactatactaggagtaaagacacaggcaagtagagttgaagtgctggatatggaagagtcccctagag

SEQ ID NO: 24251 - DNA, 120 bp, synthetic construct
  source 1..120: mol_type = other DNA
agagaaactggaggcaaaccaggagtgagcaagatcccagaaattaaataatgatagaagagaataaaaaaggtgtggaggtaggcagcatggaatgctgcagagaagtcaggcaaaata

SEQ ID NO: 24252 - DNA, 120 bp, synthetic construct
  source 1..120: mol_type = other DNA
ataccagattgcagtatgtttcaaaggtatgggagaagagaaagtgaagcttgtgaattacgattttgagacccaatgaggacaagaatacgaaacagtaatgggggagaggggtataag

SEQ ID NO: 24253 - DNA, 120 bp, synthetic construct; identical to SEQ ID NO: 7113
  source 1..120: mol_type = other DNA

SEQ ID NO: 24254 - DNA, 120 bp, synthetic construct
  source 1..120: mol_type = other DNA
ggactacaggcacacaccgccatgcctggcttattttttgtttgtttttgttttttgttttctgtagagatgaggtcttgctatgttgcccaggctaatcttgaacctctggcctcaacc

SEQ ID NO: 24255 - DNA, 120 bp, synthetic construct
  source 1..120: mol_type = other DNA
tagtgtctgggatgagtcagtcatctgtgttgataaggtgagctgatcaggtttttccttcttaggtacttcagtagatccttcctcctaatgcctttaggattaaactccttggaatag

SEQ ID NO: 24256 - DNA, 120 bp, synthetic construct
  source 1..120: mol_type = other DNA
ggggaggaggagggccccaaactttgaaatgtgttctggatggaggatgcagattaagcaaagacagacataagcgtgcctgggacttcataaaggaacagaaagaagccagtatcgaga

SEQ ID NO: 24257 - DNA, 120 bp, synthetic construct; identical to SEQ ID NO: 7114
  source 1..120: mol_type = other DNA

SEQ ID NO: 24258 - DNA, 120 bp, synthetic construct
  source 1..120: mol_type = other DNA
tctcctgcctcagcttcccaagtagctgggactacatgcgtgctctgccacgcccagctaatttttgtatttttagtagagatggggtttcaccatgttggccaagctggtctcaatctc

SEQ ID NO: 24259 - DNA, 120 bp, synthetic construct
  source 1..120: mol_type = other DNA
tagatagcagtgaatggaagggatgttttggaagagaagataataaataggcctaagcctgaagggaaatcatgaggctgcctccagtaggggagggagttggacatggtcctctacctt

SEQ ID NO: 24260 - DNA, 120 bp, synthetic construct
  source 1..120: mol_type = other DNA
taaatatgacacaatgtgatttgtgctataatattcaagcagaacaagtaaggcatagactgaggtgttcatttgcttaccagataactctatttacatggcctataggttttacaaaca

SEQ ID NO: 24261 - DNA, 120 bp, synthetic construct; identical to SEQ ID NO: 7115
  source 1..120: mol_type = other DNA

SEQ ID NO: 24262 - DNA, 120 bp, synthetic construct
  source 1..120: mol_type = other DNA
catatctcccaaattgaatttataatatcttcttccttcctataagaccttctcttccactgcctccttaattaataaatggtaccacttagcccagctaattttgccagctaaaaacac

SEQ ID NO: 24263 - DNA, 120 bp, synthetic construct
  source 1..120: mol_type = other DNA
ctcctgggttcaagcaattctcctgtcttagcctcctgagtagctgggattacaggcgcccgccactatgcctggctaattttttgtatttttagtagagactgggtttcaccatgttca

SEQ ID NO: 24264 - DNA, 120 bp, synthetic construct
  source 1..120: mol_type = other DNA
cccatcctatgaattcttctttatgtccgcttgtcaccaccacccagactactctgacagcctccccagtggatttcccactatgcttattccctccgattcttgctgtactctgaagcc

SEQ ID NO: 24265 - DNA, 120 bp, synthetic construct; identical to SEQ ID NO: 7116
  source 1..120: mol_type = other DNA

SEQ ID NO: 24266 - DNA, 120 bp, synthetic construct
  source 1..120: mol_type = other DNA
tttaaaaatctctcttcctatagcctgcaagctccagaggagaccacatttgtcttgttcattgctatgatcccctacgctagcacaatatctgacacatggtagctgtttagtagatac

SEQ ID NO: 24267 - DNA, 120 bp, synthetic construct
  source 1..120: mol_type = other DNA
ttaagctagaaaaataataaaataggatagaggctacagagatctttgcaggggggatcagactgctttggaatttgcagataagcattcacgatgtccgcttaactttctagacaaagt

SEQ ID NO: 24268 - DNA, 120 bp, synthetic construct
  source 1..120: mol_type = other DNA
ggtccaagggaggagaaaagatcttgtcaagagaggagataggcagggcacggtggcttacacctgtaatcccagcgcttagggaggcagaggtgggaggatagcttaagcccaggaatt

SEQ ID NO: 24269 - DNA, 120 bp, synthetic construct; identical to SEQ ID NO: 7117
  source 1..120: mol_type = other DNA

SEQ ID NO: 24270 - DNA, 120 bp, synthetic construct
  source 1..120: mol_type = other DNA
aggcagaaatacagcaggggcctgggcttcattttctcactgttcttttgctctcagcagcaaaaaaaaaagcgagatacccgaaaaggcaggcggaagaaggatgtggatgatgatgga

SEQ ID NO: 24271 - DNA, 120 bp, synthetic construct
  source 1..120: mol_type = other DNA
gggggaatgggtacctggaatccatgagtcatggagagtgatacctcataccctgatcttcaagttggattcaattggggggccagacattgtaattctttcctatctcatgttctcccc

SEQ ID NO: 24272 - DNA, 120 bp, synthetic construct
  source 1..120: mol_type = other DNA
caaggatgcaaccttgaccatcctactgacttctgtggccctttcattctctagggtggtaatgtttttgcagccctgattcaggatcagagtgaggaagaggaggaggaagaaaaacat

SEQ ID NO: 24273 - DNA, 120 bp, synthetic construct; identical to SEQ ID NO: 7118
  source 1..120: mol_type = other DNA

SEQ ID NO: 24274 - DNA, 120 bp, synthetic construct
  source 1..120: mol_type = other DNA
atggcgaaacctcatctctactaaaaatacaaaaattagccaggcgtggtggcgtgcgcctgtaatcccagctacttggaaggctgaggcaggagaatcacttgaacttgggaggtggaa

SEQ ID NO: 24275 - DNA, 120 bp, synthetic construct
  source 1..120: mol_type = other DNA
aaaaaaccatgccatttttatcactcagaaatctacagtgattctgttgctttaagcacagaacctgaaacaaagccccaggtccttgctcttctacttgtgactcttctgcgtgtgcat

SEQ ID NO: 24276 - DNA, 120 bp, synthetic construct
  source 1..120: mol_type = other DNA
gctatctagtctgaagctggagggtagggtttttctgggtctcatttttcgtcagcagcactcaatacagatggtctccaacttctgcttcggtgtacgatttttctactttatgatggt

SEQ ID NO: 24277 - DNA, 120 bp, synthetic construct
  source 1..120: mol_type = other DNA
ttgccaggctggagtgcagtggcgtaatcctggctcactgcaacctccgcctcccgggttcaagtgattctcctgcctcagcttcctgagtagctgagattacaggcacgtgccaccacg

SEQ ID NO: 24278 - DNA, 120 bp, synthetic construct; identical to SEQ ID NO: 7119
  source 1..120: mol_type = other DNA

SEQ ID NO: 24279 - DNA, 120 bp, synthetic construct
  source 1..120: mol_type = other DNA
atctgaggaacagcagcctgcactcaagggcaaaaagggaaaggaagagaagtcaaaagggaaggctaaggtgagagagtaactagcaggaggaggtattggggcccaggaattaaaaca

SEQ ID NO: 24280 - DNA, 120 bp, synthetic construct
  source 1..120: mol_type = other DNA
ggagatcgagaccatcctggtaacacggtaaaaccccgtctctactaaaaatacaaaaaaaattagccgggcgtggtggcgggcgcctgtagtcccagctactcgggaggctgaggcagg

SEQ ID NO: 24281 - DNA, 120 bp, synthetic construct
  source 1..120: mol_type = other DNA
atttcatcagacctgtcttttccctattagcctcaaaataaattcgctgctctggacaatgaagaggaggataaagaagaagaaattataaaggaaaaggagcctcccaaacaagggaag

SEQ ID NO: 24282 - DNA, 120 bp, synthetic construct; identical to SEQ ID NO: 7120
  source 1..120: mol_type = other DNA

SEQ ID NO: 24283 - DNA, 120 bp, synthetic construct
  source 1..120: mol_type = other DNA
tatagagatgaggtctcactatgttgctcaggctggtcttgaatttctgggctcaagcagtcctcctgcctcagcctcccaaaatgctgggtttacaggtgtgagccagcatgccagcca

SEQ ID NO: 24284 - DNA, 120 bp, synthetic construct
  source 1..120: mol_type = other DNA
tataaagttcaggagctatataaaaataaatgtcaggtcagccttggcccatgggctgtagtttgcaacacctaatccagtgaagaaagggcctggaatttatctcagatgatctgggtc

SEQ ID NO: 24285 - DNA, 120 bp, synthetic construct
  source 1..120: mol_type = other DNA
tggcacttcctaattctgtgattctgctggattcctctgactgtgcactagagcttcctgatctttttttttttttttttttttttgagatggagtctcactccgttgcccaggctggag

SEQ ID NO: 24286 - DNA, 120 bp, synthetic construct
  source 1..120: mol_type = other DNA
tgtgtttttagtagagacaggatttcaccatgttagccaggatggtcttgatctcctgaccttgtgatctgtccatcttggcctcccaaagtgctgggattacagacatgagccaccgtg

SEQ ID NO: 24287 - DNA, 120 bp, synthetic construct; identical to SEQ ID NO: 7121
  source 1..120: mol_type = other DNA

SEQ ID NO: 24288 - DNA, 120 bp, synthetic construct
  source 1..120: mol_type = other DNA
ttttgttgtttttttttttgagacggagtcttgctttgtcacccaggctggagtgcagtggcacgatctcggctcactgcaagctcctcctcccaggttcacaccattctcctgcctcag

SEQ ID NO: 24289 - DNA, 120 bp, synthetic construct
  source 1..120: mol_type = other DNA
tctgcccgctttggcttcccaaagtgctgggattacaggcgtgagccaccgcgcccagccaggagtccctagttttgaccatccccgggttctcacagggttcagaggaagaaggagaag

SEQ ID NO: 24290 - DNA, 120 bp, synthetic construct
  source 1..120: mol_type = other DNA
gtaggggatttttaaatacttcaactaggggacatgcgattggggacacgaaggaaaggtttgggggctactccaagtaaaacaatcggagtaagaaaataattgtgttctgtgaacctt

SEQ ID NO: 24291 - DNA, 120 bp, synthetic construct; identical to SEQ ID NO: 7122
  source 1..120: mol_type = other DNA

SEQ ID NO: 24292 - DNA, 120 bp, synthetic construct
  source 1..120: mol_type = other DNA
gggaaactggtagactgtggcttcaaatgtagtttttcctaccttctcagatggagtatgagcgccaagtggcttcattaaaagcagccaatgcagctgaaaatgacttctccgtgtccc

SEQ ID NO: 24293 - DNA, 120 bp, synthetic construct
  source 1..120: mol_type = other DNA
agtggctgtggtgtgtgaatgggttagttcagtgggaagaaagattggaggcattttccacaccttaggttctgccaacttgagcaagaagatagaaaaaccagtagaagtggggtccac

SEQ ID NO: 24294 - DNA, 120 bp, synthetic construct
  source 1..120: mol_type = other DNA
agcggtttgtcagaggcttccctgcagggagaaagtggccgctcctgtcccaaagggagaattttcatgtgatcatcccttccctctgccacctctttcctgatggctgcagctggagaa

SEQ ID NO: 24295 - DNA, 120 bp, synthetic construct; identical to SEQ ID NO: 7123
  source 1..120: mol_type = other DNA

SEQ ID NO: 24296 - DNA, 120 bp, synthetic construct
  source 1..120: mol_type = other DNA
ctatggagttggaagggatgtggagggagactggagaccgggaaagggatgctaaggaaaggaggggagggtcaatgaggaacttgagagtgttttatttggaacaagtacaaagagctg

SEQ ID NO: 24297 - DNA, 120 bp, synthetic construct
  source 1..120: mol_type = other DNA
cagtccaggctgttcttcgagctgacaccaagcgattgaagctgctggaagaggagcggcggcttcagggacagctggaacaaggggatgacacagctgctgagaggctagagaaggtag

SEQ ID NO: 24298 - DNA, 120 bp, synthetic construct
  source 1..120: mol_type = other DNA
aggtgtatgaggaattgcgggccactggggcggcagctgcagaggccaaagcacggcggatcctggctggcctgggctttgaccctgaaatgcagaatcgacccacacagaagttctcag

SEQ ID NO: 24299 - DNA, 120 bp, synthetic construct; identical to SEQ ID NO: 7124
  source 1..120: mol_type = other DNA

SEQ ID NO: 24300 - DNA, 120 bp, synthetic construct
  source 1..120: mol_type = other DNA
ctgggcaatatagtgagactctatcttcacaaaagggggaagaaaacatatcctagcctgggcaacatagggagaccctgtctctacaaaaaatttaaagatcagctggatatggtggcg

SEQ ID NO: 24301 - DNA, 120 bp, synthetic construct
  source 1..120: mol_type = other DNA
ccctgtctcaaaaaaattaaaccgtatcctgcccgagaacttctctgaggagagcttgggaaggagtgttcatggtctcaggctctatctccgagttttctctggggttgtctgagcaag

SEQ ID NO: 24302 - DNA, 120 bp, synthetic construct
  source 1..120: mol_type = other DNA
cttaataagtgcgttacggcctttgcatcattggttcccattctgcactttcttccccttccctccctgccctgttttcctttagcccttctccactgtgcctgtgagtggagctctatt

SEQ ID NO: 24303 - DNA, 120 bp, synthetic construct; identical to SEQ ID NO: 7125
  source 1..120: mol_type = other DNA

SEQ ID NO: 24304 - DNA, 120 bp, synthetic construct
  source 1..120: mol_type = other DNA
ctggttgtccctttgctgggaagaggagcaaccactgatgcctggtcccctcttctgccccagtgaccttcaaaaagatgtaccagcagaagcagaaagaactgctgaaacagtatgaga

SEQ ID NO: 24305 - DNA, 120 bp, synthetic construct
  source 1..120: mol_type = other DNA
agactctggaacgctggcctacatttcaaggactgccgcgcagggctcaggtttctcttttttcctcttcctctccaggaaaaacaaacgaaggaagccctgactcggaagcagcagaaa

SEQ ID NO: 24306 - DNA, 120 bp, synthetic construct
  source 1..120: mol_type = other DNA
ggtctgcatggtgagtgccgcgggcctctgctgctccacaggaagcaccggaagcatgtatgtgcaccctaaattctccaccaaggctgagattgctcctgttctccaaggccagcacat

SEQ ID NO: 24307 - DNA, 120 bp, synthetic construct; identical to SEQ ID NO: 7126
  source 1..120: mol_type = other DNA

SEQ ID NO: 24308 - DNA, 120 bp, synthetic construct
  source 1..120: mol_type = other DNA
gagcatgagaaatgtgaagacacagctgcttttgccagaagctggaatcagggagcctctcgagaatgtagagttaaatacagaactcatgatagatgattcatttccctaagaggggca

SEQ ID NO: 24309 - DNA, 120 bp, synthetic construct
  source 1..120: mol_type = other DNA
taaaaattgcataaacgggccaggcacagtagctcactcctataatcccagcagggatcacctaaggtcaagagttccagaccagcctagccaacatagtgaaccccgcctctactaaaa

SEQ ID NO: 24310 - DNA, 120 bp, synthetic construct
  source 1..120: mol_type = other DNA
ctccagcctgggcaacagagcgagactccatctcaaaaaaaaaaaaaaaaattggcctggcgtggtggcccacgcctataatcccaactctttgggggaggctgaggcaggcagatcact

SEQ ID NO: 24311 - DNA, 120 bp, synthetic construct
  source 1..120: mol_type = other DNA
gaaaccccatctctactaaaaatacaaaattagccagacgtggttgcacatgcctgtaatcccagctattttgggaggctgaggcaggagaatcacttgaacccaggaggcagaggttgc

SEQ ID NO: 24312 - DNA, 120 bp, synthetic construct; identical to SEQ ID NO: 7127
  source 1..120: mol_type = other DNA

SEQ ID NO: 24313 - DNA, 120 bp, synthetic construct
  source 1..120: mol_type = other DNA
actgtcgcccagcctggagtgcagtggtgcgatcttggcccactgcaacctccacctcccaggttcaagatattctcctgcctcagcctcctgaatagctgggattataggtacgcccca

SEQ ID NO: 24314 - DNA, 120 bp, synthetic construct
  source 1..120: mol_type = other DNA
caggcgtgagccaccgctcccagctgagataaccagtattaatgttttagtggatatctttctccttttttctttgcaaatgtgcatataatttttaacaaaaatgggctgtcatatgag

SEQ ID NO: 24315 - DNA, 120 bp, synthetic construct
  source 1..120: mol_type = other DNA
cagtggcacagtcttggctcactgcaacctccgtctcctgggttcacgcgattctcctgccttagcctcccgagtagctgggacaacaggcgcgtgctaccacgcccagctaattttttg

SEQ ID NO: 24316 - DNA, 120 bp, synthetic construct; identical to SEQ ID NO: 7128
  source 1..120: mol_type = other DNA

SEQ ID NO: 24317 - DNA, 120 bp, synthetic construct
  source 1..120: mol_type = other DNA
gttagtccctcctgcttgtccctcttgtcctccattttgcttaactccccttttgtcccttaactcttttactttgctcaccatgcctttgtcatattaggggaacatccctgttccttt

SEQ ID NO: 24318 - DNA, 120 bp, synthetic construct
  source 1..120: mol_type = other DNA
ttataggcatgtcccactatgcccagctaattattgtatttttagtagagacagggtttcacaatgttggccagcctggtctcaaactcctgaccttaagtgcctcctgacctgccttcc

SEQ ID NO: 24319 - DNA, 120 bp, synthetic construct
  source 1..120: mol_type = other DNA
gtgtatggacgaggtcaggagatcgagaccatcctggctaacatggtgaaatcccgtctctactaaaaatacaaaaaattagccgggtgtggtggcaggcacctgtattcccagctactg

SEQ ID NO: 24320 - DNA, 120 bp, synthetic construct; identical to SEQ ID NO: 7129
  source 1..120: mol_type = other DNA

SEQ ID NO: 24321 - DNA, 120 bp, synthetic construct
  source 1..120: mol_type = other DNA
tcttcaaccagcagtatgcagagcagctgcgcatggaggagacgcccactgagtacctgcagcggggcttcaacctgccctaccaggatgcccgcaagtgcctgggccgcttcggcctgg

SEQ ID NO: 24322 - DNA, 120 bp, synthetic construct
  source 1..120: mol_type = other DNA
attcatgtctacaaactgtacctagaggaaccgagaatgagggagcctcagctcacaaactggcacatcttgagggtttgccttcagaatgtgaggtgctaggtgtgacagccctcccct

SEQ ID NO: 24323 - DNA, 120 bp, synthetic construct
  source 1..120: mol_type = other DNA
aatggaagacgggagttgcagtgctcagtcatggaattcctcctatgtaggacgagccaaccaataacctggacatagagtctattgatgctctaggggaggccatcaatgaatacaagg

SEQ ID NO: 24324 - DNA, 120 bp, synthetic construct
  source 1..120: mol_type = other DNA
aggactcccttatttcatgttctgattcccctctttctcctttcttcctgccctctgttgttgctatctttcttcaaagctgtgatcgttgtcagccatgatgcccgactcatcacagaa

SEQ ID NO: 24325 - DNA, 120 bp, synthetic construct; identical to SEQ ID NO: 7130
  source 1..120: mol_type = other DNA

SEQ ID NO: 24326 - DNA, 120 bp, synthetic construct
  source 1..120: mol_type = other DNA
gcatccccctaaacaaacaagaggtgaccaccttattgtgaggttccatccagccaagtttatgtggcctattgtctcaggactctcatcactcagaagcctgcctctgatttaccctac

SEQ ID NO: 24327 - DNA, 120 bp, synthetic construct
  source 1..120: mol_type = other DNA
cctttgccattatccagcccaagatttggtgcctgcagcctcttgtctggttgaggacttggggcaggaaaggaatgctgctgaacttgaatttccctttacaaggggaagaaataaagg

SEQ ID NO: 24328 - DNA, 120 bp, synthetic construct
  source 1..120: mol_type = other DNA
atggatcttgtttgcagtcttgctgacagtgtttgctgtttaaggatcataggattcctttcccccaacccttcacgcaaggaaaaagcaaagtgattcataccttctatcttggaacat

SEQ ID NO: 24329 - DNA, 120 bp, synthetic construct
  source 1..120: mol_type = other DNA
ttttcctgcctcagcctcccgagtagctgggattacaggcacacaccaccaggcccagctaattttagtgtttttaatagagacagggttttaccatgttggtcaggctggtctcgaact

SEQ ID NO: 24330 - DNA, 120 bp, synthetic construct; identical to SEQ ID NO: 7131
  source 1..120: mol_type = other DNA

SEQ ID NO: 24331 - DNA, 120 bp, synthetic construct
  source 1..120: mol_type = other DNA
cacgacgcctagccagaatttgggtctcattgtccaagttaatctcatgaatgaggaggtgctctgccctgtggccagggaccagggtattgattctctcaaaaattattaaatcatcta

SEQ ID NO: 24332 - DNA, 120 bp, synthetic construct
  source 1..120: mol_type = other DNA
gtctaatatgtcgtactctagattctaagttgccacatactcaaaaaagggaaagattatccagggcctgattatttgacagggtcacttgagggtagatcttgaaaaatgatgatttga

SEQ ID NO: 24333 - DNA, 120 bp, synthetic construct
  source 1..120: mol_type = other DNA
ggagttaatggatgatagctgctgtggccatttttcttaagagttagactggggagatgggtttggaaagtaaaatgcaaatggtgggtagtggtattaggtggtgatgtgcaaggcgtg

SEQ ID NO: 24334 - DNA, 120 bp, synthetic construct; identical to SEQ ID NO: 7132
  source 1..120: mol_type = other DNA

SEQ ID NO: 24335 - DNA, 120 bp, synthetic construct
  source 1..120: mol_type = other DNA
gcactttgggaggcgggcagatcatgaggtcaggagttcgagagcaccctgaccaacatattgaaaccccatctccactaaaaatacaaaaaaattagccgagcgtggtggtgcacacct

SEQ ID NO: 24336 - DNA, 120 bp, synthetic construct
  source 1..120: mol_type = other DNA
ctcaaacaaaaaccaaaagacatcaggaaacatgcctcttatggaatttgagggggaaaagtcagggtcttggcagtgaccttggacaagccattagcctcttgatacctcttttctcat

SEQ ID NO: 24337 - DNA, 120 bp, synthetic construct
  source 1..120: mol_type = other DNA
tatatatattttttttttttttttttgagatggagtcttactctgttgccaggctggagtgctgtggcgtgatcttggctcactgcaacctctgcctcctgggttcaagtaattctgctg

SEQ ID NO: 24338 - DNA, 120 bp, synthetic construct; identical to SEQ ID NO: 7133
  source 1..120: mol_type = other DNA

SEQ ID NO: 24339 - DNA, 120 bp, synthetic construct
  source 1..120: mol_type = other DNA
ttgcatttcaaatatttggtcactaatttcactacttcaaacataagtgagaaaagtactttaagtactccaaaataactttccgccacaggcataaatttcatttctctctctgttctt

SEQ ID NO: 24340 - DNA, 120 bp, synthetic construct
  source 1..120: mol_type = other DNA
gccacggcacctggccacaaactttatctcctcccgtgtatgttttaacttctgtgatccctgtagccgatcatatgtgctgttaatggaattaataattcacctaaatgtgggcaaaag

SEQ ID NO: 24341 - DNA, 120 bp, synthetic construct
  source 1..120: mol_type = other DNA
agtgatgcacatatgtggtacacagtaaacatcgtagaaatgtgttttttgttgttttgagatgtggtctccctctgtttcccaggctggagtgcagtggcacaatcatggctcactgca

SEQ ID NO: 24342 - DNA, 120 bp, synthetic construct; identical to SEQ ID NO: 7134
  source 1..120: mol_type = other DNA

SEQ ID NO: 24343 - DNA, 120 bp, synthetic construct
  source 1..120: mol_type = other DNA
ggggccttatatgcatagacagcaggttgggatgtgatcaggagaggctgagcaatgggaggccattggttctgtttagccaggagtgcaaactgattcagttttcatttttacaaaatt

SEQ ID NO: 24344 - DNA, 120 bp, synthetic construct
  source 1..120: mol_type = other DNA
tggaaagaagattctcttcatctaagaatggaatggaagggagataatgtagactcagatatttccatgtgaagggaagggaaaatgttgctcacagtggatgggactcactttttccca

SEQ ID NO: 24345 - DNA, 120 bp, synthetic construct
  source 1..120: mol_type = other DNA
tgaccaacttggcaaaacaccgtctctactaaaaatgcaaaaattagccaggagtagtggcacgcatttgtaatcccagctactcaggaagctgaggcaggagaattacttgaacctggg

SEQ ID NO: 24346 - DNA, 120 bp, synthetic construct; identical to SEQ ID NO: 7135
  source 1..120: mol_type = other DNA

SEQ ID NO: 24347 - DNA, 120 bp, synthetic construct
  source 1..120: mol_type = other DNA
aaggaaaaacagactgaaacggtagagagaaaagtgcctgcagggagggcttggtgaagaaacatcattgtagtgaaatgaatgaaatgttcaacctctctccccctgcaaaaaaacaaa

SEQ ID NO: 24348 - DNA, 120 bp, synthetic construct
  source 1..120: mol_type = other DNA
ggatcacctgaggtcaggagttcgagaccagcctggacaacatggtaaaaccccatctctactaaaaatacagaaattagccaggcgtggtggcaggtgcctacaatcccagctactcag

SEQ ID NO: 24349 - DNA, 120 bp, synthetic construct
  source 1..120: mol_type = other DNA
tttttttttttttttttttgagatgaaattttgctgtcacccaggctggagtgcaatggcacgatctcagctcactgcaacctccgcctcctgggttcaaacgattcttctgcctcagcc

SEQ ID NO: 24350 - DNA, 120 bp, synthetic construct; identical to SEQ ID NO: 7136
  source 1..120: mol_type = other DNA

SEQ ID NO: 24351 - DNA, 120 bp, synthetic construct
  source 1..120: mol_type = other DNA
gccaccactcccggctaatttttttttttttttgagacagagtcttgctctgtcgcccaggctggagtgcagtggcgcgatctctgctcgctgcaagctccacctcccgggttcatgcca

SEQ ID NO: 24352 - DNA, 120 bp, synthetic construct
  source 1..120: mol_type = other DNA
tcctgacctcatgatctgcccgcttcggcctcccaaagtgctgggattacaggcgtgagccaccgcgcctggcaatttttgtatttttaatagagacggggtttcaccatgttggctagg

SEQ ID NO: 24353 - DNA, 120 bp, synthetic construct
  source 1..120: mol_type = other DNA
ctctcttttaaggttcttgtggcttgttgcaggagatagaagaaaggtgagaagcaggcagtaaatggaagcagaaagagacacaaagttgtgaccactaggttgtgacatgtttgggtt

SEQ ID NO: 24354 - DNA, 120 bp, synthetic construct; identical to SEQ ID NO: 7137
  source 1..120: mol_type = other DNA

SEQ ID NO: 24355 - DNA, 120 bp, synthetic construct
  source 1..120: mol_type = other DNA
ccaatctgtctgttttttctttttgttttgtttttgttttttgagatggagatggagtctggctctgtcacccaagctgaagtgcagtggtgtgatctctgctcactgcaacctccactt

SEQ ID NO: 24356 - DNA, 120 bp, synthetic construct
  source 1..120: mol_type = other DNA
ggctggtcacaaactcctcacctcaggtgatccatccgccttggcctctcaaagtgctgggattacaggcataagccactgcatccaacccaaatttgtttttttttttctttctttttt

SEQ ID NO: 24357 - DNA, 120 bp, synthetic construct
  source 1..120: mol_type = other DNA
ccgagtagctgggattacaggcatgcgccaccacgcccggctaatttttgtatttttagtggagacgggggttctccatgttggtcaggctggtctcgaactcctgacctcctgatctac

SEQ ID NO: 24358 - DNA, 120 bp, synthetic construct; identical to SEQ ID NO: 7138
  source 1..120: mol_type = other DNA

SEQ ID NO: 24359 - DNA, 120 bp, synthetic construct
  source 1..120: mol_type = other DNA
gggataacaggcgccagtaaccacacccagctaatttttgtatttttagtagagatggggtttcttcatgttggccaggctggtctcgaacttctgacctcaggtgatccaactgcttcg

SEQ ID NO: 24360 - DNA, 120 bp, synthetic construct
  source 1..120: mol_type = other DNA
gttttgaactcctgggttcaagtgatcgtcccatgtgggcctcccaaagtgctgggattacaggcgtgagccaacatgcccagctttaatttctggtttaagaagagtggaggccaggcg

SEQ ID NO: 24361 - DNA, 120 bp, synthetic construct
  source 1..120: mol_type = other DNA
ctggccagagccactttgggaagagcagtctatacttaccctttgtttttttgtgacggaattttgccctgtcactcaggctggagtgcagtggcatgatctcggcccactgcaacctgc

SEQ ID NO: 24362 - DNA, 120 bp, synthetic construct; identical to SEQ ID NO: 7139
  source 1..120: mol_type = other DNA

SEQ ID NO: 24363 - DNA, 120 bp, synthetic construct
  source 1..120: mol_type = other DNA
ctaatattttttgtattttttgtacagacctggtctccctatgttgctcaggctggtctcaaactcctgggctcaagtagtcttcccacctcggcctcccaaaagtgctgggattacaga

SEQ ID NO: 24364 - DNA, 120 bp, synthetic construct
  source 1..120: mol_type = other DNA
gaatgtggataagatgaccaagaacacatcctagagggcacgatagccaggataggactgttctaggaacacacacgaggcgtgttaaagaagactcagaaagatgaaaaccaggaaaga

SEQ ID NO: 24365 - DNA, 120 bp, synthetic construct
  source 1..120: mol_type = other DNA
aactgttagatcaagcattagctccagaggagtaaaaatcagattccacagatttgtactaatgtatctaacacaggtggtaatggcttttaaaaaaaaaaaaatgaaaaacagtccagg

SEQ ID NO: 24366 - DNA, 120 bp, synthetic construct; identical to SEQ ID NO: 7140
  source 1..120: mol_type = other DNA

SEQ ID NO: 24367 - DNA, 120 bp, synthetic construct
  source 1..120: mol_type = other DNA
ccaaaaaaaaaaatactcatcctcaaatccattttggctctaacccaagaccctgcacaaaacccaaccaatccactgttttcatagaaaacaactgatgccaaagtgaaggagagaact

SEQ ID NO: 24368 - DNA, 120 bp, synthetic construct
  source 1..120: mol_type = other DNA
ttcatagaaaacaactgatgccaaagtgaaggagagaactgggaaagggcaaaatcatcttgttgaatccacccaggaaggcgcctggtggggattcagaggtggttgacagggtgaagt

SEQ ID NO: 24369 - DNA, 120 bp, synthetic construct
  source 1..120: mol_type = other DNA
aagctggtctcactgaagtattttatcaagtctccagactggctatagttggcaaaggcagaccagcaccaccggtctcacctctgccagctaaaacttgcaccggatgcagatacgagt

SEQ ID NO: 24370 - DNA, 120 bp, synthetic construct
  source 1..120: mol_type = other DNA
gtgtgttccagaactcaaatccagctgattgagccctctcagtgcagtgggatatacaatacccctttcagcatctccccaccccatgaggaataatgaacttagctgggatgatttctt

SEQ ID NO: 24371 - DNA, 120 bp, synthetic construct; identical to SEQ ID NO: 7141
  source 1..120: mol_type = other DNA

SEQ ID NO: 24372 - DNA, 120 bp, synthetic construct
  source 1..120: mol_type = other DNA
agagcgaggctgcagtccacaggggttgtgtgaacagggcaggcaaatggtccctagggcagggggggcccattgacacccgggtggtagaaggcacagttgttctcatagcggcagttg

SEQ ID NO: 24373 - DNA, 120 bp, synthetic construct
  source 1..120: mol_type = other DNA
atcctgagaactgtctttcagagacaatcttggggatttgggggaagggcatagagtaggaactgctatgcatactaggacatcaaagagacgggtacctcacgttctgcctagctacca

SEQ ID NO: 24374 - DNA, 120 bp, synthetic construct
  source 1..120: mol_type = other DNA
ccctcccccgtggccaggaccatcatggccacggtgctcatgaggtggcggccctcgatggtcatggcctcggtgaccagggacatcatgaggccggtggccatggggccccccgtgtcc

SEQ ID NO: 24375 - DNA, 120 bp, synthetic construct; identical to SEQ ID NO: 7142
  source 1..120: mol_type = other DNA

SEQ ID NO: 24376 - DNA, 120 bp, synthetic construct
  source 1..120: mol_type = other DNA
tccagagcgacctcctctggcgcctcggaatggaggaggaggaggaggaggttcgtttcctcctcggccacctcggcctctatggtatggtccaggacctggtcctggacccccccgcat

SEQ ID NO: 24377 - DNA, 120 bp, synthetic construct
  source 1..120: mol_type = other DNA
aaggggacaaaaaagagagacagtatcagctaccaggaactgccatctcccaacctaaaccaccacctcccaccttccagtcaatcctatactattatcagactgaaattaagcagataa

SEQ ID NO: 24378 - DNA, 120 bp, synthetic construct
  source 1..120: mol_type = other DNA
cagggcctaggagtccatgtggcactgttaatgaaaacaagagtaacacagcatgagcactctagaagactagcatgatctcccatttaggtgcaaccaactgaccctctcaaaccaacc

SEQ ID NO: 24379 - DNA, 120 bp, synthetic construct; identical to SEQ ID NO: 7143
  source 1..120: mol_type = other DNA

SEQ ID NO: 24380 - DNA, 120 bp, synthetic construct
  source 1..120: mol_type = other DNA
atgtggagaactggggtaaggcgaatgggagacagtgaggagagcgagcttaaggaggctccacagaaggtggaaaaggggaaggagggtgcgtaccatgatggaggtgaggatctcttg

SEQ ID NO: 24381 - DNA, 120 bp, synthetic construct
  source 1..120: mol_type = other DNA
ccccccaggttccagagtctcaacatacggagtctcatccatggaacactcctgaaagaagaacaaaaaaaatcaggattgacagaacagagacattctcatatgaaagatgcaccgaat

SEQ ID NO: 24382 - DNA, 120 bp, synthetic construct
  source 1..120: mol_type = other DNA
gtagggctcaggatcaggctcatgaggactatcaggaacaacacaggtgagagaaaaaagaatgatagtcaagttattaattcagaccctgaaagtaatttctaacctccaccccgtaat

SEQ ID NO: 24383 - DNA, 120 bp, synthetic construct; identical to SEQ ID NO: 7144
  source 1..120: mol_type = other DNA

SEQ ID NO: 24384 - DNA, 120 bp, synthetic construct
  source 1..120: mol_type = other DNA
accaagtcctttcaaaatcccttaaacacacctattacgtaggaaatgacctcttacctcgttcagtttcatccaattcaaaatagaaatattctctcagtttgccttcctcaggccatg

SEQ ID NO: 24385 - DNA, 120 bp, synthetic construct
  source 1..120: mol_type = other DNA
cctggctccaaagaggctggaagcagaagaggtttcagacccagatccctcctttcagaaaaccccccaaactgaaccagtttctagattacctgtatccatgagctccgggacttcaac

SEQ ID NO: 24386 - DNA, 120 bp, synthetic construct
  source 1..120: mol_type = other DNA
ctattgtgaaagaaaaggaagttaatgaactgactggaaagccaagggcaaggcaattagtccagggtcccaggcacagtcccccaacagttcctatataaaggaagactctgtctccac

SEQ ID NO: 24387 - DNA, 120 bp, synthetic construct; identical to SEQ ID NO: 7145
  source 1..120: mol_type = other DNA

SEQ ID NO: 24388 - DNA, 120 bp, synthetic construct
  source 1..120: mol_type = other DNA
tgagccagtgaagaccctgcctcaacttaggacacgataagctcaagaggaccaggaagcacatgcaggaggattcacacaggatattcttgttgttattctaggtttctcatggcaggc

SEQ ID NO: 24389 - DNA, 120 bp, synthetic construct
  source 1..120: mol_type = other DNA
ttatctctaaaattactcctaagtgacccctgaaacgggagttccagaggtacaaaaagtaagggataccaagaaatcaaaggaaaatggagggaaataataaaagagaagggaaaaaac

SEQ ID NO: 24390 - DNA, 120 bp, synthetic construct
  source 1..120: mol_type = other DNA
caagaccatcctggctaacatggtgaaaccccatctctactaaaaatacaaaaaattagccgggcgtggtggcgggcaccagtagtcccagctactcgggaggctgaggcaggagaatgg

SEQ ID NO: 24391 - DNA, 120 bp, synthetic construct; identical to SEQ ID NO: 7146
  source 1..120: mol_type = other DNA

SEQ ID NO: 24392 - DNA, 120 bp, synthetic construct
  source 1..120: mol_type = other DNA
cacagatccaccccattcagagcctgagaatatggtccatacctctgacgtttgagggggatgggtttaaggttgtacttgtcagaaaccaccactgtgctggcattcttcttcacaggc

SEQ ID NO: 24393 - DNA, 120 bp, synthetic construct
  source 1..120: mol_type = other DNA
tgtaaccaaagcttcctctgctagtcttccctcttccttacgattaacataccacacatcaaatgattcccccataaggctctgggtgtgcacatgcccatgaaccctccagaggccagc

SEQ ID NO: 24394 - DNA, 120 bp, synthetic construct
  source 1..120: mol_type = other DNA
tcaaaggtcgctcaggaagggtagttcgactttttccttcatctttacgtttcttcttatctttctctgttgtgaaaaaacaaagcagaaaaggattttatttagatgaacactgtcaga

SEQ ID NO: 24395 - DNA, 120 bp, synthetic construct; identical to SEQ ID NO: 7147
  source 1..120: mol_type = other DNA

SEQ ID NO: 24396 - DNA, 120 bp, synthetic construct
  source 1..120: mol_type = other DNA
cttaaaaaatggaacaatgaattagagttgtgttctacttggataactttcaactctgatgtcatcacaccactctggagtaaaaagacctaatatttcagaatatgtggttaaaatcta

SEQ ID NO: 24397 - DNA, 120 bp, synthetic construct
  source 1..120: mol_type = other DNA
aaactgacatttttttaaaaagctacgttagttgctttatgtataacacacctaattgttacaacaatctgaagactttttattttcctttatagatgtgaaaacaagaataaaatttgt

SEQ ID NO: 24398 - DNA, 120 bp, synthetic construct
  source 1..120: mol_type = other DNA
tatcatttagtaataggagtttcacagatgagacacgctaggatgatactatttcccacagcaaattttaagtgtatgtgttttataacaagcaattttaggaatcagcttccagttaaa

SEQ ID NO: 24399 - DNA, 120 bp, synthetic construct; identical to SEQ ID NO: 7148
  source 1..120: mol_type = other DNA

SEQ ID NO: 24400 - DNA, 120 bp, synthetic construct
  source 1..120: mol_type = other DNA
ctccctgcttttttttttttttttattttttgagacggagtctcactctgttgcccaggctagagtgcagtggcgcagtcttggctcactgcagcctcgacctcccaggctcaaatgatt

SEQ ID NO: 24401 - DNA, 120 bp, synthetic construct
  source 1..120: mol_type = other DNA
tactgggctcaagcaatccacccacctcagcatcccaaagtgttgggattacaggtgtgagccaccacacctggctgacacattccttttttttttttttttttgagacgaagtctcact

SEQ ID NO: 24402 - DNA, 120 bp, synthetic construct
  source 1..120: mol_type = other DNA
catgcctggctaattttttgtatttttagtggagacggggtttcaccacgtcagccaggatggtctcagtctcctgacctcatgatccgcccgcctcagcctctcaaagtgctgggatca

SEQ ID NO: 24403 - DNA, 120 bp, synthetic construct; identical to SEQ ID NO: 7149
  source 1..120: mol_type = other DNA

SEQ ID NO: 24404 - DNA, 120 bp, synthetic construct
  source 1..120: mol_type = other DNA
tatcagtaatgccctttctaggttttgacagtaccacatcctacaatcccagtctcccatcaatgaccgaggaaccccatgcctcaccgccccatcttttcgctacaccttcccattcca

SEQ ID NO: 24405 - DNA, 120 bp, synthetic construct
  source 1..120: mol_type = other DNA
agttagggttagaaatgaagcagccagtatctcttctcttagcaaaagcgcctctctgtgaactgcctagagattcctaatgacttgggactttgctccagagaaggggagtcacatata

SEQ ID NO: 24406 - DNA, 120 bp, synthetic construct
  source 1..120: mol_type = other DNA
attctgcctccaggtgataaggctatccctcaacaactgtccctaatagtctgttcaagactggcttagttatttactctcccctgaaaaacctgagaatccctgaaggaaaataacatt

SEQ ID NO: 24407 - DNA, 120 bp, synthetic construct; identical to SEQ ID NO: 7150
  source 1..120: mol_type = other DNA

SEQ ID NO: 24408 - DNA, 120 bp, synthetic construct
  source 1..120: mol_type = other DNA
acaaaaaggggtaaagactcacctgaagatcttggaaatcccatccacacttttgacttccccatctcggttaaggaagctgtccaggcccttgagaagttctttggggtctatgggacc

SEQ ID NO: 24409 - DNA, 120 bp, synthetic construct
  source 1..120: mol_type = other DNA
gtataatgactaattattcaactatgctattttttagatatgaaaaatcgacacagaccacttgccactactgagaaaatagccctggcaagttaagcatggggagcatatgtgactgaa

SEQ ID NO: 24410 - DNA, 120 bp, synthetic construct
  source 1..120: mol_type = other DNA
cttcactagatcgtattaaagctaagatcagttcccataacaagatgttcaactctccagggcatttacacctatcgttaagtcctgtcttccctagttgctgataaatttggcttgaaa

SEQ ID NO: 24411 - DNA, 120 bp, synthetic construct
  source 1..120: mol_type = other DNA
cttagcccattaagagtcataatcactacacatggcaagatatgtatcagctgaagtggtagatgatggagaacaaaacaaaacttgaaaacagaatccctccctaaggagatctgggag

SEQ ID NO: 24412 - DNA, 120 bp, synthetic construct; identical to SEQ ID NO: 7151
  source 1..120: mol_type = other DNA

SEQ ID NO: 24413 - DNA, 120 bp, synthetic construct
  source 1..120: mol_type = other DNA
gctaagctccttttatggaagggacaagccagaactgaagttccagaaaggtaatttaggatcaatatggttctgattgggatttttatctacactgcctctaaatacttgcttctaaga

SEQ ID NO: 24414 - DNA, 120 bp, synthetic construct
  source 1..120: mol_type = other DNA
tcatctctacaaaacataagtcgagtgtgatggtgtgcacctgtagtcccagctacccgggaggctgacgtgggaaaacgggaggactgcttgagcccagggatactgaggctacaatga

SEQ ID NO: 24415 - DNA, 120 bp, synthetic construct
  source 1..120: mol_type = other DNA
aaggcccacactgagtagcaaggaagaggcaagaacaaaaccttcctcatcctacatctagcacagaagtaacagacacaatcccagcagaagggtagaaaaatcagtattttacaaaga

SEQ ID NO: 24416 - DNA, 120 bp, synthetic construct; identical to SEQ ID NO: 7152
  source 1..120: mol_type = other DNA

SEQ ID NO: 24417 - DNA, 120 bp, synthetic construct
  source 1..120: mol_type = other DNA
ggaacctgaggtcagagaaaaaacattcaaggagaatactggaaaagattagatgtccgtgggccaaatccactcaagtgtggtgattcctacacacacagagacagacacagaaataaa

SEQ ID NO: 24418 - DNA, 120 bp, synthetic construct
  source 1..120: mol_type = other DNA
agatatcacatctgttggagactggaaaagcaatgtatgggttccaataacaacatatcataagcaatcaagagactaagaaatttttaaaactccctctctctatatatacacacatac

SEQ ID NO: 24419 - DNA, 120 bp, synthetic construct
  source 1..120: mol_type = other DNA
ttgactgattcaaacccagagttgaatatatataaccctggagaattcctttttgcatatccaactacaagctaagccaataaatagacctactacccctatttccttcagacactaaat

SEQ ID NO: 24420 - DNA, 120 bp, synthetic construct
  source 1..120: mol_type = other DNA
gagtacaaagctaaattctgtccagtgccctctgctggaaatgggatccagggacttttttattcccacatgtataaacaagaataaaagacattaatagtcaaagggaagctaagagac

SEQ ID NO: 24421 - DNA, 120 bp, synthetic construct; identical to SEQ ID NO: 7153
  source 1..120: mol_type = other DNA

SEQ ID NO: 24422 - DNA, 120 bp, synthetic construct
  source 1..120: mol_type = other DNA
gggccgtgactaagtgttgtaacattacctactcaagatctggagtctagaatgaaagcttaagaaagctttctggaaccacaagtaatccacggcatgattatgtcttcttttaatgag

SEQ ID NO: 24423 - DNA, 120 bp, synthetic construct
  source 1..120: mol_type = other DNA
tactctactggcacaaggcattggggaattttctaccatttttaccagagataaacgtctgtgacaccaactcctgccttcaaaatgaattttacttgagggttattcaattaaataggg

SEQ ID NO: 24424 - DNA, 120 bp, synthetic construct
  source 1..120: mol_type = other DNA
aacaaaaggagaaaaaagtcccaaatttaccttaatttagaggcacttctggaaatgaaaatgatttgtacctaaccccttatgttccccttcctttcttcagtgttttaggcacttcct

SEQ ID NO: 24425 - DNA, 120 bp, synthetic construct; identical to SEQ ID NO: 7154
  source 1..120: mol_type = other DNA

SEQ ID NO: 24426 - DNA, 120 bp, synthetic construct
  source 1..120: mol_type = other DNA
tctcccatgttaaggaagatcttctttattaatcccctggctcactagagatcaggaaccccagtgggtagaatgttcagctcccaaggaagatatgctgcagaggcacatggcaaactg

SEQ ID NO: 24427 - DNA, 120 bp, synthetic construct
  source 1..120: mol_type = other DNA
ttagccctaagtctcacccaggtcaccagagggcagttatactttccaattctgcctagaacctccacgcttcagtgcaggacttttaaaaattaaaattatatggagagtctgataaag

SEQ ID NO: 24428 - DNA, 120 bp, synthetic construct
  source 1..120: mol_type = other DNA
gcaccaaatgccacagcactgcatgagttgaaaaatgaagaggacatcattttttcattaatgcttttaggaatttcttttagaagggaaggaaaaagaaattcaaaaaaggtggctctt

SEQ ID NO: 24429 - DNA, 120 bp, synthetic construct
  source 1..120: mol_type = other DNA
ctgccttgagtttacaactgccgcctcctttcctaaagattcacttcttatcctagtaccaatgtacaggaactaatcaagtgcagaacgtgatacagcactgaatacagtttatcccca

SEQ ID NO: 24430 - DNA, 120 bp, synthetic construct; identical to SEQ ID NO: 7155
  source 1..120: mol_type = other DNA

SEQ ID NO: 24431 - DNA, 120 bp, synthetic construct
  source 1..120: mol_type = other DNA
ctacacagagatggacagccttgatacttaattcctataagctcctatccctttaagatattttatataatgaaaataaggaaaatgtcttctccctagcagcaacgagcacaggcagtg

SEQ ID NO: 24432 - DNA, 120 bp, synthetic construct
  source 1..120: mol_type = other DNA
tcaggatggcaaaagggggagaaaaacaacaaagacggagggacgccattttgtaatggagaaagaggacttaaactaaaaagccacccggctctgccggtagcttcagttacattataa

SEQ ID NO: 24433 - DNA, 120 bp, synthetic construct
  source 1..120: mol_type = other DNA
cagtaagagcgtagtgaaaattaaagcaattaaaatattaaaaagaacaattttctgcagggaagaactgaatttgcaacggaggttcaaccggctaccatcgaccacccccatcctccc

SEQ ID NO: 24434 - DNA, 120 bp, synthetic construct
  source 1..120: mol_type = other DNA
tcaagacacaacctgcaacgccgcttggaagacaaaaggacaaggaaagtcgccatattgaagcagggaagaaaaaaattccttttaacgacacaaatcttttagaaagctagcattcaa

SEQ ID NO: 24435 - DNA, 120 bp, synthetic construct; identical to SEQ ID NO: 7156
  source 1..120: mol_type = other DNA

SEQ ID NO: 24436 - DNA, 120 bp, synthetic construct
  source 1..120: mol_type = other DNA
taaaaagttatagcgagctattacttctctctgcccatctccttaccctgcaatctttatgtacagattgcttattaatctggcaaattgaaaggcaccctgcttgtctcacacacaaag

SEQ ID NO: 24437 - DNA, 120 bp, synthetic construct
  source 1..120: mol_type = other DNA
tgtgagctcattaacccttttgaagactgctgctaaccagaggaaggtaaccattcctccttatataaacacatatggctttggcagtctggaaattggctggattaccaagggttaacc

SEQ ID NO: 24438 - DNA, 120 bp, synthetic construct
  source 1..120: mol_type = other DNA
gagagaacaagactgtttagacccacaggccctttttaatggagattaagtgaccagattggtccttctccagttctctatttgttctatggtctcatttcttcctctcattatttttgg

SEQ ID NO: 24439 - DNA, 120 bp, synthetic construct
  source 1..120: mol_type = other DNA
cgtcagcacctcgggctcaggggggagggggtaaaattttggaggaaaaaaaataaaacaaccaaccaggacccaaaactcaattatttagggggcctcattggatcaaaaagtctttta

SEQ ID NO: 24440 - DNA, 120 bp, synthetic construct; identical to SEQ ID NO: 7157
  source 1..120: mol_type = other DNA

SEQ ID NO: 24441 - DNA, 120 bp, synthetic construct
  source 1..120: mol_type = other DNA
gttgctgcggcttgtttctgttttcctcgtggccggcctgtctttctccgagaaaattcaaacctgggataaaaggaacacaagggagaaagatgtaatcagtacgggttgcttcaaaac

SEQ ID NO: 24442 - DNA, 120 bp, synthetic construct
  source 1..120: mol_type = other DNA
aatgaacccatccatccctatcccgcttcccagatccaacgctctccgcaaaattttacccactagacgacaaagtaggcaaacttacctctaaacgaaccccagaatggcggccgcccg

SEQ ID NO: 24443 - DNA, 120 bp, synthetic construct
  source 1..120: mol_type = other DNA
tcgccaactgattggctactctcacttcacctttgctccgcccctttccctggcactctcttccgcctccttcctgcctccctgtcgcgtgcgcgtgaccaggagcctagcacctccctt

SEQ ID NO: 24444 - DNA, 120 bp, synthetic construct; identical to SEQ ID NO: 7158
  source 1..120: mol_type = other DNA

SEQ ID NO: 24445 - DNA, 120 bp, synthetic construct
  source 1..120: mol_type = other DNA
gtacgtcaagatggcggcgtctgtattaaacaccgtgctgaggcggcttcctatgctatctctcttccgaggttctcacagagttcaggtaactcttcgaaagacattttgcacaacctc

SEQ ID NO: 24446 - DNA, 120 bp, synthetic construct
  source 1..120: mol_type = other DNA
cgcattttctaatcccgagccgaggactaaacgccagggttaggtatcatcctttttccaaaatgccatttcagtaaaataacttaagtgatggaattgacccctgtccaccctcagtca

SEQ ID NO: 24447 - DNA, 120 bp, synthetic construct
  source 1..120: mol_type = other DNA
tatgcaagtggtgactaaatctgtgttgctctggaatgtccttggggaaattagggatcccaatttctaccaaccttgctatttctcaataaggtcaggatatattcttacgacctgagg

SEQ ID NO: 24448 - DNA, 120 bp, synthetic construct; identical to SEQ ID NO: 7159
  source 1..120: mol_type = other DNA

SEQ ID NO: 24449 - DNA, 120 bp, synthetic construct
  source 1..120: mol_type = other DNA
gatttggagactcacctgtcttctgcatcccctccccaccacacatcttagttccaagaacctagatatccttcctcttactttattcttccaccagagtcaatttatttccaaaaagca

SEQ ID NO: 24450 - DNA, 120 bp, synthetic construct
  source 1..120: mol_type = other DNA
caagtgattctcttgcctcagcctcccgagtagctgggactacaggcgcatgccaccacgccgaactaatttttgtatttttagtagagataaggtttcaccatgttggccaggatggtc

SEQ ID NO: 24451 - DNA, 120 bp, synthetic construct
  source 1..120: mol_type = other DNA
ttgtactagactttttatttgtcttctgaaataagattgttttttaggcatatatcccctaacttagcttttctttcaggatccaattgtagaaaaggagagtggttgttgatttatgtc

SEQ ID NO: 24452 - DNA, 120 bp, synthetic construct
  source 1..120: mol_type = other DNA
taaactcattcttttatttttttcttctcctttgtaggttcccctccagactctttgcaccaaagctccctctgaggaagattctttgtcctcagttcccatttctccttataaggatga

SEQ ID NO: 24453 - DNA, 120 bp, synthetic construct; identical to SEQ ID NO: 7160
  source 1..120: mol_type = other DNA

SEQ ID NO: 24454 - DNA, 120 bp, synthetic construct
  source 1..120: mol_type = other DNA
actgctgttttttttctctctacagcgtcggaataaagttgttgggaatccctgccccatctgtcgagatcacaagttgcatgttgactttagggtaaggagagtcttttctttttaggg

SEQ ID NO: 24455 - DNA, 120 bp, synthetic construct
  source 1..120: mol_type = other DNA
tgaaaccccgtctctactaaaaatacaaaaaattagccggttgtggtggcgggcgcctgtagtcccagctactcaggaggctgaggcaggagaatggcgtgaacccgggaggcagagctt

SEQ ID NO: 24456 - DNA, 120 bp, synthetic construct
  source 1..120: mol_type = other DNA
tttgcagtgccaaagagattactgtaggtgccccacacttcgtatatccaggaggccctacagtccgttttatagtaactgtttctggcattataaaaacatccctccagccttttacct

SEQ ID NO: 24457 - DNA, 120 bp, synthetic construct
  source 1..120: mol_type = other DNA
ctggagtgcagtggcgtgatctcagctcactgcaacctccgccttctgggttcaagcgattctcccgcctcagcctcccaagtagctgtaactacaggcttgtgccaccaagcccagcta

SEQ ID NO: 24458 - DNA, 120 bp, synthetic construct; identical to SEQ ID NO: 7161
  source 1..120: mol_type = other DNA

SEQ ID NO: 24459 - DNA, 120 bp, synthetic construct
  source 1..120: mol_type = other DNA
tggagggcaggtatatgaagcaagatagagtccattatttttcaaaaagccttcaatatgtgagaaggacaggatttgctccttaaagaatttgaaaacatattggctgggtgcggcggc

SEQ ID NO: 24460 - DNA, 120 bp, synthetic construct
  source 1..120: mol_type = other DNA
gccaggcatggtggcaggcgcctataatcccagctacttgggaggctgaggcaggagaattgcttgaacccgggaggcggaggttgcagtgagctgagattgcaccactgcactccagcc

SEQ ID NO: 24461 - DNA, 120 bp, synthetic construct
  source 1..120: mol_type = other DNA
gaagctatatggctgatcatcagggaagtagtagagcatttggataacagtcagaaaatgggggtatttgactgcaataagaacccttctaacacaggttatttaggagtcccatagata

SEQ ID NO: 24462 - DNA, 120 bp, synthetic construct
  source 1..120: mol_type = other DNA
gagtttgagaccagcctggccaacaaggtgaaacgccgtctctactaaaaatacaaaaaaaattagctgggtgtgatggcgggcgcctgtagtcccagcttctcaggaggctgaggcagg

SEQ ID NO: 24463 - DNA, 120 bp, synthetic construct; identical to SEQ ID NO: 7162
  source 1..120: mol_type = other DNA

SEQ ID NO: 24464 - DNA, 120 bp, synthetic construct
  source 1..120: mol_type = other DNA
ttatacatacacattacaatatcattttttgggtgatttctgggatttccaatgaccagccccagtttttcacctaaaggctgacgttagaacttaacctctgcagcccaggcgcggtgg

SEQ ID NO: 24465 - DNA, 120 bp, synthetic construct
  source 1..120: mol_type = other DNA
gatggtgaaaccgcatctctactaaagatacaaaataattagccaggtgtggtggcaggcgcctgtaaccccagctactcgggaggctaaggcagagaattgcttgaacctgggaggcgg

SEQ ID NO: 24466 - DNA, 120 bp, synthetic construct
  source 1..120: mol_type = other DNA
aaaaaaaaaaaagaacttaacctctgcataagagatttctatgggagcacagtgacagaatatgggatgtgcaaggatggattcagtgaattgatgaagccaaactgggacatgaaggag

SEQ ID NO: 24467 - DNA, 120 bp, synthetic construct
  source 1..120: mol_type = other DNA
tcctgctgctctccctgcctcttttcctcacgtttctctaccactttcccccacagaacgtgaagctcttggagcaatttgtctgcgcccacacgggtatcatcttctatgctccataca

SEQ ID NO: 24468 - DNA, 120 bp, synthetic construct; identical to SEQ ID NO: 7163
  source 1..120: mol_type = other DNA

SEQ ID NO: 24469 - DNA, 120 bp, synthetic construct
  source 1..120: mol_type = other DNA
aatcccagctactcaggaggcggaggcaggagagtcgcttgaacccaggaggcacaggttgtggtgagccaacattgcgccattgcactccagcctgggcatcaagtgaagctccatctc

SEQ ID NO: 24470 - DNA, 120 bp, synthetic construct
  source 1..120: mol_type = other DNA
gacttctcacaaattgtcacataagttattttatatcattgtcaattggattagattttccaaacttggaatcgtaaatttaacaattcagaattatatttattccctaactacagtcac

SEQ ID NO: 24471 - DNA, 120 bp, synthetic construct
  source 1..120: mol_type = other DNA
gtagctgagacagagaccacaggacctgcagagtttaaaatatttactatatgactctagacagaaaaattttgctaacccctgctctgaagcaagacaaatttgcagagaataattttt

SEQ ID NO: 24472 - DNA, 120 bp, synthetic construct; identical to SEQ ID NO: 7164
  source 1..120: mol_type = other DNA

SEQ ID NO: 24473 - DNA, 120 bp, synthetic construct
  source 1..120: mol_type = other DNA
aggctggagtgcagtggcatgatcttggctcactgccgtctccacctcctgggttcaagcagttctcctgcctcagcctcccaagtagctgggattacaggcacgtgccactgtgcctgg

SEQ ID NO: 24474 - DNA, 120 bp, synthetic construct
  source 1..120: mol_type = other DNA
atgagccaccgtgcctggccttgcagagaataatctgaattcaccattgttgggggtggcagtacaatcagtgttcagtttgtcaagagtttcttatagtcaagctgtaaaggctgaagg

SEQ ID NO: 24475 - DNA, 120 bp, synthetic construct
  source 1..120: mol_type = other DNA
caactcaaccctctaattaaccacacttgcccattaaattgtgttctccctgtcttggaggttttaccattaaatggcttctctatagtggctagaccctcctaaatctttatcccagct

SEQ ID NO: 24476 - DNA, 120 bp, synthetic construct
  source 1..120: mol_type = other DNA
ttaggtaaagccaatccttcccaatctacccctctgtcaccatatggaagcagttgtgttctattatttactgtgccttaaagaacaagatatttttctccccacaggagtctgtgtgaa

SEQ ID NO: 24477 - DNA, 120 bp, synthetic construct; identical to SEQ ID NO: 7165
  source 1..120: mol_type = other DNA

SEQ ID NO: 24478 - DNA, 120 bp, synthetic construct
  source 1..120: mol_type = other DNA
caatgccttaggaagttctttatataaatgtctggccctggactacatggcactgctgcataagttagtaaaaagtatacccctctgctagggcagatgcagcttcatagtccttgttca

SEQ ID NO: 24479 - DNA, 120 bp, synthetic construct
  source 1..120: mol_type = other DNA
ccttccctttataatcctttttcttacttcatctaaaccaccctcctcattgcctcttaaatttcttttcttttttaatcccttaggtctcctcatttaccacatcccccaggttgaacc

SEQ ID NO: 24480 - DNA, 120 bp, synthetic construct
  source 1..120: mol_type = other DNA
ggtacccatggtacaactggaaacagccaccggagagagaactgtctcgccttcgccggctttaccagggtcatctccaagaagagagtggccccccacctgagtcaatgcccaagatgc

SEQ ID NO: 24481 - DNA, 120 bp, synthetic construct; identical to SEQ ID NO: 7166
  source 1..120: mol_type = other DNA

SEQ ID NO: 24482 - DNA, 120 bp, synthetic construct
  source 1..120: mol_type = other DNA
caaaaaaaaaaaaaaagactgggaagagagctagagggactaggagataatgtgtatgtaggtttatgtgatgggatatcaccctgaagagttgtgtcttttgtggccagtgacaaatcc

SEQ ID NO: 24483 - DNA, 120 bp, synthetic construct
  source 1..120: mol_type = other DNA
tatatattgtaaatagatgggctgggctaaacattgttgccgtttcatacttctaccaactcagcttttacacaataaagctctactgtctctggtttgctttgggctgtttccgatgaa

SEQ ID NO: 24484 - DNA, 120 bp, synthetic construct
  source 1..120: mol_type = other DNA
cggggatgggcagctgtgccactctgtcaagatgccttgtgggcccccactccacagcatggcccactgttcactgaggggataaaaggttggacagtgagacactgggccaaggaagac

SEQ ID NO: 24485 - DNA, 120 bp, synthetic construct; identical to SEQ ID NO: 7167
  source 1..120: mol_type = other DNA

SEQ ID NO: 24486 - DNA, 120 bp, synthetic construct
  source 1..120: mol_type = other DNA
ggcccttttctcccggttcctctccaaacctggtccaggcaccacgcccccttctcactgactagtgatcgccccttttgatgtccaggcctgcctttttggtgacctctgaccctgggc

SEQ ID NO: 24487 - DNA, 120 bp, synthetic construct
  source 1..120: mol_type = other DNA
tggcctttctgcttcctcacaataaccttaagggaggagggagtgtgccaccttgaaaggtgtgacagaagtttgggtttcagaagggtggggtgggaaatcagattggaagactcccag

SEQ ID NO: 24488 - DNA, 120 bp, synthetic construct
  source 1..120: mol_type = other DNA
ctagtgttgatctacagcagcaaattatgaccattatagatgaactgggcaaggcttctgccaaggtactggagagtttttagatggagtaaagggaggacctctgtggggatggtatat

SEQ ID NO: 24489 - DNA, 120 bp, synthetic construct; identical to SEQ ID NO: 7168
  source 1..120: mol_type = other DNA

SEQ ID NO: 24490 - DNA, 120 bp, synthetic construct
  source 1..120: mol_type = other DNA
ttcgtataccttggtttctgagaacaaaagtgctggaggttagggggcagcagagatgccggggttcctaaaacatttttattgtttctctcttaggatgatcgtgaggctcataatgag

SEQ ID NO: 24491 - DNA, 120 bp, synthetic construct
  source 1..120: mol_type = other DNA
aactaggggctcctttgccctgagcccttccagaagccctgcctcccaccccccatgttcccatgtcattctattcccttcccaggcttctggcttcctgttggcatgctttccccatac

SEQ ID NO: 24492 - DNA, 120 bp, synthetic construct
  source 1..120: mol_type = other DNA
accacagtcccacaggttagaggtttcagagaatagatccccactgagcattcccattgaatttatttgttatttatggcaaagaagtagtgacttatttcctatcacataggtttcatt

SEQ ID NO: 24493 - DNA, 120 bp, synthetic construct
  source 1..120: mol_type = other DNA
gtacagtggcgcaatctcagctcactgcaacctccacttcctggtttcaagcgattctcctgcttcagcctcctgagtagctgggactacaggcacccaccaccacacccagctaatttt

SEQ ID NO: 24494 - DNA, 120 bp, synthetic construct; identical to SEQ ID NO: 7169
  source 1..120: mol_type = other DNA

SEQ ID NO: 24495 - DNA, 120 bp, synthetic construct
  source 1..120: mol_type = other DNA
agatccacctgcctcagcctcccaaagtgctgggattataggcgtgagccactgtacccagacttattttgattctttaccacaagttgtttcctacacctaatttttcttttttttttt

SEQ ID NO: 24496 - DNA, 120 bp, synthetic construct
  source 1..120: mol_type = other DNA
agggattacaggcatgcaccatcatgcccagctaatttttgtatttttagtagagatggagtttcaccatgttggacagactggtcctgaactcatggcctcaagtgatgtgcccacctc

SEQ ID NO: 24497 - DNA, 120 bp, synthetic construct
  source 1..120: mol_type = other DNA
ctcactgcaagctccgcctcccaggttcacggcattctcctgcctcagcctcccgagtagctgggactacaggtgcccaccaccatacccagctaattttttgtatttttagtagagatg

SEQ ID NO: 24498 - DNA, 120 bp, synthetic construct; identical to SEQ ID NO: 7170
  source 1..120: mol_type = other DNA

SEQ ID NO: 24499 - DNA, 120 bp, synthetic construct
  source 1..120: mol_type = other DNA
tggtttactcaatgaaacagacaacagcctgggcaacatagcgaaactctgtctctacaaaaaatacaaaaaaaaattagccaggcgtggtggcacgagcctgtagtcccagctacttgg

SEQ ID NO: 24500 - DNA, 120 bp, synthetic construct
  source 1..120: mol_type = other DNA
aaacagaaaaaaaggccaggtgcggtgcggtggcccatgcccgtaatcccagcactttgggaggctgacgtgggcgaatcacttgaggtcaggagtttgagaccagcctggtcaacatgg

SEQ ID NO: 24501 - DNA, 120 bp, synthetic construct
  source 1..120: mol_type = other DNA
cagtgaaccaagattgcaccactgcactccagcctgagcgacagagtgaggactccatctcaaaaaagaaaaagaaaaagggccaggcatggtggctcatgcctgtaatccccacacttt

SEQ ID NO: 24502 - DNA, 120 bp, synthetic construct; identical to SEQ ID NO: 7171
  source 1..120: mol_type = other DNA

SEQ ID NO: 24503 - DNA, 120 bp, synthetic construct
  source 1..120: mol_type = other DNA
tgctctggaaaaatgagagcaagtaagggtttgggagtactcaagtaaggtggggatgggagtatgtgggattgcaggttgaaaggggatcatcactgagaaagtgtcatttgagcaata

SEQ ID NO: 24504 - DNA, 120 bp, synthetic construct
  source 1..120: mol_type = other DNA
acatggtgaaaccctgtctccactaaaaaaaatacaaaaaaattagctgggtgcctgtagtcccagctactcgggaggctgaggcaggagaatggcgtgaacctgggaggcagagcttgc

SEQ ID NO: 24505 - DNA, 120 bp, synthetic construct
  source 1..120: mol_type = other DNA
agggaggccgaggtgggtggatcacttgagcccaggagttcgagactagcctaggcaacatggtgaaaccccatctctacaaaaaacacaaaaattagccaggtgtagtggcacgcacct

SEQ ID NO: 24506 - DNA, 120 bp, synthetic construct; identical to SEQ ID NO: 7172
  source 1..120: mol_type = other DNA

SEQ ID NO: 24507 - DNA, 120 bp, synthetic construct
  source 1..120: mol_type = other DNA
aaataagatcaggccaggggtggcgactcacacctgtaatcccagcactttgggaggccgaggtaggtggatcacctgaggtctctactgaaaataccaaaattagctgggtgtgatggc

SEQ ID NO: 24508 - DNA, 120 bp, synthetic construct
  source 1..120: mol_type = other DNA
aagactccttcttaaaaaaaaaaaaaaaaaaaaatagcgccaggtgtggtatctcattcctgtaatcccagcattttgggaggcccaggcaggtggatcacaaggtcaggagttcgagac

SEQ ID NO: 24509 - DNA, 120 bp, synthetic construct
  source 1..120: mol_type = other DNA
tgggaggcagaggttgcagtgagctgagatcgcactactgcactccagcctggataacagaacgagactccatcaaagaaaaaagaaaaagatcattttggctgtgatcttgattttttc

SEQ ID NO: 24510 - DNA, 120 bp, synthetic construct; identical to SEQ ID NO: 7173
  source 1..120: mol_type = other DNA

SEQ ID NO: 24511 - DNA, 120 bp, synthetic construct
  source 1..120: mol_type = other DNA
gccagagtagaagcaagtagactaattaggcagcaacaatcctggcgaaaaatggtggtggctcagaccaaggtggtagcagtagtgatggtaaagagtggtcaaattttaaatattttg

SEQ ID NO: 24512 - DNA, 120 bp, synthetic construct
  source 1..120: mol_type = other DNA
ggaagaatgaagttgctttaactgagatggtaggtagaccagctttgggggaaatactaggagtacatttttaatatgttaattggagatgtctgtgatatgtccaggtttgagtagaca

SEQ ID NO: 24513 - DNA, 120 bp, synthetic construct
  source 1..120: mol_type = other DNA
acaggatgcgatcaccatagaaagattatagatagagaagctgcccctttgggccctctttaagaagtgaggacccccaactggctgctctgaaaagccatctttgcattgttcctggtt

SEQ ID NO: 24514 - DNA, 120 bp, synthetic construct; identical to SEQ ID NO: 7174
  source 1..120: mol_type = other DNA

SEQ ID NO: 24515 - DNA, 120 bp, synthetic construct
  source 1..120: mol_type = other DNA
gaaaacgaagcagctgaggcggtatggacaaatgggcagctgatgatgatgaagatgacgatgttgataccaagcagcagaaggccagtgaggatgattagacagcaaaaaaagaaaagt

SEQ ID NO: 24516 - DNA, 120 bp, synthetic construct
  source 1..120: mol_type = other DNA
ggcactcaccaccacccaacccaaaccagagaatttgcaacagaggaggaaaaaagaaccaaaacttccaaggtcttgctcttttaaaagtactttaaaaaggaagtttgtttgtatttt

SEQ ID NO: 24517 - DNA, 120 bp, synthetic construct
  source 1..120: mol_type = other DNA
cacctcctgggttcaagtgattctcctgcctcagcctcctgagtagctgggattacaggcgcccgccaccacacccagctaatttttgtatttttagcagagacaggctttcaccaggtt

SEQ ID NO: 24518 - DNA, 120 bp, synthetic construct; identical to SEQ ID NO: 7175
  source 1..120: mol_type = other DNA

SEQ ID NO: 24519 - DNA, 120 bp, synthetic construct
  source 1..120: mol_type = other DNA
cagaagatcgagaccatcctggctaacatggtgaaaccccctgtctactaaaaatacaaaaaattagccaggcgtggtggcgggagcctgtagtcccagctacttgggaggctgaggcag

SEQ ID NO: 24520 - DNA, 120 bp, synthetic construct
  source 1..120: mol_type = other DNA
gttctgagcattccagtagcttctttagtgtatgtagttagttgtaccataagtagttggtttgtgtgagatggttaaaaaggccaaagataaaatgtttcatttatttgccttttttgt

SEQ ID NO: 24521 - DNA, 120 bp, synthetic construct
  source 1..120: mol_type = other DNA
atgtgtgaaacaatattgtgcaacaataaacccaaattttattttgctgagttgttctaacagcaacaaaaagaagttaaggaagagaagaagaccagcaaatgcaaccacagagtgact

SEQ ID NO: 24522 - DNA, 120 bp, synthetic construct; identical to SEQ ID NO: 7176
  source 1..120: mol_type = other DNA

SEQ ID NO: 24523 - DNA, 120 bp, synthetic construct
  source 1..120: mol_type = other DNA
tccaggaggaaggaatggtttacttggtcaaatgctgctgatcaaggagcaaagaggtctgagaagttaccattggatttatctgcgttaggccattggtgatcttaatgagcagttttg

SEQ ID NO: 24524 - DNA, 120 bp, synthetic construct
  source 1..120: mol_type = other DNA
ctggagagtgaagtggatcaaaagagttgatcttttgcagatgggagaacaaatagcattagaatgattcagtagagagaaaatattattatgtcagagaaagtggggagaactgttgaa

SEQ ID NO: 24525 - DNA, 120 bp, synthetic construct
  source 1..120: mol_type = other DNA
ataaggacatggatttgagtgctatcttgggctgggggttgggtaaagaaagatgacatgtctaatcttgaaaggcaagtgtttgtcaggtggacaaaaggctaaagtgcatttcatgta

SEQ ID NO: 24526 - DNA, 120 bp, synthetic construct
  source 1..120: mol_type = other DNA
agatcgagaccatcctggctaacacggtaaaaccccgtctctactaaaaatacaaaaaaaattagctgggcgtggtggcaggcgcctgtagtcccagctaatcaggaggctgaggcagga

SEQ ID NO: 24527 - DNA, 120 bp, synthetic construct; identical to SEQ ID NO: 7177
  source 1..120: mol_type = other DNA

SEQ ID NO: 24528 - DNA, 120 bp, synthetic construct
  source 1..120: mol_type = other DNA
ggctggagtgcagtggcacaatctcagctcactggaacctctgcctcctgagtccaagcaattctcttgcctcagcctcctgagtagctgggattagaggcgcccaccaccacacctggc

SEQ ID NO: 24529 - DNA, 120 bp, synthetic construct
  source 1..120: mol_type = other DNA
cggtcctggagcacagtattcgatatgaaacacattacccagttaacatgtaaggccagagcagtatagagtgtaaataataattcacatttcatgggctctatgtggtatctatatgca

SEQ ID NO: 24530 - DNA, 120 bp, synthetic construct; identical to SEQ ID NO: 7178
  source 1..120: mol_type = other DNA

SEQ ID NO: 24531 - DNA, 120 bp, synthetic construct
  source 1..120: mol_type = other DNA
aacatggcgaaaccccatctctattaaaaatacaaaaataagccgggcgtggtggcatgtgcctgtaatcccagctactcaggaggctgagacaggagaagagcttgaacctgggaggtg

SEQ ID NO: 24532 - DNA, 120 bp, synthetic construct
  source 1..120: mol_type = other DNA
ggaaggccaaggcgggcggatcacgaggtcaagagatcaagaccatcctggccaacatggtgaaaccctgtctctactgaaaatacaaaaattagctgggcatggtggcgcatgcctgta

SEQ ID NO: 24533 - DNA, 120 bp, synthetic construct
  source 1..120: mol_type = other DNA
aaaaagatcttcccacctcaacctcccaagtagttgggactacaggcgcccaccactatggctggctgattttttgtatttttagtagagacggggtttcaccgtgttagccagggtggt

SEQ ID NO: 24534 - DNA, 120 bp, synthetic construct; identical to SEQ ID NO: 7179
  source 1..120: mol_type = other DNA

SEQ ID NO: 24535 - DNA, 120 bp, synthetic construct
  source 1..120: mol_type = other DNA
ctgagtagctaggattacaggcgcacgtcaccacacccagctaatttttgtatttttagtagagacagggtctcgaactcctgacctcaagtgatccacccgccttggcctcccaaattg

SEQ ID NO: 24536 - DNA, 120 bp, synthetic construct
  source 1..120: mol_type = other DNA
ctctcctcttgagtaaactcttaatggctacactattttcctggctaaaacactgcagctggaatcagaagtctgaaagttgaggcccagccctgccacttgtagctacttggcattggc

SEQ ID NO: 24537 - DNA, 120 bp, synthetic construct
  source 1..120: mol_type = other DNA
taaatgtgaaaatataatgaagtaactctaaaattaatagttactagttatcaaagtagcatcctggcctccagcatgtcttcccctgactttccccaccccttggaaccctgctgaatt

SEQ ID NO: 24538 - DNA, 120 bp, synthetic construct; identical to SEQ ID NO: 7180
  source 1..120: mol_type = other DNA

SEQ ID NO: 24539 - DNA, 120 bp, synthetic construct
  source 1..120: mol_type = other DNA
ttatacaagtcctttgtctgttcttaaattgtgttcttttttgttctgagagtttttcatatattctagatagaacgcacttatcagatgtatgacttgcaaacattttctcccattctg

SEQ ID NO: 24540 - DNA, 120 bp, synthetic construct
  source 1..120: mol_type = other DNA
acgccattctgctgcctcagcctcccgagtagctgggactacaggcgcccgccaccacatccggctaatttttttgtatttttagtagagatggggtttcaccatgttagccaggatggt

SEQ ID NO: 24541 - DNA, 120 bp, synthetic construct
  source 1..120: mol_type = other DNA
atcagctgaaccattatgttagaattgcctacagctggctgagcatggtggctcacgtctataatcccaggacttttggaggctgaggcagaaggatcacatgagccctggagtttgaga

SEQ ID NO: 24542 - DNA, 120 bp, synthetic construct; identical to SEQ ID NO: 7181
  source 1..120: mol_type = other DNA

SEQ ID NO: 24543 - DNA, 120 bp, synthetic construct
  source 1..120: mol_type = other DNA
atcacccaatgacgtatttctcagaatgtatccccatcgttaagtgatgcatgattgtattttgtttgtttcatcttccaggtgaacaactttgtgatctttgaaggcttctttgcccat

SEQ ID NO: 24544 - DNA, 120 bp, synthetic construct
  source 1..120: mol_type = other DNA
gccccctgctccctctctgagggcaactcgacactctcgtgctgctgcagtcgatcccacgcccgctggtaaagcctgtattgaaggggtggaactgtagtgcagtgatggctacttact

SEQ ID NO: 24545 - DNA, 120 bp, synthetic construct
  source 1..120: mol_type = other DNA
tgtttgcctttgccctcatgggagctcagtgcattttatatttggcaagacttttaactaagcaagctcattgggagcctgtttgacagctgatatcaatggaccctcttgccagttcag

SEQ ID NO: 24546 - DNA, 120 bp, synthetic construct; identical to SEQ ID NO: 7182
  source 1..120: mol_type = other DNA

SEQ ID NO: 24547 - DNA, 120 bp, synthetic construct
  source 1..120: mol_type = other DNA
cagtgcttgcttgcacagaagagcccccttcctgagctggctctgtggccaggaaaggatgtaaccaccatccaaacagcagtctgtaaccagctatgagcatcacagtgtcaggcactg

SEQ ID NO: 24548 - DNA, 120 bp, synthetic construct
  source 1..120: mol_type = other DNA
ggtgctgtggataaagcttaagtgaatttgctgagaagtctttcatttgccacacatacatgatggagaatctcttgagagggaaagccgggagcaagtagagaagtgaggagggggagg

SEQ ID NO: 24549 - DNA, 120 bp, synthetic construct
  source 1..120: mol_type = other DNA
taggaaggagagattgtgccctccttccaaacctcccctgacctctccagagcaattcctgattaaccaagggctttgtccatctcatccagaggaacccagggtcctcgttggcccggc

SEQ ID NO: 24550 - DNA, 120 bp, synthetic construct; identical to SEQ ID NO: 7183
  source 1..120: mol_type = other DNA

SEQ ID NO: 24551 - DNA, 120 bp, synthetic construct
  source 1..120: mol_type = other DNA
ctccagcaaggaagctgccacccaagagagcagagggagacatcaagccatactcctctagtgaccgagaatgtaagaggggcaagggtcgggtgtctgggcctggggtaccttaacaca

SEQ ID NO: 24552 - DNA, 120 bp, synthetic construct
  source 1..120: mol_type = other DNA
gcagatcgcctgagtccaggggttcaagaccagcctggccaacatggtgaaaccccgtctctactaaaaatacaaaaattagctgggcacggtggcacgtgcctgtaatcccagctactt

SEQ ID NO: 24553 - DNA, 120 bp, synthetic construct
  source 1..120: mol_type = other DNA
aaaaaaaagaaagactcagatttctctttttttctaccaaaacctttgctgtcatgactctcttccttttttcttctttttctgtcttgctcttcattctccctgtccccagttctgaag

SEQ ID NO: 24554 - DNA, 120 bp, synthetic construct; identical to SEQ ID NO: 7184
  source 1..120: mol_type = other DNA

SEQ ID NO: 24555 - DNA, 120 bp, synthetic construct
  source 1..120: mol_type = other DNA
aaacctttcaagaaaaatatttgtgcaagtgatctgggaaaaaaatgcagtgaaggagcagaataggaccttatatggagcctagggaccctggctttaatgtgagagttatgtggaatg

SEQ ID NO: 24556 - DNA, 120 bp, synthetic construct
  source 1..120: mol_type = other DNA
cttgtgtgccaagagtccatcgcagcaggcagggagtgggcatttcctttatttctctccctttctcttcacctctgacttctctgtttttctctcccccgccccccgccatttcccatc

SEQ ID NO: 24557 - DNA, 120 bp, synthetic construct
  source 1..120: mol_type = other DNA
tgagaacctcagacccactcttccattgcatcctgtaggacccagtggaacctgacagagcccataggattccctcttctactttcttagacagcagggatgtcagggtctcaaactgcc

SEQ ID NO: 24558 - DNA, 120 bp, synthetic construct; identical to SEQ ID NO: 7185
  source 1..120: mol_type = other DNA

SEQ ID NO: 24559 - DNA, 120 bp, synthetic construct
  source 1..120: mol_type = other DNA
tagtgagcaagctctgcttcagagcagtctagttaggtagaacagggacttaccagcttcccaaagggatctactcaccattgccaaactcttcatttccacattttgtgtaggtgtcag

SEQ ID NO: 24560 - DNA, 120 bp, synthetic construct
  source 1..120: mol_type = other DNA
gatctgttagatcctggaatcccttcttgcatccatccctccctggtagctaggtcccgatatactcctgtcttgtgagattgtcgagatgagatgggggaccactcttcctctgtcctt

SEQ ID NO: 24561 - DNA, 120 bp, synthetic construct
  source 1..120: mol_type = other DNA
ctgaaatccttgggagccggatctccccatctcccctactcactcttcccttttcttctctcagtgttgtctgaataaagtgtgaaatcttttgtgttttctaaattgacattttcaatg

SEQ ID NO: 24562 - DNA, 120 bp, synthetic construct
  source 1..120: mol_type = other DNA
aaaaaaagaatcacaaaaaaaaaagttgtcagcctcatttgtgcgtcatcccttattttcctgggatctcaggacctctgtccctctcatttctcacttctgagatctgcacatctttta

SEQ ID NO: 24563 - DNA, 120 bp, synthetic construct; identical to SEQ ID NO: 7186
  source 1..120: mol_type = other DNA

SEQ ID NO: 24564 - DNA, 120 bp, synthetic construct
  source 1..120: mol_type = other DNA
aacccttacctccattgagagtgcaacacagtctgtcaccctatttacagaggcccccttccttttcctcctaaattcaaaattcagccttgtcacttcctatttccctctggtctaagg

SEQ ID NO: 24565 - DNA, 120 bp, synthetic construct
  source 1..120: mol_type = other DNA
ctcccaagtagctgggattacagaagtgcaccaccgtgcccagctagtttgtgtatttttagtagagacagggtttcaccatgttggccaggttggtctcgatctcctgatcacgtgatc

SEQ ID NO: 24566 - DNA, 120 bp, synthetic construct
  source 1..120: mol_type = other DNA
aaggtaaccctgttttccaaaccaaacaccagagtacccgatccaacacatttttgaccacatgtgagtctgttcttctgacatgatttggatcacacctagccatagatttaacacatt

SEQ ID NO: 24567 - DNA, 120 bp, synthetic construct
  source 1..120: mol_type = other DNA
ttctggggcacagctttgattaaaacctgttaggaatgataattacccccttctctttgttcctgtgctattccttttactcctctcctctgattcctccatacccacccatctttcatc

SEQ ID NO: 24568 - DNA, 120 bp, synthetic construct; identical to SEQ ID NO: 7187
  source 1..120: mol_type = other DNA

SEQ ID NO: 24569 - DNA, 120 bp, synthetic construct
  source 1..120: mol_type = other DNA
gaaacaaagaataggtgaggtctaaacccctcccctaacagcctcccaccaccatctgactcccttcctaacatcattctcagtcacttcctactcttaaatcttattgtatgaactgga

SEQ ID NO: 24570 - DNA, 120 bp, synthetic construct
  source 1..120: mol_type = other DNA
agcactaatggttccagcttcatacccatcatgtgtcctacattaaaacctggcccgagaccttgaagagtctgtaatcttaatttcctctttagtattcctataacccactctccatct

SEQ ID NO: 24571 - DNA, 120 bp, synthetic construct
  source 1..120: mol_type = other DNA
gtggggacatactcaacgccaggttcattcgaaacctgcaggaacgtcgcagcaccaggccttggtgaccgcagccccgtcaaacatcttcaaagtattatttctccctcactacaggaa

SEQ ID NO: 24572 - DNA, 120 bp, synthetic construct
  source 1..120: mol_type = other DNA
tcacaagagctgttgaaaaatttgactcattatttcagccgcctcacccctcactgtcgttgcacccattcagccttcagccctgtttttgctcagctttttgctcaaaggcctcagctg

SEQ ID NO: 24573 - DNA, 120 bp, synthetic construct; identical to SEQ ID NO: 7188
  source 1..120: mol_type = other DNA

SEQ ID NO: 24574 - DNA, 120 bp, synthetic construct
  source 1..120: mol_type = other DNA
gaccccaggtgagcggaggagaagagggagggaggagagggggcggggagagaccctcctcaaagccggtgcgtggggcggagcgcgcgctgggttccgcgcaggcgcagagacacccgc

SEQ ID NO: 24575 - DNA, 120 bp, synthetic construct
  source 1..120: mol_type = other DNA
ggcggggtcaaggccaggcagcggggcgcgtctgcgttgcgcccgactctccgcggttacctgtgcctagaggtgatttgaagggcaggggccgagagattcgtagccctgctgcggcgc

SEQ ID NO: 24576 - DNA, 120 bp, synthetic construct
  source 1..120: mol_type = other DNA
tgcgcccgggctggcaagatggccacgcccccagcagagacggcgcctctaggacaccatcggggaccgaggtacccgagcggtccgcccgccttccctgcagtgagacgatcccctggg

SEQ ID NO: 24577 - DNA, 120 bp, synthetic construct; identical to SEQ ID NO: 7189
  source 1..120: mol_type = other DNA

SEQ ID NO: 24578 - DNA, 120 bp, synthetic construct
  source 1..120: mol_type = other DNA
tgcctcgcacacttaatcatggagatgtacaggccacagcatttaatccacagtacaataaaacctgttattcgttaactcatcaagtatgtattacatgattcttgcgataagagaggt

SEQ ID NO: 24579 - DNA, 120 bp, synthetic construct
  source 1..120: mol_type = other DNA
tcaagcaattctccttcctcagcctcccgagtagctgggactacaggctcccgccaccacacccggctaattgttttgtatctttagtagagatggggtgtcaccatattggccaggctg

SEQ ID NO: 24580 - DNA, 120 bp, synthetic construct
  source 1..120: mol_type = other DNA
gtggctcacgcctgtaatcccagcactttgggaggccgaggtgggcggattacctgaggtcaggagttcgagaacagcctggccaacatggtgaaaccccatctgtaactaaaaatacaa

SEQ ID NO: 24581 - DNA, 120 bp, synthetic construct; identical to SEQ ID NO: 7190
  source 1..120: mol_type = other DNA

SEQ ID NO: 24582 - DNA, 120 bp, synthetic construct
  source 1..120: mol_type = other DNA
agctgggcatggtggcgcgcgcctgtagtcccagctactcaggaggctgaggcaggaaaatcacttgaacccgggaggcggaggttgcagtgagctgagatcgtgctactgcactccagc

SEQ ID NO: 24583 - DNA, 120 bp, synthetic construct
  source 1..120: mol_type = other DNA
gtcaggaggaataggtattggaagcctgttgagcatccaggggatcaaggggtgttagacaagtggattcttatctttctcccttctgttctttctccttaggaccagctttatccaggg

SEQ ID NO: 24584 - DNA, 120 bp, synthetic construct
  source 1..120: mol_type = other DNA
ctacctctccctcagatccaggccctcagctcagcatgggtggttctccctccaggaaagggggaggagggaccaggacctgagttgcatagcggctgcctggatgggcttagaagcctt

SEQ ID NO: 24585 - DNA, 120 bp, synthetic construct; identical to SEQ ID NO: 7191
  source 1..120: mol_type = other DNA

SEQ ID NO: 24586 - DNA, 120 bp, synthetic construct
  source 1..120: mol_type = other DNA
ctgaggtcaggagttcaagaccagcctggccaacatggtgaaaccccatctctactaaaaacacaaaaatcagccaggcatggtggcagacgcctataatcccagctactcaggaggctg

SEQ ID NO: 24587 - DNA, 120 bp, synthetic construct
  source 1..120: mol_type = other DNA
tcctcattttgggttaagggaggttaatcatgggatgagatctttcactccaagatgggagtaaggaggccttaaaaatagaaaactgggcctggcacatggctcacgcttataatccta

SEQ ID NO: 24588 - DNA, 120 bp, synthetic construct
  source 1..120: mol_type = other DNA
gcctgtaatcccagctactcgggaggctgaggcaggagaatcgcttgaacctgggaggcggaggttgcagtgagccgagattgtacctctgcactccagcctgggcgacagagctagact

SEQ ID NO: 24589 - DNA, 120 bp, synthetic construct; identical to SEQ ID NO: 7192
  source 1..120: mol_type = other DNA

SEQ ID NO: 24590 - DNA, 120 bp, synthetic construct
  source 1..120: mol_type = other DNA
atacatgacccttttcacttcccagagaagttcctagactgcttctcacagctgttccccattccttagaagccagtttggttttctaattctgccatcatgagatttctttcccatccc

SEQ ID NO: 24591 - DNA, 120 bp, synthetic construct
  source 1..120: mol_type = other DNA
ggaccctgcaagcccggtggcggcttgtggggctgcccgtccacttgctctttttgcggttctacaagcgtgacaaagacgagcattaccggtaagagagaaatgagaaaggacccaaac

SEQ ID NO: 24592 - DNA, 120 bp, synthetic construct
  source 1..120: mol_type = other DNA
ccagcctcagcctcctgggtagctggaattacaggcacaccatcacacccggctaatttttgtatttttagtagacagagggtttcaccatgttggccaggctggtctcgaactcctcac

SEQ ID NO: 24593 - DNA, 120 bp, synthetic construct; identical to SEQ ID NO: 7193
  source 1..120: mol_type = other DNA

SEQ ID NO: 24594 - DNA, 120 bp, synthetic construct
  source 1..120: mol_type = other DNA
gcctggccaacatggtaaaacccaaaaaaatacaaaaattagcccagtgtggtggtacacacctgtagttccagctacttgggaggctgagatgagagaatcacttcaacctgggaggtt

SEQ ID NO: 24595 - DNA, 120 bp, synthetic construct
  source 1..120: mol_type = other DNA
aaatgaaaagtcctgtctcatatgttgagccttacaacctggtaaatttccgcctgggagtagaatcccaataaattgttagactcagccacaaacattggatataagtttttaaaccag

SEQ ID NO: 24596 - DNA, 120 bp, synthetic construct
  source 1..120: mol_type = other DNA
acagggcacaacctaagcactgagatgtttgtaagttgcccaggtgatctaatatgtagcagaatttagggactactcgtttaaacaaatgcttgaattcagctttgggaccagtcacct

SEQ ID NO: 24597 - DNA, 120 bp, synthetic construct; identical to SEQ ID NO: 7194
  source 1..120: mol_type = other DNA

SEQ ID NO: 24598 - DNA, 120 bp, synthetic construct
  source 1..120: mol_type = other DNA
ggcagccaagaatctcaggagccagcttcctctcctcgtttctctccttccttcctttccatctcatgctgtgtaaagctgctgtgtaatttaacttgtaaataataaagtttaactgac

SEQ ID NO: 24599 - DNA, 120 bp, synthetic construct
  source 1..120: mol_type = other DNA
tgtcaggttctgtttacgtccttctcttaccctagctcttctcgtgttttgcctatttttttgggcattttcttagcatggggatcttctagctccttggccttataataatggggagcc

SEQ ID NO: 24600 - DNA, 120 bp, synthetic construct
  source 1..120: mol_type = other DNA
agagtcttgctctattgcccaggctggactgcagtggcgtatcatggctcaaagcagtcctactgcctcagcctcccaagtagctgagactacaggcacacatcacagtgcaccattaat

SEQ ID NO: 24601 - DNA, 120 bp, synthetic construct; identical to SEQ ID NO: 7195
  source 1..120: mol_type = other DNA

SEQ ID NO: 24602 - DNA, 120 bp, synthetic construct
  source 1..120: mol_type = other DNA
atggtgaaacccagtctctactaaaaatataaaattagctgggcgtggtggtgggcacctgtaatcccagctacactggaggctgaggcaggggaatcacttgaaaccgaaggcggaggt

SEQ ID NO: 24603 - DNA, 120 bp, synthetic construct
  source 1..120: mol_type = other DNA
tcattatagccccagcacctatacagtagccattcaaatatttattgaataagtgtctagttctcagatcttggaagatgctgacacacctgttagaaaggatgtctttgggctgggcat

SEQ ID NO: 24604 - DNA, 120 bp, synthetic construct
  source 1..120: mol_type = other DNA
ggcttgcgcctgtaatctcagctacttgggaggctgaggcatgagaatctcttgaaccccagaggcagaggttgcagtgaggctagattgcgccactgcactccagcctggacaacagag

SEQ ID NO: 24605 - DNA, 120 bp, synthetic construct; identical to SEQ ID NO: 7196
  source 1..120: mol_type = other DNA

SEQ ID NO: 24606 - DNA, 120 bp, synthetic construct
  source 1..120: mol_type = other DNA
aaagaaaatcaatggaaaaggcagacatctggggaccctaagaatgcactacctttttagttcaggcttcaggaaaactagagaggtaaggaatgcatgaagaacttcccaggaatgaac

SEQ ID NO: 24607 - DNA, 120 bp, synthetic construct
  source 1..120: mol_type = other DNA
aaatgctgcatgcccccagagaagcttgctcctgggaaggtactgggggtggaaagcaggaggctgaagaaatgctgaccttgcgtacacggatatagtccccctggcaggaactgagac

SEQ ID NO: 24608 - DNA, 120 bp, synthetic construct
  source 1..120: mol_type = other DNA
actgggaagacagttaaaaagaaaggagagataattaagtatacagcaggactaaagtcccccagtgtctctcattcccactcacccaagcccagtgacctgtgtgtaaacatttagcag

SEQ ID NO: 24609 - DNA, 120 bp, synthetic construct; identical to SEQ ID NO: 7197
  source 1..120: mol_type = other DNA

SEQ ID NO: 24610 - DNA, 120 bp, synthetic construct
  source 1..120: mol_type = other DNA
atggaggcaggagcaggaaacaccggggaattctgaggcttctgcagaaagtgtgcattcactatgtgcatttggaaaagatctctgacagcagaggaatggcatttaaaggtcatccct

SEQ ID NO: 24611 - DNA, 120 bp, synthetic construct
  source 1..120: mol_type = other DNA
ggataggatcaagtgtcttacccttgtgggcctcaaaagggggcaatcagagttatctaatactttattatgtgttaagggatagtatgatgaacagaaaaagacagacaaaggggaccc

SEQ ID NO: 24612 - DNA, 120 bp, synthetic construct
  source 1..120: mol_type = other DNA
ttcgaccagactaaggagaagagagagagagttgagcccagtcctccctcaggtttcccgctactactacaggggtccctggagccatcctgacccctatcatcctgcctccacccatgc

SEQ ID NO: 24613 - DNA, 120 bp, synthetic construct; identical to SEQ ID NO: 7198
  source 1..120: mol_type = other DNA

SEQ ID NO: 24614 - DNA, 120 bp, synthetic construct
  source 1..120: mol_type = other DNA
gccagctcgctgattggctgaggcctggaaagaaaggggaacaggctggctgacaatttggtcagggaaaagaaaaaggcagtatttatgcaagaaatctggaaggatgcaaactgctca

SEQ ID NO: 24615 - DNA, 120 bp, synthetic construct
  source 1..120: mol_type = other DNA
cgattccatgcctgtgcgggggttgtagctcttctgcttacagaaccctggatccagcacataaatgatgccctcaatggtgagtgatgtctcagcaatgttcgttgccacaaccacctg

SEQ ID NO: 24616 - DNA, 120 bp, synthetic construct
  source 1..120: mol_type = other DNA
agtatccaaggtcaggagcaggggacaaggccagaagacaggggacagggaagtgggggctgggagtcagcagggccataggaggaaaggaaatggagaagaggatttagggtttttttt

SEQ ID NO: 24617 - DNA, 120 bp, synthetic construct; identical to SEQ ID NO: 7199
  source 1..120: mol_type = other DNA

SEQ ID NO: 24618 - DNA, 120 bp, synthetic construct
  source 1..120: mol_type = other DNA
ttgctctgcccaagtaagtgcactcctcactggatcatttgcatcagctattccctctgtctggcatactcttctcccagatatcagcctggctccctccctcacctggtttgggtctct

SEQ ID NO: 24619 - DNA, 120 bp, synthetic construct
  source 1..120: mol_type = other DNA
tcatagcactggccacaaattgacaatatgtatttatgcatccactgcttccccgatagaccacaagtgcaagtttgttaggctaaggactttgttttgttcatcactgtatcatcaacc

SEQ ID NO: 24620 - DNA, 120 bp, synthetic construct
  source 1..120: mol_type = other DNA
tggctcatgcctgtaacccagcactttgagaggccaaggcaggcggatcacttgagtccaggagttcaagaccagcctggccaacatggcgaaaccccatctctactaaaaattagctgg

SEQ ID NO: 24621 - DNA, 120 bp, synthetic construct
  source 1..120: mol_type = other DNA
agtttgagaccaacctggccaaaatagcgaaacctcatctctactaaaaatacaaaaaattggccaggcgtggtggagggcacctgtaatcccagctactggggggctgagacaggagaa

SEQ ID NO: 24622 - DNA, 120 bp, synthetic construct; identical to SEQ ID NO: 7200
  source 1..120: mol_type = other DNA

SEQ ID NO: 24623 - DNA, 120 bp, synthetic construct
  source 1..120: mol_type = other DNA
aaattgtttttagccttgtctcctactccttcaccacatgaacctcccactaagcctactagctcacactctgacctcaaacataccttgggccttcctctgatgacttctcagccattt

SEQ ID NO: 24624 - DNA, 120 bp, synthetic construct
  source 1..120: mol_type = other DNA
tcctgggttcaagcgattctcatgactcagcctcctaaacaggtgggattataggcgcacgccaccatgccctgctgatttttgtattttcagtggaggcagggtttcaccacgttaggc

SEQ ID NO: 24625 - DNA, 120 bp, synthetic construct
  source 1..120: mol_type = other DNA
cgcacctgacctcagacatttctcttaaaggtccatatcaaatcccacctcttagcacatcaaggacttcccttctccactgaatctactgtgcatactttccagatcacatatttggct

SEQ ID NO: 24626 - DNA, 120 bp, synthetic construct; identical to SEQ ID NO: 7201
  source 1..120: mol_type = other DNA

SEQ ID NO: 24627 - DNA, 120 bp, synthetic construct
  source 1..120: mol_type = other DNA
cccagagtcacagaaggccaacatgccggccctgtcttcccctgggatacatcatcccctctccccaccatgtcaggcacctgtcctgtcaggaacaccaggatatccccagggggctgg

SEQ ID NO: 24628 - DNA, 120 bp, synthetic construct
  source 1..120: mol_type = other DNA
cctcccaattcaacatacactttatcctagttcccctttgaaccttccattccatctttccctccacaggataaccttctccaaaggcctcagcttttctgccacagacttaagcccatc

SEQ ID NO: 24629 - DNA, 120 bp, synthetic construct
  source 1..120: mol_type = other DNA
aagaaggtggaaaaacgggcagtgtccattgtggctgaagccaccaggaccttgagctcaggtcggaagcgagcaacatccttgatcaatccaaagagaatgtctgtgtgtagggtcctt

SEQ ID NO: 24630 - DNA, 120 bp, synthetic construct
  source 1..120: mol_type = other DNA
agacaccagagttaactggatgagaggggagtaatggacacaaagagttcaagaatgactgttgacggagggggctctaaggagaagtcagccatcccacttatgtagagcaacagaaag

SEQ ID NO: 24631 - DNA, 120 bp, synthetic construct; identical to SEQ ID NO: 7202
  source 1..120: mol_type = other DNA

SEQ ID NO: 24632 - DNA, 120 bp, synthetic construct
  source 1..120: mol_type = other DNA
gccagatgtggtggtagacgcctgtagtcccagctacttgggaggctgaggcaggagaatcgcttgaacctgggaggcagaggttgcagtgagccaagatcgtgccactgcactccagcc

SEQ ID NO: 24633 - DNA, 120 bp, synthetic construct
  source 1..120: mol_type = other DNA
caagctccgcctcctgggttcacaccattctcctgcctcagcctcccaagtagctgggactacaggtgcctgccactgtgcctggctaattttttgtatttttagtagagacggagtttt

SEQ ID NO: 24634 - DNA, 120 bp, synthetic construct
  source 1..120: mol_type = other DNA
gggactacaggtgcccgccaccacgcccagctaattttttatattttttagtagagacggggtttcaccgtgttagccaggatggtcttgatctccttacctcgtgatccgcctgcctct

SEQ ID NO: 24635 - DNA, 120 bp, synthetic construct; identical to SEQ ID NO: 7203
  source 1..120: mol_type = other DNA

SEQ ID NO: 24636 - DNA, 120 bp, synthetic construct
  source 1..120: mol_type = other DNA
tctctttgttctttggcttttctgggtggcagccaagtcccaggaactcatccccatcttcccctacccacctccctgacctcaactctttgtgcctaaccctaactgtgatggtgaagt

SEQ ID NO: 24637 - DNA, 120 bp, synthetic construct
  source 1..120: mol_type = other DNA
tgggttcttagagatcttttgcaagggatatgaaggataaaatcctatctgtccaattgctccactgtgatcttccaagaccagaaattcacagcctctgaagagtcaaaaaggcacata

SEQ ID NO: 24638 - DNA, 120 bp, synthetic construct
  source 1..120: mol_type = other DNA
aagctacccaagacttgtgtggagggccaagacccagagtccaaccactctgacaggccctgcaatctccaccactctgagggttactcagccattggtattgagttggaatctgtctcc

SEQ ID NO: 24639 - DNA, 120 bp, synthetic construct; identical to SEQ ID NO: 7204
  source 1..120: mol_type = other DNA

SEQ ID NO: 24640 - DNA, 120 bp, synthetic construct
  source 1..120: mol_type = other DNA
tgaattggctgggtgggaagaagggagagaaaggccagagattagagatacctgtaactcgccaggtcaggctcagagaggaactcccggagaagcatcccatctgtcatgtagcggagg

SEQ ID NO: 24641 - DNA, 120 bp, synthetic construct
  source 1..120: mol_type = other DNA
gggcagcaccaagacttctgctgtagggacctgagggaactgtagactgagtcacagaccccagactctaccccccggttccctagaaatctcacctcattcccaagcttcacacccatc

SEQ ID NO: 24642 - DNA, 120 bp, synthetic construct
  source 1..120: mol_type = other DNA
ttactaaatatgcaccctgggaccaggtacatttcagagaaagaagttgtaaaaaccaggcaggagaaaaggaggaaaagacagatgctgaaaaccagaaaagaagggcaaatagatagg

SEQ ID NO: 24643 - DNA, 120 bp, synthetic construct; identical to SEQ ID NO: 7205
  source 1..120: mol_type = other DNA

SEQ ID NO: 24644 - DNA, 120 bp, synthetic construct
  source 1..120: mol_type = other DNA
aaatggtgaaaccccgtctactaaaaatacaaaaaattagccgagcatggtggtgcatgcctgtatttccagctacttgggaggctgaggcaggagagtcgcttgaacctgggagacaga

SEQ ID NO: 24645 - DNA, 120 bp, synthetic construct
  source 1..120: mol_type = other DNA
cagcactttgggaggctgaggtgggcagatcacgaggtcaggagattgagaccatcctggccaacatggtgaaaccccatctctactaaaaatacaaaaattagctgggtgtggtggtac

SEQ ID NO: 24646 - DNA, 120 bp, synthetic construct
  source 1..120: mol_type = other DNA
tccacctcaaaaaaaaacaaaaaatgtttaatatgggcatggtggtgtgcacctcccagatactcaggaggctgaggtgggatgatctcttgagcccaggagtcccaggttgcagtgagt

SEQ ID NO: 24647 - DNA, 120 bp, synthetic construct; identical to SEQ ID NO: 7206
  source 1..120: mol_type = other DNA

SEQ ID NO: 24648 - DNA, 120 bp, synthetic construct
  source 1..120: mol_type = other DNA
ctaacaaaaaggcaggaaaatagtcctttaactccttgttttttggccacgttggagcatagggaggtccacatttatacacgccccactccacctatccatctacccgtccttccaaat

SEQ ID NO: 24649 - DNA, 120 bp, synthetic construct
  source 1..120: mol_type = other DNA
agataggtaagtgactactaaaaatataatgtaaaaggagctctgacaggaatgaggacattgatgccaggtgccctggcaagctgaagggtgagatgactgtacctcctcaaagagata

SEQ ID NO: 24650 - DNA, 120 bp, synthetic construct
  source 1..120: mol_type = other DNA
ggcctggatggactctttctgctgggcctgagttgaagtgggtggagctgacggctcctaaggaaagagaaggaggtgtgagctaaatagctcgctacgggtcttcctcagaaagtctcc

SEQ ID NO: 24651 - DNA, 120 bp, synthetic construct; identical to SEQ ID NO: 7207
  source 1..120: mol_type = other DNA

SEQ ID NO: 24652 - DNA, 120 bp, synthetic construct
  source 1..120: mol_type = other DNA
ctgaagccttccccacaacttgtcttggggaccaaggctgaagcagacgccgcttcacctcacctgtcctcgggtttccttgggcatgtggtagcgattggtggcctccagcttctcctg

SEQ ID NO: 24653 - DNA, 120 bp, synthetic construct
  source 1..120: mol_type = other DNA
cgcctccaggtcctcaagcttctctcgctcccgcttagccaggtactctcggcgagatttcttccgcagctcagggacctgagttgggaaaggacagtcgaatcctcatcttgctggagg

SEQ ID NO: 24654 - DNA, 120 bp, synthetic construct
  source 1..120: mol_type = other DNA
caaatctgggcctctttggatgctacatgctgaccccacatcgtatcttcctgcagcagaatccagctggaaagtcctcttaggcagcattatcatctttgttaatatagatgcactagg

SEQ ID NO: 24655 - DNA, 120 bp, synthetic construct; identical to SEQ ID NO: 7208
  source 1..120: mol_type = other DNA

SEQ ID NO: 24656 - DNA, 120 bp, synthetic construct
  source 1..120: mol_type = other DNA
ccatgctgtgtctcacttagtttctacacatttacctttgatacaaacttttcaggacacattatggatgacagcagaaaactggcaatatctataaggccctttcctgccaggagtcct

SEQ ID NO: 24657 - DNA, 120 bp, synthetic construct
  source 1..120: mol_type = other DNA
ggtgggtggatcacctaaggtcaggagttagagaccagcctggccaacatggtgaaatcccgtctctactgaaaatacaaaaattagctgggcatggtagtgggcacctgtaatcccagc

SEQ ID NO: 24658 - DNA, 120 bp, synthetic construct
  source 1..120: mol_type = other DNA
aaagcccctctgctgttctacccttaaggggcctggttctatttagttgtttggcttttcttgtttgttctgtaaagacttaaaatgcagtttatgatcatgacctaatctgggtaccac

SEQ ID NO: 24659 - DNA, 120 bp, synthetic construct
  source 1..120: mol_type = other DNA
aaaattcatgagtccaatttgacacacacaaacaaaaaacaagggaaaaaaatctgtcaccagtgaaatgactgttacagcaaacgccttactctaaaaattcgtatttaaaaggaaaca

SEQ ID NO: 24660 - DNA, 120 bp, synthetic construct; identical to SEQ ID NO: 7209
  source 1..120: mol_type = other DNA

SEQ ID NO: 24661 - DNA, 120 bp, synthetic construct
  source 1..120: mol_type = other DNA
actaaaaatacaaaaaattagccgggcgtggcagcaggcgcctgtagttctagctgctcaggaggctgaggcaggagaatggcatgaacccggaaggcagagcttgcagtgagccgagat

SEQ ID NO: 24662 - DNA, 120 bp, synthetic construct
  source 1..120: mol_type = other DNA
cttctaaaagcatttgatgaaaggctattggtagaaaggatattaatactaatatatagatacacaactggatagtatgtccccgtgatatgacataatatgaagtgcacatcaccgccc

SEQ ID NO: 24663 - DNA, 120 bp, synthetic construct
  source 1..120: mol_type = other DNA
gcagagaagtacttaacaccacaagataagaatcaggcaaatccagaatgtaggacactgcaaggtgagacagacagagagagaaacaaacttaacatctaagacccaaatgcaatgcat

SEQ ID NO: 24664 - DNA, 120 bp, synthetic construct
  source 1..120: mol_type = other DNA
gagatcttagtcgatacataagaattactgttcaacttcctgactgtgacaagagcattctgattttagaggacaatatctttatccttagcaggtacacactgatgtacttagagataa

SEQ ID NO: 24665 - DNA, 120 bp, synthetic construct; identical to SEQ ID NO: 7210
  source 1..120: mol_type = other DNA

SEQ ID NO: 24666 - DNA, 120 bp, synthetic construct
  source 1..120: mol_type = other DNA
gactggccaacatggtgaaaccctatctctactaaacatacaaaaatcagccaggcatgctagtgcatgtctgtagtcccagctgctcgggaggttgaggcaggagaatcacttgaaccc

SEQ ID NO: 24667 - DNA, 120 bp, synthetic construct; identical to SEQ ID NO: 1289
  source 1..120: mol_type = other DNA

SEQ ID NO: 24668 - DNA, 120 bp, synthetic construct
  source 1..120: mol_type = other DNA
aggagttcaagaccagcctgaccaacatggagaaaccccatctctactaaaaatacaaaattagccaggcgaggtggctcatgcctgtaatcccagctactctggaggctgaggcaggag

SEQ ID NO: 24669 - DNA, 120 bp, synthetic construct
  source 1..120: mol_type = other DNA
actctgtttcaaaaaaataaataaatgaattttaaaaagtaaaaacggccaggcgtagtggctcatgcctataatcccaacactttgggaggccaaggcgggcagatcacaaggtcaaga

SEQ ID NO: 24670 - DNA, 120 bp, synthetic construct; identical to SEQ ID NO: 7211
  source 1..120: mol_type = other DNA

SEQ ID NO: 24671 - DNA, 120 bp, synthetic construct
  source 1..120: mol_type = other DNA
tgaaaccccgtctctactaaaggtacaaaaaattagccaggcgtggtggtgtgcgcctgtaatcccagctactcaggaggcggaggttgcagtgagccgagatcgcatcattgcactcca

SEQ ID NO: 24672 - DNA, 120 bp, synthetic construct
  source 1..120: mol_type = other DNA
tgtgactttacttgacaagaccaggcctttggaaaacagcttaccctacctagtttcacaccataaaaagtccagtttatgaattacaagggctctgtccctgtccagtgagaagacaca

SEQ ID NO: 24673 - DNA, 120 bp, synthetic construct
  source 1..120: mol_type = other DNA
tgccctccagcaaccttcttgacaacattccagctgcctcatatctcattaggactcaggaatagggaaagctcacaatttcattcactaatagagtatatttgatcctaaagttaagag

SEQ ID NO: 24674 - DNA, 120 bp, synthetic construct; identical to SEQ ID NO: 7212
  source 1..120: mol_type = other DNA

SEQ ID NO: 24675 - DNA, 120 bp, synthetic construct
  source 1..120: mol_type = other DNA
tcttcataagcctagaagaaaaaacaagaatggaggggtgtgaggccaaagagcccccacactgacagctgctcccctctagaatcacaaggatcattcagatgcgccctaacacaaaaa

SEQ ID NO: 24676 - DNA, 120 bp, synthetic construct
  source 1..120: mol_type = other DNA
gtcttcccagagatcactatctctgcactcacagccaacctcagatttcaccctgggatcttggggatttacagaacatgctgctcctattcaccttcttgtctgaccgttccaggacat

SEQ ID NO: 24677 - DNA, 120 bp, synthetic construct
  source 1..120: mol_type = other DNA
tctgctgtttactccccctgcagcccatccaggggattaaataagggcatagagaacacttcagcctgccccatcctctctcaccctgcttctgacttaccctgttttcttcttcccttt

SEQ ID NO: 24678 - DNA, 120 bp, synthetic construct; identical to SEQ ID NO: 7213
  source 1..120: mol_type = other DNA

SEQ ID NO: 24679 - DNA, 120 bp, synthetic construct
  source 1..120: mol_type = other DNA
cggctcacttcaacctccgcctcccaggttcaagcaattctcctgcctcagcctcccaagtagctgagattacaggcacatgccaccacgcccgactatttttgtatttttagtagagat

SEQ ID NO: 24680 - DNA, 120 bp, synthetic construct
  source 1..120: mol_type = other DNA
gttttaaaccagctaaccagcattcattctctttcttcctcatggcttcaccccatcttcatcatcctgaatggggttttttatttttttttacagacagggtttcactctgtccctctt

SEQ ID NO: 24681 - DNA, 120 bp, synthetic construct
  source 1..120: mol_type = other DNA
tggtctcgaactcctgggctcaagtaatcctcctgcctcagcctcccggggtgctgggattacaggtgtgagccactgcacccggccccctctgttaattaaacgactgaaaggaagttc

SEQ ID NO: 24682 - DNA, 120 bp, synthetic construct; identical to SEQ ID NO: 7214
  source 1..120: mol_type = other DNA

SEQ ID NO: 24683 - DNA, 120 bp, synthetic construct
  source 1..120: mol_type = other DNA
tcgcaatctgcattttaacaagaaccttggatgcatgttaagagttcgagaaacaccgttctattgcgcttaacccgacacacctaagccctcctcaatcttctccactgagctgggcgt

SEQ ID NO: 24684 - DNA, 120 bp, synthetic construct
  source 1..120: mol_type = other DNA
tccccacccctgccgacaccttgttccagagtctcagggcgaagtcccgggccggcccactgagatccaaggtatcagtgtctcgtaggcgctgcacgaactcctcggcagaggtgcagc

SEQ ID NO: 24685 - DNA, 120 bp, synthetic construct
  source 1..120: mol_type = other DNA
cctgctcccggccctgaagcgtcgggcagccgcgctcactgctgggccggtcagaggcctggagccctcggctggagcctcagcttcgcaagtcagctaccttgggacctctaggatctt

SEQ ID NO: 24686 - DNA, 120 bp, synthetic construct; identical to SEQ ID NO: 7215
  source 1..120: mol_type = other DNA

SEQ ID NO: 24687 - DNA, 120 bp, synthetic construct
  source 1..120: mol_type = other DNA
ggtgggggagggacaggatacataataaagaaagtatggaaattttatagagccaaaaactatacaaagtaagggaggaatgaaattctatttcagattggaagatcgggtccatgctca

SEQ ID NO: 24688 - DNA, 120 bp, synthetic construct
  source 1..120: mol_type = other DNA
ggcgaaaccctgtctctactaaaaatataaaaattagcctggcgtggtggtgtgcgcctgtagtcccagccactcgggaggctgaggcaggagaatcatttgaacatgggaagcagagtt

SEQ ID NO: 24689 - DNA, 120 bp, synthetic construct
  source 1..120: mol_type = other DNA
aggtcaggtataagggaagacctctaggcaggaagaaactggggaactggggaaagttgttaaagacaaaatctccaaactaaggaacaggcaaactgtgttctgcatttttgcttaaca

SEQ ID NO: 24690 - DNA, 120 bp, synthetic construct
  source 1..120: mol_type = other DNA
ggggaactggggaaagttgttaaagacaaaatctccaaactaaggaacaggcaaactgtgttctgcatttttgcttaacagcttgagaaaatcactggtggctgcttatttaaaagtaag

SEQ ID NO: 24691 - DNA, 120 bp, synthetic construct; identical to SEQ ID NO: 7216
  source 1..120: mol_type = other DNA

SEQ ID NO: 24692 - DNA, 120 bp, synthetic construct
  source 1..120: mol_type = other DNA
ccagctagtttttgtatttttaatacagatggggttttaccatgttggtcaggctggtctcaaactcctgacctcatgatccgcccgtctcggcctcccaaagtgctgggattacaggcg

SEQ ID NO: 24693 - DNA, 120 bp, synthetic construct
  source 1..120: mol_type = other DNA
aaaacaaacaaaacaaaaagctgaatttgttactcgatgctctgctgtctgatttgtttgatcctgcatcatacttttgtgattaattgcagttaccaggcactactgttaggaaatgaa

SEQ ID NO: 24694 - DNA, 120 bp, synthetic construct
  source 1..120: mol_type = other DNA
ttggctcactgcagcctccacctcctgggttcaagcaattctcctgcctcagcctcctgagtaggcgggactacaggtgcgtgccaccacgtccagctaattttttgtattttagtagag

SEQ ID NO: 24695 - DNA, 120 bp, synthetic construct; identical to SEQ ID NO: 7217
  source 1..120: mol_type = other DNA

SEQ ID NO: 24696 - DNA, 120 bp, synthetic construct
  source 1..120: mol_type = other DNA
cttgctagtaaattgaaaacctttggcgtatgcttaagttcaatttgtctcatatattttgttttatagtaaaggtgtggggcctcctctgaccagtctgagaggagcaacttgtagtgg

SEQ ID NO: 24697 - DNA, 120 bp, synthetic construct
  source 1..120: mol_type = other DNA
aaatattgatgttccacatttgtataagatattctttgaaatgggaaaattccaaatatcaactacatgggcaccaaagccatgcactatcaagatggtttttaaacctttttttttttt

SEQ ID NO: 24698 - DNA, 120 bp, synthetic construct
  source 1..120: mol_type = other DNA
gttcatgccattctcctgcctcagcctcccgagtagctgggactacaggtgcccaccactatgccccgctaattttttgtatttttagtagagacggggtttcaccgtgttagccaggat

SEQ ID NO: 24699 - DNA, 120 bp, synthetic construct
  source 1..120: mol_type = other DNA
agaggggaaccttttccaggaaactgactcttgtacatacttacttcattttgcagcaatttcagatttagtattcgtagccccagctctttaagtaagtatccctggattagccacatg

SEQ ID NO: 24700 - DNA, 120 bp, synthetic construct; identical to SEQ ID NO: 7218
  source 1..120: mol_type = other DNA

SEQ ID NO: 24701 - DNA, 120 bp, synthetic construct
  source 1..120: mol_type = other DNA
ctggttcatcccccatcattttcctctcccccagccaccagagcctcccctcacataccctttttttttcccaaagaaggagaagcagacgagttgaagagaactccattttattatgga

SEQ ID NO: 24702 - DNA, 120 bp, synthetic construct
  source 1..120: mol_type = other DNA
taggagaaacagaattaaataactatcaaggggtacagagttaagagttccagccttccctcttggggaaaactaaggcaaagtaatactgagaaaaagtggaggaagccacaccttcag

SEQ ID NO: 24703 - DNA, 120 bp, synthetic construct
  source 1..120: mol_type = other DNA
gggactttggcaggtggggctgggagctgatggaatttgtaaaccaggctgtggtcaagggaggaggcaggagctgtaaacaaaggggcagtgacctaggaaatgaaggagatgtgccta

SEQ ID NO: 24704 - DNA, 120 bp, synthetic construct; identical to SEQ ID NO: 7219
  source 1..120: mol_type = other DNA

SEQ ID NO: 24705 - DNA, 120 bp, synthetic construct
  source 1..120: mol_type = other DNA
caggatcttcagttataagaaggagggaggtatatccctatgttggaagatggtcaccgccggcaggactcatctgtgggagagggggcaataatgttagagaatgagtgagagcctctg

SEQ ID NO: 24706 - DNA, 120 bp, synthetic construct
  source 1..120: mol_type = other DNA
ctcggactctgtgccaggcatccttataactgtttaatctcaccataactccaggagagattaagtaatatgatatccagctgtggctcttggtgcttcacaaaaaattacttaatcttg

SEQ ID NO: 24707 - DNA, 120 bp, synthetic construct
  source 1..120: mol_type = other DNA
aactagccaggtgtgatggtacacatctgtaatcccagctactagagaggctgaggcacaagaatcgcttgaatttgggaggcagaggttgcagtgagccaaggttgtgccactgcattc

SEQ ID NO: 24708 - DNA, 120 bp, synthetic construct; identical to SEQ ID NO: 7220
  source 1..120: mol_type = other DNA

SEQ ID NO: 24709 - DNA, 120 bp, synthetic construct
  source 1..120: mol_type = other DNA
gctgagattacaggcgtgagccaccgtgcctggcctgtttgtttcttttgagacaggtcttcctttgttgcccaggctggagtgcagtgggtggtgcaatattggttcactgcagcctcc

SEQ ID NO: 24710 - DNA, 120 bp, synthetic construct
  source 1..120: mol_type = other DNA
tcaaggctggagtgcagtggcacgacctcggctcactgcaagctccgcctcccaggttcacgccattctcctgcctcagcctcccaagtagttgggactacaggtgcccgccaccacgcc

SEQ ID NO: 24711 - DNA, 120 bp, synthetic construct
  source 1..120: mol_type = other DNA
gcgtgagccaccgtgcccggcccacacctggataatttttcaatttttttgtagagacaggattttgccatgttgcccagggtggtcttgaactcctgggctcaagcgatccacccgtct

SEQ ID NO: 24712 - DNA, 120 bp, synthetic construct; identical to SEQ ID NO: 7221
  source 1..120: mol_type = other DNA

SEQ ID NO: 24713 - DNA, 120 bp, synthetic construct
  source 1..120: mol_type = other DNA
tgacagcagggggcgccctcgggccggcggagcctccgcttacccacaatcagggccttggtgcgcagcccgccctggagctctggctgcagcagcagcagctcttcctcatcctcttcg

SEQ ID NO: 24714 - DNA, 120 bp, synthetic construct
  source 1..120: mol_type = other DNA
aaggagatcttaagctgaaggagggagaaaaagggggcaggaggcaaggtcagcaggggagaagcccgcgggggttgagggagagaaagcgggggcggggggggcggagtctgcaaggga

SEQ ID NO: 24715 - DNA, 120 bp, synthetic construct
  source 1..120: mol_type = other DNA
ctcttcgatcatatcatttcaaaacatcagactttgccctgtacgttggcaggggcttgggaggcagaagtgaataatataagaccaaggtccctgctatttcgagtgtgggaggcagag

SEQ ID NO: 24716 - DNA, 120 bp, synthetic construct; identical to SEQ ID NO: 7222
  source 1..120: mol_type = other DNA

SEQ ID NO: 24717 - DNA, 120 bp, synthetic construct
  source 1..120: mol_type = other DNA
aggctgggggagatgacaagggcagaaaggaaagtccacacaaacctggggtgggggtccacagtgtgcccaaagggacaggcacagagacaaaataccagacagggcacagaaaaccct

SEQ ID NO: 24718 - DNA, 120 bp, synthetic construct
  source 1..120: mol_type = other DNA
gccaaagggattagggagacagcaggaggattccatatgaactacttggaaaggtccaaatgatctactcaggccttccctggcatctgtttgggaagacttggggtcagccgtacatcc

SEQ ID NO: 24719 - DNA, 120 bp, synthetic construct
  source 1..120: mol_type = other DNA
cccagcactttgggaggttgaggcgggaggatttcttgagcccaggagttcgagaccagcctgggcaatagagtgacactgtctctaaaaaagaaaaaaaaagaaaaccagatatgacac

SEQ ID NO: 24720 - DNA, 120 bp, synthetic construct
  source 1..120: mol_type = other DNA
tggttcatgcctataatcccagaactttgggaggccgaggcgggcggatcacaaggtcaagagattgagaccatcctggccaacatggtgaaacctgtctctactaaaaatacaaaaaaa

SEQ ID NO: 24721 - DNA, 120 bp, synthetic construct; identical to SEQ ID NO: 7223
  source 1..120: mol_type = other DNA

SEQ ID NO: 24722 - DNA, 120 bp, synthetic construct
  source 1..120: mol_type = other DNA
aaatatccccatggctctgaccctcctgatcaccctattttgaagtctccatattcactccccctacctcctgaccctctaagttccactgttctatttttttttccataatcacttacc

SEQ ID NO: 24723 - DNA, 120 bp, synthetic construct
  source 1..120: mol_type = other DNA
ggtggatcacttgaggtcaggagttcgagaccagcctggctaacatggtgaaaccccgtctctactaaaaatactaaaattagccgggtatggtggcgtgcgcctgtaattccagctact

SEQ ID NO: 24724 - DNA, 120 bp, synthetic construct
  source 1..120: mol_type = other DNA
agaaaagaaaaaagaaaggagcttagaagttggtacaatgcaagaggttagggtttgttcagacctcacatgaggtgccatcagaggaccaatgctggggaaacgatctgcgggtggtcc

SEQ ID NO: 24725 - DNA, 120 bp, synthetic construct; identical to SEQ ID NO: 7224
  source 1..120: mol_type = other DNA

SEQ ID NO: 24726 - DNA, 120 bp, synthetic construct
  source 1..120: mol_type = other DNA
ccccccaccaacttctgactgggcttctcagaaatgcacagcctgcatgggagtgggggggtagagagggggtgactcactcgctcctctcccatcagctatataaggtcacaatggggc

SEQ ID NO: 24727 - DNA, 120 bp, synthetic construct
  source 1..120: mol_type = other DNA
gatttctctcctgatggcagggataaatttgatggaattagcctgcaaacgagttatttagggaaggtgaagcgggggttggtggcagggtcctcctatctcctattcctgagccagtgt

SEQ ID NO: 24728 - DNA, 120 bp, synthetic construct
  source 1..120: mol_type = other DNA
cacccaagcagcggctgcttccttattctctcaccacatcctgagcacagatctggcaggcccagggcccagggcccagggttccccactcagccccaccagccttccggcccccacccc

SEQ ID NO: 24729 - DNA, 120 bp, synthetic construct; identical to SEQ ID NO: 7225
  source 1..120: mol_type = other DNA

SEQ ID NO: 24730 - DNA, 120 bp, synthetic construct
  source 1..120: mol_type = other DNA
aaatgaacccccctccacccaaggcttaacccgtatctttagtccctgtggttccccactgacactgaggacacaaaaaaatcaaatctgaggatgttaacacatgggatgagaatgaga

SEQ ID NO: 24731 - DNA, 120 bp, synthetic construct
  source 1..120: mol_type = other DNA
tctccctagagattttcaagctggaaacagatggatgtgcacagggaagaagtgaggccagggccagggggagtcatcctggctgcccccactttcctgcaggtctttgttgcaagtcta

SEQ ID NO: 24732 - DNA, 120 bp, synthetic construct
  source 1..120: mol_type = other DNA
gggagggaaagtccaggatggcaggaaaagaggggaaaaccgatccctgagccagttcttgggagggaggggaaacccagggaggaaggacaggggagtgaggggcgggggtattttgga

SEQ ID NO: 24733 - DNA, 120 bp, synthetic construct; identical to SEQ ID NO: 7226
  source 1..120: mol_type = other DNA

SEQ ID NO: 24734 - DNA, 120 bp, synthetic construct
  source 1..120: mol_type = other DNA
ccctggtgaccctgccctcactgattcaagctcgtcactttaggctctcccactggatgggctggggcaggtcacactcaggaaaggaaggaaagaaaagggggttggaaactcagagcc

SEQ ID NO: 24735 - DNA, 120 bp, synthetic construct
  source 1..120: mol_type = other DNA
tgtatgtgcagagcgaggaagggtggtggcaggaattaacaagaaagaatagaggaagacaagaaaacaggggtataaaaaagaaagagaccagagtccagagaaaattgacaagtggac

SEQ ID NO: 24736 - DNA, 120 bp, synthetic construct
  source 1..120: mol_type = other DNA
gagacggaggtagccccccagaaccaagatctcctcggcagttgggtaccgcttcttcccagcccccgggactgcagcatcaactgtggctggagaggttggggtggctggggtcgcagg

SEQ ID NO: 24737 - DNA, 120 bp, synthetic construct; identical to SEQ ID NO: 7227
  source 1..120: mol_type = other DNA

SEQ ID NO: 24738 - DNA, 120 bp, synthetic construct
  source 1..120: mol_type = other DNA
tgactctggaggttctggtttctgagtttgagcctctatgtccctgggtgtccattctcgagccttcccggagttcagggtccatttccacccttctgttggcttcatgcccctctcgcc

SEQ ID NO: 24739 - DNA, 120 bp, synthetic construct
  source 1..120: mol_type = other DNA
ctcttcttttctcccacattcttccgagtagtcttgtctttcttctcctgacctcagcctccactctgttgcctccagttgtaccaaactctgttcctgagactctctggagtcaggtct

SEQ ID NO: 24740 - DNA, 120 bp, synthetic construct
  source 1..120: mol_type = other DNA
tggggctttgctctcgagactctgctagtctcagactccgctctggagtttctccaggactcagcctccatttccatgcctctgacagtcgggagctcctgtctcccacctctcctgggc

SEQ ID NO: 24741 - DNA, 120 bp, synthetic construct; identical to SEQ ID NO: 7228
  source 1..120: mol_type = other DNA

SEQ ID NO: 24742 - DNA, 120 bp, synthetic construct
  source 1..120: mol_type = other DNA
gggacagcccaagcttggcccggcggcgctccaggagccctcgtttccaggctggcatctgggacaggcgctcccgttctgctttctctcggcctcgaacggacgcctcctcctgccggc

SEQ ID NO: 24743 - DNA, 120 bp, synthetic construct
  source 1..120: mol_type = other DNA
ggggtgagactgagggtgggaggagaggaagtggagggggagaggtgggacacaaagcagggcagaggggctaaggatgaggacagagggaaagacggaaggcagagaactggggaaatg

SEQ ID NO: 24744 - DNA, 120 bp, synthetic construct
  source 1..120: mol_type = other DNA
gagggcaggagccagatgtggcagcacagggttaatgcgtattaaagaccgtctctaggatgtgagaaagagagagaagggcgaaaaggaaagttggcgtgagggagaagagagaaatgt

SEQ ID NO: 24745 - DNA, 120 bp, synthetic construct; identical to SEQ ID NO: 7229
  source 1..120: mol_type = other DNA

SEQ ID NO: 24746 - DNA, 120 bp, synthetic construct
  source 1..120: mol_type = other DNA
cccgggcgtcagggctgccagcgcgttcccagaaccctggcgtccacccccaccctgtcctgtcaccaccgcctgcctcccccaccgactgccccacgcgaccccagagtgccaagggcc

SEQ ID NO: 24747 - DNA, 120 bp, synthetic construct
  source 1..120: mol_type = other DNA
acaaagaggagacagccaaggtccgggccagggacgggagcaaggacaggggcgaggagacacccactccccaagtctgagcccctcagtcaactcacaggccgcgggacccccggggga

SEQ ID NO: 24748 - DNA, 120 bp, synthetic construct
  source 1..120: mol_type = other DNA
ggaggagggacggagacagagaccagggggccgggcgggggcggcgaccgctttgtctaaggacaatgaggagagggaagggggcgcagggcggagccgaggagagggcggggcctagat

SEQ ID NO: 24749 - DNA, 120 bp, synthetic construct; identical to SEQ ID NO: 7230
  source 1..120: mol_type = other DNA

SEQ ID NO: 24750 - DNA, 120 bp, synthetic construct
  source 1..120: mol_type = other DNA
gcgctcagaagccagaggttttggatgctccctcccctaccagagctgctgccccgactctttctagcttcaacctgtctcccttgggtctacaggtcggctgccgggaaaaaggggatt

SEQ ID NO: 24751 - DNA, 120 bp, synthetic construct
  source 1..120: mol_type = other DNA
ccaggctccctctggctttctttcccaaactcagccctgtagcttgggagacactgacagactgcatgccatatgtagaaaaaggctgacttttattttcctgcagagcatcttcctcgg

SEQ ID NO: 24752 - DNA, 120 bp, synthetic construct
  source 1..120: mol_type = other DNA
caaggttggggcctggagggacagctatgaccgttgaacttgcagaccctggtccaccttcttggagtggaagccagcggtgcagaaggggacccctgaggcgcagaggcaagtaacagt

SEQ ID NO: 24753 - DNA, 120 bp, synthetic construct; identical to SEQ ID NO: 7231
  source 1..120: mol_type = other DNA

SEQ ID NO: 24754 - DNA, 120 bp, synthetic construct
  source 1..120: mol_type = other DNA
ggtggagttttctttgtagctgggcccggaggtagcggaggtcttgctgatcaagcccgtgagccaggcccaggtagagggtaaggaggaaagcaaggaggagacggtccgtgcccaggg

SEQ ID NO: 24755 - DNA, 120 bp, synthetic construct
  source 1..120: mol_type = other DNA
agtatacctaagagagggagaagagcttagaaatggagtcaagcccttttctcatcttgggcacttctttcctcctcttccaggcaccacccttctagaactcaggcccaggaacccccc

SEQ ID NO: 24756 - DNA, 120 bp, synthetic construct
  source 1..120: mol_type = other DNA
gggagacagtagaagagcatgggaggagggaaacccttgaaagggaacgaggagttctaaaatgggtcagaggtcataggtagggatctcggagcctcacctgtttgaggcccatgagct

SEQ ID NO: 24757 - DNA, 120 bp, synthetic construct; identical to SEQ ID NO: 7232
  source 1..120: mol_type = other DNA

SEQ ID NO: 24758 - DNA, 120 bp, synthetic construct
  source 1..120: mol_type = other DNA
agaacttatagaatagatggggtgacctgatagctacgcaaagtagtagcctgtgccaaccacccagtgaaaagacagacaaggccttctcttcagacctagggaagtggttttgaagaa

SEQ ID NO: 24759 - DNA, 120 bp, synthetic construct
  source 1..120: mol_type = other DNA
aaggacaagtacacccttcttgataaaaagtaggatatgtgctgtggaggaatggaagctgagattagttcctcaattctcctcctgaacccatattttgcccctccaatccacggcacc

SEQ ID NO: 24760 - DNA, 120 bp, synthetic construct
  source 1..120: mol_type = other DNA
ccaaagtaccgggatgtccatgccttcactctttcagctgccatgaggctgtgctgcccaacaaatagaagcaggagccccagatcccatgccaggggggcaaggatgctgcggtcctgc

SEQ ID NO: 24761 - DNA, 120 bp, synthetic construct; identical to SEQ ID NO: 7233
  source 1..120: mol_type = other DNA

SEQ ID NO: 24762 - DNA, 120 bp, synthetic construct
  source 1..120: mol_type = other DNA
tctacaaaacactttacttagaatactccggtcaccgcccttttcggctccctcagtcctcactctcccgcctctccaaaactctaatccttgagttcctaatttagaactcaggtctcc

SEQ ID NO: 24763 - DNA, 120 bp, synthetic construct
  source 1..120: mol_type = other DNA
gttcatcctcgatccctcccgctcacccggaccaccagactccgggatccctccaagaagtggccgaagggaggtaaagcgcacgaactccactccggtgccaaaggccaggatgaaaga

SEQ ID NO: 24764 - DNA, 120 bp, synthetic construct
  source 1..120: mol_type = other DNA
tgaatccagcccaggagggcggggctcctgcacgccaccgccaggcttccggcccgcctggcgcagccttccccatccagctgtggatccgtcctgggatgcgtgtcccggcctgctgtc

SEQ ID NO: 24765 - DNA, 120 bp, synthetic construct; identical to SEQ ID NO: 7234
  source 1..120: mol_type = other DNA

SEQ ID NO: 24766 - DNA, 120 bp, synthetic construct
  source 1..120: mol_type = other DNA
gatcatgcagctaaggaccttgtcacagtagacgtacacatagtagggaccttagatatcattagactaattccatcaacttatagatagaagaaacaggtccagagagataattgcctg

SEQ ID NO: 24767 - DNA, 120 bp, synthetic construct
  source 1..120: mol_type = other DNA
tgctgttgtatgctgtaccagacatcttatgttttcccttgaattcagtctccaccctgctttctgcttcagtaagttgtcccaaatggacggtatcaatgaaagtcacagtttttattg

SEQ ID NO: 24768 - DNA, 120 bp, synthetic construct
  source 1..120: mol_type = other DNA
aaatacaaaaaaaattagccgggcgcggtggcgggcgcttgtagtcacagctgctcaggaggctgaggcagaagaatggcgtgaacccgggaggcagagcttgcagtgagccgagatcgc

SEQ ID NO: 24769 - DNA, 120 bp, synthetic construct; identical to SEQ ID NO: 7235
  source 1..120: mol_type = other DNA

SEQ ID NO: 24770 - DNA, 120 bp, synthetic construct
  source 1..120: mol_type = other DNA
gtggctcacgcctgtaatcccagcaattcgggaggctgaggtgggtggatcactttagaccagaagctggagaccagaatggccaacgtggtgaaaccccatttctactaaaaaatttta

SEQ ID NO: 24771 - DNA, 120 bp, synthetic construct
  source 1..120: mol_type = other DNA
atacaaggaagtgtaagaaaagatccctaatctctagatgtttaacctgaggcatttaaatagtaccactcatgaagagggagtgtagctgagtgctacatggtgctctacagacagcag

SEQ ID NO: 24772 - DNA, 120 bp, synthetic construct
  source 1..120: mol_type = other DNA
ggatcatctgaggtcaggagtttgagaccagcctggccaacatggtgaaacctcgtctccacttaaaagacaaaaattagccaggtgtggtggcaggagcctgtaatcccagcttctcgg

SEQ ID NO: 24773 - DNA, 120 bp, synthetic construct; identical to SEQ ID NO: 7236
  source 1..120: mol_type = other DNA

SEQ ID NO: 24774 - DNA, 120 bp, synthetic construct
  source 1..120: mol_type = other DNA
ccactgcactccagcctgggcaacagaacaagactccatctcaacaacaacaacaaaaaaaaaaggagccgggtgcagtggctcacgcctgtaatcccagcactttgcgaggccaaggtg

SEQ ID NO: 24775 - DNA, 120 bp, synthetic construct
  source 1..120: mol_type = other DNA
agaaagctgaggcaggagaatcacttgaacccgagaggcggaggctgcagtgagccgagatcacgccattgaacccagcctgggcaacaagagtgaaactctgtctcaaaaaaaaaaaaa

SEQ ID NO: 24776 - DNA, 120 bp, synthetic construct
  source 1..120: mol_type = other DNA
ctaatatttatctgggtcatactgtctgccacccccacaatggctgtgcttaatgtatattatgagattagatatgtttaatagccagcaaaatgcttggcaaatctcatgctatttcta

SEQ ID NO: 24777 - DNA, 120 bp, synthetic construct; identical to SEQ ID NO: 7237
  source 1..120: mol_type = other DNA

SEQ ID NO: 24778 - DNA, 120 bp, synthetic construct
  source 1..120: mol_type = other DNA
cttgcctaaccactttattgtatttatttatttatttatttttgagacagagtttcgctcttattgcccaggctggagtgcaatggcgcgatcttggctcactgcaacctccgcctcttg

SEQ ID NO: 24779 - DNA, 120 bp, synthetic construct
  source 1..120: mol_type = other DNA
agtctcaatcaaactcctgacctcaggtgatccacccaccttggcctcccacagtgctgggattacaggcgtgagccaccacacccggcctagcctaaccactttaaagagaataatata

SEQ ID NO: 24780 - DNA, 120 bp, synthetic construct
  source 1..120: mol_type = other DNA
tgatctccgctcactgcaacctctgccacccaggttcaagcaattctcctgctcagcctcccaagtagctgggattacaggcatgtgccaccacgcctggctaattttgtatttttagta

SEQ ID NO: 24781 - DNA, 120 bp, synthetic construct; identical to SEQ ID NO: 7238
  source 1..120: mol_type = other DNA

SEQ ID NO: 24782 - DNA, 120 bp, synthetic construct
  source 1..120: mol_type = other DNA
tcatccttttctatggttgaataatatttgattatatggatatatcacaattgtttatccactcatttgctgatgaatatttgtgttgtttccacctttttggctattgtaaaaagtgct

SEQ ID NO: 24783 - DNA, 120 bp, synthetic construct
  source 1..120: mol_type = other DNA
tggctcattgcagccttgacctcctcccacctcagcattccaagtagctgggattacaggcatgtgccaccacacctggctaaattttttttttttttttgagagagagtctttctctgt

SEQ ID NO: 24784 - DNA, 120 bp, synthetic construct
  source 1..120: mol_type = other DNA
cccagctaatttttttattattattattattattttttgagacagagtctccctctatagccaggctcgagtgcagtggcatgatcttggctcactgcaaactctgactctctggttcaa

SEQ ID NO: 24785 - DNA, 120 bp, synthetic construct; identical to SEQ ID NO: 7239
  source 1..120: mol_type = other DNA

SEQ ID NO: 24786 - DNA, 120 bp, synthetic construct
  source 1..120: mol_type = other DNA
ttagtagagacgggtttctccatgttggtcaggctggtatcgaactcctgacctcaggtgatccaaccaccttcggcctcccaaaatgctgggattacaggcatgagccaccacacccgg

SEQ ID NO: 24787 - DNA, 120 bp, synthetic construct
  source 1..120: mol_type = other DNA
agccaccgcacctagcccatttttgtattttttgtagtgacagggttttgccatgttgcccagactggttgcccgtgaagtcctgggctcatgcaatcctcccactttggcctcccaaac

SEQ ID NO: 24788 - DNA, 120 bp, synthetic construct
  source 1..120: mol_type = other DNA
ttttttcctccaatttgagagcaggtactgcttaagtgcttagattagaaaaacaatcacagtagacaccttagctcattcttctaataagtctgttgatccggttctccctgttgccag

SEQ ID NO: 24789 - DNA, 120 bp, synthetic construct; identical to SEQ ID NO: 7240
  source 1..120: mol_type = other DNA

SEQ ID NO: 24790 - DNA, 120 bp, synthetic construct
  source 1..120: mol_type = other DNA
cgaagaagctgcaacacctttcggacctttgggttcacaccactgatacctctgatcctgatgacaaacggcaatttgggttttgcaggtacatagaagttgccagcttttctggccatc

SEQ ID NO: 24791 - DNA, 120 bp, synthetic construct
  source 1..120: mol_type = other DNA
gggcctttgatcttcagctctgggaaattccttcgctttttaagggtttctggcatagcaagaacctccttctttttctctctctttttttttttaagacggggtcttgctctgtctccc

SEQ ID NO: 24792 - DNA, 120 bp, synthetic construct
  source 1..120: mol_type = other DNA
ctaattttgttttgaatttttagtagagacggggttttgtcatgttggccagcctggtcttgaactcctgacctcaggtgacctgcccacctcggcctcccaaagtgttgggattacagg

SEQ ID NO: 24793 - DNA, 120 bp, synthetic construct
  source 1..120: mol_type = other DNA
tcgccaggctggagtacagtggagcagtcttggctcactgcaacctccacctcccgggttcaagcgattctcctgcctcagcctcccgagtagctaggactacaggcgcctgccaccacg

SEQ ID NO: 24794 - DNA, 120 bp, synthetic construct; identical to SEQ ID NO: 7241
  source 1..120: mol_type = other DNA

SEQ ID NO: 24795 - DNA, 120 bp, synthetic construct
  source 1..120: mol_type = other DNA
tgacctcaggtgatccacctgtcttgacttcccaaagtgctgggattacaggcatgagctgccgtgactggccttttatttttttgagacaaggtctcactctgttgcccaggctgaagt

SEQ ID NO: 24796 - DNA, 120 bp, synthetic construct
  source 1..120: mol_type = other DNA
ttttggtagagacgaggttttgtcatgttgcccggctggccgtgaacttctgagctcaagtgatctgccagccttggcctccaaagtgctgggattacatgtgtgagccactgtgcccat

SEQ ID NO: 24797 - DNA, 120 bp, synthetic construct
  source 1..120: mol_type = other DNA
ttttaaaatttaaatctggctgggcacggtggctcaagcctgtaatcccagcacttttggaggctgaggtgggtggctcacttgaggtcacgagttagagaccagcttgggcaacatgac

SEQ ID NO: 24798 - DNA, 120 bp, synthetic construct; identical to SEQ ID NO: 7242
  source 1..120: mol_type = other DNA

SEQ ID NO: 24799 - DNA, 120 bp, synthetic construct
  source 1..120: mol_type = other DNA
ctcgggaggctgaggtgggtggatcacttgaggtcagaagttagagaccagcctgggcaacatgacaaaacctcatctctaccaaaaatacaaaaatttagtagagccccgtctctacta

SEQ ID NO: 24800 - DNA, 120 bp, synthetic construct
  source 1..120: mol_type = other DNA
tggtgccactgcactccagcctaggtgacagagatgagaccctgtctcaagaaaaaaaaaaaaatcttaagaaatgtcatacaaattgtcctaaatagaagataatgatgaattaaatac

SEQ ID NO: 24801 - DNA, 120 bp, synthetic construct
  source 1..120: mol_type = other DNA
taattttataaatcctggaaaagctggccagaaaagtacagagacttgcccaaagtcaaagctaaagatgcttccagaggccaggagagaagaaaatgttttagtagcactccataactg

SEQ ID NO: 24802 - DNA, 120 bp, synthetic construct; identical to SEQ ID NO: 7243
  source 1..120: mol_type = other DNA

SEQ ID NO: 24803 - DNA, 120 bp, synthetic construct
  source 1..120: mol_type = other DNA
gatttctggtcccacccatgttccaggacaagttgtatcaatataccccaatcctttctaacgccctgagttctttcttccacatatcttctaattcgtggtctgggagggaaaagggta

SEQ ID NO: 24804 - DNA, 120 bp, synthetic construct
  source 1..120: mol_type = other DNA
tagtggaatggagcaatgagggaagtcctgagggcatgtgatcacaactctctgaggctggggaagacagagcaaaggcaaaatcaggtgaaaaagaatcctagaaatgggttcaggacc

SEQ ID NO: 24805 - DNA, 120 bp, synthetic construct
  source 1..120: mol_type = other DNA
tacacagcactttgggaggctgaggcgggtggatcacgaggtcaggagatcaagaccacggtgaaaccctgtctctactaaaaatacaaaaaaaaaaaaaaaaaaaaattagccgggcgc

SEQ ID NO: 24806 - DNA, 120 bp, synthetic construct; identical to SEQ ID NO: 7244
  source 1..120: mol_type = other DNA

SEQ ID NO: 24807 - DNA, 120 bp, synthetic construct
  source 1..120: mol_type = other DNA
catggtgaaaccccgtctttagtaaaaataaaaaaattagctgggcgtggtggtgtgcgcctgtagtcccagctactcgggaggttgaggcaggagaacagcttgaacccgggagatgga

SEQ ID NO: 24808 - DNA, 120 bp, synthetic construct
  source 1..120: mol_type = other DNA
ttatctgcaatttccaggaaatatggagtacagaggaacaagataaattatatgacaaggaggcaaacccaaaattccagactgaggaacattctaaaggacaagtgacccagcttctgc

SEQ ID NO: 24809 - DNA, 120 bp, synthetic construct
  source 1..120: mol_type = other DNA
gcagtatgtggaccttatttgaatcctgatttgaacaactgtatagagacatttttcagacaatgggagaaattttattaatggagtgtgagcaaatgaccaataaactactgttaattt

SEQ ID NO: 24810 - DNA, 120 bp, synthetic construct; identical to SEQ ID NO: 7245
  source 1..120: mol_type = other DNA

SEQ ID NO: 24811 - DNA, 120 bp, synthetic construct
  source 1..120: mol_type = other DNA
acctgtagtcccagctactcgggaggctgaggcaggagaatggtgtgaacccaggaggcggagattgtagtgagccgagattgtgccactgcactccagcctgagagtgagactccatct

SEQ ID NO: 24812 - DNA, 120 bp, synthetic construct
  source 1..120: mol_type = other DNA
agcagatctgtcccctcattcctatccctttctataccataggtcttttcccccaccctctcactactttatattcctttctgaacctccatttttttccctccaatctttgccattcca

SEQ ID NO: 24813 - DNA, 120 bp, synthetic construct
  source 1..120: mol_type = other DNA
ctgaggtggtggtggctggactccaggggtcacatagatctcatagccctaagagaaagaaatgatggagatggtattgtagattgggaagcactggagggagggctgaagcacaggtta

SEQ ID NO: 24814 - DNA, 120 bp, synthetic construct; identical to SEQ ID NO: 7246
  source 1..120: mol_type = other DNA

SEQ ID NO: 24815 - DNA, 120 bp, synthetic construct
  source 1..120: mol_type = other DNA
cctctcacctgatgcagccagtccagggacagaatggggattccccgccccagggcacacaggaacttgactgtccggcggatgcgatcagtgaccaggtgggaagcctctgccgctgaa

SEQ ID NO: 24816 - DNA, 120 bp, synthetic construct
  source 1..120: mol_type = other DNA
cccatctctacaatcctctaggtctccttgcatcctcccctcatctctgtctcccacaaagtcccatgcctttgtctcttactttgggggctgttgattcttggttaagtttggtccgtc

SEQ ID NO: 24817 - DNA, 120 bp, synthetic construct
  source 1..120: mol_type = other DNA
tcctgagattgagaaaaatcttggtgggagtttcagagccctgaagtcatttttcccagctttgtggtcccaaccctctcctcacctcttccttccctggcttctctgcagtatcttctt

SEQ ID NO: 24818 - DNA, 120 bp, synthetic construct; identical to SEQ ID NO: 7247
  source 1..120: mol_type = other DNA

SEQ ID NO: 24819 - DNA, 120 bp, synthetic construct
  source 1..120: mol_type = other DNA
tcttgatgcaactgggttgagtaataggctcaggggaaataggctggtctgtggtgacaggagattggaattcaggggtggtaggaaccggcatagctcttactgtggaagacctcagtg

SEQ ID NO: 24820 - DNA, 120 bp, synthetic construct
  source 1..120: mol_type = other DNA
gctggttcaactggtttgggagtcttgacagaggacctatttgtctttctcctagtggccctagatgtgagcttgggggtgacaggctggtctgtggaggtggtaggatggggctcaggg

SEQ ID NO: 24821 - DNA, 120 bp, synthetic construct
  source 1..120: mol_type = other DNA
ggtgacaagctggtttctggaggtggaaggctgaagctcaggggctatagggacaattgattcaggggtcttgacagaggacctatttgtcctgcccctagtggcccgagatgtgggctc

SEQ ID NO: 24822 - DNA, 120 bp, synthetic construct; identical to SEQ ID NO: 7248
  source 1..120: mol_type = other DNA

SEQ ID NO: 24823 - DNA, 120 bp, synthetic construct
  source 1..120: mol_type = other DNA
tgtgggctcaggagtgacaggttggtctgtggaagtggaaggctcgagcttaggggctgtggggacaagtgtttcaggggtcttgccagaggatctattttttcttcccctagtagcccg

SEQ ID NO: 24824 - DNA, 120 bp, synthetic construct
  source 1..120: mol_type = other DNA
ccgagatgtgggcttaggggtgacaggttggtctgtggaggtggaaatctggagctcaggggctgtggggacaactgtttcaggggtcttgacagaggacatatttgtcctgctcctagt

SEQ ID NO: 24825 - DNA, 120 bp, synthetic construct
  source 1..120: mol_type = other DNA
agtagcctgatatgtgggctcagaagtgacaggctggtctgtggaggtggaaggctggagctcaggggctgtggggacaactggttcaggggtcttgacagaggatctattttttcttcc

SEQ ID NO: 24826 - DNA, 120 bp, synthetic construct; identical to SEQ ID NO: 7249
  source 1..120: mol_type = other DNA

SEQ ID NO: 24827 - DNA, 120 bp, synthetic construct
  source 1..120: mol_type = other DNA
agttctaattttaggctttgggtggaaaggctccagctctgaggacaagggagcctctggagcttcctgactcccatcttgcctggtcttacgaacggttggcttgatagaaggtaaaag

SEQ ID NO: 24828 - DNA, 120 bp, synthetic construct
  source 1..120: mol_type = other DNA
gccctagggagaaacagaagcaagtgagggggaggaggtggagaaaagagatagaacttggatactgttcttgatacttgtttatggttagataggcttaccagatttccaccgggcgtg

SEQ ID NO: 24829 - DNA, 120 bp, synthetic construct
  source 1..120: mol_type = other DNA
aaaaggccaggcatggtggctgatgcctgtaatcccagcactttgggaggccgaggcgggtggatcacaaggtcaggaaaccgagaccatcctggctaacacggtgaaaccccgtctcta

SEQ ID NO: 24830 - DNA, 120 bp, synthetic construct; identical to SEQ ID NO: 7250
  source 1..120: mol_type = other DNA

SEQ ID NO: 24831 - DNA, 120 bp, synthetic construct
  source 1..120: mol_type = other DNA
aaaaattagccgggtgacatgcgcctgtagtcccagctacttgggaggctgcggcaggaaaattgtttgaacccaagagacggaggttacagtaagctgagatcacgccactgcacactc

SEQ ID NO: 24832 - DNA, 120 bp, synthetic construct
  source 1..120: mol_type = other DNA
ctacctttttcccacagacctgtctccataatgctactatagtgttctccacacgtggatgatggtaaggaaaaggatggctggggcaaagaaagaagaaacacgaagggtctttctttt

SEQ ID NO: 24833 - DNA, 120 bp, synthetic construct
  source 1..120: mol_type = other DNA
aatagattaaagtgaggctaggtgaaagagcattggagaagatatagagatgacttgtggaataggaggtagaaaaagtagctctcaccctggaaaccttctcagcagctctgatcctgg

SEQ ID NO: 24834 - DNA, 120 bp, synthetic construct; identical to SEQ ID NO: 7251
  source 1..120: mol_type = other DNA

SEQ ID NO: 24835 - DNA, 120 bp, synthetic construct
  source 1..120: mol_type = other DNA
cttctaactcggctggatcgcactctctgtttgctactggtctctctacttctctctcaaatgctttgcttggaagggtctgcttctgtacttgtttctcttgtatttcctcagatgtct

SEQ ID NO: 24836 - DNA, 120 bp, synthetic construct
  source 1..120: mol_type = other DNA
tctctagctaacaactgtttttgttctctgtcctgtttccccttggttaattcttcctctcctgtcacatctgtctgtctttctggtagcagtttctcagtttctctctccaatggccct

SEQ ID NO: 24837 - DNA, 120 bp, synthetic construct
  source 1..120: mol_type = other DNA
tctcctggtattgccctaggtggagacaggcaaggtccataggcctcaaggtgcgtgtcaaaaggctgggtctcagagtcctcagactctctcagacagaatggctgtgtagccaggacc

SEQ ID NO: 24838 - DNA, 120 bp, synthetic construct; identical to SEQ ID NO: 7252
  source 1..120: mol_type = other DNA

SEQ ID NO: 24839 - DNA, 120 bp, synthetic construct
  source 1..120: mol_type = other DNA
atacaaaaaaattaggtgtggggacggggacctgtagtcctgtagtctcagctacccgggaggctgaggtaggagaactacttgaaccccaaaggtcaagactgtagtgagctgtgatca

SEQ ID NO: 24840 - DNA, 120 bp, synthetic construct
  source 1..120: mol_type = other DNA
ataccactgcattccagcctgagtgacagagaccctgtctcaaaaaaagaaagaaagaaagaaagaaagaaaaacatcatagcctaataagagagttccctgaatagtctctctctctca

SEQ ID NO: 24841 - DNA, 120 bp, synthetic construct
  source 1..120: mol_type = other DNA
ggcatgtgccaaagtgcccggctaattttttgtatttgttgtagagatggggtttggtcttgaactcttagactcaagtgatccacccacattggtctcccaaagtgctgggattacagg

SEQ ID NO: 24842 - DNA, 120 bp, synthetic construct; identical to SEQ ID NO: 7253
  source 1..120: mol_type = other DNA

SEQ ID NO: 24843 - DNA, 120 bp, synthetic construct
  source 1..120: mol_type = other DNA
aatctgactggatttttgtattcattaaccaacctctttatgcattctgtccctctacccttcctagcctttggtaaccaccattctactctctacttccatgagatccatgtttttagc

SEQ ID NO: 24844 - DNA, 120 bp, synthetic construct
  source 1..120: mol_type = other DNA
tgttgctgcagatgacaggatttcattctcttctgttgctgaatactgttccactgtgtatatatacacattttcttttttttttagattgagtcttgctctgtcacccagtttggagtg

SEQ ID NO: 24845 - DNA, 120 bp, synthetic construct; identical to SEQ ID NO: 7254
  source 1..120: mol_type = other DNA

SEQ ID NO: 24846 - DNA, 120 bp, synthetic construct
  source 1..120: mol_type = other DNA
tttttgtatttttagtagagacagggtttcaccatgttggccaggctggtctcaaactcctgacctcatgtgatccacccacttcggcttcccaaagtgctgggattacaggcatgaggc

SEQ ID NO: 24847 - DNA, 120 bp, synthetic construct
  source 1..120: mol_type = other DNA
caagggattctcctgactcagtctcctgagtagctgggattacaggcatgcaccaccacacccggctaattttgtatttttagtagagacggggtttctccatgttggtcaggctggtct

SEQ ID NO: 24848 - DNA, 120 bp, synthetic construct; identical to SEQ ID NO: 7255
  source 1..120: mol_type = other DNA

SEQ ID NO: 24849 - DNA, 120 bp, synthetic construct
  source 1..120: mol_type = other DNA
aaatattttcaacctgcagctggttgaattcacggacgcaaactcgcatacacagagggctcactgtaatcagagtatgaaagaaacatgtaggaaggcaaatcaagaaagaacgcaggc

SEQ ID NO: 24850 - DNA, 120 bp, synthetic construct
  source 1..120: mol_type = other DNA
catacaaaaaattagccaggcatggtcatggacagctgtaatcccagctacctgggaagctgaaggaagagaaaccgcctgggaggcggaggttacagtgagccgagactgcaccactgt

SEQ ID NO: 24851 - DNA, 120 bp, synthetic construct
  source 1..120: mol_type = other DNA
ggagtcaacatgaaggcctgggtaggttcatcctccatgctctggactgctgtacaggaaaagatggcctaagttcatctcctccatactactgtagggttccattcctggtctcctacc

SEQ ID NO: 24852 - DNA, 120 bp, synthetic construct; identical to SEQ ID NO: 7256
  source 1..120: mol_type = other DNA

SEQ ID NO: 24853 - DNA, 120 bp, synthetic construct
  source 1..120: mol_type = other DNA
gggacctgggctccctctctctgtggctgggtggattcccctagagtgtctgtgtccaccaccagatctgtgaggttctctcttgagatagggaggtcctgctccacttgtgccacaggt

SEQ ID NO: 24854 - DNA, 120 bp, synthetic construct
  source 1..120: mol_type = other DNA
gctgttagggaggtgccctcctctgcatctgtttcacagtccccatgcagaggccaggcttcctctagagataccacaagcagctttgctggtcccccaactgctttcacatctgtttga

SEQ ID NO: 24855 - DNA, 120 bp, synthetic construct
  source 1..120: mol_type = other DNA
tggatcccaggtgagctcttatctgcttccacactgtcatcactgtccccaaaaggaggttggtccttttctgaatgtgctctaacaagggctctaatctttgtgtgatccttgaggaca

SEQ ID NO: 24856 - DNA, 120 bp, synthetic construct; identical to SEQ ID NO: 7257
  source 1..120: mol_type = other DNA

SEQ ID NO: 24857 - DNA, 120 bp, synthetic construct
  source 1..120: mol_type = other DNA
tccaggaccccttgtacctactccatggaagatcttcctcttcttcataggaatgacaactggggttgctgggatcctctcttcttccgcatcagtgtcgctgtcgatgaagccaaaagg

SEQ ID NO: 24858 - DNA, 120 bp, synthetic construct
  source 1..120: mol_type = other DNA
caccccattccctgcacccctcttgacttttgtatcattgtccctctccttcactaaaggctgatccttttcaagctggatttcagttacaacttcagcttcagactgctttgcctctac

SEQ ID NO: 24859 - DNA, 120 bp, synthetic construct
  source 1..120: mol_type = other DNA
ggaatgcccctcttcatcactgtgaagggaagaaaagagagtctatagaatttatttccctggaagggataccccaactcaactgtgagctccttgaggggagacacaaggtagcatatt

SEQ ID NO: 24860 - DNA, 120 bp, synthetic construct
  source 1..120: mol_type = other DNA
gatgtgctccataaaaattcagctgagtgaatgaatatgtatggttccccagccccaactctcatgataatcatctcttttagagattgatcctccagcccctggttcttcctcattttg

SEQ ID NO: 24861 - DNA, 120 bp, synthetic construct; identical to SEQ ID NO: 7258
  source 1..120: mol_type = other DNA

SEQ ID NO: 24862 - DNA, 120 bp, synthetic construct
  source 1..120: mol_type = other DNA
agacggtgactcaccccagggctcaaaaccttaggaggtctcaggatttgagtaccattaaggctcccacagtctcggaggataggtgccttgtcccaggctaagatttcaatctctgca

SEQ ID NO: 24863 - DNA, 120 bp, synthetic construct
  source 1..120: mol_type = other DNA
tcagagtcctggcctgtcattaggaaaaagtgcctattaggtactctactactcactcaaggcctccatatgcattagaaaaataaaaggccctaggacatctaggcactgaaagagtat

SEQ ID NO: 24864 - DNA, 120 bp, synthetic construct
  source 1..120: mol_type = other DNA
ctgttgtgcaatcatcactaccatccatctccagagcacacaattggattttatttgattttttttttttttttgagacagggtctcattctgtcacccaggctagaatgcagtgtcatg

SEQ ID NO: 24865 - DNA, 120 bp, synthetic construct; identical to SEQ ID NO: 7259
  source 1..120: mol_type = other DNA

SEQ ID NO: 24866 - DNA, 120 bp, synthetic construct
  source 1..120: mol_type = other DNA
tcacatctcattgaaacatacataagcttcttgcaaccctccaaataccttaccacaaaaataaaagatctatatcaatacttgaacatccaataccctctgacctttttctggtccatg

SEQ ID NO: 24867 - DNA, 120 bp, synthetic construct
  source 1..120: mol_type = other DNA
cttcttcaacatcccagtcaatagcctgggtgtcctccatgatctgggaaggatacacattatcaattatcctcattattggttcacacaaacagcatcagagttatcagactgaaaact

SEQ ID NO: 24868 - DNA, 120 bp, synthetic construct
  source 1..120: mol_type = other DNA
ccccaggctggcatgcagtggtaagatcttgggcccacggcaacctctgcctcccgggtttcaagcaattctctcacctcagcctcccaagtagctgagattacaggcacctgccaccat

SEQ ID NO: 24869 - DNA, 120 bp, synthetic construct; identical to SEQ ID NO: 7260
  source 1..120: mol_type = other DNA

SEQ ID NO: 24870 - DNA, 120 bp, synthetic construct
  source 1..120: mol_type = other DNA
gaaactgcaacatagctgggttaagattttcagatctccttgaaacatacataagcatatataaggttaagacttgccccaaatcactcagatgtctctcctctaaaatcttgatggttt

SEQ ID NO: 24871 - DNA, 120 bp, synthetic construct
  source 1..120: mol_type = other DNA
agtcttcgaacacactgttcttgtcttcccacatcttcatgccttagcccaattccttggctttttcccacctagttttctggtccaacttctaccatcctttaagattcagttcaaatg

SEQ ID NO: 24872 - DNA, 120 bp, synthetic construct
  source 1..120: mol_type = other DNA
gcctcagcctcccgagcagctgggattacaggcgcccggcatcacgcctggctaatttttgtatttttagtagagacggggtttcaccacggtctcgagctcctgacctcaggtgatccg

SEQ ID NO: 24873 - DNA, 120 bp, synthetic construct; identical to SEQ ID NO: 7261
  source 1..120: mol_type = other DNA

SEQ ID NO: 24874 - DNA, 120 bp, synthetic construct
  source 1..120: mol_type = other DNA
tcatcaccgagcctactgatgaaggaacaaatgagatggaaagaaaatagcataaatggaattcacctgaaaatatgccactctagagggaaactgttgacaggtagggaaagtaggatg

SEQ ID NO: 24875 - DNA, 120 bp, synthetic construct
  source 1..120: mol_type = other DNA
ggcccgacgtctccctgtgtcttcatacctaaactcggagcggggcgccaggtaaggatgagtattacagtccgagaagcgaacttccaagtcacctccgcccagtcgcacccaaggtac

SEQ ID NO: 24876 - DNA, 120 bp, synthetic construct
  source 1..120: mol_type = other DNA
gcgactgcgtgtgccgaaaaagagcttatttgctgattggcttctgccgctgtctttcacaaccgcagccagtcgagcggaggcacacccaaagccccgcccccttagagttcaaatagg

SEQ ID NO: 24877 - DNA, 120 bp, synthetic construct; identical to SEQ ID NO: 7262
  source 1..120: mol_type = other DNA

SEQ ID NO: 24878 - DNA, 120 bp, synthetic construct
  source 1..120: mol_type = other DNA
gctgcagtttggagaacagcccgtaggcgtggcagttcactcctgttgcattggaatttcatttccttttgatttggtttgtagtagaagtaatatctttcttcctgggaatacgtctct

SEQ ID NO: 24879 - DNA, 120 bp, synthetic construct
  source 1..120: mol_type = other DNA
aaagatctgtagtcgaacagagaaaactggtttgctctctgtcttaaaggctgtccccacctttcgaggggcgagggaaggatcataaaatcatttatttttattttttaattaactaat

SEQ ID NO: 24880 - DNA, 120 bp, synthetic construct
  source 1..120: mol_type = other DNA
caagtagctgggattacaggcatgcgccaccacgcccagcttatttttgtatttttagtagagacgtggtttctccatgttggtcaggctggtctcgaacttctgacctcaggtgatccg

SEQ ID NO: 24881 - DNA, 120 bp, synthetic construct
  source 1..120: mol_type = other DNA
gatctcgactcaccgcaacctccgccttctgggttcaagcaattctcctgtctcagcctcccgagtagctgggattacaggcatgcgctaccacgcccggctaattttgtatttttagta

SEQ ID NO: 24882 - DNA, 120 bp, synthetic construct; identical to SEQ ID NO: 7263
  source 1..120: mol_type = other DNA

SEQ ID NO: 24883 - DNA, 120 bp, synthetic construct; identical to SEQ ID NO: 1345
  source 1..120: mol_type = other DNA

SEQ ID NO: 24884 - DNA, 120 bp, synthetic construct
  source 1..120: mol_type = other DNA
aaaaaaagaaatacattgatctgtgtgatcgaatgtgaattaacaatgacgttgacttgatactacatttctgagtggttaccacattttattgattgtatgcttctcaccagactgcaa

SEQ ID NO: 24885 - DNA, 120 bp, synthetic construct
  source 1..120: mol_type = other DNA
ataagtgaataataaatctatgggaagaagcagatggactccgtcttgaacccactcaatttttcccccatcaattacccctctctcgtttttcaatactgggtctcttgcagagttgca

SEQ ID NO: 24886 - DNA, 120 bp, synthetic construct
  source 1..120: mol_type = other DNA
aaactgaaaatctatcaggcatctcattccatagttccctgtttgacaagaagaccaaggtgtcttcaaagtctgccctaaggtccagatctcctacccacgtaggagacttctagtttc

SEQ ID NO: 24887 - DNA, 120 bp, synthetic construct; identical to SEQ ID NO: 7264
  source 1..120: mol_type = other DNA

SEQ ID NO: 24888 - DNA, 120 bp, synthetic construct
  source 1..120: mol_type = other DNA
ttccccaccacccaacttctggaaccccagacttctcaattcctgtacccccaagaactgctcactttttgtacaaaaacctcaggcatagaggaaaggaatcttgcgcaaggtcgtttt

SEQ ID NO: 24889 - DNA, 120 bp, synthetic construct
  source 1..120: mol_type = other DNA
tggctcagaggccaatggacgcctggtacatgaccggcatcgactaatcagggccaggctcgatgaggctttgtctccctaccgcgcgcggggccgattctcccgcctcccagccccggc

SEQ ID NO: 24890 - DNA, 120 bp, synthetic construct
  source 1..120: mol_type = other DNA
ccttccagcctgcgacctgcggagaaaaaaaattacttattttcttgccccatacataccttgaggcgagcaaaaaaattaaattttaaccatgagggaaatcgtgcacatccaggctgg

SEQ ID NO: 24891 - DNA, 120 bp, synthetic construct; identical to SEQ ID NO: 7265
  source 1..120: mol_type = other DNA

SEQ ID NO: 24892 - DNA, 120 bp, synthetic construct
  source 1..120: mol_type = other DNA
aagcggggcgaggttttgcccatgtgcatcccgcccaacccccctgcggggtacttagggccaaaccggagcgggaaggggtgaggccatcgggcggctgcagagagctccagcgcaagg

SEQ ID NO: 24893 - DNA, 120 bp, synthetic construct
  source 1..120: mol_type = other DNA
aataagaacgggattaattttacttgctttcatggcccctaagagagacttttttagggcgtgaacagatatgtcgagaaaatgggggtgtgtggttttctttaatgagtccctcaggac

SEQ ID NO: 24894 - DNA, 120 bp, synthetic construct
  source 1..120: mol_type = other DNA
cgggaggaagtgcggctgctacgttgtagcagaagggcggggccctgcggggcggggccggggcgccgtgggcgcgcggggacaatgcggcgttgcccgccggcaggggcgcgctacctt

SEQ ID NO: 24895 - DNA, 120 bp, synthetic construct; identical to SEQ ID NO: 7266
  source 1..120: mol_type = other DNA

SEQ ID NO: 24896 - DNA, 120 bp, synthetic construct
  source 1..120: mol_type = other DNA
gcctgagcgcttgtggaattaaaatgggagatgtggggccgaggtgggcgaattgggatccctccaggtcaggggttcgagaccatcctgggcaacaaagcgagaccctcccccatgcca

SEQ ID NO: 24897 - DNA, 120 bp, synthetic construct
  source 1..120: mol_type = other DNA
tcatccgtgattgcaccactgcactgcaggctgggcaacaggaagaccctgtcttaaaaattagaagaagctgggcgcggtggctcacccttgtaatcccagcactttgggaggccaagg

SEQ ID NO: 24898 - DNA, 120 bp, synthetic construct
  source 1..120: mol_type = other DNA
cgggggctgaggcaggagaatcgcttgaacccgggaagcagaggttgcagtgagccgagatagcgccactgcactccagcctggtgacagagcgagactccgtctcaaaaaaaattaaga

SEQ ID NO: 24899 - DNA, 120 bp, synthetic construct; identical to SEQ ID NO: 7267
  source 1..120: mol_type = other DNA

SEQ ID NO: 24900 - DNA, 120 bp, synthetic construct
  source 1..120: mol_type = other DNA
ctggaatgacaagtctctgatccctgctgtctcccatttccagtatatctataaaccttcccttctgccagatttcacagctcttaactttattctctgtaggtggcaaatatgttcctc

SEQ ID NO: 24901 - DNA, 120 bp, synthetic construct
  source 1..120: mol_type = other DNA
tgatataccatcgtgttcaacttatttgggtgcaaggacacagcaaaagttaggagatgattgttgtattggagtgctaatacagaaatgtgttctgaaatctaacggagggtagaggta

SEQ ID NO: 24902 - DNA, 120 bp, synthetic construct
  source 1..120: mol_type = other DNA
gaattatttgaaaagttgaaagatggaaacatcatgtatcttccataccctgttaattgagcttttctcctgactgcattccaggtcagtctggggcaggtaacaactgggccaaaggcc

SEQ ID NO: 24903 - DNA, 120 bp, synthetic construct; identical to SEQ ID NO: 7268
  source 1..120: mol_type = other DNA

SEQ ID NO: 24904 - DNA, 120 bp, synthetic construct
  source 1..120: mol_type = other DNA
tgaaccaccttgtctcagccaccatgagtggtgtcaccacctgcctccgtttccctggccagctcaatgctgacctccgcaagttggcagtcaacatggtccccttcccacgtctccatt

SEQ ID NO: 24905 - DNA, 120 bp, synthetic construct
  source 1..120: mol_type = other DNA
cccgccacggccgatacctcaccgtggctgctgtcttccgtggtcggatgtccatgaaggaggtcgatgagcagatgcttaacgtgcagaacaagaacagcagctactttgtggaatgga

SEQ ID NO: 24906 - DNA, 120 bp, synthetic construct
  source 1..120: mol_type = other DNA
tcactgccatgttccgccggaaggccttcctccactggtacacaggcgagggcatggacgagatggagttcaccgaggctgagagcaacatgaacgacctcgtctctgagtatcagcagt

SEQ ID NO: 24907 - DNA, 120 bp, synthetic construct; identical to SEQ ID NO: 7269
  source 1..120: mol_type = other DNA

SEQ ID NO: 24908 - DNA, 120 bp, synthetic construct
  source 1..120: mol_type = other DNA
attccatttgtccagttaatacttcctcttaaaaatctccaagaagctgggtctccagatcccatttagaaccaaccaggtgctgaaaacacatgtagataatggccatcatcctaagcc

SEQ ID NO: 24909 - DNA, 120 bp, synthetic construct
  source 1..120: mol_type = other DNA
ggagagggaaatccaggctattaaagtcactaaatttctaagtatgtccatttcccatctcagcttcaagggaggtgtcagcagtattatctccactttcaatctccctccaagctctac

SEQ ID NO: 24910 - DNA, 120 bp, synthetic construct
  source 1..120: mol_type = other DNA
agaccagccttggtccctaagcctccagaaacgtcttcttaatccccaccttttcttactcccaaaaaagaatgaacacccctgactctggagtggtgtatactgccacatcagtgtttg

SEQ ID NO: 24911 - DNA, 120 bp, synthetic construct
  source 1..120: mol_type = other DNA
cctcacacacttggttttgttctatcctacatttgagatttctattttatgttgaacttgctgctttttttcatattgaaaagatgacatcgccccaagagccaaaaataaatgggaatt

SEQ ID NO: 24912 - DNA, 120 bp, synthetic construct; identical to SEQ ID NO: 7270
  source 1..120: mol_type = other DNA

SEQ ID NO: 24913 - DNA, 120 bp, synthetic construct
  source 1..120: mol_type = other DNA
cgatttggtatctcagggaggtactggtaaggacactgactgctttatagaccctcacatcattgtttctggtacccaaactgctctgagcaccagtcagtctttactgtagtctctgac

SEQ ID NO: 24914 - DNA, 120 bp, synthetic construct
  source 1..120: mol_type = other DNA
gggaaggcataggcttagatgcaggatccagggatggaaaatggaagctgagaagaatgacaaatcacgtgtaactggtttccagaccagcatccacatcctctgggaacttgcagaaat

SEQ ID NO: 24915 - DNA, 120 bp, synthetic construct
  source 1..120: mol_type = other DNA
tttgggttatgtgtacccatggccatttcctgtgatcctgtgggcttagtcaacctatgacaccaagataactagtgaagccctggtatggtggctcccacttgtaatcccagcactctg

SEQ ID NO: 24916 - DNA, 120 bp, synthetic construct; identical to SEQ ID NO: 7271
  source 1..120: mol_type = other DNA

SEQ ID NO: 24917 - DNA, 120 bp, synthetic construct
  source 1..120: mol_type = other DNA
tcaaggaattctgcctcagcttcccaagtagctgggattacaggcacccaccatcacgccgggctaatttttgtattttagtagagatggggtttcaccacgttggccaggactggtctc

SEQ ID NO: 24918 - DNA, 120 bp, synthetic construct
  source 1..120: mol_type = other DNA
actaggcgggattgctaccttatggtcccattctaaaacaatctgtaccatctactacctcatacttttaagttcacaatgcaagtctcaaagctaccctgaaaacaataattccttttg

SEQ ID NO: 24919 - DNA, 120 bp, synthetic construct
  source 1..120: mol_type = other DNA
ctgttggggggaaaaattaactctaaaactcttgacagtatataagtaacttgcttttctcccattctagaaagcctattgtatgcaagaaagcctattgtatgcaagggaagaagctac

SEQ ID NO: 24920 - DNA, 120 bp, synthetic construct; identical to SEQ ID NO: 7272
  source 1..120: mol_type = other DNA

SEQ ID NO: 24921 - DNA, 120 bp, synthetic construct
  source 1..120: mol_type = other DNA
actactacttggcatgtttcaccctgcctggctaatttttgtatttttggtagagacaaggtttcgtcatgttggccaggctggtcttgaactcctgacctcagatgatctgcctgcctt

SEQ ID NO: 24922 - DNA, 120 bp, synthetic construct
  source 1..120: mol_type = other DNA
agtacttacttacagcaatttatttgggtagcaaagttgaaaacctccagcccatccctcagtcttggtcaggaaaatattctagacaacaggctcaaacagtctgatttaattaggaag

SEQ ID NO: 24923 - DNA, 120 bp, synthetic construct
  source 1..120: mol_type = other DNA
aaactatttggcaaggagagatgaggggtgggacctcactgtcaatggacatgctcagggaggccagtgggttacatgcaacaggaggatcattcaggcaacttcagctatgaggctggg

SEQ ID NO: 24924 - DNA, 120 bp, synthetic construct; identical to SEQ ID NO: 7273
  source 1..120: mol_type = other DNA

SEQ ID NO: 24925 - DNA, 120 bp, synthetic construct
  source 1..120: mol_type = other DNA
tacatacgctttttttttttctttttttttttgagacggaatctcactctatcacccaggctagaatgcagtggtgcgatcttggcttactgcagcctccgcctcctgagttcaagtgat

SEQ ID NO: 24926 - DNA, 120 bp, synthetic construct
  source 1..120: mol_type = other DNA
ctgacctcagctgatcgtccaccctggcctcccaaagttctgggattacaagtgtgagccacagcacccagcccgaatatgcatttctttctctttttttttttgagacagagtcttgct

SEQ ID NO: 24927 - DNA, 120 bp, synthetic construct
  source 1..120: mol_type = other DNA
cacgcccggctgttttgtatttttagtagagacggggtttcactgtgttagccaggatggtctcaatctcctgacctcgtgatccgcccgcctcagcctcccaaagtgctgggattacag

SEQ ID NO: 24928 - DNA, 120 bp, synthetic construct
  source 1..120: mol_type = other DNA
gcaattctcctgcctcagcttcccgagtagctgagattacaggcatgcaccaccaagcctggctaatttttttttgtatttttagtaaagatggtgtttcaccatgttggccaggctggt

SEQ ID NO: 24929 - DNA, 120 bp, synthetic construct; identical to SEQ ID NO: 7274
  source 1..120: mol_type = other DNA

SEQ ID NO: 24930 - DNA, 120 bp, synthetic construct
  source 1..120: mol_type = other DNA
ccatgatctacaggtgaattaactggggcgctgagaaaagcagtgatatgccctagaattaattaactgtcaataggctgcaactagttccctatactagtggggtgaccacaagcacag

SEQ ID NO: 24931 - DNA, 120 bp, synthetic construct
  source 1..120: mol_type = other DNA
taaaacaactcatttatgtagaagcttagcactgtgtctggcacacagaaagtgattaataaacatcaatgactcccaggcctggatgctggttaaatgctaggcatactgtgtcacaca

SEQ ID NO: 24932 - DNA, 120 bp, synthetic construct
  source 1..120: mol_type = other DNA
tcactttggctgcccccatggtcccactgccgctggacaccagtgtgatcttattggctgaagtcaagggaccactgatctcctctgccacctggcaggagagagacacccactcagtgc

SEQ ID NO: 24933 - DNA, 120 bp, synthetic construct; identical to SEQ ID NO: 7275
  source 1..120: mol_type = other DNA

SEQ ID NO: 24934 - DNA, 120 bp, synthetic construct
  source 1..120: mol_type = other DNA
aggatgcttgtgagattgacggaaatcattaagaacaagaaatccccgatcaagcagcaacccccaccctctccacaagccagcatggaactgcctcttaactcacccgcacagacgcgg

SEQ ID NO: 24935 - DNA, 120 bp, synthetic construct
  source 1..120: mol_type = other DNA
aacctgaaatccataggagtccaggtggtgaaggcttcagcactccatcttggggtgcctaggtggcaagtgagctaggcagggtcagggaggggacatttacttctctgcctcggctag

SEQ ID NO: 24936 - DNA, 120 bp, synthetic construct
  source 1..120: mol_type = other DNA
cacctgcacccgctgctcctcaatctgctgcttagtcttggccacctgggtaggagggtgaagtcaggttcacgctctgagtcagaggtgaagagcaagtgcccgggaaccagagctcca

SEQ ID NO: 24937 - DNA, 120 bp, synthetic construct
  source 1..120: mol_type = other DNA
ccaacatggtgaaaccctgtctctactaaaatacaaaaaattagccaggtgtggtggcgaatgcctgtagtcccagccacccgggaggctgaggcaggagaattgcttgaacctgggagg

SEQ ID NO: 24938 - DNA, 120 bp, synthetic construct; identical to SEQ ID NO: 7276
  source 1..120: mol_type = other DNA

SEQ ID NO: 24939 - DNA, 120 bp, synthetic construct
  source 1..120: mol_type = other DNA
ttttttgtcttttgcacatggtgcagatttaacagaaaaaaaagtgaaccacgaggcttcttcctcattctccaaaccacctgggtccctttcccagagaaaccaccaagaccagcttct

SEQ ID NO: 24940 - DNA, 120 bp, synthetic construct
  source 1..120: mol_type = other DNA
ggagtgcagtggcacgatcagctcagtgcaaccttcacctcccaggttcaagctaatctcttgcctcagcctctcaagtagctgggactacaggcatgtgctaccatgtctggctaattt

SEQ ID NO: 24941 - DNA, 120 bp, synthetic construct
  source 1..120: mol_type = other DNA
atcgcacccagcctagatttcatcttcttattccttgcagtgtgagggaatcagaaggctcttatcaagatgctagtgaggagaggtgccaggcaaggaacacattttttttttcttttt

SEQ ID NO: 24942 - DNA, 120 bp, synthetic construct; identical to SEQ ID NO: 7277
  source 1..120: mol_type = other DNA

SEQ ID NO: 24943 - DNA, 120 bp, synthetic construct
  source 1..120: mol_type = other DNA
accatcatcattgtaggtctcatcaatacatgtgatgcttcccctgcctcctaccttcccccgggcccatctgttcactccagagagaagcatagctctggagacggcactctgtactgt

SEQ ID NO: 24944 - DNA, 120 bp, synthetic construct
  source 1..120: mol_type = other DNA
tgtcccttaggcaaccatttgtctgtttctttttccttcctgtctatgcccaccttttggtgaaactcaacctccagaagcttcctcagaaagaatataaagacaatattttttctgagg

SEQ ID NO: 24945 - DNA, 120 bp, synthetic construct
  source 1..120: mol_type = other DNA
agcaattctcctgcctcagcctcccatgtatctgggattataggtgcctgccaccacgctcagctaatttttgtgtttttaatagagatggggttccaccacattggccaggctggtctt

SEQ ID NO: 24946 - DNA, 120 bp, synthetic construct; identical to SEQ ID NO: 7278
  source 1..120: mol_type = other DNA

SEQ ID NO: 24947 - DNA, 120 bp, synthetic construct
  source 1..120: mol_type = other DNA
actaaaaatacaaaaattagccagcaatggtggcacatacctgtagtcccagctacttgggaagctgaggtaggagaatcgcttgaacccaggaggcagaggttgcagtagctgagatca

SEQ ID NO: 24948 - DNA, 120 bp, synthetic construct
  source 1..120: mol_type = other DNA
taaggtgggaggataacttgaacccaggagttcaagaccagcctgtgcaatatggcaagatctcacctctagaaaaaaatttaaaaattagctgggcgtggtggtgtgcccctgtggtcc

SEQ ID NO: 24949 - DNA, 120 bp, synthetic construct
  source 1..120: mol_type = other DNA
aaaaaaaaaaaaaaaaaggaatctgaagtcattttgaagcctgcctctttgagatctctctctctctagaagctttcatattttttgtcctcagcattcttaagtttcacagtgttatgt

SEQ ID NO: 24950 - DNA, 120 bp, synthetic construct; identical to SEQ ID NO: 7279
  source 1..120: mol_type = other DNA

SEQ ID NO: 24951 - DNA, 120 bp, synthetic construct
  source 1..120: mol_type = other DNA
tgacctcgtgagccacccaccttggcctcccaaagtgctgggattacaggcatgagccaacacccctggccctgcttgactcttattagtccctttcccttacttccctgcttctttctg

SEQ ID NO: 24952 - DNA, 120 bp, synthetic construct
  source 1..120: mol_type = other DNA
atggcacgatctcagctcactgcaacctctgcctcccggattcaagtgattctcctgcctcagcctcctgagtagctgggattacagtcaccatttcagctaatttttgtgtttttagta

SEQ ID NO: 24953 - DNA, 120 bp, synthetic construct
  source 1..120: mol_type = other DNA
tgagcttcaccctacggtgatctggataggccatgtacggagaaacatctgattcaggattttaagttatttctttttggattggtcatgttccccagagcagtcttctgatctcttttt

SEQ ID NO: 24954 - DNA, 120 bp, synthetic construct; identical to SEQ ID NO: 7280
  source 1..120: mol_type = other DNA

SEQ ID NO: 24955 - DNA, 120 bp, synthetic construct
  source 1..120: mol_type = other DNA
agcctggccgacatggtgaaacccctctctactaaaaaaaaaaaaaaaaatacaaaaattacctgggcgtggtggtgggcacttgtaatcccagttgaggattacttgggagggtgaggc

SEQ ID NO: 24956 - DNA, 120 bp, synthetic construct
  source 1..120: mol_type = other DNA
atagataaataagataataaacctccagatgtctgttggagcagggcaggaaccattacccagaggcagtgaggggctctgagaaggtgcttttcacatgttcctcttatttaaccagtc

SEQ ID NO: 24957 - DNA, 120 bp, synthetic construct
  source 1..120: mol_type = other DNA
agctcagctgtgtcatacctgcttagtcaattactactgacttccagtttccaaaatgatgctctggtttccgttcctattttctccatcttttttttttttaaagcctagtcagctggg

SEQ ID NO: 24958 - DNA, 120 bp, synthetic construct
  source 1..120: mol_type = other DNA
agcctgggcaacatggtgaaattccgtctctacaaaacatacaaaaattagccaggcgtggtggcatatgtttgtagaccaagctactcaggaagctgaggtgggagtattgcttgagcc

SEQ ID NO: 24959 - DNA, 120 bp, synthetic construct; identical to SEQ ID NO: 7281
  source 1..120: mol_type = other DNA

SEQ ID NO: 24960 - DNA, 120 bp, synthetic construct
  source 1..120: mol_type = other DNA
aaaaaaaaaaaatcattttggctttagtgaggttttaggagagagtaaaattagctacatttgtttaatccatcatctctgaaaaagagcccaactcatcttttgcttttttttttgaga

SEQ ID NO: 24961 - DNA, 120 bp, synthetic construct
  source 1..120: mol_type = other DNA
ccattcttctgcctcagcctcccgagtagctgggactacaggtgcctgccaccacgcccagctaattttttgtatttttagtagagacggggtttcaccatgttagccaggatggtctcg

SEQ ID NO: 24962 - DNA, 120 bp, synthetic construct
  source 1..120: mol_type = other DNA
atccctatacaaatataaataagaccatggcacctttctgcttgaagttctccaatagctttccactgtgctttcagttctcttctgtgtctccatcgtgaccacacaaaccctttgtga

SEQ ID NO: 24963 - DNA, 120 bp, synthetic construct
  source 1..120: mol_type = other DNA
acagcctttgcacttactggtcccctgcctagccacaagccacgtatgactgactgactgactgactgtctgtcgtccgtccgtccgtccgtccgtccgtccgtccgtccgtccatccgt

SEQ ID NO: 24964 - DNA, 120 bp, synthetic construct; identical to SEQ ID NO: 7282
  source 1..120: mol_type = other DNA

SEQ ID NO: 24965 - DNA, 120 bp, synthetic construct
  source 1..120: mol_type = other DNA
cttaaaaagcacaggctagaatattcttggctcagaactgtacattgttccttcttatctccaagtctgatctcaaacaccacttcctcatagaaactttctctaccacccgctaaccta

SEQ ID NO: 24966 - DNA, 120 bp, synthetic construct
  source 1..120: mol_type = other DNA
taatgtaagctgcataagggcaggaatcttttctgcctcacctccatatttatagcctcacctccaaaatggtgtctagcacatagaaggcacttaacagatatttgttgaataaatcct

SEQ ID NO: 24967 - DNA, 120 bp, synthetic construct
  source 1..120: mol_type = other DNA
ccttaatctgcagacaagtaaggtcatgtttagaaggttaagaaccttatccatagcttcactgcaagctagcagtttccatcatggtaacccttttcaaactcaaactccaatgtgcat

SEQ ID NO: 24968 - DNA, 120 bp, synthetic construct
  source 1..120: mol_type = other DNA
tttgtatttctaacaagcttcgcagtgatgctgcagctgctgctgggtagaacacagtttgagttgcaaagctgtatgccatgttcaacctgtcaagtcacccaggaatttaacataata

SEQ ID NO: 24969 - DNA, 120 bp, synthetic construct; identical to SEQ ID NO: 7283
  source 1..120: mol_type = other DNA

SEQ ID NO: 24970 - DNA, 120 bp, synthetic construct
  source 1..120: mol_type = other DNA
agacaccttatgtaaaatatattgttgattcattaacactgaactcacagctaacagcagtataacttatgcatgaacgaagcttacctaacacatgtatttctcccataaggcacatca

SEQ ID NO: 24971 - DNA, 120 bp, synthetic construct
  source 1..120: mol_type = other DNA
taaaaagcacaaaaatgcaaaaaacacggcagtaaatatactgtgaaaataacacggcttacggtatgagagctgaaacaaggcagcagagcatctccttgatcaacctcacctgggtac

SEQ ID NO: 24972 - DNA, 120 bp, synthetic construct; identical to SEQ ID NO: 1367
  source 1..120: mol_type = other DNA

SEQ ID NO: 24973 - DNA, 120 bp, synthetic construct; identical to SEQ ID NO: 7284
  source 1..120: mol_type = other DNA

SEQ ID NO: 24974 - DNA, 120 bp, synthetic construct
  source 1..120: mol_type = other DNA
agtagctgggactacaggtgcgtgccaccatacctggctaatttttgtatttttagtagaaacagggtttcactatgttggccaggctagtctcgaactcttgaccttgtgatccacctg

SEQ ID NO: 24975 - DNA, 120 bp, synthetic construct
  source 1..120: mol_type = other DNA
tcactgcaacctgcgcatcctggctcaagcaatcctcctgcctcataccccaagtagctgtgactacaggcccgagctgccatgcctggctaatgtttgtatttttcgcatagacacggt

SEQ ID NO: 24976 - DNA, 120 bp, synthetic construct
  source 1..120: mol_type = other DNA
agcttttcagctgtaacgtctgagtcttttaaatctctcctcatatgggggagttggtccagagatggagagccagaataagaccaaagttaaagtatgagaaatagtgtagtggtgtcc

SEQ ID NO: 24977 - DNA, 120 bp, synthetic construct; identical to SEQ ID NO: 7285
  source 1..120: mol_type = other DNA

SEQ ID NO: 24978 - DNA, 120 bp, synthetic construct
  source 1..120: mol_type = other DNA
tctatcccctttcccactaagcaacccccatctctctcacccggatcccagcatctctcttggcctctgcttctccaatccgtgcatctttttggacttgagctgttcgagccttcccca

SEQ ID NO: 24979 - DNA, 120 bp, synthetic construct
  source 1..120: mol_type = other DNA
aaggatcaattgcctagttttacctggtcatcgtgaatgtccttcagagtgtagctaaccacactgatgcccatgttgaccaggtctgaggaggccactttgaaaacctgttctgagaat

SEQ ID NO: 24980 - DNA, 120 bp, synthetic construct
  source 1..120: mol_type = other DNA
cctgcctcagcctcccaagtagctgggattaccgacacccatcaccatacccagctaatttttgtatttgtagtagagaaggggtttcaccaggttggctaggctggtctcgaactcctg

SEQ ID NO: 24981 - DNA, 120 bp, synthetic construct; identical to SEQ ID NO: 7286
  source 1..120: mol_type = other DNA

SEQ ID NO: 24982 - DNA, 120 bp, synthetic construct
  source 1..120: mol_type = other DNA
atgaagtcagagaaaaagcagagagagaagggagagccctctaagaaatgcttcttccatttcagggaaagaaaggaggaggaggcaagtgccttggggtgcctggaaaagatgagacta

SEQ ID NO: 24983 - DNA, 120 bp, synthetic construct
  source 1..120: mol_type = other DNA
gggcaatgccagtgactgagatggggaccccatggcgagtgtaaaccttttcactcttgacattgagggtcagtgtgttgagagagatcctaggggaaaaagaagggacagacagtaaga

SEQ ID NO: 24984 - DNA, 120 bp, synthetic construct
  source 1..120: mol_type = other DNA
ttcggcagaaccctgcaaggtgtggggcagtgaggaacggtggcagagcttgaatgtggaagactgaggaactggcgggggtgaggggacagcaacccacaggagagaatctgggagctg

SEQ ID NO: 24985 - DNA, 120 bp, synthetic construct; identical to SEQ ID NO: 7287
  source 1..120: mol_type = other DNA

SEQ ID NO: 24986 - DNA, 120 bp, synthetic construct
  source 1..120: mol_type = other DNA
gggtccgctaaggcttttccctacaaaatccttaagatccccagctacctcttctccgcctgcgtatggtccctcccttcccctcgccgctccctttgataaaggtcccccgcgcccaga

SEQ ID NO: 24987 - DNA, 120 bp, synthetic construct
  source 1..120: mol_type = other DNA
tcgcgcagggacctgggagccgggcaggggccgctcgcagaccagctttcctgggagctggccccgctcccgcgttccccaccctgccgcaccccgttgctgcggcagacgcgaccccgc

SEQ ID NO: 24988 - DNA, 120 bp, synthetic construct
  source 1..120: mol_type = other DNA
cagccgggctgcctggttagcccggggagggccacatccctgccgccccagtcaccgcccttcttgagccgggaatcccgcccacgccgcgccacgctccgcccccgggtgagggacttg

SEQ ID NO: 24989 - DNA, 120 bp, synthetic construct; identical to SEQ ID NO: 7288
  source 1..120: mol_type = other DNA

SEQ ID NO: 24990 - DNA, 120 bp, synthetic construct
  source 1..120: mol_type = other DNA
cgcagccaccctaaaggcgacttcaagaagatggaaggatctcacggatctcattcctaatggtccgccgaagtctcacacagtagacagacggagttgagatgctggaggatgcagtca

SEQ ID NO: 24991 - DNA, 120 bp, synthetic construct
  source 1..120: mol_type = other DNA
cccacaaagctcaataaataccaagagacctgcatttacagcagggggaacatctcacacccttgcataagttaaaataaatattacgtacacatctccatcacctaggaggacgtacat

SEQ ID NO: 24992 - DNA, 120 bp, synthetic construct
  source 1..120: mol_type = other DNA
atattacgtacacatctccatcacctaggaggacgtacataaatacatataaatattaattaggagcaataagaaataaattaacgacgctctccttcccaccgggcctagccccagctg

SEQ ID NO: 24993 - DNA, 120 bp, synthetic construct
  source 1..120: mol_type = other DNA
atacgctctcgcgcaccaggtacgcctggtgtttctttgtggtttttcggattctttttggggagtgcggggagtcacagttagaaggcggccgggtgttgctggaggaaagtgctgagg

SEQ ID NO: 24994 - DNA, 120 bp, synthetic construct; identical to SEQ ID NO: 7289
  source 1..120: mol_type = other DNA

SEQ ID NO: 24995 - DNA, 120 bp, synthetic construct
  source 1..120: mol_type = other DNA
gcgctttcggtgcccgcgagaggcgctggggcgcccggcaggggccgctgcgggctccgggagagggtcgaaggtgaagatctcaggaccggagccccgccggggtcccgggatggtgga

SEQ ID NO: 24996 - DNA, 120 bp, synthetic construct
  source 1..120: mol_type = other DNA
atgtgctcctgaaaattgggcgggtccttctaactcctcctcccgcagctggggagcggttggcagcagcgggctggaaattccgacgattaaacaaagggagtgggtggagacttgaca

SEQ ID NO: 24997 - DNA, 120 bp, synthetic construct
  source 1..120: mol_type = other DNA
agccacaggatccctcacaggcctttttttttttttttttttggagatggagcagtctcgttcggtcgccaggctggaatgcagaggcgcgatctcggctcactgcaacccctgactccc

SEQ ID NO: 24998 - DNA, 120 bp, synthetic construct; identical to SEQ ID NO: 7290
  source 1..120: mol_type = other DNA

SEQ ID NO: 24999 - DNA, 120 bp, synthetic construct
  source 1..120: mol_type = other DNA
gcaatactgacccagttatatgcacgcattcatgcacttgtaggtatccttagaatataaactccccaagaaggaaattgttacagaaatagtcaagattaagggagaaatgaacacact

SEQ ID NO: 25000 - DNA, 120 bp, synthetic construct
  source 1..120: mol_type = other DNA
ctaagcggattaactcaggaacagaaaaccaaataccacacattctcacttataagtgggaaccaaacattgggaactcatggacataaagatggcaacaatagcaacttgagaccagta

SEQ ID NO: 25001 - DNA, 120 bp, synthetic construct
  source 1..120: mol_type = other DNA
aacaaacctgcacatataccccagaatttaaaataaaagttggggagggagggaaggatagaaagattaaaaaagtaatacacaatggtggggcatggtggctcttgcctgtaatcctag

SEQ ID NO: 25002 - DNA, 120 bp, synthetic construct; identical to SEQ ID NO: 7291
  source 1..120: mol_type = other DNA

SEQ ID NO: 25003 - DNA, 120 bp, synthetic construct
  source 1..120: mol_type = other DNA
acaaacattctaaattgtgagacattatacaaatgttacagtaatggtaattactcaacttaaagcagattcacatttccataacttccttacagacagctgctcatggacacagaattt

SEQ ID NO: 25004 - DNA, 120 bp, synthetic construct
  source 1..120: mol_type = other DNA
ctcctgagtagctgggaccacaggtgagcaccaccatgcctggctaatatatatatatatatatatatatatatatatatatatatatatatatatataaaattttttgtagagccaggg

SEQ ID NO: 25005 - DNA, 120 bp, synthetic construct
  source 1..120: mol_type = other DNA
ttcaggcgccctctgttgagggtactactgttgagagtcctgaggctagtttcagtataagtgctgtgccatgcagctgcctgaggaaagccagataaagctgatactccagccatgagg

SEQ ID NO: 25006 - DNA, 120 bp, synthetic construct; identical to SEQ ID NO: 7292
  source 1..120: mol_type = other DNA

SEQ ID NO: 25007 - DNA, 120 bp, synthetic construct
  source 1..120: mol_type = other DNA
aggttgcagcaagctgagagcgtgccactgcactccagcctgggtgacagagtgagaccctgtctcaaaaaaacaagaacaaaacaaaaaacaaaaacaaaaacaaaaaaacctaagaaa

SEQ ID NO: 25008 - DNA, 120 bp, synthetic construct
  source 1..120: mol_type = other DNA
atgacaaattcagatgtggaggatgactgtaagaatggaattagcaaagaccttgagctggaaaagtacaggatgtgtttggggaatcacaagaaaaacaatctcagagtaagtttcctg

SEQ ID NO: 25009 - DNA, 120 bp, synthetic construct
  source 1..120: mol_type = other DNA
tggatgagataaagggaggaaaattcaagcaggaaactgattgggatgaggagtgatgctctggacgggtagagactaaggcagtagacaggaggctattggaggggctcaggtagatga

SEQ ID NO: 25010 - DNA, 120 bp, synthetic construct; identical to SEQ ID NO: 7293
  source 1..120: mol_type = other DNA

SEQ ID NO: 25011 - DNA, 120 bp, synthetic construct
  source 1..120: mol_type = other DNA
gtattcccaccttggctgggtcacaccaagcttctgagatgtggctacactcctccaaaccactcatacaaatgtacaacatctttagaaaagctgggacaattcttacacagacaccaa

SEQ ID NO: 25012 - DNA, 120 bp, synthetic construct
  source 1..120: mol_type = other DNA
tgtgtacaattcctgggcctacaagtcactttattttatactcactactcttatctaaatacacaagatcccttccacattacacacttcttcctggctggcataaaacacacctcctct

SEQ ID NO: 25013 - DNA, 120 bp, synthetic construct
  source 1..120: mol_type = other DNA
ctacacaatgaccaacataaacccatgactacttacacatgtggacagaccctcacactcacataaacataaattgggagtagggggagatagtgatgatggaagaaaactagtgggtgg

SEQ ID NO: 25014 - DNA, 120 bp, synthetic construct; identical to SEQ ID NO: 7294
  source 1..120: mol_type = other DNA

SEQ ID NO: 25015 - DNA, 120 bp, synthetic construct
  source 1..120: mol_type = other DNA
ctgccacacaggaagctagggaaatgttgggggtgaatcattaagccaataagggggtgggggagtgcaggctggggaatgagttaaggccagaaagtgccaggggctgagacgagcaac

SEQ ID NO: 25016 - DNA, 120 bp, synthetic construct
  source 1..120: mol_type = other DNA
gtttgacctttgccttgatccatcaccactgctagcctccttctcagccccttgtttttcttcatgacacatatcacgttggggaatcattttatgtatttgctttttgctgttgtttgt

SEQ ID NO: 25017 - DNA, 120 bp, synthetic construct
  source 1..120: mol_type = other DNA
agtacttggctgtcacctagtaggaacttaataaatattcttaaatctgtctcctccgaggagctaaacctcatctgcagagaggtctgtttatctagccatgttcctttagaggccccc

SEQ ID NO: 25018 - DNA, 120 bp, synthetic construct; identical to SEQ ID NO: 7295
  source 1..120: mol_type = other DNA

SEQ ID NO: 25019 - DNA, 120 bp, synthetic construct
  source 1..120: mol_type = other DNA
ggtattcagtagatcctcaataactacttggtgacttgagatgggtttgagatagaaaggaaacacggaatagcaaaaagaacatattgtaatctagtggtgttagacgaaattgggttt

SEQ ID NO: 25020 - DNA, 120 bp, synthetic construct
  source 1..120: mol_type = other DNA
agaatataaatttactccttctgggcacatagtaggtgcttcttgcatggagcaggggcattattataattatgagaagagggactgctttggaacagggatgggcagcagtgagccaac

SEQ ID NO: 25021 - DNA, 120 bp, synthetic construct
  source 1..120: mol_type = other DNA
ctctttattttccagagaagcaaagacttctgcattcctagttcctgttcaactaatgtgagtgattttatttttttatgtatgtatttatttattttttgagacaagatctcactctct

SEQ ID NO: 25022 - DNA, 120 bp, synthetic construct; identical to SEQ ID NO: 7296
  source 1..120: mol_type = other DNA

SEQ ID NO: 25023 - DNA, 120 bp, synthetic construct
  source 1..120: mol_type = other DNA
gagttcgagaccagcctggccaacatggcaaaaccccgtctctaccaaaaatacaaaaattagctgggcgtggtggcgtgtgcctgtaatcccagctactcgggaggctgaagcaggaga

SEQ ID NO: 25024 - DNA, 120 bp, synthetic construct
  source 1..120: mol_type = other DNA
ggctggagtgcagtggcacaatctcggctcactgcaacctctgcctcccgggttcaggcgattctcctgcttcagcctcccgagtagcgcatgccaccatgcccggctaatttttgtatt

SEQ ID NO: 25025 - DNA, 120 bp, synthetic construct
  source 1..120: mol_type = other DNA
agcaaaaaaaaaaatttgtttttactcaccactatactgacaaggaacaggtgattttaaacatcccctcccacctacattttagctggaacaattctccagaggcatgggggtagagtg

SEQ ID NO: 25026 - DNA, 120 bp, synthetic construct; identical to SEQ ID NO: 7297
  source 1..120: mol_type = other DNA

SEQ ID NO: 25027 - DNA, 120 bp, synthetic construct
  source 1..120: mol_type = other DNA
gactttatctatcttgtgtactgctctattttcagtgcctagaactgtgcctgtcaatcaatacaggctgctgaaaaggctagaaatacaggatcgttgatgtcattactgttacagtgc

SEQ ID NO: 25028 - DNA, 120 bp, synthetic construct
  source 1..120: mol_type = other DNA
tatttccccttttgtccagacttttcagacaccccgtatttactggatgagttgatctacaaagtgaaaggcataaattaaaggctctctaatgtttctcctcctctgaaaccccatgat

SEQ ID NO: 25029 - DNA, 120 bp, synthetic construct
  source 1..120: mol_type = other DNA
tctccaggggcggaggcgggtgctggggctggcctgtctgcagctccctggccctacccagtggggatcgcgtgtcagtactggggtttggtgggctgccaaggggtgagccctgaggcg

SEQ ID NO: 25030 - DNA, 120 bp, synthetic construct; identical to SEQ ID NO: 7298
  source 1..120: mol_type = other DNA

SEQ ID NO: 25031 - DNA, 120 bp, synthetic construct
  source 1..120: mol_type = other DNA
ctgctgaggcctccactgtcagccatgaccatttgggtttgtgcgtgtgactgctgtgtctctgacacagaccaagtggtgctgaccctgggagcctgaattaatagatttcttgagagc

SEQ ID NO: 25032 - DNA, 120 bp, synthetic construct
  source 1..120: mol_type = other DNA
agttcactaccaaaaaggcacattttattttagtgaaaatgggacaatcatgggccataaagaaccttcctaactattgttcctccggttcacctcctataccccccagggctttcttgt

SEQ ID NO: 25033 - DNA, 120 bp, synthetic construct
  source 1..120: mol_type = other DNA
ttcttgatgttgtgcatctctaattttgtcctttttctcacacatgccaaactcttacccattggaccctataaccgttctatttcttttcctttttcctccctattctcctgggaaaaa

SEQ ID NO: 25034 - DNA, 120 bp, synthetic construct; identical to SEQ ID NO: 7299
  source 1..120: mol_type = other DNA

SEQ ID NO: 25035 - DNA, 120 bp, synthetic construct
  source 1..120: mol_type = other DNA
gtcaggagttcgagaccagcctggccaacatggtgaaaccccgtctctactaaaaatacaaaaattagcctggcgtggtggcaggcgcctgtaatcccagctacttggaaggctaaggca

SEQ ID NO: 25036 - DNA, 120 bp, synthetic construct
  source 1..120: mol_type = other DNA
taaaccagatattctcaacctatccctgtgggttgaactcatcctatctctgaccctgagcctttcacataaaatttggtagtatttggtgatactgcattttgttttaaaaagtcaggt

SEQ ID NO: 25037 - DNA, 120 bp, synthetic construct
  source 1..120: mol_type = other DNA
ttaggagtagtttttgatgagttttgataaatgcatatagtttgtgtaaaggcctccaccatgatgatatagagttttccatcacccccaaaagttccctgcatccctttgtagtcagtc

SEQ ID NO: 25038 - DNA, 120 bp, synthetic construct
  source 1..120: mol_type = other DNA
gcactttgggaggccgaggcgggaggatcatctgaggtcaggagttcaagaccagcctgaccaacatggtgaaaccccgtctctactaaaaattagccaggtgtggtggcaggtggctat

SEQ ID NO: 25039 - DNA, 120 bp, synthetic construct; identical to SEQ ID NO: 7300
  source 1..120: mol_type = other DNA

SEQ ID NO: 25040 - DNA, 120 bp, synthetic construct
  source 1..120: mol_type = other DNA
actatgaacattcatagacaactcttttttaagacatgtattcttatttctcttgagcagatgtctaggagtagtataactaggtgcatgtttagcttagtaagaaatcgctgctgtgcc

SEQ ID NO: 25041 - DNA, 120 bp, synthetic construct
  source 1..120: mol_type = other DNA
gatcagcccaccttggtctcccaaagtgctgggattacaggtgtgtgccaccatgcccagcctaaaggcagaaggatttcttgagcccaggagtttgagatcagcctgggcagcatggag

SEQ ID NO: 25042 - DNA, 120 bp, synthetic construct
  source 1..120: mol_type = other DNA
aagtcacattcacaccactgcactccagcctgggagacagagcgagaccccattctaaaaaaagaaaaaataagggctgggctcggtggctcatgcctgtaatcccagcactttgggaag

SEQ ID NO: 25043 - DNA, 120 bp, synthetic construct; identical to SEQ ID NO: 7301
  source 1..120: mol_type = other DNA

SEQ ID NO: 25044 - DNA, 120 bp, synthetic construct
  source 1..120: mol_type = other DNA
gtgttttttttgttatagaacaggttgccactcagattacctcaagggacagagatgggctggaatagagccacctcagtggccagtaacctgccccttgaagaaccagcatgtcttcca

SEQ ID NO: 25045 - DNA, 120 bp, synthetic construct
  source 1..120: mol_type = other DNA
gggtagtgtgaagtgacactagcccacacacctgagcatgtatgatgcctcagaggcactgtgtgtttttttttgtttgtttgtttgtttgagatggagtcttgctctgtctgtagccca

SEQ ID NO: 25046 - DNA, 120 bp, synthetic construct
  source 1..120: mol_type = other DNA
aatttttcgtatttttagtagagatggggtttccccgtgttagccaagatggtctcgatctcctgatctcgtgatctgcccacctcggcctcccaaagtgctaggattacaggcgtgagc

SEQ ID NO: 25047 - DNA, 120 bp, synthetic construct
  source 1..120: mol_type = other DNA
aatgaggcaattcactttcttaaggttgtgtaaccaagaagtaatgggagttagatgtgaacctaggtctatttcattccaaagcctagtggcatacctatttgtcagagcatagatgct

SEQ ID NO: 25048 - DNA, 120 bp, synthetic construct; identical to SEQ ID NO: 7302
  source 1..120: mol_type = other DNA

SEQ ID NO: 25049 - DNA, 120 bp, synthetic construct
  source 1..120: mol_type = other DNA
gcctcctgattagctgggattacaggcatgtgccaccatacctggctaatttttgtttttttagtacagatggggtttcactatgttggccagactggtcttgaactcctgacctcgtga

SEQ ID NO: 25050 - DNA, 120 bp, synthetic construct
  source 1..120: mol_type = other DNA
catagctcactatagccccaaactcctgggctcaagcaatcctgccacttcagcttcctgagtttctaggactacaggcgtgtgccaccatgcccaactaattaaaaaaaattttttttt

SEQ ID NO: 25051 - DNA, 120 bp, synthetic construct
  source 1..120: mol_type = other DNA
ctggacaactgtatgttttaattcacttaattttcatggtacacctctgagaggagggcatgacaacactcattatacaggtgcagtgacagcacagaactctgtgaagcaggggaatga

SEQ ID NO: 25052 - DNA, 120 bp, synthetic construct; identical to SEQ ID NO: 7303
  source 1..120: mol_type = other DNA

SEQ ID NO: 25053 - DNA, 120 bp, synthetic construct
  source 1..120: mol_type = other DNA
cccaaggacttactcccaaatacttttctcaagagaaggtggtgtaaccagaagacactttaaggtcttgaggccatccccaaagatcatttgtttcctcaaacagattttgggcttttt

SEQ ID NO: 25054 - DNA, 120 bp, synthetic construct
  source 1..120: mol_type = other DNA
cccagattctcttaatttaggtctatgctgtctaatacagtagcatgtggctatttattttattttattttttgagatggagtctcactctgtcgcccaggctggaatgtagtggcatga

SEQ ID NO: 25055 - DNA, 120 bp, synthetic construct
  source 1..120: mol_type = other DNA
ttatttatttatttattttgagtcaaagtctcactctgtcacccaggctggagtgtagtggcgtgatctcagctcactgcaggctctgcctcccgggttcacaccattctcctgcctcag

SEQ ID NO: 25056 - DNA, 120 bp, synthetic construct
  source 1..120: mol_type = other DNA
tccgcccgccttggcctcccaaagtgctgggattacaggcgtgagccaccgcgcccagcatttttgtatttttaatggagacggggtttcaccatgttggccgggctggtctcgaactcc

SEQ ID NO: 25057 - DNA, 120 bp, synthetic construct; identical to SEQ ID NO: 7304
  source 1..120: mol_type = other DNA

SEQ ID NO: 25058 - DNA, 120 bp, synthetic construct
  source 1..120: mol_type = other DNA
tgtctctcattagattgtatcgcacactgcccattcagaggtccagaaaccacttcttcttcagaaatcttgtactgagaaatggaagcccatttctgatcacatacatgacccatgctt

SEQ ID NO: 25059 - DNA, 120 bp, synthetic construct
  source 1..120: mol_type = other DNA
cagggcacaggaaagtggtgaaaataagtggccatggttcacagatttttcagctggtagaggctagttcctacacttaaaacatcagtagattgtcaaatgtgttccaactaagagcag

SEQ ID NO: 25060 - DNA, 120 bp, synthetic construct
  source 1..120: mol_type = other DNA
tgtgtgtgtgcatctatttattatctatctacctacttatctaataacataattaactaacatttatttgatatcttagagcttaacaagtacttttcctcatatgaagactcagcagat

SEQ ID NO: 25061 - DNA, 120 bp, synthetic construct; identical to SEQ ID NO: 7305
  source 1..120: mol_type = other DNA

SEQ ID NO: 25062 - DNA, 120 bp, synthetic construct
  source 1..120: mol_type = other DNA
agtggtgcgatcatgtctcagtgcagtggtgcgattatggctcagtgcagtggtgcgatcatggctcagtgcagtggtgcgatcatggctcagtgcagtggtgcaattatgtctcagtgc

SEQ ID NO: 25063 - DNA, 120 bp, synthetic construct
  source 1..120: mol_type = other DNA
agtggtgcagtcatggctcagtgcagcctcaactgccagagctcaagcagttctccctcctcagcctcctgatttgttgggaccatgggtgtgtgccaccacatctggctaattttttga

SEQ ID NO: 25064 - DNA, 120 bp, synthetic construct
  source 1..120: mol_type = other DNA
ccactgctagtagttcattttactttctaaaagataaaatgttgatgaagagttcttagtgatccatgttttctctccagtcctccaccaaaataacgcattttaaaaaaacaaactccc

SEQ ID NO: 25065 - DNA, 120 bp, synthetic construct; identical to SEQ ID NO: 7306
  source 1..120: mol_type = other DNA

SEQ ID NO: 25066 - DNA, 120 bp, synthetic construct
  source 1..120: mol_type = other DNA
aggctggagtgcaatggcttgatttcggctcaccgcaacctccgcctcccaggttcaagcgattctcctgcctcagcctcccaagtagctgggattacagtgtgtgccaccatgcccggc

SEQ ID NO: 25067 - DNA, 120 bp, synthetic construct
  source 1..120: mol_type = other DNA
caaccgcgcctggccggtttcctttaacttttctaaagagcttctacttttcttccttggcatttgaatttctttggcttcaagccacaaaaatgattgtccttaacttgaacagaatag

SEQ ID NO: 25068 - DNA, 120 bp, synthetic construct
  source 1..120: mol_type = other DNA
tcctggctacctgctgaaatgagtaagtgacaaagggttttttccatcctttccattttgttcatcattcaaagccctagcagagagaatctgatcagcctagtctaggtaaaggctagg

SEQ ID NO: 25069 - DNA, 120 bp, synthetic construct; identical to SEQ ID NO: 7307
  source 1..120: mol_type = other DNA

SEQ ID NO: 25070 - DNA, 120 bp, synthetic construct
  source 1..120: mol_type = other DNA
tggccctacttacccctcagtgttaaatataaggattaaagaaaatatatgcaaaatgcctattaccttacttggcatgtagcaaggttcattaaatgtcagtcccatttcaccccttcc

SEQ ID NO: 25071 - DNA, 120 bp, synthetic construct
  source 1..120: mol_type = other DNA
aactggcataacattggtagcttgaagttggcctttgtagagacagaaagatgtgattgctttctgcacccatcctgagtcatgaccaatactcccataacaaaagacaggcgaacaaaa

SEQ ID NO: 25072 - DNA, 120 bp, synthetic construct
  source 1..120: mol_type = other DNA
tcaagcaatcctcctgactcagcctacagagtagctggaactacaggtgcagaccaccacacacaggtaattttttgtagagatggggtttcaccatgttactcaggctggcctcgaact

SEQ ID NO: 25073 - DNA, 120 bp, synthetic construct; identical to SEQ ID NO: 7308
  source 1..120: mol_type = other DNA

SEQ ID NO: 25074 - DNA, 120 bp, synthetic construct
  source 1..120: mol_type = other DNA
gctactcaggaggctgaggcaggagaatcacttgaacctgggagacagaagttgcagtgagttgagatcgtgccactgcactccagcctaggccacagaatgaaactctgtctcagaaaa

SEQ ID NO: 25075 - DNA, 120 bp, synthetic construct
  source 1..120: mol_type = other DNA
ggagttcaagaccagcctgaccaacatggagaaaccccatctctactaaaaatacaaaattagctgggcatggtggtgcgtgcctgtaatcccagctacttgggaggctgaggcaggaga

SEQ ID NO: 25076 - DNA, 120 bp, synthetic construct
  source 1..120: mol_type = other DNA
ctccatctcaaaaaaaaaaaaaagaaaagaaaagaaatgtgattgaacacaaagtgaatggtcgcatgggaataggctgagggagaaagccagcagagcctgtctgttgggattctgctt

SEQ ID NO: 25077 - DNA, 120 bp, synthetic construct; identical to SEQ ID NO: 7309
  source 1..120: mol_type = other DNA

SEQ ID NO: 25078 - DNA, 120 bp, synthetic construct
  source 1..120: mol_type = other DNA
aaatcggaaatgttgcaagtcagaactttcacctacccccagccctccactgcctctgagagttaaacatttacaggccactgccacatctgctcctttctttccttcacaagttgtgag

SEQ ID NO: 25079 - DNA, 120 bp, synthetic construct
  source 1..120: mol_type = other DNA
ctgccacatctgctcctttctttccttcacaagttgtgagaagaaccaagttagcattaggttgacctgtgagtgacaaaaaccgaatagaacaatggcttcctagatggaagtccattt

SEQ ID NO: 25080 - DNA, 120 bp, synthetic construct
  source 1..120: mol_type = other DNA
ccatgttcaggccaaggggaaagagaaggacaaagaaatacacaccccatcctagtaggtccacagacagaagtaacccgtaacatttctgctcatttcaaataggttggaaggaagtct

SEQ ID NO: 25081 - DNA, 120 bp, synthetic construct
  source 1..120: mol_type = other DNA
tgggattcgagaacatgtaggggagagggagaactggtgttggtgtgatgggaatgagcatagtttgtggaactctgggggagctgactggaatagaaaattaaaaatactgacaaatga

SEQ ID NO: 25082 - DNA, 120 bp, synthetic construct; identical to SEQ ID NO: 7310
  source 1..120: mol_type = other DNA

SEQ ID NO: 25083 - DNA, 120 bp, synthetic construct
  source 1..120: mol_type = other DNA
catccgggggagacatcacatgttggtaggttccgtgatgccccgcaagccgcaaaaccagcaagtttttattagggattttcaaaaggggagggagtgtgtgaataggtgtgggtcaca

SEQ ID NO: 25084 - DNA, 120 bp, synthetic construct
  source 1..120: mol_type = other DNA
cattgataacattttatcaggagacagggttttgagagaaactggtctgaccaaaatttattaggcaggaatttcctcttcctaataagcctgggagcgctatgggacactggggtctat

SEQ ID NO: 25085 - DNA, 120 bp, synthetic construct
  source 1..120: mol_type = other DNA
caatatttctcccatttgcttttgaaagaagagaaatatggctctgttccgcccagctcaccggcggtcagagtttaaggttatctctcttgttccctaaacattgctgttatcctgctc

SEQ ID NO: 25086 - DNA, 120 bp, synthetic construct
  source 1..120: mol_type = other DNA
aggattaagagattaaagtaaagacagtcataggaaatcacaagggtattgactggggaagtgataagtgtccatgaaatcttcacaatttatgtttagagattgcagtaaagacaggca

SEQ ID NO: 25087 - DNA, 120 bp, synthetic construct; identical to SEQ ID NO: 7311
  source 1..120: mol_type = other DNA

SEQ ID NO: 25088 - DNA, 120 bp, synthetic construct
  source 1..120: mol_type = other DNA
tcagctcactgcaacctctgcctcccagattcaagtgattctcctgcctcagcctcccgagtagctggggtaacaggtatgtgccaccatggccagctaatttctttatttttactagag

SEQ ID NO: 25089 - DNA, 120 bp, synthetic construct
  source 1..120: mol_type = other DNA
tggaattacaggcatgagccacggcacccggcctattattattattattttatttcgagacagggtcttcctctgtcactcaggctgaagtgcagtggtgcaatctcagctttctgcaac

SEQ ID NO: 25090 - DNA, 120 bp, synthetic construct
  source 1..120: mol_type = other DNA
ctaggctaattttttttttgtatcttttgaagaggcaagattttgctgtgtccagcctgtctccaggctggtcttgaactcatgagctcaaagcaatctgcccaccttggcctcccaaag

SEQ ID NO: 25091 - DNA, 120 bp, synthetic construct; identical to SEQ ID NO: 7312
  source 1..120: mol_type = other DNA

SEQ ID NO: 25092 - DNA, 120 bp, synthetic construct
  source 1..120: mol_type = other DNA
aaggggacaattgtgtgtggttatcagctgatattcccaaaagctggaaagtgagtggactcactggtgaaaaggacctgagcccaaacagtgtccatgatagtgaatccattttggttg

SEQ ID NO: 25093 - DNA, 120 bp, synthetic construct
  source 1..120: mol_type = other DNA
tgttggatttgaggtggcaaagaaataaggaactggcatgtgactgcgggaaattggagctacaagacaggagttcaggtgaaaagataggactaggtatgtagctattggagtggggga

SEQ ID NO: 25094 - DNA, 120 bp, synthetic construct
  source 1..120: mol_type = other DNA
gcatgatcatagctctctgcagccttgacctcccaggctcaagagatcgtctcacctcagcttcttgagtagctgatactacaggtgtatgtcaccactcccagccaattttttaaacat

SEQ ID NO: 25095 - DNA, 120 bp, synthetic construct
  source 1..120: mol_type = other DNA
ggcctagatgatagtttaaacaagagggaatttgtatatttgtcactttgggggttgctggtggcctttgaaggaagagtttcacagcaggacagagtacaaaaccatatggtgacgtga

SEQ ID NO: 25096 - DNA, 120 bp, synthetic construct; identical to SEQ ID NO: 7313
  source 1..120: mol_type = other DNA

SEQ ID NO: 25097 - DNA, 120 bp, synthetic construct
  source 1..120: mol_type = other DNA
gctggcagttagctcagggacctcagggtttctacctgtggtctagttagagtttctcttgcatagtggctgggttgctgtgagggaaccaggcatgaactgctttttttttttttgagg

SEQ ID NO: 25098 - DNA, 120 bp, synthetic construct
  source 1..120: mol_type = other DNA
gtgatcctcctgcctcagtctccctggtagctggggctactgccaacatgcctggctgatttttgtattattattatcattattttgtagagacagggtctcactatgttgcccaggctg

SEQ ID NO: 25099 - DNA, 120 bp, synthetic construct
  source 1..120: mol_type = other DNA
cagctgcattctttttataacctcatctttttttgatctgcatcacctccctcctaccctattggtcagagtagtcacagccccgctcccattcaaagagagggaacatggcccctacct

SEQ ID NO: 25100 - DNA, 120 bp, synthetic construct; identical to SEQ ID NO: 7314
  source 1..120: mol_type = other DNA

SEQ ID NO: 25101 - DNA, 120 bp, synthetic construct
  source 1..120: mol_type = other DNA
ggtctctctcagatgactcaggtcttctgggttgatgtggcttttattaagaacttgttgtctccaacagcaaatagcattcctaggggctggggctgtttcttcaaggcccctgcctct

SEQ ID NO: 25102 - DNA, 120 bp, synthetic construct
  source 1..120: mol_type = other DNA
atacatatgatgatttaacatgaagatttagtgtgattttgcatctcttcatgggagcagggtcaggaccaggtcctgttgcggaattcagctttggggctgggtagaagactgggatga

SEQ ID NO: 25103 - DNA, 120 bp, synthetic construct
  source 1..120: mol_type = other DNA
ccctggaggggaagggggacgtggtggaggcagttcctggaggcccagctcagagcggagaaaggagccaattaccacctcctcccaagtcacatcccagccctgggaatacttcacagg

SEQ ID NO: 25104 - DNA, 120 bp, synthetic construct; identical to SEQ ID NO: 7315
  source 1..120: mol_type = other DNA

SEQ ID NO: 25105 - DNA, 120 bp, synthetic construct
  source 1..120: mol_type = other DNA
agctttttctctctggttcctcatcctctcctctactcaggtgtaggctgtccctgcctagttggtctgacagtagctccctgcgacttctcatatcacctccgactccccagcctcacc

SEQ ID NO: 25106 - DNA, 120 bp, synthetic construct
  source 1..120: mol_type = other DNA
gtcatcaatccctctggaatgcacccctcctccagacacccatgctccccacatcctttattattttgttaaaactagcaatgccccccccaacccccatgattaaaatagtacatgttt

SEQ ID NO: 25107 - DNA, 120 bp, synthetic construct
  source 1..120: mol_type = other DNA
ccagaactccgtccagcttcaggccttcatgtgtgcttattgcttcttttacctgcagtcatgctctctgtctctcccctccttcaatctgtgagcaaatctactcatccttattatttt

SEQ ID NO: 25108 - DNA, 120 bp, synthetic construct; identical to SEQ ID NO: 7316
  source 1..120: mol_type = other DNA

SEQ ID NO: 25109 - DNA, 120 bp, synthetic construct
  source 1..120: mol_type = other DNA
tcccagcacttacaataatcaatttaacaaatataattaatcaattactatgtgcctggcttggtttcaggtacaggataccaagcaaaatgacccagttcttaccctcgaggaggtctc

SEQ ID NO: 25110 - DNA, 120 bp, synthetic construct
  source 1..120: mol_type = other DNA
caccattgttttatcttgttaatgcatttacttcacagaatcacaggataatggaattggacggcaccatgagatcagcaggcccatctcttcctgtacagatgaggaaactaaagtggt

SEQ ID NO: 25111 - DNA, 120 bp, synthetic construct
  source 1..120: mol_type = other DNA
ctcccctctcctcttattctgttaatccccaagtcctttgattttccccatgaaggtctctccaatctctccacttttcctcatccccacatcaccaggctctaagcctccaacatcatc

SEQ ID NO: 25112 - DNA, 120 bp, synthetic construct; identical to SEQ ID NO: 7317
  source 1..120: mol_type = other DNA

SEQ ID NO: 25113 - DNA, 120 bp, synthetic construct
  source 1..120: mol_type = other DNA
tttcagagtcctcttttctttctttcttttattttattttattttatttttttattttttttgagacagcatcctgctctgttgcccaggctggagtgcaatggcgtgatctcgggttca

SEQ ID NO: 25114 - DNA, 120 bp, synthetic construct
  source 1..120: mol_type = other DNA
atctcttgaccttgtgatctgcctgcctcggcctcccaaagtgctgggattacaggcgtaagccaccacgcctggcctctttctttctctttttttttttttttttgagacagagagagt

SEQ ID NO: 25115 - DNA, 120 bp, synthetic construct
  source 1..120: mol_type = other DNA
tcctgtctcagcttcctgagtagctgggattacaggcgcccaccaccatgcctggctaatttttgatttttagtagagacggggtttcaccatgttggccaggctgttctcaaactcttg

SEQ ID NO: 25116 - DNA, 120 bp, synthetic construct; identical to SEQ ID NO: 7318
  source 1..120: mol_type = other DNA

SEQ ID NO: 25117 - DNA, 120 bp, synthetic construct
  source 1..120: mol_type = other DNA
ccatagtgtagggtccactgggccttttttggttgagcccaccttaccagcctcttctaaacccaactcacctctctgtctgtacgcttttatatcttggaatttttttggttcctccga

SEQ ID NO: 25118 - DNA, 120 bp, synthetic construct
  source 1..120: mol_type = other DNA
tttgaacattagcttctaggagaggccttccctgatctgcatcctgtgttaggtcctctggctatacatgcctatggtaccctgaactccaccttgtgtaagagtcaccacctcagtcct

SEQ ID NO: 25119 - DNA, 120 bp, synthetic construct
  source 1..120: mol_type = other DNA
tactggtagatgctcaatacatttccattgacctgagctgtcctcagagagtatatgtattttgttgtctaatttgggttgaaatctctcagaagggtcctatctgttccttacttgaaa

SEQ ID NO: 25120 - DNA, 120 bp, synthetic construct; identical to SEQ ID NO: 7319
  source 1..120: mol_type = other DNA

SEQ ID NO: 25121 - DNA, 120 bp, synthetic construct
  source 1..120: mol_type = other DNA
cctcgttttggaagagctggaaagatacctgtggtgccagatggtatgagagtacagggtgtgagggcaggagcctacttcttggttgactcttagacttccatggactcatggaaaaga

SEQ ID NO: 25122 - DNA, 120 bp, synthetic construct
  source 1..120: mol_type = other DNA
ccgtctctactaaaaatacaaaaattagctgggcgtggtggtgggtgcctgtaatctcagctactcgggaggctgaggcaagagaatcgcttgaacctgggaggcggaggttgcagtgag

SEQ ID NO: 25123 - DNA, 120 bp, synthetic construct
  source 1..120: mol_type = other DNA
attgactgcaagggaaacaagggagactcctgggttgaagctatcttgtctagatggtggttaaatgggtaaatataaatgtaaaagctcatcggtttgtttcctgctgatagccaatta

SEQ ID NO: 25124 - DNA, 120 bp, synthetic construct; identical to SEQ ID NO: 7320
  source 1..120: mol_type = other DNA

SEQ ID NO: 25125 - DNA, 120 bp, synthetic construct
  source 1..120: mol_type = other DNA
gcctgggcaacacagtgaaaccttgcttaaaaaaagaaaagaaaaggaaaaggagaaaaacatcaaactgcatacatttttaaaatgaaaaaaggaaacaaattactgacacatgcaatg

SEQ ID NO: 25126 - DNA, 120 bp, synthetic construct
  source 1..120: mol_type = other DNA
cacttttgaaaagataaaacgatagcaacagagactagatcaaaatagcaaaatagcagggagtttgtcgggggcaggaaagaggatgggactacaaaggggtagcccgagggagtgttt

SEQ ID NO: 25127 - DNA, 120 bp, synthetic construct
  source 1..120: mol_type = other DNA
tatgttaatttttaaaataaaattatttttaattaagaagagaccttctagcccctcaatagcgcagaggagttcctgaaaggaggcgctaaggaactggctaccctggaaaaggcatac

SEQ ID NO: 25128 - DNA, 120 bp, synthetic construct
  source 1..120: mol_type = other DNA
tctaagtctcggggtctaggaagccagtgtgctttgctcactcctacgtccccggtccctgagacacaggtacgaggtggttgctcattgacagagtgaaggaatgttctagcaccaggc

SEQ ID NO: 25129 - DNA, 120 bp, synthetic construct; identical to SEQ ID NO: 7321
  source 1..120: mol_type = other DNA

SEQ ID NO: 25130 - DNA, 120 bp, synthetic construct
  source 1..120: mol_type = other DNA
tctagaaacatttatgtgaaggtaggcatgtatgtccacatatatgcaacagatatgattgccccacagctcctgggctacaagtaatgtcttgtttctttgtggactcactcaaataga

SEQ ID NO: 25131 - DNA, 120 bp, synthetic construct
  source 1..120: mol_type = other DNA
tgttcctctggccacatggtcagcacttgccagctgcttgcccaggtcagtggggaccattatgagtcaggctgctggtggggtgtggtggctcacgcctgtaatcccagcactttggga

SEQ ID NO: 25132 - DNA, 120 bp, synthetic construct
  source 1..120: mol_type = other DNA
ctgttaccataaattggttttgtctggaaggtttctaacaattgtggtgcaagttttataacccacctggttttgtcttgggaattagaagtctctcaatgttttggagagagattctga

SEQ ID NO: 25133 - DNA, 120 bp, synthetic construct; identical to SEQ ID NO: 7322
  source 1..120: mol_type = other DNA

SEQ ID NO: 25134 - DNA, 120 bp, synthetic construct
  source 1..120: mol_type = other DNA
ctcgtgatcctcccgccttggcctcccaaagtgctgggattacaggcgtgagacaccgtgctcggcctttttttttttttttttttgagacagagtcttggtctgttgccgaggctggag

SEQ ID NO: 25135 - DNA, 120 bp, synthetic construct
  source 1..120: mol_type = other DNA
gtagttttagtagagatagggtttagccatgttggccaggctggtctcgaactcctggcctcaagtgatccgcccacctcagcctcctaaagtgctggtattacaggcatgagccactgt

SEQ ID NO: 25136 - DNA, 120 bp, synthetic construct
  source 1..120: mol_type = other DNA
gtaaacttcttgagcctcagctatttcatcagtaaagtgggaacagtaacatccactgtgattatcagacctatttttaaatacttgaggccctctttccttcaaagggtgtaagaaaat

SEQ ID NO: 25137 - DNA, 120 bp, synthetic construct; identical to SEQ ID NO: 7323
  source 1..120: mol_type = other DNA

SEQ ID NO: 25138 - DNA, 120 bp, synthetic construct
  source 1..120: mol_type = other DNA
cataacctagcctgcttggttgatataccacattacacatttattactaagattatgtgaagtaaaatgtttggaacttcttggtacataataaagctgattttcttcctttcagactct

SEQ ID NO: 25139 - DNA, 120 bp, synthetic construct
  source 1..120: mol_type = other DNA
ctgatcttaagtaatcctctcccacctcagccttccgagtagctgggattgcagacataccctgccatacccagctgatttttttattttttgcagagacagggtcccactatgttgccc

SEQ ID NO: 25140 - DNA, 120 bp, synthetic construct
  source 1..120: mol_type = other DNA
tggctaaagggcaatagaacagagagccactcaaccacaaaagaaaaaggaagaagaaaggatataaagcaacaaaggtacagaaatgtaatacagaggaaaggaaaagaaacaaagtga

SEQ ID NO: 25141 - DNA, 120 bp, synthetic construct; identical to SEQ ID NO: 7324
  source 1..120: mol_type = other DNA

SEQ ID NO: 25142 - DNA, 120 bp, synthetic construct
  source 1..120: mol_type = other DNA
gagagtgcgccactgcactccagcctgggccacagagtgagattctgtctcaaaaaataaaaaataaataaataaataaaaataaaaaaaaacaaaacaaaacaaaacaaaaaaacaggt

SEQ ID NO: 25143 - DNA, 120 bp, synthetic construct
  source 1..120: mol_type = other DNA
caaacaacattttcccttaagacaaatgaacaaacaaactttggcaaatagagcttctgggtgtgcatttatcagtctttccactcggtttactgggcgcctactctgtgcctgacattg

SEQ ID NO: 25144 - DNA, 120 bp, synthetic construct
  source 1..120: mol_type = other DNA
gatggaagtgccaggaggaattaagggaagagaaggggaagcaggccctgcaaaggggctttctggaaaatttgagcctgagtgtcttgaaggataactaggagttagcaatggcaaggt

SEQ ID NO: 25145 - DNA, 120 bp, synthetic construct; identical to SEQ ID NO: 7325
  source 1..120: mol_type = other DNA

SEQ ID NO: 25146 - DNA, 120 bp, synthetic construct
  source 1..120: mol_type = other DNA
agaatcatcctagccgctgcttcatcagtgtctcaggggagtgatggctatctgcggtggtggcgttggggtaaaagaatttaccagccgggcgtagtggctcacgcccataatcccagc

SEQ ID NO: 25147 - DNA, 120 bp, synthetic construct
  source 1..120: mol_type = other DNA
gcttgtaatctaatctcagctactcgagaggctgaggcaggagaattgcttgaacctgggaggcggagcttgcagtgagccgagattgcgccacggcactccagcctgggtgacagagtg

SEQ ID NO: 25148 - DNA, 120 bp, synthetic construct
  source 1..120: mol_type = other DNA
tgtcagctgggatgtctggaaagttgaagtgtttgatggtaagcaggaagtttgtgagttctgctatctgagtaggagctggggcttgtaaagcagccaacagttgagcctgccttttgg

SEQ ID NO: 25149 - DNA, 120 bp, synthetic construct; identical to SEQ ID NO: 7326
  source 1..120: mol_type = other DNA

SEQ ID NO: 25150 - DNA, 120 bp, synthetic construct
  source 1..120: mol_type = other DNA
caccaattagaaaagacctcctggccgctcaggggcctcatgctggatggccagtccaggcactcacttatgctgggtgatcagcccaggcacgaggaaaaagaagggtaaaggaagatc

SEQ ID NO: 25151 - DNA, 120 bp, synthetic construct
  source 1..120: mol_type = other DNA
aatttagagtgagaaagagagcgtctgagttacctaaaacgtgtgtgagtttgccccgaacaagcttctgctgtcaattgtgtcacatatagggatgagggacttgcaattagagaagat

SEQ ID NO: 25152 - DNA, 120 bp, synthetic construct
  source 1..120: mol_type = other DNA
ctggccagttacctttgattgccagagagatactagaagctggttgctgaaagactgaaaaaagaaaaaaagtcaggtcactcacccaaaccaggcaatgatgatcagatgcttccacat

SEQ ID NO: 25153 - DNA, 120 bp, synthetic construct; identical to SEQ ID NO: 7327
  source 1..120: mol_type = other DNA

SEQ ID NO: 25154 - DNA, 120 bp, synthetic construct
  source 1..120: mol_type = other DNA
ctgcaaggaaacaaaggcttgttggggattttgtaggatggctcttaggctgtagagtgttatgtgcagtactgattatgccagggtagcagggaggtaacttgcatttttttttttttt

SEQ ID NO: 25155 - DNA, 120 bp, synthetic construct
  source 1..120: mol_type = other DNA
gctttcccctggtcccaccagcctgatttgttttttaattattactcaacagtgagtgctgtcacatgctgggcattgtgctatgtgctctatgtggagtaactcacttactgtccccct

SEQ ID NO: 25156 - DNA, 120 bp, synthetic construct
  source 1..120: mol_type = other DNA
ttcaagcgattcttctgcctcagcctcctgagtagctgggactacaggtgcgtgccaccacgcccaattaatttttgtgtttttagtagagacgggttttcaccacgttggccaggatgg

SEQ ID NO: 25157 - DNA, 120 bp, synthetic construct; identical to SEQ ID NO: 7328
  source 1..120: mol_type = other DNA

SEQ ID NO: 25158 - DNA, 120 bp, synthetic construct
  source 1..120: mol_type = other DNA
ctatacagatgacctcattccagccttgcaataatagcttctgtgaggtattattattcatagctttaaaaaagccagttgaaggaaatccagtgatttgtcaaaggtcagaagttaggt

SEQ ID NO: 25159 - DNA, 120 bp, synthetic construct
  source 1..120: mol_type = other DNA
taggccactttccactactattgagctgcctcctctctatgaaaatgcttttctggattgagggagacagtcatagagaaatgtgttgttggcatcgatttcctatggttgggcaatggc

SEQ ID NO: 25160 - DNA, 120 bp, synthetic construct; identical to SEQ ID NO: 7329
  source 1..120: mol_type = other DNA

SEQ ID NO: 25161 - DNA, 120 bp, synthetic construct
  source 1..120: mol_type = other DNA
gctaaagaaatctggggaaagatacacataaagatacaaacacagaaggtcaaatactggccaaggatagaatgttgatcccaaaactcatgcacttttctgtggacactgagacttgaa

SEQ ID NO: 25162 - DNA, 120 bp, synthetic construct
  source 1..120: mol_type = other DNA
cctccaccactccctgtctcattcccaaccctgctctccaggccaggctcataaaagttgttactcattttagccattccttcagccaatattcatcttattcattcttacaatcaccct

SEQ ID NO: 25163 - DNA, 120 bp, synthetic construct; identical to SEQ ID NO: 7330
  source 1..120: mol_type = other DNA

SEQ ID NO: 25164 - DNA, 120 bp, synthetic construct
  source 1..120: mol_type = other DNA
tgcaacctctgcctcctgggttctagtgattctcctgccccagcttcccgagtagctgggattacaggaacacgccaccacgcccagctaatttttgtatttttagtagagacggggttt

SEQ ID NO: 25165 - DNA, 120 bp, synthetic construct
  source 1..120: mol_type = other DNA
gagttcgagaccagcctgtccaacatggcaaaaccccatctctactaaaaatacaaaaattagctgggcatgctgccgtgtgcctgtaatcccagctacttgggagactgaggcacaaga

SEQ ID NO: 25166 - DNA, 120 bp, synthetic construct
  source 1..120: mol_type = other DNA
cagcactttgggaggccgaagtgggcggatcacctgaggtcaggaattcaagaccagcctggccaacattgcgaaaccccgtctctacttaaaatacaaaaattagctgggcgtggtggt

SEQ ID NO: 25167 - DNA, 120 bp, synthetic construct; identical to SEQ ID NO: 7331
  source 1..120: mol_type = other DNA

SEQ ID NO: 25168 - DNA, 120 bp, synthetic construct
  source 1..120: mol_type = other DNA
ggtttctccatgttggtcaggctggtctcaaactcctgacctcaggtgatccacccgcctcagcctcccaaagtgctaggattacaggcatgaggcaccacgcccgatcatgattggctt

SEQ ID NO: 25169 - DNA, 120 bp, synthetic construct
  source 1..120: mol_type = other DNA
ttgggtggagacagagtctccttctgttgcccaggctggaatgcagtggtgcgatctcagcccactgcaacctcagtctccctggctcaagtcaacctctcaccaccttagtcccctgag

SEQ ID NO: 25170 - DNA, 120 bp, synthetic construct
  source 1..120: mol_type = other DNA
cctcagcctcccaaagtgcttggattacaggtgtgagctaccaggcctggccacattttgcttattcattcatctattgatggacacttggatggcttccaccttttggctattgtgaat

SEQ ID NO: 25171 - DNA, 120 bp, synthetic construct; identical to SEQ ID NO: 7332
  source 1..120: mol_type = other DNA

SEQ ID NO: 25172 - DNA, 120 bp, synthetic construct
  source 1..120: mol_type = other DNA
cgtgcccggctaatttttgtatttttagtagagatggggtttcaccatcttggccaggctggtcttgaactcctgaccacgtgatccacccacctcggcctcccaaagtgctgggattac

SEQ ID NO: 25173 - DNA, 120 bp, synthetic construct
  source 1..120: mol_type = other DNA
tcatttccggttttacccccaatctctccccttcccagccttaagcaaccactaatctactttttgtctctatagatttgcctacactggacatttcatataaacaatcatacaatatgt

SEQ ID NO: 25174 - DNA, 120 bp, synthetic construct
  source 1..120: mol_type = other DNA
tacattcatcagttgatggacatttatactgtttccaaattttagctattatgaataatgctagtgtgaacattcatgtataagattttgtgtggacatccattttctctttggtataca

SEQ ID NO: 25175 - DNA, 120 bp, synthetic construct; identical to SEQ ID NO: 7333
  source 1..120: mol_type = other DNA

SEQ ID NO: 25176 - DNA, 120 bp, synthetic construct
  source 1..120: mol_type = other DNA
gtgcaccaccactcctggctatttttttatatttttactagagatagggtttcagcatgttggccaggctggtctcaaactcctgacctcaagtgatccgcccacctcggcctcccaaag

SEQ ID NO: 25177 - DNA, 120 bp, synthetic construct
  source 1..120: mol_type = other DNA
attgagttgtaagagtttgttataaattctaaatataagtctcttaactgatacataatttacaaatattttatcccattctatgggtcttttttacctgtttctttctttctttctttt

SEQ ID NO: 25178 - DNA, 120 bp, synthetic construct
  source 1..120: mol_type = other DNA
tgggccaccatgcccagcctattttcttaatgtcctttgaagcacaaaagttttaaattttgaagtccaatttatctatttttttttcctgcttgtgcactgtgtcatagctaagaaacc

SEQ ID NO: 25179 - DNA, 120 bp, synthetic construct; identical to SEQ ID NO: 7334
  source 1..120: mol_type = other DNA

SEQ ID NO: 25180 - DNA, 120 bp, synthetic construct
  source 1..120: mol_type = other DNA
gaaagaaaagaaaaaggactgtgcccggttttgctcaccattatcttcccaggattctcttagccccatgcaagacacatgctacatgctcaataaatatagcctgagtgagtgaacata

SEQ ID NO: 25181 - DNA, 120 bp, synthetic construct
  source 1..120: mol_type = other DNA
gtcttgtcgtcaggctggagtgcagtggcatgatctcggctcactgcaacctccacctcccaggttgaagcgattctcctgcctcagcctcctgagtagctgggactacaggcgcgcacc

SEQ ID NO: 25182 - DNA, 120 bp, synthetic construct
  source 1..120: mol_type = other DNA
acaggcatgagccactgcacctggccttctcatctaattctaattaagagtttttgtataatacttcaaagtttctgaaaatttcctgagttaccaaaagctctttgtcacaagaaacca

SEQ ID NO: 25183 - DNA, 120 bp, synthetic construct
  source 1..120: mol_type = other DNA
ctctactaaaagtacaaaaattagccgggcgtggtggcaagcacctgtaatcccagctactggggaggctgaggcagggaatcgcttgaacccgggggcagaggttgcagtgagccgaga

SEQ ID NO: 25184 - DNA, 120 bp, synthetic construct; identical to SEQ ID NO: 7335
  source 1..120: mol_type = other DNA

SEQ ID NO: 25185 - DNA, 120 bp, synthetic construct
  source 1..120: mol_type = other DNA
ttttatagttggaaagttcttctaaatctcggaccacaacctcctgctgcaaaattgtgccataaatccccatgagtgttcagtgtaaccattgactataggacctggtttgatgtggga

SEQ ID NO: 25186 - DNA, 120 bp, synthetic construct
  source 1..120: mol_type = other DNA
attctgggtgcagcttgccatatcagaggagaatgaagctaggtggcatgaaccccagaaaattttggtgaactcacctcttggaatgaggacaaaggagagtcttgaagcagaaaagag

SEQ ID NO: 25187 - DNA, 120 bp, synthetic construct
  source 1..120: mol_type = other DNA
gatgcatttgagcttctcctattgggtcctttggaaaagaattctttgaactactagaaaattaggacagggtgggggcaaaagaaaacgtatattgagagcttgctccatgtatttgtt

SEQ ID NO: 25188 - DNA, 120 bp, synthetic construct
  source 1..120: mol_type = other DNA
gcttttctaaagcccgtactctttccagtaccctgagccaggggagccagcgggcagaaatgacgtgtgaggtaccctctctctcttcacttccatgtgatctgttactcattttgtcaa

SEQ ID NO: 25189 - DNA, 120 bp, synthetic construct; identical to SEQ ID NO: 7336
  source 1..120: mol_type = other DNA

SEQ ID NO: 25190 - DNA, 120 bp, synthetic construct
  source 1..120: mol_type = other DNA
ctcctgcccaagtagctgggattacaggcacgtgccaccatgcctggcaattttcgtatttttagtagagacagggtttcgcaatgttggccaggctagtcttgaactcctggcctcaag

SEQ ID NO: 25191 - DNA, 120 bp, synthetic construct
  source 1..120: mol_type = other DNA
gcagtcacagagtttcagctgcagactgagggaagaccgatagtatctatgggaaagtgtgtgcacaaaagagacagaaaagaggctggagaatattgattattcacacatgaacaaagt

SEQ ID NO: 25192 - DNA, 120 bp, synthetic construct
  source 1..120: mol_type = other DNA
aagtaccaatgttattaatcccagggattttgctgggaggagttctggcttgttattagggtccttttctttcagatcaagaaaagggagatctaattcatgaagaaactagaaaagtgc

SEQ ID NO: 25193 - DNA, 120 bp, synthetic construct
  source 1..120: mol_type = other DNA
gttacagtaggaatccctttgcctgacaggtggtgaccttcctctggcaaggtccccagactcctaaggcagaagcaatcctcccatctcagtctgccaagtagctgggactacaggtgc

SEQ ID NO: 25194 - DNA, 120 bp, synthetic construct; identical to SEQ ID NO: 7337
  source 1..120: mol_type = other DNA

SEQ ID NO: 25195 - DNA, 120 bp, synthetic construct
  source 1..120: mol_type = other DNA
ccaactacttgggaggctgaggtgggaggattgccccaggggtttgaggctgcagtgagccatgatcatgccactgtactccagcttgggcaacagaatgagaccccatctcaaaaacaa

SEQ ID NO: 25196 - DNA, 120 bp, synthetic construct
  source 1..120: mol_type = other DNA
aggtttttctgtccctttatgtctatgaacaagtacagctgaggccatcagcactgcacacacctggaacagtcttgttaaaacaggacctccctaaaggccaagagctaaggaaagaga

SEQ ID NO: 25197 - DNA, 120 bp, synthetic construct
  source 1..120: mol_type = other DNA
cgcatggaggttcccacccctcctgtgaaaggctcccttctgagttccaggtccctatctgatgacccacctcacctatgcctgcctaatacctgaatggccatctctttcagagaccac

SEQ ID NO: 25198 - DNA, 120 bp, synthetic construct; identical to SEQ ID NO: 7338
  source 1..120: mol_type = other DNA

SEQ ID NO: 25199 - DNA, 120 bp, synthetic construct
  source 1..120: mol_type = other DNA
tgtgtgtgcaatggagggaggcttaaactcagaggctgctggttcctattaagcagagagaggttagaacttagtggcacagaaactgatatcagctaaatatgggttagtcaccaaccc

SEQ ID NO: 25200 - DNA, 120 bp, synthetic construct
  source 1..120: mol_type = other DNA
tttctcttaggtgccaggtgctacacaagatactggctatagcagcgaacaggacagcccgtctcatcctcatggaggtcacaggacaatgagaagaaagacttttttatttttattttt

SEQ ID NO: 25201 - DNA, 120 bp, synthetic construct
  source 1..120: mol_type = other DNA
gttcaagcaattatcctgcctcaggcctcttgagtagctgggattacaggcacctgccaccactcctggctaattttttgtatttttagtagagacaggggtttcatcatgttggccagg

SEQ ID NO: 25202 - DNA, 120 bp, synthetic construct
  source 1..120: mol_type = other DNA
ggtattgggtgttatgaaagaaaagcatggtactgtataatgaggtcatctaatttagtctggggtgacaaggaatgcctactaaagaaggtatcgtttaagacatacctggggaatagc

SEQ ID NO: 25203 - DNA, 120 bp, synthetic construct; identical to SEQ ID NO: 7339
  source 1..120: mol_type = other DNA

SEQ ID NO: 25204 - DNA, 120 bp, synthetic construct
  source 1..120: mol_type = other DNA
ttcctgtgcctctgtttcttgtaaattctatttccaagcatcatgaggataaaagacaatgtatatacgttgtttggcatattacagtcaatgcttggtaactactattgttatttttta

SEQ ID NO: 25205 - DNA, 120 bp, synthetic construct
  source 1..120: mol_type = other DNA
tcggcctcctgagcagctgggactacaggcgcccgcaaccacgcccggctaattttttgtatttttagtagagacggggtttcactgtgttagccaggatggtctcgatctcctaacctc

SEQ ID NO: 25206 - DNA, 120 bp, synthetic construct
  source 1..120: mol_type = other DNA
aagaaaagacatataagtccagatatcattgaacaagagtaaaataataaatcaagtaggaatggaggggaggatatgcatgcagcactagataatatctatacagagagaggatgaggt

SEQ ID NO: 25207 - DNA, 120 bp, synthetic construct; identical to SEQ ID NO: 7340
  source 1..120: mol_type = other DNA

SEQ ID NO: 25208 - DNA, 120 bp, synthetic construct
  source 1..120: mol_type = other DNA
tcgaactcctgacctcgtgagctgtccacctcggcctcccaaagtgctgggattacaggcgtgagccactgcgcccggccccagagtctttatttattatttagagagggtctcactctg

SEQ ID NO: 25209 - DNA, 120 bp, synthetic construct
  source 1..120: mol_type = other DNA
gcctggctaattttttaaaaaaatttttatagagacaaggtcttgccatgttgcccaggctggtcttgaactcttgggctcaagtgatcctcctgcctcagcctcccaaagtgctgggat

SEQ ID NO: 25210 - DNA, 120 bp, synthetic construct
  source 1..120: mol_type = other DNA
tgcttgcaggaaggagagccgaccctttcttgacctctaccaaagacactagagagctttgtaaatcttccaattagatgatacataaatacttccccaggtcttctaggcctgattcaa

SEQ ID NO: 25211 - DNA, 120 bp, synthetic construct; identical to SEQ ID NO: 7341
  source 1..120: mol_type = other DNA

SEQ ID NO: 25212 - DNA, 120 bp, synthetic construct
  source 1..120: mol_type = other DNA
tgcgatctcggctcactgcaacctccgcctcccagattcaagtgattcttcctgcctcagtctcctgagtagctgggattacaggcgcccgccaccatgcccggctaatttttgtatttt

SEQ ID NO: 25213 - DNA, 120 bp, synthetic construct
  source 1..120: mol_type = other DNA
ctattacctgtgtaagcaagtggctttattgggaggcgattttcacaaagaaacaaggttttttaaaaaaggtgtttcccgtaggtttctgcctgtgagaccacctgctgagaaatgcag

SEQ ID NO: 25214 - DNA, 120 bp, synthetic construct
  source 1..120: mol_type = other DNA
gagcctcagcaaaactgcatgtccctaaatgtcaggggtcttcacagacaagtgaagcaaccagaaatactgaattttcagatggacatgtttatcgtactgaatctccatagccaggag

SEQ ID NO: 25215 - DNA, 120 bp, synthetic construct; identical to SEQ ID NO: 7342
  source 1..120: mol_type = other DNA

SEQ ID NO: 25216 - DNA, 120 bp, synthetic construct
  source 1..120: mol_type = other DNA
aaataaaaaacaaaaaattaatttaatttaaaaaactgaggtgagaggatcacctgagcttggggatgtcaaggctgccatgagccatgtttgtgccactgcactccaccatggatgaca

SEQ ID NO: 25217 - DNA, 120 bp, synthetic construct
  source 1..120: mol_type = other DNA
gactcttgttaggaaatgatagagaaaaaacaattgctctataatcaccccttacattgtgacttcttgcaaataaatacaccccactttcagcctcactcatttattataaaattgtaa

SEQ ID NO: 25218 - DNA, 120 bp, synthetic construct
  source 1..120: mol_type = other DNA
ggagcaatggctggtcatggcttctgtcaaacacaaagctctgactggagaagcttggaatcttctggatgtcttttgcaaagatgacaaattcttttagataggctgctgcttgaaggt

SEQ ID NO: 25219 - DNA, 120 bp, synthetic construct; identical to SEQ ID NO: 7343
  source 1..120: mol_type = other DNA

SEQ ID NO: 25220 - DNA, 120 bp, synthetic construct
  source 1..120: mol_type = other DNA
tcagtaagtattacatttgtttaattagtgtctgcctaccaggttcaacccttggcttcatatgtccagcaacacttcctaacttgcccattcttgcccttccttgggtcctgctgttta

SEQ ID NO: 25221 - DNA, 120 bp, synthetic construct
  source 1..120: mol_type = other DNA
ccttattgcagaagtagcaactgaatctaggaaaggttgagtgatttgagagactatagtaggcataggtggggatattggctaattcttagttcttctgacttaggagcatctaggtcg

SEQ ID NO: 25222 - DNA, 120 bp, synthetic construct
  source 1..120: mol_type = other DNA
cagttgggatcaggaacatcaactcatatcacatgagcagaacttgttcatttggggacatccccaataatgccaaaatctatgctccagatgagtaagagtatgaattggaaccacttt

SEQ ID NO: 25223 - DNA, 120 bp, synthetic construct
  source 1..120: mol_type = other DNA
gtctcactctgttgcccaggctggagtgcaatggtgctatctcagctcactgcaacttctgccttcctggttctagtgattttcctgcctcagcctcccaagtagctgggactacaggca

SEQ ID NO: 25224 - DNA, 120 bp, synthetic construct; identical to SEQ ID NO: 7344
  source 1..120: mol_type = other DNA

SEQ ID NO: 25225 - DNA, 120 bp, synthetic construct
  source 1..120: mol_type = other DNA
ggtccaaccctgtggttctggactctgaagtggtctttactgaaaacagcagattcctaggctcagaacagtggcaaaatagcttggaatttaggggtctctgatttttttcagattctc

SEQ ID NO: 25226 - DNA, 120 bp, synthetic construct
  source 1..120: mol_type = other DNA
agctaatttttgtagttttggtagagatcttcctgtcttgcccaagctggtcttgacctcctgggatcaagcaatctgcctgcctcagcctcccaaaatgctgggattgcaggtgtgagc

SEQ ID NO: 25227 - DNA, 120 bp, synthetic construct
  source 1..120: mol_type = other DNA
gggattataatttgtaatcccaaaagtgggatttgggcatgggccaccacacccggctgattttttttttttttttttttttgatagagacaggttttataccacattgcccaggctggt

SEQ ID NO: 25228 - DNA, 120 bp, synthetic construct; identical to SEQ ID NO: 7345
  source 1..120: mol_type = other DNA

SEQ ID NO: 25229 - DNA, 120 bp, synthetic construct
  source 1..120: mol_type = other DNA
ggccccttctcagggaatgttgtgaacattcacccagaggtacatgctgtctgcttgtgtccgtctcttttggtgatgttctaagtcattcgtgatcatcgactaatccattatttcatt

SEQ ID NO: 25230 - DNA, 120 bp, synthetic construct
  source 1..120: mol_type = other DNA
tagactgcttgtgtaagagaaattgcttcatcaaccatggggttcagttatggtttctataggaaaggcagaataaaggatttctctttattaccagttttcaagttgttgagttggtta

SEQ ID NO: 25231 - DNA, 120 bp, synthetic construct
  source 1..120: mol_type = other DNA
caaattgtcccgtctttggcaagtgggagtcttttcacctctttctgacacagtccaaagagactttgatagctttttgagtttctgatttgaccagatatcgaagcacatcttgtacat

SEQ ID NO: 25232 - DNA, 120 bp, synthetic construct; identical to SEQ ID NO: 7346
  source 1..120: mol_type = other DNA

SEQ ID NO: 25233 - DNA, 120 bp, synthetic construct
  source 1..120: mol_type = other DNA
ttatacacagtcttaaaataacaacatcaatattatcgccattaatatgataatgcttttccatgaaagggccatacatgcaaagtggcccccaaaggtcaaaggagctgagaaaccaaa

SEQ ID NO: 25234 - DNA, 120 bp, synthetic construct
  source 1..120: mol_type = other DNA
ctgcaagacaggtggatctcacactgttatctcagacccaaggcttatttatataccatagggaaagagtatatgtgcttagtgcaagacaaaggcaactgtccagaacaggctagaatg

SEQ ID NO: 25235 - DNA, 120 bp, synthetic construct
  source 1..120: mol_type = other DNA
cgacatggtggattagcatccaagatggggccacttttgtctccacaataaaactattctttcagttcctttttttttgtccttagggtatatctcactaggaatatacaatcaaattgc

SEQ ID NO: 25236 - DNA, 120 bp, synthetic construct; identical to SEQ ID NO: 7347
  source 1..120: mol_type = other DNA

SEQ ID NO: 25237 - DNA, 120 bp, synthetic construct
  source 1..120: mol_type = other DNA
atttttaaaatttgaaatagagatggagtttcaccatgttgctcaggctggccttgaactcctgggcttaagcaaacagcccgccttggcctctcaaaaagtgctaggattacagccacc

SEQ ID NO: 25238 - DNA, 120 bp, synthetic construct
  source 1..120: mol_type = other DNA
gctggaaatgcatatgtaattttgctagatacagccagtcaaattcccttccatagagattgcctcattttgcattcctagtcacaatgtactagaatgcctatttccctatagctttgc

SEQ ID NO: 25239 - DNA, 120 bp, synthetic construct
  source 1..120: mol_type = other DNA
ttcgtttgttttgttttttgtttttgtttttgttttgttttttgtttttttgcgattctcctgcctcagcctcctgagtagctgggactacaagtgagcgccaccatgcttgactaattt

SEQ ID NO: 25240 - DNA, 120 bp, synthetic construct; identical to SEQ ID NO: 7348
  source 1..120: mol_type = other DNA

SEQ ID NO: 25241 - DNA, 120 bp, synthetic construct
  source 1..120: mol_type = other DNA
atatagagtctcaaatttgatattactagctcctctctcccactccctcccttcagcttgatttttcctggacattttattattttcttggccaaagctggacatggatcaaaataaacg

SEQ ID NO: 25242 - DNA, 120 bp, synthetic construct
  source 1..120: mol_type = other DNA
tttccagccattcaaggagttatgacctttagggcttgaggaagagtgcattaaaggcctgtccagagaatgattcaagctggagtggatcctgtagacgtccaggagggcccagctcta

SEQ ID NO: 25243 - DNA, 120 bp, synthetic construct
  source 1..120: mol_type = other DNA
gtcgcctgggctggagtgcagtggtgtgatctcggctcactgcaacctctgtctcttgggttcaagtgattctcctgcctcagcctcctgagtagctgggattacaggcgcccgccacca

SEQ ID NO: 25244 - DNA, 120 bp, synthetic construct; identical to SEQ ID NO: 7349
  source 1..120: mol_type = other DNA

SEQ ID NO: 25245 - DNA, 120 bp, synthetic construct
  source 1..120: mol_type = other DNA
tttagtggttatttcctaccaccacgcatcagatactgcgctaagtactttatacagaataaatcatttcatcttgacctgttagttggctagggtggttacttccagaaggaaaaagag

SEQ ID NO: 25246 - DNA, 120 bp, synthetic construct
  source 1..120: mol_type = other DNA
agtttgtggcctccgcaaaaaaggctcataacagtctgtatttctgtttgcttttccatctaaagactaactttactccacttcactgcccagatctgctgagctcagatgtgagcagtg

SEQ ID NO: 25247 - DNA, 120 bp, synthetic construct
  source 1..120: mol_type = other DNA
tcacgtatctgttggataattagatgaaaaaggaggaggaagaggaacgtgtgctggagataaagcggcaggagtggaggaggcgcaggggaagagaacagatttgggaaaaaccagtgg

SEQ ID NO: 25248 - DNA, 120 bp, synthetic construct; identical to SEQ ID NO: 7350
  source 1..120: mol_type = other DNA

SEQ ID NO: 25249 - DNA, 120 bp, synthetic construct
  source 1..120: mol_type = other DNA
ctgtctcaaaaaaaaaaaaaaaaaaaaaaaaaaaatatatatatatatatatataaacacacacacacatatatatacacacacatatatatacacatgtatacacacacatatatatat

SEQ ID NO: 25250 - DNA, 120 bp, synthetic construct
  source 1..120: mol_type = other DNA
caaaaacctgactgccttctacagacaagccaatgtgaaggtattcagctcacacaggttgcaaaagacagagaaacacccaagttacctcaggggatggacattccctaaggatacaca

SEQ ID NO: 25251 - DNA, 120 bp, synthetic construct
  source 1..120: mol_type = other DNA
agaatacagctctaggccgggtgtggttgctcacgcctgtaattccagtactttgggaggctgaggagggtggatcacctgaggtcaggagttcgggactagcctggtcaaaatggtgaa

SEQ ID NO: 25252 - DNA, 120 bp, synthetic construct; identical to SEQ ID NO: 7351
  source 1..120: mol_type = other DNA

SEQ ID NO: 25253 - DNA, 120 bp, synthetic construct
  source 1..120: mol_type = other DNA
gtagtcccagctactcaggaggctgatgcaggagaatcgcttgaacccgggaggcggaggttgcagtaagccgagatcatgccactgcactctagcctggcaacagagcaagactccatc

SEQ ID NO: 25254 - DNA, 120 bp, synthetic construct
  source 1..120: mol_type = other DNA
gtcaggagttcgagaccagcctggtcaacatggtgaaaccctgtctgtattaaaaatataaaaaaaattagccaggcctggtggcaggtgcctgtaatcccagctactcaggaggctgag

SEQ ID NO: 25255 - DNA, 120 bp, synthetic construct
  source 1..120: mol_type = other DNA
taaaagaatacagctcttctagttcccagcccctctggggttcttgtgtgaaagaaaacattttaatgtgtcctttgattacatgaaattcaggcagagtctgatcaaagagatgcccca

SEQ ID NO: 25256 - DNA, 120 bp, synthetic construct; identical to SEQ ID NO: 7352
  source 1..120: mol_type = other DNA

SEQ ID NO: 25257 - DNA, 120 bp, synthetic construct
  source 1..120: mol_type = other DNA
ccctggacttcctgtagttgtagaaaagtgcaggcctgagttatttaactatcaaagaaaaagtgatgctctgtgtgtgggaaaaacaacactcaatgtgctttttcctactctctcact

SEQ ID NO: 25258 - DNA, 120 bp, synthetic construct
  source 1..120: mol_type = other DNA
gacactgtctacctagaggtagcatcagatcccacaggttgagggctcagtccccaagactgccccccgacccacactggtcacaggtttggccttgggaacttctgacccaccagcttc

SEQ ID NO: 25259 - DNA, 120 bp, synthetic construct
  source 1..120: mol_type = other DNA
gtcctccctgtgtgcaacaccttccaggaacctccatgtgttcagctctccagaagctctctgaaccccgtcctcttgggcatttatggagacttcactggacaggcatgactgaagcat

SEQ ID NO: 25260 - DNA, 120 bp, synthetic construct; identical to SEQ ID NO: 7353
  source 1..120: mol_type = other DNA

SEQ ID NO: 25261 - DNA, 120 bp, synthetic construct
  source 1..120: mol_type = other DNA
accatggactaaaacctatatataaattataatagcacagaatcccaaaggctggaaaacttgtgggcttccctttcaccatatagagccactgttctctccacagtgcctgcatattcc

SEQ ID NO: 25262 - DNA, 120 bp, synthetic construct
  source 1..120: mol_type = other DNA
ctgcctcaatctcccaagtagctgggattataagctcctgccaccacgcccgtctaattttttgtatttttgtagagacagggtttcaccatgttggccagcctggttttgaactcctga

SEQ ID NO: 25263 - DNA, 120 bp, synthetic construct
  source 1..120: mol_type = other DNA
cctctctcttcaaatctcctttttctcactttcttctccatcttccttgcccttttagaagcagaaaagggcataccttttctgtgataccttttctctccatcatgaaagtctcggcca

SEQ ID NO: 25264 - DNA, 120 bp, synthetic construct; identical to SEQ ID NO: 7354
  source 1..120: mol_type = other DNA

SEQ ID NO: 25265 - DNA, 120 bp, synthetic construct
  source 1..120: mol_type = other DNA
cagagcaagactccgtctcaaaaaaaaaaaaaaaaaaaaaggaaaaagaaaagaattaagacccacagggaaaattctcattttttatgcttagagttgatgaagaatggatggtcatgt

SEQ ID NO: 25266 - DNA, 120 bp, synthetic construct
  source 1..120: mol_type = other DNA
ccctctggaatgaggatcttattgtgtccagaaatggtgggttcttggtttcactgacttcaagaacgaagccacagaccctcgcggtgagtgttatagcccttaaggtggcgcttctgg

SEQ ID NO: 25267 - DNA, 120 bp, synthetic construct
  source 1..120: mol_type = other DNA
cagcatggacccaaaaaagtgaacagcagcaagacttattgcaaagagcaaaagaacaaaccttccacagtctggaaagggacccaagcgggttgccaatgctggttcgggcagcctgct

SEQ ID NO: 25268 - DNA, 120 bp, synthetic construct
  source 1..120: mol_type = other DNA
tccccatcagattagttagatacagagtttggacacacaggttctccaaggctccaccagagcaactagatacagagtgtggactggtgcactcacaagccttgagctaaacacagggtg

SEQ ID NO: 25269 - DNA, 120 bp, synthetic construct; identical to SEQ ID NO: 7355
  source 1..120: mol_type = other DNA

SEQ ID NO: 25270 - DNA, 120 bp, synthetic construct
  source 1..120: mol_type = other DNA
agtacaccctctgcagccactggcccgggtgctaagtccctcattgcccggggccggcagggctggccggctgctctgagtgcggggccctccaagcccacgcccacccggaactcccgc

SEQ ID NO: 25271 - DNA, 120 bp, synthetic construct
  source 1..120: mol_type = other DNA
agtggtgggctgaagggctcgtcaaatgccgccaaagtgggagcccaggtagaggaggtggcaagagcaagcgagggctctgaggactgccagcacgctgtcacctctcattatggccca

SEQ ID NO: 25272 - DNA, 120 bp, synthetic construct
  source 1..120: mol_type = other DNA
tagggaggactaattctggcttctgtggctcacttcaggagagaatgaggggcgagagacaggaggggcagaaggtcagagggatcttggtttcgaggctgcttctgagtcttcccaatg

SEQ ID NO: 25273 - DNA, 120 bp, synthetic construct; identical to SEQ ID NO: 7356
  source 1..120: mol_type = other DNA

SEQ ID NO: 25274 - DNA, 120 bp, synthetic construct
  source 1..120: mol_type = other DNA
tggtctcgaattcctgaccccaggtgatccgcctgccttggcctcacgcctgctgggattataggcgtgagccactgcatccggcccccaatctcttctcaatcgcattcatcaatattt

SEQ ID NO: 25275 - DNA, 120 bp, synthetic construct; identical to SEQ ID NO: 1444
  source 1..120: mol_type = other DNA

SEQ ID NO: 25276 - DNA, 120 bp, synthetic construct
  source 1..120: mol_type = other DNA
tgggcaacacagtaggaccccgtctttataaaaaatacaaaaattagccaggcatgatgctacacacctgtagtctgtagtcagcttctggggaggctgagctgggaggactgcttgagc

SEQ ID NO: 25277 - DNA, 120 bp, synthetic construct; identical to SEQ ID NO: 7357
  source 1..120: mol_type = other DNA

SEQ ID NO: 25278 - DNA, 120 bp, synthetic construct
  source 1..120: mol_type = other DNA
ctccagactggggtgagacccggtctctaaacagaaatcccagttttacagcttaaaaaaaaatcaggctatctggcatcatgcgacctacaccgattgctagtaacagttgatggagct

SEQ ID NO: 25279 - DNA, 120 bp, synthetic construct
  source 1..120: mol_type = other DNA
agcagacaaattttagtttctacctatatctttactgaaaaaagggaaaacagagaacaagagccaggtctttcttatcccaagcctgctacctcatttgcattttctgctttgcccctg

SEQ ID NO: 25280 - DNA, 120 bp, synthetic construct
  source 1..120: mol_type = other DNA
tataaggttaatatttaggccgggcacagtggctcacgcctgtaatcccagcactttgggaggccaaagcgggtggatcacttgaggtcaggagttcgagaccagcctggccaacatggt

SEQ ID NO: 25281 - DNA, 120 bp, synthetic construct; identical to SEQ ID NO: 7358
  source 1..120: mol_type = other DNA

SEQ ID NO: 25282 - DNA, 120 bp, synthetic construct
  source 1..120: mol_type = other DNA
tagttactctgtgaaggatctgttacttatcttgctatttttcttgtttgactaacagcctatttatatggataagatctgagaatcggttactaggccgtatgaaagaggagtcttctt

SEQ ID NO: 25283 - DNA, 120 bp, synthetic construct
  source 1..120: mol_type = other DNA
gcagggatcctaatagcatagcaatattggcaagaacctagtgtaattaaccatgttttctagtttctatattctgatacttccacatcgtggggtcttgctgaccctggagtgactgcc

SEQ ID NO: 25284 - DNA, 120 bp, synthetic construct
  source 1..120: mol_type = other DNA
ttcccctagtcagcccaggaccagtactagagagctagggacagcccctatgccccagaggctgctgaaattattcaaactagccgagcctgaacttgcttacctgcctgcacactcctg

SEQ ID NO: 25285 - DNA, 120 bp, synthetic construct; identical to SEQ ID NO: 7359
  source 1..120: mol_type = other DNA

SEQ ID NO: 25286 - DNA, 120 bp, synthetic construct
  source 1..120: mol_type = other DNA
caggagtttgagactagcccggccaacatagtgaaatcctgtctctactaaaaaaaaaaaaaaaaaaaaaaatagctgggtgtagtggcatattcctgtaactccagctacttgggaggc

SEQ ID NO: 25287 - DNA, 120 bp, synthetic construct
  source 1..120: mol_type = other DNA
aaaaataaaaagaatctcatttctgggtggtgtggtggctcacacctataatcccagccccttgtgaggttaggataggaagatcacttgaggccaggagcttgagaccagcctggggaa

SEQ ID NO: 25288 - DNA, 120 bp, synthetic construct
  source 1..120: mol_type = other DNA
ggtgtttgaggttacagtgagctatgatcgcaccactgcactctagtgtgggcaacagaaggagatggagtgagagtgtccctaaagataataagaatctcatttcttaatttattttcc

SEQ ID NO: 25289 - DNA, 120 bp, synthetic construct; identical to SEQ ID NO: 7360
  source 1..120: mol_type = other DNA

SEQ ID NO: 25290 - DNA, 120 bp, synthetic construct
  source 1..120: mol_type = other DNA
acatctcattggccagccctatgccacaccaccactcctacctgcatggcagtttgaggcaaaaaaaaatttaaagcatagaactttgctaaacaaaataaaattggggttctgctagaa

SEQ ID NO: 25291 - DNA, 120 bp, synthetic construct
  source 1..120: mol_type = other DNA
gtcttactctgttgcccaagttggagtgcagtggtgtgatctcggctcactgcaagctccacctcctggattcacaccattctcctgcctcagcctcccgagtagctgggactacaggcg

SEQ ID NO: 25292 - DNA, 120 bp, synthetic construct
  source 1..120: mol_type = other DNA
accgcaggcgtgagccaccgcgcccagccctacatggagctctttaccctggcctgtgctttcctctctatttactttttttttttttttctttcctgagagggagtcttgctctgtcgc

SEQ ID NO: 25293 - DNA, 120 bp, synthetic construct
  source 1..120: mol_type = other DNA
agctaatttttgtatttttagtagagaacagggtttcatcatgttggccaggctggtctcaaactctctacctcaagtgatctgctcgtcttggcctcccaaagtgctagaattacaggc

SEQ ID NO: 25294 - DNA, 120 bp, synthetic construct; identical to SEQ ID NO: 7361
  source 1..120: mol_type = other DNA

SEQ ID NO: 25295 - DNA, 120 bp, synthetic construct
  source 1..120: mol_type = other DNA
cacatcacataaggggaagataaagggagactctccgtggctcttcctccttttttccaaggctgatgttggccctttctgaaaatgctttaatgtgtagaaagcagcccacagataggc

SEQ ID NO: 25296 - DNA, 120 bp, synthetic construct
  source 1..120: mol_type = other DNA
tcccacctcagcctcctaagtagctgagactacaggtgtaccaccacgcttaggtaagtttaaaaaaaaaagttttgtagagatgggggtcttactatgttgcccaggccgatctcaaac

SEQ ID NO: 25297 - DNA, 120 bp, synthetic construct
  source 1..120: mol_type = other DNA
atttctttatggccatcttctggacaaaaagtcaaggagagtttagagtaataattccagtttttatggcttttgcttcggggaaaaagggttctagtttctaggacctaccgtggggaa

SEQ ID NO: 25298 - DNA, 120 bp, synthetic construct
  source 1..120: mol_type = other DNA
ttagttaagtactcatcgccatactttggggtattgtgttctgaaccccaacagaaacaactcactctctcggcatcagccttgtgcctatacccacaggagcaggagcacaagccattg

SEQ ID NO: 25299 - DNA, 120 bp, synthetic construct; identical to SEQ ID NO: 7362
  source 1..120: mol_type = other DNA

SEQ ID NO: 25300 - DNA, 120 bp, synthetic construct
  source 1..120: mol_type = other DNA
tttctcctgctacccctccccttgtttgtttttaagatggatttgttcggaacacatcttttgctctttccttctcctttctgcctggaatgtaaatgtgatgtctgaaggcagagcaac

SEQ ID NO: 25301 - DNA, 120 bp, synthetic construct; identical to SEQ ID NO: 7363
  source 1..120: mol_type = other DNA

SEQ ID NO: 25302 - DNA, 120 bp, synthetic construct
  source 1..120: mol_type = other DNA
gtagctgagattacaggcgcccaccacatctggctaatttttttgtatttttagtggagacggggtttcacaatgttggctaggctggtcttgaactcctgacctcaggtgatccaccct

SEQ ID NO: 25303 - DNA, 120 bp, synthetic construct
  source 1..120: mol_type = other DNA
gtgtccggaattggtgggttcttggtctcactgacttcaagaatgaagccacggaccctcacggtgagtgttatagctcttaaggtggcatgtctggagtttgttctttctgatgttcag

SEQ ID NO: 25304 - DNA, 120 bp, synthetic construct
  source 1..120: mol_type = other DNA
cagtagcaagatttattgcaaagagcaaaagaacaaagcttacacactgtggaaggggaccggagcaagttgccactgttggctggggcagcctgcttttattctcttatctggccacac

SEQ ID NO: 25305 - DNA, 120 bp, synthetic construct
  source 1..120: mol_type = other DNA
agagtatggacacacgggttctccaaggccccaccagagcagctagatacagagtgtcgattggtgcactcacaaaccctgagctagacacagggtgctgattggcgtgtttacaaacct

SEQ ID NO: 25306 - DNA, 120 bp, synthetic construct; identical to SEQ ID NO: 7364
  source 1..120: mol_type = other DNA

SEQ ID NO: 25307 - DNA, 120 bp, synthetic construct
  source 1..120: mol_type = other DNA
gagctagacataaagactctccacgtccccaccagactcaggagcccagctggcttcacccagtggatccagcaccggggctgcaggtggagctgcctgccagtcctgggccatgcgctc

SEQ ID NO: 25308 - DNA, 120 bp, synthetic construct
  source 1..120: mol_type = other DNA
gggctgcaggtcccgagccctgccccgtgcgaaggcagctaaggcctggcgagaaatcgagcgcaccgccggtgggccggcactgctgggggacctagtacaccctccgcagccgctggc

SEQ ID NO: 25309 - DNA, 120 bp, synthetic construct
  source 1..120: mol_type = other DNA
cccggttccgctcgcgcctctccctccacacctccctgcaagctgagggagccggctctggccttggccagcccagaaaggggctcccatagtgcagcggtgggctgaagggctcctcaa

SEQ ID NO: 25310 - DNA, 120 bp, synthetic construct
  source 1..120: mol_type = other DNA
attctcctgcctcagcctcctgagtaggtaggattacaggcgtgtgccaccacacccggctaatttttgtacttttagtggagacagggtttcaccatgttcgccaggctggtctcaaac

SEQ ID NO: 25311 - DNA, 120 bp, synthetic construct; identical to SEQ ID NO: 7365
  source 1..120: mol_type = other DNA

SEQ ID NO: 25312 - DNA, 120 bp, synthetic construct
  source 1..120: mol_type = other DNA
tgactacttagcatgcgtcatgtgttaaaaccctaacctcgttagcaattataaccactatcagtatcccatactctggtttttttagggctttcccaaggcaaatgggaagatttgctg

SEQ ID NO: 25313 - DNA, 120 bp, synthetic construct
  source 1..120: mol_type = other DNA
tgtcctcacaaattttcacttccttcatttaagaacaaggactagagtgttctcacttaattacaactgggataggtgggagggagttacccatgtgggcaacattagggaaactttttc

SEQ ID NO: 25314 - DNA, 120 bp, synthetic construct
  source 1..120: mol_type = other DNA
agcccttagggactacaggcgcacaccaccacaccccattcatttttgcatttcttgtggagatgcgttttttccatgtttctcaggctggtcttgaattcctgggctcaagagatcctt

SEQ ID NO: 25315 - DNA, 120 bp, synthetic construct; identical to SEQ ID NO: 7366
  source 1..120: mol_type = other DNA

SEQ ID NO: 25316 - DNA, 120 bp, synthetic construct
  source 1..120: mol_type = other DNA
tctactaaaaatacaaaaatcattcggccgaggtggtggttgcctgtaatccaagctactcgggaggctgaggcaggagaatcgcttgaacctgggaggcggaggttgcagtgagctgag

SEQ ID NO: 25317 - DNA, 120 bp, synthetic construct
  source 1..120: mol_type = other DNA
tgcctctctctagcctcccagggtatttctgtagtctcaatatttggccttagctataagaaaatttccttaccattactctttattgtgcaattctctgaagatattcttctgatggca

SEQ ID NO: 25318 - DNA, 120 bp, synthetic construct
  source 1..120: mol_type = other DNA
tgcacggagacactttccttctctggaacccatggcacttagctgctatggcttttgtgctcatcagcaaactggaatgcgcttccattagacttatcctttcaccttagattccttaag

SEQ ID NO: 25319 - DNA, 120 bp, synthetic construct; identical to SEQ ID NO: 1456
  source 1..120: mol_type = other DNA

SEQ ID NO: 25320 - DNA, 120 bp, synthetic construct
  source 1..120: mol_type = other DNA
caacctccgtctcccgggttcaagcgattctcctgcctcagcctcccgagtagctgggactacagacatgcgccaccacgcccggctaaatttttgtgttttaatagagacggggtttca

SEQ ID NO: 25321 - DNA, 120 bp, synthetic construct
  source 1..120: mol_type = other DNA
attttctttacagattcttcaagctgtaaaataaatgaataccatctctcatcacctatacctaggaagtgctgagtaactctttcctgtggacccactgagtcagaggttcacatctgg

SEQ ID NO: 25322 - DNA, 120 bp, synthetic construct
  source 1..120: mol_type = other DNA
caaatctccatatgcagagtccttgatactgttcggagtgcttccatacccatgcccaaactggacccagcgggggtggctgccgagaaaagaaacttgacagagcaggttcaaagggtc

SEQ ID NO: 25323 - DNA, 120 bp, synthetic construct; identical to SEQ ID NO: 7368
  source 1..120: mol_type = other DNA

SEQ ID NO: 25324 - DNA, 120 bp, synthetic construct
  source 1..120: mol_type = other DNA
acttcaacaaatgagagagaggtcagctgtaaggtaagaaccaagaagggcccactggatttggcgtggagcaaagggatggagtgagtggagtaaaagcgaagatggaaggtggatttc

SEQ ID NO: 25325 - DNA, 120 bp, synthetic construct
  source 1..120: mol_type = other DNA
ccagccatcagctccttcagggtcccctggctgcaaagagctgcctggtccctcttcctggtcacaccctttctcctggcagctccatgtggtgactaagcagggctggatataaatgtc

SEQ ID NO: 25326 - DNA, 120 bp, synthetic construct
  source 1..120: mol_type = other DNA
tgcttccttgcccttattcacaggtgttaatacctaattaacatcttgcatcccaactttatctcagtatctgtttccagagaacatggtctccaacagaatcatgggaacaagtcttct

SEQ ID NO: 25327 - DNA, 120 bp, synthetic construct; identical to SEQ ID NO: 7369
  source 1..120: mol_type = other DNA

SEQ ID NO: 25328 - DNA, 120 bp, synthetic construct
  source 1..120: mol_type = other DNA
cccccaagtagctgggactacaggtgtgcaccaccacacctggctaatttttttttttttcttgagatggagtttttgctcttgttgcccaggctggagtgtgatggcacgatctcggct

SEQ ID NO: 25329 - DNA, 120 bp, synthetic construct
  source 1..120: mol_type = other DNA
ttctccatgttggtcaggctggtctcgaactgctgacctcaggtgatatgcctgccgcggcctcccaaagtgttgggattacaggcgtgagccaccgtgcccagctaatttttgtatttt

SEQ ID NO: 25330 - DNA, 120 bp, synthetic construct
  source 1..120: mol_type = other DNA
tgcttttcaacattcatctttttttccatctttgggaatcagagccacacaatctccaacttctaatacctttctgcctctttgtgatttctcagagatcgttgatagtgacttggagat

SEQ ID NO: 25331 - DNA, 120 bp, synthetic construct; identical to SEQ ID NO: 7370
  source 1..120: mol_type = other DNA

SEQ ID NO: 25332 - DNA, 120 bp, synthetic construct
  source 1..120: mol_type = other DNA
agatcaatgccctggtactccttatgtagtgagtgatagatgctcacggaaaatggggagaaaactaaggggtgaaagggaataactctaaaaaggacacgttcacactttctgacagca

SEQ ID NO: 25333 - DNA, 120 bp, synthetic construct
  source 1..120: mol_type = other DNA
tgaaaatgcccctgagaaagctcatttctaattcttactcctagctggctttttatacacaggcaggggagacccatctttggaattttaaggttcaaaaaggaatttgtctgtacctga

SEQ ID NO: 25334 - DNA, 120 bp, synthetic construct
  source 1..120: mol_type = other DNA
ctgttgagcccttgaatctcggagtggatgaagagggtgatgagggattgtagctaatattagcattgttgagctaaaataccatcatattttgtcaggagaagtgctgactgtcctgtg

SEQ ID NO: 25335 - DNA, 120 bp, synthetic construct; identical to SEQ ID NO: 7371
  source 1..120: mol_type = other DNA

SEQ ID NO: 25336 - DNA, 120 bp, synthetic construct
  source 1..120: mol_type = other DNA
tggcccaagggaacactcagtgcctagatgtgtgaagtgggatgcagctcctggtgaaggcagaagtcctttaaaagtttattgactgcaaagaataaaccaaaatgggccgggtgcagt

SEQ ID NO: 25337 - DNA, 120 bp, synthetic construct
  source 1..120: mol_type = other DNA
aacatggtgaaaccccgtctctactaaaaatacaaaaattagctgggcatggtggcgggtgcctgtaatcccagctacttgggaggctgaggcaggagaatcgcttgaactcgggaggca

SEQ ID NO: 25338 - DNA, 120 bp, synthetic construct
  source 1..120: mol_type = other DNA
ccatttcttcttcttcttctttcacttctccttctccttcttcttcttcttcctcttccccttcttcttcttctcctccttctccttctttttttttggagatggagtcttgctctcttg

SEQ ID NO: 25339 - DNA, 120 bp, synthetic construct; identical to SEQ ID NO: 7372
  source 1..120: mol_type = other DNA

SEQ ID NO: 25340 - DNA, 120 bp, synthetic construct
  source 1..120: mol_type = other DNA
gaattgcttgagccaggagtttgagaccagcctaggcaacatagtgagacctcatctctgcaaaagttttaaacaattagccagacatggtggtgcatgcctgtagtcccagctactcag

SEQ ID NO: 25341 - DNA, 120 bp, synthetic construct
  source 1..120: mol_type = other DNA
acacaaaaactggtgtcgggaaaagtagttgggaagctatggaaattgctccagtgagaggtgatgaacatctgaattagtggcaggagtctctctgaacctattcagtttcaggggatt

SEQ ID NO: 25342 - DNA, 120 bp, synthetic construct
  source 1..120: mol_type = other DNA
gtgagccaagatggcaccattgcactccaggctgggtgacagtgcgagactccatctcgaaaaaaaaaaaaaaaaaaggcagtggttaagggactgagtggggacagatgggagatggat

SEQ ID NO: 25343 - DNA, 120 bp, synthetic construct; identical to SEQ ID NO: 7373
  source 1..120: mol_type = other DNA

SEQ ID NO: 25344 - DNA, 120 bp, synthetic construct
  source 1..120: mol_type = other DNA
gggaccactggctcattccagacagtgcacaagcatctcttcctggtgcaaccttccatagcacgttccgcttggatcactttctctttctctgttttataattgtccattacatacagc

SEQ ID NO: 25345 - DNA, 120 bp, synthetic construct
  source 1..120: mol_type = other DNA
agaggttttagaaggctatgctccagtaaggaaaaattaatggaagtaattgttcagtaagcagttaccaatctaagttttataaaattgatactctctttatgagtgtattttagtaaa

SEQ ID NO: 25346 - DNA, 120 bp, synthetic construct
  source 1..120: mol_type = other DNA
cctcagcctccgattacaggcgcccgccaccatgccttgctaatttttgtattttatagtagagacggggttttgccatgttggccaggctggtctcgaactcctgacctcaagtgatct

SEQ ID NO: 25347 - DNA, 120 bp, synthetic construct; identical to SEQ ID NO: 7374
  source 1..120: mol_type = other DNA

SEQ ID NO: 25348 - DNA, 120 bp, synthetic construct
  source 1..120: mol_type = other DNA
gtctgaatttctcacacagtacaatataaaatacaaatagctgtggggtattttctaggtgctggttactgttctaagagctttaaatggagtaattcagttaatcctgcctcacggtac

SEQ ID NO: 25349 - DNA, 120 bp, synthetic construct
  source 1..120: mol_type = other DNA
cattccatttttttctattaaatataaaaattagccaggcgcagtggctcacacctgtaatcccagcacattgggaggccgaggagggtggatcacttgaggtcaggagttcaagaccag

SEQ ID NO: 25350 - DNA, 120 bp, synthetic construct
  source 1..120: mol_type = other DNA
ttgaatgtgggaggtggagtttgcagtgagccaagattgtgccattgcactccagcctgggtgacagagcgagactttgtctcaaaagaaaaaaaaaaaaatttaaaaactttttgtagt

SEQ ID NO: 25351 - DNA, 120 bp, synthetic construct; identical to SEQ ID NO: 7375
  source 1..120: mol_type = other DNA

SEQ ID NO: 25352 - DNA, 120 bp, synthetic construct
  source 1..120: mol_type = other DNA
attttcccaaatattaataattatttctcctgaaccatttattgcataatatttttctgttccattgttatatgacagcacgtttctgcctggttgtaatctcatagtggcttgattttt

SEQ ID NO: 25353 - DNA, 120 bp, synthetic construct
  source 1..120: mol_type = other DNA
gtcatgcatcaagtgttgatgttgctggctgcctttctcagtgttagtttttatgtgttttggaatttcagcttccaggttcatttccaggctttctctgtctcccttctcttgttcctc

SEQ ID NO: 25354 - DNA, 120 bp, synthetic construct
  source 1..120: mol_type = other DNA
ccccatggctgtgggtggctcagttaagcccaggtgtggtgccgtttggtaaccacgggcctccctaggccacagtcccaggcgaagttagtagcaagctatttcagtcttcttgaagag

SEQ ID NO: 25355 - DNA, 120 bp, synthetic construct; identical to SEQ ID NO: 7376
  source 1..120: mol_type = other DNA

SEQ ID NO: 25356 - DNA, 120 bp, synthetic construct
  source 1..120: mol_type = other DNA
ttatactacatatttggggatcactaacaattttttccggtcacactctaatcactttctcaaggctggatcaggtgcgagactctgtagcagtaacctgaagttgagaattgaggaagt

SEQ ID NO: 25357 - DNA, 120 bp, synthetic construct
  source 1..120: mol_type = other DNA
catcagaggtcttgagccagggtggaatccagctccagggagcatatgagagcaaacaatggaagcttgacatgatcactggatgaacatctgaagtttcatatgtgatgggatctcccc

SEQ ID NO: 25358 - DNA, 120 bp, synthetic construct
  source 1..120: mol_type = other DNA
agaaaacaatagtgcacatcacagccaggaggcacccagagcattgtgttgctgtgttttttgaacccagtgagttaactgtccagtgttccacatcattctgacctgggtcaacagatg

SEQ ID NO: 25359 - DNA, 120 bp, synthetic construct
  source 1..120: mol_type = other DNA
gcaatataagccaaacaaggcttcctgctggagcgcctcttggctaattcaggggcatgagaggcagcatctaaccttgcccaggggccctggctcccctttactatggggggtggcctg

SEQ ID NO: 25360 - DNA, 120 bp, synthetic construct; identical to SEQ ID NO: 7377
  source 1..120: mol_type = other DNA

SEQ ID NO: 25361 - DNA, 120 bp, synthetic construct
  source 1..120: mol_type = other DNA
gtggatctcagctttccagaatatttgtgtgcatgtgagtgagcacatctgacttaatttttatattcagtatagaatcatgactcagctttccctgttaatgtagtcaacttaagctac

SEQ ID NO: 25362 - DNA, 120 bp, synthetic construct
  source 1..120: mol_type = other DNA
tgcagtcatttagcatcttcctctttcagagtcctgtatcccagcgatggggatcaagattcagacttaaggacaccctacctggaccttggcaaggagatttttacagtgggaatctgg

SEQ ID NO: 25363 - DNA, 120 bp, synthetic construct
  source 1..120: mol_type = other DNA
ctcagcccctccgcaacccccacctgctcgcttctccttcacctcctctcctgttcacctgtaccttctttccttagatgtggccacactctgttcccccaggcagcgtcttcactgagt

SEQ ID NO: 25364 - DNA, 120 bp, synthetic construct; identical to SEQ ID NO: 7378
  source 1..120: mol_type = other DNA

SEQ ID NO: 25365 - DNA, 120 bp, synthetic construct
  source 1..120: mol_type = other DNA
ctcaattcttgcctctttggtcacttactgggatcttattgggaaactgctgatcaccagtttcagatgtttctattgggagactgcctgtctctggtgccagctgtgaccaattatttt

SEQ ID NO: 25366 - DNA, 120 bp, synthetic construct
  source 1..120: mol_type = other DNA
gatgagaagacatacaaaatagaggctactttaaaaaaaaaattctcagagtgtagtgtgtaaacgttcacctccactataaagacctccttgccaggggtaggaagcctttagtctgaa

SEQ ID NO: 25367 - DNA, 120 bp, synthetic construct
  source 1..120: mol_type = other DNA
acaattctttctttttctaagtcatctgcatttagtatccactgaccaagcaggcaggaaatgtaattgaagttttattagggactcccctatctcttctcctatggggtccagtgacca

SEQ ID NO: 25368 - DNA, 120 bp, synthetic construct; identical to SEQ ID NO: 7379
  source 1..120: mol_type = other DNA

SEQ ID NO: 25369 - DNA, 120 bp, synthetic construct
  source 1..120: mol_type = other DNA
tctttttttttctttccaacttcttctcttggtgaggctacgcaaaatcttctggggccaggatgtgcaaacgcttcctggaatggggtagaacagtgacaaaacaggaagaacaaaaaa

SEQ ID NO: 25370 - DNA, 120 bp, synthetic construct
  source 1..120: mol_type = other DNA
ccagaagaagtgggacatttggagccccagacaaaccaatgacacagactgagacactgtggagctggatgcctttctgtgtgtttgttagagtatgagaagcccgctgggaacaagtaa

SEQ ID NO: 25371 - DNA, 120 bp, synthetic construct
  source 1..120: mol_type = other DNA
gtggctcacacatgtaatctcaggtacttgggaggctgaggcaggaggatcacttgagcccaggggttccaggctgcagtgagctgcaattttgccactgtactccaacctgggtgacag

SEQ ID NO: 25372 - DNA, 120 bp, synthetic construct; identical to SEQ ID NO: 7380
  source 1..120: mol_type = other DNA

SEQ ID NO: 25373 - DNA, 120 bp, synthetic construct
  source 1..120: mol_type = other DNA
ggggaggtggcagaaatggcagacaggtttgtggggtcagacagaaagctctgtcttgcttcgtctttgagccaaaggggacctggtgcccctgagttgggggcactgtgtggtgcccag

SEQ ID NO: 25374 - DNA, 120 bp, synthetic construct
  source 1..120: mol_type = other DNA
cttcagcaggagaaaggggaggaaaattgtggcatatgcatgcagtggaatatttctcagcactgaaaatgaatgttcctataactgcatgtgataacaggcaaatctgcagacataaag

SEQ ID NO: 25375 - DNA, 120 bp, synthetic construct
  source 1..120: mol_type = other DNA
aaaaggcacaggagggggcccctggcatcctgggaatgtcctttccttaatctaggcactggttgcatgcatatgctgtttgcgaaagttctttgagctgtacatttaaaattaatgcac

SEQ ID NO: 25376 - DNA, 120 bp, synthetic construct
  source 1..120: mol_type = other DNA
gaggtcgggagttcgagaccagcctgaccaacatggtgaaaccccatctctactaaaaatacaaaaattagccgggtgtggtggcacatgcctgtaatcccaccttcctggaggctggga

SEQ ID NO: 25377 - DNA, 120 bp, synthetic construct; identical to SEQ ID NO: 7381
  source 1..120: mol_type = other DNA

SEQ ID NO: 25378 - DNA, 120 bp, synthetic construct
  source 1..120: mol_type = other DNA
actcagtagattgtcttcgccagtgtggtgggcatcatctaatctgctgagagcctgaacagaacgaaaagaggaaagagaaattcactactgtttcttcccgcctgcgcgctggaactg

SEQ ID NO: 25379 - DNA, 120 bp, synthetic construct
  source 1..120: mol_type = other DNA
ttcgctgatggcagactgtgggactttagagcctccataataatgtgagccaattcctcattctatctatcaatctatatatcgattgattgatcgatcgatagatcgatctatctaatc

SEQ ID NO: 25380 - DNA, 120 bp, synthetic construct
  source 1..120: mol_type = other DNA
agctcattgcagccttgacttcccaggctcaagcaatcctccagcctcatcctcctgagtagctaggactacaggtgcccaccaccatgcccaactaatttttaaactttttttacagat

SEQ ID NO: 25381 - DNA, 120 bp, synthetic construct; identical to SEQ ID NO: 7382
  source 1..120: mol_type = other DNA

SEQ ID NO: 25382 - DNA, 120 bp, synthetic construct
  source 1..120: mol_type = other DNA
accagagccactaagttttatatatgccattgttgaagccaaccccaactcacctggcaatcagctggaggaaggggactacttctattcattgcagatttaaaagttggctacatatcc

SEQ ID NO: 25383 - DNA, 120 bp, synthetic construct
  source 1..120: mol_type = other DNA
gaagtgatgctaaaccagcttccagcacaggattcaatagcaccttccacctcctgtctcctggagcattctctgggagcctgaatcaccatgtaaaaagttcaaaatcaggctgggcac

SEQ ID NO: 25384 - DNA, 120 bp, synthetic construct
  source 1..120: mol_type = other DNA
attagctggatgtggtggtgcgcacctgtaatcccagctactcagggggctgaggcaggagaattgcttgaaccccggaggtggaggttgcagtgagctgagattgcaccactgcactcc

SEQ ID NO: 25385 - DNA, 120 bp, synthetic construct; identical to SEQ ID NO: 7383
  source 1..120: mol_type = other DNA

SEQ ID NO: 25386 - DNA, 120 bp, synthetic construct
  source 1..120: mol_type = other DNA
aagttcaaattccctgccactgcctgctggagtggccgagtatggtactctggccaaccactagcagagcccagctgtccccacaaaggtgacaaaaatgtgaaggaagctgtcttgaac

SEQ ID NO: 25387 - DNA, 120 bp, synthetic construct
  source 1..120: mol_type = other DNA
gacacaattttttatgtaaggaagtggctgttgttgtaagccactaggtttgggatggcggttgctcagtgatagataactgaaacagctgtatctgcacctggaccagagctttcatgc

SEQ ID NO: 25388 - DNA, 120 bp, synthetic construct
  source 1..120: mol_type = other DNA
aggcttgtggcagggtaatttactgtggaattgttttgttttgttcttgttgctctgtgtatactcccctcaccaagagagttactgggctttttgttcccaattctgaggctctttctt

SEQ ID NO: 25389 - DNA, 120 bp, synthetic construct; identical to SEQ ID NO: 7384
  source 1..120: mol_type = other DNA

SEQ ID NO: 25390 - DNA, 120 bp, synthetic construct
  source 1..120: mol_type = other DNA
aggacatcactccaggacttgactgtagcctctgaaagtagaggcagctagagaaacaatagtggcttctatgggctaaatgtctctgtccccccataattaatatgttgaaaacccaac

SEQ ID NO: 25391 - DNA, 120 bp, synthetic construct
  source 1..120: mol_type = other DNA
ctctctctcggccatcggtagtgagaaggctgcagtctgagaatcaggaagagagccctcagcagacatcaaatctgctggtacctggatcttggacttcctagtctccagaactgtgag

SEQ ID NO: 25392 - DNA, 120 bp, synthetic construct
  source 1..120: mol_type = other DNA
gggaaaaccccatctctacaaaaatacaaaaacttaggctggcatggtggctcatgcctgtaatcccagcactttgggaggccaagaagggcagatcacctgaggtcaggagttcaaaac

SEQ ID NO: 25393 - DNA, 120 bp, synthetic construct; identical to SEQ ID NO: 7385
  source 1..120: mol_type = other DNA

SEQ ID NO: 25394 - DNA, 120 bp, synthetic construct
  source 1..120: mol_type = other DNA
ccctgtctcaaaaacaaacaaaaacatatttgtcatttaagtcacctagtctctggtattctgtcacagcagctagagcgaactaagttggctatcctgagtactaaggacctggccttg

SEQ ID NO: 25395 - DNA, 120 bp, synthetic construct
  source 1..120: mol_type = other DNA
gggttgaatttcctcccagtcttctgggtaggacacagagcagattacatttgattgagtaaaagtaaggaatgtgacatttcatgcacattttatagccccaaatgacaaaaataacat

SEQ ID NO: 25396 - DNA, 120 bp, synthetic construct
  source 1..120: mol_type = other DNA
ggaaattttgtctttatgaaaagtggggcatgggaccagaggagggacttggtcagaaaaacaaaatacgattatttttgatccatgtccttatttcttggttactaaatagctgccctc

SEQ ID NO: 25397 - DNA, 120 bp, synthetic construct; identical to SEQ ID NO: 7386
  source 1..120: mol_type = other DNA

SEQ ID NO: 25398 - DNA, 120 bp, synthetic construct
  source 1..120: mol_type = other DNA
tatgtagttcaaataaaaatgacatcaataagtacatgagaaatatcactcctaccccacacttaccctctctttttcccctcacattgctcgtcagtaaccatttttaccagaatagtg

SEQ ID NO: 25399 - DNA, 120 bp, synthetic construct
  source 1..120: mol_type = other DNA
atgttatatacatcttgctccttccttttaaaatcgtaactaaatatactgggtatccttccctatcaccacgtaaagctgttcctcctgcctttttcattttgacagctctatagtatt

SEQ ID NO: 25400 - DNA, 120 bp, synthetic construct
  source 1..120: mol_type = other DNA
tataaataatgccacaatgaataaccttatacctaagcaagtttacctttgtgtaggtgaatctataagatagattcccagaagggggatctctgggtcaaagggtttgtgcatgtatag

SEQ ID NO: 25401 - DNA, 120 bp, synthetic construct
  source 1..120: mol_type = other DNA
ctcttgccaaccaaggaaagatttatgtataagttcaacatggatgcacttaggctaattctccttcctgcatttccttcagaacatcctcagtctcctcactcatttcagataccttaa

SEQ ID NO: 25402 - DNA, 120 bp, synthetic construct; identical to SEQ ID NO: 7387
  source 1..120: mol_type = other DNA

SEQ ID NO: 25403 - DNA, 120 bp, synthetic construct
  source 1..120: mol_type = other DNA
agaagttgaaatattcaaaggacaagaaaaggcctctggtacggtcctgtcttggacagtttccccggccacccagcaggctgcctattgtgctgtttgagatgcaaatgatctcttctt

SEQ ID NO: 25404 - DNA, 120 bp, synthetic construct
  source 1..120: mol_type = other DNA
gcatgatcttgacacactgcaacctctgcctccagggttcaagtgattctcctgcctccgcctcccgagtagctcggactacaggcgcatggcatcacgcccagctaatttttgtatttt

SEQ ID NO: 25405 - DNA, 120 bp, synthetic construct; identical to SEQ ID NO: 1478
  source 1..120: mol_type = other DNA

SEQ ID NO: 25406 - DNA, 120 bp, synthetic construct; identical to SEQ ID NO: 7388
  source 1..120: mol_type = other DNA

SEQ ID NO: 25407 - DNA, 120 bp, synthetic construct
  source 1..120: mol_type = other DNA
cttttttttttttttgagatggagtttctgtcttgttgcccaagctggagcacagtgatatgatcttggctcactgcaacctctgcctcccaggttcaagcgattctcctgcctcagccg

SEQ ID NO: 25408 - DNA, 120 bp, synthetic construct
  source 1..120: mol_type = other DNA
cacccgccttggcctcccaaagtgctgggattacaggagcgagccaccgcgcccatccatgatgttctcatggccaacatcctgaggtctcccaaaggcaagggcttctttgcttgccca

SEQ ID NO: 25409 - DNA, 120 bp, synthetic construct
  source 1..120: mol_type = other DNA
gggctgtggagctggggatggtctccaccccacagggatccacctacctcagccggtatccagtccagggcctctgtcttcttggctgccctcaaggcactgggctcctttagacactcc

SEQ ID NO: 25410 - DNA, 120 bp, synthetic construct; identical to SEQ ID NO: 7389
  source 1..120: mol_type = other DNA

SEQ ID NO: 25411 - DNA, 120 bp, synthetic construct
  source 1..120: mol_type = other DNA
aataaataaataaataaataaaaattagctaggtgtgctggcacacgcctgtagtcctacctactcaggaggctgaagtggatcccagtagtttgaggctgcagggagctatttactcca

SEQ ID NO: 25412 - DNA, 120 bp, synthetic construct
  source 1..120: mol_type = other DNA
ttatttcttttaaagagttactgctgactgggcattgtggctcacatctgcagtcccagcactttgggaggctgaggtgggtggatcgtttgaacccaggagttcgagaccagcctggca

SEQ ID NO: 25413 - DNA, 120 bp, synthetic construct
  source 1..120: mol_type = other DNA
aaggaaaagaagaaaagaaaaacctctcagcaaagagcaaggggggttcctgccaacaggtccccactccacagattgattccaggccacacacagtagctgaagaggccaggctcctcc

SEQ ID NO: 25414 - DNA, 120 bp, synthetic construct; identical to SEQ ID NO: 7390
  source 1..120: mol_type = other DNA

SEQ ID NO: 25415 - DNA, 120 bp, synthetic construct
  source 1..120: mol_type = other DNA
gccaaaggggtctgttttaggttagtttccttcagaagcagatctggagacaaagatttgaagcaaggaggttattagagaggaaatccctggcataattgataaagtagacaggaaagg

SEQ ID NO: 25416 - DNA, 120 bp, synthetic construct
  source 1..120: mol_type = other DNA
aggaagctggggtatttcttcaccaaatcccatttcacttgagggctgcccccagggcactgacatttctagcctgccctacccatgggtagtgctcctgtgactagggtaagtcctcaa

SEQ ID NO: 25417 - DNA, 120 bp, synthetic construct
  source 1..120: mol_type = other DNA
ccccttttaggatggacccactcagctccccggttcccactccctgacatctgctttctgtccgctgctcagtgtctccagtggattcacaaaacaactgcctttctccctttccacctc

SEQ ID NO: 25418 - DNA, 120 bp, synthetic construct; identical to SEQ ID NO: 7391
  source 1..120: mol_type = other DNA

SEQ ID NO: 25419 - DNA, 120 bp, synthetic construct
  source 1..120: mol_type = other DNA
tacctcatcccttttgtggtttagacaaccactgaccagcattaataaaccagagatcataagactgacagaacaaagtatttgagccaatgaaagaccaaactataaacaagacttaag

SEQ ID NO: 25420 - DNA, 120 bp, synthetic construct
  source 1..120: mol_type = other DNA
agcagccaaacaaacattggccttgagataagcaagattaaaacaacttgcagatcgtccatcagccaaaactacagcttgggttgaacacgagactgatttcagtaaccttctcctgat

SEQ ID NO: 25421 - DNA, 120 bp, synthetic construct
  source 1..120: mol_type = other DNA
ttttaattaattttttttttttttgagacggagtctcactatcgcttaggctggagtgcagtggtgcgatctcggctcactgcaagctctgcctcccaggttcatgccattctcttgcct

SEQ ID NO: 25422 - DNA, 120 bp, synthetic construct; identical to SEQ ID NO: 7392
  source 1..120: mol_type = other DNA

SEQ ID NO: 25423 - DNA, 120 bp, synthetic construct
  source 1..120: mol_type = other DNA
tatgtatacttggccaacccagtcagattaaattcctttcttattcctcctcgtccctcaaagttcattctctaggctctgccagaggctatgcttcccactagtccgaatggtacattg

SEQ ID NO: 25424 - DNA, 120 bp, synthetic construct
  source 1..120: mol_type = other DNA
aggctcaggtgattctccaacctcagcctttcaagtagctgggaccacatccgtgcaccaccaggcccagttaactttcacaattttcttggagacagggtttcaccatattgatagatg

SEQ ID NO: 25425 - DNA, 120 bp, synthetic construct
  source 1..120: mol_type = other DNA
aagttcgtgccatgtgcagttggggaggagcctggcctcttcagttcttgtgtgtagcctggaatcagtctgggggtgggggtgctgttggcaggaactcttcttgctttgctgagagat

SEQ ID NO: 25426 - DNA, 120 bp, synthetic construct
  source 1..120: mol_type = other DNA
tgcttgtgtgacaagaacctggttttagggtttaaggaacaaagttctgcatcaataagattcaaaagaaatcattctattgaaatatgattctaggcacaggctagttgggggtctctg

SEQ ID NO: 25427 - DNA, 120 bp, synthetic construct; identical to SEQ ID NO: 7393
  source 1..120: mol_type = other DNA

SEQ ID NO: 25428 - DNA, 120 bp, synthetic construct
  source 1..120: mol_type = other DNA
catgcaggttacttcctacccagctaccttcctggctcttctgcccagggagctccttctgccagtccccagcctactgcacttcttccttatatgcttggagtgtgtggaatgctgctc

SEQ ID NO: 25429 - DNA, 120 bp, synthetic construct
  source 1..120: mol_type = other DNA
gagagggagacagaatgtaccttgcagcagcacagctgggttctggatgggctccatctctgaaagagaggggcaaaagggttggggaaggggtagctgccggtcttagtgaagggtccc

SEQ ID NO: 25430 - DNA, 120 bp, synthetic construct
  source 1..120: mol_type = other DNA
ggatattcagtagtcggcctggggacctccaaagatgctttcccattccttagcctgtcagccttggtagggacatcactttcctccttatccttcaatgaggacattcaagacaacatc

SEQ ID NO: 25431 - DNA, 120 bp, synthetic construct; identical to SEQ ID NO: 7394
  source 1..120: mol_type = other DNA

SEQ ID NO: 25432 - DNA, 120 bp, synthetic construct
  source 1..120: mol_type = other DNA
tctgttgatatggctctgatgagtggaggaacaccagggctcttgtctcacatcgaattagataagatgacacgaacacacgtggagtggttttaaggagcggagagtttaataggcaag

SEQ ID NO: 25433 - DNA, 120 bp, synthetic construct
  source 1..120: mol_type = other DNA
ggaggaggcagtatctgatctgcataggactcaggggattggtttgaccaggcatgtcattcatgtagccggcgaaaaagctggccctcccaccctagccttttaatatgcaaatgtagg

SEQ ID NO: 25434 - DNA, 120 bp, synthetic construct
  source 1..120: mol_type = other DNA
acagctagcgtttgcatatcaaaggttgctggcccaagtctaagagccagggctttcatgctagacaagagctgtgaaaaattttccatggacctttttcctctctatctgcctaaaata

SEQ ID NO: 25435 - DNA, 120 bp, synthetic construct; identical to SEQ ID NO: 7395
  source 1..120: mol_type = other DNA

SEQ ID NO: 25436 - DNA, 120 bp, synthetic construct
  source 1..120: mol_type = other DNA
caccaacctggtgatcatgaaccagccatctataaccttgttgatctagctcaacccattatataaaactgtgcttggattgtatggaatgctacacacttacaattaaagatatttaga

SEQ ID NO: 25437 - DNA, 120 bp, synthetic construct
  source 1..120: mol_type = other DNA
ttgtcttttcttttcttttcttttttttttgagatggagttttgctcttgttgcccaggctggagtgcaattgcgcggtctcagctcactgcaacctctgcctcctgggttcaagtgatt

SEQ ID NO: 25438 - DNA, 120 bp, synthetic construct
  source 1..120: mol_type = other DNA
ctgacctcaggtgattcacccccctcagcctcctaaagtgctgggattacaggcatgagccaccatgccaggtgggggtaggtggggaagcccatttctattaaaaaaaaaaaaaaaaaa

SEQ ID NO: 25439 - DNA, 120 bp, synthetic construct
  source 1..120: mol_type = other DNA
aaaaatacaaaaaattagccgggcatggtagcacgtgcctgtaatcccagatactcgggaggctgaggcaggagaatcacttgaacccaggaggcggaggttgcagtgagttgagatcct

SEQ ID NO: 25440 - DNA, 120 bp, synthetic construct; identical to SEQ ID NO: 7396
  source 1..120: mol_type = other DNA

SEQ ID NO: 25441 - DNA, 120 bp, synthetic construct
  source 1..120: mol_type = other DNA
caactgagaaagttctggaagtaggagaaaacgtctttaaggcatataggctaaacttatataaatattgttagtgtttgccaaaacagggataatctagtaaaatcagagatacaaagc

SEQ ID NO: 25442 - DNA, 120 bp, synthetic construct
  source 1..120: mol_type = other DNA
gagtttgagaccagcctgggcaaccctttcactactgaaaatacaaaaaaaaaaaaaaaaaaaaccaaaaacaaaactgggcgtgctggtgcgcacgtgtggtcccaattaccctggagg

SEQ ID NO: 25443 - DNA, 120 bp, synthetic construct
  source 1..120: mol_type = other DNA
aaaaaaaaaaaaagtatcaaaaggcctaggaatttgttctccaggtaaatctgccctccctcatctctaacctttatgaaatcacccaaatggagacatcacagcaaggccccgacaagg

SEQ ID NO: 25444 - DNA, 120 bp, synthetic construct
  source 1..120: mol_type = other DNA
atcacccaaatggagacatcacagcaaggccccgacaaggaaatgaggaatgtaggtggataagggactggaatagtgcagcacaacactaactacaggtttcagccccaatgagattgc

SEQ ID NO: 25445 - DNA, 120 bp, synthetic construct; identical to SEQ ID NO: 7397
  source 1..120: mol_type = other DNA

SEQ ID NO: 25446 - DNA, 120 bp, synthetic construct
  source 1..120: mol_type = other DNA
caattggttgactcatttgccaccgaattgaacgcaatctctagtcctcccaccctccgtcgaggttgggctggctctaaggcccaatccttttattatgtgatctttctgatgaccaac

SEQ ID NO: 25447 - DNA, 120 bp, synthetic construct
  source 1..120: mol_type = other DNA
ggacaaagggcagtcaaattctttattgttatcacagagacacagtaatataatatgatacagcagaagagaggtgaggaatgttgccatgccttgagaagcctatcacaagagctttaa

SEQ ID NO: 25448 - DNA, 120 bp, synthetic construct
  source 1..120: mol_type = other DNA
tgcaataaaggaatcggcattcaagtagatgagagaggttggggaatatgtcaagatgcaaaagtgagagagctgtcacagtttacttactctgcaatctctgaggatggaacaggatca

SEQ ID NO: 25449 - DNA, 120 bp, synthetic construct; identical to SEQ ID NO: 7398
  source 1..120: mol_type = other DNA

SEQ ID NO: 25450 - DNA, 120 bp, synthetic construct
  source 1..120: mol_type = other DNA
ttcatattaaatttttaccttctggattgagacactagagttcttaaaggttctttcagaaattcttcctatattcagtatgctaccagaaaacctcttacaactaaccttacagaagat

SEQ ID NO: 25451 - DNA, 120 bp, synthetic construct
  source 1..120: mol_type = other DNA
aattctgatgagatcattacacaataaacaataactgttgcttattacatgcttactttgtactaggcaggactaagataagtattatttaagttttaagatcattcttaatttcttgtc

SEQ ID NO: 25452 - DNA, 120 bp, synthetic construct
  source 1..120: mol_type = other DNA
aaacatacacagaagccgtgagtatataatgagtcttgctgtatccatcacaaagttttaaaaactgtcaaaagttgaccatactcacttaatctactcctaccactttttcagctggag

SEQ ID NO: 25453 - DNA, 120 bp, synthetic construct; identical to SEQ ID NO: 7399
  source 1..120: mol_type = other DNA

SEQ ID NO: 25454 - DNA, 120 bp, synthetic construct
  source 1..120: mol_type = other DNA
tctgattaagagaggtccattaatcagaaagtaaacttggcatcctcgtagaaaaatcacatagcttaacaagaattcatgactctgaattgctgcacagacaggtagcatgagttcttg

SEQ ID NO: 25455 - DNA, 120 bp, synthetic construct
  source 1..120: mol_type = other DNA
gacctggtgggaggtaactgaatcatgaggggcaggtttttcccatgctattcttcttgtgatagtgaataagtctcatgagatctcatggttttataaaggtagttctgcacacgctct

SEQ ID NO: 25456 - DNA, 120 bp, synthetic construct
  source 1..120: mol_type = other DNA
cagtgtcaggtatttattcatagcagtatgaaaacggactaatacggctgggtgcagtggctcatgcctgtaatcctagcactttgagaggccgaggcaggtgaatcatttgaggccagg

SEQ ID NO: 25457 - DNA, 120 bp, synthetic construct; identical to SEQ ID NO: 7400
  source 1..120: mol_type = other DNA

SEQ ID NO: 25458 - DNA, 120 bp, synthetic construct
  source 1..120: mol_type = other DNA
atgtgggaaagtttggaacttcctcaagacttggagggctcagaagacaggaaaatgtgggaaactttggaacttcctagagacttgttgaatggctttgaccaaaatgctgacagtgat

SEQ ID NO: 25459 - DNA, 120 bp, synthetic construct
  source 1..120: mol_type = other DNA
agatctgtggaactttgaactgaaagaaatgacttagggtatctggcagaagaaatttctaagtggtaaagctgttcaagtggaagtagagcataaaagtttggaaaatttgcagtctga

SEQ ID NO: 25460 - DNA, 120 bp, synthetic construct
  source 1..120: mol_type = other DNA
ggaatattagagaacttcatagcagcccctcccatcacaggcctggaggcctaggagggaaaaagggtttgtgggctgggctaagggacccctgctctatgcagcctggggacatggtgc

SEQ ID NO: 25461 - DNA, 120 bp, synthetic construct; identical to SEQ ID NO: 7401
  source 1..120: mol_type = other DNA

SEQ ID NO: 25462 - DNA, 120 bp, synthetic construct
  source 1..120: mol_type = other DNA
gtagatccaccaacagcttacaccatgcacctggaaaagctggagacactcaacactagcccatgaaagcagctggaaggggggctgtaccctgcaaagccacagaggcagaactaccca

SEQ ID NO: 25463 - DNA, 120 bp, synthetic construct
  source 1..120: mol_type = other DNA
gggcttgtggcacctttattttggccaatgtatcccattggaatgggtgtatttacccaatgcctgtacccccattgtatctaggaagtaactaacttgcttttgatttacaggctcata

SEQ ID NO: 25464 - DNA, 120 bp, synthetic construct
  source 1..120: mol_type = other DNA
acatgaaatttgggaggggccaggggaggaatgatatggtttggctgtgtctccacccaaatatcatcttgaattgtagttcccataatccccatgtgtcatgggagggacttggtggca

SEQ ID NO: 25465 - DNA, 120 bp, synthetic construct; identical to SEQ ID NO: 7402
  source 1..120: mol_type = other DNA

SEQ ID NO: 25466 - DNA, 120 bp, synthetic construct
  source 1..120: mol_type = other DNA
tgattctcctgccttagcctcctgagtagctgggattacaggtatgtgtcatcacagctggctaatttttgtatttttagtggagacgaggtttcaccatgttggccaggctggtcttga

SEQ ID NO: 25467 - DNA, 120 bp, synthetic construct
  source 1..120: mol_type = other DNA
tatgaaaatggactaatacattatctcttggaagtgaatggccagagtgaaagaaaccagaaaaaaaaaaaaaaaaagaagaatacatactatatgatttcatttatataaaactctagg

SEQ ID NO: 25468 - DNA, 120 bp, synthetic construct
  source 1..120: mol_type = other DNA
tatcttgattgtggtgacagtttcatagtatacaaatacgacaaaactgatcaaagtgcacactttaaatctgtgcaattatgtctcaataatttttttttttaaagaatagccaaggcc

SEQ ID NO: 25469 - DNA, 120 bp, synthetic construct
  source 1..120: mol_type = other DNA
acaaaaaattagccgggcaaggtggcaggcgcctgtagtcccagctactcgggaggctgaggcaggagaatggcgtgaaccccagggggcggagcctgcagtgagctgagattgcgccac

SEQ ID NO: 25470 - DNA, 120 bp, synthetic construct; identical to SEQ ID NO: 7403
  source 1..120: mol_type = other DNA

SEQ ID NO: 25471 - DNA, 120 bp, synthetic construct
  source 1..120: mol_type = other DNA
tggttacctcataggtggagtggctctgagggctgctagttggctatttttatgattctttctttcttttcctttttttttttttttgagacacagttttgctcttggagtgcaatggcg

SEQ ID NO: 25472 - DNA, 120 bp, synthetic construct
  source 1..120: mol_type = other DNA
gatggggcttcaccatgttggtcaggctggtctccaactcctgacctgaagtgatctgcctgccttggcctcccaaagtgctgggactacaggcatgagccacagcgcctagccaattat

SEQ ID NO: 25473 - DNA, 120 bp, synthetic construct
  source 1..120: mol_type = other DNA
ttgccatgacatttataaaccatcttggtgctggtggggggtgacttttggcatgctaatgcattataattagcatgtaatgggcagtgaggatgaccaaaagtcacttttgtcaccatc

SEQ ID NO: 25474 - DNA, 120 bp, synthetic construct; identical to SEQ ID NO: 7404
  source 1..120: mol_type = other DNA

SEQ ID NO: 25475 - DNA, 120 bp, synthetic construct
  source 1..120: mol_type = other DNA
tttgccccaagatgaaatttggagcaagccccatgaactttctagtcatttgtaggtaatctaaggtcattgggttactccaattccccaaggagtttaataagtaattaaatggtccaa

SEQ ID NO: 25476 - DNA, 120 bp, synthetic construct
  source 1..120: mol_type = other DNA
acgctcaatgggaattgaggtgtgtggtgacctctgatttcccactttgcgctttgtggcagaaattgcagttatcaccaaatattcattctcctcttcttcctgattagtaagactccc

SEQ ID NO: 25477 - DNA, 120 bp, synthetic construct
  source 1..120: mol_type = other DNA
ctaacttttggccaacggatctgaatcagaacaacataagcaaccttttgttctgccctcaaacagcatgggtggcattagtttcccctttccttctttccctggctggaatgctgaccc

SEQ ID NO: 25478 - DNA, 120 bp, synthetic construct; identical to SEQ ID NO: 7405
  source 1..120: mol_type = other DNA

SEQ ID NO: 25479 - DNA, 120 bp, synthetic construct
  source 1..120: mol_type = other DNA
gggtcattaggcatagctgattcttcctttcatcaggcacttccgttgatttttctgagctaacaccttccctttgctacgatttctcatcacctaattccctgaggtggacaaatgccc

SEQ ID NO: 25480 - DNA, 120 bp, synthetic construct
  source 1..120: mol_type = other DNA
cctgccatctctctcttatggtggccccacctgtggtccacaggaaacatgaatccagtgcccccggcaattgcggaaggctggcagccctgaaacccagctacctcccttgttccacca

SEQ ID NO: 25481 - DNA, 120 bp, synthetic construct
  source 1..120: mol_type = other DNA
caggaacatatattcagctccctgacgggtaccaccaaaggccctttcctggggctcgaagaaataccctcactgaattcaatttcctcaagtaattgaagatcttcccctttccccttt

SEQ ID NO: 25482 - DNA, 120 bp, synthetic construct; identical to SEQ ID NO: 7406
  source 1..120: mol_type = other DNA

SEQ ID NO: 25483 - DNA, 120 bp, synthetic construct
  source 1..120: mol_type = other DNA
ccaaaaggccaggggctctcatcccagtagtagtaattaatctgtcatgcacaattcatagtatttcaacattaggttccaaataagtaacctgagcatccctgggtcttgctaacctat

SEQ ID NO: 25484 - DNA, 120 bp, synthetic construct
  source 1..120: mol_type = other DNA
tgagggaaatctcactcgtgctcctaaatccaggcacccaggccaacagcaactctccatcgcctgctgagcattcccccagggaaccggagcccttcaggcatcaattctgcattgggc

SEQ ID NO: 25485 - DNA, 120 bp, synthetic construct
  source 1..120: mol_type = other DNA
gcttctatgttgaccttcagctttctttttgcttcggatggaggcaggactggactaaatgtggtgacaaacaacattcatttactcttttattcaacacatatttcctaaattccttat

SEQ ID NO: 25486 - DNA, 120 bp, synthetic construct; identical to SEQ ID NO: 7407
  source 1..120: mol_type = other DNA

SEQ ID NO: 25487 - DNA, 120 bp, synthetic construct
  source 1..120: mol_type = other DNA
acactgattgtatctcttaaagagcttttcttccttccccattccacactatgaatttatgaattccaaacttcacactttatgtaaatttgaagcttctggccaagcgtggtggctcat

SEQ ID NO: 25488 - DNA, 120 bp, synthetic construct
  source 1..120: mol_type = other DNA
gcatagtggcacacgcctgtaatcgtagctactgggaggctgaggaaggaggatcactggagcccaagaagtcaaggctgcagtgagccatgatcataccactgcactccagccttggag

SEQ ID NO: 25489 - DNA, 120 bp, synthetic construct
  source 1..120: mol_type = other DNA
agtgatctctcacttcccactgtgtgctttgtggcagaaactgctgttgtccccaagtatccattctcctcttcttccttactaatgagactcccaaatttttgctggacttgtggccat

SEQ ID NO: 25490 - DNA, 120 bp, synthetic construct; identical to SEQ ID NO: 7408
  source 1..120: mol_type = other DNA

SEQ ID NO: 25491 - DNA, 120 bp, synthetic construct
  source 1..120: mol_type = other DNA
gaggcggaggtggcagtgagaagagattatgccactgcactctagcctgggcaacaaagcgagactctgtctcgaaaaaaaaaaaaaaaaacgatggtgaaggcctatatattagtctgt

SEQ ID NO: 25492 - DNA, 120 bp, synthetic construct
  source 1..120: mol_type = other DNA
cacatcttacatggtggcagacaagaagagaatgagagaccaagtgaaagggatttccccttataaaactatccgatcttgtgggacttactaccacaaaaacagtatgggggaaaccac

SEQ ID NO: 25493 - DNA, 120 bp, synthetic construct
  source 1..120: mol_type = other DNA
ccctcccaaatctcatgtcctcacatttcaaaaccaatcatgccttcccaacagtcttaactcatttcagcataaacttaaaagtccacagtccaaagtctcatctgagacaaggcaagt

SEQ ID NO: 25494 - DNA, 120 bp, synthetic construct; identical to SEQ ID NO: 7409
  source 1..120: mol_type = other DNA

SEQ ID NO: 25495 - DNA, 120 bp, synthetic construct
  source 1..120: mol_type = other DNA
ggatctaccattctggggtctggaggatggtggccctcttctcacagctccactaggcagtgccccagtggagaccctgcatgggggcttcaacctcccattttcctcccgcagtgccct

SEQ ID NO: 25496 - DNA, 120 bp, synthetic construct
  source 1..120: mol_type = other DNA
caccatgtggaagctgccaaggcttggggcttgcaccctctgaagccatgacccaagctgtaccttggccccttttagccatggctgggatgcaggcaccaagtctccaggctgcacaca

SEQ ID NO: 25497 - DNA, 120 bp, synthetic construct
  source 1..120: mol_type = other DNA
tggtgattaacatttgactcttcattacttatgcaaacttcttcagctggctcgaatttctcctcagaaaatgatttttttggctgggcgtggcggctcaggcctgtaatcccagcactt

SEQ ID NO: 25498 - DNA, 120 bp, synthetic construct; identical to SEQ ID NO: 7410
  source 1..120: mol_type = other DNA

SEQ ID NO: 25499 - DNA, 120 bp, synthetic construct
  source 1..120: mol_type = other DNA
tagactccatctcaaaaacaaacaaacaaaaaagaaatgggtttttattttctatcacatcgtcaggctgcaagttttctgaacttttatgctgtgtttcagttttaaaactgaatgctt

SEQ ID NO: 25500 - DNA, 120 bp, synthetic construct
  source 1..120: mol_type = other DNA
ccaccagtctttgtggtaaaacatagcaagagtcacctttactccagttcccaacaagttcctcatctccatttgagaccacctcagcctgtatttcattgtccatatcattatcaggat

SEQ ID NO: 25501 - DNA, 120 bp, synthetic construct
  source 1..120: mol_type = other DNA
acatttttgggttactttacagcagcatctcactcccattaccaatgtactgtattagtcccttttcatgctactgataaaaacatacccaagactgggtaatttataaagaaaaagaag

SEQ ID NO: 25502 - DNA, 120 bp, synthetic construct; identical to SEQ ID NO: 7411
  source 1..120: mol_type = other DNA

SEQ ID NO: 25503 - DNA, 120 bp, synthetic construct
  source 1..120: mol_type = other DNA
acttacttgggcaacatagggagacttcctctctaaaagcaaacaaaaaaccaagttatccaggcatggtggcatgttcctgtagtcctagctgttccagaggctgagttggaaagatca

SEQ ID NO: 25504 - DNA, 120 bp, synthetic construct
  source 1..120: mol_type = other DNA
aaagaaaatagggtggtgaggaggctggccaaagtggtgataacctcgtgcactaggtcctagcagctggtagcaggggagccaggaggtgtagcactctgcctggtaaagcagtctgtc

SEQ ID NO: 25505 - DNA, 120 bp, synthetic construct
  source 1..120: mol_type = other DNA
aactttgagagaaggtaaaaaggaggtggattcatggagagggaaggggaaagttgagggttggggaggtgtggtgaggagctgagatcttggagagacattcttcgttggcctagggac

SEQ ID NO: 25506 - DNA, 120 bp, synthetic construct; identical to SEQ ID NO: 7412
  source 1..120: mol_type = other DNA

SEQ ID NO: 25507 - DNA, 120 bp, synthetic construct
  source 1..120: mol_type = other DNA
aaaagccaattgcccagagaaacccagcagagtcttcagctacgcctgacagtcatccggggttaaacaccagcctggaattttagcttcctgtccaggaaaaaccaaatacataaatca

SEQ ID NO: 25508 - DNA, 120 bp, synthetic construct
  source 1..120: mol_type = other DNA
cagcttcctgagtagctgggattacaggcgcgcaccaccatgcctggctaatttttgcatttttagtagagacagggtttcaccacgttggtcaggctggtctggaactactggcctcgt

SEQ ID NO: 25509 - DNA, 120 bp, synthetic construct
  source 1..120: mol_type = other DNA
gttggtctgtgtcttggaacataggaactttcaatccctccaatatgggctccatccaaatctcaagttgaactgtaattcccagtgttggagtgttggaggagaggcctggtgggaggt

SEQ ID NO: 25510 - DNA, 120 bp, synthetic construct
  source 1..120: mol_type = other DNA
cccagcatgttgggaggctgaggtaggcggatcacctgaggtcgggagttcgagaccagcctgaccaatatggagaaaccccgtctctactaaatacaaatttagccggcatggtggcac

SEQ ID NO: 25511 - DNA, 120 bp, synthetic construct; identical to SEQ ID NO: 7413
  source 1..120: mol_type = other DNA

SEQ ID NO: 25512 - DNA, 120 bp, synthetic construct
  source 1..120: mol_type = other DNA
ttctttatagcagtgctaatacaccctgttacaggactaatacaccttccctctgctaagtgtctattgatctgaaaacacatgctatgaaacattaaaacgctacctgagaccatgtgt

SEQ ID NO: 25513 - DNA, 120 bp, synthetic construct
  source 1..120: mol_type = other DNA
tataaagtcagtttaatgatttaaatcccattgtggagaaaatagatctctgcagaaaagtacatccctgccctttcccagctccccagtcaagggggggcttcctgctgagcctggaga

SEQ ID NO: 25514 - DNA, 120 bp, synthetic construct
  source 1..120: mol_type = other DNA
gagggtgatctggctatgacatctgtcaccccagtgattgccactgttgattctgctgatctagctggctaggtggtgtccccttcttccctcaccactccatgtgcatccctcctgaag

SEQ ID NO: 25515 - DNA, 120 bp, synthetic construct; identical to SEQ ID NO: 7414
  source 1..120: mol_type = other DNA

SEQ ID NO: 25516 - DNA, 120 bp, synthetic construct
  source 1..120: mol_type = other DNA
tcaacaaaatcaagctaatagaagtctcaggttgtcacttttggtgtcttgaataggatatttgtgtgagagcccctttgattaacccattgccagccccctcccaccctgacctctgaa

SEQ ID NO: 25517 - DNA, 120 bp, synthetic construct
  source 1..120: mol_type = other DNA
gttcacggtggaagatctctaagggggacagttttgctgctcctgggatggaataggtatgatggtgatccatccacctgcaagttctggtttcccagtacgtatatgatttagaattag

SEQ ID NO: 25518 - DNA, 120 bp, synthetic construct
  source 1..120: mol_type = other DNA
gctataaagaaatacttgagactgggtaatttgtaagaaaagaggtttaattggctcacggttctgtaggctgtacaggaagcatagcagcatctctttctggggaggccccaggaagct

SEQ ID NO: 25519 - DNA, 120 bp, synthetic construct
  source 1..120: mol_type = other DNA
gctacacctttttaaatgaccatatatcacaggaactcactcactatggtgagtacagtgctaaaggggatggtactagaccatttatgagaaatctgcccccacgatccaatcacctcc

SEQ ID NO: 25520 - DNA, 120 bp, synthetic construct; identical to SEQ ID NO: 7415
  source 1..120: mol_type = other DNA

SEQ ID NO: 25521 - DNA, 120 bp, synthetic construct
  source 1..120: mol_type = other DNA
cgcctaggagttcaagaccagccagggcaacaaagagagaccactgtttaaaaaaaaaaaaaattagccaggcattggggtacatgcctatagtcccagctactgaggaggctgaggtga

SEQ ID NO: 25522 - DNA, 120 bp, synthetic construct
  source 1..120: mol_type = other DNA
ctgtctgatttcacgaaaggtttttgcaggacacgcttttagtttccacaaaacagccaccctctacttccttactggcaaagctttcatgaatattatttatttgccatttcagtgctg

SEQ ID NO: 25523 - DNA, 120 bp, synthetic construct
  source 1..120: mol_type = other DNA
ttatgcttacactatattatggtctattacgtgtgcaatagcattatgtcttaaagaagtacataccttaattttaaaatactttattgctaaaaaatgataatgattatctgagccttc

SEQ ID NO: 25524 - DNA, 120 bp, synthetic construct; identical to SEQ ID NO: 7416
  source 1..120: mol_type = other DNA

SEQ ID NO: 25525 - DNA, 120 bp, synthetic construct
  source 1..120: mol_type = other DNA
aagcacttcctcatctattcaaattttatcatgagattgcagcaattcagtcacatcttcaggctccacttctagttctctggctttttctaccacatctgcagttaccgaagtcaggaa

SEQ ID NO: 25526 - DNA, 120 bp, synthetic construct
  source 1..120: mol_type = other DNA
ttttttttttttttttttttttttttgagacagagtcttactcttgttgcccaggctggagtgcagtggtgcgatatcagctcactgcaacctctgcctcccagattcaagcaattctcc

SEQ ID NO: 25527 - DNA, 120 bp, synthetic construct
  source 1..120: mol_type = other DNA
ctcaggtgatccacctgcctcggcctcccaaagtgctaggattataggagtgtgtcaccatgcctggctaattttatatttttagtagagatggggtttcaccatgttggccaggctggt

SEQ ID NO: 25528 - DNA, 120 bp, synthetic construct; identical to SEQ ID NO: 7417
  source 1..120: mol_type = other DNA

SEQ ID NO: 25529 - DNA, 120 bp, synthetic construct
  source 1..120: mol_type = other DNA
ttgaaagaaatcttttttttcctgagcagtaggtctctcaacagtgggcttaaaatattcaacaaaccatgctgtaaacagatatgctgtcatccaagctttgttgttccatttataaaa

SEQ ID NO: 25530 - DNA, 120 bp, synthetic construct
  source 1..120: mol_type = other DNA
gtcctttgaagctttgaagccaggcaggcattgacttttcctctgtagctatgaatgtcctagatggcctcttcttccaatataaagctattttatctacatggaaaatctgttgtttag

SEQ ID NO: 25531 - DNA, 120 bp, synthetic construct
  source 1..120: mol_type = other DNA
gggtggcaaggagagaaggttggggtttgtttttgacatacaaatcactttttaaaacttcaacaataacaaattaatactgtgtttgtgtgtgtatgtatgtgtgtgtgtatgtgttta

SEQ ID NO: 25532 - DNA, 120 bp, synthetic construct; identical to SEQ ID NO: 7418
  source 1..120: mol_type = other DNA

SEQ ID NO: 25533 - DNA, 120 bp, synthetic construct; identical to SEQ ID NO: 1511
  source 1..120: mol_type = other DNA

SEQ ID NO: 25534 - DNA, 120 bp, synthetic construct
  source 1..120: mol_type = other DNA
gcagttccccaaattaatacttttataatttcttacacctgtctttactgcaatctctgaacataaattgtgaagatttcatggatatttatcacttccctaatactcttataatttctt

SEQ ID NO: 25535 - DNA, 120 bp, synthetic construct
  source 1..120: mol_type = other DNA
ttgtaaaacatgtgggtttgaacaatatgaaatcagtgcactctgaaaaagaacaaagtaacagcaattttcaggtaacaagaaaagataaccataaagtctgactgcttgcagggttgg

SEQ ID NO: 25536 - DNA, 120 bp, synthetic construct; identical to SEQ ID NO: 7419
  source 1..120: mol_type = other DNA

SEQ ID NO: 25537 - DNA, 120 bp, synthetic construct
  source 1..120: mol_type = other DNA
ctttgtgatctttattgcccttcgaagcatgtgatccttgtggcttactccctgttcgtacatcccctccccttttaaaatccctaataaaaacctgctggttttgcagctcggggttgt

SEQ ID NO: 25538 - DNA, 120 bp, synthetic construct
  source 1..120: mol_type = other DNA
ctacattgaaatattgggggctggctccctctataatttgtcttcatacttcatggggttttatgaaggtcaaagtaaataatgtgaggttttggcaacacaaaagaactatacagatgt

SEQ ID NO: 25539 - DNA, 120 bp, synthetic construct
  source 1..120: mol_type = other DNA
ctggctaacacgatgaaaccctgtctctactaaaaatacaaaaaattagctggatgtggtggcacgtgcctgtaatctcagctacttagcaggctgaggcaggagaattgcttgaacctg

SEQ ID NO: 25540 - DNA, 120 bp, synthetic construct; identical to SEQ ID NO: 7420
  source 1..120: mol_type = other DNA

SEQ ID NO: 25541 - DNA, 120 bp, synthetic construct
  source 1..120: mol_type = other DNA
tacctgcctcagacttccagagtactgggattacaggcttcagccaccatgcctggccaaaaatcttaagatgtttacaacatccaagatttatttttgctcatgctatatgtattcatt

SEQ ID NO: 25542 - DNA, 120 bp, synthetic construct
  source 1..120: mol_type = other DNA
agctatttcctggaagtgatatatgttgcttctgctcacatttgattggccacagaaggtcacatagccaaacctgatgccaaggagtgaaataatgtaatcttcccatatttttgcatt

SEQ ID NO: 25543 - DNA, 120 bp, synthetic construct
  source 1..120: mol_type = other DNA
ggaggctgagacaggaagatcacctgaggccaggagtttgagagtagcctgggcagcatggtgagatcctgcttctacacgcacacatgcacacacacacacacatacagaaaagaaaga

SEQ ID NO: 25544 - DNA, 120 bp, synthetic construct; identical to SEQ ID NO: 7421
  source 1..120: mol_type = other DNA

SEQ ID NO: 25545 - DNA, 120 bp, synthetic construct
  source 1..120: mol_type = other DNA
attctgtttgggatttgcttagcatcttgaatctgttatgttttttccccctaaatttaggaaaatttttagccattattcctttcaattctttttcagctccatcctgtttctcctctc

SEQ ID NO: 25546 - DNA, 120 bp, synthetic construct
  source 1..120: mol_type = other DNA
tcatttttttcctatctattttctccctgttgttcagattggatgaattctgttgttctatcttcaagtttactgagtcttttctctgtcctctccattctgctgttgtgcccattcggt

SEQ ID NO: 25547 - DNA, 120 bp, synthetic construct
  source 1..120: mol_type = other DNA
atgacttgttgaaacattttttatgacggctgcttccttgtcagataattgcaacatctgtgttatcgtgatattgacatctgttgtcttttcttattctggttgagattttcctggttc

SEQ ID NO: 25548 - DNA, 120 bp, synthetic construct; identical to SEQ ID NO: 7422
  source 1..120: mol_type = other DNA

SEQ ID NO: 25549 - DNA, 120 bp, synthetic construct
  source 1..120: mol_type = other DNA
gcacccagcctctggatcctatttaaatcttctattttatcaagcctccttgataccacactaacagaagggtgtgtgtgtgtgtgtgtgtgtgtgtgtgtgtgtgtgtgttagggggtg

SEQ ID NO: 25550 - DNA, 120 bp, synthetic construct
  source 1..120: mol_type = other DNA
ctctgctgatatcattctggctaggagcgggaggggtaccactagccatgtggttgccactgataacctgggggtaaggtggagggacagaggctttatcaccactggatgatggtacaa

SEQ ID NO: 25551 - DNA, 120 bp, synthetic construct
  source 1..120: mol_type = other DNA
cttttcaccgttagtgtgaataaatgtctgggcttttgagatatcttttcagatttttttctatgtctgacgacttatggctccaactggatcctccaactgctcctgtggccccaccca

SEQ ID NO: 25552 - DNA, 120 bp, synthetic construct; identical to SEQ ID NO: 7423
  source 1..120: mol_type = other DNA

SEQ ID NO: 25553 - DNA, 120 bp, synthetic construct
  source 1..120: mol_type = other DNA
tcccttccctgtctcactcttcccagcccttcactcagtgcccctcctaaataaactacttatatccaagtacttgtcccaggatgtgcttttggagaaacctaaaataaaacagtaatt

SEQ ID NO: 25554 - DNA, 120 bp, synthetic construct
  source 1..120: mol_type = other DNA
ggagtacagtggtatggctcactgcaacctccatctctcaggctcaaatgatcctctcacctcagatgcctgagtagctgcgatcacagatgtgcaccactacacctggctaattttcgt

SEQ ID NO: 25555 - DNA, 120 bp, synthetic construct
  source 1..120: mol_type = other DNA
cagcaatcccatcttaaataagagctgggtaaaataaggctgaaacctactgggctgcattcccacatggttaaggtattctaagtcacaggatgagacagcaggccagcacaaaatata

SEQ ID NO: 25556 - DNA, 120 bp, synthetic construct; identical to SEQ ID NO: 7424
  source 1..120: mol_type = other DNA

SEQ ID NO: 25557 - DNA, 120 bp, synthetic construct
  source 1..120: mol_type = other DNA
tcagggggctgaggcagaagaatcacttgaacctgggaggtggaggtggcagtaagctgagatctcaccactgcactccagcctgggcagcaagagtgaaactccatctcaaaaataaat

SEQ ID NO: 25558 - DNA, 120 bp, synthetic construct
  source 1..120: mol_type = other DNA
cagccgttcttgtaatcctttactttcttaataaacttgcttttactttgcactgaggactcacccagaattctttcttgtgcgaaatccaacaaccctctcttggggtctggattgaga

SEQ ID NO: 25559 - DNA, 120 bp, synthetic construct
  source 1..120: mol_type = other DNA
ctgcaagctccgcctccccggttcacgccatcctgccgcttcagcctcctgagtagctgggactacaggggcccgccaccacgcccggctcgtttttttgtatttttagtagagacgagg

SEQ ID NO: 25560 - DNA, 120 bp, synthetic construct; identical to SEQ ID NO: 7425
  source 1..120: mol_type = other DNA

SEQ ID NO: 25561 - DNA, 120 bp, synthetic construct
  source 1..120: mol_type = other DNA
caaagagcagcctgtaaaatcgggctgcagacatagatgacggcagttgtgccaatcatgttcaaaatggcggccccatcatcccttctctgtcagccacaggtgcagtaaggagccgac

SEQ ID NO: 25562 - DNA, 120 bp, synthetic construct
  source 1..120: mol_type = other DNA
cgccgcctcctcaagctggactataaattcggctcatctgcctccagctgccccttttctctcggaagtcccctctctcactagagagagagctgttttcctttctctttcttttgccta

SEQ ID NO: 25563 - DNA, 120 bp, synthetic construct
  source 1..120: mol_type = other DNA
tggatcttgagggtcggggagatttttgacctttaacagggactccatcattgcaagttttccttggagactcttgatggcccaggtttagtttatacctactgtgagagcaagaacttg

SEQ ID NO: 25564 - DNA, 120 bp, synthetic construct; identical to SEQ ID NO: 7426
  source 1..120: mol_type = other DNA

SEQ ID NO: 25565 - DNA, 120 bp, synthetic construct
  source 1..120: mol_type = other DNA
ctcctggccttcacttggtacaaatgcgaccaagacaattaaagctataaataggtaaatgcaaatgcaggtactcacaagcagggccaggatcagttacaaatgacccaaaacatgctt

SEQ ID NO: 25566 - DNA, 120 bp, synthetic construct
  source 1..120: mol_type = other DNA
tccagagacctcagtttgagaacactatcctagcactgaccttgacttccagggtgaccttgaggtaagcatttaccatttttggatctctgtacattttttgtacacaagaataatttg

SEQ ID NO: 25567 - DNA, 120 bp, synthetic construct
  source 1..120: mol_type = other DNA
aggataagaatgtattatagacctctagagttggaaaaagaatggtggctgagatcctccagcctagctttggctctgtaatcaaaaagactcagatttgggccaagcattgtggcacac

SEQ ID NO: 25568 - DNA, 120 bp, synthetic construct
  source 1..120: mol_type = other DNA
ggtgagaccctatctctaccaatctctacatacaaacaaaaaatggctgggcgtggtggctcatgcctgtaatcccagcactttgggaggcggaggcgggcggatcacgaggtcaggagt

SEQ ID NO: 25569 - DNA, 120 bp, synthetic construct; identical to SEQ ID NO: 7427
  source 1..120: mol_type = other DNA

SEQ ID NO: 25570 - DNA, 120 bp, synthetic construct
  source 1..120: mol_type = other DNA
aataaacaaacaactgagatctgaattccagatctgccatttactgtgtgtgtatgggggatggggatggagagcaacttttctaactctcagtttctaccctaagtgggcatgtttcaa

SEQ ID NO: 25571 - DNA, 120 bp, synthetic construct
  source 1..120: mol_type = other DNA
ctttttagcaaaggacaatagaaaagagaaagtgaagattctaacattctgcctataaatgacaacatctcctatatgtgcaaattaggtcattgtaccctaaatagccccgcagctgcc

SEQ ID NO: 25572 - DNA, 120 bp, synthetic construct
  source 1..120: mol_type = other DNA
ccagtaattggagttggtcacctgtgcagcaagcgcccccaagtggccttcctgttcactgtccggaccataaggcctaaagaatactccgataagtttatcaaggccgggcttccgcag

SEQ ID NO: 25573 - DNA, 120 bp, synthetic construct; identical to SEQ ID NO: 7428
  source 1..120: mol_type = other DNA

SEQ ID NO: 25574 - DNA, 120 bp, synthetic construct
  source 1..120: mol_type = other DNA
tctttttatgagagccctgccccactcatgtcagagggccctgaggaggcaaacacaggatggttgaaaatgctagtaaaacacctaggatgtgcactgctgtcctggctggaggcttag

SEQ ID NO: 25575 - DNA, 120 bp, synthetic construct
  source 1..120: mol_type = other DNA
ccacatgctgctgccaaaaaccacttttaaaagaacacaaatctaaacatgtcatttcccagctcaaaaccccaaggttctttctcctcaccttcagaataagccaaactactcaatgat

SEQ ID NO: 25576 - DNA, 120 bp, synthetic construct
  source 1..120: mol_type = other DNA
ggaatggccttgcctcatctctgcaaatcttagcatgacttaaggcccagttcaagctccagctcctccctgaggtcttcctgagtcttgtctcctgtcccactcaggaggacctggcct

SEQ ID NO: 25577 - DNA, 120 bp, synthetic construct; identical to SEQ ID NO: 7429
  source 1..120: mol_type = other DNA

SEQ ID NO: 25578 - DNA, 120 bp, synthetic construct
  source 1..120: mol_type = other DNA
gcctcagcctcccaagtagctgggattacaggtaaccgccaccatgcctggctgatttttttgcatttttagtagagacagggtttcaccacgttggtcgggctggtctcgaactcctga

SEQ ID NO: 25579 - DNA, 120 bp, synthetic construct
  source 1..120: mol_type = other DNA
ccctctgtcacccaggctggagtgcagtggtgtgatcttggctcactgcaacctccacctctcaggtgcaaacaattctcctgcttcagcctcccaagtagctggggttacagacgcgca

SEQ ID NO: 25580 - DNA, 120 bp, synthetic construct
  source 1..120: mol_type = other DNA
ctcttaataacaactgttgtggaatgacttgggaggtggcactcagagatcccaagtgacacatgagaagtccacagagagagatcatgtttagtggagtttggatggttgcttttatca

SEQ ID NO: 25581 - DNA, 120 bp, synthetic construct; identical to SEQ ID NO: 7430
  source 1..120: mol_type = other DNA

SEQ ID NO: 25582 - DNA, 120 bp, synthetic construct
  source 1..120: mol_type = other DNA
ctggagtgcagtggtgcaatcatggcacactgcagccttgacctcccgggctcaggtgatcctcccacccagcctcctggtgcgcatcaccacatccagctaattttggtattttttgta

SEQ ID NO: 25583 - DNA, 120 bp, synthetic construct
  source 1..120: mol_type = other DNA
tgccattggtatttaagaggtgatggtttaggctttgaaattggggttgtttgtgaaaactgagagcaccttttgttttcagatatttcctatggccattggtgtaattggagggaagct

SEQ ID NO: 25584 - DNA, 120 bp, synthetic construct
  source 1..120: mol_type = other DNA
aaggaagtgaattctcaggggcccagaaggagtctctaaaggacctctgccagtcaattctaatctctcttctcccctgcaaatcagcccctgcttctgcctctttctccgcctctccta

SEQ ID NO: 25585 - DNA, 120 bp, synthetic construct; identical to SEQ ID NO: 7431
  source 1..120: mol_type = other DNA

SEQ ID NO: 25586 - DNA, 120 bp, synthetic construct
  source 1..120: mol_type = other DNA
actgggacctaagagaatcctgagctggaggtgagaggggggaagccagagatgaactgggagggcaggagtgggcactggagctgggccctccccttgtgggcagggaccaggcggtcc

SEQ ID NO: 25587 - DNA, 120 bp, synthetic construct
  source 1..120: mol_type = other DNA
ggtgtccccaaagggggaccgttgtccagaaacaggttagattctctctttggtcctcatgtccccatctgtcccgcaggtgcctcttcctttctcagccttttatacttctcatctccc

SEQ ID NO: 25588 - DNA, 120 bp, synthetic construct
  source 1..120: mol_type = other DNA
gctctcaagcctcctcagttccctgccttcctctcttaggagtttgtttccaacactgtttccttcccgagtccacttcagttccttcatccagttcagcccttttcttcccaaacttca

SEQ ID NO: 25589 - DNA, 120 bp, synthetic construct; identical to SEQ ID NO: 7432
  source 1..120: mol_type = other DNA

SEQ ID NO: 25590 - DNA, 120 bp, synthetic construct
  source 1..120: mol_type = other DNA
tgtacactccttcaccctgccccccacccgtcgcttcttactctccccagctgctgacccagcctgctcctccagaggcagctgcagctcccggaaggggactgcagctagtgtatgtgt

SEQ ID NO: 25591 - DNA, 120 bp, synthetic construct
  source 1..120: mol_type = other DNA
gctgccttctcccctctcctacgtgcctctcctcacattttttcagctgtttcccatcctctccttcctgggcagcaggctgccactggcttgaaggggagggaagcccaggatgggagg

SEQ ID NO: 25592 - DNA, 120 bp, synthetic construct
  source 1..120: mol_type = other DNA
ctttggtgctgctctctgggccccaggatggctgggatttccctctcaggcccctgggaatctcggctccgagtcccgcattccagctggctccagctccctttccgttgtcacttgact

SEQ ID NO: 25593 - DNA, 120 bp, synthetic construct; identical to SEQ ID NO: 7433
  source 1..120: mol_type = other DNA

SEQ ID NO: 25594 - DNA, 120 bp, synthetic construct
  source 1..120: mol_type = other DNA
tccagcgtctcctgggcctagattccccagctgctgttctctggaggggtaggtgttctgggggaatgaatccctgggggcttggtgggacaggaaggcgggaagaagctgctcttcgag

SEQ ID NO: 25595 - DNA, 120 bp, synthetic construct
  source 1..120: mol_type = other DNA
tgtgtacttgtctggttgggacttcgtgtttctttcttgggattgttgtctgggactgcaagcagggtatgtttttatctactgtgaggttcctggggcggagatgtgcagtggagcgag

SEQ ID NO: 25596 - DNA, 120 bp, synthetic construct
  source 1..120: mol_type = other DNA
ccgctccatcctctgcccagtagctctctcagttgctttgcctactcagtctcactgtttcatcttccctgggtctcttggtccccttccttttgactgtgtgtgattttcagtgtgcct

SEQ ID NO: 25597 - DNA, 120 bp, synthetic construct; identical to SEQ ID NO: 7434
  source 1..120: mol_type = other DNA

SEQ ID NO: 25598 - DNA, 120 bp, synthetic construct
  source 1..120: mol_type = other DNA
agggagaagagcagtctggggcctggctggacaggtgagccctgagacctgagctctgctcccttctctgggctaactcccgcagctgggctgggccgagcctgtgggaacctgcttctt

SEQ ID NO: 25599 - DNA, 120 bp, synthetic construct
  source 1..120: mol_type = other DNA
agctttggaggttctcgtttggggaagcgggggtgggctgcgagtgggtggagggggctgggcgcggagccggccggaggcagcggcgcgggcggctgggcggcctgggagcgcccaggc

SEQ ID NO: 25600 - DNA, 120 bp, synthetic construct
  source 1..120: mol_type = other DNA
ccgggagggggaagggagggctgcgagcccgaacgcgcggcgagaaggccgaggggagggaggggagcgaggagcgggaggaggaagggagggagccgaggcgagggggaggcggcgcct

SEQ ID NO: 25601 - DNA, 120 bp, synthetic construct; identical to SEQ ID NO: 7435
  source 1..120: mol_type = other DNA

SEQ ID NO: 25602 - DNA, 120 bp, synthetic construct
  source 1..120: mol_type = other DNA
ccgcctccccgatgctctggcataccgtctgaaaaccgggggcggggactgggtggaggtgaagcccgtgacctcccagaaagagttttgagcctccagccttgaggcaagtcccctctc

SEQ ID NO: 25603 - DNA, 120 bp, synthetic construct
  source 1..120: mol_type = other DNA
ccgctcagccaacacccagttggtcagtctggtcacagtccagcaaaaagagggactgccactctaacccaccagtgacaccactcttcccggctggatggtcaattagctctggcatga

SEQ ID NO: 25604 - DNA, 120 bp, synthetic construct
  source 1..120: mol_type = other DNA
tgttgctgagggcctgtaggtgtgtccaggactgagtggtgtggtggagacaggtgaaaggggagtgagtggaaaggcagggaaaggctgttgtccttattgccactcttcccacccagc

SEQ ID NO: 25605 - DNA, 120 bp, synthetic construct; identical to SEQ ID NO: 7436
  source 1..120: mol_type = other DNA

SEQ ID NO: 25606 - DNA, 120 bp, synthetic construct
  source 1..120: mol_type = other DNA
atgccacatttagcctcgctgtttacagccagttcagtaagtttgtgtgtttcaccgtgtgtgtgtgtacagagctgtgtgggtgttgtctgagtgggacttgggggttgggagaggagc

SEQ ID NO: 25607 - DNA, 120 bp, synthetic construct
  source 1..120: mol_type = other DNA
actgtggactgaagacccagtggagagagatgaggtgactgggggtgttggagaacagacagcccagacgtctctgtgcttctccgtgttcctctgcttggctctgtgccccgtgtttct

SEQ ID NO: 25608 - DNA, 120 bp, synthetic construct
  source 1..120: mol_type = other DNA
ctcatctgggataggcatgaaggttacttaggggaacaagagccccgctgttcccgagagaggtggggttggagagcggcacccaggaattccaagccagtctcctgggactctggcagc

SEQ ID NO: 25609 - DNA, 120 bp, synthetic construct; identical to SEQ ID NO: 7437
  source 1..120: mol_type = other DNA

SEQ ID NO: 25610 - DNA, 120 bp, synthetic construct
  source 1..120: mol_type = other DNA
gggcccaagatgccctgaacctgataagaggtggcagtcgagtccctcaggactccagggcctggagacttcagtacagggctctgagaccagtacaggttaggatagcttttcctgcag

SEQ ID NO: 25611 - DNA, 120 bp, synthetic construct
  source 1..120: mol_type = other DNA
ctgaggaacagagtagggattttcaaactttaatgggcacaggtcacctgggaattgtgttaaaaggcagattttgattgagcaggtcaagggtgagcctgagattctgatttcttccat

SEQ ID NO: 25612 - DNA, 120 bp, synthetic construct
  source 1..120: mol_type = other DNA
tgggagggcagcagggtgagctggtccaggcttatctgatgtttaattctatcatatcctcaacaaggaattgcccaacctttcctgggacatatttattttttaaaagtcaaaatgatt

SEQ ID NO: 25613 - DNA, 120 bp, synthetic construct; identical to SEQ ID NO: 7438
  source 1..120: mol_type = other DNA

SEQ ID NO: 25614 - DNA, 120 bp, synthetic construct
  source 1..120: mol_type = other DNA
attttttttaattccagcctgtcccctgtgggcattcacatatcttacagatttatgtcttacaaaaggtaccataataaacatctttgaaatcttcttttttatttttatttttcactt

SEQ ID NO: 25615 - DNA, 120 bp, synthetic construct
  source 1..120: mol_type = other DNA
agacctgcacatatgttcttacttcctggtgcttctctctcgagggaatgctgggtcgaagaggatgtgcatttttaattataatagacattgctagattgctttccaaatagaagataa

SEQ ID NO: 25616 - DNA, 120 bp, synthetic construct
  source 1..120: mol_type = other DNA
atcttgtcagtctgcttggtatttccctgaggctggtgaatttgaccattaaaaaaaatgtttgttggcaatttggctttgcttttctgtgaaatgactattcacattctttggctgttt

SEQ ID NO: 25617 - DNA, 120 bp, synthetic construct; identical to SEQ ID NO: 7439
  source 1..120: mol_type = other DNA

SEQ ID NO: 25618 - DNA, 120 bp, synthetic construct
  source 1..120: mol_type = other DNA
agcattctaaaaatatagctgatgctgttaaacaatgactgttgttgttgttttactgttattatccccaaagcggcccattctgtctgttgctgtcagctatgactcagtcccctgatt

SEQ ID NO: 25619 - DNA, 120 bp, synthetic construct
  source 1..120: mol_type = other DNA
caagtggagatgctgacatgaagggacattttgatcctggtgaggagactgaatcatgggtccctgagggccagggcttgggaggtagagagttgggggccttgacctgttacatgcctg

SEQ ID NO: 25620 - DNA, 120 bp, synthetic construct
  source 1..120: mol_type = other DNA
tggcacacctggcacacttgtagctgccccgagaggagctcctgggacctctacttcccctccaacccctctgcccatgccagtgaaacccctgcaggctgagggggcaaatgaagtggg

SEQ ID NO: 25621 - DNA, 120 bp, synthetic construct; identical to SEQ ID NO: 7440
  source 1..120: mol_type = other DNA

SEQ ID NO: 25622 - DNA, 120 bp, synthetic construct
  source 1..120: mol_type = other DNA
accacctatacgctgacgactctccagtttatatcatctccagactaagcctctcagctgagctccaaacaatattgtaaacctggccaccttttggatttctccacttagatgtctttt

SEQ ID NO: 25623 - DNA, 120 bp, synthetic construct
  source 1..120: mol_type = other DNA
cacctagatgtctaataggcatctcaaacgtacgtttaacttcccaagctgaatttgattcccattcccagcctaaacctgctcctcccctggcattctccagctcaggaagtggtatca

SEQ ID NO: 25624 - DNA, 120 bp, synthetic construct
  source 1..120: mol_type = other DNA
agtcactcctcaccactccacctctactgccctaggccacctgcccgccatctccagcttagatgagtgcagtagatgccaaacgcgtctccctgcttctgcccttttctgcctggagtc

SEQ ID NO: 25625 - DNA, 120 bp, synthetic construct; identical to SEQ ID NO: 7441
  source 1..120: mol_type = other DNA

SEQ ID NO: 25626 - DNA, 120 bp, synthetic construct
  source 1..120: mol_type = other DNA
cctcactgctctgtccatacttcctgcctcttgttcttcgcagctgttttccctgctgggatctcagtcctacaagggtggggagtgacgttcaccactgagaacgcgcctggcacagag

SEQ ID NO: 25627 - DNA, 120 bp, synthetic construct
  source 1..120: mol_type = other DNA
gcttggagacaaatggatggagccaggcaaggagaagagggcagctgagcctgaagtctgaggatggaacatcagagctgcgacagagccagaggtctcagctgcagatcttcatttcac

SEQ ID NO: 25628 - DNA, 120 bp, synthetic construct
  source 1..120: mol_type = other DNA
actccatcccacccaccccctgtttcctggcccacaggtgatctcaggcaatgaggaccctgagggagtggtgctgaaggaccttgggccccccatggttgcccgactggttcgcttcta

SEQ ID NO: 25629 - DNA, 120 bp, synthetic construct; identical to SEQ ID NO: 7442
  source 1..120: mol_type = other DNA

SEQ ID NO: 25630 - DNA, 120 bp, synthetic construct
  source 1..120: mol_type = other DNA
caatgtatttatctgaggccgtgtacctcaacgactccacctatgacggacataccgtgggcgggtaagaaaggcccctgcaggatatggagtttggggtgggagggaggactgtgtgtg

SEQ ID NO: 25631 - DNA, 120 bp, synthetic construct
  source 1..120: mol_type = other DNA
tagggtgaccactagcccgtatgacactgtatgaaaaaggcacccctttgctaacacacattgttggaaattgctgcaataaatatacacatcatagattgaaatggtgccccttagagg

SEQ ID NO: 25632 - DNA, 120 bp, synthetic construct
  source 1..120: mol_type = other DNA
tgagtgtgaggtgggatgggaatgggactagtggatgggagccaggctggccatgccactgtgccggagggtggcggagcagaatgcctggatgtcaagaccctcttcccttccaacctc

SEQ ID NO: 25633 - DNA, 120 bp, synthetic construct; identical to SEQ ID NO: 7443
  source 1..120: mol_type = other DNA

SEQ ID NO: 25634 - DNA, 120 bp, synthetic construct
  source 1..120: mol_type = other DNA
ctggcggggtggaatgtcgcttccggcgtggccctgccatggcctgggagggggagcccatgcgccacaacctagggggcaacctgggggaccccagagcccgggctgtctcagtgcccc

SEQ ID NO: 25635 - DNA, 120 bp, synthetic construct
  source 1..120: mol_type = other DNA
gaaattgacaactgatttcattcctaaccctgcagtgtccctaaaatactcattccttgcattatatctacccatcacccaccgaaacttctcaattaggggtgccccaaataacttgag

SEQ ID NO: 25636 - DNA, 120 bp, synthetic construct
  source 1..120: mol_type = other DNA
gttgagaaatagcctcttctctaagcctccagatacctgtcctccacctccccacaatccagcaactatagggttaacacccaccacagctgggtgttccaggaccctgctcccccagcc

SEQ ID NO: 25637 - DNA, 120 bp, synthetic construct; identical to SEQ ID NO: 7444
  source 1..120: mol_type = other DNA

SEQ ID NO: 25638 - DNA, 120 bp, synthetic construct
  source 1..120: mol_type = other DNA
ccgtggccaaggccgaggggagcccgaccgccatcctcatcggctgcctggtggccatcatcctgctcctgctgctcatcattgccctcatgctctggcggctgcactggcgcaggctcc

SEQ ID NO: 25639 - DNA, 120 bp, synthetic construct
  source 1..120: mol_type = other DNA
agtaaagagaccacttacaccatgtcaaagagggtatggggctcacagggagggctgctccccagctctgggtctgctcagcggagaggagcaaataccacgacccagaggagagagcct

SEQ ID NO: 25640 - DNA, 120 bp, synthetic construct
  source 1..120: mol_type = other DNA
tcctgctgggctcctctctggctaacccaaaccaggcctgttggtgcagtgtacactggtcagccttggggcagaagcagggtagagacaggcagagagtggggttggaggggcaaaggg

SEQ ID NO: 25641 - DNA, 120 bp, synthetic construct
  source 1..120: mol_type = other DNA
gaggcgggaggatcacctgaggtcaagagttcgagaccagcctgaccaacatggtgaaatcccatctctactaagaatacaaaattagccaggcatggtggctgatgcctgtaatcccag

SEQ ID NO: 25642 - DNA, 120 bp, synthetic construct; identical to SEQ ID NO: 7445
  source 1..120: mol_type = other DNA

SEQ ID NO: 25643 - DNA, 120 bp, synthetic construct
  source 1..120: mol_type = other DNA
ctatgacaaggctgaacggagggtgttggaagaggagctgacggttcacctctctgtccctggggacactatcctcatcaacaaccgcccaggtcctagagagccacccccgtaccagga

SEQ ID NO: 25644 - DNA, 120 bp, synthetic construct
  source 1..120: mol_type = other DNA
cccattctctttttttcctgtcttccccagtttccacttgttttcttctttctgtgcccctggttactgtctatatcactctttgtccctaccatgtagtctctctcaagagttccccat

SEQ ID NO: 25645 - DNA, 120 bp, synthetic construct
  source 1..120: mol_type = other DNA
tttgttccttcatctatcctccatcacccatccttccatccatagtcatacatccttgcatccatccatcaatcttccatcatctgtctttctatctatattcataaatctattcatcca

SEQ ID NO: 25646 - DNA, 120 bp, synthetic construct; identical to SEQ ID NO: 7446
  source 1..120: mol_type = other DNA

SEQ ID NO: 25647 - DNA, 120 bp, synthetic construct
  source 1..120: mol_type = other DNA
ccaatccagcctaccgcctccttctggccacttacgcccgtccccctcgaggcccgggcccccccacacccgcctgggccaaacccaccaacacccagggtaagcccctctgcccctggg

SEQ ID NO: 25648 - DNA, 120 bp, synthetic construct
  source 1..120: mol_type = other DNA
cccttagctcatctctgctgctgcttgctcttttttaaggtcccccccttgagctgaggagtagaaagcttactggtccccagctcttctccctcctcctcttccacgccatctcttcag

SEQ ID NO: 25649 - DNA, 120 bp, synthetic construct
  source 1..120: mol_type = other DNA
ccctcacatgtgtcctctctctgcagtcccagaggtgaaggctcatgccccaaccctttccatctgcccctcttctcctcagtgttgccttctcattgtggccccttccccagggctaag

SEQ ID NO: 25650 - DNA, 120 bp, synthetic construct; identical to SEQ ID NO: 7447
  source 1..120: mol_type = other DNA

SEQ ID NO: 25651 - DNA, 120 bp, synthetic construct
  source 1..120: mol_type = other DNA
ttatgacagttttgctcaaccatattcattgccttgaaaagctctggaatagctaactctcgtcccatgccagtgtcttcctggtttgaggttggcgcatggaatactgggaagatacag

SEQ ID NO: 25652 - DNA, 120 bp, synthetic construct
  source 1..120: mol_type = other DNA
tgcagcctacagtggggactatatggagcctgagaagccaggcgccccgcttctgcccccacctccccagaacagcgtcccccattatgccgaggctgacattgttaccctgcagggcgt

SEQ ID NO: 25653 - DNA, 120 bp, synthetic construct
  source 1..120: mol_type = other DNA
gtttggggaggtaaggagggtgcctacccagtgtctggccctattgtgtgctctgatgccatgcctgcgcatccccctagccaggaaccttagtcatttgtaaccgtgttaatccgtttg

SEQ ID NO: 25654 - DNA, 120 bp, synthetic construct; identical to SEQ ID NO: 7448
  source 1..120: mol_type = other DNA

SEQ ID NO: 25655 - DNA, 120 bp, synthetic construct
  source 1..120: mol_type = other DNA
ccgcccactcggcattcctcttcagcttctccttgttctccaggaatgatttcctgaaagaggtgaagatcatgtcgaggctcaaggacccaaacatcattcggctgctgggcgtgtgtg

SEQ ID NO: 25656 - DNA, 120 bp, synthetic construct
  source 1..120: mol_type = other DNA
ctgcgcaggggcccaccatcaggtacctgcttacccaggctgggccttgctcagaattcccccaggggatctcctcctctcccctcgcttcagcctggaggaaaagaggggagcgtgggg

SEQ ID NO: 25657 - DNA, 120 bp, synthetic construct
  source 1..120: mol_type = other DNA
tgccatgacgtcccttctgctttctctcaccctcactcccctctgagtccagattggggagcacaataaaagaagagccccctagtgttggccaggcctgggagattgagagggaagtga

SEQ ID NO: 25658 - DNA, 120 bp, synthetic construct; identical to SEQ ID NO: 7449
  source 1..120: mol_type = other DNA

SEQ ID NO: 25659 - DNA, 120 bp, synthetic construct
  source 1..120: mol_type = other DNA
tgcatcctcatggtgagcagcccgaggacagccaggttggagcagggcaggtgggagaacactggccgccactcacagccctggtctccatcagtcacacactttctctgggttgcattt

SEQ ID NO: 25660 - DNA, 120 bp, synthetic construct
  source 1..120: mol_type = other DNA
tggcagagagctcaagagatgaggttgggcgaggaagctggagatagaaggggttgggtagggagaccgaaggtcaggaccagaaagtgggggtggatggagaggaaggaggagcagaag

SEQ ID NO: 25661 - DNA, 120 bp, synthetic construct
  source 1..120: mol_type = other DNA
ggatcaggcctgagtggagcccagagtggatctggggcttccaataggaagggaggagggtctacgttgcctgatgtccctgtctgtttttgctgccttctctgcatcccaggggaagtt

SEQ ID NO: 25662 - DNA, 120 bp, synthetic construct; identical to SEQ ID NO: 7450
  source 1..120: mol_type = other DNA

SEQ ID NO: 25663 - DNA, 120 bp, synthetic construct
  source 1..120: mol_type = other DNA
tgcatcggttcctggcagaggatgcactcaacacggtgtgaatcacacatccagctgcccctccctcagggagcgatccaggggaagccagtgacactaaaacaagaggacacaatggca

SEQ ID NO: 25664 - DNA, 120 bp, synthetic construct
  source 1..120: mol_type = other DNA
ccccttcctgttcttccttcctagaagcccctgtcgcccacccagctggtcctgtggatgggatcctctccaccctcctctagccatcccttggggaagggtggggagaaatataggata

SEQ ID NO: 25665 - DNA, 120 bp, synthetic construct
  source 1..120: mol_type = other DNA
tctgggggtgaggaggacaagaaggagaggaaaatgtttccttgtgcctgctcctgtacttgtcctcagcttgggcttcttcctcctccatcacctgaaacactggacctgggggtagcc

SEQ ID NO: 25666 - DNA, 120 bp, synthetic construct; identical to SEQ ID NO: 7451
  source 1..120: mol_type = other DNA

SEQ ID NO: 25667 - DNA, 120 bp, synthetic construct
  source 1..120: mol_type = other DNA
ccacttcccaacccacttcccatcttccttttttcctgcctcctcattccatttcccatcacctgttttgcccagcattgtgttctgtttctggataatccaggcctttgcctgtgggac

SEQ ID NO: 25668 - DNA, 120 bp, synthetic construct
  source 1..120: mol_type = other DNA
agtcaggccaggggtgctgaaccttttttgtgccataaacgcctttggcagtctgtagaggtctactgagtcctcctcagaattaggttttaaaacctataaaatggaccaggcatagtg

SEQ ID NO: 25669 - DNA, 120 bp, synthetic construct
  source 1..120: mol_type = other DNA
tagcagggtgtggtggcatgcgcctgtaatctcagctattcaggaggctgaggcaggagaattgcttagaacccgggaggtgggggttgcagtgagctgagatcacacaactgtgctcca

SEQ ID NO: 25670 - DNA, 120 bp, synthetic construct; identical to SEQ ID NO: 7452
  source 1..120: mol_type = other DNA

SEQ ID NO: 25671 - DNA, 120 bp, synthetic construct
  source 1..120: mol_type = other DNA
attcataattggaggaaatgctaaacttctattagaggttagtaaaaggtgtaatttctttttcttgcccaaattctagaacccatctggctccccagggtctggaaatcccaggggaga

SEQ ID NO: 25672 - DNA, 120 bp, synthetic construct
  source 1..120: mol_type = other DNA
gaaaccagaatcaagagcctcagttatctcagaggcttggaaggatgagctgcaaccaccaagagaacaattaaagggttcaaatttggttggaaagaaaaaatcggccagtggggtggc

SEQ ID NO: 25673 - DNA, 120 bp, synthetic construct
  source 1..120: mol_type = other DNA
aacatagcacactctggcccccatttatacatatatatataaaactagctgggcttagtggtgtgcaccagcaactcaggaggccaaggtgggaggataacttgagcccaggaggttgag

SEQ ID NO: 25674 - DNA, 120 bp, synthetic construct
  source 1..120: mol_type = other DNA
gtcagttgcagggatgggacaaggcagacccatcttgatggccattcatgtgaaataaaaaccctggggttttggttgatgatattcacaaaatgagccaattggataatgaggatcaca

SEQ ID NO: 25675 - DNA, 120 bp, synthetic construct; identical to SEQ ID NO: 7453
  source 1..120: mol_type = other DNA

SEQ ID NO: 25676 - DNA, 120 bp, synthetic construct
  source 1..120: mol_type = other DNA
ctcccacatagctgggattacaggtgtgcaccaccatgcccagctaatttttttgtatttttagtagagacggggtctcaccatattggccaggctggtctcaaactcctgacctcgtga

SEQ ID NO: 25677 - DNA, 120 bp, synthetic construct
  source 1..120: mol_type = other DNA
tctactgactcagtgaatggcagcatcatccacttagctgcacaagccgcacaaggtggcatccccgagctccttctcccttaccttccacctctcaagtccagtccagcacaaaacgct

SEQ ID NO: 25678 - DNA, 120 bp, synthetic construct
  source 1..120: mol_type = other DNA
ctgcctctgctcctctctgggttgttttccaccctgcaaccacagttatctttaaaacacacaaatctgaccctaatccttcatttcaaatccagcagtgacttttcattaatcttaaaa

SEQ ID NO: 25679 - DNA, 120 bp, synthetic construct; identical to SEQ ID NO: 7454
  source 1..120: mol_type = other DNA

SEQ ID NO: 25680 - DNA, 120 bp, synthetic construct
  source 1..120: mol_type = other DNA
atctttttatacctgcccctcccaccaaactataagttgcacaagggcaaaatcttggaacacagggctcaatattggttgaaagaaagaattgtagcaaatatctgatagactaacata

SEQ ID NO: 25681 - DNA, 120 bp, synthetic construct
  source 1..120: mol_type = other DNA
tacttaatacaacaatatatgaagtagttaaaattactttgcacagagaagaaaattctgttaggttaagcagcttgcccaaagtagcagtcagtcaacagtaaagcctgtgggaagtgg

SEQ ID NO: 25682 - DNA, 120 bp, synthetic construct
  source 1..120: mol_type = other DNA
cttctgggttgaagcgattctcctgcctcagcctcctgagtagctgggattacaggcacctgccaccatgcccggctaatttttgtatttttagtagagactgggtttcaccatgttggc

SEQ ID NO: 25683 - DNA, 120 bp, synthetic construct; identical to SEQ ID NO: 7455
  source 1..120: mol_type = other DNA

SEQ ID NO: 25684 - DNA, 120 bp, synthetic construct
  source 1..120: mol_type = other DNA
gacagagattgcagtgagccaagattgtgccactgcatttgacctgggtgacactgtaagactctgtcccctcaccccctccaaaagaggtgtgcctatttcaatttttttttttttttt

SEQ ID NO: 25685 - DNA, 120 bp, synthetic construct
  source 1..120: mol_type = other DNA
cctcagcctctcaagtagctgggcctacaggcatgcaccctcatgcccagctaatttttttattttttgtagagacagggtttcaccatgttgcccaggctggtctcaaacttcggggct

SEQ ID NO: 25686 - DNA, 120 bp, synthetic construct
  source 1..120: mol_type = other DNA
tgaggttgtcaatccttaatttcttttttgctgaacttttatattttaattttatttatgtatttattttgagatagagtcttgctctgttgcccaggctggagtgcagtggtgtgatct

SEQ ID NO: 25687 - DNA, 120 bp, synthetic construct; identical to SEQ ID NO: 7456
  source 1..120: mol_type = other DNA

SEQ ID NO: 25688 - DNA, 120 bp, synthetic construct
  source 1..120: mol_type = other DNA
ctcagcctcccaagtagctgggattacaggcgcccgtcaccatgccagctaatttttgtgtttttagtagagacaaggtttctactaaaatgttgaccaggctagtctggaactcctgac

SEQ ID NO: 25689 - DNA, 120 bp, synthetic construct
  source 1..120: mol_type = other DNA
agtggtgtaactgtagctcactacagccttgaactgctggactcaaccgatcttcctacctcagcctcctgagtagctaggacttcaggtgtgtgcataccgagctaatttctttttctc

SEQ ID NO: 25690 - DNA, 120 bp, synthetic construct
  source 1..120: mol_type = other DNA
ggtccaaacaatcctcctgcctcagcctcctgagtagctgggaccacagaaccaggcctggctaattttttgaattttttttttttttttttgagacaaagtctcgctcttgtcccccag

SEQ ID NO: 25691 - DNA, 120 bp, synthetic construct
  source 1..120: mol_type = other DNA
aatttttgtatttttaggagagacgggtttcaccatgttggccaggctggtctcgaactcctgatctcgggtgatccacccacctcggcctcccaaagtgtcgggattacaggcgtgagc

SEQ ID NO: 25692 - DNA, 120 bp, synthetic construct; identical to SEQ ID NO: 7457
  source 1..120: mol_type = other DNA

SEQ ID NO: 25693 - DNA, 120 bp, synthetic construct
  source 1..120: mol_type = other DNA
accactacacctagctaatttttgttttgttttgtttttgtagcgatagagtttctgtataatgcccaggctggtctggaactcctgagctaaaatgatccaccttctttggcctcccaa

SEQ ID NO: 25694 - DNA, 120 bp, synthetic construct
  source 1..120: mol_type = other DNA
tctgtcccaatctttctattatgtttctttttcttattgctttgtaacagctttttgtattttgtttatttcatcaaccatttcttcctagattgtaaattgtctttcaaccttacctaa

SEQ ID NO: 25695 - DNA, 120 bp, synthetic construct
  source 1..120: mol_type = other DNA
aacagaaaacatgggtgggctacaaagtataaaaagtcttgcatagtcattaccattttgatccctggttgcttgcaaatgtgcttcaaatcccagcttgggcacttcctgtctgattgt

SEQ ID NO: 25696 - DNA, 120 bp, synthetic construct
  source 1..120: mol_type = other DNA
gagtttgagactagcctggccaacatgttgaaaccctatctctactaaaaataccagaattagccgggcgtggtggcacacacctgtagtcccagctacttgggaggctgaggtaagaga

SEQ ID NO: 25697 - DNA, 120 bp, synthetic construct; identical to SEQ ID NO: 7458
  source 1..120: mol_type = other DNA

SEQ ID NO: 25698 - DNA, 120 bp, synthetic construct
  source 1..120: mol_type = other DNA
gtgaagacctccacttttgtagtaggttcataaatcaaatcagagcaaatagttggtgtcttaaaaactgtatttatctgggtcttctaagtaaacggtttgaggagtggtggaggcaga

SEQ ID NO: 25699 - DNA, 120 bp, synthetic construct
  source 1..120: mol_type = other DNA
ttgagacggagtttcactcttgtcgcccaggctggcgtgtaatggcatggtcctggctcactgcaactccgcctccagggttcaagcgattcacctgcctcagcctccagagtagctggg

SEQ ID NO: 25700 - DNA, 120 bp, synthetic construct
  source 1..120: mol_type = other DNA
tcccaaagtgctaggattacaggcgtgagtcaccgcgcccggcctggagtgtgtattatcccaattttatggggagtaattgtgctcactcggctcaccaccaagtcgccagagcgcgcc

SEQ ID NO: 25701 - DNA, 120 bp, synthetic construct; identical to SEQ ID NO: 7459
  source 1..120: mol_type = other DNA

SEQ ID NO: 25702 - DNA, 120 bp, synthetic construct
  source 1..120: mol_type = other DNA
cttacctcccttctcttctgaattctccattctgggctcttgcctgtgaaatctttctttgctttccccatcttttcctcgcattttttcaccatctttccctcaatctccaggagccaa

SEQ ID NO: 25703 - DNA, 120 bp, synthetic construct
  source 1..120: mol_type = other DNA
gagtgggaggcgaagagtgagaggaaggcagggagaagctaggagatcggaaggcgtgggtcagggtgaatgacgtgaagtagacttgggaagggaaaagaggtggctttagatttggga

SEQ ID NO: 25704 - DNA, 120 bp, synthetic construct
  source 1..120: mol_type = other DNA
aggtgtgggctcaattttctttgtccctgtttagccaaagatgagacaagtcattgaaatacaaaatgatcttgcaaacactggacagttaacaattctgtcacttggtaattgagggaa

SEQ ID NO: 25705 - DNA, 120 bp, synthetic construct; identical to SEQ ID NO: 7460
  source 1..120: mol_type = other DNA

SEQ ID NO: 25706 - DNA, 120 bp, synthetic construct
  source 1..120: mol_type = other DNA
ttgtatgggcaccctgccacatgtctggctgtcttcaggtgagaagccccttcatggcagggaaatgtaatggggtctgcggagtggaataaaatatcataggtaaaagtgtagcagcct

SEQ ID NO: 25707 - DNA, 120 bp, synthetic construct
  source 1..120: mol_type = other DNA
tctaaagtgtggaggccaaaacagcaggactggtaaagttgtgctggagtgagatgagatgtttgagaggtaattgagggcagagatgcagatacaatgcagcttctgatactaaccttt

SEQ ID NO: 25708 - DNA, 120 bp, synthetic construct
  source 1..120: mol_type = other DNA
gcaagtaagtctcagccagatacaaatttctcaacagctacatttcccaaactgctgttccttggagcacttccaggaagtgttaatagatatatcacaaaacttaaaaataaatacatt

SEQ ID NO: 25709 - DNA, 120 bp, synthetic construct; identical to SEQ ID NO: 7461
  source 1..120: mol_type = other DNA

SEQ ID NO: 25710 - DNA, 120 bp, synthetic construct
  source 1..120: mol_type = other DNA
cctcaaccccattttccgccagaacctccgcattgcccttctgggtgggtatgtcacttctctctcttcctaagctagggcaggggaactgctgcttattaaaccactaattaaactttg

SEQ ID NO: 25711 - DNA, 120 bp, synthetic construct
  source 1..120: mol_type = other DNA
ctgaggataagggtggaaagatggcagagggcagcaaggaacacagacagggttccttactctttttttgttgttctgttttgtttgtttttgagacagagtctcactctgtcaccaagg

SEQ ID NO: 25712 - DNA, 120 bp, synthetic construct
  source 1..120: mol_type = other DNA
attttttgtatttttagtagagatggggtttcgccatgttggccaggctggtcttgaactcctgacctcaagtgatccgcccatctcggcctcccaaagtacagggattacaggtgtgag

SEQ ID NO: 25713 - DNA, 120 bp, synthetic construct; identical to SEQ ID NO: 7462
  source 1..120: mol_type = other DNA

SEQ ID NO: 25714 - DNA, 120 bp, synthetic construct
  source 1..120: mol_type = other DNA
tgccatctccttgggtccctaagaaatggtatctggggctagtcaagatcagaggacattagctggaaaaggcaagctgagtagaatatagccagagataccaagaaaaaacgtgagtgg

SEQ ID NO: 25715 - DNA, 120 bp, synthetic construct
  source 1..120: mol_type = other DNA
gacaccccggctcagctctggtactttatgttgcagtatttgcagacagcccaggtgaggaggcagggccacttaaccagcatgctctgctcctctcaggtctcactgagagactcctgc

SEQ ID NO: 25716 - DNA, 120 bp, synthetic construct
  source 1..120: mol_type = other DNA
ttctctccttcctcttccagctcagcttctctactctgggcaaggtaagcagggggctgaaaggtatagagatgggaaggggaaagcaagttgtggggcagtagagtagactgagaagat

SEQ ID NO: 25717 - DNA, 120 bp, synthetic construct; identical to SEQ ID NO: 7463
  source 1..120: mol_type = other DNA

SEQ ID NO: 25718 - DNA, 120 bp, synthetic construct
  source 1..120: mol_type = other DNA
agggatctgatatttcaggcaggaagatgtaaggcagtgacttctgagacaaggcatctgcctttctattcttttcagaggaaatctcggcgttactaccccacacgcctggccatcaat

SEQ ID NO: 25719 - DNA, 120 bp, synthetic construct
  source 1..120: mol_type = other DNA
ggaggttgggggtgagggaatgccagtttatgttcgtgtttacctggcagtctacagagctctctgacatttctcatgacacttgaaagaagggcttgagggagtctgggtgtgggggtg

SEQ ID NO: 25720 - DNA, 120 bp, synthetic construct
  source 1..120: mol_type = other DNA
atcggttccccaacatggtggtggcgcaggtgacccgggagagtgtgcagcaggcaatcgccagtggcatcacagcccagcaggtattcccacttgggagaggtggagcaggaagacagg

SEQ ID NO: 25721 - DNA, 120 bp, synthetic construct; identical to SEQ ID NO: 7464
  source 1..120: mol_type = other DNA

SEQ ID NO: 25722 - DNA, 120 bp, synthetic construct
  source 1..120: mol_type = other DNA
gagctcagcacctgtcatgcaataaatgctaaaaaaagaaaatagtagctgctgctattttaaagaaagaaaaacaaaacattactggaaagggcgaatgtgccagaaaaggaatatccc

SEQ ID NO: 25723 - DNA, 120 bp, synthetic construct
  source 1..120: mol_type = other DNA
ataagctgatgttccagtgacattaggtgacagctcagatggctttcctgccttcttgctggagccctcatgccattcttgtctgttttcctagataatccatttcctaaggacaagagc

SEQ ID NO: 25724 - DNA, 120 bp, synthetic construct
  source 1..120: mol_type = other DNA
ggttgtctggggcagtattctgagtccctacagtcaacccttgctccttgcagacacctgtgctgccccccaccatcaccgaccagatccggctctgggagctggaaagggacagactcc

SEQ ID NO: 25725 - DNA, 120 bp, synthetic construct; identical to SEQ ID NO: 7465
  source 1..120: mol_type = other DNA

SEQ ID NO: 25726 - DNA, 120 bp, synthetic construct
  source 1..120: mol_type = other DNA
ggggattcccaataggagctccgagcttcactttctcgtcttctccccgcgcccctcccgtcctgccgaccccaggtgtcctgtataaccagttcctgtcgcaagtggactttgagctgc

SEQ ID NO: 25727 - DNA, 120 bp, synthetic construct
  source 1..120: mol_type = other DNA
gctcctgagagcgcgggacttggacacggacctcggcgggcgggactgggcggggcggggcatcagaactcaggtgttttttatttacgcgtcagggcttttcttgtttaataaagttat

SEQ ID NO: 25728 - DNA, 120 bp, synthetic construct
  source 1..120: mol_type = other DNA
cgcatgcgccggccggggccccgcccccatgcgccgcgcggctccagggccacgttccagggtcgggtttggtggattcctcagtccctgccgccgcggggcgccctgggatagcggcgg

SEQ ID NO: 25729 - DNA, 120 bp, synthetic construct; identical to SEQ ID NO: 7466
  source 1..120: mol_type = other DNA

SEQ ID NO: 25730 - DNA, 120 bp, synthetic construct
  source 1..120: mol_type = other DNA
aatagagacttggaataacagacctgtgctaattagagacaggaaagatggaacaaggggagtgacccttctccacccccatatcctaatgtgctctctctctatccagaacagatctcg

SEQ ID NO: 25731 - DNA, 120 bp, synthetic construct
  source 1..120: mol_type = other DNA
ccccatggatctcccatctcccggaggaaccgtgaagccaaacagaagcgcctgcgagagaagcaggcgactctggaggctgagatagcaggggagagcaaggttaggggtcagacagct

SEQ ID NO: 25732 - DNA, 120 bp, synthetic construct
  source 1..120: mol_type = other DNA
ggcctggaggcctaaggagttagtattgtatgaaatccctacgaaacccggtgaaaagaaaggtaagtagaataagtaagaaggccttttctttcacatatgtgttgcccatttggcctg

SEQ ID NO: 25733 - DNA, 120 bp, synthetic construct; identical to SEQ ID NO: 7467
  source 1..120: mol_type = other DNA

SEQ ID NO: 25734 - DNA, 120 bp, synthetic construct
  source 1..120: mol_type = other DNA
ctcctctccactctcctcttatttgcaggacagttcttccttgaagttctttctgttctggagacagtagagggtgctctttccccaatccaattctctcttgcccctttgacttttttt

SEQ ID NO: 25735 - DNA, 120 bp, synthetic construct
  source 1..120: mol_type = other DNA
cctcgtgcgctggtgagaggggagtgggggctgcttgagttcttggaagggaaataggaagggcaggaatgagtgaggataaacatttaagctcaggggctcacaggagggcatttttgt

SEQ ID NO: 25736 - DNA, 120 bp, synthetic construct
  source 1..120: mol_type = other DNA
tttgttacctgttccttttcttgggcaaaagcaatttcttcccccaaagcaaccaagcaacctgactctgttcatttgccctgaatccaactgcaggctgtggtggagaaacaactgtgg

SEQ ID NO: 25737 - DNA, 120 bp, synthetic construct
  source 1..120: mol_type = other DNA
tttcttgcctcccaccactatcactcctgacttgtaatccttggctcttcccgacacagctctgacttcctcagagatggaagctctggagcctgttaacatttggtggagtttctaagc

SEQ ID NO: 25738 - DNA, 120 bp, synthetic construct; identical to SEQ ID NO: 7468
  source 1..120: mol_type = other DNA

SEQ ID NO: 25739 - DNA, 120 bp, synthetic construct
  source 1..120: mol_type = other DNA
taatatcttagaaaaccccatactgggtttgtaagtccatttctattagcctctagaggctagatcaatgccatcctcacttgattttcctccaacacctggcattgctgggggcatcgc

SEQ ID NO: 25740 - DNA, 120 bp, synthetic construct
  source 1..120: mol_type = other DNA
cgagagtgttttaccatggatgttgtgagtgttctgtgccttggtccctgtgagtgatgggcgatgtttagggatctgtgtggggcagggaggaagcaatgcctgggtccctgagcaggg

SEQ ID NO: 25741 - DNA, 120 bp, synthetic construct
  source 1..120: mol_type = other DNA
gcttgtcaactggtcatgtgctttaagatcagccatctcggacattgaggtgaggcggagagagggaagcaggtttgtgagagctctgaggcagagtggtcaatgattaagagctcagac

SEQ ID NO: 25742 - DNA, 120 bp, synthetic construct; identical to SEQ ID NO: 7469
  source 1..120: mol_type = other DNA

SEQ ID NO: 25743 - DNA, 120 bp, synthetic construct
  source 1..120: mol_type = other DNA
aaaggctgccctctgacccagctttctcggtgcctccaggtggagaaccggcccctgcctggccacacacagcttcgactgcctggctgccccacccccgtgtcttttggcctcctattt

SEQ ID NO: 25744 - DNA, 120 bp, synthetic construct
  source 1..120: mol_type = other DNA
catctctcacatgtaccttggtagtgttcacctcagcgtgggcacttacccagggtcttctgggggatgtacaaaaagtgcatgtggtcactgccctttgagagtgtggtgtgattcttc

SEQ ID NO: 25745 - DNA, 120 bp, synthetic construct
  source 1..120: mol_type = other DNA
tcggctcctgcaacctctgcttcccaggttcaagcgattctcctgtctcagcctcctgagtagctgggattacaggcgcgtgccaccaggcctggctaatttttgtatttttagtagaga

SEQ ID NO: 25746 - DNA, 120 bp, synthetic construct; identical to SEQ ID NO: 7470
  source 1..120: mol_type = other DNA

SEQ ID NO: 25747 - DNA, 120 bp, synthetic construct
  source 1..120: mol_type = other DNA
atttcttccatgcaaattatcagggaattctttagcaccagagaccctctcagacctctggtcatcagcttatgggaaaccctgggttcctataaacactgctcctacttttttctagtc

SEQ ID NO: 25748 - DNA, 120 bp, synthetic construct
  source 1..120: mol_type = other DNA
tgagaggtgaggatgatgaccagctgtaagtgtttaaatgtttatcttcagatgcagaggttgtggtaggaaccacaaggccagagacgctgcctggagatgtggctgtggccgttcatc

SEQ ID NO: 25749 - DNA, 120 bp, synthetic construct
  source 1..120: mol_type = other DNA
ttttcctgagacttctctcagtggttctgattggactccctcctcctcttatagtttttctgtagctcaggggttgacaaactggcccatggtcctaatccagcttgcggcctttttttt

SEQ ID NO: 25750 - DNA, 120 bp, synthetic construct; identical to SEQ ID NO: 7471
  source 1..120: mol_type = other DNA

SEQ ID NO: 25751 - DNA, 120 bp, synthetic construct
  source 1..120: mol_type = other DNA
ttatattatctatggctgctattatataccctctccagctctgctgcagtggcataatagagtaattgtgctgagaatgaatttgtctctaggcccaaaagcctaaaatatctacattct

SEQ ID NO: 25752 - DNA, 120 bp, synthetic construct
  source 1..120: mol_type = other DNA
gatccctctcccttcccttcagcatctacacgggcgacagcttcgtcaccccttgatggggcagcctcttcccctcatcacagactatgctgttcagccacatgtgggcacgggtgagtg

SEQ ID NO: 25753 - DNA, 120 bp, synthetic construct
  source 1..120: mol_type = other DNA
aggcacagacagagaaagtcgcaggggctggggcggtgcaggtgatgatgatacatctggaaaagcaaaagccaaggtcaggttcagtactcaccatggctgtgctccccaaggggcagt

SEQ ID NO: 25754 - DNA, 120 bp, synthetic construct; identical to SEQ ID NO: 7472
  source 1..120: mol_type = other DNA

SEQ ID NO: 25755 - DNA, 120 bp, synthetic construct
  source 1..120: mol_type = other DNA
tttactaagggctaccccaaaagggaatgtatggagcttaagggtgacaataggatgggctctgcacccctccgttagaatacgagctccgtgtcggttttattcgctattgtatcctca

SEQ ID NO: 25756 - DNA, 120 bp, synthetic construct
  source 1..120: mol_type = other DNA
ctgaagaaccagtggtttgtccgctgccaggaaatgggggcccgagctgccaaggtgaggctgcagtgtaggaaggactggggccaggggttgggggagctccctgagaattggaatgaa

SEQ ID NO: 25757 - DNA, 120 bp, synthetic construct
  source 1..120: mol_type = other DNA
agaatcttggcaagaggcttgggaggtcctttctgagttttaaaatgacctcagaggccactcgtcctatctgtggaggtgcggccgtgcaggaagggcaacattgtctaaagtcccctt

SEQ ID NO: 25758 - DNA, 120 bp, synthetic construct; identical to SEQ ID NO: 7473
  source 1..120: mol_type = other DNA

SEQ ID NO: 25759 - DNA, 120 bp, synthetic construct
  source 1..120: mol_type = other DNA
tcatagtcatgtaaccttctgcgcgatcaaggctccctgaagtggcatttctttatctcacccctgggggaacctggccactctaagaccacatgaggacgtgaaaaccaagtgacattt

SEQ ID NO: 25760 - DNA, 120 bp, synthetic construct
  source 1..120: mol_type = other DNA
cagggaggccaggggcagagctgaccctggagaggggtgagtgcctgagctggggagggatgtacaggggagcgggggcctgggcatctgggcctttgaggggaacagatcccaagatac

SEQ ID NO: 25761 - DNA, 120 bp, synthetic construct
  source 1..120: mol_type = other DNA
actgtccccattctttttctgtttcccagatcctgatgtcctagacacatggttttcttctgccctgttccccttttctgccctgggctggccccaagaggtgaggtgggttgagagggc

SEQ ID NO: 25762 - DNA, 120 bp, synthetic construct; identical to SEQ ID NO: 7474
  source 1..120: mol_type = other DNA

SEQ ID NO: 25763 - DNA, 120 bp, synthetic construct
  source 1..120: mol_type = other DNA
caaaagtatggaggccagagatcccaaggcacctccaaggaaacccccctctgttgacccctccctgcccccaggtgcttcttcatcccatggttcgggacaggcagggccggaagatga

SEQ ID NO: 25764 - DNA, 120 bp, synthetic construct
  source 1..120: mol_type = other DNA
aggctgagggaggagtgaggccagcaggtgtgacccttatagaggcagggccttcgacctgggtcgtgaattgcccccttccatccccaggtgctgcaggaaaagctgagaagcggaaat

SEQ ID NO: 25765 - DNA, 120 bp, synthetic construct
  source 1..120: mol_type = other DNA
ccacaaaggcatctgccacccttcttcttcctctggttgcagaaaaaggactttcctcacgggatccctgagtgtgggacagatgccctgagattcacactctgctcccatggagttcag

SEQ ID NO: 25766 - DNA, 120 bp, synthetic construct; identical to SEQ ID NO: 7475
  source 1..120: mol_type = other DNA

SEQ ID NO: 25767 - DNA, 120 bp, synthetic construct
  source 1..120: mol_type = other DNA
gccccctctgcctgcagctgtctccctcctccccgatggatgcctggatcctgagccgccttgccctggctgcccaggagtgtgagcggggcttcctcacccgagagctctcgctcgtca

SEQ ID NO: 25768 - DNA, 120 bp, synthetic construct
  source 1..120: mol_type = other DNA
agagctctggagttaataagttcccaattgtcccctcagttaggagaggagaggagacgagggagtctcagttcccctcttcctgggactggttttggcagtgcagcccaggcactgttg

SEQ ID NO: 25769 - DNA, 120 bp, synthetic construct
  source 1..120: mol_type = other DNA
caggctgcgtgctgagagaggcctgggagggactagcagcggtctttagaccaggggttctcacgctgtcctacgtccaaagcacctggagggcttgttgacggtggatcccccccgctc

SEQ ID NO: 25770 - DNA, 120 bp, synthetic construct; identical to SEQ ID NO: 7476
  source 1..120: mol_type = other DNA

SEQ ID NO: 25771 - DNA, 120 bp, synthetic construct
  source 1..120: mol_type = other DNA
tgtagggaggagggctgtggccctggacctgtcctctgaccattggcttcctctccaggaggctgtgaagcccgtgctgtggcactcgccccgccccctggggccccctcaggtcctgtt

SEQ ID NO: 25772 - DNA, 120 bp, synthetic construct
  source 1..120: mol_type = other DNA
cccctaccccagcgcctgcagcttggtgagtcccaagcaccttggagtgggtctgtgggtgaatgggggggagcaccttctgaaggggtttgctgcagggggctcatctgcaggaatggt

SEQ ID NO: 25773 - DNA, 120 bp, synthetic construct
  source 1..120: mol_type = other DNA
ctgctatttttgagctgtgtgatcgagcctcagtttcccgcatgtttaaactaggaacagtaatagtatatgttatggttgtgatgagggttggataagttagtaatagggtgtccccaa

SEQ ID NO: 25774 - DNA, 120 bp, synthetic construct; identical to SEQ ID NO: 7477
  source 1..120: mol_type = other DNA

SEQ ID NO: 25775 - DNA, 120 bp, synthetic construct
  source 1..120: mol_type = other DNA
ggtcccccccattgccaggagcactggcgccagccagagctggagcggcgcttctcccgggtccaagaggtcgtgcaggtgctaagggctctccgagccacgtaccagctcaccaaagcc

SEQ ID NO: 25776 - DNA, 120 bp, synthetic construct
  source 1..120: mol_type = other DNA
gggaggcaggagctgaggccttgcccctgacagtttctttctttccagtgctgctgcagagctcagagcctggggaccagggcctcttcgaggccttcttggagcccctgggcaccctgg

SEQ ID NO: 25777 - DNA, 120 bp, synthetic construct
  source 1..120: mol_type = other DNA
gggagggttagggcaggcttgggaagcatgctgggaggaagggaggggctgggctctataaagtaggggaagggaccttctaatggaggatggaggcctggcagcaggcggatgtctgag

SEQ ID NO: 25778 - DNA, 120 bp, synthetic construct; identical to SEQ ID NO: 7478
  source 1..120: mol_type = other DNA

SEQ ID NO: 25779 - DNA, 120 bp, synthetic construct
  source 1..120: mol_type = other DNA
catccccatcagttttcctccctctcagacctgtctttgaggacaaacagatttgtcagctgtcagggtgcagtgggacgtcagagactatgtggtccatcgccttcattgtgtaaatga

SEQ ID NO: 25780 - DNA, 120 bp, synthetic construct
  source 1..120: mol_type = other DNA
agtctgggaatgaggagattgagataaacttttgaaatcccaaacatgtctgtttatggctctttggtcccctttgctcccagtggtgacttttgtgcttctgagttgtcccctgagagc

SEQ ID NO: 25781 - DNA, 120 bp, synthetic construct
  source 1..120: mol_type = other DNA
ctggcttttgcaggctctttctcctccacttctcactaaatggaagcttccccgctccttggctgtatccctagaggtgctgagagaagtaggacttcctccagacctgatgggctgcag

SEQ ID NO: 25782 - DNA, 120 bp, synthetic construct; identical to SEQ ID NO: 7479
  source 1..120: mol_type = other DNA

SEQ ID NO: 25783 - DNA, 120 bp, synthetic construct
  source 1..120: mol_type = other DNA
tgtagcctcaacctccagggctctagtgatcctcctgcctcagacttctgagtagctgggaccacaggtgtgcaccactgtgccctgctacttttttttttttttttttttttggaaacg

SEQ ID NO: 25784 - DNA, 120 bp, synthetic construct
  source 1..120: mol_type = other DNA
attctcctgccttagcctcttgagtagctgggattacagttgtctgtcaccacgcccagctaaattttttttgtatttttagtagagacaaggtttcaccatgttggccaggctggtttt

SEQ ID NO: 25785 - DNA, 120 bp, synthetic construct
  source 1..120: mol_type = other DNA
ttttgccatgttggccagggtggtcttgaacttctgggctcaaataatccacctgccttggcctcccaaggtgttgggattacaagcataaaccactgcgcccagcccccattttggaga

SEQ ID NO: 25786 - DNA, 120 bp, synthetic construct; identical to SEQ ID NO: 7480
  source 1..120: mol_type = other DNA

SEQ ID NO: 25787 - DNA, 120 bp, synthetic construct
  source 1..120: mol_type = other DNA
ttttgagcacctgctatggatgggctgggccttattctggacacttagattcatcagtgagtgaaacaaaattctgtgcccttgtagtactttccttctagcaggacagtcagaaataac

SEQ ID NO: 25788 - DNA, 120 bp, synthetic construct
  source 1..120: mol_type = other DNA
aaatagtgggtcagggcagaactcactgtaaaggtgaggtttaagcaaaggcttgtaggaggtataggaagagcgttccagacaaagggaagggccagaggaaaacagatagaggcatgg

SEQ ID NO: 25789 - DNA, 120 bp, synthetic construct
  source 1..120: mol_type = other DNA
caaggcggacaatctggggcttgtgtccaaaatggtagccagttggctacctaaagcattaaataaaataaaaacgttcagtttcttagtcgtacttgccatatttcaagtgttttggta

SEQ ID NO: 25790 - DNA, 120 bp, synthetic construct; identical to SEQ ID NO: 7481
  source 1..120: mol_type = other DNA

SEQ ID NO: 25791 - DNA, 120 bp, synthetic construct
  source 1..120: mol_type = other DNA
gaaccccaaagcactcttcactgcactgctctgttttgagccttgggagacaattctttgagaaaaataatctggaaatcacatcctggtgatctcaggccctgaagtctaggaaccagg

SEQ ID NO: 25792 - DNA, 120 bp, synthetic construct
  source 1..120: mol_type = other DNA
taggggcaagtcataaaatactagtctcctttggagccccctgctacctctccttgggggctaattgtcccaggacagttgtgaaggaaggtagaccaattttttaagtgttttttttcc

SEQ ID NO: 25793 - DNA, 120 bp, synthetic construct
  source 1..120: mol_type = other DNA
gtgaaggaaggtagaccaattttttaagtgttttttttccaccctgccattttctatgctcccctcatcttcagtgatgctccatactgaactcttgttgtcttctgtctccaaaggagt

SEQ ID NO: 25794 - DNA, 120 bp, synthetic construct
  source 1..120: mol_type = other DNA
agtttgtgttttgagagctggtgagaagtcaatttttttttttttttttttttttttgagacagagtcttgctctgtagtccaggctggagtgcatggtcttggctcactacagcctctg

SEQ ID NO: 25795 - DNA, 120 bp, synthetic construct; identical to SEQ ID NO: 7482
  source 1..120: mol_type = other DNA

SEQ ID NO: 25796 - DNA, 120 bp, synthetic construct
  source 1..120: mol_type = other DNA
agacaggctgtgatatgtccctaagtagcttccctgtgtgatcctcacaacaacctgatggtgcaggaataatgagaaaaactcagaattgtgtaaaaacaaaacaaaacaacaacaaca

SEQ ID NO: 25797 - DNA, 120 bp, synthetic construct
  source 1..120: mol_type = other DNA
gacagctttagagatccgtgctgcctcccatgctaaagctgctttcaagctaattttctgactctgccgactgtgtgtgtgcgaatggactgttttccttggtgggttcccagatactct

SEQ ID NO: 25798 - DNA, 120 bp, synthetic construct
  source 1..120: mol_type = other DNA
ctgtcacactacagcaggtaccatcattgttcccattttgcgagtgaagaaatggaggctccaagaggataagaaacatgcccaggaattcacatgtgggctggtgtcacctcatactca

SEQ ID NO: 25799 - DNA, 120 bp, synthetic construct; identical to SEQ ID NO: 7483
  source 1..120: mol_type = other DNA

SEQ ID NO: 25800 - DNA, 120 bp, synthetic construct
  source 1..120: mol_type = other DNA
taatgatacctagtatgccacattcaagactgctgcaagcatcgaaatagggatgcaggagaaaagcaggacttcaataaatgttgcttctctttattcccaggtgttccaaagatctca

SEQ ID NO: 25801 - DNA, 120 bp, synthetic construct
  source 1..120: mol_type = other DNA
accctctgctcaacagggggacagtcagagacttgagcatccaacccccacttcctgccagctctgtgctcagggacccacagagtcaagcaagttattgaattcagcataccgaatttt

SEQ ID NO: 25802 - DNA, 120 bp, synthetic construct
  source 1..120: mol_type = other DNA
tgcagacaacatggtgttgagatcttgcatggtggagggtgacgctggtccctgaagggagatggaggaggaggcagagctgggaacaaagggttaaagggcgccatgtaagagagctct

SEQ ID NO: 25803 - DNA, 120 bp, synthetic construct; identical to SEQ ID NO: 7484
  source 1..120: mol_type = other DNA

SEQ ID NO: 25804 - DNA, 120 bp, synthetic construct
  source 1..120: mol_type = other DNA
cccttttctctggcctcttcttgccacagggacccaggagtcctgccctctagccctcacctgttccatgtgagctgccaaggagggtcaagaggaggacaaggggcagcccagacccca

SEQ ID NO: 25805 - DNA, 120 bp, synthetic construct
  source 1..120: mol_type = other DNA
aggaatctggtcaactggattttccagttctcccagtaagagaggacccaggagaggaccattcactgtgcttttggggaaaatagaaggaagtcccctcttttccactctgtgtcccac

SEQ ID NO: 25806 - DNA, 120 bp, synthetic construct
  source 1..120: mol_type = other DNA
ccgggcctcccaaggatctttagagattaattattaactgcagctaattttcatcattcttgacaccgaagggctcaggaatgtgggcccaaaagggaggggtggattaagccaagtttc

SEQ ID NO: 25807 - DNA, 120 bp, synthetic construct; identical to SEQ ID NO: 7485
  source 1..120: mol_type = other DNA

SEQ ID NO: 25808 - DNA, 120 bp, synthetic construct
  source 1..120: mol_type = other DNA
aaaggggacacccacctactcccggccgagatgcctacaggcaagcgctgggacaggcaagcacaggacagatgtgcagagggagttactgaccctctttagaaactaggaaagtaaggc

SEQ ID NO: 25809 - DNA, 120 bp, synthetic construct
  source 1..120: mol_type = other DNA
aagagacacaccagccatggaaacttgcttgaacacacaagggcacaggccagcatcttcctatctgccacttccctatgcagcctctccaccttccccaaagccagcgggactgagcac

SEQ ID NO: 25810 - DNA, 120 bp, synthetic construct
  source 1..120: mol_type = other DNA
agacttgcacaggacaacaggaagaccacagtgggaagaaagcatggaggagaagagcagcaggcacaggagggacgagcaggaggtagaattgggaacacagagagatcttcctcggag

SEQ ID NO: 25811 - DNA, 120 bp, synthetic construct; identical to SEQ ID NO: 7486
  source 1..120: mol_type = other DNA

SEQ ID NO: 25812 - DNA, 120 bp, synthetic construct
  source 1..120: mol_type = other DNA
ccatgtgctaggctcatcactaagtattcctttatagcgcataagcgcctgtgaagtaggtactagattaccccgattttagaggtgaaattaagacttaggccttgtgacttgccagag

SEQ ID NO: 25813 - DNA, 120 bp, synthetic construct
  source 1..120: mol_type = other DNA
cccaaacatgacacgtgtcttccttggtgccccttatctcccctttccccttccctgtcaaaggaatggaaagctctgtcagctgcagccatctaggtgagacacggctcaggtattgac

SEQ ID NO: 25814 - DNA, 120 bp, synthetic construct
  source 1..120: mol_type = other DNA
aatcctgcttccctgagggactcatacgtcctgacttccaacggttgtacttctaggaacaagaggatgaccttgggataggtcatttgggtctccccttttaaaggagggtctgggctg

SEQ ID NO: 25815 - DNA, 120 bp, synthetic construct; identical to SEQ ID NO: 7487
  source 1..120: mol_type = other DNA

SEQ ID NO: 25816 - DNA, 120 bp, synthetic construct
  source 1..120: mol_type = other DNA
gggggtcttgaggaaggacatgaatttgggacccagtgggatggccaactcttctaaccctgttctatggtttatcttcttttttcaacagttcagctgaccctactggggacttctgac

SEQ ID NO: 25817 - DNA, 120 bp, synthetic construct
  source 1..120: mol_type = other DNA
ccggtttctggaagtctcccactgtttctggaagtcttcccactatctctggaggtttccccactgtttctgcaactgtccccactatttccaaaagtttccctactgtctctgaaatct

SEQ ID NO: 25818 - DNA, 120 bp, synthetic construct
  source 1..120: mol_type = other DNA
gtgtctcaacagtttcttcaaactctgggagttttcccagcagtcctcagtctttagctccagccgtttctgggagcacttcaggaacagtctccacatcatcaggtgatatttctgttg

SEQ ID NO: 25819 - DNA, 120 bp, synthetic construct
  source 1..120: mol_type = other DNA
aacctcagtggaagcagctcccttgcctttgtggctatacaagggcctctctttctgttttccaattcatcacctttttctgtcatgattagttcctgttgtatcctaagacttttttgg

SEQ ID NO: 25820 - DNA, 120 bp, synthetic construct; identical to SEQ ID NO: 7488
  source 1..120: mol_type = other DNA

SEQ ID NO: 25821 - DNA, 120 bp, synthetic construct
  source 1..120: mol_type = other DNA
actcttgttgcctaggctggagtgcaatggcgcgatctcggctcactgcaacctccgcctcccgggttcaagcaattctcctgcctcagcctccggagtagctgggattacaggcgcctg

SEQ ID NO: 25822 - DNA, 120 bp, synthetic construct
  source 1..120: mol_type = other DNA
gacgtcaggtgatctgcctgtctcagcctcccaaagtgctgggattacaggtgtgagccactgcacccggcctatcagtcagttcttactccagggccacagtgcttaaggactacagat

SEQ ID NO: 25823 - DNA, 120 bp, synthetic construct
  source 1..120: mol_type = other DNA
attttcataacattatttcatcagtttattccaaaaacttgctggagtcttgcctgtgggtgcatttgatgtgacctctgctttgctcttgcttgaatctcttctgttttttccctctgc

SEQ ID NO: 25824 - DNA, 120 bp, synthetic construct
  source 1..120: mol_type = other DNA
cctctgggctcagcatcctggccagttaagtcactcttctaggcactgggtcacttacagtaaaatgttggtgggcctattctctctcatttccctgcagccacccctggctccttggga

SEQ ID NO: 25825 - DNA, 120 bp, synthetic construct; identical to SEQ ID NO: 7489
  source 1..120: mol_type = other DNA

SEQ ID NO: 25826 - DNA, 120 bp, synthetic construct
  source 1..120: mol_type = other DNA
ggagtggtggggagaactggggcttggaggaaggagagtgcctactgaggaccctcccagtgcagaagcatcacagacccagggatgcagaaaatagggcccgagaaagacagtgaggtg

SEQ ID NO: 25827 - DNA, 120 bp, synthetic construct
  source 1..120: mol_type = other DNA
gataggagaaaacaccagagagatgaggtctcagagtcagagacatcagtcacagaaagaaagatggaaagtcagagggcagtgggggtctggggggctggaggcaccacttacctcagt

SEQ ID NO: 25828 - DNA, 120 bp, synthetic construct
  source 1..120: mol_type = other DNA
aagaaggtgagcaatgccatggtccaatgtgtgggatccctgtgccagtggggctgggacctggtgccccaggattcagaggagaacagggctttggggaggggaatgacagcttgcagg

SEQ ID NO: 25829 - DNA, 120 bp, synthetic construct; identical to SEQ ID NO: 7490
  source 1..120: mol_type = other DNA

SEQ ID NO: 25830 - DNA, 120 bp, synthetic construct
  source 1..120: mol_type = other DNA
tacagatgaggtaattgagtcctggatgaaatgagaatgatggcatccatctcaaagggtggttgggaggatcaaataagcttatgcaaagagagcactaatggtgcttggcatgtatta

SEQ ID NO: 25831 - DNA, 120 bp, synthetic construct
  source 1..120: mol_type = other DNA
aagaggaagcagcagttcatgggaagagctgggctgagcagcaggttcccgggtccctagattaacccatcgtaccctcccctcatctcacaggcctgccagttccggagggagatgagt

SEQ ID NO: 25832 - DNA, 120 bp, synthetic construct
  source 1..120: mol_type = other DNA
ggccttccttcttcctctcccagatagtctcattcccagactcccctatcccattcaccttagctgggaccatttcctgcaggtagattcctggggtcactggcccccccaggtctcttc

SEQ ID NO: 25833 - DNA, 120 bp, synthetic construct; identical to SEQ ID NO: 7491
  source 1..120: mol_type = other DNA

SEQ ID NO: 25834 - DNA, 120 bp, synthetic construct
  source 1..120: mol_type = other DNA
agggcaggtgcaggaccctcctctgtggtgccccctcggtctgctatgggagggtggtgaacaagttattgctaaataaaatggcacttcctccacttgtctcccagatgctgtgggttt

SEQ ID NO: 25835 - DNA, 120 bp, synthetic construct
  source 1..120: mol_type = other DNA
ccctgatccgaggctcatttatcctcatctgtaaagtgagggtgacaggtgataactcataggtgaggtgcttagtacattcttcagtacatagaaatgcccaaacaatggtagttggca

SEQ ID NO: 25836 - DNA, 120 bp, synthetic construct
  source 1..120: mol_type = other DNA
cttggggtggagttgtagctcagagagaagggaagggggtgttcattcacaaacactggttagtgcttattctaaagcagagatcctccacttcagcacaattggtgtcctgggctggat

SEQ ID NO: 25837 - DNA, 120 bp, synthetic construct; identical to SEQ ID NO: 7492
  source 1..120: mol_type = other DNA

SEQ ID NO: 25838 - DNA, 120 bp, synthetic construct
  source 1..120: mol_type = other DNA
tgactccacggagcctcattaatctcccattaatcacattaataagcagttggcctcctctcctcttcccacctattccagccctgcccagggcttagggacaagtcacaccaagtaagg

SEQ ID NO: 25839 - DNA, 120 bp, synthetic construct
  source 1..120: mol_type = other DNA
gaaaggcatcctccggccctggcttccactccatccaggcggagtggaaacatttattgattgcctactgtgtgccagacactgtcctaggctctgatgacacagcagggatccaaggtg

SEQ ID NO: 25840 - DNA, 120 bp, synthetic construct
  source 1..120: mol_type = other DNA
agtctctgagctaatgcttgctttaggcaggaagtgaggaagggaagggggagctctggggtgctcctaaaaatgagatgtctgcatttctgtataggagtgaatggggacttcgagaca

SEQ ID NO: 25841 - DNA, 120 bp, synthetic construct; identical to SEQ ID NO: 7493
  source 1..120: mol_type = other DNA

SEQ ID NO: 25842 - DNA, 120 bp, synthetic construct
  source 1..120: mol_type = other DNA
gctgatgcgggagaggtgggagggtgcgcgtgaagctggacacagatcagaacgtgaaccccaccccatcctgctcccagccagagctcagtccttctagaactgagccatctgctcccc

SEQ ID NO: 25843 - DNA, 120 bp, synthetic construct
  source 1..120: mol_type = other DNA
gtgcctggctccatgacgcagcagctgcggtctcctcttatcagggctcccctgtgggttggggtggctccatttgtttaagacttagtcctgaggagccccagcccccatgacgtcaag

SEQ ID NO: 25844 - DNA, 120 bp, synthetic construct
  source 1..120: mol_type = other DNA
cttccttctagcttcttggggggcaggtaagatgcccacaggggatacagaagacagaaacagcttgtttcttagtgttcatagcgttggacaacaaatagaaatgaatgaagggggcgg

SEQ ID NO: 25845 - DNA, 120 bp, synthetic construct; identical to SEQ ID NO: 7494
  source 1..120: mol_type = other DNA

SEQ ID NO: 25846 - DNA, 120 bp, synthetic construct
  source 1..120: mol_type = other DNA
tgcagcctctgcctcccgggttcaagcgattcttctgcctcagtctcctgggtaactgggattacaggcacctgccaccacgcctggctcatttttttgtatttttagtagagacaggat

SEQ ID NO: 25847 - DNA, 120 bp, synthetic construct
  source 1..120: mol_type = other DNA
atctcagcatcccctgaggtggctaataatatcccatcttatagttgaggagagtggattcacaatgattatgtcccatatctcacagctagagggaggtaagcagggattccagctcca

SEQ ID NO: 25848 - DNA, 120 bp, synthetic construct
  source 1..120: mol_type = other DNA
aaaatgggctggatgctgctgcccagccgtaccagtatttgatgcctacagagcatttacactgcaccaggtgttgctctagggacttcatccacatttactcatttaatccacatggag

SEQ ID NO: 25849 - DNA, 120 bp, synthetic construct; identical to SEQ ID NO: 7495
  source 1..120: mol_type = other DNA

SEQ ID NO: 25850 - DNA, 120 bp, synthetic construct
  source 1..120: mol_type = other DNA
gatattagaggcagtgccccttccctgagcacagtcaggttgaggccaggggtggaggcaggggcaggtgggtggtgaatggcgatgactgaggaatctttgagctgcctctgaaaggtc

SEQ ID NO: 25851 - DNA, 120 bp, synthetic construct
  source 1..120: mol_type = other DNA
ccccttcctctcaggcggattgtccactggctgctctctcctccttccatcttgcagcttaaggaagaggaacctgcagggggcggaagggaatccactccatacacagtcgctctgaga

SEQ ID NO: 25852 - DNA, 120 bp, synthetic construct
  source 1..120: mol_type = other DNA
gctggctgctcccattctgcagattttgaagacaagagtgagtgggttacaggtggggagggcttgaggctgggctcgggttgtgatgaggtcgggtggaactggagtgtgaatcagagc

SEQ ID NO: 25853 - DNA, 120 bp, synthetic construct; identical to SEQ ID NO: 7496
  source 1..120: mol_type = other DNA

SEQ ID NO: 25854 - DNA, 120 bp, synthetic construct
  source 1..120: mol_type = other DNA
tgagggagcacaggtgcagtctagattaaattatcacagggaggcacaggtgcagtccagattaaatcatcacagggaggctcaagcgcagtctagattaaatcatctgagggaggctca

SEQ ID NO: 25855 - DNA, 120 bp, synthetic construct
  source 1..120: mol_type = other DNA
agatgaaaccatctgagagagtacaggtgaggcaggagatgggaattggggctggggtccttggaagaatctaacaagaacattttcctataacaaatgttatttgatttaatttctata

SEQ ID NO: 25856 - DNA, 120 bp, synthetic construct
  source 1..120: mol_type = other DNA
agtccccaagcaatcatttgattatatctccctttagctttccttttttttttttgtagagacaggtctcgctatgttgcccagactggtctcaaactggtgatcctcctgcctcagact

SEQ ID NO: 25857 - DNA, 120 bp, synthetic construct
  source 1..120: mol_type = other DNA
ttgaactcatactgtataggtattttaacaaacatttacccacattattgcaaatggagcatgccatttatgggggtaaggataccaggaaacactagagatgctcttttgggacagcgt

SEQ ID NO: 25858 - DNA, 120 bp, synthetic construct; identical to SEQ ID NO: 7497
  source 1..120: mol_type = other DNA

SEQ ID NO: 25859 - DNA, 120 bp, synthetic construct
  source 1..120: mol_type = other DNA
atttttagtagagacggggtttcgccatgttggccaggctggtctcgaactcctgacctcaggcccacaatggcctcccaaagtgttgggattgcaggtataaggcactgtgcccagccg

SEQ ID NO: 25860 - DNA, 120 bp, synthetic construct
  source 1..120: mol_type = other DNA
tgtcttgtgctaaagttggattttcctctctgcacctcctgcctattcttcagtgaccaaaacagttcttttcgggctatgatggttgtacgtggaatgaatatctcctggtgaaaactt

SEQ ID NO: 25861 - DNA, 120 bp, synthetic construct
  source 1..120: mol_type = other DNA
cctcttggctgtgtcagggccaaggaatcccttgagctttacctcagctttttacaatctatggttccacaactgtttgatgcagatctaaaattctaaaatcttgttatctgagtctag

SEQ ID NO: 25862 - DNA, 120 bp, synthetic construct
  source 1..120: mol_type = other DNA
aatctcagagctcaattactgaacagcggaagtcgcccttggtcttccagcctgtggaggtcacaaatacatttggtttttacttaacgtgcatgatgaaatgttgttggcaaggctttt

SEQ ID NO: 25863 - DNA, 120 bp, synthetic construct; identical to SEQ ID NO: 7498
  source 1..120: mol_type = other DNA

SEQ ID NO: 25864 - DNA, 120 bp, synthetic construct
  source 1..120: mol_type = other DNA
gacagggaggctgaggtgggggtactgcttgagcccaggaggtcaggactgcagtgagctgtgaccatgccactgcactccagcctggtgcagagtaagactctatctcaaacaacaaca

SEQ ID NO: 25865 - DNA, 120 bp, synthetic construct
  source 1..120: mol_type = other DNA
aaccccatctctactaaaaatacaaaaaattagctgggtgtggtggcatgtgcctgtagtcccagctactcaggaggctgaagcaggaaaatcacttgaacccaggaggtggaggttgca

SEQ ID NO: 25866 - DNA, 120 bp, synthetic construct
  source 1..120: mol_type = other DNA
gccttgccattgtggaaatttaattgtatttatcacatatcagaaagtgatgagtgctgtgttattaaaacacagcagagaaagtggcccaggaatgcagaggctgctgttttcaagaag

SEQ ID NO: 25867 - DNA, 120 bp, synthetic construct; identical to SEQ ID NO: 7499
  source 1..120: mol_type = other DNA

SEQ ID NO: 25868 - DNA, 120 bp, synthetic construct
  source 1..120: mol_type = other DNA
tgattctttaaggccagtggaaaatgccctttgcattgctgccagctcctttattcactcaatagatagtcattcatcccttatcatgtttaaaaacatctggggcacagtgaaaagtct

SEQ ID NO: 25869 - DNA, 120 bp, synthetic construct
  source 1..120: mol_type = other DNA
ttcataattatttgattaaataaacaaatatatgaacagcacctttcagggagtccacacatgtcagtgtctttccttctttaaaagactgggctgacctattggctgtgcactgtggtc

SEQ ID NO: 25870 - DNA, 120 bp, synthetic construct
  source 1..120: mol_type = other DNA
tgagaagattacttaaccactcagaaccttgtttcttcatctataaagtttggagaataggatagttctcaacctcaacaggttcttgtgaaaagtaaataagttaatgtatgccctcac

SEQ ID NO: 25871 - DNA, 120 bp, synthetic construct
  source 1..120: mol_type = other DNA
tttcctccgtgaaatgtaaatttctcagatgtaaaataggggaagttgaccgcttctaaagagccttatggagcattgggagatcaatcaccatagaagagaatccagaaagagaatgtc

SEQ ID NO: 25872 - DNA, 120 bp, synthetic construct; identical to SEQ ID NO: 7500
  source 1..120: mol_type = other DNA

SEQ ID NO: 25873 - DNA, 120 bp, synthetic construct
  source 1..120: mol_type = other DNA
ctttcactctttggtgatctcttggccttcactcttttggctaggtatcagagacatctcctctgtctccatcaggttgtttttccatggaattaaggcgtgtatctgtccactgatagg

SEQ ID NO: 25874 - DNA, 120 bp, synthetic construct
  source 1..120: mol_type = other DNA
atctatccccagttggctttaaatgtgtgaagagggggacccagtggggtgaccataagggttgggtcatctcatccattcccctcatccaactttatcaccgaaatgaaagcttcccat

SEQ ID NO: 25875 - DNA, 120 bp, synthetic construct
  source 1..120: mol_type = other DNA
atttgggatggtgttagaatgttatggaaaggtgaagagtctaacgtttactcctggtcttctcagctatgccatagaaagaagactccattccataagttacagaccctaaaggggcac

SEQ ID NO: 25876 - DNA, 120 bp, synthetic construct; identical to SEQ ID NO: 7501
  source 1..120: mol_type = other DNA

SEQ ID NO: 25877 - DNA, 120 bp, synthetic construct
  source 1..120: mol_type = other DNA
gaacaaagagatcccctagagaaggaggtgggaagggggagttggagaagaacatgggggaagtttcttatttgcctctctccctccacaggtgctactacattccaagaatatcagaaa

SEQ ID NO: 25878 - DNA, 120 bp, synthetic construct
  source 1..120: mol_type = other DNA
acagaaatccatgagcaaaaacgccactgcaacaccacacgccattctaagccaactgacaagcctacaggcaactccaaaactatagaccacaaaagctctacagataatcatgaggct

SEQ ID NO: 25879 - DNA, 120 bp, synthetic construct
  source 1..120: mol_type = other DNA
ataacgccagcacccaagagcaaaataaactgtcgtaagtccacaacaggcaaatcaacggtaacaagaaaatcagataaaactggaagacctttggaaaagtccatgagtactttggat

SEQ ID NO: 25880 - DNA, 120 bp, synthetic construct; identical to SEQ ID NO: 7502
  source 1..120: mol_type = other DNA

SEQ ID NO: 25881 - DNA, 120 bp, synthetic construct
  source 1..120: mol_type = other DNA
ctatccccagcagagcctatagaaaatagagaaaggacagccaatgagaacaccgcaccattcccagcagggcctacagaaaatagagaaatgacagccaatgagaataccacactattc

SEQ ID NO: 25882 - DNA, 120 bp, synthetic construct
  source 1..120: mol_type = other DNA
gagcctacagaacatggagaaaggaccccatttgccaatgacaaaaccacatcatcctcagcagagtctacagaacatggagaaaggaccccactggccaacgagaacaccacaccatcc

SEQ ID NO: 25883 - DNA, 120 bp, synthetic construct
  source 1..120: mol_type = other DNA
gagcctacagaaaatagagaaacaacagccaatgagaagaccacaccatccccagcagagcctacagaaaatggacaaaggaccccatttgccaatgagaaaaccacatcatcctcagca

SEQ ID NO: 25884 - DNA, 120 bp, synthetic construct; identical to SEQ ID NO: 7503
  source 1..120: mol_type = other DNA

SEQ ID NO: 25885 - DNA, 120 bp, synthetic construct
  source 1..120: mol_type = other DNA
ccagcagggcctacagaaaatagagaaatgacagccaacgagaagaccacactattcccagcagagcctacagaaaatagagaaaggacagccaatgagaagaccacatcatccccagca

SEQ ID NO: 25886 - DNA, 120 bp, synthetic construct
  source 1..120: mol_type = other DNA
ccagcagagcctacagaaaatagagaaaggacagccaatgagaagaccacaccattcccagcagagcctacagaaaatagagaaaggacagccaatgagaacaccacaccatccccagca

SEQ ID NO: 25887 - DNA, 120 bp, synthetic construct
  source 1..120: mol_type = other DNA
tcagcagagcctacagaacacgcagaaaggactccactggccaatgagaacaccacatcatccccagcagagcctacagaaaatagagaaaggacagccaatgagaagaccacacaattc

SEQ ID NO: 25888 - DNA, 120 bp, synthetic construct; identical to SEQ ID NO: 7504
  source 1..120: mol_type = other DNA

SEQ ID NO: 25889 - DNA, 120 bp, synthetic construct
  source 1..120: mol_type = other DNA
ccagcaaagcctacagaacatggagaaacgacagtcaatgaggacaccacaccatcctcagcagagcctacagaaaatggagaaaggaccccactggccaatgagaacaccacaacatcc

SEQ ID NO: 25890 - DNA, 120 bp, synthetic construct
  source 1..120: mol_type = other DNA
ccagcaaagcctacagaacacgaagaaatgaccccatcggccaatgagaacaccacaccatccccagtaaagcctacagaacatggagaaaagactacattggccaatgagaagatcaca

SEQ ID NO: 25891 - DNA, 120 bp, synthetic construct
  source 1..120: mol_type = other DNA
atcacctcatctgcagcagagtctacagaacatagagatagggctacatcagccaatgtgatcacaccagccccagcagagcctataaaacatgcaaaaaggaccacattggcccatgag

SEQ ID NO: 25892 - DNA, 120 bp, synthetic construct; identical to SEQ ID NO: 7505
  source 1..120: mol_type = other DNA

SEQ ID NO: 25893 - DNA, 120 bp, synthetic construct
  source 1..120: mol_type = other DNA
attacatctagaacgaagctgagttctatcacatcagaagccacaggaaacgagagccatccatacctcaataaagatggctcacagaaaggtatccacgctggacagatgggagagaat

SEQ ID NO: 25894 - DNA, 120 bp, synthetic construct
  source 1..120: mol_type = other DNA
gggatagggaattgaggatacattaggggtcagagttacagggaataatgagtctaggaaaagagacatggcagaagtgggaggaacagtaatagagggagagttttggtgaaaactaag

SEQ ID NO: 25895 - DNA, 120 bp, synthetic construct
  source 1..120: mol_type = other DNA
gaggtgtaaagacaaggagaatatggtagagtggggaactggagatggagctgggactcattgtattggacctggagctggaataaacatcaaggtttggatggaatcttgagaatagaa

SEQ ID NO: 25896 - DNA, 120 bp, synthetic construct; identical to SEQ ID NO: 7506
  source 1..120: mol_type = other DNA

SEQ ID NO: 25897 - DNA, 120 bp, synthetic construct
  source 1..120: mol_type = other DNA
gttcttgaaactggttggggaatgaggtgataagcaaggagggtgtaagtttaggggacaaagaagaaagaatgaataatacgagcagacattctctgtagaaggtaatggtctgagaat

SEQ ID NO: 25898 - DNA, 120 bp, synthetic construct
  source 1..120: mol_type = other DNA
gggaaagggagggactgagggcagagtctctgggtttcaggacagcattatgttatttccattcactattacttaagagtttgtgtgtaaacaggctcatctctgagttctcaggaccct

SEQ ID NO: 25899 - DNA, 120 bp, synthetic construct
  source 1..120: mol_type = other DNA
ccactctctccatgccctggagaaaaaaaagtccagaagaaatcataaatatctctcatctacatggttgcttcctcttcctcccaaatcccttagttttcctaaatgtctacagtggac

SEQ ID NO: 25900 - DNA, 120 bp, synthetic construct; identical to SEQ ID NO: 7507
  source 1..120: mol_type = other DNA

SEQ ID NO: 25901 - DNA, 120 bp, synthetic construct
  source 1..120: mol_type = other DNA
gtctattgaccttttttataataaagtataacatgtttataaagggcatcatagttattagactatccattgggagaaagttctgactggcgttcctggctctggctgagaccttacaga

SEQ ID NO: 25902 - DNA, 120 bp, synthetic construct
  source 1..120: mol_type = other DNA
tccaaaaatggctcctttctgggtttaggtaagagccagcctcagtccaggctgggtttatttgcatggtgacaaaatgagtagaaaaacctgtcaattaataagcaagtattttaaagc

SEQ ID NO: 25903 - DNA, 120 bp, synthetic construct
  source 1..120: mol_type = other DNA
attaaataattcaacaagagttgtcacaagttaggtgctatatagaataaaacaacaccctaattcattaagcccaactccgtgagcatctactatgccccctatttatgttaggacacc

SEQ ID NO: 25904 - DNA, 120 bp, synthetic construct; identical to SEQ ID NO: 7508
  source 1..120: mol_type = other DNA

SEQ ID NO: 25905 - DNA, 120 bp, synthetic construct
  source 1..120: mol_type = other DNA
ctctcagaaagcagacatgccagatgccagagggacccagacttaggcccctggagaaaggaggcagagggacacctgggttctggaaggggctggagagccctcgagaaaaggaggaag

SEQ ID NO: 25906 - DNA, 120 bp, synthetic construct
  source 1..120: mol_type = other DNA
tcaaaaacaaaacgaaataaaaacatctctgcctctagagtcctaaacatccaaccggacagacccctcccctatcaagacaccaaaatgcagcactggaggtcaaagggtgtataaggg

SEQ ID NO: 25907 - DNA, 120 bp, synthetic construct
  source 1..120: mol_type = other DNA
tattccccgctaattatcactttgaaatctaggcggaaatcctttaacaagctccggggctgggccctcattagggataattacttaatcagtaggacgggagggaatgcgctcccccag

SEQ ID NO: 25908 - DNA, 120 bp, synthetic construct; identical to SEQ ID NO: 7509
  source 1..120: mol_type = other DNA

SEQ ID NO: 25909 - DNA, 120 bp, synthetic construct
  source 1..120: mol_type = other DNA
aaactgacacccgtttgtgctgtgctttcacgtacatcgcacctgtgatcctccgatcaccctgcgagttacgaggcctgctttacaagccttataagaagttacagaccttataagagt

SEQ ID NO: 25910 - DNA, 120 bp, synthetic construct
  source 1..120: mol_type = other DNA
ttgttcctcagtggagccaggttctctgacaccaaggcagccccacctggacgggtgggatgttacagggaccacctaaggaacagggtgtaattgagatttgcacgagggtgtccagcc

SEQ ID NO: 25911 - DNA, 120 bp, synthetic construct
  source 1..120: mol_type = other DNA
attaactggcctcatagtcacaggctctgcatcctcccctcacagtgcccagctgtccctggagaggtgctggcaaagtaagaagatccaatgatttgggacacagtcaccttcattttt

SEQ ID NO: 25912 - DNA, 120 bp, synthetic construct; identical to SEQ ID NO: 7510
  source 1..120: mol_type = other DNA

SEQ ID NO: 25913 - DNA, 120 bp, synthetic construct
  source 1..120: mol_type = other DNA
atcttactcctcccagaaccctgcccctggcaagcttttaattcttcctgcaacttcatgtcccattgagacaccaggcatcaaggccccctctggagcccatctgccctctagaaccca

SEQ ID NO: 25914 - DNA, 120 bp, synthetic construct
  source 1..120: mol_type = other DNA
atccatcaatcggagaagacactgaggccacaaaaagtctgaaggagacaagggttcctgtcccaggcattctgtttgcttttcttattctcattcttttgcaaaagcaaaaagcaagca

SEQ ID NO: 25915 - DNA, 120 bp, synthetic construct
  source 1..120: mol_type = other DNA
ccaatgctccgctgtaagcatgaacacaaataatagctgtgttgtatttccttagaatcccgggtttaacggctgctcaacaaatgctttgtatctaacttgaaaattctagtttcaata

SEQ ID NO: 25916 - DNA, 120 bp, synthetic construct; identical to SEQ ID NO: 7511
  source 1..120: mol_type = other DNA

SEQ ID NO: 25917 - DNA, 120 bp, synthetic construct
  source 1..120: mol_type = other DNA
tgcctaatgactacaacccaatgtcaggcagatttataaagccccttcgcttccactgtaggatggaatgccataaaaagggagcaaggagacagttgtggaattggaataaacagaaac

SEQ ID NO: 25918 - DNA, 120 bp, synthetic construct
  source 1..120: mol_type = other DNA
tgttcttttcctcctccctgcgtctctgtgagcttgttcattttaagaggcccaaattattactgcaacaggcaacttccaaactcatattaagtctaccttggctctgaaatccagtcc

SEQ ID NO: 25919 - DNA, 120 bp, synthetic construct
  source 1..120: mol_type = other DNA
ataaatcagtgaacaaaacagcaacaggccctgccttcagggagctcacagttcactaggaaaggcagagatcacacaaagaaggcatataataaaagagaggcacaagtgtgcaaaata

SEQ ID NO: 25920 - DNA, 120 bp, synthetic construct; identical to SEQ ID NO: 7512
  source 1..120: mol_type = other DNA

SEQ ID NO: 25921 - DNA, 120 bp, synthetic construct
  source 1..120: mol_type = other DNA
atagcgaaaccccgtctctactaaaaatacaaaacttagccaggtgtggtggtgcacacctgtaatctcagctacttgggaggctgaggcaggggaatcacttgaacctgggaggcagag

SEQ ID NO: 25922 - DNA, 120 bp, synthetic construct
  source 1..120: mol_type = other DNA
ggcctgtaatcccagcacttttggaagacaaggtgggaggattgcccaaagctaggagtcagagacctgcctgggcgacattgcgagacactgtctctattaaaaaaaaaaaaaaaaaaa

SEQ ID NO: 25923 - DNA, 120 bp, synthetic construct; identical to SEQ ID NO: 1611
  source 1..120: mol_type = other DNA

SEQ ID NO: 25924 - DNA, 120 bp, synthetic construct
  source 1..120: mol_type = other DNA
aaactagcacggatgcaccctcccccttttcatgtccaattcctgttctccagaggagacgacttttaacttttagctttttatcccagtatttgcaagtgcagatttaaacatcatgcc

SEQ ID NO: 25925 - DNA, 120 bp, synthetic construct; identical to SEQ ID NO: 7513
  source 1..120: mol_type = other DNA

SEQ ID NO: 25926 - DNA, 120 bp, synthetic construct
  source 1..120: mol_type = other DNA
gctgccaccatgcccagctaattagttttgttttaaattttagtagagaccatatctcactatgttgcccaggctggtcttgaacccctgagctcaagtgatcctcctgccttggcctcc

SEQ ID NO: 25927 - DNA, 120 bp, synthetic construct
  source 1..120: mol_type = other DNA
aagatagggtctttaggaagtaattaaagttaatggggtcataagagtggtgcccgaattcaatgggactgtggccttatcaaaggagaaagagagttctttctgtcttcactatgtgag

SEQ ID NO: 25928 - DNA, 120 bp, synthetic construct
  source 1..120: mol_type = other DNA
tgtttaagccacccagtttgtggtatttgctatagcagtccaaggtgattaagacagtatccaatatcatggagggataaattttcttttcaaaacaaaactaaaaatattttttaattc

SEQ ID NO: 25929 - DNA, 120 bp, synthetic construct; identical to SEQ ID NO: 7514
  source 1..120: mol_type = other DNA

SEQ ID NO: 25930 - DNA, 120 bp, synthetic construct
  source 1..120: mol_type = other DNA
agtgcagtggtgcgatcttggctcactgcaacctctgcctcccaggttcaggcaattcttctgcctcagcctcccgagtagctgggattacaggcatgcaccaccacacctggctaattt

SEQ ID NO: 25931 - DNA, 120 bp, synthetic construct
  source 1..120: mol_type = other DNA
catgcccagccttagaggctttattagcattcaaaaccatggatgcaatgaagtgtggagtactcttaaacaagctccaagtccatgaaatgccgtgtcagaatttttcctttccttttt

SEQ ID NO: 25932 - DNA, 120 bp, synthetic construct
  source 1..120: mol_type = other DNA
agggtagctgctgattttcccttcttcctcctcctcttctcctcctcctttttcttctaattcttcctcctcttcctcttctctctccctctctgctttctcctccgccttcttattttc

SEQ ID NO: 25933 - DNA, 120 bp, synthetic construct; identical to SEQ ID NO: 7515
  source 1..120: mol_type = other DNA

SEQ ID NO: 25934 - DNA, 120 bp, synthetic construct
  source 1..120: mol_type = other DNA
cagctgcacagtcgttgctatgtagaggaactaatacttgagcgactattttcttatagttggataactctgtttccttataaatatttttctttataaatagagagtgctgtcccatca

SEQ ID NO: 25935 - DNA, 120 bp, synthetic construct
  source 1..120: mol_type = other DNA
gtctacattttctctgagctttccagcttgctccaatgcctctgaggttgctgtgtcagtgctgctgttttttagatccatcaaaggctgggatttctgcatttccttcaacattgtgtc

SEQ ID NO: 25936 - DNA, 120 bp, synthetic construct
  source 1..120: mol_type = other DNA
agttcatggctaacatggtgaaaccatctctactaaaaatataaaagttagccgggcgtggtgacgtgtgcctgtagtcccagctactcaggaggctgaggcaggagaatcactcaaacc

SEQ ID NO: 25937 - DNA, 120 bp, synthetic construct; identical to SEQ ID NO: 7516
  source 1..120: mol_type = other DNA

SEQ ID NO: 25938 - DNA, 120 bp, synthetic construct
  source 1..120: mol_type = other DNA
ctctctcccttatttgaatataagctctgtatcaacttttcaatcactgtatcccatgcctggcacatcatgtggcccacagaaggttcttaaggaatatgtttgaataaatgaatgaga

SEQ ID NO: 25939 - DNA, 120 bp, synthetic construct
  source 1..120: mol_type = other DNA
tgaaagtaagaaagacaggaaggaaggagggaaagaaggaaggaagggagggagggaggaagaaggaaggaaggaagtaaagaagggaggaaggaattaaagaagaaaggaaggaagaga

SEQ ID NO: 25940 - DNA, 120 bp, synthetic construct
  source 1..120: mol_type = other DNA
cttttccccctagtatctccttgtgtctctttacaaactgcctaactcatcaactttcaccacctgaagaggctggaaaaaagctggcctcctgtgaattttacaccccggtgctctcag

SEQ ID NO: 25941 - DNA, 120 bp, synthetic construct; identical to SEQ ID NO: 7517
  source 1..120: mol_type = other DNA

SEQ ID NO: 25942 - DNA, 120 bp, synthetic construct
  source 1..120: mol_type = other DNA
tttgtatttttagtagagacggggtttctccatgttggtcaggctggtctcgaactcccaacctcaggtgatctgcccgccttggcctcccaaagtgttgggattacaggcgtgagccac

SEQ ID NO: 25943 - DNA, 120 bp, synthetic construct
  source 1..120: mol_type = other DNA
gattttatttcacctaggcaagtacagttccaaaaaacattatggcagaaaggacaaggtgccaagaagatcgatcaaatgactcatgcactacagaagcacagctgaatcagcaaccgg

SEQ ID NO: 25944 - DNA, 120 bp, synthetic construct
  source 1..120: mol_type = other DNA
gctcctaattaaatatcaaaaatgtaaagtaggtgtcgtatttgactaaaaattgatatttttcaggaaggactatgcccccagggcccactgtagcctttgagaccatggtggagtctg

SEQ ID NO: 25945 - DNA, 120 bp, synthetic construct; identical to SEQ ID NO: 7518
  source 1..120: mol_type = other DNA

SEQ ID NO: 25946 - DNA, 120 bp, synthetic construct
  source 1..120: mol_type = other DNA
agcctctatcctggcccttgagtccaccctggccttcaccacggtctctaacaccaccacatcttccacagtaacacctgtgcccaccacagcttccacctcaggctctaagaacacaac

SEQ ID NO: 25947 - DNA, 120 bp, synthetic construct
  source 1..120: mol_type = other DNA
aacacctactgacaccaccacagcatctgtgtccgccacagtccccaagaacaacacaccctctgtgataacatctacaccttccacagctcccaacacagcctctaaaaccatgaccac

SEQ ID NO: 25948 - DNA, 120 bp, synthetic construct
  source 1..120: mol_type = other DNA
cactgcaatctccacaaaagcctctgggacaactgtagagtctgcgccctctacagcccctccaacacctgctgagaccaccacagcatctgtgcccaccacaacctctaccacaggctc

SEQ ID NO: 25949 - DNA, 120 bp, synthetic construct; identical to SEQ ID NO: 7519
  source 1..120: mol_type = other DNA

SEQ ID NO: 25950 - DNA, 120 bp, synthetic construct
  source 1..120: mol_type = other DNA
agtatctgtgcctactgcagtctttatcaaagcgcctgaaaccaccacaggctctgagatcactctggcttccatcataacctcaggaaccactgcagtctgtgactacattggcctcta

SEQ ID NO: 25951 - DNA, 120 bp, synthetic construct
  source 1..120: mol_type = other DNA
tcaaaatatttgtgtccaccacatcctagcctccactatggcctttgaggccacatcaacctctgagacccccactacctccacaatagtatctgtgcccacaacaacctccaaaataac

SEQ ID NO: 25952 - DNA, 120 bp, synthetic construct
  source 1..120: mol_type = other DNA
gacccccagtgcctccataatagtatctatgcccacaaccgcctcctccacagactctgagaccaccacagcctccactgcaatatccacgagcaacatggctgtgagcacagcctctga

SEQ ID NO: 25953 - DNA, 120 bp, synthetic construct; identical to SEQ ID NO: 7520
  source 1..120: mol_type = other DNA

SEQ ID NO: 25954 - DNA, 120 bp, synthetic construct
  source 1..120: mol_type = other DNA
ctggagggcccctagaggcgaggttgagagtgtgacccatgaggagatgtactacactcgaaaagaactgcttgaattttctaatttatataaacagaaatctggagaacaggcattaga

SEQ ID NO: 25955 - DNA, 120 bp, synthetic construct
  source 1..120: mol_type = other DNA
aaagggttctaatagtttatttgcttagttagctaaaatatggattaaaagatggcccactgtgagcaagctgatctcccttggtttaatgtaaatgaagggatccaaaggcttagggag

SEQ ID NO: 25956 - DNA, 120 bp, synthetic construct
  source 1..120: mol_type = other DNA
tgaagagccctataattgctcttctctgtatgtcagatctaacagtgggaaccgccgtcagtcaactgcaaaatttaaatacaatgggaataattggatccagaggtggcaggggccaag

SEQ ID NO: 25957 - DNA, 120 bp, synthetic construct; identical to SEQ ID NO: 7521
  source 1..120: mol_type = other DNA

SEQ ID NO: 25958 - DNA, 120 bp, synthetic construct
  source 1..120: mol_type = other DNA
ctttctcccatccttccccaagacctctggccttttaccagggtaactgtgtattggggaaagggaaatgattagacattttggggactactggacactggctctgagctggcgttgatt

SEQ ID NO: 25959 - DNA, 120 bp, synthetic construct
  source 1..120: mol_type = other DNA
gtcaggagttcgagaccagcctggccaaaatagtgaaaccctctctactaaaaatacaaaaattagccacgtatggtggtgcacgcctgtagtcccagctacttgggaggctgaggcagg

SEQ ID NO: 25960 - DNA, 120 bp, synthetic construct
  source 1..120: mol_type = other DNA
cgtttatagaagtcaggtaattaatggagttttagcccaggtctgacttatagtgggtcccgtgggtccctggactcatcctgtgatcatttcctcagtgccagaatgcataattggcat

SEQ ID NO: 25961 - DNA, 120 bp, synthetic construct; identical to SEQ ID NO: 7522
  source 1..120: mol_type = other DNA

SEQ ID NO: 25962 - DNA, 120 bp, synthetic construct
  source 1..120: mol_type = other DNA
cctggtacctagtatgcagccattgacttggcaaatgcctttttctccattcctgtccataggcccaccagaagtaatttgccttccgctggcaaggccagcaatacagctttactgtcc

SEQ ID NO: 25963 - DNA, 120 bp, synthetic construct
  source 1..120: mol_type = other DNA
ttgggtccagtgagcaagaagtagcaaacacactggacttattggtgagatatttgtgtgccagaggatgggaaataaatctgactaaaattcagggagcttctacctcagtaaaatttc

SEQ ID NO: 25964 - DNA, 120 bp, synthetic construct
  source 1..120: mol_type = other DNA
ggaagcaacacattccacatttgagtgtgttactccagctcatttattgagtcacccgaaaggctgacagttttgagtgggatccagaacaggagaaggctctgcaatacgtccaggctg

SEQ ID NO: 25965 - DNA, 120 bp, synthetic construct; identical to SEQ ID NO: 1622
  source 1..120: mol_type = other DNA

SEQ ID NO: 25966 - DNA, 120 bp, synthetic construct
  source 1..120: mol_type = other DNA
acacatgatcgggctcaagcagttcctgaaggcacaagtaagttacatgaggaagtggctcaaatgcccatggtctccactcctgccaccctgctttctcttccccagcttgtaccgatg

SEQ ID NO: 25967 - DNA, 120 bp, synthetic construct
  source 1..120: mol_type = other DNA
ccctctctaggacatccctgaaggacagcggtggagggaaatattctcagtgggcagaacttcaagcagtgcacttggttctgcactttgcatggaaggagaacggtcagatgtgtgatt

SEQ ID NO: 25968 - DNA, 120 bp, synthetic construct
  source 1..120: mol_type = other DNA
gtggtcaaaaactgtgaagatatttgtatctcatgtgagtgctcaccaacagatgacctcagcagaggaggattttaataatcaagtggatacgatgacccgttctgtggataccattca

SEQ ID NO: 25969 - DNA, 120 bp, synthetic construct; identical to SEQ ID NO: 7524
  source 1..120: mol_type = other DNA

SEQ ID NO: 25970 - DNA, 120 bp, synthetic construct
  source 1..120: mol_type = other DNA
atgccttatccaccatcatggttccacacagcattacctctggccaaggcattcactttacagctaaagaagggtggcagtgggctcatgctcatggaatttactggtcttatgttcccc

SEQ ID NO: 25971 - DNA, 120 bp, synthetic construct
  source 1..120: mol_type = other DNA
atgctctgaatcagtgtccattgtatggtactgtttctcccatagccagcattcctgggtccaggaagcaagggatggaagtggaagtggcaccactcaccatcacccctagtgatccac

SEQ ID NO: 25972 - DNA, 120 bp, synthetic construct
  source 1..120: mol_type = other DNA
taaaattgccacctggacactttgggctccttctacctttacgttaacaggcttagaagggagttacagtgttggctgctgtgactgacctagactatcctgatgaagtcagtctactac

SEQ ID NO: 25973 - DNA, 120 bp, synthetic construct; identical to SEQ ID NO: 7525
  source 1..120: mol_type = other DNA

SEQ ID NO: 25974 - DNA, 120 bp, synthetic construct
  source 1..120: mol_type = other DNA
aagaaaatatcttcattttatttcctttctcctttattatgtgatgtaagatttattgacttcacatcagcatttaagtattattaactttgcgtaatagcatatgggctggggattggt

SEQ ID NO: 25975 - DNA, 120 bp, synthetic construct
  source 1..120: mol_type = other DNA
gggtggacttatgatggttaatactgagtgtcaacctgattggattgaaggacacaaagtattgatcgtgggtgtgtctgcgagggtgttaccaaaggagatgaacatttgagtcagtgg

SEQ ID NO: 25976 - DNA, 120 bp, synthetic construct
  source 1..120: mol_type = other DNA
catcttcctcccgtgctggatgcttcctcagttttggaactcggactggctctcctttctcctcagcctgcagacggcctattgtggggccttgtgatcatgtgagttaatatttaataa

SEQ ID NO: 25977 - DNA, 120 bp, synthetic construct; identical to SEQ ID NO: 7526
  source 1..120: mol_type = other DNA

SEQ ID NO: 25978 - DNA, 120 bp, synthetic construct
  source 1..120: mol_type = other DNA
ccaccctctcctgtccctgtgagcagccttctccacttgggtcaggtcctcccacatctgcccaagcacactcaccccacctttgctgaccaccacagtgtggtagatgatgtcacctcc

SEQ ID NO: 25979 - DNA, 120 bp, synthetic construct
  source 1..120: mol_type = other DNA
tgatcacagtcacaaaagaagcagggcctgccactttgtatacaagcccgccctcttctatttgggtggccacttccgaagtcaaatagatcttccacttccatacccatcacggtcacg

SEQ ID NO: 25980 - DNA, 120 bp, synthetic construct
  source 1..120: mol_type = other DNA
atctctcctcccccaccacccctctcctgagctattctcaccatagacatgttagattcaccccgctctgctctaagcgctcccactcccctttaattatctctgctatgaatgcatcat

SEQ ID NO: 25981 - DNA, 120 bp, synthetic construct; identical to SEQ ID NO: 7527
  source 1..120: mol_type = other DNA

SEQ ID NO: 25982 - DNA, 120 bp, synthetic construct
  source 1..120: mol_type = other DNA
gtcagtaggactgaggttttgcctgtgagtgactgagcatggaaatgggcagagctttcctgagaagatagatcacgaggaggattagaattgacggaagaagggccactagactattag

SEQ ID NO: 25983 - DNA, 120 bp, synthetic construct
  source 1..120: mol_type = other DNA
gtcagatttatcagttagttgcaaaatgggaggctgtataccagggagctgaggagcttctcaccaaacaacggaaatgtcattacagtattgggggaaatgtcattatagtattggggg

SEQ ID NO: 25984 - DNA, 120 bp, synthetic construct
  source 1..120: mol_type = other DNA
gcagggctgtttgtaaaggggtcaccggcagcttgaaactgtgaaatagattgtttccttggaaactacagttaaaatgaacgtggaatgttgtattcagagaaaccccttatctgtacc

SEQ ID NO: 25985 - DNA, 120 bp, synthetic construct
  source 1..120: mol_type = other DNA
gatttagaatcaaacagcaaatttgtaatagtctgcgattttagagaatgaaatttttcattggctaaatcactgcaagtgagtaggtcactggaagtgagtaagggctgtgatacttca

SEQ ID NO: 25986 - DNA, 120 bp, synthetic construct; identical to SEQ ID NO: 7528
  source 1..120: mol_type = other DNA

SEQ ID NO: 25987 - DNA, 120 bp, synthetic construct
  source 1..120: mol_type = other DNA
gcaggaggatcacttgaggtcaggagttcgagagaagcctgaccaaaatggtgaaactccatctctactaaaaatacaaaaattagccggtgtggtggtaggcacctgtaatcccaacta

SEQ ID NO: 25988 - DNA, 120 bp, synthetic construct
  source 1..120: mol_type = other DNA
aagaggaagggggccccaagtgagaggaaagtgtctgggtatgaataggagagcattgagaatatgatggaaaatgtgtcttataaaatagctgggaatgtaacactagaaaaaacatct

SEQ ID NO: 25989 - DNA, 120 bp, synthetic construct
  source 1..120: mol_type = other DNA
agagtggggcatgtcccacctcatgcctttatgattttacccaagtgaaaacaaattcacttttctaggtacctcttagcacaactcaaataggctagagatttcaaaacttcatgaaac

SEQ ID NO: 25990 - DNA, 120 bp, synthetic construct
  source 1..120: mol_type = other DNA
aatgtgacagccactggccagcagcagactgtgttctattgtccatcctggtcttaatcttctattcaaatgtatttctcttgttctattttaagaaatagaacatttatattttcccat

SEQ ID NO: 25991 - DNA, 120 bp, synthetic construct; identical to SEQ ID NO: 7529
  source 1..120: mol_type = other DNA

SEQ ID NO: 25992 - DNA, 120 bp, synthetic construct
  source 1..120: mol_type = other DNA
tcaaccacccttggggatgcgtactcctattatcccattttatagactagaaaactggaagcagagacataagtaacttgctgaagaccacaggacaaggccacgcagagctaggctcta

SEQ ID NO: 25993 - DNA, 120 bp, synthetic construct
  source 1..120: mol_type = other DNA
caacctccacctcccgggttcaagcaattctcctgcctcagcctcctgagtagctgggattacaggcatgtgccaccatgcccggctaattttttgtatttttagtagagatggggtgtc

SEQ ID NO: 25994 - DNA, 120 bp, synthetic construct
  source 1..120: mol_type = other DNA
ttctccaacctttagctctttatggcctgtctcttatttttctttatctttaaaaattgaggtgtaattcttaccaataaaaaatgataagtatgcaaggcaatagatatgttaatttga

SEQ ID NO: 25995 - DNA, 120 bp, synthetic construct; identical to SEQ ID NO: 7530
  source 1..120: mol_type = other DNA

SEQ ID NO: 25996 - DNA, 120 bp, synthetic construct
  source 1..120: mol_type = other DNA
caagttggagttggctactcctgtttggtttcgattaatttgcaggagtggctgactgaactcagggaaacacctttactggtttattacaaaggatattacaaaggatacaggtgaaga

SEQ ID NO: 25997 - DNA, 120 bp, synthetic construct
  source 1..120: mol_type = other DNA
gccctggcctttggggtttttacagaggcttcattatgtaggtatacctgattaaaccatggccactggtaatcaacttaaccttcagtcccctctcctccctggaggttaagggttaag

SEQ ID NO: 25998 - DNA, 120 bp, synthetic construct
  source 1..120: mol_type = other DNA
gaaatgtgcagaagtccaaatatatgtttcacgtatcaacttaatacagttgggagaaaggttaaaagttaaattacacttaaaaataaaaagaacagccgggcgcagttctgtaacctc

SEQ ID NO: 25999 - DNA, 120 bp, synthetic construct; identical to SEQ ID NO: 7531
  source 1..120: mol_type = other DNA

SEQ ID NO: 26000 - DNA, 120 bp, synthetic construct
  source 1..120: mol_type = other DNA
tacagcttgattaatttcaaaatgtgttaacacttgtacaaccattacccaacttaaaatgtagaatatttctaccatctgagtagtttattttgtggcccttcccagataatacccact

SEQ ID NO: 26001 - DNA, 120 bp, synthetic construct
  source 1..120: mol_type = other DNA
ctttaaaaaaaatttttcattttaatttttggatggggtctcactctgtcacccaggctggagtccagtggtgccgtcttggctcactgcagcttctgtctacccagagatagagctggg

SEQ ID NO: 26002 - DNA, 120 bp, synthetic construct
  source 1..120: mol_type = other DNA
tatttatttttacctgacctcatagacatgcaacctttttggttgatttacacaataaaagattccctactcttagctgactctgttcccaggtacaggatgcaaatttaccttgtcttg

SEQ ID NO: 26003 - DNA, 120 bp, synthetic construct
  source 1..120: mol_type = other DNA
ccaccatgcccagacttatcttgtcttgaaagttgagcagcatagatccctaccaaggtacaagtatactaattaggaagactgttttctccaataaataaataaataagaggaagagag

SEQ ID NO: 26004 - DNA, 120 bp, synthetic construct; identical to SEQ ID NO: 7532
  source 1..120: mol_type = other DNA

SEQ ID NO: 26005 - DNA, 120 bp, synthetic construct
  source 1..120: mol_type = other DNA
ccatggagatggctgtggagtgaatcatggtgggcgttatggacttggaggaggctacagcaataatcatgaaatgcatcacagagaaggtcgccaaggcaaaggagagtatagacatag

SEQ ID NO: 26006 - DNA, 120 bp, synthetic construct
  source 1..120: mol_type = other DNA
gccatagagatggtcatgatcaaaatcaagaaaagaaccagagaaaagagcacagagggtttggccaacgggacagtcagaaaaatagggagtggttctggaggagacctgcagcctcac

SEQ ID NO: 26007 - DNA, 120 bp, synthetic construct
  source 1..120: mol_type = other DNA
atgatcaagctcagaacaatttctctttgatctctcaacacacaagtcagaactctttaggctttggctttctatcgtttcctcaggatggaacctgaccagtaggaggaagaataagat

SEQ ID NO: 26008 - DNA, 120 bp, synthetic construct; identical to SEQ ID NO: 7533
  source 1..120: mol_type = other DNA

SEQ ID NO: 26009 - DNA, 120 bp, synthetic construct
  source 1..120: mol_type = other DNA
attattgcatgcttattaagtgccaaacactatgctagtgcctgtaaatacatcaccatttatttctcaaaacaatccaatgacaacttaaacttcttgctatataatggactacgtgcc

SEQ ID NO: 26010 - DNA, 120 bp, synthetic construct
  source 1..120: mol_type = other DNA
ggaatgctaaaattaaagactaaataggacccaggaggtaagggaagtactgaagccaacttttgcaaaacccaaagaacttaagcttcgggtattacagcttcagctggatcagcccaa

SEQ ID NO: 26011 - DNA, 120 bp, synthetic construct
  source 1..120: mol_type = other DNA
agaggagggtagagggagtatcccttgagaaataaattgtaaccacaacaaccaacaataccttacttacatggtttgtagccacaaatcatgcagtctaggtaattcaaaagaccgcaa

SEQ ID NO: 26012 - DNA, 120 bp, synthetic construct
  source 1..120: mol_type = other DNA
tatacagtaacaatgttaataaaatattttaattaaaaatataataataaaataatcctcaaatggtaatgtctccatatgcttggaaaaaacatgcaaattctctgtgaaagatcgtag

SEQ ID NO: 26013 - DNA, 120 bp, synthetic construct; identical to SEQ ID NO: 7534
  source 1..120: mol_type = other DNA

SEQ ID NO: 26014 - DNA, 120 bp, synthetic construct
  source 1..120: mol_type = other DNA
ttttttttatttttactttttgtggtacatagtaggtgtatatatttatggggtacatgagatgttttgatacaggtatgcaatgtgaaatcagcacatcgtggagaatggggtatctat

SEQ ID NO: 26015 - DNA, 120 bp, synthetic construct
  source 1..120: mol_type = other DNA
tcttattcattctttttaattcatttgtttttttaaattaatttaattcatttaattaattcattcattaaccatctctacctcccccagtcctccccactacctttcccagcctctggt

SEQ ID NO: 26016 - DNA, 120 bp, synthetic construct; identical to SEQ ID NO: 7535
  source 1..120: mol_type = other DNA

SEQ ID NO: 26017 - DNA, 120 bp, synthetic construct
  source 1..120: mol_type = other DNA
agtagctgggattacagatgcctgccaccacgcccggctaatttttgtatttttagtggagatggggtttcaccatgctggccaggctggtctcgaactcctgacatcatgatctgccca

SEQ ID NO: 26018 - DNA, 120 bp, synthetic construct
  source 1..120: mol_type = other DNA
gctcactgcaacctccgtctcccaggttcaagcaattctcctacctcagcttctcgagtagctgggattacaggcgcccgtcaccacactgggctaatttttgtatttttagtggagatg

SEQ ID NO: 26019 - DNA, 120 bp, synthetic construct
  source 1..120: mol_type = other DNA
tctttattcattcatccattaatagacacttccaaatcttagctattgcaaacagtgctgcaacaaacgttggagtgcggatatttctttgatacactgatttcttttcttttggctacc

SEQ ID NO: 26020 - DNA, 120 bp, synthetic construct; identical to SEQ ID NO: 7536
  source 1..120: mol_type = other DNA

SEQ ID NO: 26021 - DNA, 120 bp, synthetic construct
  source 1..120: mol_type = other DNA
taggctctgataagtatgcgcgctacaattttcagagtaccctctaaaaggtgaaatttggacttgaatccaggatctcagtttctaaataattctggaagaagaaaattcttagagtgc

SEQ ID NO: 26022 - DNA, 120 bp, synthetic construct
  source 1..120: mol_type = other DNA
ccgcatacctgaccctctggaacttcccatcacagccactaggcagactcacttctgagcctttcccagcacaccgctgaccctttctgtttctccagctcactcattcagagctccttc

SEQ ID NO: 26023 - DNA, 120 bp, synthetic construct
  source 1..120: mol_type = other DNA
actatctgagagactgtgtcttccaggaagcttctcgtcattgttgggggaaatgcagacaactcactttggtcattgcaatggtttggatgtggttgttaaaccctgccaagtctcatg

SEQ ID NO: 26024 - DNA, 120 bp, synthetic construct; identical to SEQ ID NO: 7537
  source 1..120: mol_type = other DNA

SEQ ID NO: 26025 - DNA, 120 bp, synthetic construct
  source 1..120: mol_type = other DNA
gcaacaccaatggactatgacagaaaatacagactgtatattggaaccccatcagcctggtcacagatgccatctcagacctccccaaaccctctgctcatttgggtctcttcagtcacg

SEQ ID NO: 26026 - DNA, 120 bp, synthetic construct
  source 1..120: mol_type = other DNA
gcactgtgtctctccctaaggtgtgtactctcctgagagacgcttccttggaactgatgctaaggcacatcagaaggatctcagggtggaaaggctcctatacagccgtctgaaaacaaa

SEQ ID NO: 26027 - DNA, 120 bp, synthetic construct
  source 1..120: mol_type = other DNA
ccagagaccccaaacatgttttcattatctctcttcattatgtcttctggatctctcttcccctgttccttcaatgtgcattgttgagtgcttactgcatactcagtaatactccatttg

SEQ ID NO: 26028 - DNA, 120 bp, synthetic construct; identical to SEQ ID NO: 7538
  source 1..120: mol_type = other DNA

SEQ ID NO: 26029 - DNA, 120 bp, synthetic construct
  source 1..120: mol_type = other DNA
ttcctcttgacccctgctctattccgtcccaggcttggtatcgttctctcacctgcctgtagttggcagactgtcaggtcaactgccccacccctcctcagaccatatgaagctataaag

SEQ ID NO: 26030 - DNA, 120 bp, synthetic construct
  source 1..120: mol_type = other DNA
cccacgcctgagtccaagattcttcccaggaacacaaacgtaggagacccacgctcctggaagcaccagcctttatctcttcaccttcaagtcccctttctcaagaatcctctgttcttt

SEQ ID NO: 26031 - DNA, 120 bp, synthetic construct
  source 1..120: mol_type = other DNA
aaatgttctccttatgtttggtctactattgcatttagaagctggtgagtgattttatttaaaatcgggtggtctgagaacctttgaggagttgggagagaaatgtgaccactactgggg

SEQ ID NO: 26032 - DNA, 120 bp, synthetic construct
  source 1..120: mol_type = other DNA
aagcagtcagacacagtggttaaaattgggctctggtctcacattgcctacatttgaattatggctccatctattaactgtgtactttaggtcagttgcttctctgcgcctcgatttctg

SEQ ID NO: 26033 - DNA, 120 bp, synthetic construct; identical to SEQ ID NO: 7539
  source 1..120: mol_type = other DNA

SEQ ID NO: 26034 - DNA, 120 bp, synthetic construct
  source 1..120: mol_type = other DNA
tgagactctgtctcaaaaaaataaaataataaaataaggccaggctcagtggctcacgcctgtaatctcagcactttgggaggccaaggcgggtggatgtcttgaggccaggagtttcag

SEQ ID NO: 26035 - DNA, 120 bp, synthetic construct
  source 1..120: mol_type = other DNA
acgtgggaggcggatgttgcagtgagctgagattgctccactatactccagcctgggcggcagagcaagactccgtctcaaaaacaaataaataaataagcaataaaataaaataaaata

SEQ ID NO: 26036 - DNA, 120 bp, synthetic construct
  source 1..120: mol_type = other DNA
ttcatccttctgggaaatcaagggcaaaaatttgacataaccttaactccagccaagcctccaagaagttaaaagccttccctctacctttagacgttggtttacagcccttattcctgg

SEQ ID NO: 26037 - DNA, 120 bp, synthetic construct; identical to SEQ ID NO: 7540
  source 1..120: mol_type = other DNA

SEQ ID NO: 26038 - DNA, 120 bp, synthetic construct
  source 1..120: mol_type = other DNA
tataatactttatatctgtattgtatcttgcatagcagaatgtggaaaaaggttagctaccagtgaaactagatgatgtaactctggcattgtgggtgggtggttgacttagcttagtct

SEQ ID NO: 26039 - DNA, 120 bp, synthetic construct
  source 1..120: mol_type = other DNA
tggcacccaggctggagtgcaatggctcgatctcgactcaccgcaacctctgcctcccgggttcaagtgattctcctgcctcagcctcccgagtagctggaattaatgcccggctaattt

SEQ ID NO: 26040 - DNA, 120 bp, synthetic construct
  source 1..120: mol_type = other DNA
tgcccagcccagtatcaacattttgaagcctcaatttcttcatctcagctggtgataataatagcatctatgttatagcaccatagtgagcattaaataaaattatgtaatgaatttagc

SEQ ID NO: 26041 - DNA, 120 bp, synthetic construct; identical to SEQ ID NO: 7541
  source 1..120: mol_type = other DNA

SEQ ID NO: 26042 - DNA, 120 bp, synthetic construct
  source 1..120: mol_type = other DNA
accaactctgagtccagcacaccctccagtggggccagcacagccaccaactctgactccagcacaacctccagtggggctagcacagccaccaactctgactccagcacaacctccagt

SEQ ID NO: 26043 - DNA, 120 bp, synthetic construct
  source 1..120: mol_type = other DNA
agcacaacctccagtggggccagcacagccaccaactctgagtccagaacgacctccaatggggctggcacagccaccaactctgagtccagcacgacctccagtggggccagcacagcc

SEQ ID NO: 26044 - DNA, 120 bp, synthetic construct
  source 1..120: mol_type = other DNA
gggatcagcacagtcaccaattctgagtccagcacaccctccagtggggccaacacagccaccaactctgagtccagtacgacctccagtggggccaacacagccaccaactctgactcc

SEQ ID NO: 26045 - DNA, 120 bp, synthetic construct; identical to SEQ ID NO: 7542
  source 1..120: mol_type = other DNA

SEQ ID NO: 26046 - DNA, 120 bp, synthetic construct
  source 1..120: mol_type = other DNA
agtgtgacctctgcaggctctggaacagcagctctgactggaatgcacacaacttcccatagtgcatctactgcagtgagtgaggcgaagcctggtgggtccctggtgccgtgggaaatc

SEQ ID NO: 26047 - DNA, 120 bp, synthetic construct
  source 1..120: mol_type = other DNA
ggaaatgggtgtgaatagaaggggtctcaagtcaggggtgggtagggaggaagggagatcaggaaagagtaacacagagacatggtaggtcaatgcagaggaagctgctgacctgcggga

SEQ ID NO: 26048 - DNA, 120 bp, synthetic construct
  source 1..120: mol_type = other DNA
aactattgactcttctttttttagagaaacagcctgtccctgagaaacacctttaacacagctgtctaccaccctcatggcctcaaccatggccttggtccaggccctggagggaatcat

SEQ ID NO: 26049 - DNA, 120 bp, synthetic construct; identical to SEQ ID NO: 7543
  source 1..120: mol_type = other DNA

SEQ ID NO: 26050 - DNA, 120 bp, synthetic construct
  source 1..120: mol_type = other DNA
ctagctctgagatgaactcagttataggagaaaacctccatgctggactccatctggcattcaaaatctccacagtaaaatccaaagacctcattcttatctgtgtgtctgcattttcta

SEQ ID NO: 26051 - DNA, 120 bp, synthetic construct
  source 1..120: mol_type = other DNA
gcctgtggtacacagagattaggttgtgatacatgaagagccaagagcaggatgaggtggaggcgttacaactacctgctctgtgtgtggggggggaggggggaggggggtacgcatatt

SEQ ID NO: 26052 - DNA, 120 bp, synthetic construct
  source 1..120: mol_type = other DNA
ttctggcctgctgaggtcgaatcttccaagaggctcttgcaaagacccgagattctcataaatccccgcccagaagagctgcacgtatccctttcatgagtccagggaagagggtcctcc

SEQ ID NO: 26053 - DNA, 120 bp, synthetic construct; identical to SEQ ID NO: 7544
  source 1..120: mol_type = other DNA

SEQ ID NO: 26054 - DNA, 120 bp, synthetic construct
  source 1..120: mol_type = other DNA
atcctcctgcctcagcctcctgagtagctgggactacagtttcgtgtgccaccatgcctggctaatttttagaattttttgtagggacagggcctcactctgttgcacaagctggtcttg

SEQ ID NO: 26055 - DNA, 120 bp, synthetic construct
  source 1..120: mol_type = other DNA
tatcaagggctttaaaacaatgcctgtagcgtaattaacctctcacaaagatgcttatctaacctccccagcagtcatgggtttcagcaagaaagtctgtgatgtgaccagttgcacatg

SEQ ID NO: 26056 - DNA, 120 bp, synthetic construct
  source 1..120: mol_type = other DNA
ttttcccctaaaagcttactctagaaaggatattttttggagagggagtgtgggaatccaccatcttgtggccacctcagacatcacttctctttggaagactccattaaatatttctct

SEQ ID NO: 26057 - DNA, 120 bp, synthetic construct
  source 1..120: mol_type = other DNA
agaacaaggaatgggtaaggagaatgaagcatctgtaaggaaaccccagggcggcagccacgtctgtgtagggttggatggcacaactgttcgatacctgtgtacctctgtgtgagtgca

SEQ ID NO: 26058 - DNA, 120 bp, synthetic construct; identical to SEQ ID NO: 7545
  source 1..120: mol_type = other DNA

SEQ ID NO: 26059 - DNA, 120 bp, synthetic construct
  source 1..120: mol_type = other DNA
atccctgggattgttatgaagaggaagactgatgacatagaagtcacaggtgtggagggggatggggatcattggcaagctcgctgtctcatgcaaaggaaagtgaaacctaacattggc

SEQ ID NO: 26060 - DNA, 120 bp, synthetic construct
  source 1..120: mol_type = other DNA
tggtctgattgtgggacacaggggctgatgatatttccttaacaggagaagcagaaaaaatgagtaacatcaccacccatgcagccctgcagaagcatctttgctaaggcaaggcagacg

SEQ ID NO: 26061 - DNA, 120 bp, synthetic construct
  source 1..120: mol_type = other DNA
tccaagaattaggaatgagtcaagtcatctatgtttgggttctcacaggacttaaaacagttttttcctgcagggatgaaaaataaattgctgaagggtgcaccaggagaatggcacaac

SEQ ID NO: 26062 - DNA, 120 bp, synthetic construct; identical to SEQ ID NO: 7546
  source 1..120: mol_type = other DNA

SEQ ID NO: 26063 - DNA, 120 bp, synthetic construct
  source 1..120: mol_type = other DNA
gctgggcacggtggctcatgcctgtaatcccagcactttgggaggccgaagtggatggatcacctgaggtcaggagttcaagaccagcctggtcaacatggtgaaattccttctctacta

SEQ ID NO: 26064 - DNA, 120 bp, synthetic construct
  source 1..120: mol_type = other DNA
attgcactccagcctgagcaacaacagcgaaacttcgtcttaaaaaaaaaaaaaaaaagatgtatatgacgtaggagaagccatcacagatttgggagctactgagaaagctagggacgg

SEQ ID NO: 26065 - DNA, 120 bp, synthetic construct
  source 1..120: mol_type = other DNA
tattgggagcagaaaaattctgagaaaaaaatatgtaaaaaatgttaaaatatggaaaatatgaaaaatgctgtgttagtagccttatggagggaagtacagactgaagggctgttttgt

SEQ ID NO: 26066 - DNA, 120 bp, synthetic construct; identical to SEQ ID NO: 7547
  source 1..120: mol_type = other DNA

SEQ ID NO: 26067 - DNA, 120 bp, synthetic construct
  source 1..120: mol_type = other DNA
atacatctaggtattggggaagctcccctgccccatatgtggtgtttatttttcttattccagaaaacattttaggcacaggtattctgttaggaaagacttagcaaacttcagtggaaa

SEQ ID NO: 26068 - DNA, 120 bp, synthetic construct
  source 1..120: mol_type = other DNA
agggagatttggcagggtcataggacaataatggagggaaggtcagcagataaacaagtgaacaaaggtctctggttttcctaggcagaggaccctgaggccttccgcagtgtttgtgtc

SEQ ID NO: 26069 - DNA, 120 bp, synthetic construct; identical to SEQ ID NO: 7548
  source 1..120: mol_type = other DNA

SEQ ID NO: 26070 - DNA, 120 bp, synthetic construct
  source 1..120: mol_type = other DNA
acggggtggtggcctggcagaggggctcctcacttcccagtagtggcggccagtcagaggcgcccctcacctcccggacggggcagctggccgggcggggggctgacccccccacctccc

SEQ ID NO: 26071 - DNA, 120 bp, synthetic construct
  source 1..120: mol_type = other DNA
tctcagacggggcggttgccaggcagagggtctcctcacttctcagacggggcggccgggcagagacgctcctcacctcccagacggggtcgcggctgggcagaggcgctcctcacatcc

SEQ ID NO: 26072 - DNA, 120 bp, synthetic construct
  source 1..120: mol_type = other DNA
tgggatggcggccgggctgagacgctcctcactttccagactgggcagccaggcagaggggctcctcacatcccagacgatgggcggccaggcggagacgctcctcacttcccagacggg

SEQ ID NO: 26073 - DNA, 120 bp, synthetic construct
  source 1..120: mol_type = other DNA
cactgagtgaacgagactcccgtctgcaatcccggcacctcgggaggccgaggctggcggatcactcgcggttaggagctggagaccggccccgccaacacagcgaaaccccatctccac

SEQ ID NO: 26074 - DNA, 120 bp, synthetic construct; identical to SEQ ID NO: 7549
  source 1..120: mol_type = other DNA

SEQ ID NO: 26075 - DNA, 120 bp, synthetic construct
  source 1..120: mol_type = other DNA
gttcgggggttcatatgcaggtttgttacataagtaaatgtgtgtcatgggggtttttttgtacaggttatttcgtcacccagctattaagcctagtacccattagttatttttcctgat

SEQ ID NO: 26076 - DNA, 120 bp, synthetic construct
  source 1..120: mol_type = other DNA
ttttctgttcctgcattagtttgctaagaataatggcctccagctccatccatgtccctgcaaaggacatgatgttgttctttttgtatgactgcatagtagtccatgatgtatatatac

SEQ ID NO: 26077 - DNA, 120 bp, synthetic construct
  source 1..120: mol_type = other DNA
gaacacatgcatgcatttttttttttttttgagatggagttttgctcttgttgccgaggctagagtgcaatggtgcgatctcagctcactgcaacctctgcctcccgggatcaagcgatt

SEQ ID NO: 26078 - DNA, 120 bp, synthetic construct; identical to SEQ ID NO: 7550
  source 1..120: mol_type = other DNA

SEQ ID NO: 26079 - DNA, 120 bp, synthetic construct
  source 1..120: mol_type = other DNA
tcttttttctccacaacctcgccagcatcttttattttttgactttttaataatagctgttctgactggcgtgagatgatatcttattgtgggtttttgtttgtttgttttgagatggag

SEQ ID NO: 26080 - DNA, 120 bp, synthetic construct
  source 1..120: mol_type = other DNA
caggctggagtgcaatggcacaatatcattgtggttttgatatgcgtttctctaataatcaatgatgtttagctttttaaaatatgtttgttggccacatgtatgtcttcttttgggaag

SEQ ID NO: 26081 - DNA, 120 bp, synthetic construct
  source 1..120: mol_type = other DNA
attttctcccattctgtaggttgtctgtttactctgttgatagtttcttttgctgtgcagaagctctttcgtttagttaaatcccattttcaatttttccttttgttgcaattgctttca

SEQ ID NO: 26082 - DNA, 120 bp, synthetic construct
  source 1..120: mol_type = other DNA
ttttgtgtaaggtgtaaagaaggggtccagtttgaattgtttgcatatggctagcctgttatcccagcaccgtttattgaacagggaattctttccccattgtttgctttcgtcaggttt

SEQ ID NO: 26083 - DNA, 120 bp, synthetic construct; identical to SEQ ID NO: 7551
  source 1..120: mol_type = other DNA

SEQ ID NO: 26084 - DNA, 120 bp, synthetic construct
  source 1..120: mol_type = other DNA
tacaggcacctgccaccatgcccagctaacttttgtatttttagtagagatggggtttcaccatattggccaggctggtctcgaactcctgaccttgtgatccgcccaccttggcctccc

SEQ ID NO: 26085 - DNA, 120 bp, synthetic construct
  source 1..120: mol_type = other DNA
gtcaactccagaaacagtcaaagaaatccaaacatttgtgggtcttttgggttattggagagtatgcatcccatacttagcacagtttttgagatccctatacagacttatcagagaaag

SEQ ID NO: 26086 - DNA, 120 bp, synthetic construct
  source 1..120: mol_type = other DNA
gctgctcctgaggatatgagtggggccttatggcaaccgcagtctagggaatcagtccttttaagaaaggagccaaaaccagatactctcctgttgaacaagaagtgctagtagtagaga

SEQ ID NO: 26087 - DNA, 120 bp, synthetic construct; identical to SEQ ID NO: 7552
  source 1..120: mol_type = other DNA

SEQ ID NO: 26088 - DNA, 120 bp, synthetic construct
  source 1..120: mol_type = other DNA
aactgatacaatctggtttgatacaggtgggcatcagaggagccactgggatgagttgcaagcagcctggttaatagtcacatatgagcctggcccctggttctttgcactgatagctga

SEQ ID NO: 26089 - DNA, 120 bp, synthetic construct
  source 1..120: mol_type = other DNA
cttgtggctgatttaactgtatttcaggtgactgcacataaaaaccactcagttccacaaaacatggaagctaaaaccctaaaaaaaattagaagcatcatgccagctcaggcctctgaa

SEQ ID NO: 26090 - DNA, 120 bp, synthetic construct
  source 1..120: mol_type = other DNA
ctgtaatcccagcactttgggaggccgaggcgggcaaatcacctgaggttgggagttcgagaccagcttgaccaacatggagaaacctgtctctactaaaaatacaaaattagctgggcg

SEQ ID NO: 26091 - DNA, 120 bp, synthetic construct; identical to SEQ ID NO: 7553
  source 1..120: mol_type = other DNA

SEQ ID NO: 26092 - DNA, 120 bp, synthetic construct
  source 1..120: mol_type = other DNA
cccaacagctcttacaaattgtttaccatgttctctattgtagatcatattgagcaggacacattcagatattcagaaggctgtccaccatgtaacagattggcaagtggattatttaga

SEQ ID NO: 26093 - DNA, 120 bp, synthetic construct
  source 1..120: mol_type = other DNA
ataagcaagctaatcaagccagtactattaaaggcttagaggctctcagtactatgtatggatatatctggcacattgacagtgaccgagggacccatttcgctggatatgacatgcagg

SEQ ID NO: 26094 - DNA, 120 bp, synthetic construct
  source 1..120: mol_type = other DNA
accagtctgttgaaagcacaaattcaaactctaatttgggaaacctaccttgcataggcagatgaatgtgttatctccaacctttatttctttaaattcagccaaagcagggacgcctgc

SEQ ID NO: 26095 - DNA, 120 bp, synthetic construct
  source 1..120: mol_type = other DNA
agatgccagcagatatactaccgaggaggaaacacaccgagcttggaacgacaaatagccccaggctggataggctatttcctgctagagagtgacaacaccctaaataaagaacaaaac

SEQ ID NO: 26096 - DNA, 120 bp, synthetic construct; identical to SEQ ID NO: 7554
  source 1..120: mol_type = other DNA

SEQ ID NO: 26097 - DNA, 120 bp, synthetic construct
  source 1..120: mol_type = other DNA
gattatacacgggcacagactgaatagttcacacactacaaagcctatcaatctccctcatttgaaatcccactggttctgatctgttttttattggtatgattgtttggcctccatttg

SEQ ID NO: 26098 - DNA, 120 bp, synthetic construct
  source 1..120: mol_type = other DNA
gcctggccaacacggtgtaaccccatctccacaaaaaataacaaaattagctgggcgtggtggcgcatgcctgtaatcccagttacttgggaggctgaggcaggaaaattgcttgaacct

SEQ ID NO: 26099 - DNA, 120 bp, synthetic construct
  source 1..120: mol_type = other DNA
actttaaatgatagctgcatgggaatctctcttttaaacatggaagtcactgtcatgagaaagtctgtcctcccaaattaccaggctttacatatactcacgctgcacaacggggcactt

SEQ ID NO: 26100 - DNA, 120 bp, synthetic construct
  source 1..120: mol_type = other DNA
acataaccaagctctcagacccctactttgaataattggcttcacagctggtttgggtcctggggcacctggtggcataagctgcttcttggtttaggtgctgtactcgtacgttcctta

SEQ ID NO: 26101 - DNA, 120 bp, synthetic construct; identical to SEQ ID NO: 7555
  source 1..120: mol_type = other DNA

SEQ ID NO: 26102 - DNA, 120 bp, synthetic construct
  source 1..120: mol_type = other DNA
gccaaggccggagcccactccctcagcttgcagggaggtgtggagggagaggtgcggagggagaggtgcgagcgggaaccggggctgcacgcggcgcttgcgggccagctggagttccgg

SEQ ID NO: 26103 - DNA, 120 bp, synthetic construct
  source 1..120: mol_type = other DNA
gatttctcaccaggccttagctgccttcccgcggggcagggcttgggacctgcagcccgccatgcctgagcctcccaccccctccatgggctcctatgcggcccgagcctccccgacgag

SEQ ID NO: 26104 - DNA, 120 bp, synthetic construct
  source 1..120: mol_type = other DNA
tgaagccagctgggctcctgagtctggtggggatgtggagaacctttatgtctagctcagggattgtaaatacaccaatccgcactctgtatctagctcaaggtttgtaaacacaccaat

SEQ ID NO: 26105 - DNA, 120 bp, synthetic construct
  source 1..120: mol_type = other DNA
ggacgtggagaacctttgtgtctagctcagggattgtaaacgcaccaatcagcaccctgtcaaaacagaccactcggctctaccaatcagcaggatgtgggtggggccagataagagaat

SEQ ID NO: 26106 - DNA, 120 bp, synthetic construct; identical to SEQ ID NO: 7556
  source 1..120: mol_type = other DNA

SEQ ID NO: 26107 - DNA, 120 bp, synthetic construct
  source 1..120: mol_type = other DNA
cttttgcatagcaaagtgcactgcagcacagtcttcaaacaatgcctgctgcataaataacccttcacaaacatgcttctttaacctccggagtggttatgggttttggcaagaaagtct

SEQ ID NO: 26108 - DNA, 120 bp, synthetic construct
  source 1..120: mol_type = other DNA
aaatttcttttggagaaactggatttgttagccacttatttcattcagcctttgttccataaaagggtcatacatgtaaagtggctcccaaacgctgaaggagccgagaaaccaaaaaca

SEQ ID NO: 26109 - DNA, 120 bp, synthetic construct
  source 1..120: mol_type = other DNA
gcttaccccggaaagggtgtatacttcctgtagagacaattaaaagcaacctttcagaacaggcaggaatgctatgtgcgtcgtagcctgtaatttatgccataatatcaaggttgcttt

SEQ ID NO: 26110 - DNA, 120 bp, synthetic construct; identical to SEQ ID NO: 7557
  source 1..120: mol_type = other DNA

SEQ ID NO: 26111 - DNA, 120 bp, synthetic construct
  source 1..120: mol_type = other DNA
aagaacagtaaataaagtaggaatgaggcccatgtgactcatgggacctgggttaatcagaagtcaacatggcagattagcatccaagatggagtcactttgtctccacagcctctcagc

SEQ ID NO: 26112 - DNA, 120 bp, synthetic construct
  source 1..120: mol_type = other DNA
agggaaagacaagttgaacaccctgaaaaggtgcctcccactgataggaactgtggaaacccttatgtggaaaagcatgaaaagaaataagatcaggcaagggtgtccagctagatcatt

SEQ ID NO: 26113 - DNA, 120 bp, synthetic construct
  source 1..120: mol_type = other DNA
tagtaatccggaagagcaagcgcgaaaaataactcaaacagacacaattatacaggaataaaaatcacccggcaaatataatacatttggaggatagatccaggaagactaacgtgcaag

SEQ ID NO: 26114 - DNA, 120 bp, synthetic construct
  source 1..120: mol_type = other DNA
taataaggctcaaaacagagaaaaagagacgaaatggaagagaagaattagaagggaaaaaagaagagctggaatagagaaaaaagatttgagtctgtctatgaaaagcttcaccaagta

SEQ ID NO: 26115 - DNA, 120 bp, synthetic construct; identical to SEQ ID NO: 7558
  source 1..120: mol_type = other DNA

SEQ ID NO: 26116 - DNA, 120 bp, synthetic construct
  source 1..120: mol_type = other DNA
actttattttattcttattatttttttaaatttgagatggaatctcactctgtcaccgaggctggagtgcagtggcgcaatctcggctcactgcaacctctgcttcctaggtttaagaga

SEQ ID NO: 26117 - DNA, 120 bp, synthetic construct
  source 1..120: mol_type = other DNA
tcctaacctcaggtgatccacccatctcagcctcccaaagtgctgggattagaggcatgacccaccttgcccagccaggtttatatactttaaacaggtgaactatatggtatgtaaatt

SEQ ID NO: 26118 - DNA, 120 bp, synthetic construct
  source 1..120: mol_type = other DNA
cagatcacttgaggccaggagtttgagaccagcctggccaacatggcaaaaccctgtctctactaaaaatacaaaaattagccatgcgcggtggtgcgcgcctgtagtcccagctacttg

SEQ ID NO: 26119 - DNA, 120 bp, synthetic construct; identical to SEQ ID NO: 7559
  source 1..120: mol_type = other DNA

SEQ ID NO: 26120 - DNA, 120 bp, synthetic construct
  source 1..120: mol_type = other DNA
gcatgcgtgacccaagcaaaagtccaggaagtggacagggttaaagggctgcccatctagacctgtgcctttgcactgtggatttagcacaatgatcttcacgtggcatctgtgccccca

SEQ ID NO: 26121 - DNA, 120 bp, synthetic construct
  source 1..120: mol_type = other DNA
gagggcacctctgtggtcagggctacacttttctgactcttctttgatgaacatccaacatttcctctgtagctcccatattattattaccacatttccgcagggtgtagaacatttcag

SEQ ID NO: 26122 - DNA, 120 bp, synthetic construct; identical to SEQ ID NO: 1662
  source 1..120: mol_type = other DNA

SEQ ID NO: 26123 - DNA, 120 bp, synthetic construct; identical to SEQ ID NO: 7560
  source 1..120: mol_type = other DNA

SEQ ID NO: 26124 - DNA, 120 bp, synthetic construct
  source 1..120: mol_type = other DNA
gcatgatttcaaggagaaagatgttgtaagctccaactgattaatgttacaccttaagataaaagacacttagagaggccatacggcatgtcagctaagagcacagattgtggagctcga

SEQ ID NO: 26125 - DNA, 120 bp, synthetic construct
  source 1..120: mol_type = other DNA
aacatgagagtgaaaatagtacccacttcatggggttattgtgaaggcttagaatagtcctgcatttcgtaagcgctctgtaagttgtgttatttttaaaatgttaggtaagtgggccaa

SEQ ID NO: 26126 - DNA, 120 bp, synthetic construct
  source 1..120: mol_type = other DNA
acaaaaactagctggcgtggtggcaggcacctgtagtcccagctacgtgggaagctgaggcaagagaatagcttgaacctgggaagtggaggttgcagtgagccgagattgcaccactgc

SEQ ID NO: 26127 - DNA, 120 bp, synthetic construct
  source 1..120: mol_type = other DNA
tttttgcttaattcaccaaaaagttactgggggctataaattgaacacagagtcttacaaggcacaggaaattttttagacgtttataaacatatcttttgatgcagaggagtatgacag

SEQ ID NO: 26128 - DNA, 120 bp, synthetic construct; identical to SEQ ID NO: 7561
  source 1..120: mol_type = other DNA

SEQ ID NO: 26129 - DNA, 120 bp, synthetic construct
  source 1..120: mol_type = other DNA
gacgtcaacgaggtggggaggttgtgcttgcgtaggggcagggagtctatgggacctctgtacttaccacttaattttgctgtgaacccaaaactgctctaagagataaggtttattaat

SEQ ID NO: 26130 - DNA, 120 bp, synthetic construct
  source 1..120: mol_type = other DNA
gaataatatggggaaagtaaaatggaactataagttcgtagagcaggaggaaccatttaaaaacctagactattgaggaagagcttgcttatatgttattcaaaaggataatggaagcta

SEQ ID NO: 26131 - DNA, 120 bp, synthetic construct
  source 1..120: mol_type = other DNA
gtaaaataaaatttaaaaaaaggataatgatgagtattgagatgctgctagtgtttagagtctactggaaacattttaaagagtagtaaaaacttttattatttcaatgtctacatttac

SEQ ID NO: 26132 - DNA, 120 bp, synthetic construct; identical to SEQ ID NO: 7562
  source 1..120: mol_type = other DNA

SEQ ID NO: 26133 - DNA, 120 bp, synthetic construct
  source 1..120: mol_type = other DNA
ttgttactttctgatgaactatatgctatatggaaggtaccattgagactccttgtgatgaaaataactctacttgaattgggggtaaactaaaattagaagggaaagcagaccccttgt

SEQ ID NO: 26134 - DNA, 120 bp, synthetic construct
  source 1..120: mol_type = other DNA
tttcaaatctatgctatgtttataaattgtgtactctacgtaattgccgggtccctggaattccctactctgtgcgaaactaatctcttactctctaaaacaaacccaagtcctaagccc

SEQ ID NO: 26135 - DNA, 120 bp, synthetic construct
  source 1..120: mol_type = other DNA
actcattaattttcccgacatgtcccttatgatgactcgtccatctgtttttcaaattccacatagctgggcctctgtagctttgtggttttatattccgcatactttctaacagtgaca

SEQ ID NO: 26136 - DNA, 120 bp, synthetic construct; identical to SEQ ID NO: 7563
  source 1..120: mol_type = other DNA

SEQ ID NO: 26137 - DNA, 120 bp, synthetic construct
  source 1..120: mol_type = other DNA
gagagaccagcttgaagggccgaagtcttgttcccacattgccagtaggaggcataaattccccctcagaggacgtgcaggaaagaagtggaggggagagcccttgaaatggggggaaaa

SEQ ID NO: 26138 - DNA, 120 bp, synthetic construct
  source 1..120: mol_type = other DNA
gggctggagtgcagtggtgcgatcttggctcactacaacctctgcctcccgggttcaagcaattctcctgcctcagcctcccaagtagctgggattacaggcacccgccactacgcccag

SEQ ID NO: 26139 - DNA, 120 bp, synthetic construct
  source 1..120: mol_type = other DNA
ccaccaaaatttttttctttcttattgtttttaattctccccccaagcttactgaggtaaaatagacaaaaattatatgttttcagcgtgtacaatgtgttgatttgatgagtatacatt

SEQ ID NO: 26140 - DNA, 120 bp, synthetic construct; identical to SEQ ID NO: 7564
  source 1..120: mol_type = other DNA

SEQ ID NO: 26141 - DNA, 120 bp, synthetic construct
  source 1..120: mol_type = other DNA
ccacctcagcctctcaaggtgttgggattacaggcatgagccaccgcacccggccaattgttgaatcttaacacatgcatacactcacctacccgctttccagatcaagatgtgccacat

SEQ ID NO: 26142 - DNA, 120 bp, synthetic construct
  source 1..120: mol_type = other DNA
agaaccatacagtatgccttccaaaagagacacttttaaaagaaaatgaaatttcatcaccaatatttggcaagcttatacccgtatcctcatttccaaccccaggcttccctgccattg

SEQ ID NO: 26143 - DNA, 120 bp, synthetic construct
  source 1..120: mol_type = other DNA
atagggacgcaggtgagtcagggtccctgacctatgcttaagagccattgccaaagattgactcagggaaatgggtagttccgtgccccatcctcttccctactcacttccgcttgatac

SEQ ID NO: 26144 - DNA, 120 bp, synthetic construct; identical to SEQ ID NO: 7565
  source 1..120: mol_type = other DNA

SEQ ID NO: 26145 - DNA, 120 bp, synthetic construct
  source 1..120: mol_type = other DNA
cttccactccgacaagtttgatcccctcattctgcctccctccctgcccctcctcatgtgtgcgccctctggtcttgccgactctgctctctcctccgccttgattcctgtagggtacat

SEQ ID NO: 26146 - DNA, 120 bp, synthetic construct
  source 1..120: mol_type = other DNA
tactcagtatcagctataaatgccacagacacgtttgcgaggaaaaaagaagaaaaataagaagccaaactgtggagcaatttgggggctccccccaaccatgccatctgcctacaaggc

SEQ ID NO: 26147 - DNA, 120 bp, synthetic construct
  source 1..120: mol_type = other DNA
atctaaatgacaacttctatgtgcatcatttagagatgagaagaggaaatatctctcctgctttctggttcctgtggctgcttctctttggacttctgggacccagtaagtgacttagca

SEQ ID NO: 26148 - DNA, 120 bp, synthetic construct; identical to SEQ ID NO: 7566
  source 1..120: mol_type = other DNA

SEQ ID NO: 26149 - DNA, 120 bp, synthetic construct
  source 1..120: mol_type = other DNA
aaaccaggatctcagtctaaagtcaagtaaaaatccttcaatccttctttgttttttttccataggttatttgggtacaggtgatatttggttatgtaagtgctttattggtgaattgtg

SEQ ID NO: 26150 - DNA, 120 bp, synthetic construct
  source 1..120: mol_type = other DNA
atgcgtttgagtcctcacagcttagctcccacctatcagtgagaacatacgatgtttggttttccattcctgagtaacttcacttagaataatagtctacagtctcatccaggtcactgc

SEQ ID NO: 26151 - DNA, 120 bp, synthetic construct
  source 1..120: mol_type = other DNA
tgtgctgctataaacatgtgtgtgcaagtgtcttttttgtataatgacttcttttcctctgggtagatacccagtagtgggattactggatcaaatggtagatctacttttagttcttta

SEQ ID NO: 26152 - DNA, 120 bp, synthetic construct; identical to SEQ ID NO: 7567
  source 1..120: mol_type = other DNA

SEQ ID NO: 26153 - DNA, 120 bp, synthetic construct
  source 1..120: mol_type = other DNA
aattatgagacaccaggttaattggctcatccattccattgcctttactgtaggatggctcgtcaagaagtgggaggtgcggttgaaagagaaggtataggttggatgatgtggaggatt

SEQ ID NO: 26154 - DNA, 120 bp, synthetic construct
  source 1..120: mol_type = other DNA
tcaccctgaatgcttcaactgttctctacctacccatgccttccagatctgcccgtcgcctgtcctaatcctgaactccagtcctatctgtctgattttaaacaagagtccccttacctc

SEQ ID NO: 26155 - DNA, 120 bp, synthetic construct
  source 1..120: mol_type = other DNA
cccccatggaacacttggtctactgtaaaacatagacttaaataatatttcctaacaaaagggagcaagtgtgcaagggctgaaaggcccctcctcttttcctaccactagatctataaa

SEQ ID NO: 26156 - DNA, 120 bp, synthetic construct; identical to SEQ ID NO: 7568
  source 1..120: mol_type = other DNA

SEQ ID NO: 26157 - DNA, 120 bp, synthetic construct
  source 1..120: mol_type = other DNA
aggtccctggaccaaacactgaatgatgtccatcctaacgtccccgcatcactcctcagccaccacctctccctccactctcctcctcacccccattcttttttttttttttggagatgg

SEQ ID NO: 26158 - DNA, 120 bp, synthetic construct
  source 1..120: mol_type = other DNA
gcacaccgccacgcccagctaattttttgtattttagtagagacggggtttcattgtgttgcccaggctggactcgaactcctgagctcagacaatctacccaccttggcctcccaaagt

SEQ ID NO: 26159 - DNA, 120 bp, synthetic construct
  source 1..120: mol_type = other DNA
ttaggtaatggatgtaagcagttctgaaaaagaaatacttgtagtcctacaaggcttctcataaaacttcagcccctgattcccttgccccaattgcttcttattctgagtcctgcttcc

SEQ ID NO: 26160 - DNA, 120 bp, synthetic construct
  source 1..120: mol_type = other DNA
ggaatgcagagacaccatcatagctcactgcagcctggtactcccgggctcaagggatcctctcacctcagctttccaaagcactgggattacaggcgtgagccattgcacccggccata

SEQ ID NO: 26161 - DNA, 120 bp, synthetic construct; identical to SEQ ID NO: 7569
  source 1..120: mol_type = other DNA

SEQ ID NO: 26162 - DNA, 120 bp, synthetic construct
  source 1..120: mol_type = other DNA
tgggtcatataattgcattgtgatgaccatccgttcttgtaatttttgtttttctagatattaataatagcctcatttttaaaatgtccatagttttcttcatatatgtaattaattcat

SEQ ID NO: 26163 - DNA, 120 bp, synthetic construct
  source 1..120: mol_type = other DNA
tttagaagcctctgtccaaccagtactggttgcttgctagatctcttgtcctgcaatctgtattcagcaacattctggaaattcccttttttcccttgtaaattcttatcttttttctgg

SEQ ID NO: 26164 - DNA, 120 bp, synthetic construct
  source 1..120: mol_type = other DNA
accttatgcactgttagggtaatgctaagctgctgtaacaaggagatcccgaaagtggctttgaaaaacaagtttatttttctcccttgtaccagtcctaaggtaagtattataggatgg

SEQ ID NO: 26165 - DNA, 120 bp, synthetic construct; identical to SEQ ID NO: 7570
  source 1..120: mol_type = other DNA

SEQ ID NO: 26166 - DNA, 120 bp, synthetic construct
  source 1..120: mol_type = other DNA
cctgtgttctttgagctatatggctgattaccacctagttgcctagtacttgactttggaatgactaaggcagataaatattgtttcctggagtatatgggccagatagaggagctatgg

SEQ ID NO: 26167 - DNA, 120 bp, synthetic construct
  source 1..120: mol_type = other DNA
ctggaccctttgctacttttaagaattggctagccctggaaggtcctgtctctccctagctagaaaagtttgttaagatgtcaaaacatgataatatacagaaattaaaaatatatatac

SEQ ID NO: 26168 - DNA, 120 bp, synthetic construct
  source 1..120: mol_type = other DNA
agaggttgacaaatgtaacttagccatgtgcccaggaagaagagaaaaatgggcccagctgtccatagaccttatacatctgaaaatgtcttattccaccctcacatttgactcatagtt

SEQ ID NO: 26169 - DNA, 120 bp, synthetic construct; identical to SEQ ID NO: 7571
  source 1..120: mol_type = other DNA

SEQ ID NO: 26170 - DNA, 120 bp, synthetic construct
  source 1..120: mol_type = other DNA
ctgacactctaattttcttatatttcttcttctgtcttccaactctgtcgttttatttttcttctggggagatttcctcagcttctaaagtcttcaaatccttctagtgaattttgaggt

SEQ ID NO: 26171 - DNA, 120 bp, synthetic construct
  source 1..120: mol_type = other DNA
ggttttgctgtttgcattgtctcagttctctctggctttgcttcatagggatatttgttttggtctctatatttcaagctagagatttttctcaaatatctggtaatcccagaatgtcct

SEQ ID NO: 26172 - DNA, 120 bp, synthetic construct
  source 1..120: mol_type = other DNA
ttagggtaatttagcagagacgtggcagtttagattgggaagatcctcaaaatgtcagtatctagtgttggctaatttctttccacaagaagaattctccagatcctgtctagagcatac

SEQ ID NO: 26173 - DNA, 120 bp, synthetic construct
  source 1..120: mol_type = other DNA
tagcatagctgctgaagtgctggaagctgagcaagggaataggtaatgtgggttttacatttcagggtgtaagcatttccttaattgcatagtttcagtaaaaccttttgagaggtgaca

SEQ ID NO: 26174 - DNA, 120 bp, synthetic construct; identical to SEQ ID NO: 7572
  source 1..120: mol_type = other DNA

SEQ ID NO: 26175 - DNA, 120 bp, synthetic construct
  source 1..120: mol_type = other DNA
ggtgctgcgctccaattctcgccggacctcagctgcctccctgaggggcacggcttgggacctgcagcccgccatgcctgagcctcccccacgccgccatgggctcctgtgcagccagaa

SEQ ID NO: 26176 - DNA, 120 bp, synthetic construct
  source 1..120: mol_type = other DNA
gggatccactaggtgaggccagctgggctcctgagtgtagtggggacttggagaacctttatgtctagctaagggattgtaaatacaccaatcagcactctgtgtctagctcaaggtttg

SEQ ID NO: 26177 - DNA, 120 bp, synthetic construct
  source 1..120: mol_type = other DNA
aatacaccaatcagcactctgtgtctagctcaaggtttgtaaacacaccagtaagcaccctgtgtctagctaatctggtggggacttggagaatctttatgtctagctaagggattgtaa

SEQ ID NO: 26178 - DNA, 120 bp, synthetic construct
  source 1..120: mol_type = other DNA
ttgtgtctagctcagggattgtaaacacaccaatcagcaccttgtcaaaacagaccaatcagctctctgtaaaaccaatcggcgctctgtaaaatggaccaatcagtaggatgtgggtgc

SEQ ID NO: 26179 - DNA, 120 bp, synthetic construct; identical to SEQ ID NO: 7573
  source 1..120: mol_type = other DNA

SEQ ID NO: 26180 - DNA, 120 bp, synthetic construct
  source 1..120: mol_type = other DNA
ctgccttcagcagtgcctgggattactgatctagagtttctttggtttcagtatctccagagataaaaccctaagctgttaaaaggaagagaggtgtattcatccaagtgcttgagtgga

SEQ ID NO: 26181 - DNA, 120 bp, synthetic construct
  source 1..120: mol_type = other DNA
cccaaatctttagaggaacccagttgcaattcccgaatctttccaggattccacagaattaataatctaccagtagttgacttactctcacccccaatggaggcctgtatgttgaagctt

SEQ ID NO: 26182 - DNA, 120 bp, synthetic construct
  source 1..120: mol_type = other DNA
ccatcgtttgtccttgtggaggtatgtgttttgttatttctctactttttattcttctatgaaatccgtaagcctccatatatacttattcttttattcattccaattggggtctacccc

SEQ ID NO: 26183 - DNA, 120 bp, synthetic construct
  source 1..120: mol_type = other DNA
atatttttctagagcctctctattctcttgacttccttgattcactttttagagttttctttctgccttagtggatgctccttctcagtctcattcatttgcgtctcctcctctatctga

SEQ ID NO: 26184 - DNA, 120 bp, synthetic construct; identical to SEQ ID NO: 7574
  source 1..120: mol_type = other DNA

SEQ ID NO: 26185 - DNA, 120 bp, synthetic construct
  source 1..120: mol_type = other DNA
gcgtaagccccaaagctagaagttgttcttgacttcttttcgtgtcatccaccacatgcagcctttcaacacttcctattggttctacttttctaatttcaaaacatagcttgtattcat

SEQ ID NO: 26186 - DNA, 120 bp, synthetic construct
  source 1..120: mol_type = other DNA
caattttgttttctactttctcttcccttcctgaatgattaagccccagatcattaggtgaggcagagcaaagcagatatcagggttggacaggaggggagacagcagtggcccagagaa

SEQ ID NO: 26187 - DNA, 120 bp, synthetic construct
  source 1..120: mol_type = other DNA
ggcaaaactctgtttctactagaaatacaaaaattagctgggtgtggtagcgcatgtctgtatttccagctactcaggaggctgaggcaggagaatcccttgaacccgggaggtggaagt

SEQ ID NO: 26188 - DNA, 120 bp, synthetic construct; identical to SEQ ID NO: 7575
  source 1..120: mol_type = other DNA

SEQ ID NO: 26189 - DNA, 120 bp, synthetic construct
  source 1..120: mol_type = other DNA
accaaagtacaacgtaatcaaataactaaaaatcagtgataaaagggaaatcctagaatgagctagaaaagacacattgtatagagaggagcaaagacaagcataacagacttcctgtga

SEQ ID NO: 26190 - DNA, 120 bp, synthetic construct
  source 1..120: mol_type = other DNA
aaatactgaaagaaaaaaatactttatcaacctagaattacacggagtaagaatattttcaatatgaagatgaaatgaaggcttttctagacaagcaaaaactggaagaccttgcctcct

SEQ ID NO: 26191 - DNA, 120 bp, synthetic construct
  source 1..120: mol_type = other DNA
gcgtgctggcagtcctcagagccctcgcttgctctcagcacctcctctgcctgggctcccactttggcggcacttgaggagcccttcagcccaccgctgcactgtgggagtccctttctg

SEQ ID NO: 26192 - DNA, 120 bp, synthetic construct
  source 1..120: mol_type = other DNA
ggcttggcggccccgcactcgaagcagccagcgggccctgcaggccccgggcagtgaggggcttagcacccgggccagtggctgcggagggtgtactaggtcccccagcagtgccggccc

SEQ ID NO: 26193 - DNA, 120 bp, synthetic construct; identical to SEQ ID NO: 7576
  source 1..120: mol_type = other DNA

SEQ ID NO: 26194 - DNA, 120 bp, synthetic construct
  source 1..120: mol_type = other DNA
tgtgagtacaccaatggacactctgtatctagctgctctggtagggccttggagaacctttatgtctagctcagggattgtaaatacaccaatcggcactctgtatctagctcaaggttt

SEQ ID NO: 26195 - DNA, 120 bp, synthetic construct
  source 1..120: mol_type = other DNA
taaatacaccaatcggcactctgtatctagctcaaggtttgtaaacacaccaatcagcaccctgtgtttagctcaaagtttgtgagtgcaccaatcgacactctgtatctagctgctctg

SEQ ID NO: 26196 - DNA, 120 bp, synthetic construct
  source 1..120: mol_type = other DNA
agaccactcggctctaccaatcagcaggatgtgggtggggccagataagagaataaaagcaggctgcccgagccagcagtggcaacctgcttgggtcgttttccacactgtggaaacttt

SEQ ID NO: 26197 - DNA, 120 bp, synthetic construct; identical to SEQ ID NO: 7577
  source 1..120: mol_type = other DNA

SEQ ID NO: 26198 - DNA, 120 bp, synthetic construct
  source 1..120: mol_type = other DNA
caccaattccagacacactgggttcaagcgattttcctgcctcagcttctcgagtagctgggattacaggcatgtaattagccacaccatgcctggctaattttgtatttttagtacaga

SEQ ID NO: 26199 - DNA, 120 bp, synthetic construct
  source 1..120: mol_type = other DNA
caggcgtgaatcgacaggcaagactgacatttttttttaaatgtaaaagttcttcaggaagaaaaaatttagatctatgcaaaaaagaatgaagtgtgctggaaatgataaatatatggg

SEQ ID NO: 26200 - DNA, 120 bp, synthetic construct
  source 1..120: mol_type = other DNA
gaaatggaagtgtactgtgttgagactctcatgcctttacaggaagaggaatgagctcactgggaggtagacagtgataaaggtgtatatcgtaaatcctagagcaaaggcacacaaata

SEQ ID NO: 26201 - DNA, 120 bp, synthetic construct; identical to SEQ ID NO: 7578
  source 1..120: mol_type = other DNA

SEQ ID NO: 26202 - DNA, 120 bp, synthetic construct
  source 1..120: mol_type = other DNA
aatactgggttaattaaaaaaaaaaaaggcgaaaaatggaggaaaaggtaagaagatcagacgagaaaaatagaaaacaaatatgaagactattaaattcagggccagctacagtggttc

SEQ ID NO: 26203 - DNA, 120 bp, synthetic construct
  source 1..120: mol_type = other DNA
gtaattagccaggcatcatgactcgtgcctgtgatcctagatagttcggaggctgaggcaggaggatttcttgagcttagaaagtcaaggctgcagtcagccgtgattgtgccactgcat

SEQ ID NO: 26204 - DNA, 120 bp, synthetic construct
  source 1..120: mol_type = other DNA
tggttaaaaaagaaagccccaaataaataatattcaaccaagaaatacattttaactaactataactacaaatagggtaaacaataggataaaaataagaggaagaaagatacggccata

SEQ ID NO: 26205 - DNA, 120 bp, synthetic construct; identical to SEQ ID NO: 7579
  source 1..120: mol_type = other DNA

SEQ ID NO: 26206 - DNA, 120 bp, synthetic construct
  source 1..120: mol_type = other DNA
aaataattgacctgtaatcttcaaaggttaaaagttatgaagatcaaaggaagactgaagaactgcaccagactgaagaagactaaagagacagaacaacgaaaaacaacacacgattct

SEQ ID NO: 26207 - DNA, 120 bp, synthetic construct
  source 1..120: mol_type = other DNA
aatatattcatgtgaatttcttgatcttgatggctgtattatggttgcgtatgagaatatataaagtattgaaggataatgagacagattcagggaaaagggttctttgtgttatacttg

SEQ ID NO: 26208 - DNA, 120 bp, synthetic construct
  source 1..120: mol_type = other DNA
cattgtatttgagatgaaatttaacctttctaccatggtattttgctaaactctgagtatacccctgtcagcaaaagaaatgtgggcttatgttcttgtaaagaagagtttagaatataa

SEQ ID NO: 26209 - DNA, 120 bp, synthetic construct; identical to SEQ ID NO: 7580
  source 1..120: mol_type = other DNA

SEQ ID NO: 26210 - DNA, 120 bp, synthetic construct
  source 1..120: mol_type = other DNA
cctgaatagctgggattataggcatgcgccaccatgcctggctaattttgtatttttagtagagatggggtttctccatattggtcaggctggtcttgaactcccggcctcaggtgatcc

SEQ ID NO: 26211 - DNA, 120 bp, synthetic construct
  source 1..120: mol_type = other DNA
agcaccactgctttctttaacagcacttaagccaatgtgtatttatattttatgttgtagctctcttctttactaaattataagcccatatcccttttgctgacaggagtatgcccagag

SEQ ID NO: 26212 - DNA, 120 bp, synthetic construct
  source 1..120: mol_type = other DNA
gtaacactatactaaacctgcaaattcatctttaacccattcccaccaccttatttgttctccacctcaggctctgagaataccacagccttcacaaaaggctccgacaccaccacagcc

SEQ ID NO: 26213 - DNA, 120 bp, synthetic construct; identical to SEQ ID NO: 7581
  source 1..120: mol_type = other DNA

SEQ ID NO: 26214 - DNA, 120 bp, synthetic construct
  source 1..120: mol_type = other DNA
gcaggctctgagaaaacgatggcctcctccataatttctgagaccaccatggcctccaccacaggctctgagactgccacagtctctaccacaggctctgagaccaccaccacctccact

SEQ ID NO: 26215 - DNA, 120 bp, synthetic construct
  source 1..120: mol_type = other DNA
tcaactgcagactccaaggtgatcacggcatccagcatgagctctgagaccactgtggcccccgctgcaggctctaacaccaccacagcctctaccacaggctctgagaccactacaatc

SEQ ID NO: 26216 - DNA, 120 bp, synthetic construct
  source 1..120: mol_type = other DNA
tctacggcaggatccgagaacaccacagtctctagtgcaggctctgggaccaccacagcttctatggcaggctctgagaccaccgtctccactgcaggctctgagaccactacagtctct

SEQ ID NO: 26217 - DNA, 120 bp, synthetic construct; identical to SEQ ID NO: 7582
  source 1..120: mol_type = other DNA

SEQ ID NO: 26218 - DNA, 120 bp, synthetic construct
  source 1..120: mol_type = other DNA
accatgggctctgagaccaccaaagtctcaactgcaggctctgagaccacagtctccactgcaggctctgagaccactgcagcctctactgaagattctgaaaccaacacagcatttact

SEQ ID NO: 26219 - DNA, 120 bp, synthetic construct
  source 1..120: mol_type = other DNA
ataggccctgagaccaccaaggtctccactgcaagctctgaggtgaccacagtctttgctgcaggctctgagacaatcagagcctctaccgtaggctctgagaccaccacagtctctacc

SEQ ID NO: 26220 - DNA, 120 bp, synthetic construct
  source 1..120: mol_type = other DNA
gaaggctctgaggccactacagtctccaccacaggctctgagaccactacagtttctatcacagactcagagaccaccaccacctgtactgaaggctctgagatgactgcagtctccacc

SEQ ID NO: 26221 - DNA, 120 bp, synthetic construct; identical to SEQ ID NO: 7583
  source 1..120: mol_type = other DNA

SEQ ID NO: 26222 - DNA, 120 bp, synthetic construct
  source 1..120: mol_type = other DNA
agtctccaccacaggctctgagaccactacagtttccaccacaggcttggagaccaccaccacttccactgaaggctctgagatgactacagtctccaccacaggtgctgagaccaccac

SEQ ID NO: 26223 - DNA, 120 bp, synthetic construct
  source 1..120: mol_type = other DNA
agcctctactacaggctctgagaccaccacagcctctactacaagctctgagaccaccacagcctctactgaaggctctgagaccactacagtctccaccacagactctgagaccaccat

SEQ ID NO: 26224 - DNA, 120 bp, synthetic construct
  source 1..120: mol_type = other DNA
ctccatcacaggctctgagaccactaaagtttctaccacaggttcagagaccaccaccacttctactgaaggctctgagattactacagcctccatcacaggctctgagaccaccacagc

SEQ ID NO: 26225 - DNA, 120 bp, synthetic construct; identical to SEQ ID NO: 7584
  source 1..120: mol_type = other DNA

SEQ ID NO: 26226 - DNA, 120 bp, synthetic construct
  source 1..120: mol_type = other DNA
agcctctactgaaggctctgagaccaccacagcctctactgaaagctctgagaccactacagccactaccataggctctgagaccaccacagcctctactgaaggctctgagactaccac

SEQ ID NO: 26227 - DNA, 120 bp, synthetic construct
  source 1..120: mol_type = other DNA
agcctctactgaaggctctgagctcactacagtttctaccacaggctctgagaccatcacagtctctgctgaaggctctgagaccactacagtcactactatgggctctgagaccaccac

SEQ ID NO: 26228 - DNA, 120 bp, synthetic construct
  source 1..120: mol_type = other DNA
agtctctaccacaggcactgagactaccatcacctctactgaaggttcagagaccactacagtcactactgcaggttctgagaccacagcagtctataccacaggctctgagactaccac

SEQ ID NO: 26229 - DNA, 120 bp, synthetic construct; identical to SEQ ID NO: 7585
  source 1..120: mol_type = other DNA

SEQ ID NO: 26230 - DNA, 120 bp, synthetic construct
  source 1..120: mol_type = other DNA
aggccaccacatcctctgctgcaggctctgaggccaccaccacctctactgaaggctctgagaccaccacagcctccactgcaggctctgagaccaccacagcctccactgcaggctctg

SEQ ID NO: 26231 - DNA, 120 bp, synthetic construct
  source 1..120: mol_type = other DNA
gcaggctctgagaccaacactgccttcatcataggctctgagagcaccatagcttccactgcaagcttggagcccactgcaacttccctcacaggctctgagaccaccacagtctctatc

SEQ ID NO: 26232 - DNA, 120 bp, synthetic construct
  source 1..120: mol_type = other DNA
catgtcttctttgagcccacacattttaactccagtggcaaccaccagctgttcacctgtttctatcatctctgccctggttcaagtcaagccagcacacagttagatataatttcctct

SEQ ID NO: 26233 - DNA, 120 bp, synthetic construct
  source 1..120: mol_type = other DNA
ttgagaccatcctggctaacacggtgaaatccagtctctactaaaaatacaaaaaattagctgggcgtggtggcgggcacctgtagtcccagctactcggaaggctgaggcaggagaatg

SEQ ID NO: 26234 - DNA, 120 bp, synthetic construct; identical to SEQ ID NO: 7586
  source 1..120: mol_type = other DNA

SEQ ID NO: 26235 - DNA, 120 bp, synthetic construct
  source 1..120: mol_type = other DNA
caaccatctgtgacactgccacctcctatcaatgtattgactctagaccagaggctggcagaccacatttcatgggtcaagtctcacctgttacctggttttgtaaagttttactggaac

SEQ ID NO: 26236 - DNA, 120 bp, synthetic construct
  source 1..120: mol_type = other DNA
ccaaaagcctaaattatttgctgtttggacctttacagaaaaaatttggcaacctttgctccagtctgagaccaaacaattttgttcattctctggcacttgccatcagcaagccggtta

SEQ ID NO: 26237 - DNA, 120 bp, synthetic construct
  source 1..120: mol_type = other DNA
acttctgacctaggcacacccatcgctacctaagccgccaccaccgcctctgctgtgttgattcgtgctcacacctgtctgagcccaccctctcctatccctgtgagcagccttctccac

SEQ ID NO: 26238 - DNA, 120 bp, synthetic construct
  source 1..120: mol_type = other DNA
tccaattctaccatctcctcctccagctccctccttacacccagtgatcacagtcacaaaagaagcagggcctgccgctttgtataccagcccacccacttatttgatctgctttgattt

SEQ ID NO: 26239 - DNA, 120 bp, synthetic construct; identical to SEQ ID NO: 7587
  source 1..120: mol_type = other DNA

SEQ ID NO: 26240 - DNA, 120 bp, synthetic construct
  source 1..120: mol_type = other DNA
ctatttgggtggccacttctgaagtcaaatagatcttccacttctgaacccatcgcgataacgtttcctcaaacttctgcctcctccatcaccaactccaccaggtgacacattctacct

SEQ ID NO: 26241 - DNA, 120 bp, synthetic construct
  source 1..120: mol_type = other DNA
acacctctcctgagccacctccaccataggtttgttagattcaccctcctctggtctaagcacccccattcccctttaatcatctctgctacaaatgcatcatcttgtgtgacctgtttc

SEQ ID NO: 26242 - DNA, 120 bp, synthetic construct
  source 1..120: mol_type = other DNA
tgctgccagccatactgtgccaggaatagtcttaaacacctctggcctgggtacatccactatgggagcatcatctaccacctcagcccacggcgtcaggaccaccacaggatccacccg

SEQ ID NO: 26243 - DNA, 120 bp, synthetic construct
  source 1..120: mol_type = other DNA
caaacgtgatcaaaccaagtggatatttacagccctgggctatcatcctcatttccctggctgcagttgtggctgctgttggattgtcagtaggactgagtttttgtctggtgagtaccc

SEQ ID NO: 26244 - DNA, 120 bp, synthetic construct; identical to SEQ ID NO: 7588
  source 1..120: mol_type = other DNA

SEQ ID NO: 26245 - DNA, 120 bp, synthetic construct
  source 1..120: mol_type = other DNA
gtccaggcatttgagaccagcctggccaacatggtgaaacttgtctttactaaaaatacaaaaattagtcgagagtggtagcatggacctgtagtcccagctactttggaggctgaggca

SEQ ID NO: 26246 - DNA, 120 bp, synthetic construct
  source 1..120: mol_type = other DNA
taggaaggaaggaaggagagagagagagaaaaagagaaagaatgaggaagaaaggaagaaagcaagaaagagaaagaaaggaagaaagaaagaaagaaactgagagagaaagagaaagaa

SEQ ID NO: 26247 - DNA, 120 bp, synthetic construct
  source 1..120: mol_type = other DNA
agcaattccttgtgtggcctgtgactgttactctctgacctcccactccatctctgctctctggtcttgattgttctttgaatacatatttttcttacatcgatttcacatttattgatg

SEQ ID NO: 26248 - DNA, 120 bp, synthetic construct; identical to SEQ ID NO: 7589
  source 1..120: mol_type = other DNA

SEQ ID NO: 26249 - DNA, 120 bp, synthetic construct
  source 1..120: mol_type = other DNA
ctccgtatgtggactacataataaataccagcatctaagaattactccctaaattactttattatttcatttgcaagatcaagagagaataacgaaagtgaacattgagtttttactgcc

SEQ ID NO: 26250 - DNA, 120 bp, synthetic construct
  source 1..120: mol_type = other DNA
ttgccccagcacatgtagtgagtggcagatataagactctaactcaggttagttggattctggagttcatgcctataatctcaaggctctgtgtagacagctttctagagctctcaattc

SEQ ID NO: 26251 - DNA, 120 bp, synthetic construct
  source 1..120: mol_type = other DNA
cataaccttatgatctgcagagctagggcctgagtacgcacataaagatgatatgttaataaggtaacaaggaagcttattttgtcagacggagaaagagtaaaagaacaaggaaaaaga

SEQ ID NO: 26252 - DNA, 120 bp, synthetic construct; identical to SEQ ID NO: 7590
  source 1..120: mol_type = other DNA

SEQ ID NO: 26253 - DNA, 120 bp, synthetic construct
  source 1..120: mol_type = other DNA
ccacatccatggagatggctacggagtgaatcatggcgggcattatggacatggaggaggccactgaggacaccatggagtggatcacagagggagccaccaaggaggccacggcaggac

SEQ ID NO: 26254 - DNA, 120 bp, synthetic construct
  source 1..120: mol_type = other DNA
gtgatccatggagatggacatggactaggtcaagaaaagaaccagcaaaaggacctcagagactttgactggcttggaggggacttcaagtcaaagcttctgtgagtttttcctgagtct

SEQ ID NO: 26255 - DNA, 120 bp, synthetic construct
  source 1..120: mol_type = other DNA
aagacatgtctaagaaacaaaagcacataatgaatgtattatcagggccacacacgtattcgttttcctgtttgttctttcaggttttgttttttttttttttttttgagtgcttattat

SEQ ID NO: 26256 - DNA, 120 bp, synthetic construct
  source 1..120: mol_type = other DNA
ttcgagaccagcctggccaacatggtgaaaccccgtctctactaaataaatacaaaaatcagccaggcgtggtggcgagtgcctataatcccagctactcgggatgctgaggcaggagaa

SEQ ID NO: 26257 - DNA, 120 bp, synthetic construct; identical to SEQ ID NO: 7591
  source 1..120: mol_type = other DNA

SEQ ID NO: 26258 - DNA, 120 bp, synthetic construct
  source 1..120: mol_type = other DNA
gaaaaagatgatgcaattttaaattgggcaaaatatttgataaatagttagcaaaagaggatatcaaaacagccggtgaacatttgaaaaggtacccaatatcactgcttatcagaagtg

SEQ ID NO: 26259 - DNA, 120 bp, synthetic construct
  source 1..120: mol_type = other DNA
agtgggagtgtaaattgatacaattatcttgggaaaatgtttggcaatgctaaaattaaacacataccctatgactcggtacttccactcctgagagtaaatatccagcagaaatgaata

SEQ ID NO: 26260 - DNA, 120 bp, synthetic construct
  source 1..120: mol_type = other DNA
gtggaatgctacccagtagtgaaaaaaaaaacctatgaaatcacacaataacattaatgaatctcatagtcagtgttgagtaaaagaagtcaaaacaaaagtgtacctactgtataattc

SEQ ID NO: 26261 - DNA, 120 bp, synthetic construct; identical to SEQ ID NO: 7592
  source 1..120: mol_type = other DNA

SEQ ID NO: 26262 - DNA, 120 bp, synthetic construct
  source 1..120: mol_type = other DNA
ccaaagacagtggtgctgcaggaagcattgtgtgcaagggaggcaagcagctattttcaatgaggacaaatcacctctctctttaggttgaaataggtctgatataattaatctgccatt

SEQ ID NO: 26263 - DNA, 120 bp, synthetic construct
  source 1..120: mol_type = other DNA
gagccttgcatacgcttcatccctgccagcctgtctgctttgtccatgtccctgctgagcgagcactagagcagctggaaaaagagattggctgacgtctgcagaatggatcgcttggtc

SEQ ID NO: 26264 - DNA, 120 bp, synthetic construct
  source 1..120: mol_type = other DNA
gacttccttgtcatcaattcaccatgtctttcctcaccctgagttatctagccaaactgttagccactgcctattgatcagggttaactgtaactggtcatctctttgcccaggcaaagt

SEQ ID NO: 26265 - DNA, 120 bp, synthetic construct; identical to SEQ ID NO: 7593
  source 1..120: mol_type = other DNA

SEQ ID NO: 26266 - DNA, 120 bp, synthetic construct
  source 1..120: mol_type = other DNA
gcccagtctagtgtggtggtgcagacaacacccagttcataaagggcagctcatgtttcatgaaccctcgcatgctgaggacccaagattaagtcagatgctaggatgtggaagagggct

SEQ ID NO: 26267 - DNA, 120 bp, synthetic construct
  source 1..120: mol_type = other DNA
tgtctcaagcagccttatggccttgctttggttcccacttgaaagtggggaaatatgcgcagacggagcctagagatgaactttgagtaagatgttatttatgttcttttttttttgaga

SEQ ID NO: 26268 - DNA, 120 bp, synthetic construct
  source 1..120: mol_type = other DNA
tcaagcgattctcctgtctcaacctctcgagtaggtggaactacaggcgcctgccaccatgcctggctaattttcgtatctttagtagagccaggtttttaccttgttggtcaggctggt

SEQ ID NO: 26269 - DNA, 120 bp, synthetic construct; identical to SEQ ID NO: 7594
  source 1..120: mol_type = other DNA

SEQ ID NO: 26270 - DNA, 120 bp, synthetic construct
  source 1..120: mol_type = other DNA
ttcaaccacctggatattttcacttatatagatcaagtaagattttagtggttaattgattaatgattaattagccatagccaaagagccctgattacagctctggtcgtgatgcccaca

SEQ ID NO: 26271 - DNA, 120 bp, synthetic construct
  source 1..120: mol_type = other DNA
ctgaaatcaggaagctcatttcaatggtcagatcatccaccattgcatttagcaaagagctgctacagagcttttcaacgatgctggtcctctcccttctaatgccttgatgaagacagt

SEQ ID NO: 26272 - DNA, 120 bp, synthetic construct
  source 1..120: mol_type = other DNA
tcttcctaagtcttttgatttttttcttccgcttatactaatgaaatactgggatctcaactttatttagtgtaggccaccactaagtccacatttcaagcaaccgagagaactattagt

SEQ ID NO: 26273 - DNA, 120 bp, synthetic construct
  source 1..120: mol_type = other DNA
ataacttactacaaatgcagcagcttaaaccaacacccatttatcagaccacagttctatgaggcgggtctggggccagcatgactgactcctttgctcagtctcacaggttaaaatgaa

SEQ ID NO: 26274 - DNA, 120 bp, synthetic construct; identical to SEQ ID NO: 7595
  source 1..120: mol_type = other DNA

SEQ ID NO: 26275 - DNA, 120 bp, synthetic construct
  source 1..120: mol_type = other DNA
cacaaaggtccttataagagggagatgagaggccgggcgcagtgactcacacctgtaatctcagcacttagggaggctgaggagggtagatcacgaggtcaggagttcgagaccagcctg

SEQ ID NO: 26276 - DNA, 120 bp, synthetic construct
  source 1..120: mol_type = other DNA
gtggaggttgcagtgagccaagattgcaccactgcactctagcctgggcaacagggcaagactcaatctcaaaaaaaaaaaaaaaaagagggagacaggagtcagagtcagagagatttg

SEQ ID NO: 26277 - DNA, 120 bp, synthetic construct
  source 1..120: mol_type = other DNA
cacagaccagctgacaccttgactttagcccagtaaaacctattttaaacttccgatctccagaactgcaagataatatatttgtgctatcttcagcctgaatttgtggtaatttgtcac

SEQ ID NO: 26278 - DNA, 120 bp, synthetic construct; identical to SEQ ID NO: 7596
  source 1..120: mol_type = other DNA

SEQ ID NO: 26279 - DNA, 120 bp, synthetic construct
  source 1..120: mol_type = other DNA
gggtctggttttttcatacatagtccctgtggctttgagagataagcatgtcttttagaatattcagagaaagctctgtgttcgctggcaatgccttgactgaggatgcagcagaggggt

SEQ ID NO: 26280 - DNA, 120 bp, synthetic construct
  source 1..120: mol_type = other DNA
tattccaggcaccaccacaggtgataacttaagtcactttttctatcttttgctgtgtaatacaaagacttcattttatactagcatgaggtcgcccctgccctcaagcctaatgggtca

SEQ ID NO: 26281 - DNA, 120 bp, synthetic construct
  source 1..120: mol_type = other DNA
ataaaaggatttagtacaagaagtagatgtttataaaaccactcgaaaaggtggtgtgccgcccattgcttcccattctatacacagtgattcacgctggtcacacgcagtcagctctgg

SEQ ID NO: 26282 - DNA, 120 bp, synthetic construct; identical to SEQ ID NO: 7597
  source 1..120: mol_type = other DNA

SEQ ID NO: 26283 - DNA, 120 bp, synthetic construct
  source 1..120: mol_type = other DNA
tatgggaacggggtaattggcttccagttccttcattcgcaggtcatgaaaaaaacctggggctagactccatgagagtttttttgttttctgttttgtttgtttgtctgtttgtttgtt

SEQ ID NO: 26284 - DNA, 120 bp, synthetic construct
  source 1..120: mol_type = other DNA
ctacaggcgcccgccaccacgccctgctaattgttttgtatttttcgtagagacagggtttcactgtgttagccaggatggtctcgatctcctgaccttgtgatccacccgcctcagcct

SEQ ID NO: 26285 - DNA, 120 bp, synthetic construct
  source 1..120: mol_type = other DNA
ggcccttcctaatgggactaagtcatcctccaccctcacctaccttctggctgctgtaccctcctctctaagcttggggattctgccactgctcacagctggaagaacaacagcctacat

SEQ ID NO: 26286 - DNA, 120 bp, synthetic construct
  source 1..120: mol_type = other DNA
tctcagctcactgcaacctctgcctcctgggctcaagcgattctcccgcctcagcctcccaagcaactgggactacaggcatgtgccaccacaccaagctaatttttgtatttttagtag

SEQ ID NO: 26287 - DNA, 120 bp, synthetic construct; identical to SEQ ID NO: 7598
  source 1..120: mol_type = other DNA

SEQ ID NO: 26288 - DNA, 120 bp, synthetic construct
  source 1..120: mol_type = other DNA
aggagccttcccttccagcctcacacaggcagactatctcaaaagaaagagaaagcaattttcccttgcatgctggctgtttcacttccttctacttttaggaaatggtgagtgattttg

SEQ ID NO: 26289 - DNA, 120 bp, synthetic construct
  source 1..120: mol_type = other DNA
gcttctttctctccaatgcaacccagcatctgtcctccgttctgttctcagtggcaactcttctgcccagaagatggacctatttactctataatacatcattcccagatataggcgcat

SEQ ID NO: 26290 - DNA, 120 bp, synthetic construct
  source 1..120: mol_type = other DNA
catctagcctctaattaaacacttcatgagacattgctgttccacactcacgcagatttaattctctctagaatctgccccagcatggctttgactcttgtgttttatgcccctgaccaa

SEQ ID NO: 26291 - DNA, 120 bp, synthetic construct; identical to SEQ ID NO: 7599
  source 1..120: mol_type = other DNA

SEQ ID NO: 26292 - DNA, 120 bp, synthetic construct
  source 1..120: mol_type = other DNA
gaaagaagctcagtctcaccttaactctaactgatccaacaagaaagctgagccactttcctgaatcccagaagatcttatttcttcaagctgacatgactgattctttactagtccatg

SEQ ID NO: 26293 - DNA, 120 bp, synthetic construct
  source 1..120: mol_type = other DNA
cctccaccttccaggctcaagcgattctcgtgcctcaacctcccgagtagctgggattacaggtgtgcaccaccatgcttgtctaatttttttgtatgtgtagtagagacagggtttctc

SEQ ID NO: 26294 - DNA, 120 bp, synthetic construct
  source 1..120: mol_type = other DNA
gaattacccgatgtagtaaaaatgcacatcatggtcccctcccaaaccgattccgcttgattatctgccccctagaggaagggcacaatactgtttggagaggagcttgatgggccttca

SEQ ID NO: 26295 - DNA, 120 bp, synthetic construct; identical to SEQ ID NO: 7600
  source 1..120: mol_type = other DNA

SEQ ID NO: 26296 - DNA, 120 bp, synthetic construct
  source 1..120: mol_type = other DNA
agcacagtgcctggaatatagtgagcattcttaaatgacagccactattattatcactagtattactcatagtagcggtagtggtgaacaaaaccaaatttccagtggagccaaccagcc

SEQ ID NO: 26297 - DNA, 120 bp, synthetic construct
  source 1..120: mol_type = other DNA
aaattactgtgaacactgccctggaccaaccacaccttccagtggaatcaccatgaccacccctccaggatcaaccacattatccagcagaatcaccgtgaccacgctccctggaccaac

SEQ ID NO: 26298 - DNA, 120 bp, synthetic construct
  source 1..120: mol_type = other DNA
atgagggaaggtctaatggatgcctgaggctgtgggaagtcatcctagtcactctggccttggttgcaatggctgtgattctcttcacagggctcttttatttcatgagtgcctgatgtg

SEQ ID NO: 26299 - DNA, 120 bp, synthetic construct; identical to SEQ ID NO: 7601
  source 1..120: mol_type = other DNA

SEQ ID NO: 26300 - DNA, 120 bp, synthetic construct
  source 1..120: mol_type = other DNA
tctctgtgcctaagaaacctcttcaccaaagatcttcacatcccaaaccttggtccatgtcctcaaggatatcatggagtccaagatgggtcaagtgagactgaaacggattttagagac

SEQ ID NO: 26301 - DNA, 120 bp, synthetic construct
  source 1..120: mol_type = other DNA
ctgctcctcccagctctgctccagcccctgacactcctaccttctgtttagttctcccagacctgaaacaggaggctatcgctagtgctgaatgattaaataagtgcatctgctctatgt

SEQ ID NO: 26302 - DNA, 120 bp, synthetic construct
  source 1..120: mol_type = other DNA
gctagtgctgaatgattaaataagtgcatctgctctatgtgacagccagactgtgggtgtgtgcttgtatattgctgtgaagagaggtttcctatatcatgaggacactctttcgctgtg

SEQ ID NO: 26303 - DNA, 120 bp, synthetic construct
  source 1..120: mol_type = other DNA
gatgggggaaggcaggtgctggtctttacagacgtgtgttgcatggcaggaaaacagcctctgcgtgagcctagaacatgaactggaggaaagtgatcctgttttcatgttgtgaggtag

SEQ ID NO: 26304 - DNA, 120 bp, synthetic construct; identical to SEQ ID NO: 7602
  source 1..120: mol_type = other DNA

SEQ ID NO: 26305 - DNA, 120 bp, synthetic construct
  source 1..120: mol_type = other DNA
ttcaccctctgctaagtctcttcagcttctgggattctcctgggtctttgggagagccttaacaggaccaagctgtttctctaagaacattttacaatatgatgaacaaaactgttttta

SEQ ID NO: 26306 - DNA, 120 bp, synthetic construct
  source 1..120: mol_type = other DNA
actaaaaatacaaaaattagccgggtgtggtggcacatgcctgtagtttcagctactcgggaagctgaggtgggaggattgcttgaacctgggaggcggaggttgcagtgagcagagatt

SEQ ID NO: 26307 - DNA, 120 bp, synthetic construct
  source 1..120: mol_type = other DNA
acaatttatttgcatgaaattcaacaataggcaaaactaatctatggtggcagagatcagatctcctatgagggtgagggtttttaggaagggggcactttctgggtgataggaatgttt

SEQ ID NO: 26308 - DNA, 120 bp, synthetic construct; identical to SEQ ID NO: 7603
  source 1..120: mol_type = other DNA

SEQ ID NO: 26309 - DNA, 120 bp, synthetic construct
  source 1..120: mol_type = other DNA
agaaacctccactaactgaattcttaagatctgtgcatttcactttttgtaaattttacctcaataggaagaaaaaatgtatattcgggttttttattttgggattttttaatttttatt

SEQ ID NO: 26310 - DNA, 120 bp, synthetic construct
  source 1..120: mol_type = other DNA
tttttcattcattcattcaccatatttactggacacctgcttggcatgaggtctcaaggagctggggcagctaggatgaccctgtaggtcacagttgggtgagggaggtacataagttac

SEQ ID NO: 26311 - DNA, 120 bp, synthetic construct
  source 1..120: mol_type = other DNA
acatagaaggtgacatttggattttgaggagttagcaggcatttacgaggagcagaagaggaaatgccaggcaagcaagcagcttgtgcaagactgggcatggcacggccagtgaaggtc

SEQ ID NO: 26312 - DNA, 120 bp, synthetic construct; identical to SEQ ID NO: 7604
  source 1..120: mol_type = other DNA

SEQ ID NO: 26313 - DNA, 120 bp, synthetic construct
  source 1..120: mol_type = other DNA
aaaactgtttgagcccaggagtttgagaccagcctgggcaacagagtgaggtcctgtctctacaaaaagttaaaaagattagccaggtgtggtggtgcacacctgtagtcccagctgagg

SEQ ID NO: 26314 - DNA, 120 bp, synthetic construct
  source 1..120: mol_type = other DNA
aaacgagaagaaatgtgaatttcaagagatttctgcctagcacttttttaaaaatccccaactccagaatttatggtgacttttgttaaaagtcctgttttagggaggtcttcatctaac

SEQ ID NO: 26315 - DNA, 120 bp, synthetic construct
  source 1..120: mol_type = other DNA
agtgtgattccctcctgctgcaggctggaggctgggagacagagggagactggggaatgtcttcttgatttatagcatgttttctagttaagaaaatactcaagataaatatatttattt

SEQ ID NO: 26316 - DNA, 120 bp, synthetic construct; identical to SEQ ID NO: 7605
  source 1..120: mol_type = other DNA

SEQ ID NO: 26317 - DNA, 120 bp, synthetic construct
  source 1..120: mol_type = other DNA
atggaaattcagcaaatcaaccaggatgtggagggaaagatggaaagcagactctgacaaatgactcatgtaagcacagtgaaacggatggagaagaaggagctggcctaagtaactttg

SEQ ID NO: 26318 - DNA, 120 bp, synthetic construct
  source 1..120: mol_type = other DNA
accccgcctctacaaaaagttaaaaaaattagctgggcatgatggtgtgcctgtagtcctagctgctcaggaggctaggatggagggatcgcttgagtccaggagatcaaggctgcagtg

SEQ ID NO: 26319 - DNA, 120 bp, synthetic construct
  source 1..120: mol_type = other DNA
acactgtactgtagttggtaaatgtgtttctggcaagggtatgaattagcagttctgaaaccactatttgtttattagggttgaaaaaataagtaaaaaaatatgtttatagacattcgt

SEQ ID NO: 26320 - DNA, 120 bp, synthetic construct; identical to SEQ ID NO: 7606
  source 1..120: mol_type = other DNA

SEQ ID NO: 26321 - DNA, 120 bp, synthetic construct
  source 1..120: mol_type = other DNA
tccaagaaattgaaaatccaaaacacttacggtctcaaacatttcagataagggattcaatctgtatatgcagacaggtaattgcagaaataaatacagacctgtgtttatgcatgagtt

SEQ ID NO: 26322 - DNA, 120 bp, synthetic construct
  source 1..120: mol_type = other DNA
aagaggagccagagctctgtggagaaatagttgattccagggcctggatggacaaaataaaaaatgagcatgaagcatcttgtaataccagaatgcaagaaagtgttttaaaaagggatg

SEQ ID NO: 26323 - DNA, 120 bp, synthetic construct
  source 1..120: mol_type = other DNA
ctactaaaataatacagaattagttgggcatggtggtgcatgcctgtaatcccagctacttgggaggctgaggcaggagaatcacttgaacccaggaagcagaggttgcagtgagccgag

SEQ ID NO: 26324 - DNA, 120 bp, synthetic construct; identical to SEQ ID NO: 7607
  source 1..120: mol_type = other DNA

SEQ ID NO: 26325 - DNA, 120 bp, synthetic construct
  source 1..120: mol_type = other DNA
aatattgcaccactgcactctagcatgggcaacaaagtgagaccctgtctcaaaaaacaaaacaaaatagcaatggagatatcagctgggtgtgctggtgcatgcctgtagtcctagcta

SEQ ID NO: 26326 - DNA, 120 bp, synthetic construct
  source 1..120: mol_type = other DNA
aaaaaaaggatggaggacattaaaacggcactggagcccatctgaaagagctcccagtggccaaagtttgagcaacaaaataaatagtgatagtattggatcataactcacagaacaaaa

SEQ ID NO: 26327 - DNA, 120 bp, synthetic construct
  source 1..120: mol_type = other DNA
caccattaggattacacacctgtaatcccgggtgctcgggaggctgaggcaggagaattacttgaacctgggaggggaaggttgctgtgggctgagatcgtgccattgcactccagcctg

SEQ ID NO: 26328 - DNA, 120 bp, synthetic construct; identical to SEQ ID NO: 7608
  source 1..120: mol_type = other DNA

SEQ ID NO: 26329 - DNA, 120 bp, synthetic construct
  source 1..120: mol_type = other DNA
tagttatactaaatacatacaaattcttttgagtgtgtttaaatactatgtttgaaaatgttgctgggtgatgtggctcacacctgtaatcccagcactttgggaggctgatgagggagg

SEQ ID NO: 26330 - DNA, 120 bp, synthetic construct
  source 1..120: mol_type = other DNA
ggaggctgaggtggaaggatcacttgagcctgggagatcgaggctgcagtgagccgtgatagcaccactgcactccaacctgggcaatacagcaagaccctgtcaaaaagaaagaaagag

SEQ ID NO: 26331 - DNA, 120 bp, synthetic construct
  source 1..120: mol_type = other DNA
tactagtagttaacatagtcagttacatgtggtaaactagccattcattaaattgattttcaggaaatcagctgccttctaagagaggaacaattcccggcccacctgcaatttcacact

SEQ ID NO: 26332 - DNA, 120 bp, synthetic construct; identical to SEQ ID NO: 7609
  source 1..120: mol_type = other DNA

SEQ ID NO: 26333 - DNA, 120 bp, synthetic construct
  source 1..120: mol_type = other DNA
cttttcgccaatcatctttctcttgctattctcatgactgtgaataagtctcatgagatttgatgggtttatcaggggtttccgcttttgcttctttctcattttctcttgccgccactg

SEQ ID NO: 26334 - DNA, 120 bp, synthetic construct
  source 1..120: mol_type = other DNA
aaaacagactaatacatgcagtaattgagaaagctcactggggtgagggcactcgagcagggggagcaaggagagagatccgtgggctggagagaagccaaggaagaggatttgggtgga

SEQ ID NO: 26335 - DNA, 120 bp, synthetic construct
  source 1..120: mol_type = other DNA
ctctgacacccagctctcctcctgccaagcatcatcccccaggcaggcctggcctatgccctccttggtcatcctgactttactgtggccacctgtgggaaggaaggccgaggccctccc

SEQ ID NO: 26336 - DNA, 120 bp, synthetic construct; identical to SEQ ID NO: 7610
  source 1..120: mol_type = other DNA

SEQ ID NO: 26337 - DNA, 120 bp, synthetic construct
  source 1..120: mol_type = other DNA
tcttgagatgagaagaaaatgccccgctacgtcccccttctgctgctcctgcttctcctgaggtgttcagaacggggtggaggagttaattttggtgagaaggatgcaaaagtccccggg

SEQ ID NO: 26338 - DNA, 120 bp, synthetic construct
  source 1..120: mol_type = other DNA
taccctcaatcacctgccacagggaagcagggaccccagcgtctttctcatatccccttttaaggaaatgctctgcttttgattttgtgcattttatttaagtttctttgtttcaacttt

SEQ ID NO: 26339 - DNA, 120 bp, synthetic construct
  source 1..120: mol_type = other DNA
ctctacaaaaaccaaaaaaatcagccaggcgtggtagcccatgcctgtagtctaatctactcgggaggctgaggtgggaggatcacttgaggccaggaggccaaggctgcattgagccat

SEQ ID NO: 26340 - DNA, 120 bp, synthetic construct
  source 1..120: mol_type = other DNA
gcactttgggaggctgaggcgggtgggtcatctgaggtcaggtgtttgagaccagcctggccagcatggtgaaacccagtctctagtaaaaatacaaaaattagctgggtctggtggcgc

SEQ ID NO: 26341 - DNA, 120 bp, synthetic construct; identical to SEQ ID NO: 7611
  source 1..120: mol_type = other DNA

SEQ ID NO: 26342 - DNA, 120 bp, synthetic construct
  source 1..120: mol_type = other DNA
agaggactcatctcttctttgtacttatacctgactcagtgttgccctcagtccaactagatcacacccacacccctcatgactcctcccctaagcctgcccccataccaccttgaatct

SEQ ID NO: 26343 - DNA, 120 bp, synthetic construct
  source 1..120: mol_type = other DNA
ggagcacctggccagctgtctcattttaaatcatataccaagcatgacctgagtgtaatctctaacatgaatcacagcttctgcctcattggtttgccagaaccgcaggcacaaatggat

SEQ ID NO: 26344 - DNA, 120 bp, synthetic construct
  source 1..120: mol_type = other DNA
aaaagacagagtcaaagctgggtgagcaggccttcgaagggcgtggctcagcaaagataatccatattgtagtgcaagaggattcttgtggaatatgttttaccagaattaaaccaaaaa

SEQ ID NO: 26345 - DNA, 120 bp, synthetic construct; identical to SEQ ID NO: 7612
  source 1..120: mol_type = other DNA

SEQ ID NO: 26346 - DNA, 120 bp, synthetic construct
  source 1..120: mol_type = other DNA
agacccagcgaccaccaaggactatgtgtctgcagacccagggaccaccaaggattctgtcactgcagacccagggaccactcactgagaactttgtcactgcagacccagggaccacca

SEQ ID NO: 26347 - DNA, 120 bp, synthetic construct
  source 1..120: mol_type = other DNA
cagggaccaccaaacactccatcactgcagacccagggaccaccgaggactccgtcactgcagacccagggaccacagaagatgaaaccactaaacatggtgacactcaccttctgtgaa

SEQ ID NO: 26348 - DNA, 120 bp, synthetic construct
  source 1..120: mol_type = other DNA
tgagtatttggtctgggaatattcagggcatcaggggaacgaggccaactgaggataagcggtgggcatggagagctgaggtacagaggcccaagaaatcgtcaggcgtgaggaagccta

SEQ ID NO: 26349 - DNA, 120 bp, synthetic construct; identical to SEQ ID NO: 7613
  source 1..120: mol_type = other DNA

SEQ ID NO: 26350 - DNA, 120 bp, synthetic construct
  source 1..120: mol_type = other DNA
agaagatttttttaaaaccaaaattgagtgggtttttatgagccaccactaccctgcaccaaagagacagtttgtaccagctctcaaagaggagctctgggtatttttctgtctctgagg

SEQ ID NO: 26351 - DNA, 120 bp, synthetic construct
  source 1..120: mol_type = other DNA
aatcatcccaaaagcagcagcagggaaattcccacagggagtggcccaaaccctccagagatggggccaattgggattccaaagaaagaagcccagatgtcagggtgatcaattcaaagc

SEQ ID NO: 26352 - DNA, 120 bp, synthetic construct
  source 1..120: mol_type = other DNA
gtttagggaatttgactcagggctggagccagtttctttcaacgttttgggcaacaacctagatacctttattagtgcctgggagtgttcaaggccctggtttgcgttcaagcctgctgg

SEQ ID NO: 26353 - DNA, 120 bp, synthetic construct; identical to SEQ ID NO: 7614
  source 1..120: mol_type = other DNA

SEQ ID NO: 26354 - DNA, 120 bp, synthetic construct
  source 1..120: mol_type = other DNA
taagtgtgagtaaagccgaaagtaatgcatgatacagatgaggtgttcacatttaattctgctaaaatgacaccatgaaactagagcattctgaaggatgctgacaagaggaaaatggaa

SEQ ID NO: 26355 - DNA, 120 bp, synthetic construct
  source 1..120: mol_type = other DNA
ccatgaaaagttggacactcttgctctagaacaaaagatgctttccttcctccaaaccaggcattggcccagagaggtcactagcattagcaccttcttaatttcatgtagagactaaaa

SEQ ID NO: 26356 - DNA, 120 bp, synthetic construct
  source 1..120: mol_type = other DNA
attaccattcctcccaagtttcatttgtcaaaatgcttttttctttaaactttaatggtttaagttttttttaagttgttttaaaaaaaacaaaaaaggtttaagttttttttggcaggg

SEQ ID NO: 26357 - DNA, 120 bp, synthetic construct
  source 1..120: mol_type = other DNA
ctggccaatatggtgaaaccccatctctactaaaactacaaaaaagttagccagccatagtggtgggcacctgtaatcccagctacttgagagactgaggcagagaattgcttgaacccg

SEQ ID NO: 26358 - DNA, 120 bp, synthetic construct; identical to SEQ ID NO: 7615
  source 1..120: mol_type = other DNA

SEQ ID NO: 26359 - DNA, 120 bp, synthetic construct
  source 1..120: mol_type = other DNA
actacagtacaccataaagaggaccccagcagtgactacagttggttctagaaaaaggagacccctcatccgcctctgcaagactatacagcatgatgtgtatcctcaggcctccactcc

SEQ ID NO: 26360 - DNA, 120 bp, synthetic construct
  source 1..120: mol_type = other DNA
gaccttggttacttcctctggacaatcgcctttacctatctaccaggttttgaggaattacacacagctcaggtataagagatattcggtaagtctgatcaaatcaataaagcaaatttt

SEQ ID NO: 26361 - DNA, 120 bp, synthetic construct
  source 1..120: mol_type = other DNA
agctcactgcaacctctgccccccaggttcaagtgattctcctgcctcagcctccctagtagctgggattacaggcgcatgccaccacgcctggctaatttttgtatttatagtagagac

SEQ ID NO: 26362 - DNA, 120 bp, synthetic construct; identical to SEQ ID NO: 7616
  source 1..120: mol_type = other DNA

SEQ ID NO: 26363 - DNA, 120 bp, synthetic construct
  source 1..120: mol_type = other DNA
atcgcggtgtgaaatgaggacacgaagtccagacctaacctctaagagaaaagccctgcctgatagaagaagagatttgtccttacttaatgcaaatgcaccatattcatgcacctatga

SEQ ID NO: 26364 - DNA, 120 bp, synthetic construct
  source 1..120: mol_type = other DNA
ctgatgccactatgagcagcatcaccaccagtgttaaataatggaattgtagtattatgatacagagtcggaaacacggaataataaattaaaatactaaagtgaaaaaattggattgat

SEQ ID NO: 26365 - DNA, 120 bp, synthetic construct
  source 1..120: mol_type = other DNA
cgatcttggctcactgcaacctccacttcctgggttcaagcgattctccttcctcagcctccgagtagctgggattacaggcgtgcaccaccatgcctggctaatttttgtatttttagt

SEQ ID NO: 26366 - DNA, 120 bp, synthetic construct; identical to SEQ ID NO: 7617
  source 1..120: mol_type = other DNA

SEQ ID NO: 26367 - DNA, 120 bp, synthetic construct
  source 1..120: mol_type = other DNA
ctagtttctcaaatctcatttgccacttgatgttttccttctttcatggatcgtctctgtacaagctctctcaagaccttcagtctctcagtcagctgcgggattattgggcccttaatg

SEQ ID NO: 26368 - DNA, 120 bp, synthetic construct
  source 1..120: mol_type = other DNA
caggaaatgcttatattatggggattttcaagattattacctgaaggaaaacgtgacagaaacagctctagtctccccttcccttacacttggagaacctgagttttgggggtgatggta

SEQ ID NO: 26369 - DNA, 120 bp, synthetic construct
  source 1..120: mol_type = other DNA
gtgtcccttccagatgaaaaggccaaagctcatgaggagaaagccctttgccccttccccttcgttcctcttcctacctggaatgcagatatgagacctggggctcagcaatgctgaggt

SEQ ID NO: 26370 - DNA, 120 bp, synthetic construct; identical to SEQ ID NO: 7618
  source 1..120: mol_type = other DNA

SEQ ID NO: 26371 - DNA, 120 bp, synthetic construct
  source 1..120: mol_type = other DNA
taaaatgatctccctcttctgcccccatggaggcagcaagtggccaagggagaattttgtgattagagatacttgcatgaatatcagtttattgcaggaaaaaagagtgacagaagagtc

SEQ ID NO: 26372 - DNA, 120 bp, synthetic construct
  source 1..120: mol_type = other DNA
ctgggcatttgtcaaagggtattggcaagcacaaggaattccagaatctgccttggtcttcaagggggcagaacttttggtctcggtacaagctaggtttgtgcaataaacaaaggaatt

SEQ ID NO: 26373 - DNA, 120 bp, synthetic construct
  source 1..120: mol_type = other DNA
accatgaaatctctgtaaatggcatagaaactttagcatgcaaaagcatgcatgcaaaaacgctagcatatcaaaagcttttcttttctttcaatcaagttaatttctggccaggcagga

SEQ ID NO: 26374 - DNA, 120 bp, synthetic construct
  source 1..120: mol_type = other DNA
aattagccgagtgtggtggcacatgcctgtaggctcagatacttgggaggctaaggcaagaggctcgcttgagcccaggaggtggaggctgcagtgagccatgactgtgccactgtactc

SEQ ID NO: 26375 - DNA, 120 bp, synthetic construct; identical to SEQ ID NO: 7619
  source 1..120: mol_type = other DNA

SEQ ID NO: 26376 - DNA, 120 bp, synthetic construct
  source 1..120: mol_type = other DNA
taaaagaaagaaaatgttaatttctgctcctgtcagattagagggaaattcaatctcagtctttttgctgctctccaaagatcccagagttgtacataggattgaagcataaggaacatc

SEQ ID NO: 26377 - DNA, 120 bp, synthetic construct
  source 1..120: mol_type = other DNA
atcccagagttgtacataggattgaagcataaggaacatccttaaagtcagtagcaactggcctgtactaattattcccaggatacgcatatccctttgtggcagcagttctgccagagg

SEQ ID NO: 26378 - DNA, 120 bp, synthetic construct
  source 1..120: mol_type = other DNA
gagatatacatgaagatctggtctctggagagtattgaaggtagaaaagacaaggagaagatgctgcagaacacccataagggaagaaaaaaaaaatgaagcctcaatgaataagggaaa

SEQ ID NO: 26379 - DNA, 120 bp, synthetic construct
  source 1..120: mol_type = other DNA
ctttggtaaatgcatacagttaatcatacagctaatcctccttttctctttatgaagtccagtgtttaaaggacctcttcaggtgtcatcaaggagtcataccaggtccagctgaaccca

SEQ ID NO: 26380 - DNA, 120 bp, synthetic construct; identical to SEQ ID NO: 7620
  source 1..120: mol_type = other DNA

SEQ ID NO: 26381 - DNA, 120 bp, synthetic construct
  source 1..120: mol_type = other DNA
tatggagctgacgacaatctgaacttatgcttatttacgtgttaacttatttgttttatgtctgtctccttccactagaatgtcagttccttgagaataggggttttgaggacaatatat

SEQ ID NO: 26382 - DNA, 120 bp, synthetic construct
  source 1..120: mol_type = other DNA
ccagcactttgggaggctgaggcaggtggatcacttgacgtcaggagttggagaccagcctggccaacatagtgaaaccccgtctctactaaaaatacaaaaattagctgggcgctggtg

SEQ ID NO: 26383 - DNA, 120 bp, synthetic construct
  source 1..120: mol_type = other DNA
gagatgctgtcttaaaaaaataataataaaaataaaatggagatgtccactggctgcagtggttcaggcctgtaatcccaggacttttggaggacaaggtgggaggattgcccagagcta

SEQ ID NO: 26384 - DNA, 120 bp, synthetic construct; identical to SEQ ID NO: 7621
  source 1..120: mol_type = other DNA

SEQ ID NO: 26385 - DNA, 120 bp, synthetic construct
  source 1..120: mol_type = other DNA
gcaacctccgcctcccaggctcaagcaattctcctgcctcagcctcctgagtagctgggactataggcgcgtgccaccacacccggctaatttttgtatttttagtagagacagggtttc

SEQ ID NO: 26386 - DNA, 120 bp, synthetic construct
  source 1..120: mol_type = other DNA
gtctagtatggtgctgggaattcttttgggaacagaggcagccaaccaacagaagtgaatgacatagttcttaccctcaaggacaagaaaaccagcaattacagtgcaacatgctaagtg

SEQ ID NO: 26387 - DNA, 120 bp, synthetic construct
  source 1..120: mol_type = other DNA
gggcactttgagctgctgtcacatatgtggattcttttgatcttcacatcacctctgtgaggtaggagaaccatcctgtcttagaaatgcaaagactgaagttcagagaagttaaataaa

SEQ ID NO: 26388 - DNA, 120 bp, synthetic construct; identical to SEQ ID NO: 7622
  source 1..120: mol_type = other DNA

SEQ ID NO: 26389 - DNA, 120 bp, synthetic construct
  source 1..120: mol_type = other DNA
tattcttgaggagcccccagtctgaaaacaagtcgtggatacacagaaaaaacattcttgtgtgtgtgatggatggtagggaacgtgtcatcaattgtgacatttatggcatttatttgc

SEQ ID NO: 26390 - DNA, 120 bp, synthetic construct
  source 1..120: mol_type = other DNA
gttttttaggcagcaaccctgaaccaagttggcctcgaggtattcgtgagtttccatacccagaagactttttcagcttctaccttctacccatgaaaggaggtggcatggatgtttcct

SEQ ID NO: 26391 - DNA, 120 bp, synthetic construct
  source 1..120: mol_type = other DNA
gaacaagggtctctggttttcctaggcagaggaccccgcggccttccgcagtgtttgtgtccctgggtacttgagattagggagtggtgatgactcttaacgagcatgctgccttcaagc

SEQ ID NO: 26392 - DNA, 120 bp, synthetic construct
  source 1..120: mol_type = other DNA
cagaagaatttttcttagtacagaacaaaatggagtctcccctgtctacttccctctacacagacacagcaacaatctgatttctctatcttttccccacatttccccctttctattcga

SEQ ID NO: 26393 - DNA, 120 bp, synthetic construct; identical to SEQ ID NO: 7623
  source 1..120: mol_type = other DNA

SEQ ID NO: 26394 - DNA, 120 bp, synthetic construct
  source 1..120: mol_type = other DNA
gctccccacatctcagacgatgggcggcccggcagagatgctcctcacttcctagatgggatggcggccgggaagaggcgctcctcacttcccagactgggcggccaggcagaggggctc

SEQ ID NO: 26395 - DNA, 120 bp, synthetic construct
  source 1..120: mol_type = other DNA
ggaggttgtagccagccgagatcacgccactgcactccagcctgggcaacattgagcactgagtgattgagactccgtctgcaatcccagcacctcgggaggccgaggctggcagatcac

SEQ ID NO: 26396 - DNA, 120 bp, synthetic construct
  source 1..120: mol_type = other DNA
tgagacaggagaatcaggcagggaggttgcagtgagctgagatggtggcagtacagtccagcttcggctcggcatcagagggagaccgtggagagagagggagagggagagggagaggga

SEQ ID NO: 26397 - DNA, 120 bp, synthetic construct; identical to SEQ ID NO: 7624
  source 1..120: mol_type = other DNA

SEQ ID NO: 26398 - DNA, 120 bp, synthetic construct
  source 1..120: mol_type = other DNA
acacagtggagagccatgtaaatagcttttgccttcaaggtgcctggcagaagcgaatgaatattgctgtcatgtacatgcaaacgttgtgaaatgcttcaatgttccacatcttctttg

SEQ ID NO: 26399 - DNA, 120 bp, synthetic construct
  source 1..120: mol_type = other DNA
cttgcgctaacaccacaacagacccattctttcatttggattagtattcactacttgtgcttagttgcttgcagtggatacccaatttgtgaagtgagctgaggtataatgcagtattgt

SEQ ID NO: 26400 - DNA, 120 bp, synthetic construct
  source 1..120: mol_type = other DNA
tgaggatgaagattggattatagtatatattcagcatgcaaaaacagataatcaggggaaatgcagtgacagtcaaagcaactatggaaacaatatccatggcaacaaatggcctggtcg

SEQ ID NO: 26401 - DNA, 120 bp, synthetic construct; identical to SEQ ID NO: 7625
  source 1..120: mol_type = other DNA

SEQ ID NO: 26402 - DNA, 120 bp, synthetic construct
  source 1..120: mol_type = other DNA
tcatgcagcactaagaggaaaacacagcgggttaaactatgacacgccattgattgtaagacgcatccctattcaagagatgataaatgggaaaataaatatatgtcttacaacctataa

SEQ ID NO: 26403 - DNA, 120 bp, synthetic construct
  source 1..120: mol_type = other DNA
ctcggataacatagcaagactctgtatttaaaaaatatatatatatatatgtatatatatacacacacacatatatataaatgactttcagtgattcatttaacattttcagatacttgt

SEQ ID NO: 26404 - DNA, 120 bp, synthetic construct
  source 1..120: mol_type = other DNA
ctggtgtcctgtctttagggggcttttgttacagtgacttggtttctgattatctttgtcacactgaatctgtgagtcagtgagtccgtgaccctaagtgagtttcagagtgaaaacaga

SEQ ID NO: 26405 - DNA, 120 bp, synthetic construct; identical to SEQ ID NO: 7626
  source 1..120: mol_type = other DNA

SEQ ID NO: 26406 - DNA, 120 bp, synthetic construct
  source 1..120: mol_type = other DNA
tcatggctcatagaagccttaatctcactggctcaagtaatcttctcacctcagcttcccaaatagctgggatcataggcatgcaccaccatgccctgctacgttttatttttatttttt

SEQ ID NO: 26407 - DNA, 120 bp, synthetic construct
  source 1..120: mol_type = other DNA
cctcatctttctttcatgtcactagatcaagaaagctccagagtttttcttgttcccttcaggtgtcaagcaatatcattttatgtatataaacatctaattcagaatagtttcactctt

SEQ ID NO: 26408 - DNA, 120 bp, synthetic construct
  source 1..120: mol_type = other DNA
acctcatggtaggagacaggctggttttctgccctgggagtgggagtgtaggaaaggaggaggcactggggacctgtatcccaggttttcagggcaaggctgtgtaagtatttccagcag

SEQ ID NO: 26409 - DNA, 120 bp, synthetic construct; identical to SEQ ID NO: 7627
  source 1..120: mol_type = other DNA

SEQ ID NO: 26410 - DNA, 120 bp, synthetic construct
  source 1..120: mol_type = other DNA
attctactcaaccttggagggttagaaaccaccattagcaagacaggagaagaaggatagatgcataatgttgaggacctgtttccccatttctcatcttcccatccttgcaaagccctt

SEQ ID NO: 26411 - DNA, 120 bp, synthetic construct
  source 1..120: mol_type = other DNA
acaggacctaagagagatcagaacagtcttagtactgtccatattttcatcttggaatggggaaaactggctccactgagcaagttaaggacgtcatagactgatctgtagatgttcaat

SEQ ID NO: 26412 - DNA, 120 bp, synthetic construct
  source 1..120: mol_type = other DNA
agtttgagatcagcctggccaaagtggtgaaaccccatctctattaaaaatacaaaaattagccaggcgtggtggtgtgcacctgtaatctcagccactcgggaggctgaggcaggagaa

SEQ ID NO: 26413 - DNA, 120 bp, synthetic construct
  source 1..120: mol_type = other DNA
tccatctcaaggaaaaaaaactaattaataataataacttattcttgagacacatgcgatgcaagacaagtatttattgctaggatctcctcaggtaagctgtgcagtaagtctgtgctg

SEQ ID NO: 26414 - DNA, 120 bp, synthetic construct; identical to SEQ ID NO: 7628
  source 1..120: mol_type = other DNA

SEQ ID NO: 26415 - DNA, 120 bp, synthetic construct
  source 1..120: mol_type = other DNA
tcgctttctgtggacatgtagtctctctcacagagaaatacatgtatatttctgctggacatgtagtctctctcacaggtcataaggcactgaggtcacaggccataggttgggatgttt

SEQ ID NO: 26416 - DNA, 120 bp, synthetic construct
  source 1..120: mol_type = other DNA
gattgagtggggaaacttcctgctgtctttgaaccagaacaagaacagagttgggagcctgtattttgcatagtgaaggcacactcaagggagccacctatcttggggagttatgctggc

SEQ ID NO: 26417 - DNA, 120 bp, synthetic construct
  source 1..120: mol_type = other DNA
gaaatctgaaagcaccatgtctcatttccagttttaagtgtacctggaattctcttctgttatccctaggtctttagtggagcctgattaaacatgaggctgagggcagctgtgggagct

SEQ ID NO: 26418 - DNA, 120 bp, synthetic construct
  source 1..120: mol_type = other DNA
agcctctggcccagcttgctgcgggtcgctgctgttctctttgtgtctcttagcctgtgacttcaatgcagtcatctcatttctgggaatctatccaattctcaattgtgtaaaaagctt

SEQ ID NO: 26419 - DNA, 120 bp, synthetic construct; identical to SEQ ID NO: 7629
  source 1..120: mol_type = other DNA

SEQ ID NO: 26420 - DNA, 120 bp, synthetic construct
  source 1..120: mol_type = other DNA
acgagaatctcttgaacccggcaggcagaggttgcagtgaacagagatcacgccactttactccatcctgggtgacagaactagactgtctcaaaaataaataaataaataaatataagg

SEQ ID NO: 26421 - DNA, 120 bp, synthetic construct
  source 1..120: mol_type = other DNA
aaatgttttaaaatgaaaccataactgtattagggttctccagagaaacagaactaaaacctctctctctctgtctctctctctctctcatatagatgagaagacacactcaaaggagct

SEQ ID NO: 26422 - DNA, 120 bp, synthetic construct
  source 1..120: mol_type = other DNA
ctaagggcaacctggaggcagaattccctcttccttgggggatgtcagacccactcacatacgggagggtaatttgctttattcaaagtccatccatttaaatgttgatttcatctacaa

SEQ ID NO: 26423 - DNA, 120 bp, synthetic construct; identical to SEQ ID NO: 7630
  source 1..120: mol_type = other DNA

SEQ ID NO: 26424 - DNA, 120 bp, synthetic construct
  source 1..120: mol_type = other DNA
gtaagaccatgcctcaaaaaattaattaattcattaaatttaataaatatttttaaaaattaactttcacaatgatctaaggcttactactttaggatttgcttttgaaatacttttctg

SEQ ID NO: 26425 - DNA, 120 bp, synthetic construct
  source 1..120: mol_type = other DNA
cttggacacctttcacagcattcctcacctctgtcttctaccattattatgcatgtctgaatatgtcttcctttgctaaacatcaaacagagttttaggactgggattctagaaagtgag

SEQ ID NO: 26426 - DNA, 120 bp, synthetic construct
  source 1..120: mol_type = other DNA
gctcatgttccagtttctttgcaaaaatcaacttgataaagtttttcctgttttgttaaaattgcctaaaattttttagcaatacttcatttgattttctctaatggtttctgtcatttc

SEQ ID NO: 26427 - DNA, 120 bp, synthetic construct; identical to SEQ ID NO: 7631
  source 1..120: mol_type = other DNA

SEQ ID NO: 26428 - DNA, 120 bp, synthetic construct
  source 1..120: mol_type = other DNA
gtctcactctgttgtccaggctggagtgcagtggcgccatctcggctcactgcaacctccggctcccgggttcaagtgattctcctgcctcagactctcaagcatctgggactccagtca

SEQ ID NO: 26429 - DNA, 120 bp, synthetic construct
  source 1..120: mol_type = other DNA
gggattacagtcgtgagccacggtggccagtctcattaccatttgttaagaactcatttgggcgggcaacaggtatacatcgcctcatgaaaactgagtcactcagcctgtgctcccacc

SEQ ID NO: 26430 - DNA, 120 bp, synthetic construct
  source 1..120: mol_type = other DNA
ttaactgagtcaccagccatatcataaagcatgactacaactacgcaggcctggtccctaaccccatgttgttacagcaaaatataacccattcttatttcagaaaaagaaaaaaagcta

SEQ ID NO: 26431 - DNA, 120 bp, synthetic construct; identical to SEQ ID NO: 7632
  source 1..120: mol_type = other DNA

SEQ ID NO: 26432 - DNA, 120 bp, synthetic construct
  source 1..120: mol_type = other DNA
gttgcccagggtggagggcagtggtgcgatctcggctcattgcagcctcagcctcccaggctcaggcaatcctcccacctcagctccctgagtagctggggctacaagaacacgccacca

SEQ ID NO: 26433 - DNA, 120 bp, synthetic construct
  source 1..120: mol_type = other DNA
ggcgtgagccaccatgtccagccaatgttatttaatttatttatttttatttatttatttttttgagacagggtctcattctgttgtccagactagagtgcagtggtgcaatcatggctt

SEQ ID NO: 26434 - DNA, 120 bp, synthetic construct
  source 1..120: mol_type = other DNA
gtcttactatgttgctcaggctggtcttgaactcctggactcaagttatcctcccacctcggtgtcccaaagtgctggtattacagatgtgagccaccatgtccagccttatttttaaaa

SEQ ID NO: 26435 - DNA, 120 bp, synthetic construct; identical to SEQ ID NO: 7633
  source 1..120: mol_type = other DNA

SEQ ID NO: 26436 - DNA, 120 bp, synthetic construct
  source 1..120: mol_type = other DNA
tacattgaggcatacactgaagcagaggccccagtgccacctgggcagaggcaagccagagaaaacagagggaaatgaaaagaaagacttcctggtattcacttctacatactgccagct

SEQ ID NO: 26437 - DNA, 120 bp, synthetic construct
  source 1..120: mol_type = other DNA
acagtggcaggatcttggctcaccacaacctccgcctcctgggttcaagtgattctcctgcctcagccttcctgagtagctgggattacaggcatgcaccactacggctggctaagtttt

SEQ ID NO: 26438 - DNA, 120 bp, synthetic construct
  source 1..120: mol_type = other DNA
gccactgtgcctggccgggccttcaggctttatgtagctgattgaacacaaccatctctgctcccagcagaaatcccaccaaaatgtgataaaggggttttaaaaggcaaggactgacaa

SEQ ID NO: 26439 - DNA, 120 bp, synthetic construct
  source 1..120: mol_type = other DNA
gatctggataacaaatagacaaaggtcttagcagataagagaaatttaaaggtaaaatgtcagtgggagaatcccagaagcaggctgatttcacatagcagaaccccagtaaggaatgga

SEQ ID NO: 26440 - DNA, 120 bp, synthetic construct; identical to SEQ ID NO: 7634
  source 1..120: mol_type = other DNA

SEQ ID NO: 26441 - DNA, 120 bp, synthetic construct
  source 1..120: mol_type = other DNA
taccaaaaaaaaaaaaattacatatatatatatatagcctatggccttctggctttatgtggccagaagaaaacaaaataaaataatttaaaaaatagaaaataagtaataataaaagaa

SEQ ID NO: 26442 - DNA, 120 bp, synthetic construct
  source 1..120: mol_type = other DNA
gccagacttgccccaggccgattaatagagaaaccttctctggagaaactgaccagacaaggaaaaacacctaggaacacaggagtaagggggttctgacggatattaagctactgtcac

SEQ ID NO: 26443 - DNA, 120 bp, synthetic construct
  source 1..120: mol_type = other DNA
ggcatcaccacagccgaggatcttcagccctgtagcaacagctggtccagcagcagtagcaagtcccaaactgtggttcttcctcactcccggcaaaggcctcttcccgtggcctcagtg

SEQ ID NO: 26444 - DNA, 120 bp, synthetic construct; identical to SEQ ID NO: 7635
  source 1..120: mol_type = other DNA

SEQ ID NO: 26445 - DNA, 120 bp, synthetic construct
  source 1..120: mol_type = other DNA
agaccagcctggccaatatggtgaaaccctgtctctactaaaaatacaaaacttagctgggtgtggtggcaggtgcctgtaatcccactacttgggaggctgaggcaggagaatcatttg

SEQ ID NO: 26446 - DNA, 120 bp, synthetic construct
  source 1..120: mol_type = other DNA
tttggatttttttctttcacctgactagaccctaatacaagggtcttctggagaaacagttcagcccatttgcactatggtgaagcccactgaaacctccccccatccccaacacacaca

SEQ ID NO: 26447 - DNA, 120 bp, synthetic construct
  source 1..120: mol_type = other DNA
cagagaaagtttattattagaaagaattattggctgtaacaggctaaaaagacgtgcagagaactccaaagaatgctgtagggccgcgggagagtacccaaagaaggacacacgtggaag

SEQ ID NO: 26448 - DNA, 120 bp, synthetic construct; identical to SEQ ID NO: 7636
  source 1..120: mol_type = other DNA

SEQ ID NO: 26449 - DNA, 120 bp, synthetic construct
  source 1..120: mol_type = other DNA
ctccggcgccctctactgagaaagcttaatattgtgctggctgcgaaggagaaccgcttaattcaatacagatcagttaagaggatggatttacggttgagaggcaatacattgataaga

SEQ ID NO: 26450 - DNA, 120 bp, synthetic construct
  source 1..120: mol_type = other DNA
caagctgggcggatcgcttgagcccaagagttcaagaacagcctgagcaaaatggcgagattctgtgtctacaaaaagtacaaaaattagccgggcgcggtggcgtgcacctgtagtctc

SEQ ID NO: 26451 - DNA, 120 bp, synthetic construct
  source 1..120: mol_type = other DNA
aaaaaaaaagaagaagaagaagaagaggaaatttagagaatgcaaagagccaaataataaaatccactgcaattaatattttcataaacataagagacgatattttctccatggtaaaag

SEQ ID NO: 26452 - DNA, 120 bp, synthetic construct; identical to SEQ ID NO: 7637
  source 1..120: mol_type = other DNA

SEQ ID NO: 26453 - DNA, 120 bp, synthetic construct
  source 1..120: mol_type = other DNA
aaaaaaggaaaagaaatgtagatggtatagaaaatatatgaaaattagatcatctggatgaataggaggatttctagaaagaatagacagagggaacagaagggatgaaattatcaaaga

SEQ ID NO: 26454 - DNA, 120 bp, synthetic construct
  source 1..120: mol_type = other DNA
ccaaagtgagatagacctcaagtgtctaacagaagtgtctaacaaaaggaatgaaatccaaggcatactaccataattttaaaaatactgaggacaaaaagaaaaatcccaaaattggac

SEQ ID NO: 26455 - DNA, 120 bp, synthetic construct
  source 1..120: mol_type = other DNA
tcacccaggctggagcgtagtgatacaatcatggatcactgcagccttgaactcctgggctcaagggatcgtcccctctcagccttctgaaaactacagacacgtaccaccatgcccagc

SEQ ID NO: 26456 - DNA, 120 bp, synthetic construct
  source 1..120: mol_type = other DNA
acaggtgcgcaccataacacctagctgaggacttttcaacagtagcactggaagctggaagatagtggagcagtgctttcctaatttaggtgtaaattttacaacttggaattttatttt

SEQ ID NO: 26457 - DNA, 120 bp, synthetic construct; identical to SEQ ID NO: 7638
  source 1..120: mol_type = other DNA

SEQ ID NO: 26458 - DNA, 120 bp, synthetic construct
  source 1..120: mol_type = other DNA
ggccaacatagtgaaaccccgtctctaccaaaaacacacaaaagaattagctgggcatggtggcacatgcctgtaattccaactactcaagaggcggaggcagagaatttcttgaaccca

SEQ ID NO: 26459 - DNA, 120 bp, synthetic construct
  source 1..120: mol_type = other DNA
gaaaaaaaaaaaaggcttggggccaaaacctcagggattaagaaaattcctttacctggttacagaaagatattaccaagaaaaagagggaattgattaattgtaatacattagactgca

SEQ ID NO: 26460 - DNA, 120 bp, synthetic construct
  source 1..120: mol_type = other DNA
gatctgtataattctggatatcattccataaagcccagcttagaacctgtgccctcagcccttataaagatttcaaaagctcttaataccctttgtaaaatgtcttcctgttaatttacc

SEQ ID NO: 26461 - DNA, 120 bp, synthetic construct; identical to SEQ ID NO: 7639
  source 1..120: mol_type = other DNA

SEQ ID NO: 26462 - DNA, 120 bp, synthetic construct
  source 1..120: mol_type = other DNA
aaaaggccaggagcggtggctcacacctgtaatcccagcattttgggaggccaaggtgggtggatcacctgaggtcaggagtttgagaccagcctgaccaacatggtgaaaccctgtctc

SEQ ID NO: 26463 - DNA, 120 bp, synthetic construct
  source 1..120: mol_type = other DNA
aggatgacacacaaatttgtgaagggttccatttaaaaaaaaaaaaaagtctgagcgaggtggctcagtcctgtaatcccagcacttcgggaggccaaggcgggaggatcacttgaggtc

SEQ ID NO: 26464 - DNA, 120 bp, synthetic construct
  source 1..120: mol_type = other DNA
ggcagcagaattgcttgaactcaggaggcggaggttgcagtgagctgagatcatgccattgcactccagcctgggcaagaagagcaaaattccatctcaaaaaaaaaaaaagggcatctg

SEQ ID NO: 26465 - DNA, 120 bp, synthetic construct; identical to SEQ ID NO: 7640
  source 1..120: mol_type = other DNA

SEQ ID NO: 26466 - DNA, 120 bp, synthetic construct
  source 1..120: mol_type = other DNA
gcctccttagccaaacggagctgctgtggtcgcaaatagccttgtgcccctgggaacctgtgagatgcaatatgtcgtcagtctccctcaatcttggcctgagtccaagagaaaggcagc

SEQ ID NO: 26467 - DNA, 120 bp, synthetic construct
  source 1..120: mol_type = other DNA
gataaccaagatgcaaaatcctaaaatcctccattaagcacctaccagctgcagaggccctgctggggccctgagggagatgtgtgtggcagactgcaggccaagtaagtccttctttaa

SEQ ID NO: 26468 - DNA, 120 bp, synthetic construct
  source 1..120: mol_type = other DNA
aggcagtcactgcaatcacacatgctcactaatccagttcactaaggtacgaagccacaataaagtttggagccaaaactgtagatataaagagagttcctttatctggaatggcctcga

SEQ ID NO: 26469 - DNA, 120 bp, synthetic construct
  source 1..120: mol_type = other DNA
cgcctcccgggttcaagcaattctcctgcctcagcctcctgagtagctgggattacaggcgcctgccaccacgcctggctaatttttgtacttttagtagagatggggtttcgccatgat

SEQ ID NO: 26470 - DNA, 120 bp, synthetic construct; identical to SEQ ID NO: 7641
  source 1..120: mol_type = other DNA

SEQ ID NO: 26471 - DNA, 120 bp, synthetic construct
  source 1..120: mol_type = other DNA
tgcatattttctcaatgcattgcagtaggtggatttggtacttgagaccctcaacaatctctttccgcatatcatgactaacagtataggctcatggtttttaaaggactgccctttgaa

SEQ ID NO: 26472 - DNA, 120 bp, synthetic construct; identical to SEQ ID NO: 1751
  source 1..120: mol_type = other DNA

SEQ ID NO: 26473 - DNA, 120 bp, synthetic construct
  source 1..120: mol_type = other DNA
ccttttagagagatacactgttctcttttaggaagatgggcatagaagtgcaggaagtcaactagacgtgttaaaatataaatttttggctgcttgtaacagagacacaaatgccactgg

SEQ ID NO: 26474 - DNA, 120 bp, synthetic construct
  source 1..120: mol_type = other DNA
acctgctctatcattcccccaacttataggacaaaaagtccgagaagccaaagggatagacctacccatggaggttgcatctcttctacaagtactacagtctaggtacttggaacccct

SEQ ID NO: 26475 - DNA, 120 bp, synthetic construct; identical to SEQ ID NO: 7642
  source 1..120: mol_type = other DNA

SEQ ID NO: 26476 - DNA, 120 bp, synthetic construct
  source 1..120: mol_type = other DNA
ctcagatagatttatctgcagaagttttattggggaacaatcttgggacaaacacctttaaaagctgagagaaacgggacagggaaagggagcagttgaactgtaatgaagccgtaaaga

SEQ ID NO: 26477 - DNA, 120 bp, synthetic construct
  source 1..120: mol_type = other DNA
gtgggggaggattatctgaggtcagcagttcaagaccagcctagttaacatggtgaaaccccgtttctactaaaaatacaaaaaattagccgggcatggtggcatgcgcctgtaatccca

SEQ ID NO: 26478 - DNA, 120 bp, synthetic construct
  source 1..120: mol_type = other DNA
ctccagctcgggcaacaagagcgaaagtccatctcaaacaaacaaacaaacaaacaaacaaaaaggtggccaaacttgaagcaaggtaaccaggactttgtatgttcttatcttatctat

SEQ ID NO: 26479 - DNA, 120 bp, synthetic construct; identical to SEQ ID NO: 7643
  source 1..120: mol_type = other DNA

SEQ ID NO: 26480 - DNA, 120 bp, synthetic construct
  source 1..120: mol_type = other DNA
tcagcctggactgctgaatagatgccctgtgatttatcttcagacatgactcagtggaaatgcagttgactccattctaaaacctctcttgagaatatttccaggcccagtcaacttatc

SEQ ID NO: 26481 - DNA, 120 bp, synthetic construct
  source 1..120: mol_type = other DNA
ggttggaaaatagacaagacaaaggcaggcagatgtaagaggtattcaaaagcccagttgtgctctatttttgccttccacgaggaatcttacggggagcttccacattacccggttatt

SEQ ID NO: 26482 - DNA, 120 bp, synthetic construct
  source 1..120: mol_type = other DNA
tccaagactttcctaatgtagagtgattttattgagcctagaccatggatttcccatctgataactctttaagagggatgagatagaacataatgtgagaaaataacattgttccaagat

SEQ ID NO: 26483 - DNA, 120 bp, synthetic construct
  source 1..120: mol_type = other DNA
ataactaataataaaggtaaaatttttgttggtcttaatgagagagaatttggaaagtggagataagcggggctttggagctcctaaactattcgggctgtgttttgactcagcgagctc

SEQ ID NO: 26484 - DNA, 120 bp, synthetic construct; identical to SEQ ID NO: 7644
  source 1..120: mol_type = other DNA

SEQ ID NO: 26485 - DNA, 120 bp, synthetic construct
  source 1..120: mol_type = other DNA
aaaaaaaaaagaaaggcgttaaaattaatttaaagatacacaataatgaaaatattacaaagtactattattcagccataaaaaagaaattacattctatttatttattttattttattt

SEQ ID NO: 26486 - DNA, 120 bp, synthetic construct
  source 1..120: mol_type = other DNA
ctgggattacaggcacgcgccatcacgcccagctaatttttgtattttttttagtagagacggggtttcaccatgctggccaggcgggtctccaactcctgacctcaggtgatctgccag

SEQ ID NO: 26487 - DNA, 120 bp, synthetic construct
  source 1..120: mol_type = other DNA
cagacacaaaaggacaaatattgtatgatttcacttacgttagatatttaaaatggggaaatctggtttgccagcacagcaggaaaaaaaataaataaaagtaaaatacaaaaatcatag

SEQ ID NO: 26488 - DNA, 120 bp, synthetic construct; identical to SEQ ID NO: 7645
  source 1..120: mol_type = other DNA

SEQ ID NO: 26489 - DNA, 120 bp, synthetic construct
  source 1..120: mol_type = other DNA
ctcaggcctgtaatcccagcactttgggaggccgaggtgggaggatcacctgaggtcaggagttcaagaccagcctggccaacatggtgaaaccccatctgtactaaaaatacaaaaatt

SEQ ID NO: 26490 - DNA, 120 bp, synthetic construct
  source 1..120: mol_type = other DNA
gtgggcaacagaacgagactccgtcttgagaaaataaaataaaataaaataaaataaaatggttaaatgggaaatcttaccttatatacattttcatatatataacatacacacacacac

SEQ ID NO: 26491 - DNA, 120 bp, synthetic construct
  source 1..120: mol_type = other DNA
ccctgctgtgctgacaaaccagatttccccattttaaatatctgatgtaagtgaaatcatgcaatatttgtccttttgtttctggctcatttcattttgcataattttttttcaatattc

SEQ ID NO: 26492 - DNA, 120 bp, synthetic construct
  source 1..120: mol_type = other DNA
ccagcactttgggaggccaaggcaggtggatcacttgagctcaggagtttgagaccaacctgggcaacatggcgaaaccctgtctgtactaaaaatacaaaaattagccgggcgtgttgg

SEQ ID NO: 26493 - DNA, 120 bp, synthetic construct; identical to SEQ ID NO: 7646
  source 1..120: mol_type = other DNA

SEQ ID NO: 26494 - DNA, 120 bp, synthetic construct
  source 1..120: mol_type = other DNA
gagacagggtttctccaggttggtcaggctggtctcgaactcctgacctctggtgatctgcccacctcggcctcccaaagtgctgggattacaggtgtgagccactgcacctggctaaaa

SEQ ID NO: 26495 - DNA, 120 bp, synthetic construct
  source 1..120: mol_type = other DNA
aggacgcaatgaaatatggaaactagtgaatggaaacagtgaaatgacaaaataactaaataaactagtagcaagatacctgaaaggaaaagttgactgccaatcaaaatacgttgctgg

SEQ ID NO: 26496 - DNA, 120 bp, synthetic construct
  source 1..120: mol_type = other DNA
gtgaccaagaaatcaaagttaagagaggtagatattttaggagtatttcatccaggtcatagtaaaacccagtccaggaataaaacattgtatgtatctataccagccttgttttaaaca

SEQ ID NO: 26497 - DNA, 120 bp, synthetic construct
  source 1..120: mol_type = other DNA
gccaggagtttgagactgcccagcctggacaacatagccagatctcatctctaaaaaagcaataaaatgaattagccaggctgttggggcacatgcctatagtcctagctacttcctcag

SEQ ID NO: 26498 - DNA, 120 bp, synthetic construct; identical to SEQ ID NO: 7647
  source 1..120: mol_type = other DNA

SEQ ID NO: 26499 - DNA, 120 bp, synthetic construct
  source 1..120: mol_type = other DNA
ggggagcagcctggcccctcttcttagtgtgtggatcctgggatttgaatggcgggtgggaagcgctctagtagggactctggcctagcgacagtccctgtttctccgttttcttccttt

SEQ ID NO: 26500 - DNA, 120 bp, synthetic construct
  source 1..120: mol_type = other DNA
aactaatcctttccctgagaccaggaagcagttttcttctggtctcccttgaccagaaggggtgtgataaagtgaacaacgtctcaaccacaccactaccataaatacaagttttcatag

SEQ ID NO: 26501 - DNA, 120 bp, synthetic construct
  source 1..120: mol_type = other DNA
atgaattctagtgtacatgaaacagacggcacacatattcttccatcaaactgacagaagaagtctctctccacccatcttttgatatgtagagcatgactgtgagttcagtgttattat

SEQ ID NO: 26502 - DNA, 120 bp, synthetic construct
  source 1..120: mol_type = other DNA
ttccatcaaactgacagaagaagtctctctccacccatcttttgatatgtagagcatgactgtgagttcagtgttattatacacttgatgtcacagccattttgaagctgctgattaaaa

SEQ ID NO: 26503 - DNA, 120 bp, synthetic construct; identical to SEQ ID NO: 7648
  source 1..120: mol_type = other DNA

SEQ ID NO: 26504 - DNA, 120 bp, synthetic construct
  source 1..120: mol_type = other DNA
atttgatttttgcttccttaggtctagtctttatccatgcatacttccccttggctccctttgattggatttatttactccccaatttccttagcaccatctacagtgtcttttccagtt

SEQ ID NO: 26505 - DNA, 120 bp, synthetic construct
  source 1..120: mol_type = other DNA
tctctgagccatattttcatcatttataaagctcataatgcctaccttggaaggatgtttggaattaaagtaagttagaggctgggtgcagtggctcacacctgtaatcctagcactttt

SEQ ID NO: 26506 - DNA, 120 bp, synthetic construct
  source 1..120: mol_type = other DNA
gtaatcccaacattttgggaggctgaggtgggctgatcacctgaagtcaggagttcaagaccagcctggccagcatggtgaaaccccatctctaccaaaaatacaaaaattagttgggca

SEQ ID NO: 26507 - DNA, 120 bp, synthetic construct; identical to SEQ ID NO: 7649
  source 1..120: mol_type = other DNA

SEQ ID NO: 26508 - DNA, 120 bp, synthetic construct
  source 1..120: mol_type = other DNA
taatggtaacaacagcaaattgttattgagttcttatcgtgccagacacgatgctaagaatttcgtatacaaatatttggttgagtcatctcaacaagcctatcacatgggaactctgac

SEQ ID NO: 26509 - DNA, 120 bp, synthetic construct
  source 1..120: mol_type = other DNA
caatgtccttcaatgtcatgagaaagtcaccatcagcctgggagttcagtgggagggtcaggaaagacttgaacaatgagttgtttgcagatgaatgggcttttgtgtttgttttgtttt

SEQ ID NO: 26510 - DNA, 120 bp, synthetic construct
  source 1..120: mol_type = other DNA
aaagtacaaagttgaaaagtcctgaaaagcttctaccaccaaggaataaccgccgaaataatatctcatcagaactttctccatgaatacactttttaaaaattatcaccagcagtttca

SEQ ID NO: 26511 - DNA, 120 bp, synthetic construct
  source 1..120: mol_type = other DNA
ccctgattttcaccgaaagggttgctctctatgttgttgtttcagcccttccagtagtttaaaacatgcatctttagttctagtctaattcatgatttcccttacatctatttaaagtta

SEQ ID NO: 26512 - DNA, 120 bp, synthetic construct; identical to SEQ ID NO: 7650
  source 1..120: mol_type = other DNA

SEQ ID NO: 26513 - DNA, 120 bp, synthetic construct
  source 1..120: mol_type = other DNA
agccactgcgtctggccaccaaatacattttaacttctttcctctttccattcctcttactgtacccttctaggattccctgggttttgttaaaagcttctggaactggaatgtagcaaa

SEQ ID NO: 26514 - DNA, 120 bp, synthetic construct
  source 1..120: mol_type = other DNA
tcagtcattagttctgcaaatgttcatgagttccaccagtggtgtctgcccagcagagagcaggagcaggggtgagggtgaggacaagagacagacagagcctggaggggcagtcagctg

SEQ ID NO: 26515 - DNA, 120 bp, synthetic construct
  source 1..120: mol_type = other DNA
ggccagttaggagagtgctgtcaccacccaggcaggaggccatgaacatccccatatgagaaagaagggcataaacaggaaacaaatttaacaattaaataaaagcacctccctcatgca

SEQ ID NO: 26516 - DNA, 120 bp, synthetic construct; identical to SEQ ID NO: 7651
  source 1..120: mol_type = other DNA

SEQ ID NO: 26517 - DNA, 120 bp, synthetic construct
  source 1..120: mol_type = other DNA
agatttcagcgtatcttttgggggtgggggacacatggtcacatcctgaatgactatagctcaaacaggtctttgttaggtgaaaataacaggtggaaaaatcactgagcacttcacctt

SEQ ID NO: 26518 - DNA, 120 bp, synthetic construct
  source 1..120: mol_type = other DNA
catattccttcacttcattcctgcataaacctgggtatggtcccttcattgtctctcagtgatgtggaaagttttcatgatgagtctaccctgctctctctaatgcaagtaggatacaac

SEQ ID NO: 26519 - DNA, 120 bp, synthetic construct
  source 1..120: mol_type = other DNA
gatggcttcagcccaggagtttgagaccagcctgggcaacatggtgaaaccctgtctctatttaaaaaaaaaaaaaaaaaaattagccaggcatggtggtgcacttgtagtcctagctac

SEQ ID NO: 26520 - DNA, 120 bp, synthetic construct; identical to SEQ ID NO: 7652
  source 1..120: mol_type = other DNA

SEQ ID NO: 26521 - DNA, 120 bp, synthetic construct
  source 1..120: mol_type = other DNA
cttagaatgcaaggcttaggtgacaactgattccatgtctcagagaaggaaagaatcaggacaggacttgaatgttctgttgttgccatagagcaaggatgacttcaagaatgtgaagga

SEQ ID NO: 26522 - DNA, 120 bp, synthetic construct
  source 1..120: mol_type = other DNA
aaaaaatacaaaaagtagctgggcatggtgatgcatgcctgtagtcccagctatgtgggaggctgaaatgggaggatcatctgatgctgggaaggtcaagactgcagtgagctgtgactg

SEQ ID NO: 26523 - DNA, 120 bp, synthetic construct
  source 1..120: mol_type = other DNA
gtaagtcaaggacagtgcttaaaaagacaaaggagccaatttcaaagagctcccattgttcaagttgacagtcgggcatgaaagaaagaagatgggaggaggaatgataattatggttaa

SEQ ID NO: 26524 - DNA, 120 bp, synthetic construct
  source 1..120: mol_type = other DNA
ataaaaagggaactattcattttgtctcttctattaattatgtgtctgtttataaagcaaagataggtgcttgcttttgtctgtgtaagcagaaaacccacagagaatgctgagaaagcc

SEQ ID NO: 26525 - DNA, 120 bp, synthetic construct; identical to SEQ ID NO: 7653
  source 1..120: mol_type = other DNA

SEQ ID NO: 26526 - DNA, 120 bp, synthetic construct
  source 1..120: mol_type = other DNA
cagtaaacacactgtgcatgccgccctttccaagggctagcagaccactgcacatatggacagcccagcccaagggaagaatcaagggagaaggaacaccaagacccccgaagcatgcaa

SEQ ID NO: 26527 - DNA, 120 bp, synthetic construct
  source 1..120: mol_type = other DNA
gaaaccccgtctctactaaaaatacaaaaattagccaggcttggtggtgcacacctgtaatcccagctacttgggaggctgaggcaggagaatcgcttgaacccgggaggcggaggttgc

SEQ ID NO: 26528 - DNA, 120 bp, synthetic construct
  source 1..120: mol_type = other DNA
cttgatctctaaagtcgtccacttggccctcttccaaatgtactttccttcctgctctaaagccttttaataaactttcactcctgctctaaaacttgcctcgttgtctcctgccttatg

SEQ ID NO: 26529 - DNA, 120 bp, synthetic construct; identical to SEQ ID NO: 7654
  source 1..120: mol_type = other DNA

SEQ ID NO: 26530 - DNA, 120 bp, synthetic construct
  source 1..120: mol_type = other DNA
aaattcattatgtaataatggtcaagagattattgaagtgtgttatattagggggagaaaatatgttgtgagattcttgtttgtttttttgtttttgttttttgatacgaagtctcgctc

SEQ ID NO: 26531 - DNA, 120 bp, synthetic construct
  source 1..120: mol_type = other DNA
acgcccggctaatttttgttttttcagtagagacagggttttgccatgttggccggactggtcttgaactcctgacctcaggtgatccattctcctcagcctaccaaagtgctgggatta

SEQ ID NO: 26532 - DNA, 120 bp, synthetic construct
  source 1..120: mol_type = other DNA
tagtaaaaagagagataataagtgttggcaagggtgtggaaaaattggcactctcatgcacagctgttggacagtgaaatggtacagcactttggaaaatagtctgaccattcctccaaa

SEQ ID NO: 26533 - DNA, 120 bp, synthetic construct; identical to SEQ ID NO: 7655
  source 1..120: mol_type = other DNA

SEQ ID NO: 26534 - DNA, 120 bp, synthetic construct
  source 1..120: mol_type = other DNA
tatatgaaatgtacagaataggtaagtccttagagacaaaaagtagatgagtggctgcttagggctggggtggagtaggggagggttaggagattgggagtgactgctcatgggtttggg

SEQ ID NO: 26535 - DNA, 120 bp, synthetic construct
  source 1..120: mol_type = other DNA
attattatttatttatttatttatttatttattttgagacagagtttctctcttgtcgcccaggctggagtgcaatggcacaatcttggctcaccgcaaccttccgcctcctggcttcaa

SEQ ID NO: 26536 - DNA, 120 bp, synthetic construct
  source 1..120: mol_type = other DNA
actcccaacctcaggtgatccgcctgcctcagcctcccaaagtgctgggattacaggagtgagccaccacgcccggcctcattttattattttattaatgattttttaattttgtgtgta

SEQ ID NO: 26537 - DNA, 120 bp, synthetic construct; identical to SEQ ID NO: 7656
  source 1..120: mol_type = other DNA

SEQ ID NO: 26538 - DNA, 120 bp, synthetic construct
  source 1..120: mol_type = other DNA
gaggcaggagaatcactggagcccaggaggtggaggctgcagtaagctgagaaggtgccactatactccagcctgggcaacagagggagattccatccgaaaaaaaagaaaaaaaaagtt

SEQ ID NO: 26539 - DNA, 120 bp, synthetic construct
  source 1..120: mol_type = other DNA
cctttggtaaccatccttctactgtctctgtccatgagttcaattgttttgattttagatcccacaaataagtgagaacatgtgatgtttgtctttctatgcctggcttatttcatctaa

SEQ ID NO: 26540 - DNA, 120 bp, synthetic construct
  source 1..120: mol_type = other DNA
cactttagttgcttccaaatcttggctattatgaacagtgctgcagtaaactatagttattattttctattggttcatcatttagtctttctactttaagacaggagtagtttacctacc

SEQ ID NO: 26541 - DNA, 120 bp, synthetic construct; identical to SEQ ID NO: 7657
  source 1..120: mol_type = other DNA

SEQ ID NO: 26542 - DNA, 120 bp, synthetic construct
  source 1..120: mol_type = other DNA
tgccttgaggtagtctttgagtttaatctgcctggcattctataaccttcttttatttgaatgttgatatctttccataggtttgggaaattctgttatttctctgaataaactttctat

SEQ ID NO: 26543 - DNA, 120 bp, synthetic construct
  source 1..120: mol_type = other DNA
tctgactctgtattttcaaggagcctgtcttcaggctcactaattcttctgcttgattaattctacaattcagagattctgtcttttctgaaagattaaaataaataaaattttaaaaag

SEQ ID NO: 26544 - DNA, 120 bp, synthetic construct
  source 1..120: mol_type = other DNA
aaaatacaaaaattagccaggcgtggtggtgggcatctgtaatcccagctactcgggaggcggaggcaggagaacctctcgaacccaggagacggaggttgcagtgaactgaaattgtgc

SEQ ID NO: 26545 - DNA, 120 bp, synthetic construct; identical to SEQ ID NO: 7658
  source 1..120: mol_type = other DNA

SEQ ID NO: 26546 - DNA, 120 bp, synthetic construct
  source 1..120: mol_type = other DNA
agcctcctgagtagctgggactgcaggcacgtgccaccacgcccagctaattttttgtatttttagtagaaatggggtttcaccatgttagccaggatggtctcgatcccgatctcgcga

SEQ ID NO: 26547 - DNA, 120 bp, synthetic construct
  source 1..120: mol_type = other DNA
atatctctttttctccaggattggtccctgatagcctatctagttcatttgatgaggtcatgatggtattgatgcttataggcgtttgtcggtatctgggcattgaagagttaggtattt

SEQ ID NO: 26548 - DNA, 120 bp, synthetic construct
  source 1..120: mol_type = other DNA
aattttctggattatcaggcatagactcttgttctttttgcttactttctcccaaacatacagtctctctctctcttgctgagccacctggagctgggggtgtggtgacacaagcacccc

SEQ ID NO: 26549 - DNA, 120 bp, synthetic construct; identical to SEQ ID NO: 7659
  source 1..120: mol_type = other DNA

SEQ ID NO: 26550 - DNA, 120 bp, synthetic construct
  source 1..120: mol_type = other DNA
tgtaatcccagcactttgggaggccgaggcaggtggatcacttgaggtcaggaggtcaagaccagcctgaccaacatggtgaaacactgtctctactaaaaatacaaaaattagccaggt

SEQ ID NO: 26551 - DNA, 120 bp, synthetic construct
  source 1..120: mol_type = other DNA
cagcaagactccgtctcgaaaaaataaaaataaaaattaaagcccaagaactcttccatcagcttgtggtgaatgttgccaagcctgggacttacctttcagggcagcaggctcccctct

SEQ ID NO: 26552 - DNA, 120 bp, synthetic construct
  source 1..120: mol_type = other DNA
caaagtcccctttacttttccctctgcttttctcaaactgcaggagtctttcaccatagccaccatagctgggaatgtgctgggttactgctgaagacagcatgtctcagagtctcaccc

SEQ ID NO: 26553 - DNA, 120 bp, synthetic construct; identical to SEQ ID NO: 7660
  source 1..120: mol_type = other DNA

SEQ ID NO: 26554 - DNA, 120 bp, synthetic construct
  source 1..120: mol_type = other DNA
tggtgtctacctaggtcaagtgcaaccctagtccattggctgtaagtccagccgagcactaggagttgtctaggaattgcagtccttgggtcctagactgccttttcttttttttctttt

SEQ ID NO: 26555 - DNA, 120 bp, synthetic construct
  source 1..120: mol_type = other DNA
agactgcctttcaagtttacctaggacaccagagcactttggcccatggtggtgaggcttgcagagaaactcaagttccaaccactgggacaggtgatttccctctggctagggctggcc

SEQ ID NO: 26556 - DNA, 120 bp, synthetic construct
  source 1..120: mol_type = other DNA
tgcaaagactctctttccacgctgcagggacactgccagggaggacggaaggggcgtcacaattcaagactgtctctcctgccctcctcaatgtttcctttagtgatatgaagttaaatc

SEQ ID NO: 26557 - DNA, 120 bp, synthetic construct; identical to SEQ ID NO: 7661
  source 1..120: mol_type = other DNA

SEQ ID NO: 26558 - DNA, 120 bp, synthetic construct
  source 1..120: mol_type = other DNA
tgtctccaaaaaataaaaataaaataataataataattgcattcgtaggccgggtgcagtggctcacacctgtaatctcagcagtttgggaggccaaggtgggtggatgacctgtggtca

SEQ ID NO: 26559 - DNA, 120 bp, synthetic construct
  source 1..120: mol_type = other DNA
attgcttgaacccggaaggcagaggttgcagtgagcagacatcgcgccattgcactacagcctgggcaacaagagcgaaaatccatctcaaaaaaaaaaacgcatttgcttcttaggggg

SEQ ID NO: 26560 - DNA, 120 bp, synthetic construct
  source 1..120: mol_type = other DNA
cctctgcctcctgggttcaagcgattctgctgcctcagtctcctgagtagctgggattataggcgcttgccaccatgcccagctaatttgtatatttttagtagagacagggtttcacca

SEQ ID NO: 26561 - DNA, 120 bp, synthetic construct; identical to SEQ ID NO: 7662
  source 1..120: mol_type = other DNA

SEQ ID NO: 26562 - DNA, 120 bp, synthetic construct
  source 1..120: mol_type = other DNA
ctgggaggcagaggttgcagtgagccgacatcacgccactgcactccagcctgggtgacagagaagactccgtctcaaaaaaataaataaataaataaataaataaataaataaataaat

SEQ ID NO: 26563 - DNA, 120 bp, synthetic construct
  source 1..120: mol_type = other DNA
aattcataagagaaacaaaattacattaagtagaaataccttaatgacatttagacactgagagggtgtcccaggaaaagagaggggcacctgaacttgaaggctggtgacagatgttta

SEQ ID NO: 26564 - DNA, 120 bp, synthetic construct
  source 1..120: mol_type = other DNA
tctcctgaattcatcatatgaaaatgtcacagtggacagagagactcaagagaagtgagttttgactgggtgagtcaagagggattatggtcctgagtagccagggagtgatttaagtac

SEQ ID NO: 26565 - DNA, 120 bp, synthetic construct
  source 1..120: mol_type = other DNA
gtcaggagatcagaccatcctggccaacatggggaaaccccgtctctactgaaaaatacaaaaattagctggggatggtggcacatgcctgtaatcccagctactcgggaggctgaggca

SEQ ID NO: 26566 - DNA, 120 bp, synthetic construct; identical to SEQ ID NO: 7663
  source 1..120: mol_type = other DNA

SEQ ID NO: 26567 - DNA, 120 bp, synthetic construct
  source 1..120: mol_type = other DNA
caacctgggcaacaagcgagacccccatctctacaaacaaacaaacaaacaaaagagtaagcacgtcatacacatcatagaattctaagaactgaagtaaccttgtaacatttagttcat

SEQ ID NO: 26568 - DNA, 120 bp, synthetic construct
  source 1..120: mol_type = other DNA
tggctaagtgaatgctgtttgtttgagggatgaaatatttaaatgagaagccaactcaactcttcctcttgatcttagagtcattctctcaagtgtaactcccagtgcaaagcatcacat

SEQ ID NO: 26569 - DNA, 120 bp, synthetic construct
  source 1..120: mol_type = other DNA
ttaggatctatcccttacgatggctcagggttttccagtctctaaggcaccttatcattatcttacctaaacttcctaataatcctgtgagggaggctggacatctgctttcatcccatg

SEQ ID NO: 26570 - DNA, 120 bp, synthetic construct; identical to SEQ ID NO: 7664
  source 1..120: mol_type = other DNA

SEQ ID NO: 26571 - DNA, 120 bp, synthetic construct
  source 1..120: mol_type = other DNA
tgttgttgttgtttttctgagatggagtttccctcttgtcacctaggctggagtgcaatggtgcaatctcagctcactgcaacctctacctcccaggttcaagcgattctcctacctcag

SEQ ID NO: 26572 - DNA, 120 bp, synthetic construct
  source 1..120: mol_type = other DNA
tccaccctccttagcctcccaaagtgctgggattacaggtgtaagccgcctttcttttcttttctttttttttcctttttagtcttgccctgtcacccaggctagagtgcagtggaatga

SEQ ID NO: 26573 - DNA, 120 bp, synthetic construct
  source 1..120: mol_type = other DNA
ttatttttgctcttatgatgatgattttttttttgagacagagtctcactctgttgcccaggctggagtgcagtggcacaatctcagctcactgcaacctccatctcccaagttcaagca

SEQ ID NO: 26574 - DNA, 120 bp, synthetic construct; identical to SEQ ID NO: 7665
  source 1..120: mol_type = other DNA

SEQ ID NO: 26575 - DNA, 120 bp, synthetic construct
  source 1..120: mol_type = other DNA
acaactaacgttaatccaaagaccaccctgaggggactggccacatccccctgggaccctccactgttaaagtccatcttccctgagccatcagcaccaagcatcagatgaacttcactg

SEQ ID NO: 26576 - DNA, 120 bp, synthetic construct
  source 1..120: mol_type = other DNA
ggaagggtgtgtgtgcaagccccttgtccaggacctggcctatatgtaaatataataaaagttcgttgttatttctgttaattgcatattgtacttgaatactccctggacagataatga

SEQ ID NO: 26577 - DNA, 120 bp, synthetic construct
  source 1..120: mol_type = other DNA
attgcatattgtacttgaatactccctggacagataatgagaaaaatgaggtttgagtcaccacccctgtcacttgtaaccctgtgtgacttgcttaatccctctaaatctcagttcctc

SEQ ID NO: 26578 - DNA, 120 bp, synthetic construct
  source 1..120: mol_type = other DNA
agcctcagcctcctaagtagctggcattacaggcaccatgcctggctaatttttgtgtttttagtagagatgaggtttcaccatgttccccatgttggactaggctgtctcgaactcctc

SEQ ID NO: 26579 - DNA, 120 bp, synthetic construct; identical to SEQ ID NO: 7666
  source 1..120: mol_type = other DNA

SEQ ID NO: 26580 - DNA, 120 bp, synthetic construct
  source 1..120: mol_type = other DNA
gtgcagcagtgaactaaagagacaaagcccctgtcctcgtggtgcttatgctctagtgagtctgtggaacagagcaggggactgttgacaccaaatttaaatgtgcgaataggaatgact

SEQ ID NO: 26581 - DNA, 120 bp, synthetic construct
  source 1..120: mol_type = other DNA
ggcagggagaaaccaagagagtccaagctgggaaaagaatcaggtgaggaggttgaggtgttgacgaagggagtgtgcttggtgatgggaaaggtgggctctgaggaaggtgttccagga

SEQ ID NO: 26582 - DNA, 120 bp, synthetic construct
  source 1..120: mol_type = other DNA
tgtttttcctactcctttctcccctcccacaagctgcccaactcccagggacctgactggatggagagtacatacacctggaccactgcaggcatggcacagggaagagagaatccagac

SEQ ID NO: 26583 - DNA, 120 bp, synthetic construct; identical to SEQ ID NO: 7667
  source 1..120: mol_type = other DNA

SEQ ID NO: 26584 - DNA, 120 bp, synthetic construct
  source 1..120: mol_type = other DNA
ctaaatgatgcctgtaagggaggaggtcgatgtacctccacttccaagaagcttgactttccggggaagaaaagacaagtgaagcgtagacattgcgacttttggcttcctgtttctgtg

SEQ ID NO: 26585 - DNA, 120 bp, synthetic construct
  source 1..120: mol_type = other DNA
caattagtcctgctgtccctcctccccctttcagattccagcacaattctggaacagctctcccacctggccggggtgagactgaggctccaccctcaagcacttgggcactgatccttt

SEQ ID NO: 26586 - DNA, 120 bp, synthetic construct
  source 1..120: mol_type = other DNA
cccagaaacaaagaaaccaaggagaagcaaattccataagtgcttttattttattggagatgagcaggggaggcactgaaaagtggggatagtgctggaaacatgctgacagggcctgga

SEQ ID NO: 26587 - DNA, 120 bp, synthetic construct; identical to SEQ ID NO: 7668
  source 1..120: mol_type = other DNA

SEQ ID NO: 26588 - DNA, 120 bp, synthetic construct
  source 1..120: mol_type = other DNA
cgttccccaaccagtcccagggcctccacctccccaggacacactgggattcagggtaccccaggggtgatcaggcagaaccctgtggatgagagaccagggagggcgttgggaaaggat

SEQ ID NO: 26589 - DNA, 120 bp, synthetic construct
  source 1..120: mol_type = other DNA
gccactgcccggagcgagggccgcagcactggagaggtaagagagttcttcaggcagcgcttcccccaggcggtcctcagccgcagcagccatcatctgccaaggatcctcagggggcca

SEQ ID NO: 26590 - DNA, 120 bp, synthetic construct
  source 1..120: mol_type = other DNA
agacctagggtccagagcgggctgcggatgttcagagttagaggggccagtggaggaaggttgtccgagctgaggcaagttggtccccaagttttgggaaactttctcctccacaacacc

SEQ ID NO: 26591 - DNA, 120 bp, synthetic construct; identical to SEQ ID NO: 7669
  source 1..120: mol_type = other DNA

SEQ ID NO: 26592 - DNA, 120 bp, synthetic construct
  source 1..120: mol_type = other DNA
aacaggctgggctagtggttgtgaagacaataaacctccacattccaccctcattcctaatgtggtctgtggcaacaggtgtcacttgaatgaatgtcccagaggaagctgggtgtctcc

SEQ ID NO: 26593 - DNA, 120 bp, synthetic construct
  source 1..120: mol_type = other DNA
tggggtcccactctcttaattgcctctctcagcaacagaaacacttgtttctttttgggagctggattgtttcctcccagcacccctttctcatgcatcctcatatctccttcaccttgg

SEQ ID NO: 26594 - DNA, 120 bp, synthetic construct
  source 1..120: mol_type = other DNA
agggaaatggacctggatgccatccttatgagatactgactaattcctgctgctgcagtgacaaattaccatgaaccgaatggcttacaacaacatggatttattactttacagttttgg

SEQ ID NO: 26595 - DNA, 120 bp, synthetic construct; identical to SEQ ID NO: 7670
  source 1..120: mol_type = other DNA

SEQ ID NO: 26596 - DNA, 120 bp, synthetic construct
  source 1..120: mol_type = other DNA
cttaatttccctttgccatgtaacctaattcctacgttccagggattaggatgtggacatctttgatggtgttggggttgaagacatcattctgcctgctactggtggtcagatgtgcca

SEQ ID NO: 26597 - DNA, 120 bp, synthetic construct
  source 1..120: mol_type = other DNA
tagagattcattaacagtttgttggcttttaaatatgtttgcaaattttattataaaaatgcaatggctttgttctctccatggcttccgggaggccccaggagtaggcttccctggctg

SEQ ID NO: 26598 - DNA, 120 bp, synthetic construct
  source 1..120: mol_type = other DNA
ccagaggcctttttggatgacatgcatgagttttacacaagcttttaatttggagcacagcaggagactcgaggaaacaccacatcagagagccttctctccctgcaattcccattcatg

SEQ ID NO: 26599 - DNA, 120 bp, synthetic construct; identical to SEQ ID NO: 7671
  source 1..120: mol_type = other DNA

SEQ ID NO: 26600 - DNA, 120 bp, synthetic construct
  source 1..120: mol_type = other DNA
ctctccctgcctgtctcaggacttaagtcgcatggaccccaccacacactccactttctctctcttctccagtggaagcgactcctctttcccactggggcactctgccttctcagccct

SEQ ID NO: 26601 - DNA, 120 bp, synthetic construct
  source 1..120: mol_type = other DNA
gtgagtcaccctgcttggctgcactccctgccctgctcccatcctctcagtcctttactctctccacccccagctccaggaacaacgcccaactggcctcctactcagctgacaggaatc

SEQ ID NO: 26602 - DNA, 120 bp, synthetic construct
  source 1..120: mol_type = other DNA
gagaggatggcatctagaaggtgaggaatgctaatggtggaagaaaaggagtttgggtggggaggggaggggaggggagggagaggaaacactgagggccctaaataaggggaaggggga

SEQ ID NO: 26603 - DNA, 120 bp, synthetic construct
  source 1..120: mol_type = other DNA
aggccaggcaatctctgctttcagttcaacaaatatttattgtcttcctcctctgtgggagcagctggaaggtagaagagaaacacagcccgcttttgaaggaaaatgaggaacacagag

SEQ ID NO: 26604 - DNA, 120 bp, synthetic construct; identical to SEQ ID NO: 7672
  source 1..120: mol_type = other DNA

SEQ ID NO: 26605 - DNA, 120 bp, synthetic construct
  source 1..120: mol_type = other DNA
cccagtggcatattgggtgggttgactagatgtcgaagaaaggtcagtgaaaagtggccactgtttccagatgatggtttgactttgctttatttggtaaaggggaagaggaaggtataa

SEQ ID NO: 26606 - DNA, 120 bp, synthetic construct
  source 1..120: mol_type = other DNA
accatttccacacagtagagggaattgtaaggggtggtgatctggctgaggggcactgtggtggaatgggaatttaaacagtaggagagaatcaagagaggagctttgaatctaccattt

SEQ ID NO: 26607 - DNA, 120 bp, synthetic construct
  source 1..120: mol_type = other DNA
acttctcccatatgggatatagtgtatgtgcttgtttgtgcccaaggcatgcacacacacaacagttgacttcttatggactgttgagtaactctccttggggtaggaaaacttcagggt

SEQ ID NO: 26608 - DNA, 120 bp, synthetic construct; identical to SEQ ID NO: 7673
  source 1..120: mol_type = other DNA

SEQ ID NO: 26609 - DNA, 120 bp, synthetic construct
  source 1..120: mol_type = other DNA
gagctgctggaaatgctagaactgctggggactcgagaactggagggagagcagggtcccttggagcccgtggagccgcctccacagagctggaccccaccagtccccactggctggaat

SEQ ID NO: 26610 - DNA, 120 bp, synthetic construct
  source 1..120: mol_type = other DNA
ttctctttggtgaagtagcccacagggtagattttacccttactgtaggtcatgcctggaaccagataactgtcagaggagccacccaccacctcgtagccaccataggatttgtctaca

SEQ ID NO: 26611 - DNA, 120 bp, synthetic construct
  source 1..120: mol_type = other DNA
accgtgctggtccaccaccaccaccacaggcctctgaccccctgacacagagtgggagctggggatgtaggggccggagtgcgagacgatgggccctccactgcagggagagtcggggat

SEQ ID NO: 26612 - DNA, 120 bp, synthetic construct
  source 1..120: mol_type = other DNA
tttgtccaggctgggaagggtttagtattccgcggtaagagttgtcattggttggcagagcagagccattccctacttggaagctgctgctgctgaactgaaagctgctgctgctgctcg

SEQ ID NO: 26613 - DNA, 120 bp, synthetic construct; identical to SEQ ID NO: 7674
  source 1..120: mol_type = other DNA

SEQ ID NO: 26614 - DNA, 120 bp, synthetic construct
  source 1..120: mol_type = other DNA
atacgcgtggggtccttacaagggtctgagaaggtgccaatgctcttagccaaggtccctgtggaggaaagcagtggttagtaagggccaaggaggcttggcttcctccctcacctttct

SEQ ID NO: 26615 - DNA, 120 bp, synthetic construct
  source 1..120: mol_type = other DNA
aaggcatttctttgtttgggaagggtgggcaaacaccaaccagaaaaatagaaaattaggtgccaaagtgagtggcctcaaaggaatacattgaatataagagggggctgggcacagtgg

SEQ ID NO: 26616 - DNA, 120 bp, synthetic construct
  source 1..120: mol_type = other DNA
ttttttaaaaagaagagggaatggagaaggggcaggaacaagtaggtctaaaagaaaggaccctgaagagacagagaattggggaaactgaggctctgaggagtccaggcgtaaattctt

SEQ ID NO: 26617 - DNA, 120 bp, synthetic construct; identical to SEQ ID NO: 7675
  source 1..120: mol_type = other DNA

SEQ ID NO: 26618 - DNA, 120 bp, synthetic construct
  source 1..120: mol_type = other DNA
cccagggaaccaggacgaaaccccacgaacctccgaggctcctggccacaatcagcttccctctctgagcacacctgcctctgtccagcccctcatctgacttctgctgccttgacttcc

SEQ ID NO: 26619 - DNA, 120 bp, synthetic construct
  source 1..120: mol_type = other DNA
gcccctccaggtcccacgtgttacaaacagagccacatactagcaagttactgaacctctctgagctttagtttatacattcagaggggccaaattttccctgccttcccacagcattac

SEQ ID NO: 26620 - DNA, 120 bp, synthetic construct
  source 1..120: mol_type = other DNA
agctcactgtaacctctgcctccttggtgcaagcgattctcctgcctcagcctcccaagtagctgggaccacaggtgcccgccaccacacccagctaattttttgtatttttagtagaga

SEQ ID NO: 26621 - DNA, 120 bp, synthetic construct; identical to SEQ ID NO: 7676
  source 1..120: mol_type = other DNA

SEQ ID NO: 26622 - DNA, 120 bp, synthetic construct
  source 1..120: mol_type = other DNA
tgggaaggtcgcagaaattcctcaagggctataagtacccggtggtcaacaacacaggtccaggggttgcccggcctggggttgaaatcttggctttgctgccttctaatgcatgatctt

SEQ ID NO: 26623 - DNA, 120 bp, synthetic construct
  source 1..120: mol_type = other DNA
ctcatgcctgtaatcccagcaccttgggaggctgaggcgagcggatcacttgagtcaggagttcaagaccagcttgaccaaaatggtgaaaccctgtttctactaaaaatacaaaaaaaa

SEQ ID NO: 26624 - DNA, 120 bp, synthetic construct
  source 1..120: mol_type = other DNA
agaggtggaagttgcagtgagccgagattacgccactgcactccagccttggagacagagtgggactccatctcacaaaaaaaaataaaaataaaagttctaatatataatccaaatgtg

SEQ ID NO: 26625 - DNA, 120 bp, synthetic construct; identical to SEQ ID NO: 7677
  source 1..120: mol_type = other DNA

SEQ ID NO: 26626 - DNA, 120 bp, synthetic construct
  source 1..120: mol_type = other DNA
tcccagggcccccagcctcctacctggcaggaggagaccagccagcagcagtgccatcatcccgtgcccacccacacgccccatccagggtgcccgagacgagcccatctcggactgcac

SEQ ID NO: 26627 - DNA, 120 bp, synthetic construct
  source 1..120: mol_type = other DNA
gaagttggtgtggccgggaggagcgtggtaatcagcccggtgcatctgcctactcagcagcagcagtggctgcagtgtggggtacccatggccacggggctctaacgatcctgccacctg

SEQ ID NO: 26628 - DNA, 120 bp, synthetic construct
  source 1..120: mol_type = other DNA
tgcctaccgtagcttggcctgtctctccatctgccctccactcgcagtcgtgggtgtttcagctttttcttccacacttgggtgcccgctccagccccacccacccaaccccaatgaggt

SEQ ID NO: 26629 - DNA, 120 bp, synthetic construct; identical to SEQ ID NO: 7678
  source 1..120: mol_type = other DNA

SEQ ID NO: 26630 - DNA, 120 bp, synthetic construct
  source 1..120: mol_type = other DNA
tcaaagctgggccttggttactcacagggcactcacagcccctccccatggctggtaacccagacctcaagggtgagcaagaggctaagaaggctaattgggaaggtggtggccccatag

SEQ ID NO: 26631 - DNA, 120 bp, synthetic construct
  source 1..120: mol_type = other DNA
gagccctgccatctgctgagagggtggtggcttctcctccattgcgttggcctccctcctgctctggcccctgccccgccccagccaattaattgctcactagtattgcgggagtatcag

SEQ ID NO: 26632 - DNA, 120 bp, synthetic construct
  source 1..120: mol_type = other DNA
aactcacttcccaaacctcatctcctcacaaaggcagctctgtccctgggccccttggcctggtctctcccattccctctacctcctgaccgccctttaagttcagaccagcaggaggat

SEQ ID NO: 26633 - DNA, 120 bp, synthetic construct
  source 1..120: mol_type = other DNA
tttaattttaattaattgtaatgatgtggttggccacgtgcagctagtggctgccatctagtcttgctcttgacttgctagtgacactcagaatgggagtgggaggaaagaggggctgag

SEQ ID NO: 26634 - DNA, 120 bp, synthetic construct; identical to SEQ ID NO: 7679
  source 1..120: mol_type = other DNA

SEQ ID NO: 26635 - DNA, 120 bp, synthetic construct
  source 1..120: mol_type = other DNA
ttcacccccacagccccaggctccctttcctgagtctccagcccagccaatgctagcagagtgtcttctgctcccttcctgccttgtatagaggtgcaggcacaaatgtgagacagagat

SEQ ID NO: 26636 - DNA, 120 bp, synthetic construct
  source 1..120: mol_type = other DNA
atggcgaaaccccgtctctaccaaaaatacaaaaaaaattagccaggcgtggtggtgggcgcctgtaatccctgctactcgggaggctgaggcaggagaatcacttgaaccctggaggca

SEQ ID NO: 26637 - DNA, 120 bp, synthetic construct
  source 1..120: mol_type = other DNA
ccctagactctcaggcttggctccctggaggacctgggcaaggagggagggggcactggggtaatgaggggagtggcagagggcagggaggagtggactagaaggtgctgggccgtccca

SEQ ID NO: 26638 - DNA, 120 bp, synthetic construct; identical to SEQ ID NO: 7680
  source 1..120: mol_type = other DNA

SEQ ID NO: 26639 - DNA, 120 bp, synthetic construct
  source 1..120: mol_type = other DNA
tactgaaaccctgccttctgtgctagattttactctggtgctcaccattaatctttctctcagtgcaggtggtggagacctaaagctaatggggcttaggagggaagaaaagggcatcag

SEQ ID NO: 26640 - DNA, 120 bp, synthetic construct
  source 1..120: mol_type = other DNA
tgcccgtgcattggaccgggtgagaaagtgtgggtggcgtagacactctacacccgagaaaatcaagctcaaagcacatgccttccataggcaaaaggtggggctcccagccatgtatca

SEQ ID NO: 26641 - DNA, 120 bp, synthetic construct
  source 1..120: mol_type = other DNA
tgcactgagaaagaagagaaattgttccttgccctgaggagctgccatccagctggggacacacagcgtaagacagcagcctagagtggagaagcgggtaggcacttggcttcagggagg

SEQ ID NO: 26642 - DNA, 120 bp, synthetic construct; identical to SEQ ID NO: 7681
  source 1..120: mol_type = other DNA

SEQ ID NO: 26643 - DNA, 120 bp, synthetic construct
  source 1..120: mol_type = other DNA
gttgagggactccataaagaggaggcttggggcacgagatccaccatgtactgactgcctgctgcaggcggacacggtgcctgggtatttaacatgagttgtcttgttcaatcttcacaa

SEQ ID NO: 26644 - DNA, 120 bp, synthetic construct
  source 1..120: mol_type = other DNA
ctaacaagcaaaaatgtttgaaaaagattcaaacccaggcctgttggacttccaggcccacatagatcctattactctgcagctgacaccatgctataaatgaatggcagaggttcatgg

SEQ ID NO: 26645 - DNA, 120 bp, synthetic construct
  source 1..120: mol_type = other DNA
gtaatcccagcactctgggaggccaaggcaggtggatcacttgagctcaggaatttgaaaccagcctggccaacatggcaaaaccatctctactaaaaatacaaaaattagccgggtgcg

SEQ ID NO: 26646 - DNA, 120 bp, synthetic construct
  source 1..120: mol_type = other DNA
gagccgatttcatgccactgcactccagcctgggtgacagagtgagactccgtctcaaaaaaaaaaagtgaagaattcttaagtgaaggttactggctcatgaggtccctcctccacagc

SEQ ID NO: 26647 - DNA, 120 bp, synthetic construct; identical to SEQ ID NO: 7682
  source 1..120: mol_type = other DNA

SEQ ID NO: 26648 - DNA, 120 bp, synthetic construct
  source 1..120: mol_type = other DNA
acaacaacaccctcctctccttggcgtggaagccagcgctcctggcccactcccagtaggggatgtcctctgagttgtttttcctgtgcggggaggggtggactgagtcatccacactct

SEQ ID NO: 26649 - DNA, 120 bp, synthetic construct
  source 1..120: mol_type = other DNA
acacttcttgactcagttttaatctctccttctctgccttcctgttgggaataccccctcacttctgtggcttctttcctgtagtagacgatcaagggtggaatctacagtccgtgagcc

SEQ ID NO: 26650 - DNA, 120 bp, synthetic construct
  source 1..120: mol_type = other DNA
aagcacaggtgcgttcactgagttcccagcacatagctgtggcaggcacttggtgatattttgaaataaaagaatggaagaatgtgtccaggctgtgcttcccctttctaccttactcag

SEQ ID NO: 26651 - DNA, 120 bp, synthetic construct; identical to SEQ ID NO: 7683
  source 1..120: mol_type = other DNA

SEQ ID NO: 26652 - DNA, 120 bp, synthetic construct
  source 1..120: mol_type = other DNA
cacatggctgtgatgaggacgtactggggtttcccctggacatggcattcatctgatgccagtggtgggcaggaccgtgctgtatactttaaaaaaaccctagggggttctgttaggtgc

SEQ ID NO: 26653 - DNA, 120 bp, synthetic construct
  source 1..120: mol_type = other DNA
ttcttccctgcttggctcctggtccaatggctctctcctctatggaatggcctcctggagcttggctgggtcagcccccactttccactcttcccatgcctgtcctcaccctcccagcag

SEQ ID NO: 26654 - DNA, 120 bp, synthetic construct
  source 1..120: mol_type = other DNA
ggttctgcccaccaagctttcttccccccgctcccctgagtcttttcccttcacccccacttcccaaaagcagcagggagtcagctgtagggcagtcgctccctggccgaagccttcctg

SEQ ID NO: 26655 - DNA, 120 bp, synthetic construct; identical to SEQ ID NO: 7684
  source 1..120: mol_type = other DNA

SEQ ID NO: 26656 - DNA, 120 bp, synthetic construct
  source 1..120: mol_type = other DNA
gaatgggactgtggtggcccatcttccctcctgtgttctgggctgtctgagtgcctctgggtgagagtcctcacaggagggagcttctcctactgcccagtgtctccctggcacctgagg

SEQ ID NO: 26657 - DNA, 120 bp, synthetic construct
  source 1..120: mol_type = other DNA
ctccttggcagtgtgtaacattcagctcggtgccgaggtctgcccatgcaggactgatctccattctctcaatgaccctaggagacaggaattattattattattattattattattatt

SEQ ID NO: 26658 - DNA, 120 bp, synthetic construct
  source 1..120: mol_type = other DNA
gctgagacaggagaatcacttgaacccgggaggtagaggttgcagtgagctgagatcgcaccactgcactccagcctgggcgacaagagcgaaactctgtctcaaaaaaacacacataca

SEQ ID NO: 26659 - DNA, 120 bp, synthetic construct; identical to SEQ ID NO: 7685
  source 1..120: mol_type = other DNA

SEQ ID NO: 26660 - DNA, 120 bp, synthetic construct
  source 1..120: mol_type = other DNA
ctcaccttagaacggtcaccttgacggctaaagggacacctgtgtgccttgatggtggacccagggagtggatgacattagtgagggaaagagcaaaggctctggaggaaaacacctgag

SEQ ID NO: 26661 - DNA, 120 bp, synthetic construct
  source 1..120: mol_type = other DNA
ggagtttagaggttattaaagaaatccccctaaagtcccatcccaaggtcacatagagaacgaatggctaagtagcgacaagaacccaagtcacagtctgttgatctcactaccatgcta

SEQ ID NO: 26662 - DNA, 120 bp, synthetic construct
  source 1..120: mol_type = other DNA
aaacccacaggaggtgcatttggcttaattcagcaagttttttgagttttgattcagtgccaggcacctggtgggcacttaattaaagattagcaggagaagaaaaatgtacagtaagag

SEQ ID NO: 26663 - DNA, 120 bp, synthetic construct; identical to SEQ ID NO: 7686
  source 1..120: mol_type = other DNA

SEQ ID NO: 26664 - DNA, 120 bp, synthetic construct
  source 1..120: mol_type = other DNA
aaagacatcattcgctgcccaaggctcagggctgtgcctggtgctttctcaaggtaacttagcttgtataattagattttaccgtgatactagttctaggttctttttttttcattggcc

SEQ ID NO: 26665 - DNA, 120 bp, synthetic construct
  source 1..120: mol_type = other DNA
aagcatttaataactatctgtcatgtccaaggttctgggctattgttctgtaaatctgtgatcctattctgttatttaattccgtgactctgtgttgacatagacgtgacggtgtccctg

SEQ ID NO: 26666 - DNA, 120 bp, synthetic construct
  source 1..120: mol_type = other DNA
caatgggtttccctctgcaaatacctccataccatccaggcccactcagtctcctccccagctaatgaagacagcctgtttgagtgccaaaatccactgcctattaataggtactaaaat

SEQ ID NO: 26667 - DNA, 120 bp, synthetic construct
  source 1..120: mol_type = other DNA
tatgacttgcacaggtgagttacctctctcagtgttggttcctcttctgtgaaatggggctaatcatttgctttattgagtgccttctaggctgggtactaggagagaaggaagggatac

SEQ ID NO: 26668 - DNA, 120 bp, synthetic construct; identical to SEQ ID NO: 7687
  source 1..120: mol_type = other DNA

SEQ ID NO: 26669 - DNA, 120 bp, synthetic construct
  source 1..120: mol_type = other DNA
attaattaattttttttcctcctaactaattccacgttattggcttgagggtcagtttgaggggtccagacctccttcttcctttctatccttagcttcctgccacagtatacccagaga

SEQ ID NO: 26670 - DNA, 120 bp, synthetic construct
  source 1..120: mol_type = other DNA
aggtgatcttcctgctgagtagctgggactacaggcatgcactaccatggcctggctaattgtttgttttttttttttgagatggagtctcactctgtcgtccaggctggagtgcagtgg

SEQ ID NO: 26671 - DNA, 120 bp, synthetic construct
  source 1..120: mol_type = other DNA
tttagtagagacagggtttcaccgtggtctcgatctcctgacctcgcgatccgcccacctcggcctcccaaagtgctgggattacaagcgtgagccactgcgcctggcaacctggccaaa

SEQ ID NO: 26672 - DNA, 120 bp, synthetic construct; identical to SEQ ID NO: 7688
  source 1..120: mol_type = other DNA

SEQ ID NO: 26673 - DNA, 120 bp, synthetic construct
  source 1..120: mol_type = other DNA
ttcagatatgagctcctgcacttggcaccaagatcttccctaattttcccccgacctgtctctccaacatgtctctctcttcttcgggttattttactccaatcattccgatctactctt

SEQ ID NO: 26674 - DNA, 120 bp, synthetic construct
  source 1..120: mol_type = other DNA
tcttcgggttattttactccaatcattccgatctactctttgttaattgggcccttcattaaataatttagcctttcacaaaacacacattaagtgtgcatgacggcccaggcactgtat

SEQ ID NO: 26675 - DNA, 120 bp, synthetic construct
  source 1..120: mol_type = other DNA
gaccagcctggccaacatggtgaaaccccgtgtctactaaaaaaaaactacaaaaattagccaggtatggtggcgggtgcctgtaatcccagccatgtgggaggctgaggcaggagaatt

SEQ ID NO: 26676 - DNA, 120 bp, synthetic construct
  source 1..120: mol_type = other DNA
atgtagtggttaaaatcagtgttgttagcatagcacagacctaaattgaaatcccagttctgccatttgtcccctgtgtgaccttgcatgggtcactgtacctctctaggcctgtttctg

SEQ ID NO: 26677 - DNA, 120 bp, synthetic construct; identical to SEQ ID NO: 7689
  source 1..120: mol_type = other DNA

SEQ ID NO: 26678 - DNA, 120 bp, synthetic construct
  source 1..120: mol_type = other DNA
gctcaggagtttgagaccaggttgggcaatatagtaagacccaatctctacaaaaaaaattagccagacgtggtggcatgcgcctgtgatccagctacttgggaggcttaggtgggagga

SEQ ID NO: 26679 - DNA, 120 bp, synthetic construct
  source 1..120: mol_type = other DNA
gacactttgggaggccaaggcgggcagatcacctgaggtcaggagtttgagaccagcctggccaacatggtgaaaccctgtttctactaaaaatacaaaaattagctgggcatagtggcg

SEQ ID NO: 26680 - DNA, 120 bp, synthetic construct
  source 1..120: mol_type = other DNA
gactccgtctcaaaaattgaataaataaataaataaataaataaaagtaatgaggggactgggcatgatggctcacacctgtaatcccagtgctttgggaggccaaggcaggaagattgc

SEQ ID NO: 26681 - DNA, 120 bp, synthetic construct; identical to SEQ ID NO: 7690
  source 1..120: mol_type = other DNA

SEQ ID NO: 26682 - DNA, 120 bp, synthetic construct
  source 1..120: mol_type = other DNA
ggtactgacaccttcatatttgtccaccgttggttaaggtctgggggcgggctgggggagtgggagggtggtggcatgtgaggatgtgggagagaaaaatttccaagtgcttccagctct

SEQ ID NO: 26683 - DNA, 120 bp, synthetic construct
  source 1..120: mol_type = other DNA
aaaatggtaaaggggttcaagaagaaatgcgtagaacacagtccctgccccacaaggttcatggcctgggaagggaagacagacatgaataaatcattgccatagggtgactggggtgaa

SEQ ID NO: 26684 - DNA, 120 bp, synthetic construct
  source 1..120: mol_type = other DNA
aggctgatgcacatacgcgcaagggctggtccctagagctggtggttctggccacgagagctcatcacctgggggcagcttttgtacctgcaccctgtatgaggctccgggtctgccctt

SEQ ID NO: 26685 - DNA, 120 bp, synthetic construct; identical to SEQ ID NO: 7691
  source 1..120: mol_type = other DNA

SEQ ID NO: 26686 - DNA, 120 bp, synthetic construct
  source 1..120: mol_type = other DNA
ggggcctatttaattctactaggctcaacctacaattcttatgtgttctcagattattcctaaaccctaagcttagttttgtttcattcggaccacatgtagtttttttttgttttttgt

SEQ ID NO: 26687 - DNA, 120 bp, synthetic construct
  source 1..120: mol_type = other DNA
gggattacaggcgcccgccaccatgcccagctaatttttttgtatttttagtagagacagggattcaccatgttggtgaggctggtctcgaactcctgacctcaggtaatccacccgcct

SEQ ID NO: 26688 - DNA, 120 bp, synthetic construct
  source 1..120: mol_type = other DNA
gagtgcagtggcacgatctcggctcactgcaagctccacctcccaggttcacgccattctcctgtctcagcctcccgagtagctgggactacaggcgccggccaccatgcccggctaatt

SEQ ID NO: 26689 - DNA, 120 bp, synthetic construct; identical to SEQ ID NO: 7692
  source 1..120: mol_type = other DNA

SEQ ID NO: 26690 - DNA, 120 bp, synthetic construct
  source 1..120: mol_type = other DNA
tttgagacacggtctcactctgttgcccagactggagtgcagtggtgccatcttggctcactatagcctcaacctcccagggtcaagcaatcttcccacctcagcctcctgagtagctgg

SEQ ID NO: 26691 - DNA, 120 bp, synthetic construct
  source 1..120: mol_type = other DNA
tcccgaagtgctggtattacaggcatgagccaccttgcccagccccttgcacatttttaagtcaacatttaacatttgtaataatttaatagcattccaaagggtatgcttttcaaggaa

SEQ ID NO: 26692 - DNA, 120 bp, synthetic construct
  source 1..120: mol_type = other DNA
ctgcaacctctgcctcccaggttcaagcaattctcatgccctagcttcccgagtagctgggatgcccagctaagttttttgtatttttagtagagacagagtttcaccattgtccaggct

SEQ ID NO: 26693 - DNA, 120 bp, synthetic construct; identical to SEQ ID NO: 1807
  source 1..120: mol_type = other DNA

SEQ ID NO: 26694 - DNA, 120 bp, synthetic construct
  source 1..120: mol_type = other DNA
tttgggaggccaagatgggccgatcacttgagctccggagtttgagacaagcccgggcaacacggtaaaaccccatctctaaaaacaaaacaaaactaaactaaacaaatacaaaaaatt

SEQ ID NO: 26695 - DNA, 120 bp, synthetic construct
  source 1..120: mol_type = other DNA
gacagatggagaccctgtctcaaacaaacacacaaaaagacatgaaaagtaacttattgaaaatgcatctcttggccaggcgtggtggtttacacctgtaatcctagcactttgggaggc

SEQ ID NO: 26696 - DNA, 120 bp, synthetic construct
  source 1..120: mol_type = other DNA
agctactcgggaggttgaggcaggagaatcacttgaatccaggaggcgaaggttgcagtgagctgatatctgtcgtgccactgcactccagcctgggcgacagagagataatacgtctca

SEQ ID NO: 26697 - DNA, 120 bp, synthetic construct; identical to SEQ ID NO: 7694
  source 1..120: mol_type = other DNA

SEQ ID NO: 26698 - DNA, 120 bp, synthetic construct
  source 1..120: mol_type = other DNA
taagccccagagccttacatgctggacatgggcaagataggaactcaagttacttccaggtctccgtaagtttaggactgtgaagagggcatcctaatagtcaaaaacataagtgttggc

SEQ ID NO: 26699 - DNA, 120 bp, synthetic construct
  source 1..120: mol_type = other DNA
acaaaaattagccgggcatggtggtgcgcacctgtaatcccagctactcagaaggctgaggcaggagaatggcttgaacccgggaggcggaggttgcagtgagccgagatcgtgccattg

SEQ ID NO: 26700 - DNA, 120 bp, synthetic construct
  source 1..120: mol_type = other DNA
agatcacgaggtcaggagatcgagaccactctggctaacacggtgaaaccccgcctctactaaaaaatacaaaaaattagcctggcgtggtggcgggcgcctgtagtcccagctactcgg

SEQ ID NO: 26701 - DNA, 120 bp, synthetic construct; identical to SEQ ID NO: 7695
  source 1..120: mol_type = other DNA

SEQ ID NO: 26702 - DNA, 120 bp, synthetic construct
  source 1..120: mol_type = other DNA
aggagagtaggcttaggctgtcagaggaaaaaacgggcgatgtgaggactaagtatggatctcaggaggggacaggaaatattgagaacaccaccttacgggttcagaataaaaccgagg

SEQ ID NO: 26703 - DNA, 120 bp, synthetic construct
  source 1..120: mol_type = other DNA
tatctgtactcttcccggggtgggtctaggtctggctcctcctgaggtcggttgtccacctcaggggcaggaggccaggggttttctgggggctggggtcctgccggccaagggtcgtca

SEQ ID NO: 26704 - DNA, 120 bp, synthetic construct
  source 1..120: mol_type = other DNA
gcccctggccaagggtcaccggggactggggggccctgaggcaatgttggggagcctgcctcctctcggtcctctgcgggtgggtgagaggggtggccctcgctgcctgagatgcctgta

SEQ ID NO: 26705 - DNA, 120 bp, synthetic construct; identical to SEQ ID NO: 7696
  source 1..120: mol_type = other DNA

SEQ ID NO: 26706 - DNA, 120 bp, synthetic construct
  source 1..120: mol_type = other DNA
tttacaaggaccccagctccttaacacagatcccagctccgaggaaactcgtcccccccacgttaatcctgaccgactttgccacatggagccagcaaaccatttctggtgagagccaaa

SEQ ID NO: 26707 - DNA, 120 bp, synthetic construct
  source 1..120: mol_type = other DNA
gccatcttgagtatccctcatcaccccaaactgcagtccctgcctctgttcccacctcacctctggtgtgcaggcaaaggaccaggatccccaggagcttccagttgaggatcatggcta

SEQ ID NO: 26708 - DNA, 120 bp, synthetic construct
  source 1..120: mol_type = other DNA
agggaccagcccagtggcacaggaataccatcagaacagaactggtcaaacccgttgggaaggcctgggctgatgtgtcacccctgaaggtggcgtcccttattttagtcctccagccca

SEQ ID NO: 26709 - DNA, 120 bp, synthetic construct; identical to SEQ ID NO: 7697
  source 1..120: mol_type = other DNA

SEQ ID NO: 26710 - DNA, 120 bp, synthetic construct
  source 1..120: mol_type = other DNA
aagctccccctggggcttcgtgctttcctgggcacttcccttcccccatgggatccaggcatcctgctctccaccatgtccttcttcaggcatgcaggggacctccaagcaatgatatcc

SEQ ID NO: 26711 - DNA, 120 bp, synthetic construct
  source 1..120: mol_type = other DNA
gaagctgccaggctccagcaacctcagccccttcctcctccctcaggaatccacctatccgcctctaggaccttggctccaactctattgtactcgtctcctccctcccattctcctttt

SEQ ID NO: 26712 - DNA, 120 bp, synthetic construct
  source 1..120: mol_type = other DNA
tagcctttcagaagtaacatgtccaaaataaaatttgattcctcccaggttgttccctgcctggtccgctaccccacagtaaggaacaccttattatgcaatggcgtgatctcatctgtt

SEQ ID NO: 26713 - DNA, 120 bp, synthetic construct; identical to SEQ ID NO: 7698
  source 1..120: mol_type = other DNA

SEQ ID NO: 26714 - DNA, 120 bp, synthetic construct
  source 1..120: mol_type = other DNA
agccggacatggtggcacatgcctgtaatcccagctactcaagaggctgaggcaggagaatcgcttgaacccaggaggcagaggttgtggtgagctgagatcacaccattgcactccagc

SEQ ID NO: 26715 - DNA, 120 bp, synthetic construct
  source 1..120: mol_type = other DNA
gagctcaggagttgtgtgcgctgcttcacctgcagcaagactgtgggcaacacgtgggaggcctacctggggctgctgcagtccaagtacgctgatggggacgccctgggcctgaagcgc

SEQ ID NO: 26716 - DNA, 120 bp, synthetic construct
  source 1..120: mol_type = other DNA
gagcaatcgctgaccacagtgcgtggatatgtgtacctcactctggaagggaccatccagtaagtccctcaggaaaaaaaatgtacaccaaatcatgttgcgtcttccctttgtttgggg

SEQ ID NO: 26717 - DNA, 120 bp, synthetic construct; identical to SEQ ID NO: 7699
  source 1..120: mol_type = other DNA

SEQ ID NO: 26718 - DNA, 120 bp, synthetic construct
  source 1..120: mol_type = other DNA
agcaaaactgtctcaaaaaaaaaaagtgctgggattacaggcaggagccacaacaccgggcccccttccctgtttttttttttttttttttaattcttcttctttttttgaggctgagtc

SEQ ID NO: 26719 - DNA, 120 bp, synthetic construct
  source 1..120: mol_type = other DNA
accaccacacctggctaattttttgtattttagtagagacgaagtttcaccatgttgcccaggctggtctcaaactcctgagctcaggtgatccgcgtgcctcagcctcccaaagtgtca

SEQ ID NO: 26720 - DNA, 120 bp, synthetic construct
  source 1..120: mol_type = other DNA
catccttgagcattctctacagagacctcctggcctccacaggagcccacttcaggcaggcctctgcacaaggtcccctgctcagaggcctctccccagagtcagtttctatcatatcat

SEQ ID NO: 26721 - DNA, 120 bp, synthetic construct; identical to SEQ ID NO: 7700
  source 1..120: mol_type = other DNA

SEQ ID NO: 26722 - DNA, 120 bp, synthetic construct
  source 1..120: mol_type = other DNA
gggagaattcccacagattcccagaaataacatttccaaacaatggctccttctgtagtcgtctttatttagagcagaattcagactcagctggtatcccccagggcaaccccaggatgg

SEQ ID NO: 26723 - DNA, 120 bp, synthetic construct
  source 1..120: mol_type = other DNA
aggttgtctccttgacaaacagcttcctctttggaaatggcttcactcaggtcctgcaggtcatcgagcaggacagagagggaccctgggaaggaagacagcagatgagcaccagacaag

SEQ ID NO: 26724 - DNA, 120 bp, synthetic construct
  source 1..120: mol_type = other DNA
cagagaacaacactcatcatgcgagagtctgaagaggagattcctgaagtgcgcgcatttgtcccttgtccctttgtgcttggcccaagaccttttatggactccctggtgggcactgct

SEQ ID NO: 26725 - DNA, 120 bp, synthetic construct; identical to SEQ ID NO: 7701
  source 1..120: mol_type = other DNA

SEQ ID NO: 26726 - DNA, 120 bp, synthetic construct
  source 1..120: mol_type = other DNA
gagttcctggctccgctccttttcctgggcggctctgcgctgaatctggcgtaaggagaccactacagagaggccaaggcacagaggaggcaggtgtgagtcaggccagaggcagccagg

SEQ ID NO: 26727 - DNA, 120 bp, synthetic construct
  source 1..120: mol_type = other DNA
ggaatctgaacctaagtatcttcctcatccctgaaccatcctggagttcctcaggggaaatctgaacatgaactgggttagattttgtgcaattagtgttcactgtcttaaagtgtgatg

SEQ ID NO: 26728 - DNA, 120 bp, synthetic construct
  source 1..120: mol_type = other DNA
gggcggatcacgaggttaggagctcgagaccatcctggccaacatggtgtaatcccgtctctactgcaaatacaaaaactagctgggcatggtggtgggcgcctgtaatcccagctactt

SEQ ID NO: 26729 - DNA, 120 bp, synthetic construct; identical to SEQ ID NO: 7702
  source 1..120: mol_type = other DNA

SEQ ID NO: 26730 - DNA, 120 bp, synthetic construct
  source 1..120: mol_type = other DNA
gcctcacaagtaagcttggggtacaggtgcccaccaccaggcctagctaatttttgtatttttagtcgagacagggtttcgccatgttgtccaggctggcctcaaactcctgacctcagg

SEQ ID NO: 26731 - DNA, 120 bp, synthetic construct
  source 1..120: mol_type = other DNA
catctgtgctactcctggataccttcattacttcctgtaatgaagctttgaacacactttgaggggaaaataataaccttatgtcttaacacttccttcttcctggaaggccctatccac

SEQ ID NO: 26732 - DNA, 120 bp, synthetic construct
  source 1..120: mol_type = other DNA
agccgagtttccacttcagccaccttttcttgcagggctggggtgaaagtgcagacggggcatatcagcaggagctttgattcgcagttcccaccccaccctccaagggaagcacccatt

SEQ ID NO: 26733 - DNA, 120 bp, synthetic construct; identical to SEQ ID NO: 7703
  source 1..120: mol_type = other DNA

SEQ ID NO: 26734 - DNA, 120 bp, synthetic construct
  source 1..120: mol_type = other DNA
ggcggttccgttcttcccgcaactgctgcaactcaaggctcacgtctgtgaccggtggtggtaggggacagctgggacggggaagagaaagagtcagaagaaatcacccagctgcctgat

SEQ ID NO: 26735 - DNA, 120 bp, synthetic construct
  source 1..120: mol_type = other DNA
gcaagctttcgagcaatcaggcctggaggggaaaaagcagggagaaaaagagatgaagtttgcatgggagaaagtggggacagggagtaagggaaaaagagatgcaaggactggtgaaag

SEQ ID NO: 26736 - DNA, 120 bp, synthetic construct
  source 1..120: mol_type = other DNA
cttgcggacagcatagctgagtcggttgttgaggctgggaagctgggcggcagccccttccaccttagccatggtggtctcgagccagatctgagagctggagagggcacaagtcactga

SEQ ID NO: 26737 - DNA, 120 bp, synthetic construct; identical to SEQ ID NO: 7704
  source 1..120: mol_type = other DNA

SEQ ID NO: 26738 - DNA, 120 bp, synthetic construct
  source 1..120: mol_type = other DNA
cctggccaacatggtgaaactctctctacttaaaaacacaaaaattagccgggcatggtggctcatgcctgtaatcccagctactccagaagctgaggcacgagaatcacttgaacctag

SEQ ID NO: 26739 - DNA, 120 bp, synthetic construct
  source 1..120: mol_type = other DNA
caaaagaaaacaaagttatcctctccaagcccaggagtgtcgatctagcaccaatgacgggcaggtccacatgctttaccagctggctgtgccagaagtaggaccaacctggctcatgaa

SEQ ID NO: 26740 - DNA, 120 bp, synthetic construct
  source 1..120: mol_type = other DNA
agctgcatccccagcagcacagcaaagttcactttgatctggaaattgttccagtagatgcttccaacacctaccacagcccttattaaagtctccaattacctagagacaatctaataa

SEQ ID NO: 26741 - DNA, 120 bp, synthetic construct; identical to SEQ ID NO: 7705
  source 1..120: mol_type = other DNA

SEQ ID NO: 26742 - DNA, 120 bp, synthetic construct
  source 1..120: mol_type = other DNA
aggactcatcctgcatcttaatttcgctaaaccaaaaattatctttatctaaattaacccatcaagaagagcctcacgataacaataaacatttacaagccagagactgtgctaagaact

SEQ ID NO: 26743 - DNA, 120 bp, synthetic construct
  source 1..120: mol_type = other DNA
ctactaaaaatacaaaaaagtagccgggtgtggtggtgtgcacctgtaatcccagctactcaggaggctgaggcaggaaaatcgtgtgaacccgggaggcagaggttgcagtgagctgag

SEQ ID NO: 26744 - DNA, 120 bp, synthetic construct
  source 1..120: mol_type = other DNA
caccagcacaaagaagctttgctgttttcttagaggtttttctgaaggtcatacaacaattgtaggtaatgaaacaactaggaagttggtaggagagacaaaggctggcaattgatttag

SEQ ID NO: 26745 - DNA, 120 bp, synthetic construct
  source 1..120: mol_type = other DNA
tctgaaggtcatacaacaattgtaggtaatgaaacaactaggaagttggtaggagagacaaaggctggcaattgatttagaaggaaactaactggcttacattttagatggaatagtaag

SEQ ID NO: 26746 - DNA, 120 bp, synthetic construct; identical to SEQ ID NO: 7706
  source 1..120: mol_type = other DNA

SEQ ID NO: 26747 - DNA, 120 bp, synthetic construct
  source 1..120: mol_type = other DNA
aatagactaaatttttctccagtgaaacggattgcccgtaaaattttagaaaaaaaaaggaagatgaagtgtctacactctccatccttgaacaatactgcaagtaaagatcctcccggg

SEQ ID NO: 26748 - DNA, 120 bp, synthetic construct
  source 1..120: mol_type = other DNA
aaattcataacaagcaatcaggtatgaatgcagaaggggcttccccaggaaaagaaacgaacacaggaacattgatagagctaaatctgcccagccctgtagcctccagtggccactttc

SEQ ID NO: 26749 - DNA, 120 bp, synthetic construct
  source 1..120: mol_type = other DNA
agctgctcctcggctgaggctgtctgctgctgccaccgacgcctggcctcctgagcacggctcagctccaactgcaggccctggggaggatgcagcaaaggacagggtccctccctaagt

SEQ ID NO: 26750 - DNA, 120 bp, synthetic construct; identical to SEQ ID NO: 7707
  source 1..120: mol_type = other DNA

SEQ ID NO: 26751 - DNA, 120 bp, synthetic construct
  source 1..120: mol_type = other DNA
gaggccgaggcagatggatcacttgaggtcaggggttcaagatcagcctgaccaacatggtgaaagcctgtctctactaaaaatacaaaaattagctgagcgtgatggcatgtgcctgta

SEQ ID NO: 26752 - DNA, 120 bp, synthetic construct
  source 1..120: mol_type = other DNA
aaaaaaaaaaaaaaaaaaaaaagaaaagaaaaagaatgaatgccacgcagggagacagaagcttaggttctgaggatggaatctgagcccagtgttccatgttccacattccatgtgccc

SEQ ID NO: 26753 - DNA, 120 bp, synthetic construct
  source 1..120: mol_type = other DNA
actcaccccacagtctctccgtcacattatcttttgaatttttcttactactttctttttttttgagaaaagatctcgctttgtcacccaggctagagtgcagtgatgggatcacagttc

SEQ ID NO: 26754 - DNA, 120 bp, synthetic construct; identical to SEQ ID NO: 7708
  source 1..120: mol_type = other DNA

SEQ ID NO: 26755 - DNA, 120 bp, synthetic construct
  source 1..120: mol_type = other DNA
ccactgcacctggcttcaatctttctatcgcacatataattacccaacattatctgtttacttgcgtgttctgtgtctctgttctagaatgcaagctccacattttagttttgttcaggg

SEQ ID NO: 26756 - DNA, 120 bp, synthetic construct
  source 1..120: mol_type = other DNA
gagggaataccgggagaaaagagagtgcagtgacctgtcccttcagctgcttaacagagtcactgtgttccagctcctgggcctttagctgcaccatgagggcaaacaccttctcccgcc

SEQ ID NO: 26757 - DNA, 120 bp, synthetic construct
  source 1..120: mol_type = other DNA
gggagaaaagtgtgggctcctgggggaggagaggaaggaggtggcatctttgtttctcctctgtcctgcctgggcaacatgagctacagcaagaggagttcacaggaaggagatctaagc

SEQ ID NO: 26758 - DNA, 120 bp, synthetic construct; identical to SEQ ID NO: 7709
  source 1..120: mol_type = other DNA

SEQ ID NO: 26759 - DNA, 120 bp, synthetic construct
  source 1..120: mol_type = other DNA
cctgcaccctcacctgcatggtttccagaagcttctgtcgctccagttcccatgtctggctgtggacctcagaaggcacttgttccccaacatattttcttagattctcaaccagggtca

SEQ ID NO: 26760 - DNA, 120 bp, synthetic construct
  source 1..120: mol_type = other DNA
cacctacctcagctgcttccgaagcagctcggcctccctctgagcctcggccagctccttggcttcccctgctcttctggtttccagactactcagagacttctccaagccctcagcctt

SEQ ID NO: 26761 - DNA, 120 bp, synthetic construct
  source 1..120: mol_type = other DNA
ccactttctgtgaccttagagaatgacccaaccaatcagccaactgtgcacagcaaatggagagctggcaactcactctccgcagctgccccacaacccatcaggagttcttgtccgatc

SEQ ID NO: 26762 - DNA, 120 bp, synthetic construct; identical to SEQ ID NO: 7710
  source 1..120: mol_type = other DNA

SEQ ID NO: 26763 - DNA, 120 bp, synthetic construct
  source 1..120: mol_type = other DNA
tcagctgttcacgtcctcctgagcacttagcactgaccatatcttgcttatgtgtatgtgttactatctgtcggaccacactggaaggaaagctccaggaaaggaggaattttgtgtctt

SEQ ID NO: 26764 - DNA, 120 bp, synthetic construct
  source 1..120: mol_type = other DNA
gcccaccctgcttcctggtctgcctcctctagccctgtctccatacaacaataaaattaatttgggggacataaatgacaaaattttttagacataaaatacaaatctaatcatgttatt

SEQ ID NO: 26765 - DNA, 120 bp, synthetic construct
  source 1..120: mol_type = other DNA
ggatcacaaggtcaggagatcgagatcatcctggctaacatggtgaaaccccgtctctattaaaatacaaaaaattagctgggcgtggtggcgggcgcctgtagtcccagctactcggaa

SEQ ID NO: 26766 - DNA, 120 bp, synthetic construct; identical to SEQ ID NO: 7711
  source 1..120: mol_type = other DNA

SEQ ID NO: 26767 - DNA, 120 bp, synthetic construct
  source 1..120: mol_type = other DNA
tggtctcgaactcctgacctcaagtgatccacccgcctcagcttcccaaagtgctaggattacacatgtgagcaaccatgcccagccctaatttcttccataaaatagagatgggggtct

SEQ ID NO: 26768 - DNA, 120 bp, synthetic construct
  source 1..120: mol_type = other DNA
gggaaagtagcaagttctgaagtggccaaagccttgtgccctgggccctgggctctgcagcacactcagtgcccctcatctctgtgccccagccttctggcctcctgtccccgccttcac

SEQ ID NO: 26769 - DNA, 120 bp, synthetic construct
  source 1..120: mol_type = other DNA
ctggagtgtgatgtcagctcactgtaacctctgtctcccaggttcaagcaattctcctgcctcagcctcccaagaagctgggggattacaggcgcccacgactatacccggctaattttt

SEQ ID NO: 26770 - DNA, 120 bp, synthetic construct; identical to SEQ ID NO: 7712
  source 1..120: mol_type = other DNA

SEQ ID NO: 26771 - DNA, 120 bp, synthetic construct
  source 1..120: mol_type = other DNA
caattttttcctttatggcttctagattttggattttgactcacaggtagaaaggccttgcccactacaaggttataaaggaattctcccttgttttctcccagttccttttttatttta

SEQ ID NO: 26772 - DNA, 120 bp, synthetic construct
  source 1..120: mol_type = other DNA
tgggattacaggtgcgcaccaccacgcctggtgaatttttgtatttttagtagagacagggtttcgccatgttggccaggctggtcttgaactcctgaccttgtgatctgcctgcttcgg

SEQ ID NO: 26773 - DNA, 120 bp, synthetic construct
  source 1..120: mol_type = other DNA
cagtggccttccctgaaccccagactaagttagtgctttctagtccttctccttcaaggcattcctcctgattgcaattaattatgattaaattaaatgtggatgtgtatatcccccacg

SEQ ID NO: 26774 - DNA, 120 bp, synthetic construct
  source 1..120: mol_type = other DNA
tagcccccttatacccaccttcctcactgccctccacaatacccctgatgaattggtacctggagtaaagtagggaggcaaactatttcctactagaaagggaagcagggcttcaagtgg

SEQ ID NO: 26775 - DNA, 120 bp, synthetic construct; identical to SEQ ID NO: 7713
  source 1..120: mol_type = other DNA

SEQ ID NO: 26776 - DNA, 120 bp, synthetic construct
  source 1..120: mol_type = other DNA
agttcttccggacaacctcagccccagccaaagcagcacgcaggccctcagcctcagctcggccggccttctccgcccgtgccagagcctctagctccatggcctgggcctctagcctca

SEQ ID NO: 26777 - DNA, 120 bp, synthetic construct
  source 1..120: mol_type = other DNA
cccaggaccttcaaagacaggttagtgcaggtgagacttgtctccagtgctggaaggatagttgagggcataaacatagccaggagaaggaaaagaggacccctctgcttccgtgtgggg

SEQ ID NO: 26778 - DNA, 120 bp, synthetic construct
  source 1..120: mol_type = other DNA
gttgagtccagtgcctggactcacaggacctaaagtctggctgagatcgtggaacatgatctccctagagagagctacatacaggaggattcaacatcaaatgtgtatatcattaggcca

SEQ ID NO: 26779 - DNA, 120 bp, synthetic construct; identical to SEQ ID NO: 7714
  source 1..120: mol_type = other DNA

SEQ ID NO: 26780 - DNA, 120 bp, synthetic construct
  source 1..120: mol_type = other DNA
atctctactaaaaatataaaaaactagctgggcatggtggcaggtgcctgtagtcccagctgcttgggaggctgaggcaggagaatggcgtcaacctgggaggcagagcttgcagtgagc

SEQ ID NO: 26781 - DNA, 120 bp, synthetic construct
  source 1..120: mol_type = other DNA
cacagtgccagcctttagagaaatcgtctaccaatgtcacgtgaagtttaatccagcttggaacatggctcctgaggcagctctctgagacccaggactataagagattgttgttgttgt

SEQ ID NO: 26782 - DNA, 120 bp, synthetic construct
  source 1..120: mol_type = other DNA
gctaggactacaaatgcatgccaccacagccagctaattattttctgtggagacggagtctcgctttgttgcccacgctggtcatgaactcctgggctcaagtgatcctcctgcctcagc

SEQ ID NO: 26783 - DNA, 120 bp, synthetic construct; identical to SEQ ID NO: 7715
  source 1..120: mol_type = other DNA

SEQ ID NO: 26784 - DNA, 120 bp, synthetic construct
  source 1..120: mol_type = other DNA
actgccacagtgctgggtctctacctctagtttgcacttcttcatcttgcctcataccatgctttaccatcagctggtggtcaatctatctcccctcttaggattttagattccttatta

SEQ ID NO: 26785 - DNA, 120 bp, synthetic construct
  source 1..120: mol_type = other DNA
atgcactgtaggaactaattgcttacataaaaatgagtacgttctggaaactagggccgaaatagggtaaggagtttattccagtgaggaagggtcactagcaagcaagcctgagaaaac

SEQ ID NO: 26786 - DNA, 120 bp, synthetic construct
  source 1..120: mol_type = other DNA
atggcctgggggttggaccaggggaatgtctgagagccaggtgggagccattcttggcagagttgaaaggggccgagcttgaaagtgggaggggggaatcagcccagtggaacctgaaga

SEQ ID NO: 26787 - DNA, 120 bp, synthetic construct; identical to SEQ ID NO: 7716
  source 1..120: mol_type = other DNA

SEQ ID NO: 26788 - DNA, 120 bp, synthetic construct
  source 1..120: mol_type = other DNA
tactgaaagagacagactgagaggggctctgaggctttactcatactttcaggattctgggcagtgcctctaccctcctccttaagtttctatggtccctgctgctcctggccagaggtg

SEQ ID NO: 26789 - DNA, 120 bp, synthetic construct
  source 1..120: mol_type = other DNA
ctgttaaagtgctggcccaaggcctggccccagctgaatgtggccacatgcagggctagaccctccccaagaccttgggaatccaggccgcctagatccccaggcagaaaagccagcgtc

SEQ ID NO: 26790 - DNA, 120 bp, synthetic construct
  source 1..120: mol_type = other DNA
taagatcttcctcccaccctcccaccctcattaatctattttttacccgaatctgggatccctactcccgtccctttttacaacctaatctacctttttctgaaggaattattctggtcc

SEQ ID NO: 26791 - DNA, 120 bp, synthetic construct; identical to SEQ ID NO: 7717
  source 1..120: mol_type = other DNA

SEQ ID NO: 26792 - DNA, 120 bp, synthetic construct
  source 1..120: mol_type = other DNA
cctatttcactctgttgggaggagggggaaaggtgtacgcaggcgcagtggcgtctaaatttgggcccactaaatgcgtcggagcatctccgcgcccaggcggctcctcctcactgcggc

SEQ ID NO: 26793 - DNA, 120 bp, synthetic construct
  source 1..120: mol_type = other DNA
tcgctcggcgcgaagttcgggcccgggaattccgaaggaggggtaggcgctgcccgcgcgcagaggccgcgcccctcctggccccggcttcttggctgtcaaacagatgcagcaacgtcg

SEQ ID NO: 26794 - DNA, 120 bp, synthetic construct
  source 1..120: mol_type = other DNA
gggaaaaggccgggtatgccttgcatgatcgcggggagctccttcctgtttttatcccacctagagaagccgggaagtaggggtttaggtccaatttgttggagtacttaaggactcgtt

SEQ ID NO: 26795 - DNA, 120 bp, synthetic construct; identical to SEQ ID NO: 7718
  source 1..120: mol_type = other DNA

SEQ ID NO: 26796 - DNA, 120 bp, synthetic construct
  source 1..120: mol_type = other DNA
accttcctggaatttttcatttgcaagtcggcttaaccaattttgcattgagtcctaggctgcttgcactctgaatttgggctattcaggtagtgtgctcaaagttgaaaccgcatacag

SEQ ID NO: 26797 - DNA, 120 bp, synthetic construct
  source 1..120: mol_type = other DNA
gctgccctgcttccaactgctgcgcatagggggcggcaggggcggtgatctctacaccttccacccccccgccggggctggctgcacctatcgcttgggccacagggccgacctgtgtga

SEQ ID NO: 26798 - DNA, 120 bp, synthetic construct
  source 1..120: mol_type = other DNA
gcattaagcagggcagctttgcccctgggtggttgaagcgccaggctggaatgagtaaggtctccacaagaccctgctgcctgcctcccatactcccatcagattggatggatggtcgtg

SEQ ID NO: 26799 - DNA, 120 bp, synthetic construct; identical to SEQ ID NO: 7719
  source 1..120: mol_type = other DNA

SEQ ID NO: 26800 - DNA, 120 bp, synthetic construct
  source 1..120: mol_type = other DNA
tagccaacattcatctagtgcttactgttatgagccaggccctattttaagtgtattgaatgtaggtggtactaatattatcctcatttacagtaaaggaaaatgaggcacaaagaggtt

SEQ ID NO: 26801 - DNA, 120 bp, synthetic construct
  source 1..120: mol_type = other DNA
tgagctcaggagttcgagaccagcctgggcaacatggtgaaaacctgtctctaccaaaaaattaattaatttttttaaaaaagcctgggcacggtggctcacgcctgtaatcccagcact

SEQ ID NO: 26802 - DNA, 120 bp, synthetic construct
  source 1..120: mol_type = other DNA
gaaaaaaaaatacaaaaattagccaggtgtggtggcgtgcacctgtaaccccagctactcaggaggctgaagcagcagaatcacttgaacccgggaggcggaggttgcagtgagctgaga

SEQ ID NO: 26803 - DNA, 120 bp, synthetic construct; identical to SEQ ID NO: 7720
  source 1..120: mol_type = other DNA

SEQ ID NO: 26804 - DNA, 120 bp, synthetic construct
  source 1..120: mol_type = other DNA
cttgaacctgggaggcggagtgcagtgagctgagattgcactactgcactccagcttgggcaatagagcaaaactccatctcaaaaaaaaaaaaaaagaaagaaagaaaaaaaaagaaga

SEQ ID NO: 26805 - DNA, 120 bp, synthetic construct
  source 1..120: mol_type = other DNA
ggggcttaggatgtgagggagaatctgactacagtttcatattcttccccagaaatcatacagatttctccactcctgactctggtcatttctgtttttgtcctccatatttgcctggtg

SEQ ID NO: 26806 - DNA, 120 bp, synthetic construct
  source 1..120: mol_type = other DNA
cggagttctacttcatgttccaacaagtacgagtcaagcctcaggactttgctgccattaccatcccacggtctaggggagaagcccgggttggggctggtttccggcctatgctgccct

SEQ ID NO: 26807 - DNA, 120 bp, synthetic construct; identical to SEQ ID NO: 7721
  source 1..120: mol_type = other DNA

SEQ ID NO: 26808 - DNA, 120 bp, synthetic construct
  source 1..120: mol_type = other DNA
tcagtgttttactgcttttcgattccttgtatccctaggctgtgaggaggtccccctgcctggggggatgggcacgggaggtggaatagatggaatggcaagacctgggttagctctgat

SEQ ID NO: 26809 - DNA, 120 bp, synthetic construct
  source 1..120: mol_type = other DNA
tgctttttacattcatatggctttaaccccattcttctagtgcctaaggatggggaactttcaggctcatactagaggtttttaggcccaccctatgtgtttttaaggacagagtccagg

SEQ ID NO: 26810 - DNA, 120 bp, synthetic construct
  source 1..120: mol_type = other DNA
ttcagaaatcgacgtggccgtcctcggaagtacccagtgagcgctcccatggctccccctgcagttgggggcggggagccctgtgcagctccttgttgctgcctgccccaggaagagaca

SEQ ID NO: 26811 - DNA, 120 bp, synthetic construct; identical to SEQ ID NO: 7722
  source 1..120: mol_type = other DNA

SEQ ID NO: 26812 - DNA, 120 bp, synthetic construct
  source 1..120: mol_type = other DNA
ggaagttcccactattacaagccataaggccatgttgccatggacaccagaatatctgtagtcagagcacctatcagttgcaaaagccatgcctgcaaccgatggaaaatgtaagaggga

SEQ ID NO: 26813 - DNA, 120 bp, synthetic construct
  source 1..120: mol_type = other DNA
tcacagctttgcttttatttccaagtcaaggacaagccgcttcattcactcctgggcatttactcttcttgtgggtctgtgatattccttgctttccagggagaatgtgcttggcaaggt

SEQ ID NO: 26814 - DNA, 120 bp, synthetic construct
  source 1..120: mol_type = other DNA
agtttaagggaaaacagatctattgccatttaaataaggtaactgggatttggttaagttcacaaagatagcagaagatttatttacaggcttcacctgtactgtcagggcaagagaaag

SEQ ID NO: 26815 - DNA, 120 bp, synthetic construct; identical to SEQ ID NO: 7723
  source 1..120: mol_type = other DNA

SEQ ID NO: 26816 - DNA, 120 bp, synthetic construct
  source 1..120: mol_type = other DNA
aaaatggaagaaatgactctggggcaaagacccctaatgaactagtggcagagccaggaataaaacttgagtaactaatgagtcacttatgggcagagtatgcaaaaaccttaagtggaa

SEQ ID NO: 26817 - DNA, 120 bp, synthetic construct
  source 1..120: mol_type = other DNA
aagatgatttctaagtataaagccatttaagaattccagagtagggtgggaaagcaaaaagccagctctgaacaggtaacagctacatggtgactgagtctatgggcaaaagttcttgca

SEQ ID NO: 26818 - DNA, 120 bp, synthetic construct
  source 1..120: mol_type = other DNA
ggtcacttgggtatgagcattggatattcccatccctacctcagtaactgaaggacaaaccaagataagtgtgtctatctactgtgtcccaggcttctttatttaagaaaaaagtgatac

SEQ ID NO: 26819 - DNA, 120 bp, synthetic construct
  source 1..120: mol_type = other DNA
cctttgtgttcccaattccttccttagtgaatgaagaacttaatcccaaaaaccctggcacaaactccaggttttctttccctagctcctcccctccccctgtcccccattcctagaagg

SEQ ID NO: 26820 - DNA, 120 bp, synthetic construct; identical to SEQ ID NO: 7724
  source 1..120: mol_type = other DNA

SEQ ID NO: 26821 - DNA, 120 bp, synthetic construct; identical to SEQ ID NO: 1840
  source 1..120: mol_type = other DNA

SEQ ID NO: 26822 - DNA, 120 bp, synthetic construct
  source 1..120: mol_type = other DNA
gagacatggcactcacatccttctcgagcccaagctgctgggcgatgtggctgatctgctgcagtgtgggtttcgggcactgcaggaacaaattctccaggttgcctctcactcggttct

SEQ ID NO: 26823 - DNA, 120 bp, synthetic construct
  source 1..120: mol_type = other DNA
gtctgtgactagatgtgtcagcagagccaggtggtggtgtgaaaaggcaggatcctggaagggttggctctggaccttatcccagcagaactgaggaatttcactccatcccactgagaa

SEQ ID NO: 26824 - DNA, 120 bp, synthetic construct; identical to SEQ ID NO: 7725
  source 1..120: mol_type = other DNA

SEQ ID NO: 26825 - DNA, 120 bp, synthetic construct
  source 1..120: mol_type = other DNA
gggagctcaaagcatcttctccctctccctactcctcttcatgggtgagggtagtctgcccctgcccctccccactaggttcagggatactccttagaggggagatgcggtcagaatctg

SEQ ID NO: 26826 - DNA, 120 bp, synthetic construct
  source 1..120: mol_type = other DNA
ctttgatgtcctgggactggattttaaaaggcagaagacttgtaagaacataaacacaccagttatcaatctcccctttccattcgggattcaagaacctacgtgtggccccaaggaata

SEQ ID NO: 26827 - DNA, 120 bp, synthetic construct
  source 1..120: mol_type = other DNA
tcccccagaaactggcacatccaagggatgcagagcatcgtgaaaggacagaaagagagaccctggcctcgagaacacctgtcaggttatgaaggttagaagttctttgctgggcgcggt

SEQ ID NO: 26828 - DNA, 120 bp, synthetic construct
  source 1..120: mol_type = other DNA
agctgggcacggtggcacgcacctgtaatcccagctactcaggaggctgaggcaggagaatcacttgaacccgggaggcggaggttgcagtgagctgagatcacgccactgcactccagc

SEQ ID NO: 26829 - DNA, 120 bp, synthetic construct; identical to SEQ ID NO: 7726
  source 1..120: mol_type = other DNA

SEQ ID NO: 26830 - DNA, 120 bp, synthetic construct
  source 1..120: mol_type = other DNA
ctatagaggcatcctaattgatttttaaattcaagagatttatcgagcaccttctataagccagcggctatacaaagtggacaaagagccctgacatccagcatgacagaagtgctattt

SEQ ID NO: 26831 - DNA, 120 bp, synthetic construct
  source 1..120: mol_type = other DNA
aaaataaaaaatggccaggcacagtggctcatgtctgtaaatcctagcactttgggaggccaaggtgggcagactgcttgagcccaagagttagaaagcagcctgggtaacatagtgaga

SEQ ID NO: 26832 - DNA, 120 bp, synthetic construct
  source 1..120: mol_type = other DNA
ccaaggtgggtagatcacttgaggtcaggagttcaagactagcctggtcaacatagtgagactctgtctctactaaaaatacaaaaattagctgggcatcatggcgctcccctataatcc

SEQ ID NO: 26833 - DNA, 120 bp, synthetic construct; identical to SEQ ID NO: 7727
  source 1..120: mol_type = other DNA

SEQ ID NO: 26834 - DNA, 120 bp, synthetic construct
  source 1..120: mol_type = other DNA
ctttgttttagtccaagcgaaatgatctctcaccctttttctccccaccaagacggaatctcgttctatcgcccaggctggagtgctgtggcgtgatcttggctcactgcaatctccgcc

SEQ ID NO: 26835 - DNA, 120 bp, synthetic construct
  source 1..120: mol_type = other DNA
ctggtcaggagacctcaagtgatctgtccaccttggcctcccaaagtgctgggattacaggtgtgaaccaccgcacctagcctcaccttttttttttttttttttgagagtttcgctttt

SEQ ID NO: 26836 - DNA, 120 bp, synthetic construct
  source 1..120: mol_type = other DNA
cgcccagctaattttgtatttttagtagagatggggtttcgccatgttggtcaggctggactcgaactcccgacctcaggtgattcgcctgcctcggcctcccaaagtgcctggccacac

SEQ ID NO: 26837 - DNA, 120 bp, synthetic construct; identical to SEQ ID NO: 7728
  source 1..120: mol_type = other DNA

SEQ ID NO: 26838 - DNA, 120 bp, synthetic construct
  source 1..120: mol_type = other DNA
catatgaggctgccggcagacagaggtgcacagctagtgagaaaaaaacaaggcctttttgtagttctgaagcctcaaggaagtgtttcaatggtgcttgatcatatcaatttcaaatag

SEQ ID NO: 26839 - DNA, 120 bp, synthetic construct
  source 1..120: mol_type = other DNA
cttcatcatttagcagttaaaacccgttaaataggataataatacctccccctaggagattttgtgctggttaatgagataatgatgtataaacggagcacacagccaggcacttaggaa

SEQ ID NO: 26840 - DNA, 120 bp, synthetic construct
  source 1..120: mol_type = other DNA
cagaaaccagtcacacctttctgtgaggtctcaaggcttagtatttaatctctaattgcttacacttgtcgccttgaaggactggaagatacatctttaatagtcctcagcagggctgga

SEQ ID NO: 26841 - DNA, 120 bp, synthetic construct
  source 1..120: mol_type = other DNA
tggagaaatctctcaccatttttcttgtttacaactttggaactgaggctgaagtcaatcaaaatccagctttctacaaggggtgccagggtgtgcaccttaacacagtggccagtcatt

SEQ ID NO: 26842 - DNA, 120 bp, synthetic construct; identical to SEQ ID NO: 7729
  source 1..120: mol_type = other DNA

SEQ ID NO: 26843 - DNA, 120 bp, synthetic construct
  source 1..120: mol_type = other DNA
tgtgagagaccctgacaagggctgggccagagcaaaggccagcctgggccagcttccgactctcccaggctgctctgccctcaccggcagttgtctcttcgaaatccagcttccacttcc

SEQ ID NO: 26844 - DNA, 120 bp, synthetic construct
  source 1..120: mol_type = other DNA
tccccatcaggctgccctgtcatgaccacctccccacaccccaaccccgtcgaagctcacttgcctcctccgggttttgctccagcttctccttctccagcttcacggcaccaggggtga

SEQ ID NO: 26845 - DNA, 120 bp, synthetic construct
  source 1..120: mol_type = other DNA
cacagtacgccatccccccacagaactcatacggcggggggcatgggggaatcccccacacctcagagcctggcccaacccccggcccgattcctggccctccaggagggccttggaagc

SEQ ID NO: 26846 - DNA, 120 bp, synthetic construct; identical to SEQ ID NO: 7730
  source 1..120: mol_type = other DNA

SEQ ID NO: 26847 - DNA, 120 bp, synthetic construct
  source 1..120: mol_type = other DNA
aggtcccccacagaaactttttttatttttattttttaagacagggtctcactttgttgcccagactggagtgcagtggagtacaatgatggctcaatgtagcctcgatctactgggcca

SEQ ID NO: 26848 - DNA, 120 bp, synthetic construct
  source 1..120: mol_type = other DNA
tgaattcctgtcctcaagaaatcctcccgcctctgccgcccagtgtcatgattaaaggcgtgagccaccacacccaactttcaactcccaacccgctccctggcactctctcaggctctg

SEQ ID NO: 26849 - DNA, 120 bp, synthetic construct
  source 1..120: mol_type = other DNA
cctcaaatttattgaatgtgtgtgtggcgctatccctcaatgcatcaacagccataagcacaatggccagctgctcccttatgccttcccccgatccatccagaatcctaggcattccca

SEQ ID NO: 26850 - DNA, 120 bp, synthetic construct; identical to SEQ ID NO: 7731
  source 1..120: mol_type = other DNA

SEQ ID NO: 26851 - DNA, 120 bp, synthetic construct
  source 1..120: mol_type = other DNA
atctaataccacggtaggccccgttctccctcccccacctccctggcccaggcctccagccctaggccctgggtggggaaaaccagggggtggggggtgtggagaaaaaatatctgactt

SEQ ID NO: 26852 - DNA, 120 bp, synthetic construct
  source 1..120: mol_type = other DNA
ggcctggatggctcccctggggactgcttcctgctccccaaccccccagtcccaatcccctcacacagaatccccttcagagacgctaaaaggagctccagcaacccccctctgcaatcc

SEQ ID NO: 26853 - DNA, 120 bp, synthetic construct
  source 1..120: mol_type = other DNA
ggcagattgagggatgtgctttgtttagtggggctggctggcagaaagacgcagaggaggtggagagtgatttgtggaggcgtgcaggaaggctgccctaagctccccttcagggtctgt

SEQ ID NO: 26854 - DNA, 120 bp, synthetic construct; identical to SEQ ID NO: 7732
  source 1..120: mol_type = other DNA

SEQ ID NO: 26855 - DNA, 120 bp, synthetic construct
  source 1..120: mol_type = other DNA
tgtcttcatcttggtggcatccgtgagtcttttgagacttttcccccactcttatgttgcctctgttcgtgtgcccatctcctgtctgtgtagactttttgagcctaattgtatgcgtgc

SEQ ID NO: 26856 - DNA, 120 bp, synthetic construct
  source 1..120: mol_type = other DNA
ggaggaacatgcttcggaacaggaggaggcccctccccagccatctcaatccccaggacagaaccatcacggcacctttgtcatgcatctctctgctgtctgccaagaagacggcctctc

SEQ ID NO: 26857 - DNA, 120 bp, synthetic construct
  source 1..120: mol_type = other DNA
tgcccattttcctagtggctcctaaaacaccttccccaatttccccactcaacaccaccctcttgtttttagattataatttgtactgtaggtggtgtatttctggcctgggcaagaggc

SEQ ID NO: 26858 - DNA, 120 bp, synthetic construct; identical to SEQ ID NO: 7733
  source 1..120: mol_type = other DNA

SEQ ID NO: 26859 - DNA, 120 bp, synthetic construct
  source 1..120: mol_type = other DNA
gccaggctgagtcatcagaactggtcccatgattccctgggttttagaaagtcaccataaaaagatacttcacacacacctttattattacagtgcaatgtcaagacccttcacagagca

SEQ ID NO: 26860 - DNA, 120 bp, synthetic construct
  source 1..120: mol_type = other DNA
actgggagatgaggtgctgtttggttgaaaaaccagctgaaaaaactcagttgggaccaatagagacttgctctcgacccggtctaggaaaccacttattttgacttccgaggcctgtca

SEQ ID NO: 26861 - DNA, 120 bp, synthetic construct
  source 1..120: mol_type = other DNA
agcaatttagacaaattcctttgctcactgtggaccaagtcccctcttctcaacaaaggaccctctgatctcccccatgagccctgcaaactgaggtcaccttatcccaaatccagacac

SEQ ID NO: 26862 - DNA, 120 bp, synthetic construct; identical to SEQ ID NO: 7734
  source 1..120: mol_type = other DNA

SEQ ID NO: 26863 - DNA, 120 bp, synthetic construct
  source 1..120: mol_type = other DNA
ggtgttcaatgagaagttggcataggcctccctgtaccctgccacctacctccaagcatccttcctggggaatctggcaggttttcccctgaagtttgatcaagagatataggaggaggc

SEQ ID NO: 26864 - DNA, 120 bp, synthetic construct
  source 1..120: mol_type = other DNA
aataccaaaaggtggtttttttgtttgtttgttttgttttttttgcatgtggtggtgcatgcctgtaatcccagctactcaggaggctgagaaacaaaaatcgcttgaactcaggcagca

SEQ ID NO: 26865 - DNA, 120 bp, synthetic construct
  source 1..120: mol_type = other DNA
agacaggagagcctatgctcacgtcaaagggatcacagcagactgctggctctgggcatctgagcagcgccatgcaagggggcaagtggcttagggttccagggactcaggggctggggc

SEQ ID NO: 26866 - DNA, 120 bp, synthetic construct; identical to SEQ ID NO: 7735
  source 1..120: mol_type = other DNA

SEQ ID NO: 26867 - DNA, 120 bp, synthetic construct
  source 1..120: mol_type = other DNA
cggtcagcaacagagctgtgttcatttaggacatgggtattgaaatggagttttgaaggctggctgaggggcctgcactccatccctcccacagtgccctcagctcctccaccttcccca

SEQ ID NO: 26868 - DNA, 120 bp, synthetic construct
  source 1..120: mol_type = other DNA
tccttctgcagctatgcttggttctggctggcttttgctggagttgaaagactcaagtgtgctaagaagggagtcctggccatcacagttgtagtgccagtgtccccagctgctccggtt

SEQ ID NO: 26869 - DNA, 120 bp, synthetic construct
  source 1..120: mol_type = other DNA
cctcccaaaatgcatgaaattcccttcctctgactgataaaccctcactcattctccaagacatatcttctctgtcaaccacatccccaccaaagtcacactgcacccgctctccctccc

SEQ ID NO: 26870 - DNA, 120 bp, synthetic construct; identical to SEQ ID NO: 7736
  source 1..120: mol_type = other DNA

SEQ ID NO: 26871 - DNA, 120 bp, synthetic construct
  source 1..120: mol_type = other DNA
atgaaaaaaaatgatattggttagaaatatattttgctcaggtcaccaggtttcttattaactactggtggtggcgagagaggtgaatgtcagaaaaaggccagtttttcccatttcctg

SEQ ID NO: 26872 - DNA, 120 bp, synthetic construct
  source 1..120: mol_type = other DNA
ctggccaacatggtgaaaccccatctctactaaaaatataaaaattagccaggtgtggtggcaggcgcctgtaatcccagctactcaggaggctgaggcaggggaatcgcttgaacctgg

SEQ ID NO: 26873 - DNA, 120 bp, synthetic construct
  source 1..120: mol_type = other DNA
ttctttcttagagacctagtccttgactgagggaaagggtgagggtcttatacttcttttttttttttttttattgagacagagtcttgctctgtcacccaggctggagtgcagtggcac

SEQ ID NO: 26874 - DNA, 120 bp, synthetic construct
  source 1..120: mol_type = other DNA
agtagagacagggtttcactgtgttagctaggatggtctcgatctcctgaccttgtgatccacctgcctcggcctcccaaactgctgggattacaggcatgagccaccgcgcccagccag

SEQ ID NO: 26875 - DNA, 120 bp, synthetic construct; identical to SEQ ID NO: 7737
  source 1..120: mol_type = other DNA

SEQ ID NO: 26876 - DNA, 120 bp, synthetic construct
  source 1..120: mol_type = other DNA
ccgggatggtgacaaggtgctgggctctggccttcagtctgagaaccagcttctcccaagctcttgggtccctggcctgagcccaggatgcacggggctctgcccacctgccctccttgc

SEQ ID NO: 26877 - DNA, 120 bp, synthetic construct
  source 1..120: mol_type = other DNA
atgaagtcatagcacagagagtgggttgctgaggaaaagagaatgatgggaaagggttattttccaacaggagtcttacctgggagacactgcacaaggtgcctgtgtggtgaggctgtg

SEQ ID NO: 26878 - DNA, 120 bp, synthetic construct
  source 1..120: mol_type = other DNA
tcccaaatctcttcatccctgttcttcacatcggtatatccaactacctacctgttggtcatctggacctaaggttccatatggccttaaatctgacacatccaaaactgagtatttcct

SEQ ID NO: 26879 - DNA, 120 bp, synthetic construct; identical to SEQ ID NO: 7738
  source 1..120: mol_type = other DNA

SEQ ID NO: 26880 - DNA, 120 bp, synthetic construct
  source 1..120: mol_type = other DNA
gaaacctcctgcatcctgagtgcctcatgtctcacgtatttagggtaccgtgaatatttagtgcctccttggtctttctgtcccttttgatctctgtacacacgaatatgttgtactatc

SEQ ID NO: 26881 - DNA, 120 bp, synthetic construct
  source 1..120: mol_type = other DNA
ttgagtttattgttttcctgtcttctacagcagaattggatattcccaaacaatcggcaagtctggtgtttatcctagagtgctgcctcccttcacaccccctagtttcaaacagtcagc

SEQ ID NO: 26882 - DNA, 120 bp, synthetic construct
  source 1..120: mol_type = other DNA
ccctccagtcttaagcatataaaatctgtcctccttgatataatcagagtgatctatccagaaatacatatcagaccgcatacctctctgctcttcctctaaggattccccttttgtcct

SEQ ID NO: 26883 - DNA, 120 bp, synthetic construct; identical to SEQ ID NO: 7739
  source 1..120: mol_type = other DNA

SEQ ID NO: 26884 - DNA, 120 bp, synthetic construct
  source 1..120: mol_type = other DNA
ggggccatctcttgtggacaagaatatgagccacattcttcatatatgagaaaattacaccaatctcagaggattagaggtcatgccaaaaaacacacctggtagttatgtttaaatata

SEQ ID NO: 26885 - DNA, 120 bp, synthetic construct
  source 1..120: mol_type = other DNA
aggagaatccctagaacccaggaggcggaggttgtagtgagccgagattgcaccactgcactccagcctgggcgactgagtgattctccgtctccaaatatatatatacacacacacaca

SEQ ID NO: 26886 - DNA, 120 bp, synthetic construct
  source 1..120: mol_type = other DNA
aagtgcagtggcacaatcatgaggcccaccccaacctctgcctcccaggctcaagcgatcctcccacctcagcctccagagtaactgggactacaggcgtgcaccaccacgcctggctaa

SEQ ID NO: 26887 - DNA, 120 bp, synthetic construct; identical to SEQ ID NO: 7740
  source 1..120: mol_type = other DNA

SEQ ID NO: 26888 - DNA, 120 bp, synthetic construct
  source 1..120: mol_type = other DNA
ggctcaggggaaggggagaggtgctaaataattaagcccccctactactcagcacccgcgtgaggcatcgtcaggcatcgtcaggcctccagtggtggtggtggcaccgggcctcaacct

SEQ ID NO: 26889 - DNA, 120 bp, synthetic construct
  source 1..120: mol_type = other DNA
gcggagcagagccccgcagtcactggcctgacttccggaacgaaccgtcgccagcaagcacagcagtaggaccagggggatgcaagagcgggggcggccggggatcgtgcttctcgctca

SEQ ID NO: 26890 - DNA, 120 bp, synthetic construct
  source 1..120: mol_type = other DNA
aggcgggactttccctttttcttgaaccccattgggttaagtccagtccgagacaagcgtctctcctcagcagtgggaggggtgatttggctcatccatacttaggaatttggggtttga

SEQ ID NO: 26891 - DNA, 120 bp, synthetic construct
  source 1..120: mol_type = other DNA
aaaaatacaaaaaaattagccgggtgtggtggcgggcacctgtagtcccagctactcgggaggctgaggcaggagaatggcgtgaacgctggaggcagagcttgcagtgagcagagatcg

SEQ ID NO: 26892 - DNA, 120 bp, synthetic construct; identical to SEQ ID NO: 7741
  source 1..120: mol_type = other DNA

SEQ ID NO: 26893 - DNA, 120 bp, synthetic construct
  source 1..120: mol_type = other DNA
ttgtctctccttggtcgctgtgcagtcgagtgtttttatgttcagacctcttcctgcccattttatttatttaatttattatttatttatttatttatattttttgatatggagtttcac

SEQ ID NO: 26894 - DNA, 120 bp, synthetic construct
  source 1..120: mol_type = other DNA
accataccccactaattttttgtatttttagtagagatggggtgtgtgtatacatatatatatatatatatatatagcaagtagtcaagagctagtctattttgatagatagcatttctc

SEQ ID NO: 26895 - DNA, 120 bp, synthetic construct
  source 1..120: mol_type = other DNA
atgagccatcttgtgtctaagtggcaggcctatagtattatataatttttttaggaggtcatttatcatctttccaattacctatggctatgcttcgtttttcgcaggaagcatagactg

SEQ ID NO: 26896 - DNA, 120 bp, synthetic construct; identical to SEQ ID NO: 7742
  source 1..120: mol_type = other DNA

SEQ ID NO: 26897 - DNA, 120 bp, synthetic construct
  source 1..120: mol_type = other DNA
cttgacagatacacttattttttttttactgtgtcactttttttttccaatttagagaaccgcatcctattccatgctgcttactatcaatagcggcacaagcaccaaattttaaggtta

SEQ ID NO: 26898 - DNA, 120 bp, synthetic construct
  source 1..120: mol_type = other DNA
taacacacatcaggttggttattccctgggctacataccttggatagcattatacaaacaagtttcttttagagtcctggtacacttatgataaccataaaataataggactgtagcaat

SEQ ID NO: 26899 - DNA, 120 bp, synthetic construct
  source 1..120: mol_type = other DNA
ttcctcatgcttcgcctgtgcgtggaccagtcagcttctgggtgtgactggagcagggcttgtctccttcttcagagtcactttgcaggggttggcaaagccgctcccatccacgtacag

SEQ ID NO: 26900 - DNA, 120 bp, synthetic construct; identical to SEQ ID NO: 7743
  source 1..120: mol_type = other DNA

SEQ ID NO: 26901 - DNA, 120 bp, synthetic construct
  source 1..120: mol_type = other DNA
tctagttgttttgagagataggcccctggccttgaccagggccctacagtctgggttaaaactccaactgtcattttttctctttctgacacacagagtgtaaagagttttgtcaggtca

SEQ ID NO: 26902 - DNA, 120 bp, synthetic construct
  source 1..120: mol_type = other DNA
aaatattgacttaaatcctgtaactatttgatttcaagctttaaattgatctggtattccttgtggggctccaattgcatttaagtagatgtgagaattgaaagacctataaggggcttc

SEQ ID NO: 26903 - DNA, 120 bp, synthetic construct
  source 1..120: mol_type = other DNA
aaggtccaccccgataccaccacacatcctctcggggatgaacaagggctgactgattgataagctcttggaaactcttaagctcactgcatcccttcaggtctccaaggaatgctaaat

SEQ ID NO: 26904 - DNA, 120 bp, synthetic construct; identical to SEQ ID NO: 7744
  source 1..120: mol_type = other DNA

SEQ ID NO: 26905 - DNA, 120 bp, synthetic construct
  source 1..120: mol_type = other DNA
ctctagtaaaatgaatgtttcctttagcatctatttttattagtttttagaccaaagaaagctaaacaccattttatatttaataatgcttcttgtatgatttttataccaggtaagcta

SEQ ID NO: 26906 - DNA, 120 bp, synthetic construct
  source 1..120: mol_type = other DNA
accttttataatttttgttaaagagcaggttgatgctttaagaaaaacctgtcacatttttactttaatgtccagttcacagaaaaactggatgatacctttttaactttagctaatatg

SEQ ID NO: 26907 - DNA, 120 bp, synthetic construct
  source 1..120: mol_type = other DNA
tttttaccaaaggtatattttacttttcttatacaccttgcacataaactgtttttttttttaaatagtactcaggaggccttattacttttaaattacacaatattttttgcataaatt

SEQ ID NO: 26908 - DNA, 120 bp, synthetic construct; identical to SEQ ID NO: 7745
  source 1..120: mol_type = other DNA

SEQ ID NO: 26909 - DNA, 120 bp, synthetic construct
  source 1..120: mol_type = other DNA
aattggtatagatggcctttttttctctctgctggtctttccttgcctctgccagatgcttatgctactgttctcttaactactgtagggggaagggggtctaaaaccagctgtaactgt

SEQ ID NO: 26910 - DNA, 120 bp, synthetic construct
  source 1..120: mol_type = other DNA
ctatttcacaagttctaagttttcctggtgtcacagtaacatcgtaatctcccttaaattctttcttgaaaaaaaattttttttaacatagttcctagtggggtgggcttatttgtgcct

SEQ ID NO: 26911 - DNA, 120 bp, synthetic construct
  source 1..120: mol_type = other DNA
ccaagccaggtcaaaaccaaaaccaaaaccaaagtatcacacaatctaagtcaagtcaaaaccagaataaaagtgccagtacaggcacaccatgggtgatcaggccatgcttccactcag

SEQ ID NO: 26912 - DNA, 120 bp, synthetic construct; identical to SEQ ID NO: 7746
  source 1..120: mol_type = other DNA

SEQ ID NO: 26913 - DNA, 120 bp, synthetic construct
  source 1..120: mol_type = other DNA
attcagctgcgagcatcggcaagctactgccttaaaatccaaactccctgaatgcacaatttctgtcccttttaaggtctcacaacactaaagatttcacatgaaagtgtcgtgattgat

SEQ ID NO: 26914 - DNA, 120 bp, synthetic construct
  source 1..120: mol_type = other DNA
gcgttctaagtcatgggttgatttttaactactgggtttaggccaggcaggcccaggcctggtttcgggcctggcgccaggctgcctgtctttggttttacttccttgttttttcttaaa

SEQ ID NO: 26915 - DNA, 120 bp, synthetic construct
  source 1..120: mol_type = other DNA
actaatctgtataccaaatccccatgacaggcaatttacttctataacaaacctgctcatgtaaaaggtttttggccgggcatggtggctcacgcctgtaatcccagcactttgggaggc

SEQ ID NO: 26916 - DNA, 120 bp, synthetic construct
  source 1..120: mol_type = other DNA
agctactcgggaggctgaggaaagggaatggcttgaacctgggagggggaggttgcagtgagtcgagatcatgccactgcactccaggctgggtgacagagtgagactgtgtctcaaaaa

SEQ ID NO: 26917 - DNA, 120 bp, synthetic construct; identical to SEQ ID NO: 7747
  source 1..120: mol_type = other DNA

SEQ ID NO: 26918 - DNA, 120 bp, synthetic construct
  source 1..120: mol_type = other DNA
accaccatgcctggctaattttttgtatttttagtagagatggggatttcaccatgttggccaggctggtctcaaatttctgacctcaggtgatctgcccacctcggcctcccagagtgc

SEQ ID NO: 26919 - DNA, 120 bp, synthetic construct
  source 1..120: mol_type = other DNA
gttaattccccttgtaattttttccatcatttatttacctttctccacagcagcctattcacctaacaataaactgagtgcccattatgtgccaagaactggagataaggatatgagtaa

SEQ ID NO: 26920 - DNA, 120 bp, synthetic construct
  source 1..120: mol_type = other DNA
ttgtttgtgcagcctgtttatcctctcctttggaacttcagtactcttttttttttttttgagacggagtcttgctctgttgcccaggctagagttcagtggtgtgatctcggctcactg

SEQ ID NO: 26921 - DNA, 120 bp, synthetic construct; identical to SEQ ID NO: 7748
  source 1..120: mol_type = other DNA

SEQ ID NO: 26922 - DNA, 120 bp, synthetic construct
  source 1..120: mol_type = other DNA
aggtagctgggactacaggcatgtgccactacgcccagctaatttcttgtatttttagtagagatggggttttactgtgttagccaggatagtctcgatctcctgacctcgtggtccact

SEQ ID NO: 26923 - DNA, 120 bp, synthetic construct
  source 1..120: mol_type = other DNA
actcctgacctcaggtgatccttccacctcggcctcctaaaatgctgagattacaggtgtgagccaccacacctggcacaattatcttatttattatcattattatttttgagacggagt

SEQ ID NO: 26924 - DNA, 120 bp, synthetic construct
  source 1..120: mol_type = other DNA
ctgccaccaccctcggctaattttgtatttttggtagagacagggtttctccatgtgggccaggctagtctcaaactcctgacctcaggtgatccgcccacctcggcctcccaaagtgct

SEQ ID NO: 26925 - DNA, 120 bp, synthetic construct; identical to SEQ ID NO: 7749
  source 1..120: mol_type = other DNA

SEQ ID NO: 26926 - DNA, 120 bp, synthetic construct
  source 1..120: mol_type = other DNA
ggtcaagcgattttcctctctcagcctcctgagtagctgggactacaggtacacaccacacacctggatgatttttgtatttgcttgcagagacagggtttcgccaggctggtctcaaat

SEQ ID NO: 26927 - DNA, 120 bp, synthetic construct
  source 1..120: mol_type = other DNA
ttttaaaatttcaccatttacaaaaagtgaaatgatcagatctttagcaaatccatcaatgaattttgacaagtacatgtcacccacacccctgtcaagatatagaaagttctctttgcc

SEQ ID NO: 26928 - DNA, 120 bp, synthetic construct
  source 1..120: mol_type = other DNA
tgcaatggcacgatctcggctcactgcaacctctgcctcctgggttcaagagattctcctgcctcagcctcctgagtagctgggagtacaggtgtgagccaccatgactggctaattttg

SEQ ID NO: 26929 - DNA, 120 bp, synthetic construct; identical to SEQ ID NO: 7750
  source 1..120: mol_type = other DNA

SEQ ID NO: 26930 - DNA, 120 bp, synthetic construct
  source 1..120: mol_type = other DNA
gcatttcttctgcctcagccccctgagtagctggaactacaggtgtgtgcaccaccacgcctggctaatttttgtatttttagtacagatgggatttcccagctactccagaggctgagg

SEQ ID NO: 26931 - DNA, 120 bp, synthetic construct
  source 1..120: mol_type = other DNA
cacacctgtggtcccagctagtggggagcccaagagttcaagccttcagtgagtggtagtcatactagtataccccagcctgggtgacagagtgaaaccttgtctcagaaagaaaaaaaa

SEQ ID NO: 26932 - DNA, 120 bp, synthetic construct
  source 1..120: mol_type = other DNA
atatttgcttgcatatgcataaaacgtctaagtttgtttggtttttttgggacagaatctgactgtcacccaggctggagtgcaatggtgcaatctcagctcactgcaacctccgcctcc

SEQ ID NO: 26933 - DNA, 120 bp, synthetic construct; identical to SEQ ID NO: 7751
  source 1..120: mol_type = other DNA

SEQ ID NO: 26934 - DNA, 120 bp, synthetic construct
  source 1..120: mol_type = other DNA
ctgcctcagcctcccaagtagctgggattacagatgcccaccaccacacccgactaatttttgtatttttagtagagacgggggtttcatcatgttggccaggctggtctcgaactcttg

SEQ ID NO: 26935 - DNA, 120 bp, synthetic construct
  source 1..120: mol_type = other DNA
aacacaaaaggtaattccaaggaggaaaaaaacccaaaaaactcatagtgaaaatttaagaaaaaaactcagcctgatagaattctcttaccttcattaagagaaaacaaaaattgtagc

SEQ ID NO: 26936 - DNA, 120 bp, synthetic construct
  source 1..120: mol_type = other DNA
taaaaatacaaaaaattagccaggtgtggtggcgggcacctatagtcccagctactcaggaggctgaggcaggagaatggcgtaaacccgggaggcagagcttgcagtgagccaagatcg

SEQ ID NO: 26937 - DNA, 120 bp, synthetic construct; identical to SEQ ID NO: 7752
  source 1..120: mol_type = other DNA

SEQ ID NO: 26938 - DNA, 120 bp, synthetic construct
  source 1..120: mol_type = other DNA
aggcatgagccactgctcccagccaaaccgcagtctttacaagggattcttttttttttttttttctgatggagttttgctgttgttgcccaggctggaatgcaaggatgcaatcttggc

SEQ ID NO: 26939 - DNA, 120 bp, synthetic construct
  source 1..120: mol_type = other DNA
atgttggcccggctggtctcgaactcctgacctcagatgatccaccctccgcggtctcccaaagtgctgtgattacaggtgtgagccaccatgcctggcctttacaagggattctaatgg

SEQ ID NO: 26940 - DNA, 120 bp, synthetic construct
  source 1..120: mol_type = other DNA
ttgccaacttttcaagattcttatttatttatttatttttttttttggagacagagtctcgctctgttgccccatctggagtgcagtggtgcaatcttctcggttcactgcaacctccgc

SEQ ID NO: 26941 - DNA, 120 bp, synthetic construct; identical to SEQ ID NO: 7753
  source 1..120: mol_type = other DNA

SEQ ID NO: 26942 - DNA, 120 bp, synthetic construct
  source 1..120: mol_type = other DNA
ggcgtgcgcaaccaaagattctcattcttagcccattctgttatccctatgagtctgctaatagttgtcatactaggtcaccctgtatttggatcagaaggtacggtaggagcgcctagg

SEQ ID NO: 26943 - DNA, 120 bp, synthetic construct
  source 1..120: mol_type = other DNA
gagggtgtgggggccagactgtgtagtggcaggaaccccaggtgctgtgtgaagcagagagcatgcatcaccctctgacccacattcagtttcttcctaggtgtctgcaattcccgggac

SEQ ID NO: 26944 - DNA, 120 bp, synthetic construct
  source 1..120: mol_type = other DNA
ttctgcctcatagtgctctcccagtcctcttctgttattagagatcaaaccaggttgctttagggcagtgattctcaaagtgtagtcctgggacaaacagcactggcatcacctggaaac

SEQ ID NO: 26945 - DNA, 120 bp, synthetic construct
  source 1..120: mol_type = other DNA
ggtgaaaccctgtctctactaaaaatacaaaaaattagccgagcgtggtggcaggcgtctgtaatcccagctacctgggaggctgagacaggagaatcacttgaacccgggaggcggagg

SEQ ID NO: 26946 - DNA, 120 bp, synthetic construct; identical to SEQ ID NO: 7754
  source 1..120: mol_type = other DNA

SEQ ID NO: 26947 - DNA, 120 bp, synthetic construct
  source 1..120: mol_type = other DNA
tctcttgtcccaggtgcctgttgggctcctacttacacctcaaaacatagcttgaacattgtctcttttgtgaactttctgtgactcctaggtcagagaagatggtctacttgtgagttt

SEQ ID NO: 26948 - DNA, 120 bp, synthetic construct
  source 1..120: mol_type = other DNA
ccagctccttaaacacaatgcctggcacgtggtaggtatttgataaatatttattcaatgaaggaactgcctgcaatggcctggtagacaggaaagcggaatgaaagcaggtcaaaagtg

SEQ ID NO: 26949 - DNA, 120 bp, synthetic construct
  source 1..120: mol_type = other DNA
acttagtcacacactacctttcaggactaccttccacatcagccaggtgcaaaccccacaatgacttctgccatggctcccaatgcttggctgcaactctgaggccaatttcagtgagag

SEQ ID NO: 26950 - DNA, 120 bp, synthetic construct; identical to SEQ ID NO: 7755
  source 1..120: mol_type = other DNA

SEQ ID NO: 26951 - DNA, 120 bp, synthetic construct
  source 1..120: mol_type = other DNA
gccctcgcttgctctccccgcctcctctgcctgggctcctactttggcggcacttgaggagcccttcagcccaccgctgcactgtgggagcccctttctgggctggccaaggccggagcc

SEQ ID NO: 26952 - DNA, 120 bp, synthetic construct
  source 1..120: mol_type = other DNA
cggagcagccggccagccctgctggcccctggcaatgagggacttagcacccgggccagcagctgcggagggtgtactgggtcccccagcagtgccagcccaccagcgctgcgctcgatt

SEQ ID NO: 26953 - DNA, 120 bp, synthetic construct
  source 1..120: mol_type = other DNA
accccctgctccacggcgcccagtcccatcgaccacccaagggctgaggaatgcaagcgcaccgtgcgggactggtaggcagctccacctgcagccccggtgcgggatccactaagtgaa

SEQ ID NO: 26954 - DNA, 120 bp, synthetic construct; identical to SEQ ID NO: 7756
  source 1..120: mol_type = other DNA

SEQ ID NO: 26955 - DNA, 120 bp, synthetic construct
  source 1..120: mol_type = other DNA
gagaacctttgtgtctagctcagggattgcaaacgcaccaatcagcaccctgtcaaaacagaccactcggctctaccaatcagcaggatgtgggtggggccagataagagaataaaagca

SEQ ID NO: 26956 - DNA, 120 bp, synthetic construct
  source 1..120: mol_type = other DNA
gagctgtaacactcactgtgaaggtctacagcttcactcctgaagccagcaagaccaaaagcccaccgggagaaacaaacaactccagacgtgccgccttaagagctataacactgaccg

SEQ ID NO: 26957 - DNA, 120 bp, synthetic construct
  source 1..120: mol_type = other DNA
aacactcaccgcgagggtccacagtttcattcttgaagtcagtgagatcaagaacccaccaattccggacacaaaacttgcttaattacagaaaatatgaaaagtatataaaagcagggt

SEQ ID NO: 26958 - DNA, 120 bp, synthetic construct; identical to SEQ ID NO: 7757
  source 1..120: mol_type = other DNA

SEQ ID NO: 26959 - DNA, 120 bp, synthetic construct
  source 1..120: mol_type = other DNA
gctggtctagtatcatttcagtgaacgtcactctacattttttgtgtgtgtgtgagatggagtctctgtcgcccaggctggagtgcagtggcgcgatctcggctccctgcaagctccgcc

SEQ ID NO: 26960 - DNA, 120 bp, synthetic construct
  source 1..120: mol_type = other DNA
agctggtctcgaactcctgacctcaagtgatccgcccgccatggtctcccaaagtgccgggattacagacgtgagccaccgcgctcggctgtcactgcagactttgatgggggccacact

SEQ ID NO: 26961 - DNA, 120 bp, synthetic construct
  source 1..120: mol_type = other DNA
gggcgctgccttcctggggtgacgcagcagcaggaagagtttccggatcctggaatccgtgggcggcccgtgggaggggctgaggctcatttctctactcacctgtctccgaatccgtcg

SEQ ID NO: 26962 - DNA, 120 bp, synthetic construct; identical to SEQ ID NO: 7758
  source 1..120: mol_type = other DNA

SEQ ID NO: 26963 - DNA, 120 bp, synthetic construct
  source 1..120: mol_type = other DNA
ccgtttctcttttttttccggaccccgcagtggcgcctaaagtctgcaaggaggaggtcgcctctgtgctgtgggtccaggaatctaaggcgagtgctgagggagaaaatgtagttgatg

SEQ ID NO: 26964 - DNA, 120 bp, synthetic construct
  source 1..120: mol_type = other DNA
cccggagccgaagaccatctcagctttccctagcccagaaagggtgggactggctttatttctgcctgccatcacctcaaaatgccgtgggacaaatcttacatattattattgttattt

SEQ ID NO: 26965 - DNA, 120 bp, synthetic construct
  source 1..120: mol_type = other DNA
cagcctcccaagtagctgcgattacaggcaccccccaccacgcccggctgatttttatatttttagtagagacggggttttgccatgttgtccaggctagtctcgaactcctgaccttag

SEQ ID NO: 26966 - DNA, 120 bp, synthetic construct; identical to SEQ ID NO: 7759
  source 1..120: mol_type = other DNA

SEQ ID NO: 26967 - DNA, 120 bp, synthetic construct
  source 1..120: mol_type = other DNA
acagagtgaggccctgtgtcaaaaaataagaaagaaagaagagagagagagaggaagggagggagggagggagttgaggttcagaatatgtaacagtgtttattgctatactccattcaa

SEQ ID NO: 26968 - DNA, 120 bp, synthetic construct
  source 1..120: mol_type = other DNA
ggtcaacatggtgaaacctcgtttctactaaaaatacaaaaattaccctggcatggtggcacacgcctgtaatctcagttacttgggaggctgaggcaggagaatcacttgaacttggga

SEQ ID NO: 26969 - DNA, 120 bp, synthetic construct
  source 1..120: mol_type = other DNA
gtgggtattttcattcataattgtcagattactttcataaacaatggaaacagtttcaggctcctcagcttctcacctccaaaatgggccttttcctgtatcattaacagtcctcaatgt

SEQ ID NO: 26970 - DNA, 120 bp, synthetic construct; identical to SEQ ID NO: 7760
  source 1..120: mol_type = other DNA

SEQ ID NO: 26971 - DNA, 120 bp, synthetic construct
  source 1..120: mol_type = other DNA
caggcatcttctttattctggaatgagcctgcccatccctcaggaagactgaaaggaattcggtcagaagaatattattgacttttatccagacttgatttcagtagagttctgggacct

SEQ ID NO: 26972 - DNA, 120 bp, synthetic construct
  source 1..120: mol_type = other DNA
aattttacaacctgctgtagcatctttgctcccactgtgacagtaaactccttgagactggtggccatcttgggaagtgattagattcagaagaggttgagaggttggggcccccatgat

SEQ ID NO: 26973 - DNA, 120 bp, synthetic construct
  source 1..120: mol_type = other DNA
atctgctggttccctaacctcagatttccagggtccagaattgtgagaaagaaatgtctgttgttaaccaatccatctgtggtgttttgttatggcagcacaagctgactaaacaagtgc

SEQ ID NO: 26974 - DNA, 120 bp, synthetic construct; identical to SEQ ID NO: 7761
  source 1..120: mol_type = other DNA

SEQ ID NO: 26975 - DNA, 120 bp, synthetic construct
  source 1..120: mol_type = other DNA
accagcctggccagcatgatgaaaccctgtttctactaaaaatacaaaaattagctgggcgtggtggtaggtgcctgtaatcccagctgcttgggaggctgaggcaggagaatcgcttga

SEQ ID NO: 26976 - DNA, 120 bp, synthetic construct
  source 1..120: mol_type = other DNA
ctttatattatctctcattctgtgggctgattgggctcagctgggcagctcttccgctccatacaacatgggctgggccaccatcatctggagcccagctggtccaacacattcaagagg

SEQ ID NO: 26977 - DNA, 120 bp, synthetic construct
  source 1..120: mol_type = other DNA
tgcacctggggtccgggtgtttcaagtggccaagtcagaaccacaaggcatcttatgctggaacctcagaagtcaggcagcatcacgttcctcatgttctagtcaccaaagcaagtccca

SEQ ID NO: 26978 - DNA, 120 bp, synthetic construct; identical to SEQ ID NO: 7762
  source 1..120: mol_type = other DNA

SEQ ID NO: 26979 - DNA, 120 bp, synthetic construct
  source 1..120: mol_type = other DNA
ggtgaaggttgcagtgagccaatatcgcaccactgccctccagcctggtgacagagcaagactccacctcaaaaaaaaagaaaaaaagtaaaaaaaaaaaaatgcaaagttgacaatcaa

SEQ ID NO: 26980 - DNA, 120 bp, synthetic construct
  source 1..120: mol_type = other DNA
ccttccagaatcaccctcatgtacacctatgctctgtacatacccagggctctgcactgaggcagaccctaaagctgcagtgggaatggaggtggacacacttatggaaagacttcttca

SEQ ID NO: 26981 - DNA, 120 bp, synthetic construct
  source 1..120: mol_type = other DNA
tcccaccctcactccacctctctgctctctgtctcctacatcgagtgcctccttccccagggcttgtggtccctgacaaggaggaccctgagggcaaccacaccttgccatgcagagcac

SEQ ID NO: 26982 - DNA, 120 bp, synthetic construct; identical to SEQ ID NO: 7763
  source 1..120: mol_type = other DNA

SEQ ID NO: 26983 - DNA, 120 bp, synthetic construct
  source 1..120: mol_type = other DNA
ttatttggaaatttttctcactctaaccttccttcctgccgcaccttctgccccatccccaggctctggcctctctctctcctcttctaccctttagcaggtaatgactcagttcccact

SEQ ID NO: 26984 - DNA, 120 bp, synthetic construct
  source 1..120: mol_type = other DNA
gaggcgataaagacagatgtttccgtattaccatttttctttcatggtccgagggagctgcccttcccccaagcccaggaaagtgaaaagagaagcaggaacagtaaaatactccacagg

SEQ ID NO: 26985 - DNA, 120 bp, synthetic construct
  source 1..120: mol_type = other DNA
agaataaaattatcaatgtctcagctctgcaggctgaaaaaacggaggctttacaaaataaaatcatgcttggaaaacttctcctctgagggatgtcaaaggctgcactgaataagctct

SEQ ID NO: 26986 - DNA, 120 bp, synthetic construct
  source 1..120: mol_type = other DNA
ctcaggcaggtgttggaattgaggaagtataggtaatgaaaaaagtaaacatgtcctcgggacatagcgactggtgatgaccacacaatcaacacaataaactctagcattcacattgta

SEQ ID NO: 26987 - DNA, 120 bp, synthetic construct; identical to SEQ ID NO: 7764
  source 1..120: mol_type = other DNA

SEQ ID NO: 26988 - DNA, 120 bp, synthetic construct
  source 1..120: mol_type = other DNA
agcagcccaccctgaatcctctcagggtgtacagtttattttgcacttaactttcaaaataatatttttcctttgtaataaattgctttgtacttcatctcctttgctgcgtgtttcttg

SEQ ID NO: 26989 - DNA, 120 bp, synthetic construct
  source 1..120: mol_type = other DNA
tttaaattcttttaaatgaagaagtcaagaaccaaggtattacaacagccgtcaacatttccggtgccatgactcagaggtttgtctgcttcgttggtttcagtttcccttcactactgg

SEQ ID NO: 26990 - DNA, 120 bp, synthetic construct
  source 1..120: mol_type = other DNA
tttccatttggctgctgcttttacagtgtttacaattaccttatttggatggaacgccctgattattcagccttgggacttttgctgcttctgtttcactttttgttttgctgttcctcc

SEQ ID NO: 26991 - DNA, 120 bp, synthetic construct
  source 1..120: mol_type = other DNA
gcaacctccacctcctgggctcaagcgattctcctgcctcagcctcccaagtagctgggattacaggcgtgcaccatcacgcccggctaatttttgtattttcaatagagtcggggtctc

SEQ ID NO: 26992 - DNA, 120 bp, synthetic construct; identical to SEQ ID NO: 7765
  source 1..120: mol_type = other DNA

SEQ ID NO: 26993 - DNA, 120 bp, synthetic construct
  source 1..120: mol_type = other DNA
tggacattaaaaatggcagatcagtgaaataaggaagggcttgttggtgagacatccaggctccccggctggcagcagagatcacttcagttcagcttggagacgtccagcaccagtgag

SEQ ID NO: 26994 - DNA, 120 bp, synthetic construct; identical to SEQ ID NO: 1884
  source 1..120: mol_type = other DNA

SEQ ID NO: 26995 - DNA, 120 bp, synthetic construct
  source 1..120: mol_type = other DNA
gaaaccccatctctactaaaaatacaaaattagctgggcatggcggcacattcctgtaatcccagctactcgggaggctgaggcaggagaattgcttgaaccaggaggcggaggttgcag

SEQ ID NO: 26996 - DNA, 120 bp, synthetic construct; identical to SEQ ID NO: 7766
  source 1..120: mol_type = other DNA

SEQ ID NO: 26997 - DNA, 120 bp, synthetic construct
  source 1..120: mol_type = other DNA
ctggcagggcttccgtccaggctgtgcactgtctgggaatcctcatttgcaatgtctggagatcttcatttttcttactactaacaatcatcttgttatgtttgcacttctttgcatttc

SEQ ID NO: 26998 - DNA, 120 bp, synthetic construct
  source 1..120: mol_type = other DNA
ctttttctctctaacccgtaagactgataaaaattgtcctaaagtttctttctttctgctttgtgtgtcagggctcctctgcctttggtgagagcagagttttatctttaccggaagaaa

SEQ ID NO: 26999 - DNA, 120 bp, synthetic construct
  source 1..120: mol_type = other DNA
cagcctcccgagtagctgggactacaggtgtgtgccaccacgcctggctaatttttttgtatttttagtagagatggggtttcaccatattggccagactgctctggaactcctgacctc

SEQ ID NO: 27000 - DNA, 120 bp, synthetic construct
  source 1..120: mol_type = other DNA
attgctgggtgaaatatattttctaccaaattccccttacgagacctagaaagcctaatgaacatagctacttacatgtcctaagctgttattttaaggccaaaattaaaacattaaggg

SEQ ID NO: 27001 - DNA, 120 bp, synthetic construct; identical to SEQ ID NO: 7767
  source 1..120: mol_type = other DNA

SEQ ID NO: 27002 - DNA, 120 bp, synthetic construct
  source 1..120: mol_type = other DNA
ttagctgggcatggtggcacgtgcctgtagtcccagctactcgggaggctgaggcaggagaatcactggaacctgggaggcagaggttgcagtgagacaagattcagccactgcactcta

SEQ ID NO: 27003 - DNA, 120 bp, synthetic construct
  source 1..120: mol_type = other DNA
aagggcccaggggaacctgacattattccccctactaaccagacagctctatactaagaccagtcccttagagactgataccaaatctattatgctcatgttattcaaaagaatttggga

SEQ ID NO: 27004 - DNA, 120 bp, synthetic construct
  source 1..120: mol_type = other DNA
gaccagcctgaccaacatggtgaaaccccatctctactaaaaatacaaacattagccaggcgtggtggcttgcacctataatcccagctactcaggaggctgaggcaagataatcacttg

SEQ ID NO: 27005 - DNA, 120 bp, synthetic construct
  source 1..120: mol_type = other DNA
ataataagaaatataccagctgggtgcaacagtggccctttgggaggccaaggtgggtggatcacttgaggttaggagttcgagaccagcctggccaacatggtgaaaccctgtctctac

SEQ ID NO: 27006 - DNA, 120 bp, synthetic construct; identical to SEQ ID NO: 7768
  source 1..120: mol_type = other DNA

SEQ ID NO: 27007 - DNA, 120 bp, synthetic construct
  source 1..120: mol_type = other DNA
acaactcatagcagagtatcctattgcccccctaaaacaaaaagcaacctactctcactctctatctgtatctccctctctcaggtaacacacagaaaaacaaccaaatcctcttagaga

SEQ ID NO: 27008 - DNA, 120 bp, synthetic construct
  source 1..120: mol_type = other DNA
aactgctaaacctaacttttggtgtctttaattaccaagacagagtggaaaaggcacatagagatcaaagggaagaaaagagagacaaaagatagtcccaatttttggccttcactcact

SEQ ID NO: 27009 - DNA, 120 bp, synthetic construct
  source 1..120: mol_type = other DNA
ctggagcctgtcatcaatgtgacaaagaagggcaatggaagaaggactgtctccaactctgaagggaggagggactcctaattccttattgtccctggctaaagactaaagagaccaaag

SEQ ID NO: 27010 - DNA, 120 bp, synthetic construct; identical to SEQ ID NO: 7769
  source 1..120: mol_type = other DNA

SEQ ID NO: 27011 - DNA, 120 bp, synthetic construct
  source 1..120: mol_type = other DNA
agactccaagctattcctatgaagcactggaggatctaaggctcctgtccaaaaacagccaagacccaaaacatcaggcaattaatgttgcctcagcataagcttctattcaagaaaaca

SEQ ID NO: 27012 - DNA, 120 bp, synthetic construct
  source 1..120: mol_type = other DNA
attaactcagtcttgctggctttgcatgactaccaaaatttaaaaatgtgcaaaacctgtttctcgggaagaatgggccaacattcctatacacctcctggaacaaactttggaccataa

SEQ ID NO: 27013 - DNA, 120 bp, synthetic construct
  source 1..120: mol_type = other DNA
tttcttaccttgctttttacccagagcaattccccttctgcctttacagcaaccatgccagtttcactccttttatagaaaaactccacaagagagtcagtatatctaaacctttctcac

SEQ ID NO: 27014 - DNA, 120 bp, synthetic construct; identical to SEQ ID NO: 7770
  source 1..120: mol_type = other DNA

SEQ ID NO: 27015 - DNA, 120 bp, synthetic construct
  source 1..120: mol_type = other DNA
ttagctagatatggtggcatgtgcctgtaatcccagctactcaggaggctgaggcaggagaatcgcttgaaccagggagtcggaggttgcaatgagctgagatcgcactactgtactcca

SEQ ID NO: 27016 - DNA, 120 bp, synthetic construct
  source 1..120: mol_type = other DNA
tacatttccccttatctaccttttgcgttggctaacaaatctctccctttccccatgtaccaacatcacaagatccaccgctgagcaggattccttgttcccttgggattaatgctatcc

SEQ ID NO: 27017 - DNA, 120 bp, synthetic construct
  source 1..120: mol_type = other DNA
aacagctggacttcctggcagtcctacaaaaccgaagagccttagaccttctcacagttggacaacgaggaacatgtttgtatctagaagaagaatgttgttttcgcatcaatcaaatta

SEQ ID NO: 27018 - DNA, 120 bp, synthetic construct; identical to SEQ ID NO: 7771
  source 1..120: mol_type = other DNA

SEQ ID NO: 27019 - DNA, 120 bp, synthetic construct
  source 1..120: mol_type = other DNA
ggcagaggttgcagtgagctgagagctgagatcactccattgcactccagcctgggcatcagagccagactgtctcaaaaaaaaaaaaaaattgctgatttcttgctttgtcacctacag

SEQ ID NO: 27020 - DNA, 120 bp, synthetic construct
  source 1..120: mol_type = other DNA
ggaaaagacttcagggcccaggttaggcaaggacaatgccgcactcagcaggaagcagctctggaagaaatgacctagcctctcatcctcccgtatgattatgggtcctaagatctttta

SEQ ID NO: 27021 - DNA, 120 bp, synthetic construct
  source 1..120: mol_type = other DNA
tcaagcaaagctatctccagtagggaatttaccctgtagagagcatgcgcattttgattttacctaccgtcaaactgacccttagctcattacaatagtaagaaacacacacctgggtgg

SEQ ID NO: 27022 - DNA, 120 bp, synthetic construct; identical to SEQ ID NO: 7772
  source 1..120: mol_type = other DNA

SEQ ID NO: 27023 - DNA, 120 bp, synthetic construct
  source 1..120: mol_type = other DNA
agaggtatcacagatgtcatcaacagaacctctatgtcctccttaggaaagtgaaatgagcacccaatgcccagattttggttataatacatcaatctccaatagaaggaaccagggctc

SEQ ID NO: 27024 - DNA, 120 bp, synthetic construct
  source 1..120: mol_type = other DNA
ggaggctgaggcaggcgaatcacaaggtcaggaattcgagaccagcctggtcaacatggtgaaaccccatctctactaaaaatacaaaaaattagccaggcgtagtggtgggcacctgta

SEQ ID NO: 27025 - DNA, 120 bp, synthetic construct
  source 1..120: mol_type = other DNA
tcccagtcaaaaccccaggacgttattttgtgtatactcacaagctgatttaaaaatttatatggagaggccgggcacagtggctcatgcctgtaatcccagcactttgggaggccgagg

SEQ ID NO: 27026 - DNA, 120 bp, synthetic construct; identical to SEQ ID NO: 7773
  source 1..120: mol_type = other DNA

SEQ ID NO: 27027 - DNA, 120 bp, synthetic construct
  source 1..120: mol_type = other DNA
agacagataattggtatagtcattgctggaaggagtatgaaggttcctcaaaaaattaaaatatagaactaccatatgatccagcaatcctaccactgaatatatattcaaaggatataa

SEQ ID NO: 27028 - DNA, 120 bp, synthetic construct
  source 1..120: mol_type = other DNA
gtggtcatcttgcctcagcctcctgagtagctggattccatgtgcgagccaccacacctggctgcagtgttattctcaagagccaagatatggaatcaacctaagtatccattaatggat

SEQ ID NO: 27029 - DNA, 120 bp, synthetic construct
  source 1..120: mol_type = other DNA
tctcacatatatgtggaatgtaaaaaaagccaaactcatatacatggtgagtaaaccggtagttgtcagaggctgggaggtgggaggattggggaggggtaagcaaatgacacaaaattt

SEQ ID NO: 27030 - DNA, 120 bp, synthetic construct
  source 1..120: mol_type = other DNA
agagactagcctgggcaacatggtgaaaccctgtctctactaaaatacaaaagaaattagccgggtgtcgtggcatgcgcctgtagtcccagctactcgggaggctgagacaggagaatt

SEQ ID NO: 27031 - DNA, 120 bp, synthetic construct; identical to SEQ ID NO: 7774
  source 1..120: mol_type = other DNA

SEQ ID NO: 27032 - DNA, 120 bp, synthetic construct
  source 1..120: mol_type = other DNA
ggattacaggcatgagccatcatgcccgaccaacacaaaatttcaattagataggaagaataagtttaagagatctattgtactttatggtgattaaacttagtaaccacatattgtata

SEQ ID NO: 27033 - DNA, 120 bp, synthetic construct
  source 1..120: mol_type = other DNA
gctatacacccaaatataacttttatttgtcaaccaaaataatttaatttaaaaaagacagtgttgtattggcaaaagaatagacaaatagatcaatgaaacagaatagagaaccaagaa

SEQ ID NO: 27034 - DNA, 120 bp, synthetic construct
  source 1..120: mol_type = other DNA
agctctcttgaaaggttgttgtgaaggtcatctgtgacaggaacaaaaagtgcccagcagggtctctgacagcaagctcctacattaatctaatggctggacttcaatagccttagcccc

SEQ ID NO: 27035 - DNA, 120 bp, synthetic construct
  source 1..120: mol_type = other DNA
tacattaatctaatggctggacttcaatagccttagccccgtctccataaaactttgctatgaaggctacaatgattcctgtcagtcatgcagtcctactaacctgctgggtaggataca

SEQ ID NO: 27036 - DNA, 120 bp, synthetic construct; identical to SEQ ID NO: 7775
  source 1..120: mol_type = other DNA

SEQ ID NO: 27037 - DNA, 120 bp, synthetic construct
  source 1..120: mol_type = other DNA
tgggggccttcctgtagtgtcatcccatggtgaaagaggtagggcaaaggggccaaacatactttttatcaggagcccactcccacaataatgacattaatctattcaacctaatcaact

SEQ ID NO: 27038 - DNA, 120 bp, synthetic construct
  source 1..120: mol_type = other DNA
tgagtaaaataaggctgaaccctactgggccacattcccagacggttaaggcattctaagtcataggatgagacagaaggtcagcacaagatacaggtcctaaagaccttgctgataaaa

SEQ ID NO: 27039 - DNA, 120 bp, synthetic construct
  source 1..120: mol_type = other DNA
acactcccaccagcaccatgacagtttacaaatgctgtggcaacgacaggaagttactctatatggtctaaaaagggaaggcataaataacccaccccttgtttagcatatcatcaagaa

SEQ ID NO: 27040 - DNA, 120 bp, synthetic construct; identical to SEQ ID NO: 7776
  source 1..120: mol_type = other DNA

SEQ ID NO: 27041 - DNA, 120 bp, synthetic construct
  source 1..120: mol_type = other DNA
attacaggcatgtgccaccatgcctggctaattttgtatttttggtagagatggggtttctccatgttggtcaggctggtcccaacctcaggtgatcctcctgccttggcttcccaaagt

SEQ ID NO: 27042 - DNA, 120 bp, synthetic construct
  source 1..120: mol_type = other DNA
cccagcactttcttaagttcttacagatgaacaaagctaatattcacagattctatttatttatggcttaggactacctactgtaaattactgggggccagtccattttggagttcataa

SEQ ID NO: 27043 - DNA, 120 bp, synthetic construct
  source 1..120: mol_type = other DNA
aaaggttcagcttcttcaacttccttgttctttgttttctatttctaaaacccaacttccttgtactctcttgttcctagttacccgctctgtaaacaccaactcccaccagttccaatc

SEQ ID NO: 27044 - DNA, 120 bp, synthetic construct; identical to SEQ ID NO: 7777
  source 1..120: mol_type = other DNA

SEQ ID NO: 27045 - DNA, 120 bp, synthetic construct
  source 1..120: mol_type = other DNA
ccttctgcagaagtaaacttgccttgctgagaaatccttttgtttgagtgcttgtcttctttgcgactccaagctcttgtttttttttttctaaatagctgctatctttttgtttttgtt

SEQ ID NO: 27046 - DNA, 120 bp, synthetic construct
  source 1..120: mol_type = other DNA
ctcccgagtagctgggattacaggtgtgtgccaccatgcctggctaattttttgtatctttagtacagatggggtttctccatgttggccaggctggtcttgaactcctgacctcatgat

SEQ ID NO: 27047 - DNA, 120 bp, synthetic construct
  source 1..120: mol_type = other DNA
gtgtgatcttggctcactgcaacctctgcctcctgcctcagcctcccgagtagctgggatgacaggtgcctgccaccatgcctggccaatttttgtatttttagtaaagacagggttttg

SEQ ID NO: 27048 - DNA, 120 bp, synthetic construct; identical to SEQ ID NO: 7778
  source 1..120: mol_type = other DNA

SEQ ID NO: 27049 - DNA, 120 bp, synthetic construct
  source 1..120: mol_type = other DNA
cttgtgaggctgtgattagtccttagtgaatctacattttacatgtgaaaagaagggagggaggaagaagtcagttatgcattcacatcatgttcagtaaatctatattttacataagct

SEQ ID NO: 27050 - DNA, 120 bp, synthetic construct
  source 1..120: mol_type = other DNA
cttttcacatttctcccttgttattcaaaatctttcagagaaagcatggtagaagaaaatgggtgtctgctcatgggtttagtctaacctcttctgctagaatgatttattcctggaaga

SEQ ID NO: 27051 - DNA, 120 bp, synthetic construct
  source 1..120: mol_type = other DNA
aaaaagagaaacaaaagggagggaccaagaccagattatagaaacaaatggaatgcaatcctggaaaagtaatttaggatatgctaccgagaagtccatacttcagtaggcaggcacaaa

SEQ ID NO: 27052 - DNA, 120 bp, synthetic construct
  source 1..120: mol_type = other DNA
acattttataggtgaaaagaagggagtagagaaaaaatctattatgcatttgtcttgcacttagtaagtctacattgtacataagaaaaagtaagcttgtgaaaatacagttatctgcaa

SEQ ID NO: 27053 - DNA, 120 bp, synthetic construct; identical to SEQ ID NO: 7779
  source 1..120: mol_type = other DNA

SEQ ID NO: 27054 - DNA, 120 bp, synthetic construct
  source 1..120: mol_type = other DNA
accaacgtatctgcaaaataagttttagtcttattatacttggtctgattatttgcataaagcgcagcaagaataattattggccaataggctcttttttttttttgagacagagtttcc

SEQ ID NO: 27055 - DNA, 120 bp, synthetic construct
  source 1..120: mol_type = other DNA
caccaagcccagctaattttgtatttttagtcaggacggggttactccatgtttgtcaagctggtctcgaactcccaacctcaggtgatccatccgccttggcttcccaaagttctggga

SEQ ID NO: 27056 - DNA, 120 bp, synthetic construct
  source 1..120: mol_type = other DNA
ctgcagatacttgtatgaatgaggtaaatttctgtcttctcaaggtctcaaaataacgtgtggttcctaggtctgtgagaaagtgatattcttacttactacctgtcaggaaccctgtaa

SEQ ID NO: 27057 - DNA, 120 bp, synthetic construct; identical to SEQ ID NO: 7780
  source 1..120: mol_type = other DNA

SEQ ID NO: 27058 - DNA, 120 bp, synthetic construct
  source 1..120: mol_type = other DNA
ctaaaaatacaaaaattagccaggcgtggtggcgggtgcctgtaattccagctactcaggaggctgagacaggagaatcacttgaacccgggaagcagacattgcagtgagctgagatcg

SEQ ID NO: 27059 - DNA, 120 bp, synthetic construct
  source 1..120: mol_type = other DNA
gcctcaaattttgcttacaagagtacgcttcattgtgaaaagctgtaaatgttcaaaagaaaagttttcttgactctgaaaaacaaagcaaaaagaatcagcaatgtttccaacaaaaaa

SEQ ID NO: 27060 - DNA, 120 bp, synthetic construct
  source 1..120: mol_type = other DNA
aaccccatctctactaaaaatacaaaaaattagctgagcgtggtggtgcacatctgtagtcccagctacttgggaggctgaggcaggagaatcacttgaacccagcaggtggaggttgat

SEQ ID NO: 27061 - DNA, 120 bp, synthetic construct; identical to SEQ ID NO: 7781
  source 1..120: mol_type = other DNA

SEQ ID NO: 27062 - DNA, 120 bp, synthetic construct
  source 1..120: mol_type = other DNA
ccgcctcccaggttcaagcgattctcctgcctcagtctcccaagtagctgggactacaggtgtgtgccactacgcccggctacttttttttatttttagcagagatggagtttcaccatg

SEQ ID NO: 27063 - DNA, 120 bp, synthetic construct
  source 1..120: mol_type = other DNA
aactgcatttagataggtgcttttaatttggcctgtatcttttaactggaccattgaactcagggtagagcccacactgaattttcagtgcccagaaagagagtaatgccatggggacct

SEQ ID NO: 27064 - DNA, 120 bp, synthetic construct
  source 1..120: mol_type = other DNA
agtcaagttttctcacaatataaagtgatttctgatcccattcaaagccaaaatcaggtcatgcaaggcaaaggaacagagtttttgacctgagaggattttgtcctctcttggattccc

SEQ ID NO: 27065 - DNA, 120 bp, synthetic construct; identical to SEQ ID NO: 7782
  source 1..120: mol_type = other DNA

SEQ ID NO: 27066 - DNA, 120 bp, synthetic construct
  source 1..120: mol_type = other DNA
ccccgtctctactaaaaatacaaaaattagctgggtgtggtggcaggcgcctgtagtcccagctacttgggaggctgaggtgggagaatcgcttgaacctgggaggtggaggttgcagtg

SEQ ID NO: 27067 - DNA, 120 bp, synthetic construct
  source 1..120: mol_type = other DNA
tagggaaacagaggaagtgcatgtggctagcagggggttgaaaaagagagacatttagttgactgagaaatgtttacccagggagaaaagagaccttaaagcaatatgtacacactgaag

SEQ ID NO: 27068 - DNA, 120 bp, synthetic construct
  source 1..120: mol_type = other DNA
tttagccaggaggaacagttgatattcctggcttttcaccttctttaccaaaaggtatcctcccaagtgccttaaccaaagttatgactattaggccacaaggtgggtggcccttagttg

SEQ ID NO: 27069 - DNA, 120 bp, synthetic construct
  source 1..120: mol_type = other DNA
cctctcaggttcaagcgattctcctgcctcagcctcctgagtagctgggactacaggtgcccaccaccacacccgactaatttttgtatttttagtagagacagggtttcaccatgttgg

SEQ ID NO: 27070 - DNA, 120 bp, synthetic construct; identical to SEQ ID NO: 7783
  source 1..120: mol_type = other DNA

SEQ ID NO: 27071 - DNA, 120 bp, synthetic construct
  source 1..120: mol_type = other DNA
tgttcctgttatataaatgaaacctctcaggtagtcaaattttatctttttttaaccagctgggggttttacaggtgcaacctgactttctgcagctgtgggctttccagtatagctcct

SEQ ID NO: 27072 - DNA, 120 bp, synthetic construct
  source 1..120: mol_type = other DNA
taaactaatgggctagaaacagagaaagggaggtagaatttcccacttacagccagaccctgcagcacagctttccagagcctcagcccccctgccctggctgatgctccctccctgact

SEQ ID NO: 27073 - DNA, 120 bp, synthetic construct
  source 1..120: mol_type = other DNA
ggtcaagatccagaacctgaagaaacagataaggaaggaggcaccaagagagcctgggaggagacacccaagcttcccaccagtgcctgtggcacccctcagcattggaaatactgtgca

SEQ ID NO: 27074 - DNA, 120 bp, synthetic construct; identical to SEQ ID NO: 7784
  source 1..120: mol_type = other DNA

SEQ ID NO: 27075 - DNA, 120 bp, synthetic construct
  source 1..120: mol_type = other DNA
tcgaactccaagttcttccgctttgggactcggactggcttccttgctcctcagcttgcaggcgacctattgtgggaccatgtgatcatgcgagttaatactacttaataaatccccctt

SEQ ID NO: 27076 - DNA, 120 bp, synthetic construct
  source 1..120: mol_type = other DNA
gccttacaggaatttaccctggatcatgtcctacaataacctctccccaaacacagtaagaagatgtagcatgcagataccacagacacacatgtgttccatttttcgttaggatttttt

SEQ ID NO: 27077 - DNA, 120 bp, synthetic construct
  source 1..120: mol_type = other DNA
tagctgggattacaggcgctcgtcatcacgcccggttatttttgtatttgtagtagacgctgggtttctccatattggtcaggctggtcttgaacttccgacttcaggtgatccacccgc

SEQ ID NO: 27078 - DNA, 120 bp, synthetic construct; identical to SEQ ID NO: 7785
  source 1..120: mol_type = other DNA

SEQ ID NO: 27079 - DNA, 120 bp, synthetic construct
  source 1..120: mol_type = other DNA
tgggggtgagggaagggatgtaatatgatgagagaagacagaaaccccacataaaggtcaggaaaacatcccaacacagcatcaaaggccagggggcatgaaccagtcaagtgtccatta

SEQ ID NO: 27080 - DNA, 120 bp, synthetic construct
  source 1..120: mol_type = other DNA
gatcagcactcaccgtggaggagacatctgtctcatcaggcagctcactaacactgacctcgaagcgatgctgcccatcacactggatccttgcatgattctcatctgacacaaacgctg

SEQ ID NO: 27081 - DNA, 120 bp, synthetic construct
  source 1..120: mol_type = other DNA
aagatagaaaacataaggaatgggagagtaggtgtccttctgggtgtggggctcacctgtcattgataaaggcaatgctcatccacttgatgtctatgacgtggcccaataggttggtaa

SEQ ID NO: 27082 - DNA, 120 bp, synthetic construct; identical to SEQ ID NO: 7786
  source 1..120: mol_type = other DNA

SEQ ID NO: 27083 - DNA, 120 bp, synthetic construct
  source 1..120: mol_type = other DNA
cctgagaagaaagaggaacttgactgtctgaaggctcttgggtggtgtttaagacccctggccactgtgtcctggctgaatgcatacatgcagatggaatctctttctttcttttttttt

SEQ ID NO: 27084 - DNA, 120 bp, synthetic construct
  source 1..120: mol_type = other DNA
actacaggcacccgccaccacacccggctaattttttgtatttttagtagagacagggtttcactgtgttagaatggtctcgatctcctgacctggcgatccgcctgcctcggcctccca

SEQ ID NO: 27085 - DNA, 120 bp, synthetic construct
  source 1..120: mol_type = other DNA
cttgaggcattaacttttttgcttcttaaggccattggtcttttatgctagtctttctacaaacataacatgaggaaacgcctaggctggcagcaatgttttcagccagctgaacaaata

SEQ ID NO: 27086 - DNA, 120 bp, synthetic construct; identical to SEQ ID NO: 7787
  source 1..120: mol_type = other DNA

SEQ ID NO: 27087 - DNA, 120 bp, synthetic construct
  source 1..120: mol_type = other DNA
cagcaagctattgctagggccttggagggacaaacagggagtgtacatacaattttatactggcagtttttatagtactttgtaggactagagattgtgagataggttgggttcatggat

SEQ ID NO: 27088 - DNA, 120 bp, synthetic construct
  source 1..120: mol_type = other DNA
tttttttttttttttacttgtatgaatcttaaactaagtcctaggtaaagacttcggtcatagcatatataaggctggccatttcttgggtcacaaattgaacaggtggtctgattataa

SEQ ID NO: 27089 - DNA, 120 bp, synthetic construct
  source 1..120: mol_type = other DNA
ctcagcctcccgagtagctgggactataggagcccaccaccacgcccggctaattttttttttttttatttttagtagagacgggggtttcaccgtgttagccaggatggtctcgatctc

SEQ ID NO: 27090 - DNA, 120 bp, synthetic construct
  source 1..120: mol_type = other DNA
tacaacagagttctagttgtactgttctttgactaagtagtatgtgtacagtggggacacttttctgtcagtgtttcttctagtatggttaagggggtaacaacatcaaaacaatgtaca

SEQ ID NO: 27091 - DNA, 120 bp, synthetic construct; identical to SEQ ID NO: 7788
  source 1..120: mol_type = other DNA

SEQ ID NO: 27092 - DNA, 120 bp, synthetic construct
  source 1..120: mol_type = other DNA
ggcttgttgtttcttcaaacttcagctgtgcgtagactggtcagcctctggagtgaccagagcagggctgttgtcttcagcagcagcttggtcttgtctcaggatcagccgggttggatg

SEQ ID NO: 27093 - DNA, 120 bp, synthetic construct
  source 1..120: mol_type = other DNA
gggcttatcttacatgggtcttagagaagttgggttctactttttaacttaaacaaagctactaggtttaaagggtgtactgggtctgttagacttctaggcattcttttatgtacttaa

SEQ ID NO: 27094 - DNA, 120 bp, synthetic construct
  source 1..120: mol_type = other DNA
gatttcttaaggttagttcttttagttcttggagatcacttttaatttgacggtggctgattgaacaaaatcttatagggtaaatacttagtttgtttggtgggggtgcgcttggctcag

SEQ ID NO: 27095 - DNA, 120 bp, synthetic construct; identical to SEQ ID NO: 7789
  source 1..120: mol_type = other DNA

SEQ ID NO: 27096 - DNA, 120 bp, synthetic construct
  source 1..120: mol_type = other DNA
ggtcaggagatcgagaccatcctggctaacatggtgaaaccctgtctctactaaaaatacaaaaaattacccaggtgtggtggtgggtgcctgtagtcccagctactcgggaggctgagg

SEQ ID NO: 27097 - DNA, 120 bp, synthetic construct
  source 1..120: mol_type = other DNA
gcgagacaccatctaaaaaaaaatatatgtataaaactgtccttgaggtaagcttgctaagcagaaaaaaacttgttcttttctttttctttttaacttttgccttgccacattctaagc

SEQ ID NO: 27098 - DNA, 120 bp, synthetic construct
  source 1..120: mol_type = other DNA
aattacatgtattttttttttgaagccatgcctttggattagggcaaactctaggatatttaagtgaattccctgaggaatgtggactctgtaagcaggtgagtgcattattctctgctt

SEQ ID NO: 27099 - DNA, 120 bp, synthetic construct
  source 1..120: mol_type = other DNA
aacaggcacctgcaggagatgggagcatgcggggagaagtaactcagggttttcatttccctcactccctctggacagctctgtggttccgtaatcattgccgtcctctacctacagcca

SEQ ID NO: 27100 - DNA, 120 bp, synthetic construct; identical to SEQ ID NO: 7790
  source 1..120: mol_type = other DNA

SEQ ID NO: 27101 - DNA, 120 bp, synthetic construct
  source 1..120: mol_type = other DNA
gaggctgaggcaggagaattgcttgaacccaggaggcagaggttgtggtgagccgagatcacaccattgcactccagcctgggcaacaagagtgaaactcagtctcggaaaaaaaaaaaa

SEQ ID NO: 27102 - DNA, 120 bp, synthetic construct
  source 1..120: mol_type = other DNA
aaattgacttactacaataaaagggaaaaataagagtattctggaaacagagcaggaaggaaggcaaaggtgaaaacaatcaatctggggcatctgagaagccccaagtgcagaggctgc

SEQ ID NO: 27103 - DNA, 120 bp, synthetic construct
  source 1..120: mol_type = other DNA
aggggtgagatcaacatgtaaaaatacacacacacaaagtggagctgagggcaggatggagaactctcattctcagcccatgacctccatggacttggagaaagactcagcctggagatg

SEQ ID NO: 27104 - DNA, 120 bp, synthetic construct; identical to SEQ ID NO: 7791
  source 1..120: mol_type = other DNA

SEQ ID NO: 27105 - DNA, 120 bp, synthetic construct
  source 1..120: mol_type = other DNA
ctcttgcctcagcatcccgagtagctgggattacaggcagctgccaccacacccagctaatttgtgtatttttagagatggggttttcaccatgttagccaggctggtctcgaattcctg

SEQ ID NO: 27106 - DNA, 120 bp, synthetic construct
  source 1..120: mol_type = other DNA
ggatatgagaataataactcatagagcaagatatctgtttagagtgagtgagtcacaggggagatctgggagggaaacactgcaactctttcattcccagaaaaagaaggttgatccagg

SEQ ID NO: 27107 - DNA, 120 bp, synthetic construct
  source 1..120: mol_type = other DNA
gctgtgcagctgggggaagagaagtcagggtccagagacaaggggagctgagaacaatctgtgtcttgctggtctgcagaaggcagctctcaaactgtagagaacagtttgggatgatga

SEQ ID NO: 27108 - DNA, 120 bp, synthetic construct; identical to SEQ ID NO: 7792
  source 1..120: mol_type = other DNA

SEQ ID NO: 27109 - DNA, 120 bp, synthetic construct
  source 1..120: mol_type = other DNA
cattgtttgtaatttttaaaacctgaaaacaaataaaatgaccacaaacaaagaaggattaatttaatgtgtggaattctatgaataataaacatgaatgctctagagacacctataaca

SEQ ID NO: 27110 - DNA, 120 bp, synthetic construct
  source 1..120: mol_type = other DNA
agatgtatgcatgggagtaaagctttaaagaaaggcgtgaacaggattactatgaaatcaggatgagggtgaactctcacgacagcaaagggattgttattgctatcaggattggtatgg

SEQ ID NO: 27111 - DNA, 120 bp, synthetic construct
  source 1..120: mol_type = other DNA
tgtaagactgctaaaaaaaaaataatattagctacttacgtgtaattggaaaaattaacctttattcacaaaagagatgggctgccccctataccacgaatcagagaagagaccatgaat

SEQ ID NO: 27112 - DNA, 120 bp, synthetic construct; identical to SEQ ID NO: 7793
  source 1..120: mol_type = other DNA

SEQ ID NO: 27113 - DNA, 120 bp, synthetic construct
  source 1..120: mol_type = other DNA
ggaattaaagacacacacacagaaatatggcgtgtggggtgggaaatgaggagtctcacagccttcattccagtaaacagtcattgtgaccggttgtcccgctttcctcaggttttcttc

SEQ ID NO: 27114 - DNA, 120 bp, synthetic construct
  source 1..120: mol_type = other DNA
ctcgggatcctcctggaatctcttccttggcatctggctcatgataaggttttaggtgtcttgatagtatccaaattggctgctggttttggcctggagaaacacaagcataacctctac

SEQ ID NO: 27115 - DNA, 120 bp, synthetic construct
  source 1..120: mol_type = other DNA
ctggcctttgggcagcctcaaaaaatttaaagttaataatgctagattcagttgtgtatgggctgtctcgtaatccctgtttctcccccttttttgtcatcagttgttcatctgtataaa

SEQ ID NO: 27116 - DNA, 120 bp, synthetic construct; identical to SEQ ID NO: 7794
  source 1..120: mol_type = other DNA

SEQ ID NO: 27117 - DNA, 120 bp, synthetic construct
  source 1..120: mol_type = other DNA
tgctcctatagcttgtataactgaattaatggctcctaaatcagttaacattctccatttacctgattttttcttaattacaaaagctggagaattccaaggggaaagtgttgtagctat

SEQ ID NO: 27118 - DNA, 120 bp, synthetic construct
  source 1..120: mol_type = other DNA
tggaggcttaacaatgactgccatcaaaaatgataccctaaaccttggcgggaactttgtctctccacttgaagcattttttttcaaaccttgcaaattttttcctagtcccataccagg

SEQ ID NO: 27119 - DNA, 120 bp, synthetic construct
  source 1..120: mol_type = other DNA
agttataattggttgaatagtcccaggttgtccatcgggcccttcacaatgcaaaatataatggctttgatatacttcaggggctttaccaactccaactgttttaagttgagtgtgttg

SEQ ID NO: 27120 - DNA, 120 bp, synthetic construct; identical to SEQ ID NO: 7795
  source 1..120: mol_type = other DNA

SEQ ID NO: 27121 - DNA, 120 bp, synthetic construct
  source 1..120: mol_type = other DNA
cctagaaataatcctatcgttcccgctggcaagggtccacagacccctgttgggaccttttgcagggtttccccaggcagaagcctcacagcttttgtgcaacataaatctactgtggtg

SEQ ID NO: 27122 - DNA, 120 bp, synthetic construct
  source 1..120: mol_type = other DNA
ttcccatctttatcaaacttagagtgacactgattagcccaatgttttccttttttgcattttggacatatttcaggctcagtagttttctttttttcccctatatggtggcctgacttg

SEQ ID NO: 27123 - DNA, 120 bp, synthetic construct
  source 1..120: mol_type = other DNA
agctttatgcagattacctccgataccgtcacaggccttgatataatcaactaaatgtgctttccctctaataggtcacaaagcagcctggcaatcgagattaacattgccaaaagctaa

SEQ ID NO: 27124 - DNA, 120 bp, synthetic construct; identical to SEQ ID NO: 7796
  source 1..120: mol_type = other DNA

SEQ ID NO: 27125 - DNA, 120 bp, synthetic construct
  source 1..120: mol_type = other DNA
ggacttagacaagctcgaataagagtgtccccgtcagcaggaatcatccgactggaaacagcaacattctttaacagtcccattacaaaaggagaacctggtccatactgattaatagct

SEQ ID NO: 27126 - DNA, 120 bp, synthetic construct
  source 1..120: mol_type = other DNA
tagcctgctgaactcctgcctgaatagaactgacagcagtcgctcgaggtgctgctcagtcactggggcaactacttttcgcccagtgtcctccagaaaagaaagatctggagggtctgg

SEQ ID NO: 27127 - DNA, 120 bp, synthetic construct
  source 1..120: mol_type = other DNA
ttcgtcatactctccttcctcctcatcatcagtgtgaaaaagttccaaggtggaacgaaccagagcccacacttgtcccattgttaccggatgcttccaagctccccatcttactcacta

SEQ ID NO: 27128 - DNA, 120 bp, synthetic construct; identical to SEQ ID NO: 7797
  source 1..120: mol_type = other DNA

SEQ ID NO: 27129 - DNA, 120 bp, synthetic construct
  source 1..120: mol_type = other DNA
gatgggctctggctagttatctgcagcaggagcatgtccttaaggcacagattgctcacgctactgtttgtggtttaagaacacctttaagtggttttccactctgggtgggccaggtgt

SEQ ID NO: 27130 - DNA, 120 bp, synthetic construct
  source 1..120: mol_type = other DNA
tattttggggggcccgttcccaacattacagaaacaaaatgcagcatctactatcactatctttttgttcagtcatccattatgtgaatgacaacttcattgttactaactttggaaaga

SEQ ID NO: 27131 - DNA, 120 bp, synthetic construct
  source 1..120: mol_type = other DNA
ccccacaaaaaacccctgtttatctctgttatctctgggtatagaaaaatgctgaattcttatttgtatgtgaaataaagtggtttttcaataagaaattttgctataaggtaagaattt

SEQ ID NO: 27132 - DNA, 120 bp, synthetic construct; identical to SEQ ID NO: 7798
  source 1..120: mol_type = other DNA

SEQ ID NO: 27133 - DNA, 120 bp, synthetic construct
  source 1..120: mol_type = other DNA
ctcgaactcttgacctcattcctagagcattttttccattcatcttttattagtattcagatacacctagcagctggtatgttttgtaggatagtttttggtcattcattctaccatgat

SEQ ID NO: 27134 - DNA, 120 bp, synthetic construct
  source 1..120: mol_type = other DNA
tcaaggccagacatggtggctcatgcttgtaatcccagcactttgggaggcccatatcacctggggtcgggagttcgagaccagcctggccagcatggtgaaaccccgtctctactaaaa

SEQ ID NO: 27135 - DNA, 120 bp, synthetic construct
  source 1..120: mol_type = other DNA
gcactccagcctggcggtagagtgagactttgtctcaaaaaaaaaaaaaacaaaaaaaaaaaactccaataatcagttcaaggttgaactgctaacaataagatttgaagttaacattta

SEQ ID NO: 27136 - DNA, 120 bp, synthetic construct; identical to SEQ ID NO: 7799
  source 1..120: mol_type = other DNA

SEQ ID NO: 27137 - DNA, 120 bp, synthetic construct
  source 1..120: mol_type = other DNA
ctcataggtttagctgtggtcctgctatagagtttgttaagaaaacttccctgagttgttttaaatggtcttatcaaagccaaacactgaaatcctataatcattggaattgggaacaaa

SEQ ID NO: 27138 - DNA, 120 bp, synthetic construct
  source 1..120: mol_type = other DNA
attttatgctgaatcatttgaccatgtgaggaaagcatatttttggactcttatcccatcttgactagagggatcagtaaaaacctggaatgaagaagttcttcatgtgcacatcttttt

SEQ ID NO: 27139 - DNA, 120 bp, synthetic construct
  source 1..120: mol_type = other DNA
ttcttgtgtgcactgcccttcattcacacttctgtgcattcacacatttgtgattgcacgttttggtattgatttagaatcatttattaattccacagtcaagttaataaaatgccattg

SEQ ID NO: 27140 - DNA, 120 bp, synthetic construct
  source 1..120: mol_type = other DNA
cttattaattcaatcaaaagccattgaagtttatagcaagaggcatcaaagaaggcagaatgtttctatctgttctgggattaacgggggtagaaagatgggaagggcagagggacaaga

SEQ ID NO: 27141 - DNA, 120 bp, synthetic construct; identical to SEQ ID NO: 7800
  source 1..120: mol_type = other DNA

SEQ ID NO: 27142 - DNA, 120 bp, synthetic construct
  source 1..120: mol_type = other DNA
gagtggaagtgaggggaggccactgggcagtcagagattttgaatccctgtttcctttccccccatctcaaccagaggccacttgtgaaagcccaagaaaaaaagacacgaatgtcagag

SEQ ID NO: 27143 - DNA, 120 bp, synthetic construct
  source 1..120: mol_type = other DNA
actgccatcaggcaccccaggagctggacatgtggcattctttgtcatgtctgatgaggaactggagaggtcccagagcatatagaccttgatcgaattggagctagagtggagtcaggc

SEQ ID NO: 27144 - DNA, 120 bp, synthetic construct
  source 1..120: mol_type = other DNA
tagcaattcctttctgctgttgctgtatttgccctgtgacaactggtgcttgaaggaaggagaaatcattatgtgtgcaggaaagcacatgcaattagaaaactgggacatgattcataa

SEQ ID NO: 27145 - DNA, 120 bp, synthetic construct; identical to SEQ ID NO: 7801
  source 1..120: mol_type = other DNA

SEQ ID NO: 27146 - DNA, 120 bp, synthetic construct
  source 1..120: mol_type = other DNA
gaggtcaggagttcgagaccagcctggcaaacatgatgaaactccatctctaccaaaaatgcaaaaattagccagatgtggtggcatgcacctgtaatcccagctactcaggaggctgag

SEQ ID NO: 27147 - DNA, 120 bp, synthetic construct
  source 1..120: mol_type = other DNA
caacaacaaaaaggaaataaaaaaagagaaaataaccaaatgtataaaaatcaaggttgcaattctgcaattcttgtggcacccagaatactggactagaccaagggtgccaggtgcttg

SEQ ID NO: 27148 - DNA, 120 bp, synthetic construct
  source 1..120: mol_type = other DNA
tggataaacacatccattctagtgagaataaatgaaaacacatttcatccttactgagatgcagtgagtgtcgccccagtactaaggggtaaatgcagagagaaacattagtttaggatt

SEQ ID NO: 27149 - DNA, 120 bp, synthetic construct
  source 1..120: mol_type = other DNA
ctccccactgtgttcaagcaattcacctacctcagcctcccaagtagctggaactataggcttgtgccactatgcccggctaatttttttgtatttttagtagagttagggtttcaccat

SEQ ID NO: 27150 - DNA, 120 bp, synthetic construct; identical to SEQ ID NO: 7802
  source 1..120: mol_type = other DNA

SEQ ID NO: 27151 - DNA, 120 bp, synthetic construct
  source 1..120: mol_type = other DNA
ctgagtaaaactgaaaagaaatggggatatctccatttttgagtggtgaccatgggacccaaagtggtttgtaaatgaccctttatcatctacacttgtcaagtttcaattgattcactc

SEQ ID NO: 27152 - DNA, 120 bp, synthetic construct
  source 1..120: mol_type = other DNA
tgacgtaaagaacagaaaaattattgtgccacagttccagaggctggaagtccaagatcatggtgttggcagtgcacatttcttctgaggcttctttccttggcttgtagatgtgttttc

SEQ ID NO: 27153 - DNA, 120 bp, synthetic construct
  source 1..120: mol_type = other DNA
tccttaaagacctctccaaatgcagtcactttctcaggtactgggggttaggacaccaacatgccaatttttggagggatgcaatttagcccataacagtctggattaacctggagactc

SEQ ID NO: 27154 - DNA, 120 bp, synthetic construct
  source 1..120: mol_type = other DNA
cccaggctggagtgcagtggcacgatctcggctcaccgcaacctccgcttcccaggttcaagcatttctcctgtctcagtttcccgagtagctgggattacagatgcctgccaccacgcc

SEQ ID NO: 27155 - DNA, 120 bp, synthetic construct; identical to SEQ ID NO: 7803
  source 1..120: mol_type = other DNA

SEQ ID NO: 27156 - DNA, 120 bp, synthetic construct
  source 1..120: mol_type = other DNA
tcctgaaagtttgctccattctagtgattctggctccagctttttcattgggaagaggattctctcccagaggaaaaacttctcctgctatgcaggcttattttctttatatttgtagga

SEQ ID NO: 27157 - DNA, 120 bp, synthetic construct
  source 1..120: mol_type = other DNA
atgacactggacattttgagccacaatttctctgggcctttccatgggattcagtttcagccctggtaggtgaagggagagctcttggtgtagggtttggtctttataataaactatgct

SEQ ID NO: 27158 - DNA, 120 bp, synthetic construct
  source 1..120: mol_type = other DNA
gaaagtgacagagcattctttcacctttttgtgacatgcatgcatccaagtctctggtgttttaaataactgaaactgagacctagacccacttatctgtaaagtagaactgtggagaag

SEQ ID NO: 27159 - DNA, 120 bp, synthetic construct
  source 1..120: mol_type = other DNA
ttcatcaaaataaagtgaaattgtggctgtagatggggttttatttagagctttgactccgcatctgcttcctaagacatggtccttccccaggatactacagaatcacagggcttagac

SEQ ID NO: 27160 - DNA, 120 bp, synthetic construct; identical to SEQ ID NO: 7804
  source 1..120: mol_type = other DNA

SEQ ID NO: 27161 - DNA, 120 bp, synthetic construct
  source 1..120: mol_type = other DNA
atgcctgaaccatgttaaactccaaggccatcatctgagcccagcaaacacatagaaccctatgagaaatcattaaaaattcttagttactattttcaggaatatccttttccatccttt

SEQ ID NO: 27162 - DNA, 120 bp, synthetic construct
  source 1..120: mol_type = other DNA
tttacatttaaagtaattactgatgaagaaggacttacctctgtaattgtgatggttttatgcatgtcttatagctgtttcatcccttatcttcctcattccaaccttcctttgtgttta

SEQ ID NO: 27163 - DNA, 120 bp, synthetic construct
  source 1..120: mol_type = other DNA
ttgaattgaaaccagtatgaaactctgcttctttacatctttttccacccctcattttacattattgatgtcacaaattactcctctgcaggctagcaggctggaaagtcacaatgttgc

SEQ ID NO: 27164 - DNA, 120 bp, synthetic construct
  source 1..120: mol_type = other DNA
agtcttcagtctaaaatttgtaaaccaggctggcagattggaaatctaaactgtagttgctactgtcatcttgaggcagaattttttcttctttgagaagcctcacattttgcccaaagg

SEQ ID NO: 27165 - DNA, 120 bp, synthetic construct; identical to SEQ ID NO: 7805
  source 1..120: mol_type = other DNA

SEQ ID NO: 27166 - DNA, 120 bp, synthetic construct
  source 1..120: mol_type = other DNA
ccctctgcccggccagccgccccgtccgggagggaggtggggggggtcggccccccgcccggccagccgccctgtccgggagggaggtgggggggtcagccccccgcctggccagccgcc

SEQ ID NO: 27167 - DNA, 120 bp, synthetic construct
  source 1..120: mol_type = other DNA
agccgccccgtctgggagggaggtgggggggtcggccccccgcccggccagccgccccgtccgggagggaggtgggggggtcagccctccgcccggccagccgccccgtctgggaggtga

SEQ ID NO: 27168 - DNA, 120 bp, synthetic construct
  source 1..120: mol_type = other DNA
gagggaggtggggaggtcagccctccgcccggccagccgccccgtccgggagggaggtggggatgtcggccccccgcccggccagccgccccgtccgggagggaggtgggggggtcggcc

SEQ ID NO: 27169 - DNA, 120 bp, synthetic construct; identical to SEQ ID NO: 7806
  source 1..120: mol_type = other DNA

SEQ ID NO: 27170 - DNA, 120 bp, synthetic construct
  source 1..120: mol_type = other DNA
gcactaagaaaaattcctctgccttgggatcctgttgatctgtgaccttacccccaaccctgtgctctctgaaacatgtgctgtgtccactcaggattaaatggattaagggcggtgcaa

SEQ ID NO: 27171 - DNA, 120 bp, synthetic construct
  source 1..120: mol_type = other DNA
gaaaaccagagacctttgttcacttgtttatctgctgaccttccctccactattgtcccatgaccctgccaaatccccctctgtgagaaacacccaagaattatcaataaaaaaataaat

SEQ ID NO: 27172 - DNA, 120 bp, synthetic construct
  source 1..120: mol_type = other DNA
gtcatacttttgctaaagatgatacagctatcttgcatccatctaaaaacactaaccatttcctcagaaaaaaattcaaactcaatgcatgataagcatttttctcttcgatatactgta

SEQ ID NO: 27173 - DNA, 120 bp, synthetic construct; identical to SEQ ID NO: 7807
  source 1..120: mol_type = other DNA

SEQ ID NO: 27174 - DNA, 120 bp, synthetic construct
  source 1..120: mol_type = other DNA
gctcactgcaaactccacctcctgggcacaagtgatccttctacctcaacctcctaagtagctgggactgcaagcacaccaccaagtctgactaattttttgtatgtattttcagtagag

SEQ ID NO: 27175 - DNA, 120 bp, synthetic construct
  source 1..120: mol_type = other DNA
tggggttataggcatgagccactgtgctggtcacaactagtgtaaatagctttttttcactaaccatcccatagtcccactgccttcagcaagtccgtcagctgatcaggtttcttttcc

SEQ ID NO: 27176 - DNA, 120 bp, synthetic construct
  source 1..120: mol_type = other DNA
attgactttaattatagagcagagtattactaagagatgctctaaaagatctcctgtatttcaaacatagtcttatttactgccattgtgtagtagcagaccaatttccccctgatgacc

SEQ ID NO: 27177 - DNA, 120 bp, synthetic construct
  source 1..120: mol_type = other DNA
tgggtgtcttagcttccagctcaatggaataatttctgtgtctcctgagggagtattcctccctttggtaaacctctagatcctgatcctattcctcgtgactgtgcaagacctcccaac

SEQ ID NO: 27178 - DNA, 120 bp, synthetic construct; identical to SEQ ID NO: 7808
  source 1..120: mol_type = other DNA

SEQ ID NO: 27179 - DNA, 120 bp, synthetic construct
  source 1..120: mol_type = other DNA
ctaaagctgagatgactgaaagagcagaagtagaattcagaatatggagagggaagaagttcactgtgctaaaggagtacagtgtgacccaatccaaggaagctaaaaataatgataaaa

SEQ ID NO: 27180 - DNA, 120 bp, synthetic construct
  source 1..120: mol_type = other DNA
gaacaagtggaggaaagactctcagtgcttgaagactggctttctaaaataagacaggaagacaagaatagagaaaacagaatgaaaaggaacaaacaaaacctctgagaaacatcagat

SEQ ID NO: 27181 - DNA, 120 bp, synthetic construct
  source 1..120: mol_type = other DNA
gaccaacattcaaattcagaaatgcagaggacactagtaagttactccatgagaagatcatccccaagatacaatcatcagattctccatggttgaaatgaaagaaagaacgttaagggc

SEQ ID NO: 27182 - DNA, 120 bp, synthetic construct
  source 1..120: mol_type = other DNA
ccagaagagattgagggccagtattgaacattgttaaagaaaagaatttccaacccacaatttcatatccagccaaactaagcttcataagcaaaaaagaaataaaattcttttcagaca

SEQ ID NO: 27183 - DNA, 120 bp, synthetic construct; identical to SEQ ID NO: 7809
  source 1..120: mol_type = other DNA

SEQ ID NO: 27184 - DNA, 120 bp, synthetic construct
  source 1..120: mol_type = other DNA
ggaaaattttccaagcaaatggaaagcggaagaaagccagggttgcaatcctagtttctgacaacacagactttaaaccaagaaagataaaaaaagataaaggtgggcattacataatgg

SEQ ID NO: 27185 - DNA, 120 bp, synthetic construct
  source 1..120: mol_type = other DNA
cagtagaagtggtggactttaataccccactgacaatattagacagatcatcaagacagaaaattaacaaagatattcaggacctgaattcagccctggagcaaatggacctgatagata

SEQ ID NO: 27186 - DNA, 120 bp, synthetic construct
  source 1..120: mol_type = other DNA
ctgaaatcataacaaatagtctctcagactacagtgcaatcaaattcaaaatcaagaataagaaattcactaaaaccatataattacttagaaattaaataacctgttcttgaatgactt

SEQ ID NO: 27187 - DNA, 120 bp, synthetic construct; identical to SEQ ID NO: 7810
  source 1..120: mol_type = other DNA

SEQ ID NO: 27188 - DNA, 120 bp, synthetic construct
  source 1..120: mol_type = other DNA
aagctaataaagaagaaaagagagaaaattccaataaacacaatcagaaacaataagaggaacattacctctgaccccacagaaatacaagcaaccaccagaaaatattatgaacacttc

SEQ ID NO: 27189 - DNA, 120 bp, synthetic construct
  source 1..120: mol_type = other DNA
gcagtaatgaagagcctaccaaaaaaaaaaaaaaaaagtgcaggaccagatgattgacaggtgaattctactggatgtacaaagaagagatggtaccattcctattgaaactattcccaa

SEQ ID NO: 27190 - DNA, 120 bp, synthetic construct
  source 1..120: mol_type = other DNA
atgaacattaatgcaaaaatctccaacaaaatgctggcaaaccgaatcctgcagcacatcaaaaaccttatccatcacaatcaagtaggcttcatcgccaggatgcaaggttagttcaac

SEQ ID NO: 27191 - DNA, 120 bp, synthetic construct; identical to SEQ ID NO: 7811
  source 1..120: mol_type = other DNA

SEQ ID NO: 27192 - DNA, 120 bp, synthetic construct
  source 1..120: mol_type = other DNA
ataggaagagaggaattcaaatgattcctgtttgcagatgacatgattctataactagaaaaacccatagcctcagtccaaaagcttcttaagctgataaacaacttcagcaaattctca

SEQ ID NO: 27193 - DNA, 120 bp, synthetic construct
  source 1..120: mol_type = other DNA
ggaataatgctaatttgggaggtaaaagatgtctgcaaagagaactactggtcccaaaaagtgtgcattaatgttagcagtagctatgataggctgggtggaatgcccataggtggtgtt

SEQ ID NO: 27194 - DNA, 120 bp, synthetic construct
  source 1..120: mol_type = other DNA
tgggttgagcaattcccaggaccctgggctgtgttctctgtctcagtggaaaaaggaaatgaagctgtcttttcatcattaaatgctgtgccaactagtcccttaattttctttttgcct

SEQ ID NO: 27195 - DNA, 120 bp, synthetic construct; identical to SEQ ID NO: 7812
  source 1..120: mol_type = other DNA

SEQ ID NO: 27196 - DNA, 120 bp, synthetic construct
  source 1..120: mol_type = other DNA
atgtctttttttttactttctgcttattcatttttctctccttctgttttcaacaaatacatgtttttttcacccacagttatagaatgaacttgagcaacaatctataggaatggcttt

SEQ ID NO: 27197 - DNA, 120 bp, synthetic construct
  source 1..120: mol_type = other DNA
cttggctgaaccacaatgcccagataggtgatcaagcattattctggatgatttgtgagaatgtttcttggataacattaatgcaaaataactagactttgagtaaagtagattgatctc

SEQ ID NO: 27198 - DNA, 120 bp, synthetic construct
  source 1..120: mol_type = other DNA
tcaactgatctcaaacagctggttggtttgtgtacagcatttggaagatgaatggacaacatcctgtttggaagtccaccgctttgatcgaagaagataaaaacagaacaactcttgtgg

SEQ ID NO: 27199 - DNA, 120 bp, synthetic construct; identical to SEQ ID NO: 7813
  source 1..120: mol_type = other DNA

SEQ ID NO: 27200 - DNA, 120 bp, synthetic construct
  source 1..120: mol_type = other DNA
cagtgcccatcaatgcccatcagaataactcccttccaggtttggaaggtgattgaaataaacaagcatttatctccaagtgtttgccaggtgcacctgtaattccagctatgagagcag

SEQ ID NO: 27201 - DNA, 120 bp, synthetic construct
  source 1..120: mol_type = other DNA
agaccacatctaacaaaaatccacgtttgcttgcggtgatcacctaggtccatgaagtaagtagacactggggctgtagcaatgcagagagaggtggaatcaaggcatattcctcttgca

SEQ ID NO: 27202 - DNA, 120 bp, synthetic construct
  source 1..120: mol_type = other DNA
atggctatgtggcagattctcttatgggaagatcttgaaaatacagagctggcaagttacactgataccagtagacccaggaagcagcaaatgggtcttggcagcaatagatatgcaccc

SEQ ID NO: 27203 - DNA, 120 bp, synthetic construct
  source 1..120: mol_type = other DNA
tggagctgggcattgctcagctggtggtagatgtgctaccaaactgaactggagtccactcacctggggcagtaaaaacaaacatccatactgagattttgtagtgagagaaaggagggc

SEQ ID NO: 27204 - DNA, 120 bp, synthetic construct; identical to SEQ ID NO: 7814
  source 1..120: mol_type = other DNA

SEQ ID NO: 27205 - DNA, 120 bp, synthetic construct
  source 1..120: mol_type = other DNA
tggtcagagttcagtcctcagtttccccttatctgaggtcagtggatctattaggtgggaatccgagtttctgaaaaacaactcagggacatatgttaagatgttctctttagtttccat

SEQ ID NO: 27206 - DNA, 120 bp, synthetic construct
  source 1..120: mol_type = other DNA
ttgaaggaactgaaggtttttctttatttccatgttgggaggccctggcaggcttctaagagaggtccctgctttatctcagatgcaaatgcttggagtgctactaagagcttgaatggg

SEQ ID NO: 27207 - DNA, 120 bp, synthetic construct
  source 1..120: mol_type = other DNA
cattgaaacattggttgtataaagcaagagtggggaaacaagcatgaagggtgggcttacacaccttcatgagtgtgcttacacttgatatgaaagtatcctctcttttccttgtggatc

SEQ ID NO: 27208 - DNA, 120 bp, synthetic construct; identical to SEQ ID NO: 7815
  source 1..120: mol_type = other DNA

SEQ ID NO: 27209 - DNA, 120 bp, synthetic construct
  source 1..120: mol_type = other DNA
cctaccctctatgaactggaatggatgatgcaagacaattgctagaacagtattggtccctgcagtctaggtcagcacagcagcagaacctcatgtcccttccataactagaaatgtttg

SEQ ID NO: 27210 - DNA, 120 bp, synthetic construct
  source 1..120: mol_type = other DNA
ttacatgaactactcaaaagagatataagcaagagatgatattgtctcttaactcaattttaccaaatgcctgaacgggtgcagccatatgttgctgagactactcctgtttttgggctg

SEQ ID NO: 27211 - DNA, 120 bp, synthetic construct
  source 1..120: mol_type = other DNA
gcattaggtatttctcctaatgctatccctcccccctgtccccaccccatgacaggccctggtgtgtgatgttccccaccctgagttcaagtgttctgattgttcaattcccacctatga

SEQ ID NO: 27212 - DNA, 120 bp, synthetic construct; identical to SEQ ID NO: 7816
  source 1..120: mol_type = other DNA

SEQ ID NO: 27213 - DNA, 120 bp, synthetic construct
  source 1..120: mol_type = other DNA
ccagctaatttttttgtatttttagtagagacggggtttcactgtattaggcaggatggtctcgatctcctgacctcgtgatccacccacctcagtctcccaaagtgctgggattacaag

SEQ ID NO: 27214 - DNA, 120 bp, synthetic construct
  source 1..120: mol_type = other DNA
tttatagtagcatgatttataatcctttgggtatatacccagtaatgggatggctgggtcaaatggtatttctagttctagatccttgaggaattgccacactgtcttccacagtggttg

SEQ ID NO: 27215 - DNA, 120 bp, synthetic construct; identical to SEQ ID NO: 7817
  source 1..120: mol_type = other DNA

SEQ ID NO: 27216 - DNA, 120 bp, synthetic construct
  source 1..120: mol_type = other DNA
tttcactctgatggtagtttcttttgctgtgcagaagctctttagtttaattagatcccatttgtcaattttggcttttgttgccattgcttttggtgtttcagtcatgaagtccttgcc

SEQ ID NO: 27217 - DNA, 120 bp, synthetic construct
  source 1..120: mol_type = other DNA
atccagtttcagctttctactatggctagccagttttcccagcaccatttattaaatagggaatcctttccccatttcttgtttttgtcaggtttgtcaaagatcagatacttgtagatg

SEQ ID NO: 27218 - DNA, 120 bp, synthetic construct
  source 1..120: mol_type = other DNA
atgcctccagctttgttcttttggcttaggattgtcttggcaatgcaggttcttttttggttccatatgaactttaaagtagttttctccaattctgtgaagaaagtcattggtaggttg

SEQ ID NO: 27219 - DNA, 120 bp, synthetic construct; identical to SEQ ID NO: 7818
  source 1..120: mol_type = other DNA

SEQ ID NO: 27220 - DNA, 120 bp, synthetic construct
  source 1..120: mol_type = other DNA
gcttatcagcttaaggagattttgggctgagatgatggggttttctaaacatccaatcatgtcatctgcaaacagggacaatttgacttcctcttttcctaattgaataccctttatttc

SEQ ID NO: 27221 - DNA, 120 bp, synthetic construct
  source 1..120: mol_type = other DNA
cagtatgatattggctgtgggtttgtcataaatagctcttattattttgagatatgtcccatcaatacctagtttattgagagtttttggcatgaagggctgtggaattttgttgaaggc

SEQ ID NO: 27222 - DNA, 120 bp, synthetic construct
  source 1..120: mol_type = other DNA
ttgatcatggtggataacctttttgatgtgctgctggattcggtttgccagtgttttattgaggatttttgcatccatgttcatcagggatattggtctaaaattctctttttttttgtt

SEQ ID NO: 27223 - DNA, 120 bp, synthetic construct
  source 1..120: mol_type = other DNA
tacctctgttagaattcggctgtgaatccatctggtcctggacttttttgggttggtaggctattaattattgcctcaatttcagagcctattattggtctattcagggattcaacttct

SEQ ID NO: 27224 - DNA, 120 bp, synthetic construct; identical to SEQ ID NO: 7819
  source 1..120: mol_type = other DNA

SEQ ID NO: 27225 - DNA, 120 bp, synthetic construct
  source 1..120: mol_type = other DNA
agttcttttaattgtgatgttaggctgtcgattttagatctttcctgctttttcttgcaggcatttagtgctacaaatttccctctacacactgctttaaatgtgtcccagagattctgg

SEQ ID NO: 27226 - DNA, 120 bp, synthetic construct
  source 1..120: mol_type = other DNA
tgagtgagtttcttaatcctgagttctaatttgattgcactgtggtctgagagacagtttgttataatttctattcttttacatctgctaaggagtgctttacttccaactatgtggtca

SEQ ID NO: 27227 - DNA, 120 bp, synthetic construct
  source 1..120: mol_type = other DNA
tccttgttaactttctgtctcgttgatctgtctaatgttgacagtggggtgttaaagtctcccattattattgtgtgggagtctaagtctttttgtaggtctctaaggacttgctttatg

SEQ ID NO: 27228 - DNA, 120 bp, synthetic construct
  source 1..120: mol_type = other DNA
aagtctgttttatcagagactaggattgcaacccctgctttttttgttttccatttgcttggtagatcttcctccattcctttattttgagcctatgtgtgtctctgcacatgagatggg

SEQ ID NO: 27229 - DNA, 120 bp, synthetic construct; identical to SEQ ID NO: 7820
  source 1..120: mol_type = other DNA

SEQ ID NO: 27230 - DNA, 120 bp, synthetic construct
  source 1..120: mol_type = other DNA
aggctcttatttctcctttacttatgaagcttagtttggctggatatgaaattctgggttgaaaattcttttctttaagaatgttgaatattggcccccactcgcttctggcttgtagag

SEQ ID NO: 27231 - DNA, 120 bp, synthetic construct
  source 1..120: mol_type = other DNA
tatgtctttgggttgctcttcttgaggagtatctttgtggtgttctctgtatttcacaaatttgaagtttggcctgccttgctaggttggggaagttctcctggataatatcctgaagag

SEQ ID NO: 27232 - DNA, 120 bp, synthetic construct
  source 1..120: mol_type = other DNA
tttctctcaacttctctgctcgcttcatttcattcatttgatcttcaatcaccgataccctttcttccacttgatcgaattggttactgaagcttgtgcatgcgtcatgtagttctcatg

SEQ ID NO: 27233 - DNA, 120 bp, synthetic construct; identical to SEQ ID NO: 7821
  source 1..120: mol_type = other DNA

SEQ ID NO: 27234 - DNA, 120 bp, synthetic construct
  source 1..120: mol_type = other DNA
agatgtcctttttgttgatgttattctttctgtttgttagttttccttctaacagtcaggaccctcagctgcaggtctattggagtttgctggaggtccactccagaccctgtttgcctg

SEQ ID NO: 27235 - DNA, 120 bp, synthetic construct
  source 1..120: mol_type = other DNA
tccctactgggaggtgtctcccaggtaggctactcagaggtcagcgacgcacttgaggaggcaatctgtccgttctcagatctcaaactccatgctggtagaaccactgctctcttcaaa

SEQ ID NO: 27236 - DNA, 120 bp, synthetic construct
  source 1..120: mol_type = other DNA
cacctagtttgagcttcctgccactttgtttacctagtcaagcctcagcaatggcagacgcccctcccccagcctcactgtcacctcccagttcaattttggactgctgtgttagcagtg

SEQ ID NO: 27237 - DNA, 120 bp, synthetic construct; identical to SEQ ID NO: 7822
  source 1..120: mol_type = other DNA

SEQ ID NO: 27238 - DNA, 120 bp, synthetic construct
  source 1..120: mol_type = other DNA
atgatctcccctgggataattgttcatgaccaaaaaggattctggtaatgtaccaggatcttctcactgttatgattcttctggtataggagatctgtgattggccaggcacagtggctc

SEQ ID NO: 27239 - DNA, 120 bp, synthetic construct
  source 1..120: mol_type = other DNA
atagtgagaccccattcctacaaaatctttaaaaaattagttgggcatgctggtgtgcacctgtaatgctattgctcaggaggctgaggcaggaggataacttgagcccaggaattcaag

SEQ ID NO: 27240 - DNA, 120 bp, synthetic construct
  source 1..120: mol_type = other DNA
tataaaaagagataatgtggtcaaagaccagggtgtgatctgtggcccaatcaaaatatttggtctttttccctgtttcctgacaagcaggttccaaaacatttgcaatctcctcagtga

SEQ ID NO: 27241 - DNA, 120 bp, synthetic construct; identical to SEQ ID NO: 7823
  source 1..120: mol_type = other DNA

SEQ ID NO: 27242 - DNA, 120 bp, synthetic construct
  source 1..120: mol_type = other DNA
atgcacctcttcatctggctgctcatttgtaccctttataactgctatggtttgaatgtttccctagaaaagcatctgttggataattcatcctgaatgcaacatttttaagaggtggga

SEQ ID NO: 27243 - DNA, 120 bp, synthetic construct
  source 1..120: mol_type = other DNA
agtttgacctcttattccccctacctctcaccctctcttgcccttttgctttctaccaggtacagtccttggtcttggaattcccatcctcaacaaccatgaacaaaataaatttctgtt

SEQ ID NO: 27244 - DNA, 120 bp, synthetic construct
  source 1..120: mol_type = other DNA
caggtcactagtgggtgagagagcatgagcatgaccacctgagctccgcctcctgtcagatcagtggcggaattagattctcataagagcatgaaccctattgtgaactctgcatgcgag

SEQ ID NO: 27245 - DNA, 120 bp, synthetic construct; identical to SEQ ID NO: 7824
  source 1..120: mol_type = other DNA

SEQ ID NO: 27246 - DNA, 120 bp, synthetic construct
  source 1..120: mol_type = other DNA
aagattgaggaccacatatctccccaggtggcctccctcacaaattgttcacaagataattccttgtgggccccaacatctttactctaaaacagagttttgttgaatttcaccctaaca

SEQ ID NO: 27247 - DNA, 120 bp, synthetic construct
  source 1..120: mol_type = other DNA
tgtaaaatgcagatttactgagcactcgatgaaagcatagttgcctgttcctttttcctctcctgcctgctctttctcctgtaaatattgaagtcctcaaaaccctcttagtaaaaagca

SEQ ID NO: 27248 - DNA, 120 bp, synthetic construct
  source 1..120: mol_type = other DNA
aggaacttcctgagttctttgagttagtttaagaattcccaaaccttgggaggtgagaaacccctgactttgcagccatgatagacagaagtgcaggtaacctggaacccaataacttgt

SEQ ID NO: 27249 - DNA, 120 bp, synthetic construct; identical to SEQ ID NO: 7825
  source 1..120: mol_type = other DNA

SEQ ID NO: 27250 - DNA, 120 bp, synthetic construct
  source 1..120: mol_type = other DNA
cacatatcagtaggactgtgatgtccgcttgagtctcagacaaacaagtttttgttaagggtttcaaaaggggagggggtgtaagaacaaggagtaggtaaaaaatcacacgcttctgag

SEQ ID NO: 27251 - DNA, 120 bp, synthetic construct
  source 1..120: mol_type = other DNA
ttggtaaacatcttaaacaacagaaaacagggtttgagagcagagaagtggtctgaccacaagtttaccagggcagagtttttccccaccctagtaagcctgagggttctgcaagagacc

SEQ ID NO: 27252 - DNA, 120 bp, synthetic construct
  source 1..120: mol_type = other DNA
ggaaaaaaatttagtgatatctctcctacttgcacgtctgtttataggctctgggcaagaagaaaaaatatggctctttttgcccaacctcgcaggcagtcagaccttatggttgtcttt

SEQ ID NO: 27253 - DNA, 120 bp, synthetic construct; identical to SEQ ID NO: 7826
  source 1..120: mol_type = other DNA

SEQ ID NO: 27254 - DNA, 120 bp, synthetic construct
  source 1..120: mol_type = other DNA
caagtaaacctctaccttcttcggtcccagaggaaaagataaaaaaaaattaagcatttatttcatgtccctaagtctgctaaacacaggtttctaccagctattcattgtccagacatg

SEQ ID NO: 27255 - DNA, 120 bp, synthetic construct
  source 1..120: mol_type = other DNA
aatattaatataaaacatcagtgtgcaaccagatcctctgagatcttacaaacctgggtgttttaatcctagtaagagacaatgccaagcacacaatgccactccaataatctggagtat

SEQ ID NO: 27256 - DNA, 120 bp, synthetic construct
  source 1..120: mol_type = other DNA
ttcattcagacactctgaatccctaccagatacaagataaatttcttgtcttggagcactgctccaataattaaaatttatcattcttttcccacccttcacactccagcacttcaaccc

SEQ ID NO: 27257 - DNA, 120 bp, synthetic construct; identical to SEQ ID NO: 7827
  source 1..120: mol_type = other DNA

SEQ ID NO: 27258 - DNA, 120 bp, synthetic construct
  source 1..120: mol_type = other DNA
tgagttattatcaataaaaaggaacgtctgggttatgataagaggttgtggagtccaaaattttatcatgcagttgaagcctccaggtgccaggcttcagagagaatagattataatgtt

SEQ ID NO: 27259 - DNA, 120 bp, synthetic construct
  source 1..120: mol_type = other DNA
gtctttcaagttaacttttgagcaccctggctgaggagggtgtccattaagatggttgggagagggtgggtttgaagtttatttttggtttacaacatgtaaaatgttaagaggagatag

SEQ ID NO: 27260 - DNA, 120 bp, synthetic construct
  source 1..120: mol_type = other DNA
agtcagatgaccacctgctgaagcggcattgttgtctcaggtaaatactcagggttcattgtatcttgccaagaagattaaggacagtgacacacaaggagtgagtttattggccggtgc

SEQ ID NO: 27261 - DNA, 120 bp, synthetic construct
  source 1..120: mol_type = other DNA
taggtgtccttttcctattggcacagctgccagcattcactcgtgcaagcttccagcttgcttgtctatgtctgaagcttgattttacaggctggtctttgtcagaaaagaaaatgattt

SEQ ID NO: 27262 - DNA, 120 bp, synthetic construct; identical to SEQ ID NO: 7828
  source 1..120: mol_type = other DNA

SEQ ID NO: 27263 - DNA, 120 bp, synthetic construct
  source 1..120: mol_type = other DNA
ggcgtgggctatggattctgttccgggatgtgtagttttcagcctggttctgtggccttccccacaataaaattaacccccaataccagatatactactttatgtgtaaattacagaaat

SEQ ID NO: 27264 - DNA, 120 bp, synthetic construct
  source 1..120: mol_type = other DNA
tccttgtgtgacagccacatcctgaattgtctacctggcctctacctcatggtggagagatcaacagggaatatcacatctcttaactgatgatatacatcctccctttcctttctgcaa

SEQ ID NO: 27265 - DNA, 120 bp, synthetic construct
  source 1..120: mol_type = other DNA
aggttcctgatccggctgagcaacaagatttctggtggaggcttagaaaatactcaggccactcctcagaacccctgtctcacaatattatgcacaagaccaaggaatcatttacataac

SEQ ID NO: 27266 - DNA, 120 bp, synthetic construct
  source 1..120: mol_type = other DNA
cgtgagctccagccttgtcataaatccagaatctcttgctcgactccagacttcctggatctcagcaccacatacaggtgatcctggtgcacatgggggttccttgtctgagtgtcctct

SEQ ID NO: 27267 - DNA, 120 bp, synthetic construct; identical to SEQ ID NO: 7829
  source 1..120: mol_type = other DNA

SEQ ID NO: 27268 - DNA, 120 bp, synthetic construct
  source 1..120: mol_type = other DNA
ccatctccactgacagcagctccacccttccttctactcactcattttacaactatgggtgtccttgattcgtctttctcacaccacagatacaatccattggcaaatgctgtgagtcta

SEQ ID NO: 27269 - DNA, 120 bp, synthetic construct
  source 1..120: mol_type = other DNA
ccctcgtccctcgcctctcaattctgtcctcagcacagccatcagagatccttttaagaaagaagtcatatcatggccctcttctgctcaaaactgtcctctaactccccatcccactca

SEQ ID NO: 27270 - DNA, 120 bp, synthetic construct
  source 1..120: mol_type = other DNA
accttcctgccattgtgcatttggactggagtttccttgcctagaaagaacttccccagacatcctcatatccctcaaatctttcctgaaaggtcatctttgcaacaaggcacacattga

SEQ ID NO: 27271 - DNA, 120 bp, synthetic construct
  source 1..120: mol_type = other DNA
tctgcctcttaccactggagcatatgctcagatatttttctgattttacttcaatggcgttccccagatgcagaacttttctgtcctatgtctggctgacaacaaaggtcagttgaatga

SEQ ID NO: 27272 - DNA, 120 bp, synthetic construct; identical to SEQ ID NO: 7830
  source 1..120: mol_type = other DNA

SEQ ID NO: 27273 - DNA, 120 bp, synthetic construct
  source 1..120: mol_type = other DNA
atccctcctcccacaccaaccgccctgcacactgcagcacacgatcaggtttctctcttcaggaaggaacaattctagactatggacccaattttacaaacaaatacaaatctaaattag

SEQ ID NO: 27274 - DNA, 120 bp, synthetic construct
  source 1..120: mol_type = other DNA
aatgggtctgaaaatttgtctcagaaagcacagggactcccgtgtgcaggggctgccctgggcgatgggtgagcctctgtggtcacagcttccgctggacaagtttccactgaagggaca

SEQ ID NO: 27275 - DNA, 120 bp, synthetic construct
  source 1..120: mol_type = other DNA
cccacctgcaacagactcagcacagcgaacatgcaaattctggaaggttctcaggtctttatttgctctctcaacttctaggaattgacttatttaattaatccatcaacgcttcatagc

SEQ ID NO: 27276 - DNA, 120 bp, synthetic construct
  source 1..120: mol_type = other DNA
aaatatttgagaacacaaatttatattcaggttcttaacttcattagggaagtaagaagttgcagctcagtgcaccatgaatttgagacagagatggagacatccagccccacctctctg

SEQ ID NO: 27277 - DNA, 120 bp, synthetic construct; identical to SEQ ID NO: 7831
  source 1..120: mol_type = other DNA

SEQ ID NO: 27278 - DNA, 120 bp, synthetic construct
  source 1..120: mol_type = other DNA
accacttcagctccccagaatctcacctttacaagtgatgagagactcatcagagccctgggcactgttgctgcctggggtagaacaaaaaaaaagacctggtcagagcccgcaggagat

SEQ ID NO: 27279 - DNA, 120 bp, synthetic construct
  source 1..120: mol_type = other DNA
ccctccttttccacctgtgggaagaaaatgccctatgaggggactgggaggaggcagggccatgtgatcttaggggaacctcctagtcttggacccaagagaagtttccagaactacgac

SEQ ID NO: 27280 - DNA, 120 bp, synthetic construct
  source 1..120: mol_type = other DNA
tagcagggaccttcccctgactcatgaatgctggaatcaggaccccaacaccataatcatcaaggtgatacatccgtccttcattgtcacatgtgcttcacaaaagagtaagtgctggca

SEQ ID NO: 27281 - DNA, 120 bp, synthetic construct
  source 1..120: mol_type = other DNA
gaaactcccagtgggacaagaaaacccagaccccgctcttcaccccttccctacctgagctcttcctcctacacatcatagcggtgaccacagctccaaggacagctaggacaaccagga

SEQ ID NO: 27282 - DNA, 120 bp, synthetic construct; identical to SEQ ID NO: 7832
  source 1..120: mol_type = other DNA

SEQ ID NO: 27283 - DNA, 120 bp, synthetic construct
  source 1..120: mol_type = other DNA
gtgatctccgcagggtagaagcccagggcccagcacctcagggtggcctcatggtcagagagggggtggtgggtcacgtgtgtctttgggggttctgacgggaagagtcagaaaattcag

SEQ ID NO: 27284 - DNA, 120 bp, synthetic construct
  source 1..120: mol_type = other DNA
ctgggataatctcctattcattggaaagttctagtctctgagggaggaacagcgacttctggtcctgacctgagtggaggctgcaggactcagaaaagctggaatcaaaccttcagacac

SEQ ID NO: 27285 - DNA, 120 bp, synthetic construct
  source 1..120: mol_type = other DNA
tccatttcctcagagacttcatcccttaattgtcctagagagcagagggggccctcagaggaaactcaggaaaactcatgccattctccattcaagggagggcgatattccagtgctgat

SEQ ID NO: 27286 - DNA, 120 bp, synthetic construct; identical to SEQ ID NO: 7833
  source 1..120: mol_type = other DNA

SEQ ID NO: 27287 - DNA, 120 bp, synthetic construct
  source 1..120: mol_type = other DNA
gccccgcccccgcggtcagcccagtcccccgagccccgccccgccccgaccaacccgcggggattttggcctaaaccgaaaatgaaaccgggtaaaggcgactggggctctctccggtcg

SEQ ID NO: 27288 - DNA, 120 bp, synthetic construct
  source 1..120: mol_type = other DNA
cactcaccgtcctcgctctggttgtagtagccgcgcaggttccgcaggctcactcggtcagcctgtgcctggcgcttgtacttctgtgtctcccggtcccaatactccggcccctcctgc

SEQ ID NO: 27289 - DNA, 120 bp, synthetic construct
  source 1..120: mol_type = other DNA
gacacggcggtgtcgaaatacctcatggagtgggagcctgggggcgaggaggggctgagacccgcccgacccacctccctgcgcggctccccgggtcctgcgccctcgccgggagggccc

SEQ ID NO: 27290 - DNA, 120 bp, synthetic construct; identical to SEQ ID NO: 7834
  source 1..120: mol_type = other DNA

SEQ ID NO: 27291 - DNA, 120 bp, synthetic construct
  source 1..120: mol_type = other DNA
cctgagagccccgcccgggacctgggacttcgtcctgatccctcttctcctacaccaagcatctttgtcacactgtgtgcctgagtcctggacaaggatctgtctgtggaaaccagggag

SEQ ID NO: 27292 - DNA, 120 bp, synthetic construct
  source 1..120: mol_type = other DNA
ccaccctttgccttaccttacctcacctcaggtaatattaaactacatccagcaaaataaaggaaacttacctctccccttggactcttgtacagggaaactcaccatggggaacttgat

SEQ ID NO: 27293 - DNA, 120 bp, synthetic construct
  source 1..120: mol_type = other DNA
agcaccaggtagagattctcatagagaccagtttcctttttgtttattgatacagtaggtagcacaatattggtaatccctgaatgattagaattccaatctgtgaaagacctgtgtcaa

SEQ ID NO: 27294 - DNA, 120 bp, synthetic construct; identical to SEQ ID NO: 7835
  source 1..120: mol_type = other DNA

SEQ ID NO: 27295 - DNA, 120 bp, synthetic construct
  source 1..120: mol_type = other DNA
ttaaggcagtcacacaaaatgtattaaataccgaatgcaaagaaccccctgccaggctcttctactgctttagaattctttcctctgctccttttcctcacctcctgcttctccagccct

SEQ ID NO: 27296 - DNA, 120 bp, synthetic construct
  source 1..120: mol_type = other DNA
gtgctcagcagtcctgctaatgtgactcaggtcgtgtcatttcttcacttataatggttgggttttggtctaccattttgctatacgttttcaatttgtctcatatctttttgtttctgt

SEQ ID NO: 27297 - DNA, 120 bp, synthetic construct
  source 1..120: mol_type = other DNA
cccaattccttgacttttcacagtgaaattcaggtaatattaagctgcatccagcaaaataaaggacacttcaaatggtgtagtttcacttaaactatcattatgctattattattgtat

SEQ ID NO: 27298 - DNA, 120 bp, synthetic construct; identical to SEQ ID NO: 7836
  source 1..120: mol_type = other DNA

SEQ ID NO: 27299 - DNA, 120 bp, synthetic construct
  source 1..120: mol_type = other DNA
tgtaaaaaaattcaccagttttagctgcactttttggtggatattggtaattatttatagtgtaactaccacactgcccagtagagaaacaccaaatgcaaagatcctcctactaggccc

SEQ ID NO: 27300 - DNA, 120 bp, synthetic construct
  source 1..120: mol_type = other DNA
tcagaccttcttctccccttacctccccctcccagtcactcctgagttgtggcgctgtagagaacagtttcttttccctaaaaactttctttatccccctttctatttaatccttgcctc

SEQ ID NO: 27301 - DNA, 120 bp, synthetic construct
  source 1..120: mol_type = other DNA
cccttagcataacgatgtttgagatgatgccattcattcatttttgttgctgagcagctgccgagtattgctggaatcccagtttattcattggtttctgtgtctccagttgatagacat

SEQ ID NO: 27302 - DNA, 120 bp, synthetic construct; identical to SEQ ID NO: 7837
  source 1..120: mol_type = other DNA

SEQ ID NO: 27303 - DNA, 120 bp, synthetic construct
  source 1..120: mol_type = other DNA
ttcatctaagtgacttattacatatattttacgaactattttgcaaattcaatgattaattccagagactttttcagaattccctagtgttttctacatatacaatgaagctggtgacaa

SEQ ID NO: 27304 - DNA, 120 bp, synthetic construct
  source 1..120: mol_type = other DNA
tcctcccacctcagcctcccaaaatgcagggattacaggcatgagccaccatgcctggtccttgttgcactggttaggatggctgttaggtgtttaaacaagaatgataagagctcacat

SEQ ID NO: 27305 - DNA, 120 bp, synthetic construct
  source 1..120: mol_type = other DNA
tgaaaaaaagctcacacacgtatatgaaacgtgactgtttataatcctatccaaaaaagacctgatttcaagcaacagcaggattgcttccgttcaatacttggacctgcaaacatcaaa

SEQ ID NO: 27306 - DNA, 120 bp, synthetic construct; identical to SEQ ID NO: 7838
  source 1..120: mol_type = other DNA

SEQ ID NO: 27307 - DNA, 120 bp, synthetic construct
  source 1..120: mol_type = other DNA
cattctctcagtgttcctgaagaagccatcagtccaggagtcactgctagctggattgaagcacacctcccagatgattctatagacacatggaagaagagggggaatgtggagtatatg

SEQ ID NO: 27308 - DNA, 120 bp, synthetic construct
  source 1..120: mol_type = other DNA
ttggttttagagggaggctgtaaaaactggttcctttgctattcccagtatacaacaaatgctaaggtcactccacccccacaacaccagaatgaagagttgtctatctcattggatttt

SEQ ID NO: 27309 - DNA, 120 bp, synthetic construct
  source 1..120: mol_type = other DNA
aatgagaggacgggaccactgaatatatcaattccagttgaaccagttgctgcttctaaatctgatgtttcacccatcattcagccagtgcctagcataaagaatgttccacagattgat

SEQ ID NO: 27310 - DNA, 120 bp, synthetic construct; identical to SEQ ID NO: 7839
  source 1..120: mol_type = other DNA

SEQ ID NO: 27311 - DNA, 120 bp, synthetic construct
  source 1..120: mol_type = other DNA
acgtgaacaggccaagaaagaggataaagaaatctcagcaaagaagggcaaagaaataacaagagtaaaaagacaaagtaaaagtgatcatgaaacctctggtgccgagaagtctgtaga

SEQ ID NO: 27312 - DNA, 120 bp, synthetic construct
  source 1..120: mol_type = other DNA
agaaactggaattctaaggacagaaacttttagagaggatacagatgatactgaaagaaataaaactcaacgagaaccttcgataatagcacgaagtgaagaaatggggaggatggtacc

SEQ ID NO: 27313 - DNA, 120 bp, synthetic construct
  source 1..120: mol_type = other DNA
ccttccacccctccaactcataaaggcaagccacagattcctgctaagcaggatagggaaccttccaaactgaaatgctcttactcctccccagatataacccaggctattaaagaggaa

SEQ ID NO: 27314 - DNA, 120 bp, synthetic construct; identical to SEQ ID NO: 7840
  source 1..120: mol_type = other DNA

SEQ ID NO: 27315 - DNA, 120 bp, synthetic construct
  source 1..120: mol_type = other DNA
ccccgtggacaggacagtatagatatatcagtccaaaagaccttaaaatcaccattgggaagatcaattaccagtttgcaggatacagtcaagattcacaagaatttcttctgttcctaa

SEQ ID NO: 27316 - DNA, 120 bp, synthetic construct
  source 1..120: mol_type = other DNA
tctatgagtctattattgttgcactttttcagggtcaattcaaatctacagtacagtgcctcacccgtcacaaaaagtctaggacacttgaggccttcatgtatttgtctctactgatag

SEQ ID NO: 27317 - DNA, 120 bp, synthetic construct
  source 1..120: mol_type = other DNA
gaaatctggaagttaccacctgtgcttttagtgcatctgaaacatttttcctacaatggcaggtggaaacaaaaattacagacatctgtggacttcccgttagaaaatcttgccttgtca

SEQ ID NO: 27318 - DNA, 120 bp, synthetic construct; identical to SEQ ID NO: 7841
  source 1..120: mol_type = other DNA

SEQ ID NO: 27319 - DNA, 120 bp, synthetic construct
  source 1..120: mol_type = other DNA
tagcaatagctggccatttagaggaattctaggacagtgggagctgtgttactagcactatataattcctgtcagtggtgacaaataacacttagcaagtattgcagtaagcatcactta

SEQ ID NO: 27320 - DNA, 120 bp, synthetic construct
  source 1..120: mol_type = other DNA
ctggtctaaaaaccattgtaccctttttttccttttcactgttacagccttttcacatttctaaatcccatcttcatatactatgaatactctagaatgatgtgaagcagataggaatgt

SEQ ID NO: 27321 - DNA, 120 bp, synthetic construct
  source 1..120: mol_type = other DNA
ctcagaggattgcatttttttctttgagcatattttgagtaactgcagtgctttcttatggaaatgacagggcaaagctatttttctgttggctttgggggcatttgggtgcactaaatc

SEQ ID NO: 27322 - DNA, 120 bp, synthetic construct
  source 1..120: mol_type = other DNA
gctcaatatcactgctcattagagaaatgtaaatcaaagccacaatgagataccatctcccgccagtcagaatggtaattattaaaaagtcaagaaacaatagatgctggtgaggctgtg

SEQ ID NO: 27323 - DNA, 120 bp, synthetic construct; identical to SEQ ID NO: 7842
  source 1..120: mol_type = other DNA

SEQ ID NO: 27324 - DNA, 120 bp, synthetic construct
  source 1..120: mol_type = other DNA
atggatgaagctggaagtcatcatcctcagcaaactaacacgggaacagaaaacaaagcacctcatgttctcattcctaagtgagagttgaacaatgacaacacatggatacagggaggg

SEQ ID NO: 27325 - DNA, 120 bp, synthetic construct
  source 1..120: mol_type = other DNA
gttctgcacatgtatcctggaacctaaagtaaaataaaacaaagcaaattaaaaaaagaaagcccatgtcttacatgtatgcatatgttcattgcagcactattcacaatagcaaagaca

SEQ ID NO: 27326 - DNA, 120 bp, synthetic construct
  source 1..120: mol_type = other DNA
gtccctcggcttcctgccttggaagcgcagcagcaggcatcgtgggaaggtgaagagcttccctaaggatgacccgtccaagccggtccacctcacagccttcctgggatacaaggctgg

SEQ ID NO: 27327 - DNA, 120 bp, synthetic construct; identical to SEQ ID NO: 7843
  source 1..120: mol_type = other DNA

SEQ ID NO: 27328 - DNA, 120 bp, synthetic construct
  source 1..120: mol_type = other DNA
gaagaaggcccacctgatggagatccaggtgaatggaggcactgtggctgagaagctggactgggctggtgagaggctcaagcaccaggtacctgtgaaccaagtgtttgggcaggatga

SEQ ID NO: 27329 - DNA, 120 bp, synthetic construct
  source 1..120: mol_type = other DNA
ggcatggcatcctgctcgtgtgggcttctctgtggtacgtggtgggcagaaaggctaccatcaccgcactgagatcaacaagaagatctataggattggctagggctaccttatcaagga

SEQ ID NO: 27330 - DNA, 120 bp, synthetic construct
  source 1..120: mol_type = other DNA
actatggtgaagtgaccaatgactttgtcatgctgaaaggctgtgtggtgggaaccaagaagtgggtgctcaccctccgcaagaccttgctggtgcagacaaagcagcgggctctggaga

SEQ ID NO: 27331 - DNA, 120 bp, synthetic construct
  source 1..120: mol_type = other DNA
atgggaccactcaagaaagaccgaattgcaaaggaagaaggagcttaatgctgggaacagatattgcaactggtgggatctcaataaaagttattttccattaaaaaaaaaagaaaaaga

SEQ ID NO: 27332 - DNA, 120 bp, synthetic construct; identical to SEQ ID NO: 7844
  source 1..120: mol_type = other DNA

SEQ ID NO: 27333 - DNA, 120 bp, synthetic construct
  source 1..120: mol_type = other DNA
caataaaaccgcatgacacaagtttacctatataacaaacctgtacatgtactccttaactaaaaataaaagttaaattaaaaaaaaaagaaacaaagaaactgcatatctggaaagagc

SEQ ID NO: 27334 - DNA, 120 bp, synthetic construct
  source 1..120: mol_type = other DNA
atgttatttcctcagttttggtttctctgttcctcttgtcctgaccaacgacttcttattagaaaccatagaaacaaaagaaagtagaataacacctttaaagtgctggaagaaaaaaag

SEQ ID NO: 27335 - DNA, 120 bp, synthetic construct
  source 1..120: mol_type = other DNA
ggtaaagaaaattcttcaggctaaaggcaaatgataccaggtgggaaatgaggttatcagaaaagatgaagatgatcaaaaatggtaaatactgagctaagtgcaaaaggctatcttgtt

SEQ ID NO: 27336 - DNA, 120 bp, synthetic construct; identical to SEQ ID NO: 7845
  source 1..120: mol_type = other DNA

SEQ ID NO: 27337 - DNA, 120 bp, synthetic construct
  source 1..120: mol_type = other DNA
tttcagaactattgtgaatacaaaagtaatcaaagaacagtcctgcccagaaagaggagttatccctaaatatggtgtccctggaacaggtggctctccctgctggacctcttccacgtg

SEQ ID NO: 27338 - DNA, 120 bp, synthetic construct
  source 1..120: mol_type = other DNA
gtacattacaagctgggcatgacagctcacgcctgtaatcccagcaattcaggatgctaaggcaagaggattgcttgagatcaggaattggagaccagcttggacaacatagtgggaccc

SEQ ID NO: 27339 - DNA, 120 bp, synthetic construct
  source 1..120: mol_type = other DNA
ttgagctacgatcccaccactgggctccagcccaggccagagtgaggtcttgactcaaaaaaatacattgtaagcctttgctcactatgggttatttattatttattcaatgtgtatttt

SEQ ID NO: 27340 - DNA, 120 bp, synthetic construct; identical to SEQ ID NO: 7846
  source 1..120: mol_type = other DNA

SEQ ID NO: 27341 - DNA, 120 bp, synthetic construct
  source 1..120: mol_type = other DNA
acggggtttcaccatgttagccaggatggtctcaatctcctgacctcgtgatctgcccacctcgacctcccaaagtcctgggattacaggcgtgagccaccgcacccggcctctccttgg

SEQ ID NO: 27342 - DNA, 120 bp, synthetic construct
  source 1..120: mol_type = other DNA
gcgaagggccaggccttactccccatgcagagaggaggctatggccatgaagacgcctgtggagaagtgaggacccgctccctctacactgatggccaagagcctacagatggcggagaa

SEQ ID NO: 27343 - DNA, 120 bp, synthetic construct
  source 1..120: mol_type = other DNA
cctggggctgctggttgttctgggtgctcagtgtccagaaaagaagatggggaggaggctttgtgcaaaacagtaaccatactctataaattattttttcattagcctttgtgtcataaa

SEQ ID NO: 27344 - DNA, 120 bp, synthetic construct; identical to SEQ ID NO: 7847
  source 1..120: mol_type = other DNA

SEQ ID NO: 27345 - DNA, 120 bp, synthetic construct
  source 1..120: mol_type = other DNA
tgcattttgctgattgctccccaaggcatagtttaatatgtatttctattatctgtattgcctctaaattggtaattggctatggagatcagcttctattcaggcttggtttctttttca

SEQ ID NO: 27346 - DNA, 120 bp, synthetic construct
  source 1..120: mol_type = other DNA
tcatgatgggttgcaaaagagttattatagtctcagtctctcattccttcttcatttattatctgaataatttctaagtaagagattcaccctcctctactgtttgtttactactagaaa

SEQ ID NO: 27347 - DNA, 120 bp, synthetic construct
  source 1..120: mol_type = other DNA
atagcagcacgatttgtaaaatctgtatacaacaaaattgtctatcaacagtgaaaggacaagaaatgtgagttatttataaagtggagcattggacagccatgggagtgaataggctac

SEQ ID NO: 27348 - DNA, 120 bp, synthetic construct; identical to SEQ ID NO: 7848
  source 1..120: mol_type = other DNA

SEQ ID NO: 27349 - DNA, 120 bp, synthetic construct
  source 1..120: mol_type = other DNA
catggtcatgaaagggagctgcagacatatggtttccagagtttcaaaatccatatgactaaaatctatgtgatgcgtattatatgatgactgcctcaagacagacaggtgtccacttag

SEQ ID NO: 27350 - DNA, 120 bp, synthetic construct
  source 1..120: mol_type = other DNA
tccactcctatcatcacctcagacaaccctgcgtttagctcaagattcttcccttcatcgtaactgaaagtcactaatgactgcaatcaatttgaaatactataagtaggtaagatttcc

SEQ ID NO: 27351 - DNA, 120 bp, synthetic construct
  source 1..120: mol_type = other DNA
cagttattcttcatccagaattacacaatagaagctctcattcttgcatttcccaacagtttgccttagccaggaaaataaaccccatgggtctctagcatgaccacagtgcaagaataa

SEQ ID NO: 27352 - DNA, 120 bp, synthetic construct
  source 1..120: mol_type = other DNA
tgtttctaggataaggcaaaggccctgctcatggattcatccgtaatctgaacacagcacatgaagagtgaacagctgtcaatatctactttcacctcaatgtaaactttcaaaattaag

SEQ ID NO: 27353 - DNA, 120 bp, synthetic construct; identical to SEQ ID NO: 7849
  source 1..120: mol_type = other DNA

SEQ ID NO: 27354 - DNA, 120 bp, synthetic construct
  source 1..120: mol_type = other DNA
gcccaagctgtaagggctggcaaatattttgagtattggtcccaaaggcccctgaaggtgaaaggatcttgttcttcattttcattacttctaagcactgagacctcttacaagaatcat

SEQ ID NO: 27355 - DNA, 120 bp, synthetic construct
  source 1..120: mol_type = other DNA
tactaaggcaataaaactattcaactgagcattcaaattcacacagaggataccacgccaagaaaatgaaagcagaaatattggattctccttatttgttaaacctttccctctagaacc

SEQ ID NO: 27356 - DNA, 120 bp, synthetic construct
  source 1..120: mol_type = other DNA
cagttattaatcttcaaaggcctagcaccaggcagcttcacacagcacatctgcagaattgtaatgatcaataagagtaaacccaaagtacactaaatactttcatggcctacaggaaaa

SEQ ID NO: 27357 - DNA, 120 bp, synthetic construct
  source 1..120: mol_type = other DNA
catttaaatgttacacagtaaatactgagaaaacccagaatttttggatgtgcagaagcaatatcacatcattaatacaaaaggtgctcagctgcgggattataataccattgagtgctg

SEQ ID NO: 27358 - DNA, 120 bp, synthetic construct; identical to SEQ ID NO: 7850
  source 1..120: mol_type = other DNA

SEQ ID NO: 27359 - DNA, 120 bp, synthetic construct
  source 1..120: mol_type = other DNA
caaggagatcacttctcgtatcactttttggtggctgtgcaggttcttgacactttgcctcagctactggtggtagtgtgggggcgaatgcatggggaagacaaaaaagaagaactgagc

SEQ ID NO: 27360 - DNA, 120 bp, synthetic construct
  source 1..120: mol_type = other DNA
gaggatttgcagaaggcaacaaaggcagtttgtactgtaaaagggggaagagaaggaggtcttgacgggttgtaatatgcaagcacctgtgctgggagcatcctgtagtctcctggagcc

SEQ ID NO: 27361 - DNA, 120 bp, synthetic construct
  source 1..120: mol_type = other DNA
gcctggtttgtgggcccatgtggacatgcatcttcagctgcctaggaagggtcgtgagaatggtttggagtagctcgataagagcatccctaacatccattgtatgggacctgctgtcta

SEQ ID NO: 27362 - DNA, 120 bp, synthetic construct
  source 1..120: mol_type = other DNA
atcatattccactcatggtgcttgtttctggcttttgtaatccttttcacatcataagtggtgccatctatgtggttttgctacttttgatgccttctgtctttccttttgtcttctgtg

SEQ ID NO: 27363 - DNA, 120 bp, synthetic construct; identical to SEQ ID NO: 7851
  source 1..120: mol_type = other DNA

SEQ ID NO: 27364 - DNA, 120 bp, synthetic construct
  source 1..120: mol_type = other DNA
ctccttaaatagctcaccaaatatgtcttcagcatgtatgttcagattgcttagctggtgcgtaatagtgacaagattgttgttggttacactttcaagtcactggtaatcccttcaggc

SEQ ID NO: 27365 - DNA, 120 bp, synthetic construct
  source 1..120: mol_type = other DNA
gcttcagaaatttcctcaggaagcatcaccactttgattcagataccagcagtaactgcaatcaaaattaaaatgatcagtcccgctgatgtagaggcagagattgcactggtagctccc

SEQ ID NO: 27366 - DNA, 120 bp, synthetic construct
  source 1..120: mol_type = other DNA
aacaccttagatatgagctaaaatcccccaccaaatgtgggaaactttcaactattattttctcaaatatttttttctgatcctgtgtcttcttttgaggatccacttgcatatctggtc

SEQ ID NO: 27367 - DNA, 120 bp, synthetic construct; identical to SEQ ID NO: 7852
  source 1..120: mol_type = other DNA

SEQ ID NO: 27368 - DNA, 120 bp, synthetic construct
  source 1..120: mol_type = other DNA
gaatttccaattgttttgttagactcaaatcctgccttttcacctctcaagccagtaagatttttgctttcttctactgagctctgtgcaggttggcaaatgcactcagtccatgttact

SEQ ID NO: 27369 - DNA, 120 bp, synthetic construct
  source 1..120: mol_type = other DNA
gattcccaagtggcccacacccatgcagagtttagtgttcaactagggatgagcataatttgcattcacattgttgatctcaactcttctgcagctctctttcaacattctcatttacat

SEQ ID NO: 27370 - DNA, 120 bp, synthetic construct
  source 1..120: mol_type = other DNA
agagcactcataggtaagaaggaaaggccaccaacttgcagtccttacctaagacagaaggagtcttaaacaagaaagctcttatcacatattgcttgcctttgttaattttccagtgac

SEQ ID NO: 27371 - DNA, 120 bp, synthetic construct
  source 1..120: mol_type = other DNA
gccataaccagaagttctaccctgaaagagacttttgggagagaaggtcacagtccacaattcaatcttctgagacaaatatggatccaggcaccagaaactgtcaagttagatttctaa

SEQ ID NO: 27372 - DNA, 120 bp, synthetic construct; identical to SEQ ID NO: 7853
  source 1..120: mol_type = other DNA

SEQ ID NO: 27373 - DNA, 120 bp, synthetic construct
  source 1..120: mol_type = other DNA
ggttctatgggaatcactgacttcatacaacctacaatgataaagaaggacaccctacatatatatgactggcctctttagtattggagagagcacattccatagctcataactttccga

SEQ ID NO: 27374 - DNA, 120 bp, synthetic construct
  source 1..120: mol_type = other DNA
tcacatgtttttaataaattctacagccggttgtagctattggcaatgagacctcccattattgaggccctggtctttttaacttgaggaattccagcaaatctaaggagtacaagctct

SEQ ID NO: 27375 - DNA, 120 bp, synthetic construct
  source 1..120: mol_type = other DNA
tgcaagggtatttctctaatccaaaatcctatgagctagtacaagtacagaaacattccataataaatggaaatgtcattttgatccaggcaaaagtcaagcatatctgccatttggccc

SEQ ID NO: 27376 - DNA, 120 bp, synthetic construct
  source 1..120: mol_type = other DNA
gcagtcataggactcattgcccaagtttcagggtttggggaaaaagttccattctttttctgaatttgagtaatagcttctggcttactactgggccctggtagattctgaattctatga

SEQ ID NO: 27377 - DNA, 120 bp, synthetic construct; identical to SEQ ID NO: 7854
  source 1..120: mol_type = other DNA

SEQ ID NO: 27378 - DNA, 120 bp, synthetic construct
  source 1..120: mol_type = other DNA
gcttggataccccagagttaactgtcagggcattagagtctctttcaggaatcatcattaagagtaatggaaataaaaatacttccagtgagaagatgttcaattagaccatctggaagt

SEQ ID NO: 27379 - DNA, 120 bp, synthetic construct
  source 1..120: mol_type = other DNA
cagtgactttaaaggaataagatggtaaggtttgtgataaggagcgttggggaggagatttgaaccactcacatggcacatttaggtaaacatacctaccctcatgctaacaaaaatgga

SEQ ID NO: 27380 - DNA, 120 bp, synthetic construct
  source 1..120: mol_type = other DNA
taggataattaaggtttagttttcatggcctcctaaggcatttggaatagaagacagagttcaggtagcactcagagtgggaaatttaatagagtgttctcctcatttcaccaggatccc

SEQ ID NO: 27381 - DNA, 120 bp, synthetic construct
  source 1..120: mol_type = other DNA
ggcaaaaccttctcctgagattaaagagaagtggatttgcagcccgagttcacactccctgggtggtctaaaaatcatcaaggcatgaatttattttaaagtagtgcagactccaaggaa

SEQ ID NO: 27382 - DNA, 120 bp, synthetic construct; identical to SEQ ID NO: 7855
  source 1..120: mol_type = other DNA

SEQ ID NO: 27383 - DNA, 120 bp, synthetic construct
  source 1..120: mol_type = other DNA
caaacacataacacttaagcatgaaaatataataataaaatttaaatctcaatgaattttgaagacaaacaatttaacacaaacacacctagtaaagtacaagaagttctaaagaatgta

SEQ ID NO: 27384 - DNA, 120 bp, synthetic construct
  source 1..120: mol_type = other DNA
tgagaatctataaatattgttaaatgaaatacaaattattttatctttttccaggtctaatgttggatttcttttcttcatattctgattaaaatttcaagataaacttctcactcataa

SEQ ID NO: 27385 - DNA, 120 bp, synthetic construct
  source 1..120: mol_type = other DNA
tttccaagctattgttggattgtccagtacttcacgttctccaaccttgtaagtaatgaatgtacaagttcaactgtacatttttactagtgggcagttttccacaatatgaatgccatt

SEQ ID NO: 27386 - DNA, 120 bp, synthetic construct
  source 1..120: mol_type = other DNA
tgctctctcaactggatgcaatggaatgccagggaggaaagtttaagataaactctagtcaccacggaattgtgatttttaagcatagtaagcatagtctgaaataccacattctttcca

SEQ ID NO: 27387 - DNA, 120 bp, synthetic construct; identical to SEQ ID NO: 7856
  source 1..120: mol_type = other DNA

SEQ ID NO: 27388 - DNA, 120 bp, synthetic construct
  source 1..120: mol_type = other DNA
gtaggtacaaaaaccagtgcctgaaatatagcaagagccttttaaatgcagccattattgttattatggttattcttattgtcgtttttcacagaataccttctggttcccacacaggat

SEQ ID NO: 27389 - DNA, 120 bp, synthetic construct
  source 1..120: mol_type = other DNA
aattttacagaagttcccaataccttatctgaaggtttcttacagtcagattatgagtcttggttgaaggcatcttctggagtcatggtaacactccgggtattctgggaaaacagtgat

SEQ ID NO: 27390 - DNA, 120 bp, synthetic construct
  source 1..120: mol_type = other DNA
aaattccagtctgtgaagtgaagggagaggagatacttccttagcaggaggaagagaatgtaccaagtacagggcagttaaagaaatgtttgtttgatttttttgccagtggttatatct

SEQ ID NO: 27391 - DNA, 120 bp, synthetic construct
  source 1..120: mol_type = other DNA
ttgctaccaccatcctctcagtcaagtgggaataatctggtgagcatagcagatgccaatcagttcataaaaagctcaatcttcaagtttgcagaattaattctaaaaacgagaagagta

SEQ ID NO: 27392 - DNA, 120 bp, synthetic construct; identical to SEQ ID NO: 7857
  source 1..120: mol_type = other DNA

SEQ ID NO: 27393 - DNA, 120 bp, synthetic construct
  source 1..120: mol_type = other DNA
ttcagggatagagaaattaacaggcagagagggaatctctgagactaggaaagactaactgcagctgggcctagatgatctgagatccaaatgtagctgttgatcttaaattatgcaaag

SEQ ID NO: 27394 - DNA, 120 bp, synthetic construct
  source 1..120: mol_type = other DNA
acatctgtagagtgggtgacaaataaatgaaaccacctaaatatttaccccaggggagtaggtgcatataacatactatggaacagcattaaaatgatgagttaaaccattttttctgtg

SEQ ID NO: 27395 - DNA, 120 bp, synthetic construct
  source 1..120: mol_type = other DNA
attaaaaagcaagaggtaaaactatctcaattgcagatgataaaatcttatatagaaatacgaaagaattcactaaaaacaagcttagcaactactaaaccactaatactaaattagttt

SEQ ID NO: 27396 - DNA, 120 bp, synthetic construct; identical to SEQ ID NO: 7858
  source 1..120: mol_type = other DNA

SEQ ID NO: 27397 - DNA, 120 bp, synthetic construct
  source 1..120: mol_type = other DNA
agaaaacataagcataaatcttcatgactttggattaggtaaaaatacctgatcttaaatgataccaaaggcacaagcaaaaagaggaaataaaagataaattgaacatcatcaaaatta

SEQ ID NO: 27398 - DNA, 120 bp, synthetic construct
  source 1..120: mol_type = other DNA
tggttgtaactcaatataataatattaataataagataataataaacaataaataataataataataagacaaataatatacaaaaggcccataagcacatagaaacatgttcaacatca

SEQ ID NO: 27399 - DNA, 120 bp, synthetic construct
  source 1..120: mol_type = other DNA
tcacactttgctggtggggatttaagagacatagcccctttagaaagcaggctagcagtagctcaaatttgtgaacattaagttattacatgacccagcaatcccctcctatgatacagt

SEQ ID NO: 27400 - DNA, 120 bp, synthetic construct; identical to SEQ ID NO: 7859
  source 1..120: mol_type = other DNA

SEQ ID NO: 27401 - DNA, 120 bp, synthetic construct
  source 1..120: mol_type = other DNA
aataggtaaatctgtagagttaaaacataggttggtagtttcttagggctggggtttggatatggatttttctgcagggctgggaggagataaaaggatctgtaattgattgtggtaatg

SEQ ID NO: 27402 - DNA, 120 bp, synthetic construct
  source 1..120: mol_type = other DNA
atagtcattacagctcaacaaaagctaccagataaaaacactcactatggtttgcgtgcaagtgaagaaagtagacatgcagagagtaggctgatacaatagtaatcaccttagttaagt

SEQ ID NO: 27403 - DNA, 120 bp, synthetic construct
  source 1..120: mol_type = other DNA
aatcttcaaagctctgcagtcaaataaacatagtaacaagtgataatgagctgtctggaatgtcttcctagagaactggctgaagcacatgcatgcaaaaggaaggcaatggctgaagaa

SEQ ID NO: 27404 - DNA, 120 bp, synthetic construct
  source 1..120: mol_type = other DNA
tgaagcacatgcatgcaaaaggaaggcaatggctgaagaatcaaggcagaactacagtggtagaagagaagaaaaatgtaaacatggagatataagacaagaagatgactgatgaaggaa

SEQ ID NO: 27405 - DNA, 120 bp, synthetic construct; identical to SEQ ID NO: 7860
  source 1..120: mol_type = other DNA

SEQ ID NO: 27406 - DNA, 120 bp, synthetic construct
  source 1..120: mol_type = other DNA
caggaataaatagaaataagagcatacactaatgtttggaaaccacgggtagcaaatattggtgaagtcatgtgacaggcagaataacagtctcctaaatatgtctgtgtcctaatccct

SEQ ID NO: 27407 - DNA, 120 bp, synthetic construct
  source 1..120: mol_type = other DNA
ttatcctggattatctgggcaggttcgatgtaatcacaatagtccttataagtgaaaggagtagaaagcagcatcagagttagagctgtgacaacagaatcagaggtcaaagtgatgtga

SEQ ID NO: 27408 - DNA, 120 bp, synthetic construct
  source 1..120: mol_type = other DNA
cagattttcctttagagcctcagaagaaatgcagctctgacgacatgttaattttagcccatagtgacacatttttgacttcttacctccagaactataagagaatacattggtgttgtt

SEQ ID NO: 27409 - DNA, 120 bp, synthetic construct
  source 1..120: mol_type = other DNA
tcagcttgaagcatggatgggaggttctcagaatcctgctgcgagattgctatattctccagaacctatgagaaagctcttatcactcatcttagtccacacaagcaaagcaggtgggtc

SEQ ID NO: 27410 - DNA, 120 bp, synthetic construct; identical to SEQ ID NO: 7861
  source 1..120: mol_type = other DNA

SEQ ID NO: 27411 - DNA, 120 bp, synthetic construct
  source 1..120: mol_type = other DNA
ggactggctgacctcagtttgacaagcaaatgtgccattagatgatgcaaaccattggtatatctatgagatttagtagttttagcaagctatttattggagcaaggatgtatcaaaaac

SEQ ID NO: 27412 - DNA, 120 bp, synthetic construct
  source 1..120: mol_type = other DNA
ttatataggtacacatgtgccattgtggtttgctgcatccatcaacccgtcatctaggttttaagccccgcatgcattaggtatttctcctaatggtatccctccccttgcccccatccc

SEQ ID NO: 27413 - DNA, 120 bp, synthetic construct
  source 1..120: mol_type = other DNA
gaatgattgtttccagcttcatccatgtctctgcaaagcacatgaactcattcttttttatggctgcataacattccatggtgtatatgtgccacattttctttatccagtctatcattg

SEQ ID NO: 27414 - DNA, 120 bp, synthetic construct; identical to SEQ ID NO: 7862
  source 1..120: mol_type = other DNA

SEQ ID NO: 27415 - DNA, 120 bp, synthetic construct
  source 1..120: mol_type = other DNA
gctggctacagcaactcctagttaagccagaagtttggaatgagttcaattttgggggattaaattctaatgagaggcagaaaacaggaaagtttatgcttttccatgctaatcaatggc

SEQ ID NO: 27416 - DNA, 120 bp, synthetic construct
  source 1..120: mol_type = other DNA
aaactcaagtgttttatcagtaatttcttagaggtgcacacagagagagatgagtataattgtgaagctaagttttgtaaagcacagggatggctaagaatgggaaggaactgatcccag

SEQ ID NO: 27417 - DNA, 120 bp, synthetic construct
  source 1..120: mol_type = other DNA
gaggagcaaacagaattgcatgaagaataagagtgcagacggtgtcctaaatacagtgctgagattcatgtagaagcacaggaggaagcaactgtgtaagtatccagagtcctatgaagt

SEQ ID NO: 27418 - DNA, 120 bp, synthetic construct
  source 1..120: mol_type = other DNA
tcggagaggggaatgaacacacacacagcaaagggaaaccatctgggcctttactgaaaccactggctgacccctgggttaaagtatgtatgttctgagtactgatgttaattacataca

SEQ ID NO: 27419 - DNA, 120 bp, synthetic construct; identical to SEQ ID NO: 7863
  source 1..120: mol_type = other DNA

SEQ ID NO: 27420 - DNA, 120 bp, synthetic construct
  source 1..120: mol_type = other DNA
ggcttaaatagcgggtccggggcctggaaggagcaagataggaagatcaggaacaggaatatctggaaagaggcatacagtagatacaaagtgcttggatcttttgtatcagatgttaat

SEQ ID NO: 27421 - DNA, 120 bp, synthetic construct
  source 1..120: mol_type = other DNA
ttgaaagcagtatctatggtggaagagatgcactgtgggtgggtcccaaggcttgggctcccttcagcatggctgacgtggttattgtcacaacctaccttccaacgataaataaactcc

SEQ ID NO: 27422 - DNA, 120 bp, synthetic construct
  source 1..120: mol_type = other DNA
ggtatgagtttgttctttcttcccatagtgccacactcagaaacgttatctaagggctcacatatgtatgatcttctaataggggaaccacataacattgccccagactaagggacctac

SEQ ID NO: 27423 - DNA, 120 bp, synthetic construct; identical to SEQ ID NO: 7864
  source 1..120: mol_type = other DNA

SEQ ID NO: 27424 - DNA, 120 bp, synthetic construct
  source 1..120: mol_type = other DNA
gcttcccatcccctcaacgtactcagctggtctaggagtttgggatcccagagaaggaagttcctaccatggaacagagtacaagttacattacgtttaggggtatgtttgttacctgtt

SEQ ID NO: 27425 - DNA, 120 bp, synthetic construct
  source 1..120: mol_type = other DNA
tatgaggagcagaactttaatttctgtcttaatttcttgctgaaactggtaacagtggttgcatccaggcaaggaatttggaagaattgtggatggggtggagaacgaaatttgctttgc

SEQ ID NO: 27426 - DNA, 120 bp, synthetic construct
  source 1..120: mol_type = other DNA
agtttttgggggacaggtagtttttggttatgtgtgtgagttctttagtagtgaattctgagattttggtgcaccatcacccgagcagtgtactctgtacccagtgttgccttttatccc

SEQ ID NO: 27427 - DNA, 120 bp, synthetic construct; identical to SEQ ID NO: 7865
  source 1..120: mol_type = other DNA

SEQ ID NO: 27428 - DNA, 120 bp, synthetic construct
  source 1..120: mol_type = other DNA
ctttgggtagatacccagtagtgggattgctggatcaaatgatagatctagttttagttctttaaggaatctccatactgttttccatagtagttgtactaatttacattctcacaacca

SEQ ID NO: 27429 - DNA, 120 bp, synthetic construct
  source 1..120: mol_type = other DNA
tggttccctgcaacctccacctcccaggttccagcaattctcctgcctcagcctcccgagtagctgggactacaggtgcatgccaccacgcccagataattttttgtatttctggtagag

SEQ ID NO: 27430 - DNA, 120 bp, synthetic construct
  source 1..120: mol_type = other DNA
ccattcttgcatgtataacgtggtatctcatggtgaaccccacatttatttagcaaacatttattaggcagttactatgtgtcagggtctcctaggcctcaatgagtgaaacatcaaaga

SEQ ID NO: 27431 - DNA, 120 bp, synthetic construct; identical to SEQ ID NO: 7866
  source 1..120: mol_type = other DNA

SEQ ID NO: 27432 - DNA, 120 bp, synthetic construct
  source 1..120: mol_type = other DNA
caggaagaaccttgatcagatctgcattccagaatatcactttggtgaagtgtgaagaatgaactgagagatgctagactgaatacatggagaagaagaggttcggggaaaccctggcag

SEQ ID NO: 27433 - DNA, 120 bp, synthetic construct
  source 1..120: mol_type = other DNA
gtgaacagcactccatctggaaaaatgacataaaacaagggaatttggcccatgacataagaggtccttgggctcacatggtattgagtgatcagggaggagtttagttgagttcacctc

SEQ ID NO: 27434 - DNA, 120 bp, synthetic construct
  source 1..120: mol_type = other DNA
gactttccaggacccccagtaattttgtcgtgtccatgtgggaagtgagctgaggcttggcaagaggatcttagcccatatggtccaaaaaatagtagaaatatttctttagaagacaca

SEQ ID NO: 27435 - DNA, 120 bp, synthetic construct; identical to SEQ ID NO: 7867
  source 1..120: mol_type = other DNA

SEQ ID NO: 27436 - DNA, 120 bp, synthetic construct
  source 1..120: mol_type = other DNA
gtctcttgatttttgtttccagggattcgatttcataaacacagctcagctctgcagatcatctggcccagtccaggacccgggtttgtaatgatcttgttcagtcatggtccagcctgt

SEQ ID NO: 27437 - DNA, 120 bp, synthetic construct
  source 1..120: mol_type = other DNA
cgtgatgaggtcatattacagccgcacttctgtattactagatgactctgtcttctaccttctttgtttgcaagttttgatgaagcagaaaggcccatgtggcaaggaactgaagtcagc

SEQ ID NO: 27438 - DNA, 120 bp, synthetic construct
  source 1..120: mol_type = other DNA
gacccagccatggcactctgatgaaaatcatgtgagaaagctgcatagctgtgtctggattcctgacccatagaaatgtgggataatacatgtgtgttgttgtaagctgctaagtttgtg

SEQ ID NO: 27439 - DNA, 120 bp, synthetic construct; identical to SEQ ID NO: 7868
  source 1..120: mol_type = other DNA

SEQ ID NO: 27440 - DNA, 120 bp, synthetic construct
  source 1..120: mol_type = other DNA
caccactctcaggcccatgcaggctgtgaaataaaaccgtgatgaatagactctgcatggcccctgctggtctttacccttcagcattctagatagtgcacctcatatgccatgatgcaa

SEQ ID NO: 27441 - DNA, 120 bp, synthetic construct
  source 1..120: mol_type = other DNA
tgcaatagacttcagtccagtctctgtgcctggagaagaaagggaagctggtcagagcccacaggaggaggtgacccacagggagccagtagtaggtgggtgtgagggtgagtatgacag

SEQ ID NO: 27442 - DNA, 120 bp, synthetic construct
  source 1..120: mol_type = other DNA
tctctaggtcatagggctcttgtgaggtttaaatgatttaattcatgtaaatcccttaggaacgtgactgacactttttttaaggtacaattctgtaaaagagtgggacccatccattta

SEQ ID NO: 27443 - DNA, 120 bp, synthetic construct; identical to SEQ ID NO: 7869
  source 1..120: mol_type = other DNA

SEQ ID NO: 27444 - DNA, 120 bp, synthetic construct
  source 1..120: mol_type = other DNA
gtaattccagttcaatctcttttaagaaatttaagaatctgaaagagaaagacctgagaatttttgtcccacaagagacagacccacttcctaggcactgtgggactttctgagccccat

SEQ ID NO: 27445 - DNA, 120 bp, synthetic construct
  source 1..120: mol_type = other DNA
agcaggtccccttcctcctatctcacctatgacgtctcagcctgccttccacagccaagggcccctcccaggctttgctgcacagcaggaatctccacggggctctagaaggaacaggga

SEQ ID NO: 27446 - DNA, 120 bp, synthetic construct
  source 1..120: mol_type = other DNA
cctgtaatcccagcactctgggaggccgaggcgggcggatcatgaggtcaggagatcgagaccatcctggctaacacagtgaaaccccgtctctactaaaaatacaaaaaattagccggg

SEQ ID NO: 27447 - DNA, 120 bp, synthetic construct; identical to SEQ ID NO: 7870
  source 1..120: mol_type = other DNA

SEQ ID NO: 27448 - DNA, 120 bp, synthetic construct
  source 1..120: mol_type = other DNA
tgggttaaagattatatgtaattgttgggcacagagggccaggaaagaaaaagattcccggtgaagctagacccaagtacatcactgttgacaagggtaactactgtcctttcctattta

SEQ ID NO: 27449 - DNA, 120 bp, synthetic construct
  source 1..120: mol_type = other DNA
gaggagaaggaggaggaggaggagacggagactgttcggtctcctctttcctcaaatatggatgcctccaaggaacataattccagctccaagaggtcctgacgtggggcctggaggacc

SEQ ID NO: 27450 - DNA, 120 bp, synthetic construct
  source 1..120: mol_type = other DNA
tgatggatcctccaagccgctctttgagccgctgtccaggtctgcaggtcctcgttcagggacatgaaatctccttgtcgtaggcggacttaaagtgtccttcgaggaagctcctgtccg

SEQ ID NO: 27451 - DNA, 120 bp, synthetic construct; identical to SEQ ID NO: 7871
  source 1..120: mol_type = other DNA

SEQ ID NO: 27452 - DNA, 120 bp, synthetic construct
  source 1..120: mol_type = other DNA
tcagtaacacattccctgcggtcttcgagaactttcctcagggcgcccacagccctgtgccatcttctccacccgcgcttcacgctctgattctcgccgcggctgtggaagctcaggaat

SEQ ID NO: 27453 - DNA, 120 bp, synthetic construct
  source 1..120: mol_type = other DNA
cgggagaggcgcagggtgcctgggacgccgccccgctcgcctctctcctggacgccgtcgccctgcctccccgcggggacacagcctccctcccacgtcccgcccggcaccggagccgct

SEQ ID NO: 27454 - DNA, 120 bp, synthetic construct
  source 1..120: mol_type = other DNA
agcccgggacggaggcgccgcgagaggagctactaagccctccaagccgccctttccctcttgcctccccagcccagttcatcctgatcttctcaccagcccagttctccctaaggtcag

SEQ ID NO: 27455 - DNA, 120 bp, synthetic construct; identical to SEQ ID NO: 7872
  source 1..120: mol_type = other DNA

SEQ ID NO: 27456 - DNA, 120 bp, synthetic construct
  source 1..120: mol_type = other DNA
agctggagatgcttaagtttaaaccagagactttggatattttccctgagtgacataatccttgtctttctctcctggaatcgtgggtccagaccatcacagtgatccagtcggccccct

SEQ ID NO: 27457 - DNA, 120 bp, synthetic construct
  source 1..120: mol_type = other DNA
ggctccatccctacttttgtgtgatcttcattcctatggcattaactatgaaagggaaaaataacaggcacaagccatggatgtgtagtcagaataaaatgaattggcatttttaaagtg

SEQ ID NO: 27458 - DNA, 120 bp, synthetic construct
  source 1..120: mol_type = other DNA
cgaagaccactatttgacacatagcacaataaaagtgtaaaatgctatcattcttgtcatttctttaggtcctttttcttgaggtcttcctcttctctttgggttcccatgaaaatttac

SEQ ID NO: 27459 - DNA, 120 bp, synthetic construct
  source 1..120: mol_type = other DNA
aaaaaccgatggtggaccagtagctagtgagtcagagtccattttatttaaacaagatcacctacctagaattaactccattttgataaggacatgcatctcacagataagcccagtgta

SEQ ID NO: 27460 - DNA, 120 bp, synthetic construct; identical to SEQ ID NO: 7873
  source 1..120: mol_type = other DNA

SEQ ID NO: 27461 - DNA, 120 bp, synthetic construct
  source 1..120: mol_type = other DNA
ttctcccttggcatgtgacattgacataaaaattgtacattgtactttagttttcagcaattattaattatgtaatttggatcatccctcccattgagtactactggacaagtgggaaaa

SEQ ID NO: 27462 - DNA, 120 bp, synthetic construct
  source 1..120: mol_type = other DNA
gaaggcagaaatctagaagagcaagttgagctgcagggttgcttttgtcctgggtgatgttggctgctctgggcagtgtctgagacctttgagggctaggtggataaagcctacatctaa

SEQ ID NO: 27463 - DNA, 120 bp, synthetic construct
  source 1..120: mol_type = other DNA
gtccagcagttttcactgctcttattaaaaattttaattgaggatcttcccagtgtcataaagaagaaaagaaatacacttaaaaaggtttgaaaagaaggcacaaaactcttataattt

SEQ ID NO: 27464 - DNA, 120 bp, synthetic construct
  source 1..120: mol_type = other DNA
ttttttttttttgagatggagtctcgctctgtcgcccaggctggagtgcagtggcgagatctcggctcactgcaagctccgcctcccagatttacttaggccattctcctgcctcagcct

SEQ ID NO: 27465 - DNA, 120 bp, synthetic construct; identical to SEQ ID NO: 7874
  source 1..120: mol_type = other DNA

SEQ ID NO: 27466 - DNA, 120 bp, synthetic construct
  source 1..120: mol_type = other DNA
atcctggcttggatggttcaatataataatgacattaatttcctacaggactcttaagaactcaaacacatctcaatcaaatgtttatcaagcatttttgcaacacatagtaagccaatt

SEQ ID NO: 27467 - DNA, 120 bp, synthetic construct
  source 1..120: mol_type = other DNA
gagagtcgagatgttgagacagggtagtaaactagaacttgggaacagaatagaaagccctgaacgtatgtagagcagaggcaacattacagatcagtgggtaaaggaaaacgatttaga

SEQ ID NO: 27468 - DNA, 120 bp, synthetic construct
  source 1..120: mol_type = other DNA
agtgtagggaaagatttttatgcaggttacaacaaagtattaaccccagggtaatctttgacaggattaaagacattaaagttgagctcccagattatttggggttttccattccccagt

SEQ ID NO: 27469 - DNA, 120 bp, synthetic construct; identical to SEQ ID NO: 7875
  source 1..120: mol_type = other DNA

SEQ ID NO: 27470 - DNA, 120 bp, synthetic construct
  source 1..120: mol_type = other DNA
acactttcctctgcagtatgcctgtgatagggattctgttgatataggctagtggttttcacaaactgttgcatatagcaaaatctggagagatgatttgttttaataaactcaaggctc

SEQ ID NO: 27471 - DNA, 120 bp, synthetic construct
  source 1..120: mol_type = other DNA
gttgattggagtcaaacctggagagttttaggaacaatactgtttccaggatcctacttttgatgaattagatttcattggttttacatgttgatctagacctggggctatttaaaatct

SEQ ID NO: 27472 - DNA, 120 bp, synthetic construct
  source 1..120: mol_type = other DNA
acatttaatctaagatactgggtgaagatcccatattgatgaatccaggccaatcacatctcatttctccctatgtcaatactgaaagctatggggagaaatccctccaaccagtgctcc

SEQ ID NO: 27473 - DNA, 120 bp, synthetic construct; identical to SEQ ID NO: 7876
  source 1..120: mol_type = other DNA

SEQ ID NO: 27474 - DNA, 120 bp, synthetic construct
  source 1..120: mol_type = other DNA
aaccaacactgaaattcaacaaagaaagagatactgtgaacactagcaccatatttcaagatctttggaataaatctactaaaagatgcacaagtaaaaccaacaatactttatttaaga

SEQ ID NO: 27475 - DNA, 120 bp, synthetic construct
  source 1..120: mol_type = other DNA
gtacttggaaaggtgcctgtcaagctaggaaagttgccaatgatagaaaaaacactcctgaagtgaaaactcaaaatttatggatttacttcattgtatagagagacatattataaagcc

SEQ ID NO: 27476 - DNA, 120 bp, synthetic construct
  source 1..120: mol_type = other DNA
ctcaataaagtttaatgaggaaaacataatgagatattttgaaaaatgcactagaatttctatattaaaattattgagttttccaaacactgatgagaatacagaccatcaagatctacc

SEQ ID NO: 27477 - DNA, 120 bp, synthetic construct; identical to SEQ ID NO: 7877
  source 1..120: mol_type = other DNA

SEQ ID NO: 27478 - DNA, 120 bp, synthetic construct
  source 1..120: mol_type = other DNA
aaaatgaggtcttgtaagaatatacacagcatgattccatttgtatgaaaaattcaaaatttatataaagtttgagataacctgtgttgttttagaaatatatgcatggggtaaagcttt

SEQ ID NO: 27479 - DNA, 120 bp, synthetic construct
  source 1..120: mol_type = other DNA
gggaattggtatgaaaacttctgggttttttttctgagttttgtttctttttcacacggatcttccctttaaaaccatgtgttaaaatgtaaatgtaattcaagcccttcacttttggtt

SEQ ID NO: 27480 - DNA, 120 bp, synthetic construct
  source 1..120: mol_type = other DNA
agagaccatgaattggaatgggaactcggaattgtcatcatcctataattctactcaggattctgtccttaaaacattggcacactgctgtccagctcccttctgtagtgatggaatgcc

SEQ ID NO: 27481 - DNA, 120 bp, synthetic construct; identical to SEQ ID NO: 7878
  source 1..120: mol_type = other DNA

SEQ ID NO: 27482 - DNA, 120 bp, synthetic construct; identical to SEQ ID NO: 2007
  source 1..120: mol_type = other DNA

SEQ ID NO: 27483 - DNA, 120 bp, synthetic construct
  source 1..120: mol_type = other DNA
tcaaatgttttatccaagttgcttataattattactgtttggctactatagtgtaaatatttttcaaatcatctgaaatttaaaaatatagcaatataattctatgctgtgtgtgaaaag

SEQ ID NO: 27484 - DNA, 120 bp, synthetic construct
  source 1..120: mol_type = other DNA
taaaagatgatgaacacctcacacagcctgttaaattaatcagaaacatttcactgtgaatgtggaagggaagatgaacagaattttaaacacattgggtgtgtacagaggatcagaatc

SEQ ID NO: 27485 - DNA, 120 bp, synthetic construct
  source 1..120: mol_type = other DNA
aactttaagaagtagccaccatgctaatcccaatttacgggtgagtagtaactttgcgtaactccagccaagggcgtgataagcttttacagttcttttgtagtttttattcctaaaaca

SEQ ID NO: 27486 - DNA, 120 bp, synthetic construct; identical to SEQ ID NO: 7879
  source 1..120: mol_type = other DNA

SEQ ID NO: 27487 - DNA, 120 bp, synthetic construct
  source 1..120: mol_type = other DNA
ctgcctcaggctcttgagtagctgggactacaaggcatgcatcaccatgcctggcttggtattttcttttatcagatagcagagtgaagcacttgcattacaaaaataaaatgcataaaa

SEQ ID NO: 27488 - DNA, 120 bp, synthetic construct
  source 1..120: mol_type = other DNA
acttctactactactcataggtttagctgtggtcctgctatagagtttgttaagaaaacttccctgagttgttttaaatggtcttttgaaagccagacactgcaatcctataatcattgg

SEQ ID NO: 27489 - DNA, 120 bp, synthetic construct
  source 1..120: mol_type = other DNA
ttcagtcagttgtattttatgctgaatcatttgaccatgtgaggaaagcagatttttagacttttagcccatcttgaccagagggatcagcaaaaacctggaatgaagaatttcttcctg

SEQ ID NO: 27490 - DNA, 120 bp, synthetic construct; identical to SEQ ID NO: 7880
  source 1..120: mol_type = other DNA

SEQ ID NO: 27491 - DNA, 120 bp, synthetic construct
  source 1..120: mol_type = other DNA
aagaggcatctaagaaggcagaatgtttctatctgttctgggattaacaggggtagaaagatgtgaaaggcagatggaaaagaggcctcagagaggcagcccagatataatgacacctgc

SEQ ID NO: 27492 - DNA, 120 bp, synthetic construct
  source 1..120: mol_type = other DNA
cacactttggtttgaggatccaagcacagaatgtggctgtctctgggacatttcatgctaaagaagcccagcacgtatagacaaagggtctagagggcaccagccaccttccatggagct

SEQ ID NO: 27493 - DNA, 120 bp, synthetic construct
  source 1..120: mol_type = other DNA
ttgaatccctgtgtcctttccctccatctctaccagagaccacttgtggaaaaaaaagacacgaatgtcagaggtgaatccaggcccatggatccattgtggtcaggggactgaagccaa

SEQ ID NO: 27494 - DNA, 120 bp, synthetic construct; identical to SEQ ID NO: 7881
  source 1..120: mol_type = other DNA

SEQ ID NO: 27495 - DNA, 120 bp, synthetic construct
  source 1..120: mol_type = other DNA
tccttggcttgtagatatgttctctctatgtcttcacatggtcattcctccgtatctgtctgtgtctaatcttctctttttataaagacactagtcacattgaattagggcacactcata

SEQ ID NO: 27496 - DNA, 120 bp, synthetic construct
  source 1..120: mol_type = other DNA
agtctgattatccttgagattgcattttctaaagaataaaatagagtaaatctctttggctcttgatactctgaaattttgttcttgcaatgagaataaaaaaacggagagccaaaggtt

SEQ ID NO: 27497 - DNA, 120 bp, synthetic construct
  source 1..120: mol_type = other DNA
cattctagtgattccggtaccagcctttcaactggaaagaggatgctttcccaggggaacaacttctcctgctgtgctggcttattttctttgtatttggaggacaaaaaagttgatgta

SEQ ID NO: 27498 - DNA, 120 bp, synthetic construct; identical to SEQ ID NO: 7882
  source 1..120: mol_type = other DNA

SEQ ID NO: 27499 - DNA, 120 bp, synthetic construct
  source 1..120: mol_type = other DNA
agggtgcagtgagtgagagaagggaaagtgacagagcattctttcacctttttgtgacatgcatgcatccaagtctctggtgttttaaataattgaaactgagatctagttccacttatc

SEQ ID NO: 27500 - DNA, 120 bp, synthetic construct
  source 1..120: mol_type = other DNA
ttttatcgaaaatgacacaaaatttcatcaaaataaagtgaaattgtggctgtagatggggctttatttagagcttcgactccccacctgcttcctaagacatgatccttccccaggata

SEQ ID NO: 27501 - DNA, 120 bp, synthetic construct
  source 1..120: mol_type = other DNA
cttccatcacacttgcttttctttagtttgacccaccactccctcatcaagaggtaaggtctctccactctttaaacataagcagatctgatatttgcgctacccaataaaatatggcag

SEQ ID NO: 27502 - DNA, 120 bp, synthetic construct; identical to SEQ ID NO: 7883
  source 1..120: mol_type = other DNA

SEQ ID NO: 27503 - DNA, 120 bp, synthetic construct
  source 1..120: mol_type = other DNA
ttacaggcacctgccactatgcccggctaatttttttctatttttagtagagacaggggtttcatcatgttggccaggctggtctcaaactcctgacctcgtgatccacccgccacagcc

SEQ ID NO: 27504 - DNA, 120 bp, synthetic construct
  source 1..120: mol_type = other DNA
aaagtaattactgataaggaaggatttacttctgtaattgtgatgttggttttatgcatgtcttatagctgttttgtccctcatctccttcattcaaaccttcttttgtttttagtcatt

SEQ ID NO: 27505 - DNA, 120 bp, synthetic construct
  source 1..120: mol_type = other DNA
caatcttgaactgaaatcaatatgaaactctgcttctttacatcttttcccacccctcattttacgttattgatgtcacaaattacacctcagcaggctggaaggctggaaagtcataat

SEQ ID NO: 27506 - DNA, 120 bp, synthetic construct; identical to SEQ ID NO: 7884
  source 1..120: mol_type = other DNA

SEQ ID NO: 27507 - DNA, 120 bp, synthetic construct
  source 1..120: mol_type = other DNA
gtgaacttggcacccattaacattttccttaaaccttacttcgtctccaaataaaaacagctataaagtcttacttttgccaaagatgatacaattaacttgcatccaactagaaacaca

SEQ ID NO: 27508 - DNA, 120 bp, synthetic construct
  source 1..120: mol_type = other DNA
cagatgatcaggaaagatgaaaagaaaggtatttgctcaatacatgtaaggatacatacacacagacataaatatcattataaaaacataaagaagtaatgctgataacgtttactgtct

SEQ ID NO: 27509 - DNA, 120 bp, synthetic construct
  source 1..120: mol_type = other DNA
ttaccttggctcactgcaaactctacctcttgggcacaagtgatcctcctacctcaacctcctaagtagctgggactacaagcacaccaccaagtctaactaattttttgtatttatttt

SEQ ID NO: 27510 - DNA, 120 bp, synthetic construct; identical to SEQ ID NO: 7885
  source 1..120: mol_type = other DNA

SEQ ID NO: 27511 - DNA, 120 bp, synthetic construct
  source 1..120: mol_type = other DNA
ctgggttgttgtagtttttattgactttagttatagggcagagtattactaagagatgctctaaaagacctcctgtgttccagacatagtcctatttaccgccattgtgtagtagctgac

SEQ ID NO: 27512 - DNA, 120 bp, synthetic construct
  source 1..120: mol_type = other DNA
gttcatttctgtgtctcctgtaggagcattcctccttttgtaaacctctagatcctgatcctgttcctcttgactgggcaagatctcccaaccagggtctccagcacctcctacaggtgt

SEQ ID NO: 27513 - DNA, 120 bp, synthetic construct
  source 1..120: mol_type = other DNA
gaggcaactagggactggagcaggcccccagcaaactgtagcagccctgcagaaaagtggccagactgttaaaagagaaaacaaaagaagagaaaaaaaaatccactcaaaggtcagcaa

SEQ ID NO: 27514 - DNA, 120 bp, synthetic construct; identical to SEQ ID NO: 7886
  source 1..120: mol_type = other DNA

SEQ ID NO: 27515 - DNA, 120 bp, synthetic construct
  source 1..120: mol_type = other DNA
caacctagctagacaggccaacactcaaattcagaaatgcagaggaccccagtaagttactccatgagaagatcatccccaagataaataatcatcagatgctccaaggttaaaatgaaa

SEQ ID NO: 27516 - DNA, 120 bp, synthetic construct
  source 1..120: mol_type = other DNA
ttcaacattcttaaagaaaagagtttccaacccagaatttcatatccaaccaaactaagcttcataagcaaaggagaaatcagattcttttcaggcaaacaaatgccaagggaattcatg

SEQ ID NO: 27517 - DNA, 120 bp, synthetic construct
  source 1..120: mol_type = other DNA
aagcaagtctgcaaagtaactagttaacatcatgatgacaggatcaaatccatacatatcaatactaaccttaaatgtaaattggctaaatgccccatttaaaagacatagagtggcaag

SEQ ID NO: 27518 - DNA, 120 bp, synthetic construct; identical to SEQ ID NO: 7887
  source 1..120: mol_type = other DNA

SEQ ID NO: 27519 - DNA, 120 bp, synthetic construct
  source 1..120: mol_type = other DNA
cactgacaatattagacagatcatcaagacagaaaattaacaaagatattcaggacctgaactcagccctggatcaaatggacctgataaatatctacagaagtcttcaccccaaagcaa

SEQ ID NO: 27520 - DNA, 120 bp, synthetic construct
  source 1..120: mol_type = other DNA
gcaatcaaattcaaaataaagactaagaaattcactcaaaccatacgattacatagaaattgaataacctgttcttgaatgacttttgggtaaataatgaaattaaggcacaaatcaaga

SEQ ID NO: 27521 - DNA, 120 bp, synthetic construct
  source 1..120: mol_type = other DNA
ttcaagttaacaacctaaaatcacaaccaaaagaacttgagaacaaagagcaaacatatcccaaagctagcagaagacaagacgtaataataaaaaattaacaaaggtattgtctcctga

SEQ ID NO: 27522 - DNA, 120 bp, synthetic construct
  source 1..120: mol_type = other DNA
gagatggagtttcactcttgttacccaggcaggagtgcagtggtgcgagctcagctcactgcaacctctgcttcccaggctcaagtgattctcctgcctcagcctctcgagtagcttgga

SEQ ID NO: 27523 - DNA, 120 bp, synthetic construct; identical to SEQ ID NO: 7888
  source 1..120: mol_type = other DNA

SEQ ID NO: 27524 - DNA, 120 bp, synthetic construct
  source 1..120: mol_type = other DNA
gatcaattcctggatacatacacctgccccctccatgactgaaccaggaagaaattgaatcactgaacagactaataatgagttctgaaattaaggcagtaataaacagcctaccaacca

SEQ ID NO: 27525 - DNA, 120 bp, synthetic construct
  source 1..120: mol_type = other DNA
cctaactcattctattaggccagcaacatcctgataccaaaatgtggcagagataccacaacaacaaaaaagaaaacctcaagccaatattcttgatgaacatcgatgcaaaaatctttg

SEQ ID NO: 27526 - DNA, 120 bp, synthetic construct
  source 1..120: mol_type = other DNA
gttatacaaacagaactaaagaccaaaaccacatgattatctcagtagatgcagaaagggcttttgataaaatgcaacatctattcatgttttaaaaaactctcaataacctagatagtg

SEQ ID NO: 27527 - DNA, 120 bp, synthetic construct; identical to SEQ ID NO: 7889
  source 1..120: mol_type = other DNA

SEQ ID NO: 27528 - DNA, 120 bp, synthetic construct
  source 1..120: mol_type = other DNA
caacaacaggcaaactgagagccaaatcaggaaagaactcccattcacaaatgccacaaaaagaatacaatacctaggaacacagctaacttgggaggtaaaaggtctctataagaagaa

SEQ ID NO: 27529 - DNA, 120 bp, synthetic construct
  source 1..120: mol_type = other DNA
attcaatgctattcctgtcaaactgccactgacattcttttttttttttttttgagatagagtcttgctctgtcgcccaggctggagggcagtggcgcgatctcggctcactgcaagctc

SEQ ID NO: 27530 - DNA, 120 bp, synthetic construct
  source 1..120: mol_type = other DNA
tagccaggatggtctcgatctcctgacctcgtgatctgcctgcctcggcctcccaaagcgctgggattacaggtgtgagccaccgcgcccggccactaccactgacattcttcacagaac

SEQ ID NO: 27531 - DNA, 120 bp, synthetic construct; identical to SEQ ID NO: 7890
  source 1..120: mol_type = other DNA

SEQ ID NO: 27532 - DNA, 120 bp, synthetic construct
  source 1..120: mol_type = other DNA
gtgctgggattacaggtgagagccaccatgtccagcctatgctacctgatttcaactatacttcaaggctacagtaaccaaaacagcatggtactggtacaaaaacagacatatagagca

SEQ ID NO: 27533 - DNA, 120 bp, synthetic construct
  source 1..120: mol_type = other DNA
ctggctagccatatgcagaagattaaaactgaacccctttcttacaccatataccaaaatcacctcaaaatgaattaaagacttaaatgtaagatccaaaactgtaaaaaccctaacaca

SEQ ID NO: 27534 - DNA, 120 bp, synthetic construct; identical to SEQ ID NO: 7891
  source 1..120: mol_type = other DNA

SEQ ID NO: 27535 - DNA, 120 bp, synthetic construct
  source 1..120: mol_type = other DNA
gcaaatcaaaaccacagtgagatgccatttcacaccagtcagaatgactattattaaaaagtcaaaaaataacagatgctggcaaagttgtggagaaaaaggaatacttatacactgttg

SEQ ID NO: 27536 - DNA, 120 bp, synthetic construct
  source 1..120: mol_type = other DNA
cacacatatgttcattgcagcactattcacaatagcaaagacatggaatcaacttaaatgctcatcaattatagactggataaagaaaatgtgatacatgtataccatggaatactatgc

SEQ ID NO: 27537 - DNA, 120 bp, synthetic construct
  source 1..120: mol_type = other DNA
tgggagctaaatgatgagaatgcatagagacatagaggggaatagcacacactggagcctttcagaaggtggagggtgggagaaagaagaggatcaggaaaaataagtaacgggtactag

SEQ ID NO: 27538 - DNA, 120 bp, synthetic construct; identical to SEQ ID NO: 7892
  source 1..120: mol_type = other DNA

SEQ ID NO: 27539 - DNA, 120 bp, synthetic construct
  source 1..120: mol_type = other DNA
gacagtcttttgtatttttgcaatatcagttgtaatgtttctcttgtttctgattttgagtctgttagaaattaagcttgaagtcgcaaagaaaacgaacacttgaacaaaggatttctc

SEQ ID NO: 27540 - DNA, 120 bp, synthetic construct
  source 1..120: mol_type = other DNA
aggggtttttattcctaacgcaagttgtttctactattgtttcctgtctgcattggctggagctggactgcgcagtctaaactgatcccggttgactaaaaactttaactttcctaaaaa

SEQ ID NO: 27541 - DNA, 120 bp, synthetic construct
  source 1..120: mol_type = other DNA
gtctggtcagatccaggcagactacgagttaggccttggttcaagtacaagaacatagaatgtgtttatttatttactgtatgtaacaactacttggagcacaataaagagtcattagta

SEQ ID NO: 27542 - DNA, 120 bp, synthetic construct; identical to SEQ ID NO: 7893
  source 1..120: mol_type = other DNA

SEQ ID NO: 27543 - DNA, 120 bp, synthetic construct
  source 1..120: mol_type = other DNA
gaactgaggacatgagtcctttccacttaccaaaccacctttccattaagctagtgaaaggatcatttattccagagtttttagctagttcatttgataaagcagtaagaccttgtcatg

SEQ ID NO: 27544 - DNA, 120 bp, synthetic construct
  source 1..120: mol_type = other DNA
cccaagtcatctgtctggtgggtcctagttgctcagctattccctcatagcatcccttgtgcaattaatgaattattgctgattgtagtaaatataatttatccaatctacatttttttt

SEQ ID NO: 27545 - DNA, 120 bp, synthetic construct
  source 1..120: mol_type = other DNA
tgccaccacgcccggctaatttttgtatttttattagagaaagggtttcactatgttggtcaggctggtctcaaactcctgacctcgtgatccacccgccttggcctcccaaagtgctgg

SEQ ID NO: 27546 - DNA, 120 bp, synthetic construct; identical to SEQ ID NO: 7894
  source 1..120: mol_type = other DNA

SEQ ID NO: 27547 - DNA, 120 bp, synthetic construct
  source 1..120: mol_type = other DNA
ggaagtgcttgacctccctgcatcccatgaggtttccaaggaaagccaaattttctccctgttgtgagagacacgaagcaaatttggtcccagaagatggaggctgaatggccttcgggg

SEQ ID NO: 27548 - DNA, 120 bp, synthetic construct
  source 1..120: mol_type = other DNA
accatctcagtggaaaggggataatttgggcctctgatctgctgtgtgcccaagcataacaatctctcttattttgactgtggatggaatatttaatccattccacccaggcatttgcat

SEQ ID NO: 27549 - DNA, 120 bp, synthetic construct
  source 1..120: mol_type = other DNA
tggaaggggcaactttcccgagatgttggcccctatgccataaatacgacttaatgaaggggaagagttttgggatgttgcaatagtaatagtaagccaaataggattacattggttata

SEQ ID NO: 27550 - DNA, 120 bp, synthetic construct; identical to SEQ ID NO: 7895
  source 1..120: mol_type = other DNA

SEQ ID NO: 27551 - DNA, 120 bp, synthetic construct
  source 1..120: mol_type = other DNA
ttaatgatgagatgggggcagttaagggaaagaaaagaagaaaaaagatagatatattaagtttttctttttatcgttactctggtgggagttgacggaataacggtccatgtctccgga

SEQ ID NO: 27552 - DNA, 120 bp, synthetic construct
  source 1..120: mol_type = other DNA
tcttttcagcctttgataaggacgtgatctctgggttgatgttggtgggccaggaattcaaggagtggagtctgtgctaggagaccttgagtcctgagggaagaaagagtggaagacaga

SEQ ID NO: 27553 - DNA, 120 bp, synthetic construct
  source 1..120: mol_type = other DNA
gggaaagtttggattgttagtaaagcaatgggaagagattttgtccatggtagccaagtttctaagattaatttggttagatgactctttaaagtttgattcattctttctactctccct

SEQ ID NO: 27554 - DNA, 120 bp, synthetic construct; identical to SEQ ID NO: 7896
  source 1..120: mol_type = other DNA

SEQ ID NO: 27555 - DNA, 120 bp, synthetic construct
  source 1..120: mol_type = other DNA
aggttgtttttttagggtctgcttattagattttctgcacactatacaactttccaccatttgcttggcgagggtgtatattcctatgcacccataaaccctaaggactgcatcacacat

SEQ ID NO: 27556 - DNA, 120 bp, synthetic construct
  source 1..120: mol_type = other DNA
tcctattttttttagtttttcctgatctgcttgagagaagatagggagtgcagctgaagatggaagacaaggggttagtcaaaaaatgggttctgctggagaagaggcagcttgcttagc

SEQ ID NO: 27557 - DNA, 120 bp, synthetic construct
  source 1..120: mol_type = other DNA
gtccccatggtctaaaatttgacctttgctgttaatgaggccccactcagtccaaatttttccaaaagtatggactactccaaaggcatacctggagtctgtatagatttttccttcttg

SEQ ID NO: 27558 - DNA, 120 bp, synthetic construct; identical to SEQ ID NO: 7897
  source 1..120: mol_type = other DNA

SEQ ID NO: 27559 - DNA, 120 bp, synthetic construct
  source 1..120: mol_type = other DNA
gcttcatactttaaaattcttgaatcagtaagccaccttcccgccttctgattgagaattgttctcacttggtgaggagcactaatgataagatttccccaaaggttaattgtctgctgt

SEQ ID NO: 27560 - DNA, 120 bp, synthetic construct
  source 1..120: mol_type = other DNA
taagtacccctaaggctactcattacctacattaacaaaaagatgaaagggcaattctaaagagggtaaggctagaacatgggctgtcactagtaactcttaatttttttacctgctgta

SEQ ID NO: 27561 - DNA, 120 bp, synthetic construct
  source 1..120: mol_type = other DNA
aattttctaagttccttctttgtctcaggcagaggtaaggatatgatgccttcaatccattcaaatccaattctctatttgcccttactgattaagtgccctaaatacttgacttcaggt

SEQ ID NO: 27562 - DNA, 120 bp, synthetic construct; identical to SEQ ID NO: 7898
  source 1..120: mol_type = other DNA

SEQ ID NO: 27563 - DNA, 120 bp, synthetic construct
  source 1..120: mol_type = other DNA
ttactaataatagtataaggattaggaacaacagggtgagttgttcgaactatttggttaatagatcgaagatcttgcactagccgatatgacccatctggctttttcacaggtagtgtg

SEQ ID NO: 27564 - DNA, 120 bp, synthetic construct
  source 1..120: mol_type = other DNA
tcccccagctttttcaatttaacttggattggggaaattcgtaattttcctcggtttccttcctttgaccatacatctgaatggatgtatccctcatttagagtagcaagcaaatttaag

SEQ ID NO: 27565 - DNA, 120 bp, synthetic construct
  source 1..120: mol_type = other DNA
ttctgatatttaatttttgtttcttctaagacttttgctttaaacccctccccttttgctcccaaaataaaaagttcttcttgtgaccaagttacaccagggggaagataacaaactgag

SEQ ID NO: 27566 - DNA, 120 bp, synthetic construct; identical to SEQ ID NO: 7899
  source 1..120: mol_type = other DNA

SEQ ID NO: 27567 - DNA, 120 bp, synthetic construct
  source 1..120: mol_type = other DNA
ttgccttgtccttttacttttcttcatctcttcgtacatacaccttttgggcctcccttaagagttcctttatgggacagtccttccaattttctgtcttttgtaatttcttggtaacat

SEQ ID NO: 27568 - DNA, 120 bp, synthetic construct
  source 1..120: mol_type = other DNA
cctcatcttttccttgctgtatattaaaagctttggtcatattctgggtgcagggtaacgattctctaattccttttattattatttcttgcaggtctctcatattcctcctatgagcta

SEQ ID NO: 27569 - DNA, 120 bp, synthetic construct
  source 1..120: mol_type = other DNA
tttcttcccctgaaaaaagaatgcctatgatggacattaactcagcccagtatacaactggagtcctaaaaattgatgaatttgatctgtcactacatagagatcatctaagagtggctt

SEQ ID NO: 27570 - DNA, 120 bp, synthetic construct; identical to SEQ ID NO: 7900
  source 1..120: mol_type = other DNA

SEQ ID NO: 27571 - DNA, 120 bp, synthetic construct
  source 1..120: mol_type = other DNA
gtcccatgtgttggtggggttcttggcgtaaggggtattaatttcatgagaagtagtttctggcttctctcctttagtttttagatgacaaaggaggatgggcctttgccaccaacacag

SEQ ID NO: 27572 - DNA, 120 bp, synthetic construct
  source 1..120: mol_type = other DNA
ttagatgacaaaggaggatgggcctttgccaccaacacagagcataatgtatttcctcctgggaaacaggacttttatcatttacatattgtattaaaagctggcagtccaatcctcatt

SEQ ID NO: 27573 - DNA, 120 bp, synthetic construct
  source 1..120: mol_type = other DNA
tattttaacatgagtcctaaaggactatcagaggtgatttcactgtctgccttttcctttttaccttctgtcttactcagggtatttcccatgttgaatactggttaggctcagtccctt

SEQ ID NO: 27574 - DNA, 120 bp, synthetic construct
  source 1..120: mol_type = other DNA
gaactagagatttttcacctatccttccctggaggtttaacccctatcctggaggttccttgcaatcttctccttctgcttcgtccactctggctgctttcccagaggaaattaggctcc

SEQ ID NO: 27575 - DNA, 120 bp, synthetic construct; identical to SEQ ID NO: 7901
  source 1..120: mol_type = other DNA

SEQ ID NO: 27576 - DNA, 120 bp, synthetic construct
  source 1..120: mol_type = other DNA
ggtgaccaaagaccccttcccaaagaagaatgggaatagtggatgagcccccagaaaattgttagaaataaagctcggagtcacaaagaaaacaaacacttgaacaaaggatttctcagc

SEQ ID NO: 27577 - DNA, 120 bp, synthetic construct
  source 1..120: mol_type = other DNA
ggtttttattcctaacgcaagttgtttctactattgtgtcctgtctccattggctggaactggaccacacaatctaaactgatcccagttggctaaaaacttaaactttcccaaataagg

SEQ ID NO: 27578 - DNA, 120 bp, synthetic construct
  source 1..120: mol_type = other DNA
caggcagatccaggcagactaggggacaaaggagttaggccttggttcaagtacaagaacatagaatgtgtttatttctttactgtatgtaacaactccttgggggcacaataaagaatc

SEQ ID NO: 27579 - DNA, 120 bp, synthetic construct; identical to SEQ ID NO: 7902
  source 1..120: mol_type = other DNA

SEQ ID NO: 27580 - DNA, 120 bp, synthetic construct
  source 1..120: mol_type = other DNA
tgtttctacttttcttaggtaggtatttattcctataaacctcccttttagccctgtttagctgtatcccacaggttttggtatgttgtgtttccattttcatttgtttcaagaaacttt

SEQ ID NO: 27581 - DNA, 120 bp, synthetic construct
  source 1..120: mol_type = other DNA
ttgtggccagagaagatatttaatgatttcaatttttgaaaatttgttcagacttgttttgtggcttaacataggctctctccctgaaaacgttccatgtgttcatgaaaggagtgtaca

SEQ ID NO: 27582 - DNA, 120 bp, synthetic construct
  source 1..120: mol_type = other DNA
gttgggatgttgaagtcccctactattattgtattggagtctatctttcttgttagatgtagtaatatttgttttatgagtctaggttctccagtgtttagtgcatatatatttagaatt

SEQ ID NO: 27583 - DNA, 120 bp, synthetic construct; identical to SEQ ID NO: 7903
  source 1..120: mol_type = other DNA

SEQ ID NO: 27584 - DNA, 120 bp, synthetic construct
  source 1..120: mol_type = other DNA
gtggcactagaggaatcaaagacacacacacagaaatatagaggtgtgaagtgggaaatcagggatctcacagccttcagagctgacagccttgaacagagatttacccccatatttatt

SEQ ID NO: 27585 - DNA, 120 bp, synthetic construct
  source 1..120: mol_type = other DNA
ccaaaataaagggatgggtttggctagttatctgcagcaggagcatgtccttaaggcacagatcactcatgctattgtttgtggtttaagaacgactttaagcagttttccgccctgggt

SEQ ID NO: 27586 - DNA, 120 bp, synthetic construct
  source 1..120: mol_type = other DNA
gtttacggccagatttttggaggcctgttcccaacagctttgttcctatcacattgttgttttcgggttgttttatatgtcctttattactgtctttttctcttattgcttgtcattatg

SEQ ID NO: 27587 - DNA, 120 bp, synthetic construct; identical to SEQ ID NO: 7904
  source 1..120: mol_type = other DNA

SEQ ID NO: 27588 - DNA, 120 bp, synthetic construct
  source 1..120: mol_type = other DNA
tcttctggcctgtaagatttctgctaagaaatctgctgttagagctgggcacagtggctcacacctgtaatcccagcactttgggaggctgaggtgggtggatcatgatgtcaagagatt

SEQ ID NO: 27589 - DNA, 120 bp, synthetic construct
  source 1..120: mol_type = other DNA
aggagaatcacctgaacccaggaggcagaggttgcagtgaaccgagatcatgccactgcaccccagcctggcagcacagcgagactccatctcaaaaaaaaaagaaagaaaaaagaaaaa

SEQ ID NO: 27590 - DNA, 120 bp, synthetic construct
  source 1..120: mol_type = other DNA
taccttatactatagaaagtctgattatatgccatggtgaggaactttttgcattgtatttttctcagaattattgaacattttgtatctgaatgtctaaatcacttgctagagttggga

SEQ ID NO: 27591 - DNA, 120 bp, synthetic construct; identical to SEQ ID NO: 7905
  source 1..120: mol_type = other DNA

SEQ ID NO: 27592 - DNA, 120 bp, synthetic construct
  source 1..120: mol_type = other DNA
tttcagaattcttttgtatctcactgaacttctgtaaaatgaatgttttgagtcctttatctagaatcttgaaaatttctttttgattaagatctattgtcttcctttgcggcttttttt

SEQ ID NO: 27593 - DNA, 120 bp, synthetic construct
  source 1..120: mol_type = other DNA
tgaattttgtttcatagtggagagcattttcctgaagatgagtctatggtgttggttgcgtggggtactttggatttgattctgggtgtagtacatagtagagtactatggcctctgtat

SEQ ID NO: 27594 - DNA, 120 bp, synthetic construct
  source 1..120: mol_type = other DNA
gtgaaaatgtgctggggactgagatgccacatgagacagtcttcaggctccagtggtggcagtggtgtgctgagtgttcctatctttgtgccccaaggtggtatatactggcatttgtgt

SEQ ID NO: 27595 - DNA, 120 bp, synthetic construct; identical to SEQ ID NO: 7906
  source 1..120: mol_type = other DNA

SEQ ID NO: 27596 - DNA, 120 bp, synthetic construct
  source 1..120: mol_type = other DNA
tcttcatcattaaatgctgtgccaactagtcccttaattttctttttgcctagaggactgaaacatttattatagtttaggtctgctggttattttttcactccctgtatgtctaaaatc

SEQ ID NO: 27597 - DNA, 120 bp, synthetic construct
  source 1..120: mol_type = other DNA
gattctcctgcctcagcctcctgagtagctgggaattacaggagcatgccaccatgcctagctaatgtttgcatttttagtagagacgaggtttcaccatgttggtcaggctggtcttga

SEQ ID NO: 27598 - DNA, 120 bp, synthetic construct
  source 1..120: mol_type = other DNA
ttaatttaatcattacatagggtacacatatatcaatacattaaacaatatctcacgaatgtattatactttgtcaattaaaactatacatatatatttgaaaaaggcattattttctgg

SEQ ID NO: 27599 - DNA, 120 bp, synthetic construct; identical to SEQ ID NO: 7907
  source 1..120: mol_type = other DNA

SEQ ID NO: 27600 - DNA, 120 bp, synthetic construct
  source 1..120: mol_type = other DNA
aaaaccataaaaaccctagaagaaaacctaggcaatacctttcaggccataggcatgggcaaggacttcgtgactaaaacaccaaaagcaatggcatcaaaaaccaaaattgacaaatgg

SEQ ID NO: 27601 - DNA, 120 bp, synthetic construct
  source 1..120: mol_type = other DNA
agaatctacaaggaactcaaacaaatttacaagaaaaaatcaaacaaccccatcaaaaagtgggcaaaagatatgaacagacacttctccaaagaagacatttatgcagccaacagacac

SEQ ID NO: 27602 - DNA, 120 bp, synthetic construct; identical to SEQ ID NO: 7908
  source 1..120: mol_type = other DNA

SEQ ID NO: 27603 - DNA, 120 bp, synthetic construct
  source 1..120: mol_type = other DNA
aaatgtccatcaatgatagataggattgagaaaatgtggcacatatacatcatggaatactatgcagccataaagaaggatgagttcatgtcctttgtagggacatggatgaagctggaa

SEQ ID NO: 27604 - DNA, 120 bp, synthetic construct
  source 1..120: mol_type = other DNA
cctgtcgtggggtgggggcagtggggagggatagcactaggagatatacctaatgtaaataatgagttaacaggtgcagcataccaacatggcacatgtatacatatgtaacaaacctgc

SEQ ID NO: 27605 - DNA, 120 bp, synthetic construct; identical to SEQ ID NO: 7909
  source 1..120: mol_type = other DNA

SEQ ID NO: 27606 - DNA, 120 bp, synthetic construct
  source 1..120: mol_type = other DNA
gctggttggtttgtgtacagcatttgcaagatgaatggacaacataatgtttggaaatccacctctttgatcaaagaaggtaaaaacagaaaagctgttgtggacttaattgcatggtgt

SEQ ID NO: 27607 - DNA, 120 bp, synthetic construct
  source 1..120: mol_type = other DNA
ttgcctatgaaaagaatgcccatgtgagccaagtcccaaggaaatcactatggtaatttgaggggttcattaatgtaagatctgttgatacctgatatagattggatgttgttcttgtgc

SEQ ID NO: 27608 - DNA, 120 bp, synthetic construct
  source 1..120: mol_type = other DNA
tgtccctcagaataactcccttccaggtttggaaggtgattgaaatcaacaagaatttatctccaagtgtttgccaggtgcacttgtaattccagctatgagagcggctgaggcagaagg

SEQ ID NO: 27609 - DNA, 120 bp, synthetic construct; identical to SEQ ID NO: 7910
  source 1..120: mol_type = other DNA

SEQ ID NO: 27610 - DNA, 120 bp, synthetic construct
  source 1..120: mol_type = other DNA
tttctttaacaaaaaaaagagagatagcatatggctatgtggcagattcttttatgggagggccttgaaaatacatagctggcgagttagactgataccagtagccccaggaagcagcaa

SEQ ID NO: 27611 - DNA, 120 bp, synthetic construct
  source 1..120: mol_type = other DNA
tgagattgtagtgggacaaaggagggcatttacatgtagggcgccaaacaaggagaatcaggcagctcacgcttaagacccaacctttttgatggctcacaagcaagaatttttaaaggc

SEQ ID NO: 27612 - DNA, 120 bp, synthetic construct
  source 1..120: mol_type = other DNA
gatttaaagattctctgatttgtgatagataaggaagcaaagcttctttacacagcttccttacacagttgggggcagtagagaggaatgttcaggcctggcctgtgggcttgactctct

SEQ ID NO: 27613 - DNA, 120 bp, synthetic construct
  source 1..120: mol_type = other DNA
tgtcagtggatctattaggagggaatccatgtttctgaaaaacaactcagggacatatgttaagatgttatttttagtttctatagagaatgaaacatcttgtgactctaacttccttgg

SEQ ID NO: 27614 - DNA, 120 bp, synthetic construct; identical to SEQ ID NO: 7911
  source 1..120: mol_type = other DNA

SEQ ID NO: 27615 - DNA, 120 bp, synthetic construct
  source 1..120: mol_type = other DNA
gagaattaaaatagtcagttggatgtgtaaaggaaagagtggggaaacaagcacaaagggtgggcttatacaccttcatgagtgtgctcacacttgacatgagagtatcctctcttttcc

SEQ ID NO: 27616 - DNA, 120 bp, synthetic construct
  source 1..120: mol_type = other DNA
ccaggactagggatgcaaatagagttcagaaacaggaattattcctgagcaagaaactgtaaatatattttatgtccattatgtaataattcctaagagcctgtagaagtaggttgtgcc

SEQ ID NO: 27617 - DNA, 120 bp, synthetic construct
  source 1..120: mol_type = other DNA
gagacacttgctagaacagtattggtccctgcagtctcagccagcacagcagcagaacctagtgttccttccaaaattataaatgtttagtataaatgaagggaaggagaaatagtagct

SEQ ID NO: 27618 - DNA, 120 bp, synthetic construct; identical to SEQ ID NO: 7912
  source 1..120: mol_type = other DNA

SEQ ID NO: 27619 - DNA, 120 bp, synthetic construct
  source 1..120: mol_type = other DNA
aatagtgagacccattcctacaaaatatttaaaaattagttgggcatgttggtgtgcacttgtaatgctatctactcaggaggctgaggcagaaggatcacttgagtccaggaattcaag

SEQ ID NO: 27620 - DNA, 120 bp, synthetic construct
  source 1..120: mol_type = other DNA
atctgtggtccaataaaaatatttggtcttttccctgtttcctgacaaccaggttctaaaacatttgcaatctcctcagtgataaacatgacttcaacatggcaatgagatgactatggg

SEQ ID NO: 27621 - DNA, 120 bp, synthetic construct
  source 1..120: mol_type = other DNA
gttgagttcagtcacacaatggccggtgatttaattaatcatgcttacacaatgaaatttccatagaaacctctggagattgggtttcggagagcacatctgtgtgtccacatgctggga

SEQ ID NO: 27622 - DNA, 120 bp, synthetic construct; identical to SEQ ID NO: 7913
  source 1..120: mol_type = other DNA

SEQ ID NO: 27623 - DNA, 120 bp, synthetic construct
  source 1..120: mol_type = other DNA
accagatagagtcccttgatctgggaattctcatcgtcgacaccatgaacgaaacaaatttctgtttgttaaaagttatccagtctcaggaattctgctctagtggcataatttaaacca

SEQ ID NO: 27624 - DNA, 120 bp, synthetic construct
  source 1..120: mol_type = other DNA
cctgtcagatcagtggcggaattagattctcatagaagcatgaaccctattgtgaactctgcatgcaagagatctaggttgcatgctccttatgaagcgctaatgcctgatcatctgagg

SEQ ID NO: 27625 - DNA, 120 bp, synthetic construct
  source 1..120: mol_type = other DNA
ccagtcccaggtgccaaaaaggtggggatttaagctataacaataaaaaactgcaatactgagtgtgaaaagaaaataaaatttcaggactccaaattcactataccaaaaggaaaaatt

SEQ ID NO: 27626 - DNA, 120 bp, synthetic construct
  source 1..120: mol_type = other DNA
ttgtgggccccaacgtgtttaccctaaaacagttttgttgaattttcccctgacaatgtaaattaacagcttatcttcacaggtacaggacaaagacaagactagaaatcatccctccac

SEQ ID NO: 27627 - DNA, 120 bp, synthetic construct; identical to SEQ ID NO: 7914
  source 1..120: mol_type = other DNA

SEQ ID NO: 27628 - DNA, 120 bp, synthetic construct
  source 1..120: mol_type = other DNA
tttaagaattctcaatccttgggaggtgagaaacccctgactttgcagccatgttagacagaagtgcaggtaacctgggacgtgatacttgtgacttgcttctgaagtgaggacagactt

SEQ ID NO: 27629 - DNA, 120 bp, synthetic construct
  source 1..120: mol_type = other DNA
aagaaaaccccatcaccatcccacagagagaaacttatagtaagagtaagcaagtaaacctctaccttcttcggtcccagaggaaaagataaacaaatgtaagcatttgtttcatgtccc

SEQ ID NO: 27630 - DNA, 120 bp, synthetic construct
  source 1..120: mol_type = other DNA
attctctccccagaaatatttccacacacaagaaaatataaatattaatagaaaacatcgtgtggacccagaacctctgagatcttacaaacctgggagttttaatcctagtaagagtca

SEQ ID NO: 27631 - DNA, 120 bp, synthetic construct; identical to SEQ ID NO: 7915
  source 1..120: mol_type = other DNA

SEQ ID NO: 27632 - DNA, 120 bp, synthetic construct
  source 1..120: mol_type = other DNA
gcccatgacacagccctcaggagaccctgagaacatgtgctcaaggtggttgaggcacaggttggttttacacatttaaggaatatatgaaacatcaatcaaatacatttaagctataca

SEQ ID NO: 27633 - DNA, 120 bp, synthetic construct
  source 1..120: mol_type = other DNA
gaaaggaatgtctgggttatgataaaaggttgtggagtccaaaattctcatgcagatgatgcctccaggtgccaggcttcagagagtatagattgtaaatgtttctgatcagactgaagg

SEQ ID NO: 27634 - DNA, 120 bp, synthetic construct
  source 1..120: mol_type = other DNA
ttgagcaccctggctgagggtgtccattaaaatgattgggaaggggtggctttgatgtttatttttggtttacaacatgtaaaatgttgagaggagacagacaccacctccctccctgga

SEQ ID NO: 27635 - DNA, 120 bp, synthetic construct
  source 1..120: mol_type = other DNA
agaggacaacaacactccagtcacccctgcagttgctcatggacatgagttttaagctccaccagtctgatgaccacctgctgaagaggtgtcattgtctcaggtaaatactaagtgttc

SEQ ID NO: 27636 - DNA, 120 bp, synthetic construct; identical to SEQ ID NO: 7916
  source 1..120: mol_type = other DNA

SEQ ID NO: 27637 - DNA, 120 bp, synthetic construct
  source 1..120: mol_type = other DNA
tggagccgccattgtgaacatacccagtcccaggcgtcctattcctattggacagctgctggcattcacccgtgcaaacttccagcttacttgtctatgtctgaagcttgatattacagg

SEQ ID NO: 27638 - DNA, 120 bp, synthetic construct
  source 1..120: mol_type = other DNA
gaatgaggtgacagagaggctaggactgtgcagaaagcattttagtaaagatggctgagtgacagtagtgatgtccaatttccatgtgcagcagtgacatctgtcctagcctcagggtcc

SEQ ID NO: 27639 - DNA, 120 bp, synthetic construct
  source 1..120: mol_type = other DNA
agtttccagcctgcttctgtagccttccccacaataaaactagcccccaataccagatatacgactttctgtgtacattacagaaatgtggtttccatagttttctccaagaagtgagtg

SEQ ID NO: 27640 - DNA, 120 bp, synthetic construct; identical to SEQ ID NO: 7917
  source 1..120: mol_type = other DNA

SEQ ID NO: 27641 - DNA, 120 bp, synthetic construct
  source 1..120: mol_type = other DNA
cggggacttagaaaatacacaggccactccccagaacccttgtctcagagtattatgcacaagaccaaggaatcatttatatgacaagccctagaggcgaggctgatgctcagacatgtg

SEQ ID NO: 27642 - DNA, 120 bp, synthetic construct
  source 1..120: mol_type = other DNA
tcttgctcaactccagacttcctggatctcagcaccacatccaggtgatcctggtgcacatgggggttccttgtctgagtgtcctctagacgtgggaccagaactgtgcagtctgctctg

SEQ ID NO: 27643 - DNA, 120 bp, synthetic construct
  source 1..120: mol_type = other DNA
ttggtgcttcatccatgcctgaggttttaagtctcatatatatggtgtgacctcctaaatctatttctccagcccagtcctttcccctaaactctggagttgtctgtccaaattccaccc

SEQ ID NO: 27644 - DNA, 120 bp, synthetic construct
  source 1..120: mol_type = other DNA
ctcactcattttacaactatgggtgtccttgattcgtctttctcacaccacagatacaatccattggcaaatgctgtgagtccatcttcaaatgcatccagaatcccctcacgccccact

SEQ ID NO: 27645 - DNA, 120 bp, synthetic construct; identical to SEQ ID NO: 7918
  source 1..120: mol_type = other DNA

SEQ ID NO: 27646 - DNA, 120 bp, synthetic construct
  source 1..120: mol_type = other DNA
gggaacacaaacaccttcctgccatagtgcatttggactggagcttcctctgcctggaaagaacttccccagacatcctcatgtctctcaaatctttcctcaaaagtcacctttgcaaca

SEQ ID NO: 27647 - DNA, 120 bp, synthetic construct
  source 1..120: mol_type = other DNA
cttaccaccttctagcactttccttccttactctggttataatgtatctatcgtctgcctcttcccactggaacatatgctacaaaaggccagagatttttcttttacttcagtggtgtt

SEQ ID NO: 27648 - DNA, 120 bp, synthetic construct
  source 1..120: mol_type = other DNA
cctattttgaaggcagtatctttattaacatagcctcaggccaagtgctgttttgtggcagctacagcacaaggacccctcacactgagatagaggccgcctatgtttttctcagcagtg

SEQ ID NO: 27649 - DNA, 120 bp, synthetic construct
  source 1..120: mol_type = other DNA
cacaatcaggttctctcttcaggaaagaacagtccttgatgacgggtccaatttcacagacaaatgtaagtctaaattagactctgctttacagattcatgagttgggattggattcagc

SEQ ID NO: 27650 - DNA, 120 bp, synthetic construct; identical to SEQ ID NO: 7919
  source 1..120: mol_type = other DNA

SEQ ID NO: 27651 - DNA, 120 bp, synthetic construct
  source 1..120: mol_type = other DNA
caccccacctgcaacagactcagcacagcgaacatgcagattctggaaggttctcaggtctttatttgctctctcaaattccaggaattgacttatttaattaatccatcaacctctcat

SEQ ID NO: 27652 - DNA, 120 bp, synthetic construct
  source 1..120: mol_type = other DNA
ttttcagtagggaagtaagaagttgcagctcagtgcacgtaaagttgagacagagatggagacatccagccccacctctctggaacaagaaagatgactggggaggaaacacaggtcagc

SEQ ID NO: 27653 - DNA, 120 bp, synthetic construct
  source 1..120: mol_type = other DNA
aagtcacaaaggggaggcgtgaagaaatcctgcatctcagtccctcacaagacagctgtctcaggctacagaaaacaacagtcatgaacaaattctggttagtcatggtaagcgatgaca

SEQ ID NO: 27654 - DNA, 120 bp, synthetic construct
  source 1..120: mol_type = other DNA
atctcaccttttcaagctgtgagagacacatcagagccctgggcactgtcgctgcctggagtagaacaaaaacaggacctggtcagagcccgcaggagacgtgggacaggaggaattatg

SEQ ID NO: 27655 - DNA, 120 bp, synthetic construct; identical to SEQ ID NO: 7920
  source 1..120: mol_type = other DNA

SEQ ID NO: 27656 - DNA, 120 bp, synthetic construct
  source 1..120: mol_type = other DNA
ctcatgaatgctggaatcaggaccccaacaccacaaccatcaaggtgatacatccatccttcattgtcacatgtgctgcacaaaagagtaagtgctggcacacagggtcccaggctgcgt

SEQ ID NO: 27657 - DNA, 120 bp, synthetic construct
  source 1..120: mol_type = other DNA
ctcttcctcctacacatcacagcagcgaccacagctccgatgaccacaactgctaggacagccaggccagcaacaatgcccacgatggggacggtggactgggaagacggctctgggaaa

SEQ ID NO: 27658 - DNA, 120 bp, synthetic construct
  source 1..120: mol_type = other DNA
tgctgtacatggcatgtgtatctctgctcttctccagaaggcaccaccacagctgcccacttctggaaggttctatctcctgctggtctggtctccacaagctcagtgtcctgagtttgg

SEQ ID NO: 27659 - DNA, 120 bp, synthetic construct; identical to SEQ ID NO: 7921
  source 1..120: mol_type = other DNA

SEQ ID NO: 27660 - DNA, 120 bp, synthetic construct
  source 1..120: mol_type = other DNA
acttctgctcctgatctgagtggaggtaaagtgactcagaagtgctggaatcagagccccaaacacactgagtgtgaggcagagaacaaggcctgagaggaaaagtcacggttcccaagg

SEQ ID NO: 27661 - DNA, 120 bp, synthetic construct
  source 1..120: mol_type = other DNA
caggaaaactcatgccattctccattcaacggagggcgacattctagcgctgatcccattttcctcctcttctcgtgggaggccatccccggcgacctataggagatggggaaggctccc

SEQ ID NO: 27662 - DNA, 120 bp, synthetic construct
  source 1..120: mol_type = other DNA
cccacttgcgctgggtgatctgagccgccgtgtccgcggcggtccaggagcgcaggtcctcgttcagggcgatgtaatccttgccgtcgtaggcgtactggtcatgcccgcggaggaggc

SEQ ID NO: 27663 - DNA, 120 bp, synthetic construct; identical to SEQ ID NO: 7922
  source 1..120: mol_type = other DNA

SEQ ID NO: 27664 - DNA, 120 bp, synthetic construct
  source 1..120: mol_type = other DNA
ggccttgtagatctgtgtgttccggtcccaatactccggcccctcctgctctatccacggcgcccgcggctcctctctcggactcgcggcgtcgctgtcgaacctcacgaactgggtgtc

SEQ ID NO: 27665 - DNA, 120 bp, synthetic construct
  source 1..120: mol_type = other DNA
ctcctcccggcgcggctcctcaggtcctgcgcccccgcctgcggtcccctcgctcctcccggcagaggccatttccctcccgacccgcactcaccggcccaggtctcggtcagggccagg

SEQ ID NO: 27666 - DNA, 120 bp, synthetic construct
  source 1..120: mol_type = other DNA
ttggcttctctagatatccaatacccaatgggagtgggaagtggggacgcgtcacgagtatcctggaagaaggacccgacacaagttgggagaagaagtgaaactcaggggagtggggaa

SEQ ID NO: 27667 - DNA, 120 bp, synthetic construct; identical to SEQ ID NO: 7923
  source 1..120: mol_type = other DNA

SEQ ID NO: 27668 - DNA, 120 bp, synthetic construct
  source 1..120: mol_type = other DNA
tctctttaaacctggtgaagttttctctgaaggcaccgcatagggattctcatagagaccagtttcctttttgtttgttaatacagtaggtagcacaatattggtaatccctgaatgatt

SEQ ID NO: 27669 - DNA, 120 bp, synthetic construct
  source 1..120: mol_type = other DNA
tcttcattccccaccctgagtttccctgtgtgagtccagaacatctcctgaatataaagaagcagggtttgttactgtctattgcaaccgggagcctgtagtcatcacctcaaagttgcg

SEQ ID NO: 27670 - DNA, 120 bp, synthetic construct
  source 1..120: mol_type = other DNA
tttttttttaatcataaggagccaattagtttttaggaagtccaacaaaatgtattaaataccgaatgcaaagaaccctctgccaggctcttccactgctttagaattctttctcctgct

SEQ ID NO: 27671 - DNA, 120 bp, synthetic construct; identical to SEQ ID NO: 7924
  source 1..120: mol_type = other DNA

SEQ ID NO: 27672 - DNA, 120 bp, synthetic construct
  source 1..120: mol_type = other DNA
acaatagcaaagaatggaaacccgattccttgacttttcacagtgaagttcaggttatattaagctgcatccagcaaaataaaggacacttctaacagtgtagtttcttgtaacctacca

SEQ ID NO: 27673 - DNA, 120 bp, synthetic construct
  source 1..120: mol_type = other DNA
gaatgtgacatgtgtatgtgcatcatttctgttgttaattgttcctttctgtatatctgggtcaccatctagtatcattttccttcaccctgaagcacttcctttaaaattaaatgtagt

SEQ ID NO: 27674 - DNA, 120 bp, synthetic construct
  source 1..120: mol_type = other DNA
aattcaccagttttagctgcgcttttttggcgaatattggtaattatttatagtcatgtaactaccacactgcccagtagagaaacccagaatgcaaagaatcccctgctaggctcctcc

SEQ ID NO: 27675 - DNA, 120 bp, synthetic construct; identical to SEQ ID NO: 7925
  source 1..120: mol_type = other DNA

SEQ ID NO: 27676 - DNA, 120 bp, synthetic construct
  source 1..120: mol_type = other DNA
gttgctgagcagctgctgagtattgctggaatcccagcttattcattggtttctctgcctccagttgatagacatgtggattcctccagttagggtttgttattaatgaagccactataa

SEQ ID NO: 27677 - DNA, 120 bp, synthetic construct
  source 1..120: mol_type = other DNA
acaaattggctgccacattttttgcattcctaccagcaatatcagacattcctattttttccatattcttgacagtatttagacttatccaatgtctttttaactttatctattctaggt

SEQ ID NO: 27678 - DNA, 120 bp, synthetic construct
  source 1..120: mol_type = other DNA
aattcagtgattaattccagagactttttcagaattccctagtgttttctacatatgcaatgaagttggtgacaaagacttttgtttcttcctttcctatctattgatcttttttctttt

SEQ ID NO: 27679 - DNA, 120 bp, synthetic construct; identical to SEQ ID NO: 7926
  source 1..120: mol_type = other DNA

SEQ ID NO: 27680 - DNA, 120 bp, synthetic construct
  source 1..120: mol_type = other DNA
gcaaatcaaaaccacaatgatgtactatctcctgcgagccagaatggcgattattaaaaagtgaggaaacaatagatgctggtgaggctgtggagaaataggaatgctttttcactgttg

SEQ ID NO: 27681 - DNA, 120 bp, synthetic construct
  source 1..120: mol_type = other DNA
acccagcaatccctttactgggtatatacccaaaggaatatcaatcattctactataaagacacatgcacaggtatgtttattgcagcactattttcaatagcaaagacatggaaccaac

SEQ ID NO: 27682 - DNA, 120 bp, synthetic construct
  source 1..120: mol_type = other DNA
aatgagttcatgtcctttgcagggacatggatgaagctggaagtcatcgtcagcaaactaacatgggaacagaaaacctaacaccacgtgtcctcactcttaagtgggaggtgaacaatg

SEQ ID NO: 27683 - DNA, 120 bp, synthetic construct
  source 1..120: mol_type = other DNA
gatgggtgaataggtgcagcaaaccactatggcagactatacgtatgtaacaaacctgcacgttctgcacatgtatctggaacttaaagcaaaataaaataaattaaataaaaagagaaa

SEQ ID NO: 27684 - DNA, 120 bp, synthetic construct; identical to SEQ ID NO: 7927
  source 1..120: mol_type = other DNA

SEQ ID NO: 27685 - DNA, 120 bp, synthetic construct
  source 1..120: mol_type = other DNA
agctaatgggaactaagacttaatacttgggtgggtactaatgggcatagaaataatttgtgaaacaaaaccccatgacacaagtttacctatataacaaacctgcacatgtacccctta

SEQ ID NO: 27686 - DNA, 120 bp, synthetic construct
  source 1..120: mol_type = other DNA
ttttaaaccaagtcacacaatctctgcccttcattggagtgttgattcatataggtttttgtcattattgatatgataagtttcacgtctaccatgttattttcccggtttttgtttctc

SEQ ID NO: 27687 - DNA, 120 bp, synthetic construct
  source 1..120: mol_type = other DNA
agatgtccttcaaggataggcaaatgagatatttcaggtaaaagaaaattaaaagaatttgtcaccagcagatctgtacaattacaattggtaaagaaaattcttcagactagaggcaaa

SEQ ID NO: 27688 - DNA, 120 bp, synthetic construct; identical to SEQ ID NO: 7928
  source 1..120: mol_type = other DNA

SEQ ID NO: 27689 - DNA, 120 bp, synthetic construct
  source 1..120: mol_type = other DNA
cggagatggttttttgaaaacaaatcctagccagtcttgagtatcatcatcctacgatttcagaactatcgtgaatataaaagtaatcaaagaacagtcctgcccagaaagaggagttat

SEQ ID NO: 27690 - DNA, 120 bp, synthetic construct
  source 1..120: mol_type = other DNA
tgtcttgctcttccactctacccagtgtcctgacccaagagacaaggggcgtctgctgctgtgtccacacttggagaaggaaatcttgaaggtgtcagtacattacaagctgggcatgac

SEQ ID NO: 27691 - DNA, 120 bp, synthetic construct
  source 1..120: mol_type = other DNA
aagtaaacttagctgggcacggtggtgggcacttgcattcccaggtattggggaggctgagatgggaagatcccttgggcttatggattcaagtctgtagtgagctgtgatcgcatcact

SEQ ID NO: 27692 - DNA, 120 bp, synthetic construct; identical to SEQ ID NO: 7929
  source 1..120: mol_type = other DNA

SEQ ID NO: 27693 - DNA, 120 bp, synthetic construct
  source 1..120: mol_type = other DNA
aaggaatacatgaaaatggttaagtaaaatcaaatggctccaaaagtcttacaatgaaaacaacagtcctgccagttgttctctcgagaggcaaacacttttcattctcttagtttttcc

SEQ ID NO: 27694 - DNA, 120 bp, synthetic construct
  source 1..120: mol_type = other DNA
tcccctgccccatccctcctaattctccagagcaatgacttttaactcttttagcaatgtcttctatttttttctcacataactacttagtcatttcttgattattttatacattctata

SEQ ID NO: 27695 - DNA, 120 bp, synthetic construct
  source 1..120: mol_type = other DNA
atgagtatgtacatattgctcattgttgagaaaaacagagtattatgctcttgcttcctgccttgtgcttccttctgccctagaattaatgattgcctaaccacccttcccccttgtttt

SEQ ID NO: 27696 - DNA, 120 bp, synthetic construct; identical to SEQ ID NO: 7930
  source 1..120: mol_type = other DNA

SEQ ID NO: 27697 - DNA, 120 bp, synthetic construct
  source 1..120: mol_type = other DNA
gaggtaacccctgagtctttgcttgcctaaaaatgtattattttaccttcacccttgattatttggctgaatatagatttattcgttgaaaataactttctttctggaattctgaaggca

SEQ ID NO: 27698 - DNA, 120 bp, synthetic construct
  source 1..120: mol_type = other DNA
catctcagctccctgagtagatgggactacaggtgtgcgccacaatgcccagctaacttttgtattttttgtagagatggggcttcaccatgttgcccaagctgatctcaaggtatctgc

SEQ ID NO: 27699 - DNA, 120 bp, synthetic construct
  source 1..120: mol_type = other DNA
tgggcccaaacccagggcaaactccatcagaatatcctgctacttctgactttaaaatatatcttaaatcacagtttcttactacatgcaaccctttggttcaaactaccatcatccctc

SEQ ID NO: 27700 - DNA, 120 bp, synthetic construct
  source 1..120: mol_type = other DNA
tcaagcctataatcccagcactttgggaggccgaggcaggcggatcactttaggtcaggagtttgagaccagcctgaccaacattgtgaaaccccgtcttcaccaaaaacacaaaattag

SEQ ID NO: 27701 - DNA, 120 bp, synthetic construct; identical to SEQ ID NO: 7931
  source 1..120: mol_type = other DNA

SEQ ID NO: 27702 - DNA, 120 bp, synthetic construct
  source 1..120: mol_type = other DNA
cctgtatctcagcagtatggagtttgttaccagtgagaacctgctcactggctttaaactggttttcttaccttctcagttccatttctccgtacctcaattgatgatttctggtaagac

SEQ ID NO: 27703 - DNA, 120 bp, synthetic construct
  source 1..120: mol_type = other DNA
tgttacaaacaaggctgcaacatttgcgtgcaaacctctgggtatacacgtaaggagctttcggtatttcccactagtgaaacttctcagttggagggtatgtgcatcttcatctttaag

SEQ ID NO: 27704 - DNA, 120 bp, synthetic construct
  source 1..120: mol_type = other DNA
tcactgtagcaggtgctggggactcagtcagggtcttggagaggcacttaattatagcaagaatatttcataagtggtatctgatatagtcaagattagtggggagtaaaaacatgttgc

SEQ ID NO: 27705 - DNA, 120 bp, synthetic construct; identical to SEQ ID NO: 7932
  source 1..120: mol_type = other DNA

SEQ ID NO: 27706 - DNA, 120 bp, synthetic construct
  source 1..120: mol_type = other DNA
aactatccaaatcatgtctactctatttgctaattctggttgttaagtaagttttaagatctcaaccagacttctggcaagaaaatgagctcgttgtggaggttccttgagttctctgct

SEQ ID NO: 27707 - DNA, 120 bp, synthetic construct
  source 1..120: mol_type = other DNA
tggaaatacctaaattcattcctgagcggcggtcagggcaggtccccgttcttgccgatgcccatgttctgagacacagcgacgatgcagtttagcaaacgaaccatgacagcagcggtg

SEQ ID NO: 27708 - DNA, 120 bp, synthetic construct
  source 1..120: mol_type = other DNA
gcatccacctccagggagcagaagcagcgcagcagcgccacctggtggtcgatgcgcttcctttgcagatcacgcacagccctgagatccacctctccttcctacgcaccacgcatttct

SEQ ID NO: 27709 - DNA, 120 bp, synthetic construct; identical to SEQ ID NO: 7933
  source 1..120: mol_type = other DNA

SEQ ID NO: 27710 - DNA, 120 bp, synthetic construct
  source 1..120: mol_type = other DNA
ctgctggttgtcctgggtgctcagagggaagatggggagggggcttcgtgcaaaacagtaaccatactctataaattattttttcattagcctttgtgtcataaaataaaatctaggact

SEQ ID NO: 27711 - DNA, 120 bp, synthetic construct
  source 1..120: mol_type = other DNA
tgcggagcaaaccagaagccccatcatttgccccagctcagcaataaactctttcctcccccaaataaaaatacatcctgacttttacgatcataacttctttgttctattttatatttt

SEQ ID NO: 27712 - DNA, 120 bp, synthetic construct
  source 1..120: mol_type = other DNA
ctgattgctccccaagccattgtttgaatatgtgtttttattatctgtattgcctctaaattggtaattggctatggaggttagcttctattcaggcttgatttctttctcacttgtatt

SEQ ID NO: 27713 - DNA, 120 bp, synthetic construct; identical to SEQ ID NO: 7934
  source 1..120: mol_type = other DNA

SEQ ID NO: 27714 - DNA, 120 bp, synthetic construct
  source 1..120: mol_type = other DNA
atttgtaaaatctggatataacacaattgtctatcaacagcaaagggacaagaaatgtgagctatttataaagtggagcattggacagccatgggagtgaataggctatgaccacacaca

SEQ ID NO: 27715 - DNA, 120 bp, synthetic construct
  source 1..120: mol_type = other DNA
gtgactgagtaagatccagtgatgtttctgggaggctgtgattggtgtactttgatgtgggtgttgtttacctgagtgttcactatgtgaaactccactgcccacttgtggattgtcctt

SEQ ID NO: 27716 - DNA, 120 bp, synthetic construct
  source 1..120: mol_type = other DNA
ttagtgcaattgtttttaattccaggaaacaaatacatataaagaggaaaatctacaacaagagcagtaggtttgggagctgacaccagaacagctttggaaatggctctcgagccagga

SEQ ID NO: 27717 - DNA, 120 bp, synthetic construct; identical to SEQ ID NO: 7935
  source 1..120: mol_type = other DNA

SEQ ID NO: 27718 - DNA, 120 bp, synthetic construct
  source 1..120: mol_type = other DNA
atgggcacagcaattgcgtcgccactcaccaaggctgagctggcagctgccactgctgagggcccagcccaccaaaagcagctgtttttttgacggagaaataaaacaggcagtggtaat

SEQ ID NO: 27719 - DNA, 120 bp, synthetic construct
  source 1..120: mol_type = other DNA
aagattatggcaatggggagaacttactacaagtaaagaagttaaaacagttgtaaaactttttttccgttcaggcatatccagactgttttacacataagttctaccaaaactttgaag

SEQ ID NO: 27720 - DNA, 120 bp, synthetic construct
  source 1..120: mol_type = other DNA
taaataacattgattctaaagccagctagggaatacataagagaaaagcatgataagataatcacttctaagcaattagaggtaaaaatactgagaaaaataatactagattgtgtccac

SEQ ID NO: 27721 - DNA, 120 bp, synthetic construct; identical to SEQ ID NO: 7936
  source 1..120: mol_type = other DNA

SEQ ID NO: 27722 - DNA, 120 bp, synthetic construct
  source 1..120: mol_type = other DNA
atacctcaaaataataaaagtcatctatgacaaacccacaaccaatatcatactgaatgggcaaaagctggaagcatccccctttaacaccagcacaaggcgaggatgccttctctcact

SEQ ID NO: 27723 - DNA, 120 bp, synthetic construct
  source 1..120: mol_type = other DNA
tatctagaaaaccctattgtttcggctgaaaagcttcttaagctgaaaggcaacttcagttaagtctcagggtacaaaatcagtgtgcagaagccataagcattcctatacaccaacaat

SEQ ID NO: 27724 - DNA, 120 bp, synthetic construct
  source 1..120: mol_type = other DNA
gcttcttaagtaactcagagaggacacagacaaatggaaaaacactccatgctcagggatagaaagaatcaatattgtgaaaacggtcatactgcccgaagtaatttatagattcagtgc

SEQ ID NO: 27725 - DNA, 120 bp, synthetic construct; identical to SEQ ID NO: 7937
  source 1..120: mol_type = other DNA

SEQ ID NO: 27726 - DNA, 120 bp, synthetic construct
  source 1..120: mol_type = other DNA
aattggacatgtcagtgattataggttttttttaaaatctgaacatgaaaaagttttccccagttttaagataatttgccatgctattcaagtcagcctaaaattttaaaaagctactac

SEQ ID NO: 27727 - DNA, 120 bp, synthetic construct
  source 1..120: mol_type = other DNA
tattaaatgagttatttatgttccagcaaacagtggatgaatgtgactatggagagcattgtttcaaaatgttttaacaaatatatcattgaagttcttgctattttattcaatttcagc

SEQ ID NO: 27728 - DNA, 120 bp, synthetic construct
  source 1..120: mol_type = other DNA
aataaaaataaaattcatatagaaccaaaaagaacttgtatagccaagacaatcctaagcaaaaagaacaaagctggaggcatcatgctacttgacttcaaactatactacaaggctaca

SEQ ID NO: 27729 - DNA, 120 bp, synthetic construct; identical to SEQ ID NO: 7938
  source 1..120: mol_type = other DNA

SEQ ID NO: 27730 - DNA, 120 bp, synthetic construct
  source 1..120: mol_type = other DNA
tggacaaataactaaagaaaatcaggaggactatgtttcactaaatagcagaaatcaataaataattgtgaaaaggaagcaaatggaaatctggagctgaaatgtacgggaagcaaaatg

SEQ ID NO: 27731 - DNA, 120 bp, synthetic construct
  source 1..120: mol_type = other DNA
gaaaattgactggagggcttcaagagcagattttagtttgcagaatgaagaatcagtaaacgcaaacataggccaattgaaattgcccatttgaggagcagaagggaaaaagtatgaaga

SEQ ID NO: 27732 - DNA, 120 bp, synthetic construct
  source 1..120: mol_type = other DNA
gaaatttttttgaaaacatgaatctgggtatccaaaacactcaaacatttaaagtagcagtaattcaaagatgtccacactgacagacattatattgaaactgtcgaaagtcaaagacaa

SEQ ID NO: 27733 - DNA, 120 bp, synthetic construct
  source 1..120: mol_type = other DNA
taaagttcagaaagaaaaaaaaacctgtctcaactgacagttgcatatttgacaaaactctccatgagaaataatggagaaattcagacatgcacaggtaaataaaagctgatggcattc

SEQ ID NO: 27734 - DNA, 120 bp, synthetic construct; identical to SEQ ID NO: 7939
  source 1..120: mol_type = other DNA

SEQ ID NO: 27735 - DNA, 120 bp, synthetic construct
  source 1..120: mol_type = other DNA
atattgtatgactccattttaataaaatattcagaagaagaaaatctagagagacagaaactgggttaatggtgccaggtgctggtggcaggggagagtggaaggtgactgcttaacggg

SEQ ID NO: 27736 - DNA, 120 bp, synthetic construct
  source 1..120: mol_type = other DNA
attttgtatttacgtgcattttaccacaactaaaaagaggctggcaaatatattccaagtttgcttgggaatctgcccatctgtcttttcccctcaggatttcatctcttattcagagct

SEQ ID NO: 27737 - DNA, 120 bp, synthetic construct
  source 1..120: mol_type = other DNA
gagataaaagaaaagacagctgggcccgggggaccactaccacaaatgcgcggagaccagtagtggccccgaatgtctggctgctctgttatttattggatacaaagcaaaaagggcagg

SEQ ID NO: 27738 - DNA, 120 bp, synthetic construct; identical to SEQ ID NO: 7940
  source 1..120: mol_type = other DNA

SEQ ID NO: 27739 - DNA, 120 bp, synthetic construct
  source 1..120: mol_type = other DNA
tctgctaagtagtgggtgttgttccttgacacttttcgctaccgctagaccacggttcgcctggcaacaggcgtcttcccagacgctggcatcaccgctagaccaaggagccctctggtg

SEQ ID NO: 27740 - DNA, 120 bp, synthetic construct
  source 1..120: mol_type = other DNA
attattataatattggaataaagagtaattgctaccaactaatgattaatgatattcatatataatcatatctaagctctatatctggtacaactattcttgttttatattttattatac

SEQ ID NO: 27741 - DNA, 120 bp, synthetic construct
  source 1..120: mol_type = other DNA
ccaaatgctcagatgcaactctggggctaacttcaggggaagttaggagattatccaaataagatggttcactgggagaaagaatgtttggctttaatgttagggaagttatgtttgcat

SEQ ID NO: 27742 - DNA, 120 bp, synthetic construct; identical to SEQ ID NO: 7941
  source 1..120: mol_type = other DNA

SEQ ID NO: 27743 - DNA, 120 bp, synthetic construct
  source 1..120: mol_type = other DNA
ttctcaaggctaatattcagtgaacccagaccaagcctcaaagtacacaggggctcagattttcatctatgaaatggaagaatccatctccctctttcaggtgtagtggtaattatatat

SEQ ID NO: 27744 - DNA, 120 bp, synthetic construct
  source 1..120: mol_type = other DNA
tgttgcctttattgctcagctgaactctataaccaaaaattggatcatggattgtgaaggaagaactcatttcttttctctggtggagcactcggtaggcatttctgccctttgggttca

SEQ ID NO: 27745 - DNA, 120 bp, synthetic construct
  source 1..120: mol_type = other DNA
gtgatcatagtggactacgtccttgaacttcagggctccagcaatgttccagcctcagcctcctgagtagctgggactacaggtgcatgccaccatgtctggcctcatttcattgttatt

SEQ ID NO: 27746 - DNA, 120 bp, synthetic construct; identical to SEQ ID NO: 7942
  source 1..120: mol_type = other DNA

SEQ ID NO: 27747 - DNA, 120 bp, synthetic construct
  source 1..120: mol_type = other DNA
ttatacaagtagttttccatgttataagctctgcataaagtttatacactttttcaagccatatcccatttcagataagaagatgtaacccaacttctttttttggatccgtctgccttc

SEQ ID NO: 27748 - DNA, 120 bp, synthetic construct
  source 1..120: mol_type = other DNA
taaacatttttaattattttcatcacattgtcacattggttctctaaatcgtcatactgacatattccacctcacctttcaggacatgctaggactcaaggctatttacgcatctggaat

SEQ ID NO: 27749 - DNA, 120 bp, synthetic construct
  source 1..120: mol_type = other DNA
gaatgtaactggcaaataattctcagaggaatttaggagttcagtgtctttagcttcattaggatctgcccagatgtccccattctgattttcaggatcccatttattcccaatcaatgc

SEQ ID NO: 27750 - DNA, 120 bp, synthetic construct; identical to SEQ ID NO: 7943
  source 1..120: mol_type = other DNA

SEQ ID NO: 27751 - DNA, 120 bp, synthetic construct
  source 1..120: mol_type = other DNA
attcacactctctgtactaatggaaatagagtcatttgtgcctttaaatccaaatagattagagaaacaattcaagaaaccccccccccccccgcaccaaattcagtacattcattctta

SEQ ID NO: 27752 - DNA, 120 bp, synthetic construct
  source 1..120: mol_type = other DNA
gaatggtgctgggtttatgggcaccaagcctattcgggagttgcacacactgagtcgggctccagtggcccctaggcttctaaggggcactctcctcctgctagtgccaagctaagctgt

SEQ ID NO: 27753 - DNA, 120 bp, synthetic construct
  source 1..120: mol_type = other DNA
cccctaggactgggagcagcccgcctgggggagaccatcaggatgtctatggaaggctgcttcatgctacaagggcagagttaagtctttggtatagagactggttggcaaagttgaaaa

SEQ ID NO: 27754 - DNA, 120 bp, synthetic construct; identical to SEQ ID NO: 7944
  source 1..120: mol_type = other DNA

SEQ ID NO: 27755 - DNA, 120 bp, synthetic construct
  source 1..120: mol_type = other DNA
cagctgcagcgactcacccagcatgagcggtgccactcagtgtgcacatgacagatgctccatcctcaggagatgacaaagacgggaggacaaggtgaagacacaggtgcatcatctcct

SEQ ID NO: 27756 - DNA, 120 bp, synthetic construct
  source 1..120: mol_type = other DNA
actacagaggccatgtgtactctgtgtaatcaacacaccccagcttcttcccacctccagtcatctcactgtatctgacatgatgccagcagattgtctcagctcaaattccagctccat

SEQ ID NO: 27757 - DNA, 120 bp, synthetic construct
  source 1..120: mol_type = other DNA
catatgccaagtacccagaaagatgtctggaacatggcaacacccaccacagaagtagtagctgcaattattgcctccttaaaacagtggagatgtcacccatcggggctagagagaatt

SEQ ID NO: 27758 - DNA, 120 bp, synthetic construct; identical to SEQ ID NO: 7945
  source 1..120: mol_type = other DNA

SEQ ID NO: 27759 - DNA, 120 bp, synthetic construct
  source 1..120: mol_type = other DNA
tgccccctcctcagtatgtctcccccaggtgctgtgaggacaggtggaggctgtctccaggctctcacccggccacacaccagcacgtctccaggttcctctcagccccggttaccccca

SEQ ID NO: 27760 - DNA, 120 bp, synthetic construct
  source 1..120: mol_type = other DNA
acgttttgtactttctgaaacatggcttcaccttcaagtgcgggtgatgacagtgccacaaagaacaaatgttactgtctatcctcatcaaccataattttccagttttccaaccctcag

SEQ ID NO: 27761 - DNA, 120 bp, synthetic construct
  source 1..120: mol_type = other DNA
gggaaccccacagatctggccgtcttcaagcacatcagagagattgccatgaggagcaacttagccagaaagacttatttgcctcctcaaaaagcgtaaaattatgtaacataatacttt

SEQ ID NO: 27762 - DNA, 120 bp, synthetic construct; identical to SEQ ID NO: 7946
  source 1..120: mol_type = other DNA

SEQ ID NO: 27763 - DNA, 120 bp, synthetic construct
  source 1..120: mol_type = other DNA
ttcacattgaaaagctcgggtatttctattagaatcacatgttttacttgaggttgctgacgcctgtgtccatctcaacctgggcattgtgctgccaccttccagaagagaaaaactagg

SEQ ID NO: 27764 - DNA, 120 bp, synthetic construct
  source 1..120: mol_type = other DNA
cttgagtcttggaaagagttgtgaaaatgccacaggtacaaacacctgcaggccactcccacagggacagctccgtgaggcggtgccgctcattcccacaacctcctgccacaggcaaca

SEQ ID NO: 27765 - DNA, 120 bp, synthetic construct
  source 1..120: mol_type = other DNA
ggaagaaaggaaaacggaagaaaggacaatgtcacagtagcccccatgaccaagagagacggttccagaagtgcagggcaactccatatgcagatgctgttgctgtgcgattacactcca

SEQ ID NO: 27766 - DNA, 120 bp, synthetic construct; identical to SEQ ID NO: 7947
  source 1..120: mol_type = other DNA

SEQ ID NO: 27767 - DNA, 120 bp, synthetic construct
  source 1..120: mol_type = other DNA
cttgtaggggatgaatccagaaaaagcctctgttacaaatcaaaatggacatgccggaagtattagctcaaatcaaccttgtcctgtctaaccacttactgacccaagataccacttgga

SEQ ID NO: 27768 - DNA, 120 bp, synthetic construct
  source 1..120: mol_type = other DNA
caggaaatggaagaccatttattcataaccatttgaatcacagccaggtgtataaacacacatcattgactgatagtttcagttctatgcccaagaaaatcatcgatggagtgaagtaat

SEQ ID NO: 27769 - DNA, 120 bp, synthetic construct
  source 1..120: mol_type = other DNA
tgtacagtttgctggagccacagaagcactgctccagagcagagcaatgccttaaatcttcagtgttcatttgtagaacattcactcacagctacaaaagtgacttaattttcttctgga

SEQ ID NO: 27770 - DNA, 120 bp, synthetic construct
  source 1..120: mol_type = other DNA
acctgattcacattattagagttgcttcttagtatccatgtgaattttcactccaaaaacacaagctagaagcttaagtgaaggacacctagggcaaatggtggctgaaagtgaggaaga

SEQ ID NO: 27771 - DNA, 120 bp, synthetic construct; identical to SEQ ID NO: 7948
  source 1..120: mol_type = other DNA

SEQ ID NO: 27772 - DNA, 120 bp, synthetic construct
  source 1..120: mol_type = other DNA
ttatgatatttattcatgtgattattagggcggtaagtatgaaaatctgcaggataagctagcaggctgaaaacgcagaaagaagatgttctaattctgaggcaggatttcttcttctct

SEQ ID NO: 27773 - DNA, 120 bp, synthetic construct
  source 1..120: mol_type = other DNA
tgtaaagtcagctaattcagcatggggaagggggtcatggtagacatgggggagggctggtctctccacctcctcacactaggctaacagggacacagacacattcagatgcctttgcag

SEQ ID NO: 27774 - DNA, 120 bp, synthetic construct
  source 1..120: mol_type = other DNA
cctcaggctacagaaaacaatagtcatgaacaaattcaggtcagtggccataaagcgtaacactctgaactccccactacacactcaaagtgtcccaaagaatcaccgtaatccagtctt

SEQ ID NO: 27775 - DNA, 120 bp, synthetic construct
  source 1..120: mol_type = other DNA
ccggtcagagcctgcaggagatgtgggagaggaggaattatggcataggtgagctcctccacatccgtctcccatagttacacacagcctgagcacctccttctctgcctctgggaagaa

SEQ ID NO: 27776 - DNA, 120 bp, synthetic construct; identical to SEQ ID NO: 7949
  source 1..120: mol_type = other DNA

SEQ ID NO: 27777 - DNA, 120 bp, synthetic construct
  source 1..120: mol_type = other DNA
tatctgttggtctatgtatgaattttctgttactgcataacatattaccactaactcactggctctacacagcacccatttatttctctacatttccttaatgagaaatccaggcctggt

SEQ ID NO: 27778 - DNA, 120 bp, synthetic construct
  source 1..120: mol_type = other DNA
cttggtggcagaattcagtttcaggcagttgtgggattgtagtccttgttcctgggcagctgtcaggtggaggtggggtggagctgttctcaattcctggagcccgtcatatcctttgcc

SEQ ID NO: 27779 - DNA, 120 bp, synthetic construct
  source 1..120: mol_type = other DNA
tgaagaagaaataagttgttttaagagctcacctgattaggacagtccaaggcaggataatcatggtcttaaagtcaactgatttgggaccttgcttatatctgcagaatcccttcacag

SEQ ID NO: 27780 - DNA, 120 bp, synthetic construct
  source 1..120: mol_type = other DNA
atcctcgcatagccaggatcttccttttgtgtttaattgggtcgtggtaggaaactgaagttcaaataaataggttgttgtgaatgttaataaaatacatcctattgatacatggaaata

SEQ ID NO: 27781 - DNA, 120 bp, synthetic construct; identical to SEQ ID NO: 7950
  source 1..120: mol_type = other DNA

SEQ ID NO: 27782 - DNA, 120 bp, synthetic construct
  source 1..120: mol_type = other DNA
gcatcctagaccacaggcaatctgaggagagttgagcaaggccatggaggagtcctccagccacagatggccaacagaggagtctcctgttgcccaggaatggtctgtcttagtgtccct

SEQ ID NO: 27783 - DNA, 120 bp, synthetic construct
  source 1..120: mol_type = other DNA
atcttcctcctgaggggtctgggcctttggaaatcaaacgctgtcagactgggttgctggacgattctgttcacatttacaatgggacaagggaaacaaggaggcccccaagtgaatctc

SEQ ID NO: 27784 - DNA, 120 bp, synthetic construct
  source 1..120: mol_type = other DNA
tctaggcccatacagtcctgtgggcaactgtaatgtgtagctcaatgggctcttgtttgtccccttgtctgagtgcctccctgtggaaaaccaggacctcctatactacaaagcccagat

SEQ ID NO: 27785 - DNA, 120 bp, synthetic construct; identical to SEQ ID NO: 7951
  source 1..120: mol_type = other DNA

SEQ ID NO: 27786 - DNA, 120 bp, synthetic construct
  source 1..120: mol_type = other DNA
gagagtaattccaaacctgtggatcaggaatgtcagtggtgctggctgagagtctgagaatagtgggggaaaaagcctacccatggaggaagtttctgtcccagtgaggatgaatctctg

SEQ ID NO: 27787 - DNA, 120 bp, synthetic construct
  source 1..120: mol_type = other DNA
gggcacatcagggcctatcacgggtgtctaatcctgacaagttggatattcagaggtggcagcagctagttcggccttggtaggtgggagtctcaccttttggaggctacctatgggtcc

SEQ ID NO: 27788 - DNA, 120 bp, synthetic construct
  source 1..120: mol_type = other DNA
gtgaaggctggctaacttccatttgtctgcttggttgttcagtgccacctcaggggcaggtattttctgggcagatggggtgttaacttggggtttgggctcattccacatggaccattt

SEQ ID NO: 27789 - DNA, 120 bp, synthetic construct; identical to SEQ ID NO: 7952
  source 1..120: mol_type = other DNA

SEQ ID NO: 27790 - DNA, 120 bp, synthetic construct
  source 1..120: mol_type = other DNA
accacagcctggatctgctgcagagtcctttcctgtgtaggctccacttgaatctggcatcctcctatgtcacccaaaatgtggccaaaatgatatacctagatgtggaatgtggtgttg

SEQ ID NO: 27791 - DNA, 120 bp, synthetic construct
  source 1..120: mol_type = other DNA
aatatctctgcatgcacctagccactggacccataaaatttcactgcagttgccactcctaaatttctgtaagatttatcctcctctttctggggtgcatgtgttttaccaagacctcca

SEQ ID NO: 27792 - DNA, 120 bp, synthetic construct
  source 1..120: mol_type = other DNA
tgtccggcatctcttaagactatgttacagatgacagaagagttataatagctctcagggaaagtgtaaataaatgtggtatgaatgtgaataactccatatccactttctagctggaaa

SEQ ID NO: 27793 - DNA, 120 bp, synthetic construct; identical to SEQ ID NO: 7953
  source 1..120: mol_type = other DNA

SEQ ID NO: 27794 - DNA, 120 bp, synthetic construct
  source 1..120: mol_type = other DNA
tttccctttagccttcagcgcaataagagccattaatccacaggttagagacgcggtgtgggggtcactccagctgccagtgcatcaatgccattatgcactcaaggaatagggaactaa

SEQ ID NO: 27795 - DNA, 120 bp, synthetic construct
  source 1..120: mol_type = other DNA
tgtaggaatctgggcatcaatgttagttcacacacaaagtcaatactcacccaaattctgcctatttccctttcccggtgtacagtctcctgtgtaaatggctgtaggttcctttgcaga

SEQ ID NO: 27796 - DNA, 120 bp, synthetic construct
  source 1..120: mol_type = other DNA
tgtcattgggatctgaatctgaaagttaggtgaggtctaggcattgagaacagattatgactttgtcttggatcaaacaccctcagcctcctgctcctcaattcttgctttcttttcata

SEQ ID NO: 27797 - DNA, 120 bp, synthetic construct
  source 1..120: mol_type = other DNA
tcatggtaactgtgacctctgacttttgcagatcactgccaccacttgatctagctgaagtagttctagctggaagaatagagaattaaaagaaatctttgtgaagccaccactcaggtt

SEQ ID NO: 27798 - DNA, 120 bp, synthetic construct; identical to SEQ ID NO: 7954
  source 1..120: mol_type = other DNA

SEQ ID NO: 27799 - DNA, 120 bp, synthetic construct
  source 1..120: mol_type = other DNA
tttatcatttaatatggtttatgaggtgaacccacacccatagaaacagttactttgttttcagttctggatagtattcatgggaggaatatcccacaatttatctcttctgtccgtgac

SEQ ID NO: 27800 - DNA, 120 bp, synthetic construct
  source 1..120: mol_type = other DNA
aagatatggatgtaggaatgggattactgtgcttttaccatgtggtgttataggatgtcaaattgttctctgaagaggttgtatcagctccccgctttaaaatcttctttgacattttac

SEQ ID NO: 27801 - DNA, 120 bp, synthetic construct
  source 1..120: mol_type = other DNA
cactctggggtgttactaccttcctaatcactccggtgtcctccactctcaggattttaaatatcatctagacacagatggctcccaaatatatatctctacatatttctataatcaaaa

SEQ ID NO: 27802 - DNA, 120 bp, synthetic construct
  source 1..120: mol_type = other DNA
ggctatttctgtccaaattaaaaatgcatacacccagtagtcccacttctagaaatgtgtccaaaacacacctgcattcctgaaaaatgactgtattcagaattatatgttgcaaccctg

SEQ ID NO: 27803 - DNA, 120 bp, synthetic construct; identical to SEQ ID NO: 7955
  source 1..120: mol_type = other DNA

SEQ ID NO: 27804 - DNA, 120 bp, synthetic construct
  source 1..120: mol_type = other DNA
ttgcttgcatatgcataaaatatatttggaagaataagcaagaagttaatatccttggttgcctgttggggatgagacagggtaagagagagacattttaccttttgaacattttgaatt

SEQ ID NO: 27805 - DNA, 120 bp, synthetic construct
  source 1..120: mol_type = other DNA
ataaaatttaaaaattttctaaatattatgttattcctttaacaaggaggtttaccgccattttaattcagtacgttgttttctttttaattgcatgatctttctttacatctgtctttt

SEQ ID NO: 27806 - DNA, 120 bp, synthetic construct
  source 1..120: mol_type = other DNA
atgggtttcagtatgctcacgacgccctccagtgtttgtgtgggctcatggatgccatatctagaaaacactggaattctcaagcacacgtgactgaagccatttgccaaatgttcaagg

SEQ ID NO: 27807 - DNA, 120 bp, synthetic construct; identical to SEQ ID NO: 7956
  source 1..120: mol_type = other DNA

SEQ ID NO: 27808 - DNA, 120 bp, synthetic construct
  source 1..120: mol_type = other DNA
cagggtgggtcaggtgtggtcgcactgatcctacacctctgcctcccagcccactcccagccctcttctgatattagaaaccaacacagattgccttagggtggtggttctcaaagtgtg

SEQ ID NO: 27809 - DNA, 120 bp, synthetic construct
  source 1..120: mol_type = other DNA
ttcaaatcagatctctctctctctctctctctctctctctgtctctctctctctctctgtctctctctctctctctgtctctctctctctctctgtctctctctctgtttcaagtctcaa

SEQ ID NO: 27810 - DNA, 120 bp, synthetic construct
  source 1..120: mol_type = other DNA
tcctggattctgagcaaagctctcctaccctgggtgcctgtggggctcccacttagaccacaaaacaaagctcaaataatattattttcttttatgagatttttggtattccttcattag

SEQ ID NO: 27811 - DNA, 120 bp, synthetic construct; identical to SEQ ID NO: 7957
  source 1..120: mol_type = other DNA

SEQ ID NO: 27812 - DNA, 120 bp, synthetic construct
  source 1..120: mol_type = other DNA
ccatgcaggcccttagcttaagttactccatattgctttgtttccctgactgcccacgtatcgggggacagaattttccattgcgggcatgtctgggcaagtctcctgtgcagcctttct

SEQ ID NO: 27813 - DNA, 120 bp, synthetic construct
  source 1..120: mol_type = other DNA
ctgaccagtttcttcctttttcctctctcaatttgtgttatgatttccttactgatctctgcctgagcaagactgggcacgccttgagggcaaggagggtttatttcctcttatctcagt

SEQ ID NO: 27814 - DNA, 120 bp, synthetic construct
  source 1..120: mol_type = other DNA
aaagtggctgggaaaagattttccaaatcctagtgatgggcacagggccccctaaagttcacttttggaaccttcccatctgtcttgttctcctttcatcagggacatccatgcccctca

SEQ ID NO: 27815 - DNA, 120 bp, synthetic construct; identical to SEQ ID NO: 7958
  source 1..120: mol_type = other DNA

SEQ ID NO: 27816 - DNA, 120 bp, synthetic construct
  source 1..120: mol_type = other DNA
ggcaggggttgggctctcacctcggcccctcccctgcacgccctggatgtggatggtccccgagtgtgaactcgcctgggctctgaccctgggtgcccttcccgccgttgtggagcctct

SEQ ID NO: 27817 - DNA, 120 bp, synthetic construct
  source 1..120: mol_type = other DNA
aactatgaaaatgagagaatctatcccactctctcaggtgtggtgagattcatattatatgacaatcggtcgtctacacattgatcacactctcagtattgcctttatcagtcggccaat

SEQ ID NO: 27818 - DNA, 120 bp, synthetic construct
  source 1..120: mol_type = other DNA
tctaccctgtggagtctagaggagactttccttgaagctgagttgggaatggacatttggacttttttttttttttttttgagacagagttttgctcttatcacccaggctggagtgtag

SEQ ID NO: 27819 - DNA, 120 bp, synthetic construct
  source 1..120: mol_type = other DNA
ttacagacacccaccaccacatccagctaattttttgtatttttagtagagacagggtttcgctatgttggccaggctggtctcgaactcctcacctcgtgatctgcccgcctcggcctc

SEQ ID NO: 27820 - DNA, 120 bp, synthetic construct; identical to SEQ ID NO: 7959
  source 1..120: mol_type = other DNA

SEQ ID NO: 27821 - DNA, 120 bp, synthetic construct
  source 1..120: mol_type = other DNA
ttttcaaaactttattatcaatacacaactttctatcatattacaaaatcttcttacacacagctttcaccagctgtaggctgtttccaaacagaggacctagccactcttcttttgcat

SEQ ID NO: 27822 - DNA, 120 bp, synthetic construct
  source 1..120: mol_type = other DNA
ttttttttttgagacggaatctcgctttgtcacacaggatggagtgcagtggcgagatctcagctcactgcaacctccacctcctgggttcaagagattctccttcctcaacctcctaag

SEQ ID NO: 27823 - DNA, 120 bp, synthetic construct
  source 1..120: mol_type = other DNA
tcggcctcccaaagtgctgggattacaggcgtgagccatcatgcccggccgcatgaatatttttaagccttctcatacatattatcaaattacttctcaaaagcagtgtaccggctgggc

SEQ ID NO: 27824 - DNA, 120 bp, synthetic construct
  source 1..120: mol_type = other DNA
aaaattagccaagcgtggtggcggacgcctgtaatcccagctactctggaggctgaggcaggagaatggtgtgaacccaggaggcagagcttgcagtgagccgagatcatgccactgcac

SEQ ID NO: 27825 - DNA, 120 bp, synthetic construct; identical to SEQ ID NO: 7960
  source 1..120: mol_type = other DNA

SEQ ID NO: 27826 - DNA, 120 bp, synthetic construct
  source 1..120: mol_type = other DNA
gaaaatatgcttgagctagaaggttgatggtggtgaggatggtaggagatatagtctgttgatcaagatgttcctgggaatttgaacactggacgtctgagcagagacctgaatggtgtg

SEQ ID NO: 27827 - DNA, 120 bp, synthetic construct
  source 1..120: mol_type = other DNA
gtgggatgaggccagagtggccagaaggatcctgtgatgagggatgaggggctgtaaaacatagtgagagactggggtttcactgtgctaagaagggaagaggctggcatgtctgtggga

SEQ ID NO: 27828 - DNA, 120 bp, synthetic construct
  source 1..120: mol_type = other DNA
tatcttggagaggatggccctggggaggaggcagtagaggagtgagaagtgattggatttggggttaatacatttttaagatggtgttagcaataactccttggagaaccacacatttat

SEQ ID NO: 27829 - DNA, 120 bp, synthetic construct
  source 1..120: mol_type = other DNA
taaaatcaacgctaaggaaaatatacattttaaaagattaaggctggggtaaagctggaacattactaggcaggaaggaacatctgaaacatttgctgaaatggagttgaccctttacct

SEQ ID NO: 27830 - DNA, 120 bp, synthetic construct; identical to SEQ ID NO: 7961
  source 1..120: mol_type = other DNA

SEQ ID NO: 27831 - DNA, 120 bp, synthetic construct
  source 1..120: mol_type = other DNA
aggcaactttggtgatctcacctgagctaggaattcggttttttgatgtgggttctctttgagccattgtgtgagctttaaaatgtgatgtggagattttgctatactggtgtttccttg

SEQ ID NO: 27832 - DNA, 120 bp, synthetic construct
  source 1..120: mol_type = other DNA
ggcttcctccaatctcactctcctccataaaacagtgtctcctaagctttctgggggtgagggccttgacaccgtgctgttctgatgaatataactgtcccagctcctgaaataaaagca

SEQ ID NO: 27833 - DNA, 120 bp, synthetic construct
  source 1..120: mol_type = other DNA
ctgtaatctcagcactttgggaggctgaggcatgagaattgtttgaagccagaagttcaagaccagcatgggtaacaaagcaagacccagtctctacaaaaaaaaaaaaaaaaaaaaagg

SEQ ID NO: 27834 - DNA, 120 bp, synthetic construct; identical to SEQ ID NO: 7962
  source 1..120: mol_type = other DNA

SEQ ID NO: 27835 - DNA, 120 bp, synthetic construct
  source 1..120: mol_type = other DNA
caggtccttctcgtggtctttgtctctttttcctggaggtgggggactctgtacttcatgaggagaagttgtctgaagaaggtgggagatactcaggagcagggtccagagagggaaaag

SEQ ID NO: 27836 - DNA, 120 bp, synthetic construct
  source 1..120: mol_type = other DNA
tctgctttatcaggatggatttgggaaaccagccggagtgggagataaggagtctactttgcaaaggacacatgtgagcctcctcctagtttgaactcatgagtagcagctaacagccag

SEQ ID NO: 27837 - DNA, 120 bp, synthetic construct
  source 1..120: mol_type = other DNA
aggtctggagggtttgggtcctcccttgtgctccttcttcctctgccatttattccctgagtgtcctcgcctttcctccgctacctggaccccactacagtaatgcacactggcctggac

SEQ ID NO: 27838 - DNA, 120 bp, synthetic construct; identical to SEQ ID NO: 7963
  source 1..120: mol_type = other DNA

SEQ ID NO: 27839 - DNA, 120 bp, synthetic construct
  source 1..120: mol_type = other DNA
ggccctccagctgttaaaaatacaaaaacctgaaaagacatctcaaaaggccactctgaggttcacaatagtgatgttaccttcaagagtaactggagaagttgcaaatcttatgacctc

SEQ ID NO: 27840 - DNA, 120 bp, synthetic construct
  source 1..120: mol_type = other DNA
aaggctagttcagcctacgcctagaaatgaagaagggcagtttagcggttggaagcaagatggggtcagttaggtttgatgtctttcactgtcatcatttccttagttataattttgcaa

SEQ ID NO: 27841 - DNA, 120 bp, synthetic construct
  source 1..120: mol_type = other DNA
ctcactgctagaacgaatattcttgagactttagatctgaaagtcagcctgatttctgaaagccttggaccgtttccaaaatcaaatcaatactccaggaacaagatctgcctcgacttt

SEQ ID NO: 27842 - DNA, 120 bp, synthetic construct; identical to SEQ ID NO: 7964
  source 1..120: mol_type = other DNA

SEQ ID NO: 27843 - DNA, 120 bp, synthetic construct
  source 1..120: mol_type = other DNA
tttcgttgtggggcttagcttcatattttcaaactgaaatattctcttccttaacctccacataaatccaagtttataatttttattattttaaaattttatttatttttctgttttggg

SEQ ID NO: 27844 - DNA, 120 bp, synthetic construct
  source 1..120: mol_type = other DNA
tagtcatgaaccactgcaatccacccaaatccaagtttacactaaaagataaaattccaacattgtaggggattggtcaggtggtgggaataattataaagataaagttataggaaatag

SEQ ID NO: 27845 - DNA, 120 bp, synthetic construct
  source 1..120: mol_type = other DNA
ccttgagttaatagcttcgagtaagtacaaagacatgtaagagagtttatctaaagagcatgtttacctttgatcatttgtaggactgctctctccgggggactgcgaccagattaatta

SEQ ID NO: 27846 - DNA, 120 bp, synthetic construct
  source 1..120: mol_type = other DNA
gtgctgaataaaggcccacagggccagatagtcagggcacgcagctgccacaaccctttctgtgagtggcctggccctctggtgcactctttcactgaatatcggtgtctgagtacatta

SEQ ID NO: 27847 - DNA, 120 bp, synthetic construct; identical to SEQ ID NO: 7965
  source 1..120: mol_type = other DNA

SEQ ID NO: 27848 - DNA, 120 bp, synthetic construct
  source 1..120: mol_type = other DNA
tttcagtagagacagggtttcaccatgttggccaggctgatcttgaacttctgacctcaggttatctgcctgccatagcctcccaaagttctgggattacaggtatgagccactgtgccc

SEQ ID NO: 27849 - DNA, 120 bp, synthetic construct
  source 1..120: mol_type = other DNA
ttgggagacgattaaaatcttctttatcttcactgtggtagtggagatgtgggtgtgtacaacagctaaaattcaacaagttgaacattttaaatagatgcagtttattgcatgcaaagt

SEQ ID NO: 27850 - DNA, 120 bp, synthetic construct
  source 1..120: mol_type = other DNA
gaggtagagggtcatgctgtctgcaacttaccctcacaggctctgaaataacaataatagcagcatatttacagatttagagagagagaaatttgtggtaaaaatgttcataagtaaaac

SEQ ID NO: 27851 - DNA, 120 bp, synthetic construct
  source 1..120: mol_type = other DNA
tcacgaggtcaggagatcgagaccatcctggctaacacagtgaaaccccgtctctactaaaaatacaaaaaattagtcgggcgtggtggcaggagcctgtagtcccagctactccagagg

SEQ ID NO: 27852 - DNA, 120 bp, synthetic construct; identical to SEQ ID NO: 7966
  source 1..120: mol_type = other DNA

SEQ ID NO: 27853 - DNA, 120 bp, synthetic construct
  source 1..120: mol_type = other DNA
tcagtgaaggtcactccagtctttcatggaggccaaactaagggtgtaaattaggatcctcactgaagtggcgggaccctaagaggctttttcctggccccttagttgtgggttttcctg

SEQ ID NO: 27854 - DNA, 120 bp, synthetic construct
  source 1..120: mol_type = other DNA
tgaggcgcagtttcctactcacccggatccgaatcctccgcggtgctgtttcaagagagccggattccagatcacgctccagcccggactcggaattcctgccctgcgggtctgcatttt

SEQ ID NO: 27855 - DNA, 120 bp, synthetic construct
  source 1..120: mol_type = other DNA
gttattccgtttctatatcagtaaacacatttcattttccgtagaccagggcggggtgacgggtgatcccagtcctcgcagtgaattccgggcagcaaaattcaaaacacatgcggccaa

SEQ ID NO: 27856 - DNA, 120 bp, synthetic construct
  source 1..120: mol_type = other DNA
aaaatataaaattagacgggcttggtggtgaatgcctgtaatcccagctagtcgggaggctgaggcaggagaatcgcttaaaccttggaggcggaggttgcggtgagccgagatcgcgcc

SEQ ID NO: 27857 - DNA, 120 bp, synthetic construct; identical to SEQ ID NO: 7967
  source 1..120: mol_type = other DNA

SEQ ID NO: 27858 - DNA, 120 bp, synthetic construct
  source 1..120: mol_type = other DNA
tcccctagcccaagagaggactggcttcatgactccctgaaaccatttctaaatgccttagaacaaaccttgcatattcattattgttattgaactattaaaagtcttttttgggggcga

SEQ ID NO: 27859 - DNA, 120 bp, synthetic construct
  source 1..120: mol_type = other DNA
ctctcactaggcttatgatctttagcagtgaaaataatctctctaaggtggggaaaggaccccggtccctgctgtgctcaataaattatgaggatcaaaataaattatcagtgaatgtga

SEQ ID NO: 27860 - DNA, 120 bp, synthetic construct
  source 1..120: mol_type = other DNA
gggaatagttagtaatgacagggatagttgaacttaaaaaaaaagtttgtgaggctgacaaagaagaaacggacacatttcctgatcttggagggttcatagggtagaagatggtagatg

SEQ ID NO: 27861 - DNA, 120 bp, synthetic construct
  source 1..120: mol_type = other DNA
tcaaggctgcagtgagctataatcatgccactgcattccaactgagtgacacagcaagactcctctcttaaaaaaaaaaaaaaaattcatggcagggcacaatgagtactatcaggaagg

SEQ ID NO: 27862 - DNA, 120 bp, synthetic construct; identical to SEQ ID NO: 7968
  source 1..120: mol_type = other DNA

SEQ ID NO: 27863 - DNA, 120 bp, synthetic construct
  source 1..120: mol_type = other DNA
cttattattgagaattgagaattcatatgccacacaatttatccttttaaagtgtgcagctcagtggcttctagcgtaatcacaaggttgtgccaccgtcaccactgtctaccctggaag

SEQ ID NO: 27864 - DNA, 120 bp, synthetic construct
  source 1..120: mol_type = other DNA
cactgcactcagaccagcctgggaagattttaaggatatggtgtggtctgatgggttccaaggcagaggttacaatagcctggaagagggagactgcttaggcagtggcatcctggtggg

SEQ ID NO: 27865 - DNA, 120 bp, synthetic construct
  source 1..120: mol_type = other DNA
agcagattgtggcagctgaggttttccacggtagagtagaagcatccatcatgtgtgacattcagcagatggggcgctgtgggtggcttggagcactctggttgtaactgaggcaggcac

SEQ ID NO: 27866 - DNA, 120 bp, synthetic construct; identical to SEQ ID NO: 7969
  source 1..120: mol_type = other DNA

SEQ ID NO: 27867 - DNA, 120 bp, synthetic construct
  source 1..120: mol_type = other DNA
gaatagagaggcggccctgggagacttcagacacttagaggatataagggggtgaaaggggggcctggctttgagtcaaagggaggagaaggagattataaagctgaaacgtctaagaga

SEQ ID NO: 27868 - DNA, 120 bp, synthetic construct
  source 1..120: mol_type = other DNA
tgagggagtgtgttgggagaatagccacgcgttgtctgtcctggaaggaacaagccagtgagagccggtttaatggggcggccggcgaaaggggcttggtgaggcccgcgctcctcgggg

SEQ ID NO: 27869 - DNA, 120 bp, synthetic construct
  source 1..120: mol_type = other DNA
ccgcgtgctccccattttctgggccccaggtcccgccttctaaatctccccaggtctccagcccactggaattttctcttccaagcgtggccccgccctctccgctcgtgattggcccta

SEQ ID NO: 27870 - DNA, 120 bp, synthetic construct; identical to SEQ ID NO: 7970
  source 1..120: mol_type = other DNA

SEQ ID NO: 27871 - DNA, 120 bp, synthetic construct
  source 1..120: mol_type = other DNA
cgtcacttttcagtcctcctcgggatcgcgcatcacctgcactttctggtctcctcctgctctttctctcctcgcgtctcctccgcttcctctcacttttcggacaaaccagtccttctg

SEQ ID NO: 27872 - DNA, 120 bp, synthetic construct
  source 1..120: mol_type = other DNA
tgaagtcctgtcctctcccggagccgacgtgttctcagctcctgggccgcagctcctggagtaggggccctcctttctcgggacccggagctggtgcttcctgctgctgtggggactgtg

SEQ ID NO: 27873 - DNA, 120 bp, synthetic construct
  source 1..120: mol_type = other DNA
cctctctctcatcccacccctactaatgaccagtgatctaaggacaccagattccctctcacctcctccctgcccatctcagggcccgctgagtccttttgccctcccagctccctgcta

SEQ ID NO: 27874 - DNA, 120 bp, synthetic construct; identical to SEQ ID NO: 7971
  source 1..120: mol_type = other DNA

SEQ ID NO: 27875 - DNA, 120 bp, synthetic construct
  source 1..120: mol_type = other DNA
catcctcagcctcaccctcttgaggaccccaccctccagcccacaggtgctggaccatccctccctggtccctccgcccctctccaccttgggaccttgtgctgctcctgtctcttgccc

SEQ ID NO: 27876 - DNA, 120 bp, synthetic construct
  source 1..120: mol_type = other DNA
tgtcctcaccctaccccaagttctcccacagtcactcctgccccatgctcatgccgccctccagttcttgctctgcccatctcccctccccaacccagacctaaaacaggctgttgggcc

SEQ ID NO: 27877 - DNA, 120 bp, synthetic construct
  source 1..120: mol_type = other DNA
agcattactccttttggcaggtccttcctcaggctgagaatctccccctctaccttggttttctctctctggccagcacccccaccccttgctttgtttttaatttttaacttttgtttg

SEQ ID NO: 27878 - DNA, 120 bp, synthetic construct; identical to SEQ ID NO: 7972
  source 1..120: mol_type = other DNA

SEQ ID NO: 27879 - DNA, 120 bp, synthetic construct
  source 1..120: mol_type = other DNA
cacaaataagtgagaacatgcaaagtttgtctgtctgggcctggggcttatttcacttcacaggatgacctccagttctttgcaaatgacacgatggctgaatagttctccacatacaca

SEQ ID NO: 27880 - DNA, 120 bp, synthetic construct
  source 1..120: mol_type = other DNA
cgatttcctttctttggagtatatgcctaacagtgggagtgctggagcatatgacagctctattgtatttttagtttttggaagaacctccacattgtttcccatagtggttgtactagt

SEQ ID NO: 27881 - DNA, 120 bp, synthetic construct
  source 1..120: mol_type = other DNA
tctggataaaagccagtttatctggggtgggatgttatctcgtaggagttttgatttgccttcatctgttgacgaatgatgttgagcaccttttcatatacctgtttgccatttatatgt

SEQ ID NO: 27882 - DNA, 120 bp, synthetic construct; identical to SEQ ID NO: 7973
  source 1..120: mol_type = other DNA

SEQ ID NO: 27883 - DNA, 120 bp, synthetic construct
  source 1..120: mol_type = other DNA
actttgatttgatttttgtatatggtgaaagacagggtctagtttcattcttctgcataaggatatctagtttccccagcaccatttttgaagagactctcctttgccaatgtgtgttct

SEQ ID NO: 27884 - DNA, 120 bp, synthetic construct
  source 1..120: mol_type = other DNA
tagctctgtagtataatttgaagtcagataatgtgattcctctagttttgttcattttgctcaggatagctttatctattctggtttttttgtggttccatatgcattttaggattattt

SEQ ID NO: 27885 - DNA, 120 bp, synthetic construct
  source 1..120: mol_type = other DNA
tatcttttccattttttgtgtccttcaattttttgcatcagtgttttttgtttttggtttttgagatggagtttcactcttgttgcccaggctagaatgcaagggtgtgatcttggctca

SEQ ID NO: 27886 - DNA, 120 bp, synthetic construct
  source 1..120: mol_type = other DNA
gtgcctggctaattttctatttttattagagatggggtttctctatgttggccaggctagtcttgaactcctgacctcaggtgatccacctgcctcggcctcccaaagtgctgggattac

SEQ ID NO: 27887 - DNA, 120 bp, synthetic construct; identical to SEQ ID NO: 7974
  source 1..120: mol_type = other DNA

SEQ ID NO: 27888 - DNA, 120 bp, synthetic construct
  source 1..120: mol_type = other DNA
ctgcagtactgtgttgcataactgtggtaaaattagtcatccttgtcttattccagatcttagagaaaaggctttcagttttcccccattcagtatgttactagctgtgagtttgtcata

SEQ ID NO: 27889 - DNA, 120 bp, synthetic construct
  source 1..120: mol_type = other DNA
ttgtcctttattctgttgatatgacgtattacattgattgatttgtgtatgttaaatcatccttgcatacctggaatacattccacttgctcataaagaatgatcttttttaatgtattg

SEQ ID NO: 27890 - DNA, 120 bp, synthetic construct
  source 1..120: mol_type = other DNA
tggctttgtaaaatgagtttggaagtattccctcctcctctatttttcagaacagtttgaataggactgacatatgttgttctttaaaagtttaattgtggtaaattatacattacataa

SEQ ID NO: 27891 - DNA, 120 bp, synthetic construct; identical to SEQ ID NO: 7975
  source 1..120: mol_type = other DNA

SEQ ID NO: 27892 - DNA, 120 bp, synthetic construct
  source 1..120: mol_type = other DNA
catctctactaaaaataataaaagttagccgggcgtgatggcgggtgcctgtaatcccaactacttgggaggctgaggcaggagaatcgcttgaatccgggaagtggaggttgcagtgag

SEQ ID NO: 27893 - DNA, 120 bp, synthetic construct
  source 1..120: mol_type = other DNA
cagaatttcattccttttaaggatggataatactcattatatgtatgtaccacatcttggttatccatccctcagacaatggacacttgggttacttctaccttttggatattggcaaat

SEQ ID NO: 27894 - DNA, 120 bp, synthetic construct
  source 1..120: mol_type = other DNA
tgtgtgtgtgtatgtgtgtgtgtaggtgtgtgataacagccatcctgattggtttcaggtggcatctcattgtggtttggatttgcattttcctaatgagtgctgatattgagcatcttt

SEQ ID NO: 27895 - DNA, 120 bp, synthetic construct; identical to SEQ ID NO: 7976
  source 1..120: mol_type = other DNA

SEQ ID NO: 27896 - DNA, 120 bp, synthetic construct
  source 1..120: mol_type = other DNA
tatatagtgcaaattaagggtccaattttattttaacaccccctgcccccagaactatttgctgaaaagatcaactgactctttgtcacctgctcaccccagtggacactagctgttcca

SEQ ID NO: 27897 - DNA, 120 bp, synthetic construct
  source 1..120: mol_type = other DNA
tcctaccctttgtgcctcatgaccaccccctcccttgtccccgccatgcccatgatgagtctcttctcgaggcagctccccttgcctccatctcaccctcagcctatgcaccacagccac

SEQ ID NO: 27898 - DNA, 120 bp, synthetic construct
  source 1..120: mol_type = other DNA
ggcccctattcccttagggggcttgtggccacccagtccttgcacctggcctacaagtttgccatcttcattcccccttcttctgttcatcagccccctcctctatcctcccaccctcac

SEQ ID NO: 27899 - DNA, 120 bp, synthetic construct; identical to SEQ ID NO: 7977
  source 1..120: mol_type = other DNA

SEQ ID NO: 27900 - DNA, 120 bp, synthetic construct
  source 1..120: mol_type = other DNA
aaggacctcaggatgaccctggctcatatcaaggaccagaaagaaggtgagagtcggcaggggcaagagtgactggagaggccttttccagaaaagttaggggcagagagcagggacctg

SEQ ID NO: 27901 - DNA, 120 bp, synthetic construct
  source 1..120: mol_type = other DNA
taccccctgggctgagttcctcacttgggtggaaaggtgatgggttcgggaatggagaagtcactgctgggtgggggcaggcttgcattccctccaggagattagggtctgtgagatcca

SEQ ID NO: 27902 - DNA, 120 bp, synthetic construct
  source 1..120: mol_type = other DNA
catgaacgtcaggaatttcttgaaggaagatgccatgaagaccaagacacactatcacgctatgcatgcagactgcctgcaggaactacggcgatatctagaatccggcgtagtcctgag

SEQ ID NO: 27903 - DNA, 120 bp, synthetic construct; identical to SEQ ID NO: 7978
  source 1..120: mol_type = other DNA

SEQ ID NO: 27904 - DNA, 120 bp, synthetic construct
  source 1..120: mol_type = other DNA
cctgacatccccctcctcagcatcaatgtggggatcccagagcctgaggccacagtcccaaggcccatcctcctgccagcctggaagaactgggccccagagtgaggacagacttgcagg

SEQ ID NO: 27905 - DNA, 120 bp, synthetic construct
  source 1..120: mol_type = other DNA
cccatggtgaatgtcacccgcagcgaggcctcagagggcaacatcaccgtgacatgcagggcttccagcttctatccccggaatatcatactgacctggcgtcaggatggggtatctttg

SEQ ID NO: 27906 - DNA, 120 bp, synthetic construct
  source 1..120: mol_type = other DNA
agcgggaatcacagcactcaccctgtgccctctggtgagcctagggtgaccctggagagggtcaggccagggtagggacagcagggatggctgtggctctctgcccagtgtataacaagt

SEQ ID NO: 27907 - DNA, 120 bp, synthetic construct; identical to SEQ ID NO: 7979
  source 1..120: mol_type = other DNA

SEQ ID NO: 27908 - DNA, 120 bp, synthetic construct
  source 1..120: mol_type = other DNA
gtgctgcccaagcaagggtcaaacgcccagctgtggcatcctcctgctgcaggtgaggagtgggcagcagggagggctgcggcgcctgctctgtccccatcccggtctctgtgtctcttg

SEQ ID NO: 27909 - DNA, 120 bp, synthetic construct
  source 1..120: mol_type = other DNA
cagaaactggagaggaatctgaggagaggcggtgcccctattcccttcctctctgcatccccctcccctgtttctccagccatcggggcggacaccgagaaaaagacctatgaggcccag

SEQ ID NO: 27910 - DNA, 120 bp, synthetic construct
  source 1..120: mol_type = other DNA
ggggttgtcgtgtcctctgcaccattcgaggccctactctttccaggttcccacggcctggcctccctgagtttcttgcagatgacatggatgagtagataagcagatgtccctgggcca

SEQ ID NO: 27911 - DNA, 120 bp, synthetic construct; identical to SEQ ID NO: 7980
  source 1..120: mol_type = other DNA

SEQ ID NO: 27912 - DNA, 120 bp, synthetic construct
  source 1..120: mol_type = other DNA
agaggctggggtgtccaggaggatgtgtctggcagtagggtcgctggtttctcatccttgaacctaattgcactgtcaatcggcccctcaggcctgagcagatgggaaggtttgtcccct

SEQ ID NO: 27913 - DNA, 120 bp, synthetic construct
  source 1..120: mol_type = other DNA
gtgggcaggaatggtttcctcataggtcactggagttttggccaggaaaagagtatgaagttcatgtgccagtttctcaaaattcctgctttcaatgttgatgtccagtaaagatattcg

SEQ ID NO: 27914 - DNA, 120 bp, synthetic construct
  source 1..120: mol_type = other DNA
gctctgcaatcttaataggatttcctaatactgtaaagcatattaaatgaaacaggaactcaaatttggagccccctctccaggaggttctgtgtggagatggtggctgtggcagtggca

SEQ ID NO: 27915 - DNA, 120 bp, synthetic construct; identical to SEQ ID NO: 7981
  source 1..120: mol_type = other DNA

SEQ ID NO: 27916 - DNA, 120 bp, synthetic construct
  source 1..120: mol_type = other DNA
acgtctttccatgctgggcctgctgggccccccaggcttcctgatggggtccccagttaggagctgcctgctcagggctgggaggggaggagcactgagctgcagatagagggcagagcc

SEQ ID NO: 27917 - DNA, 120 bp, synthetic construct
  source 1..120: mol_type = other DNA
cctctctttggggaggcctctcactgtaacaggactggtcaggcctgagaggagggcactgggttccctcttgggtcttgtcctttagtcttggggccctttccctccctgcacgatgag

SEQ ID NO: 27918 - DNA, 120 bp, synthetic construct
  source 1..120: mol_type = other DNA
caaatctggttttggagcaactgaagagagaaaagtccccagggaataaacacaacactgcacccagtggagcatttacccatttccctcttttctccagagctcgtgagcctgcaggtc

SEQ ID NO: 27919 - DNA, 120 bp, synthetic construct; identical to SEQ ID NO: 7982
  source 1..120: mol_type = other DNA

SEQ ID NO: 27920 - DNA, 120 bp, synthetic construct
  source 1..120: mol_type = other DNA
ctcacgcctgtaatcccaacactttgggaggccgaggcgggcggatcacaaggtcaagagatcgagaccatcctgatcaacatggtgaaaccctgtctctactaaaaatacaaaaaatta

SEQ ID NO: 27921 - DNA, 120 bp, synthetic construct
  source 1..120: mol_type = other DNA
ggttgcagtgagctgagatcacaccactgcactccagcctggcgacagagcgagactctgtctcaaaaaaaaaaaaaaaaaaagacagagtctcactctgtcacccaggctgcagttcag

SEQ ID NO: 27922 - DNA, 120 bp, synthetic construct
  source 1..120: mol_type = other DNA
ttacagacatgcaccaccatacccggctaatttttgcatttttcatagagacaggattttgccatgttggccaggctggtctcaaactcctgacctcaggtgatctgcctgcctcagcct

SEQ ID NO: 27923 - DNA, 120 bp, synthetic construct
  source 1..120: mol_type = other DNA
attttaatatattacgtgtgttgtaattggattatcatcggtgagctttgtgagtgagtgtcttggagatgactcctcctgaccagcccaggaccagctttcttgtcaccttgaggtccc

SEQ ID NO: 27924 - DNA, 120 bp, synthetic construct; identical to SEQ ID NO: 7983
  source 1..120: mol_type = other DNA

SEQ ID NO: 27925 - DNA, 120 bp, synthetic construct
  source 1..120: mol_type = other DNA
aacatctgccctgaagagttggagccttcatgtgatgacacagagctgaagtgtgatattcgggaggggatagagagtgcttggaggttttctgattttgaagaatcccagtcagtcagg

SEQ ID NO: 27926 - DNA, 120 bp, synthetic construct
  source 1..120: mol_type = other DNA
tgctggtgttggggcacacagatgggtgatgcacttcttggtcaaggcaacctcagccccacccacgtaaggtggtcatggcagagagtgtaagggtgacacctgtgaaaaagacccaag

SEQ ID NO: 27927 - DNA, 120 bp, synthetic construct
  source 1..120: mol_type = other DNA
agtaagggagctggagtagggaattcactcatgtgctacttactgatccagagatgtgttcgttgacattttcttttatgttttcaggttgatgtcatttacacattcatgcatttatgt

SEQ ID NO: 27928 - DNA, 120 bp, synthetic construct; identical to SEQ ID NO: 7984
  source 1..120: mol_type = other DNA

SEQ ID NO: 27929 - DNA, 120 bp, synthetic construct
  source 1..120: mol_type = other DNA
tcactcttcccattctttcatcttcccgatgtatttctgtagtaattatgtttggttcagtcgttccttgtttccttttccatgactaattttctcatatgtcagcttgaccacttttca

SEQ ID NO: 27930 - DNA, 120 bp, synthetic construct
  source 1..120: mol_type = other DNA
gtctcactctgttgtccaggctggagtgcagtggtgtgatcttggctcaccacaacctccgcctcccaggttcaagcaattctcctgcctcagcttcccgagtagctgggattacaggca

SEQ ID NO: 27931 - DNA, 120 bp, synthetic construct
  source 1..120: mol_type = other DNA
gggattacaggcgtgagacatcgcgcctggcctttttttttttttttgagatggagtctcgctcttgttgcccaggctggaatgcaatggcacaatcttggctcaccacaacctccacct

SEQ ID NO: 27932 - DNA, 120 bp, synthetic construct; identical to SEQ ID NO: 7985
  source 1..120: mol_type = other DNA

SEQ ID NO: 27933 - DNA, 120 bp, synthetic construct
  source 1..120: mol_type = other DNA
tggggcagtgctttacatgcagtggagccacctggggtccagccaaaatgcagactgattcaagatgtcaaggctgaggcatatgagcctttctgtctagtttcatgagatgctgattct

SEQ ID NO: 27934 - DNA, 120 bp, synthetic construct
  source 1..120: mol_type = other DNA
tcaagtgaccctcctacctcatcttcctaggtagtcaggaccacaggccacatcctaatatatttttaattaactgatgcagtttctttctaaattagtaagagggctgagcattttttc

SEQ ID NO: 27935 - DNA, 120 bp, synthetic construct
  source 1..120: mol_type = other DNA
ggatcactggaggcctacagttcaagtcaggcttggggaaagtagtgagaccctgtctccagccaaaaaaaaaaaattaaattaaaatatactgtactataatagtgttaattgtaagca

SEQ ID NO: 27936 - DNA, 120 bp, synthetic construct; identical to SEQ ID NO: 7986
  source 1..120: mol_type = other DNA

SEQ ID NO: 27937 - DNA, 120 bp, synthetic construct
  source 1..120: mol_type = other DNA
cctgttgtgaataacaccattatgaatacggatatgcaatctttcttttcacttttgtatcccccctcattttggtgcaactaatcttctagtagcttttcctgaaagcacgtgcttaaa

SEQ ID NO: 27938 - DNA, 120 bp, synthetic construct
  source 1..120: mol_type = other DNA
ggccggtgctgggtttcagcatcctgcaatttcagaactactgtgaatacaaaagaaagaaaggtcctgcccaggatgggagtcactcctatatatggtggccctgggacagcagacctt

SEQ ID NO: 27939 - DNA, 120 bp, synthetic construct
  source 1..120: mol_type = other DNA
caatggacagtaagcaaataaaacctagtattaccactaattgccattgagaaaaatatgcctaggccagaagattggtgatggtgggaatagcagggacatagtttagacaaggtcatt

SEQ ID NO: 27940 - DNA, 120 bp, synthetic construct; identical to SEQ ID NO: 7987
  source 1..120: mol_type = other DNA

SEQ ID NO: 27941 - DNA, 120 bp, synthetic construct
  source 1..120: mol_type = other DNA
gtgccctaattcccgtttgaaaggtttactctacctgttgtgtgggtgatggacagcggcgtgaatgtctcttcatgtccattacccatttttgaatggcgttgtttttttaatggatga

SEQ ID NO: 27942 - DNA, 120 bp, synthetic construct
  source 1..120: mol_type = other DNA
aagtttttaaatctgataaagtctaatttatcatttttctttaattgctcatgctttgggtcatccagccaagaaactactaccaaatccaatgttcacaagactttcctcaatgttttc

SEQ ID NO: 27943 - DNA, 120 bp, synthetic construct
  source 1..120: mol_type = other DNA
atatccagtttctcagcaccacttgttgcagcaccatctgtggaagtgaggctgacacatttgcaaaatgcattgagcactagtacaccatgcatttatttacttttctttactccacag

SEQ ID NO: 27944 - DNA, 120 bp, synthetic construct; identical to SEQ ID NO: 7988
  source 1..120: mol_type = other DNA

SEQ ID NO: 27945 - DNA, 120 bp, synthetic construct
  source 1..120: mol_type = other DNA
aacaaataagtagtaagtgtagacctcagaaatttaacaagattctactttttcccccaaaaaaatgtcctcacaatttcctgctgaaaggagagggttcattcaggggaccacatgatg

SEQ ID NO: 27946 - DNA, 120 bp, synthetic construct
  source 1..120: mol_type = other DNA
tgattttagcttgactaaggttttgggtttttgatattgtttgtatttgagctgcagcctggggcttagaaatgtgacttgggtattttgccaaaatggtatgtttttctatagaatttg

SEQ ID NO: 27947 - DNA, 120 bp, synthetic construct
  source 1..120: mol_type = other DNA
accctctgcctagtgcagaggatcatggactgttgcagttatggcaacaaaaaatttctccagacatagctcctgtcctctggtgggaaaatctcccctggatgagaacactagtttgag

SEQ ID NO: 27948 - DNA, 120 bp, synthetic construct; identical to SEQ ID NO: 7989
  source 1..120: mol_type = other DNA

SEQ ID NO: 27949 - DNA, 120 bp, synthetic construct
  source 1..120: mol_type = other DNA
taggaaacacagcagagagaagagcaaagtaaaaggcatcaggggaaataatatgataaattcggtgtggagagcatgctaaagttatttggcctgcaataagtaatgctgttctaaaag

SEQ ID NO: 27950 - DNA, 120 bp, synthetic construct
  source 1..120: mol_type = other DNA
tgaagatacttgaatatgaaaggactttagataatatggaattattgtttattttctttggtgtgataatgtaggtttttactcttaggagatgcacgatgaggtgtttagtggtgaaat

SEQ ID NO: 27951 - DNA, 120 bp, synthetic construct
  source 1..120: mol_type = other DNA
atagctgaagcagcataaaacctagtttctagtagagggatgcaaaaagggaggagaattggtaagttagagttttttggcaaaggactgacaatgcgccacatggataggacttctatt

SEQ ID NO: 27952 - DNA, 120 bp, synthetic construct; identical to SEQ ID NO: 7990
  source 1..120: mol_type = other DNA

SEQ ID NO: 27953 - DNA, 120 bp, synthetic construct
  source 1..120: mol_type = other DNA
agtctagaagcctttcataatgccacgtggtagctccatccagaaatcctcagttgctccctgacttcttccagccccaggtgatggctagatcctccatgaaaggaaactggttcaaac

SEQ ID NO: 27954 - DNA, 120 bp, synthetic construct
  source 1..120: mol_type = other DNA
gacccagtatttggtttgatttgattctaaaaatggaggccaagagcctcaaaataaaaaaacagagtggaggtctgctcctgtactcaccattctgatgaatgtaccttgggatcctga

SEQ ID NO: 27955 - DNA, 120 bp, synthetic construct
  source 1..120: mol_type = other DNA
acagacacacacaaggagtgagtttaggagtagaggtttaataggcaaaagaaaagaaagagaaagaagaatagctctctctcctgtgagagaaggggcacgcaagtgggaattccagcc

SEQ ID NO: 27956 - DNA, 120 bp, synthetic construct
  source 1..120: mol_type = other DNA
ggtgtgatgtttacatagtgcatggggaagctgaccaccccaccctaatcttcttatgcaaataggctttccacttggctgacaccatgttgtctgctccctgctgcacacgtggttgga

SEQ ID NO: 27957 - DNA, 120 bp, synthetic construct; identical to SEQ ID NO: 7991
  source 1..120: mol_type = other DNA

SEQ ID NO: 27958 - DNA, 120 bp, synthetic construct
  source 1..120: mol_type = other DNA
cataggagtttatccttgcaggtattaccaaactgcttccttagctatcaacatcctaggaccatgggtcatgacaagcaaggaatgtaccctgctagtttaaagataaacttgatttgc

SEQ ID NO: 27959 - DNA, 120 bp, synthetic construct
  source 1..120: mol_type = other DNA
atcctatgaccctaccctctgagtccccaacgttcattatatcattcttttgcctttgcatgcccatataagtgagaacacatgacatttagatttcaattcctgaattacttctcttag

SEQ ID NO: 27960 - DNA, 120 bp, synthetic construct
  source 1..120: mol_type = other DNA
actttttattttgaggtaatcatagatccacatgtaactgtaagaaatagtaaagagggcaggcatggtggctcaggtctgtaatcccagcactttgggaggtggagagagcaggatcac

SEQ ID NO: 27961 - DNA, 120 bp, synthetic construct; identical to SEQ ID NO: 7992
  source 1..120: mol_type = other DNA

SEQ ID NO: 27962 - DNA, 120 bp, synthetic construct
  source 1..120: mol_type = other DNA
tttttttttcactcagcatgattccctaaagattcaaggattcatttacattcttggatgtatctatcaatagattgttggtttttttgtttttttgttgttgttttttttaattatact

SEQ ID NO: 27963 - DNA, 120 bp, synthetic construct
  source 1..120: mol_type = other DNA
cctcccccctcttccctcccccaaccccacgacaggccccagtgtgtgatgttctccaccccgtgtccaggtgttctcattgttcaattcccacctatgagtgagaatatgcggcgttca

SEQ ID NO: 27964 - DNA, 120 bp, synthetic construct
  source 1..120: mol_type = other DNA
tttcattttccactcattgattgacggacatttgggctggttccatatttttgcaactgtgaattgtgctgctataaacatgtgtgtgcaagtatctttttcatataatgacttcttttc

SEQ ID NO: 27965 - DNA, 120 bp, synthetic construct; identical to SEQ ID NO: 7993
  source 1..120: mol_type = other DNA

SEQ ID NO: 27966 - DNA, 120 bp, synthetic construct
  source 1..120: mol_type = other DNA
gctgatttgtttgagttccttgtagattctggacatcagtcctttgtcaaatgcatagtttgtgtatatgttctccctctctatgggtcgtctgttaactctgttgattatttcttttgc

SEQ ID NO: 27967 - DNA, 120 bp, synthetic construct
  source 1..120: mol_type = other DNA
cagtgttatcttctagaatttttatggtttcaggtcttagatttaagtctttgatccatcttgagttaatttttgtatacggtgagacataggatccagtttcattcttctacatgtgag

SEQ ID NO: 27968 - DNA, 120 bp, synthetic construct
  source 1..120: mol_type = other DNA
tctgtttcattggtctacatgagtctttagggttttctagctgtacaatcatatcatcagcaaacagcaacagtttgactttctctttgccaattcggatgccctttatttctttctctt

SEQ ID NO: 27969 - DNA, 120 bp, synthetic construct; identical to SEQ ID NO: 7994
  source 1..120: mol_type = other DNA

SEQ ID NO: 27970 - DNA, 120 bp, synthetic construct
  source 1..120: mol_type = other DNA
ctggggaaggcagatccacccttaatctggtgggcacagtctaatcagctgccatttaacataaagcaaacagaaaaacaagaaaaggagagacactggcctagcctcccagcctacatc

SEQ ID NO: 27971 - DNA, 120 bp, synthetic construct
  source 1..120: mol_type = other DNA
attgtgtaagttagtactcaataagcatatatatatattatatattatatatgttttatatatattatatattatatatgttttatatataatatatattataatatatattattctatt

SEQ ID NO: 27972 - DNA, 120 bp, synthetic construct; identical to SEQ ID NO: 7995
  source 1..120: mol_type = other DNA

SEQ ID NO: 27973 - DNA, 120 bp, synthetic construct
  source 1..120: mol_type = other DNA
atatatattctatatatatattctatatatattctatatatattctatatatatattctatatatattctatatatattctatatatatattctatatatattctatatatatattctat

SEQ ID NO: 27974 - DNA, 120 bp, synthetic construct
  source 1..120: mol_type = other DNA
attctatatattctatatatattctatatatattctatatattctatatatattctatatatattctatatatattctatatatattctatatatattctatatatattctatatattct

SEQ ID NO: 27975 - DNA, 120 bp, synthetic construct
  source 1..120: mol_type = other DNA
tatatatatattccatatatatattctatatatatattccatatatatattctatatatatattccatatatatattctatatatatattccatatatatattctatatatatattccat

SEQ ID NO: 27976 - DNA, 120 bp, synthetic construct; identical to SEQ ID NO: 7996
  source 1..120: mol_type = other DNA

SEQ ID NO: 27977 - DNA, 120 bp, synthetic construct
  source 1..120: mol_type = other DNA
atatatcctatatatatatcctatatatatatcctatatatatcctatatatatatatcctatgtatatatcctatatatatatatcctatgtatatatcctatatatatatcctatgta

SEQ ID NO: 27978 - DNA, 120 bp, synthetic construct
  source 1..120: mol_type = other DNA
atatcctatatatatatcctatatatatatatcctatatatatatcctatatatatatcctatatatatatcctatatatatatatcctatatatatatcctatatatatatcctatata

SEQ ID NO: 27979 - DNA, 120 bp, synthetic construct; identical to SEQ ID NO: 7997
  source 1..120: mol_type = other DNA

SEQ ID NO: 27980 - DNA, 120 bp, synthetic construct
  source 1..120: mol_type = other DNA
gtatatatatattctatatatatattctatatatatattctatatacatattctatatatatatattctatatatatatattctatatacatatatattctatatatatattctatatac

SEQ ID NO: 27981 - DNA, 120 bp, synthetic construct
  source 1..120: mol_type = other DNA
tatatatatatattctatatacatattctatatatatattctatatatatattctatatatatattctatatatatattctatatatatattctatatatatatattctatatatatatt

SEQ ID NO: 27982 - DNA, 120 bp, synthetic construct
  source 1..120: mol_type = other DNA
aggaacagaatattaaggatggagttcttttgttagtttaggggtttctggagttggttgcttaatatgattagacccaaaaatgctaaggactctacttctaatagtgtggagaatgct

SEQ ID NO: 27983 - DNA, 120 bp, synthetic construct; identical to SEQ ID NO: 7998
  source 1..120: mol_type = other DNA

SEQ ID NO: 27984 - DNA, 120 bp, synthetic construct
  source 1..120: mol_type = other DNA
acacagcctcaccaagtgtctactgttaaagtgagggcattgatcagaaaagaatgagaccctgcaacttggaatggggatatgtgggaggatcctaatgaagctggggacactaagtgt

SEQ ID NO: 27985 - DNA, 120 bp, synthetic construct
  source 1..120: mol_type = other DNA
ccctgcactgcctgaggcaacagtgatggcctgccctgaagcagttgccaggcaagataatgttgattctcctcaggagccacccctaacacctctgtttgcttctagacctatgactag

SEQ ID NO: 27986 - DNA, 120 bp, synthetic construct
  source 1..120: mol_type = other DNA
ggcatgggaatggatattacaggtatgggataatggtgaaaggaacatagagttggataaggctgaatttattgatttgggccattaagtaaggactctgcttttaatgttgcagctcgg

SEQ ID NO: 27987 - DNA, 120 bp, synthetic construct; identical to SEQ ID NO: 7999
  source 1..120: mol_type = other DNA

SEQ ID NO: 27988 - DNA, 120 bp, synthetic construct
  source 1..120: mol_type = other DNA
gaggtgtcaggggccaagtggcagcattcaaccatcaaaggcaaggtgagtgtagctaccataatggacagcagaggcaaagtggcagtcataatagtccaactcatgcagagctctggc

SEQ ID NO: 27989 - DNA, 120 bp, synthetic construct
  source 1..120: mol_type = other DNA
ataaaaacaaagaatcatggcccctcagtcaatttccagacttgagccagtttacagacccagaaccccttgaatgaaaaggaagctgggtctccttgaagaaggaccccactacattac

SEQ ID NO: 27990 - DNA, 120 bp, synthetic construct
  source 1..120: mol_type = other DNA
ggctctgagctgacattgattccagggaacccaaaacatcattgtggccctccagttaaagtaggagcttatggagttcaggtaattaatggagttttagctcaggtctgacttacaatg

SEQ ID NO: 27991 - DNA, 120 bp, synthetic construct; identical to SEQ ID NO: 8000
  source 1..120: mol_type = other DNA

SEQ ID NO: 27992 - DNA, 120 bp, synthetic construct
  source 1..120: mol_type = other DNA
cctgtgcagaagacagacagatcttggagaatgacagtggattattgtaagcttaaccaagtggtgacgactccaactgcagctgctgcaccagatgtggtttcattgcttgagcaaatt

SEQ ID NO: 27993 - DNA, 120 bp, synthetic construct
  source 1..120: mol_type = other DNA
tttactgtcctgcctcaggggtatatcaacaatccagctttgtgtcataatctgattcaaagaaaccttgatcactttccgcttctgcaagatatcacactggtccattaccttaatgac

SEQ ID NO: 27994 - DNA, 120 bp, synthetic construct
  source 1..120: mol_type = other DNA
gtaaaattctaggggtccaatggtgtgggacctgccaagatattccttctaaggtgaagaataagttgctgcatttggctcctcctacaaccaagaaagaggcacaatgcctagtgggcc

SEQ ID NO: 27995 - DNA, 120 bp, synthetic construct; identical to SEQ ID NO: 8001
  source 1..120: mol_type = other DNA

SEQ ID NO: 27996 - DNA, 120 bp, synthetic construct
  source 1..120: mol_type = other DNA
acatttgactatgggtcatcaagtcaccatgcaacctgaactgcctatcatgaactggatgctttgtgactaatctagccataaagtgggtcatgcacagcagcattccatcatcaaatg

SEQ ID NO: 27997 - DNA, 120 bp, synthetic construct
  source 1..120: mol_type = other DNA
tgcaccgatggcctcatgaggagttccctatgatcagttgacagaggaacagaagaatagggccttgttcacagattgttctgcacgatatggaggcaccacccaaaagtggacagctgc

SEQ ID NO: 27998 - DNA, 120 bp, synthetic construct
  source 1..120: mol_type = other DNA
atatactgattcataggctgtagccaatggtttggctggagggtcagggacttggaagaagcatgattggaaaattggtgacaaagaaatttggggaagaggtttgtggatggacctctc

SEQ ID NO: 27999 - DNA, 120 bp, synthetic construct; identical to SEQ ID NO: 8002
  source 1..120: mol_type = other DNA

SEQ ID NO: 28000 - DNA, 120 bp, synthetic construct
  source 1..120: mol_type = other DNA
ttccattatggaaagggcagaagtttgtcttcactggaatagacacttactccggatatgggtttgcctatcctgcatgcaatgcttctgccaagactaccatcatggagtcacagaatg

SEQ ID NO: 28001 - DNA, 120 bp, synthetic construct
  source 1..120: mol_type = other DNA
ccatcctgaagcagctggattgatagaatggtgtaatgaccttttgaagtcacaataacaatgccaactaggtgacgatactttgcagggctggggcaaagttctccagaagactgtgta

SEQ ID NO: 28002 - DNA, 120 bp, synthetic construct
  source 1..120: mol_type = other DNA
atttttgcttcctgctcccacaacattatgttctgctggcctagaggtcttagttccagagggaggaatgctgccaccaggagacacaacatcgatttcattaaactagaagttaagatt

SEQ ID NO: 28003 - DNA, 120 bp, synthetic construct; identical to SEQ ID NO: 8003
  source 1..120: mol_type = other DNA

SEQ ID NO: 28004 - DNA, 120 bp, synthetic construct
  source 1..120: mol_type = other DNA
gtcatcaataccagctatgcccacgtgaccacctgcagaaacagggactgcaatggtcatgaatatttcctccttcttttgctaaaagtcatgtttgtgcatgtatacacttggactaag

SEQ ID NO: 28005 - DNA, 120 bp, synthetic construct
  source 1..120: mol_type = other DNA
gttgtacgaaggatcattgtattatgttggtgtaattatgaccttattattgtctttgtttgaagattatgtatgatctcaggagatgagtatgggttcaagttgacaaggggtggactt

SEQ ID NO: 28006 - DNA, 120 bp, synthetic construct
  source 1..120: mol_type = other DNA
gcagatccattcttaatctggtgggcacagtctaatcagctgccagcaaatataaagcaagaagaaaaatttgaaaaggagagagactggcctagcctcccagcctacatctttctccca

SEQ ID NO: 28007 - DNA, 120 bp, synthetic construct; identical to SEQ ID NO: 8004
  source 1..120: mol_type = other DNA

SEQ ID NO: 28008 - DNA, 120 bp, synthetic construct
  source 1..120: mol_type = other DNA
ttggatggattaaccagtattttgttgagaatttttgcatctatgtttattagggatattggtgtgtagtttacttttttggttatgtcttttcctgcttttggcttcatagaatgattt

SEQ ID NO: 28009 - DNA, 120 bp, synthetic construct
  source 1..120: mol_type = other DNA
aatttttttttattgctctttcaatcttgctacttgttattggtctgttcagtttctgttttttcctgatttaatctggagggttgtatatttccaggaatttatcaatatcaatctatt

SEQ ID NO: 28010 - DNA, 120 bp, synthetic construct
  source 1..120: mol_type = other DNA
gttaatttcactaatggtctatcaattgcttatcttttcaaagaaccagctttttgtttcatttatcatttttcatgcttcaattttatttagttctgctcagatctttgttattttatt

SEQ ID NO: 28011 - DNA, 120 bp, synthetic construct; identical to SEQ ID NO: 8005
  source 1..120: mol_type = other DNA

SEQ ID NO: 28012 - DNA, 120 bp, synthetic construct
  source 1..120: mol_type = other DNA
atgtattgagacttactttgtgacctatcatatggtctaccttggagaatgttccatgtgataatgacaaaaatgtatattctgcagttgttgggtagaatgttctgtaaatatctgtta

SEQ ID NO: 28013 - DNA, 120 bp, synthetic construct
  source 1..120: mol_type = other DNA
ctcatttattagatccagtaataattgttttataaatttggaacccctagtgttaggtgcatatatattaaggattgtgatactttcctgttagactaatccttttgtcattatatagtg

SEQ ID NO: 28014 - DNA, 120 bp, synthetic construct
  source 1..120: mol_type = other DNA
accttcagtttatgtgagtccttatgtgttaggcattctcttgaagacagcagatactcgattggtggatttttacccattctgccaatctgtatcttttaagtggagcatttagattat

SEQ ID NO: 28015 - DNA, 120 bp, synthetic construct; identical to SEQ ID NO: 8006
  source 1..120: mol_type = other DNA

SEQ ID NO: 28016 - DNA, 120 bp, synthetic construct
  source 1..120: mol_type = other DNA
ttgaattgtagttcccataattcccatgtgtcatgggagaaatgtagtgggagttaattgaatcatgggggcagatcccccatgctgttctcatgatagagtgactctcatgaaatctga

SEQ ID NO: 28017 - DNA, 120 bp, synthetic construct
  source 1..120: mol_type = other DNA
tgtaagtcaattaaacctctgttgtttataaattacccagcctcaggtatttcttcatagcagtgtgagaatggactaatacagtaaattagtaccaggagtggggtgctactataaaga

SEQ ID NO: 28018 - DNA, 120 bp, synthetic construct
  source 1..120: mol_type = other DNA
ggctccgaagacaggaagatatgggaaagcttgaaacttcctagagacttgttgaatggttttgaccaaaatgctgatagtaatatggacaatgaagtccaggctgaggtggcctcagat

SEQ ID NO: 28019 - DNA, 120 bp, synthetic construct; identical to SEQ ID NO: 8007
  source 1..120: mol_type = other DNA

SEQ ID NO: 28020 - DNA, 120 bp, synthetic construct
  source 1..120: mol_type = other DNA
ccatcacaagcccagaggtcatccttaagtgaaaaaatcaaccacaggagatgacatgataataggcttattacagtagaggaaggtacaaagtgtttctcatcattggtgtgtttgtta

SEQ ID NO: 28021 - DNA, 120 bp, synthetic construct
  source 1..120: mol_type = other DNA
cacatgcagaaaatgtagtctcatagcttccctattgggtgctggactgttggcatttcattattttttttaaatcaaagacatggatatcttttttcttagttgatttctaggacttca

SEQ ID NO: 28022 - DNA, 120 bp, synthetic construct
  source 1..120: mol_type = other DNA
acattctgccgggtacccagaggtggggacagatgctaacaggtccatcttataagtgcaacatgaaatttaaggtcagggaatctcttaacttttcttgaaggacctcatatttagctt

SEQ ID NO: 28023 - DNA, 120 bp, synthetic construct; identical to SEQ ID NO: 8008
  source 1..120: mol_type = other DNA

SEQ ID NO: 28024 - DNA, 120 bp, synthetic construct
  source 1..120: mol_type = other DNA
tgttcactgagcaggtgtttccactacttgcattaagtcaggggatatggaagccacttttccagcaatcaaactcaatgagaagatgaacaagaagtgttctgaaagtaagcagaaaag

SEQ ID NO: 28025 - DNA, 120 bp, synthetic construct
  source 1..120: mol_type = other DNA
gcttctaaatgagaaaatcatcaaaagggtatttagtactcaagtggtggacacaggataaatgctgaaaatcagtgctcgattcgaagatagtgatgttccaggatgttggagtctctc

SEQ ID NO: 28026 - DNA, 120 bp, synthetic construct
  source 1..120: mol_type = other DNA
acagggatctgttcctgtttagactccaatgctcagtacccagtgcagaacatggcaagacttcagcaaatacatcagtcagctggatgaaggaggcaggtgtgagccagcaaaaaaaag

SEQ ID NO: 28027 - DNA, 120 bp, synthetic construct
  source 1..120: mol_type = other DNA
agaccagcttgaccaacatggtaaaaccccatctctactaaaaatacaaaaattagccgggcatggtggcagacgcctgtaatcccagctacttgggaagctgaggcagagaattgcttg

SEQ ID NO: 28028 - DNA, 120 bp, synthetic construct; identical to SEQ ID NO: 8009
  source 1..120: mol_type = other DNA

SEQ ID NO: 28029 - DNA, 120 bp, synthetic construct
  source 1..120: mol_type = other DNA
gccacaggacagaaaaaggaaaggagtcgtgaaaaacaagataaggaaaaagatgctcctgacatggggcatcgggaggatgtgtggccctgaggctcccgggagacaggggctgcgcct

SEQ ID NO: 28030 - DNA, 120 bp, synthetic construct
  source 1..120: mol_type = other DNA
tctctaggtacaatttactgctatgaaaagggatttgagaattcccagaggaggctttcagcctctttgcatggctctttctggcctttcaaaagcgccagagacatcagaaatgaaatc

SEQ ID NO: 28031 - DNA, 120 bp, synthetic construct
  source 1..120: mol_type = other DNA
tcattctggttggattttatgacagccgtattcgccataagaattctagagccagaccttgttacttcacaattgcctcacgttgcaggacaagcaaatctagcctgagtcctgtggatt

SEQ ID NO: 28032 - DNA, 120 bp, synthetic construct; identical to SEQ ID NO: 8010
  source 1..120: mol_type = other DNA

SEQ ID NO: 28033 - DNA, 120 bp, synthetic construct
  source 1..120: mol_type = other DNA
cctccagaccaaaacagcaggatcaggtctggagctgactcaaccccaaacccttgctaatgcacgacccagtcccccagcctccaggatgggaccttggcctcctgtcccctcccttgt

SEQ ID NO: 28034 - DNA, 120 bp, synthetic construct
  source 1..120: mol_type = other DNA
gatcataagagaagaaggaatcataccaaacactggaactgtaggtcaattaaacctttttctttataagggggggggaggaagaggaggaggaaaaaggaggagggtgaaaggagtcag

SEQ ID NO: 28035 - DNA, 120 bp, synthetic construct
  source 1..120: mol_type = other DNA
gagtgaaggacaggggctaaggggcccagccctggtaggttgagggccccactttctgtgctcgggccttactgtcctagcagagtccagccccgggaagcctggggtcacagcactcgg

SEQ ID NO: 28036 - DNA, 120 bp, synthetic construct; identical to SEQ ID NO: 8011
  source 1..120: mol_type = other DNA

SEQ ID NO: 28037 - DNA, 120 bp, synthetic construct
  source 1..120: mol_type = other DNA
agctacccaagcacccccaggccctgctctctgccaaccctgatccctgaactccagcactttccaaacccacccccgaattgctggataatatagtggttctatttttagattttttaa

SEQ ID NO: 28038 - DNA, 120 bp, synthetic construct
  source 1..120: mol_type = other DNA
atttttgtcttttcagttgtggctattctatctggggtaagatgacatctcattgtggttttgatttgcatttccctaatgattagtgatgttgaacatttttttatgtatctgttggcc

SEQ ID NO: 28039 - DNA, 120 bp, synthetic construct
  source 1..120: mol_type = other DNA
cttgtcagataaattgtttgaaaatgttttctcctgttcagcagattgtctcttcactctgtcaattgttttatttgctatgcagaagcttttttagttattatagtcctatttgtctgg

SEQ ID NO: 28040 - DNA, 120 bp, synthetic construct; identical to SEQ ID NO: 8012
  source 1..120: mol_type = other DNA

SEQ ID NO: 28041 - DNA, 120 bp, synthetic construct
  source 1..120: mol_type = other DNA
tttggatactatagccttgtaatgtattttaaagtcaagtagtgtgatggccctagctttgttctttttgctcaggatttctttggctatttggactttttaaaaatgttttgggtccat

SEQ ID NO: 28042 - DNA, 120 bp, synthetic construct
  source 1..120: mol_type = other DNA
tctgattcatgagcatggaatatctttccatttgtttgtgtcctcttctttctttcatcagtgttgtatagatttatttttaagagatctttgacttccttgcataaacttattcctagg

SEQ ID NO: 28043 - DNA, 120 bp, synthetic construct
  source 1..120: mol_type = other DNA
ctgaatttacttatcatatctaatagttctttgatggagtcttcagatttttctagaaataggatcatttcattggcagggaggggagagaggctgaaggttaagctgatggccaatgat

SEQ ID NO: 28044 - DNA, 120 bp, synthetic construct; identical to SEQ ID NO: 8013
  source 1..120: mol_type = other DNA

SEQ ID NO: 28045 - DNA, 120 bp, synthetic construct
  source 1..120: mol_type = other DNA
aaacacgggcaaaatggcttgagactggcatcaggagtgggaggcttgagactggcatcaggagtgggagggggacagtcatggggactgagctctcaacccatgggatgcgatgctatc

SEQ ID NO: 28046 - DNA, 120 bp, synthetic construct
  source 1..120: mol_type = other DNA
agttgttgtggtgtgagagtagtggaaaacaatgtgagattttccacactcagagtggatctaaatgttgagttgcttttaaatttgacttagtcgtggcctgactaaacaggattagat

SEQ ID NO: 28047 - DNA, 120 bp, synthetic construct
  source 1..120: mol_type = other DNA
aaaatactctctctgcagctttaacaaatactggtttggaagagagtgactgcgtttttcaaagttctaaatggctatgattgcaggacctttgtgatgctcaggaatgtcctgatgtca

SEQ ID NO: 28048 - DNA, 120 bp, synthetic construct; identical to SEQ ID NO: 8014
  source 1..120: mol_type = other DNA

SEQ ID NO: 28049 - DNA, 120 bp, synthetic construct
  source 1..120: mol_type = other DNA
cctccagcctcagcctcatgagtagctgaaactacaggaacatgccaccatgcccaactaattttttaaaaaatttttttgtagagatgaggtatcactatgttgccgaggctggtctca

SEQ ID NO: 28050 - DNA, 120 bp, synthetic construct
  source 1..120: mol_type = other DNA
cccagcatcgatagtctactaaacatgccatgattaaattatatctctataccttgatataaacaaaaaattatatgagcagtaaagacaaatatgaaaaagtaaaattactgccaaagt

SEQ ID NO: 28051 - DNA, 120 bp, synthetic construct
  source 1..120: mol_type = other DNA
cactgcagccttgacctcccaagattcaggtgatcctcttgcctcagccccctgagtagctgagacaacaggcatgtgagacaatgcctggctcctttttatatttttagtagagatggg

SEQ ID NO: 28052 - DNA, 120 bp, synthetic construct
  source 1..120: mol_type = other DNA
acatctgctggaatggaaaatatttcttaaatgagacacaaatgtatcaaattgaaaatgtttaaacttcaaaggacttacatacatatacagtcattcttcgctcaatggtgagatagc

SEQ ID NO: 28053 - DNA, 120 bp, synthetic construct; identical to SEQ ID NO: 8015
  source 1..120: mol_type = other DNA

SEQ ID NO: 28054 - DNA, 120 bp, synthetic construct
  source 1..120: mol_type = other DNA
tgagtgagtgagtggtgagtgaatgtgaaggctagggcattactgtacactacttagactttataaacttaggctacactaaattgattttaacattgtctttctttaataataaattaa

SEQ ID NO: 28055 - DNA, 120 bp, synthetic construct
  source 1..120: mol_type = other DNA
aagttttagggtacatatgcacattgtgcaggttagttacatatgtatacatgtgccatgctggtgtgctgcacccattaactcgtcatttagcattaggtatatctcctaatgctatcc

SEQ ID NO: 28056 - DNA, 120 bp, synthetic construct
  source 1..120: mol_type = other DNA
tcccacttatgagtgagaacatgcggtgtttggtgttttgtccttgcgatagtttactaagaatgatgatttccaatttcatccgtgtccctacaaaggacatgaactcatcctttttta

SEQ ID NO: 28057 - DNA, 120 bp, synthetic construct
  source 1..120: mol_type = other DNA
gtgtgcatgtgtctttacagcagcatgatttatagtcctttgggtatatacccagtaatgggatggctgggtcaaatggtatttctagttctagacccctgaggaatcgccacactgact

SEQ ID NO: 28058 - DNA, 120 bp, synthetic construct; identical to SEQ ID NO: 8016
  source 1..120: mol_type = other DNA

SEQ ID NO: 28059 - DNA, 120 bp, synthetic construct
  source 1..120: mol_type = other DNA
tgtaggttgcctgttcactctggtggtagtttcttttgttgtgcagaagctctttagtttaattagatcccatttgtcaattttggcttttgttgccattgcttggtgttttagacatga

SEQ ID NO: 28060 - DNA, 120 bp, synthetic construct
  source 1..120: mol_type = other DNA
ttcctatttaattatctttaccttttaatcttttttggtaaaaataaagacatacattagcataggctgacacagggtcaagaccaacaatatcaaccatcttcagccttcacatcttgt

SEQ ID NO: 28061 - DNA, 120 bp, synthetic construct
  source 1..120: mol_type = other DNA
atatagaaggagcacactctaaaataacaataaaaagtatagtaaatacataaaacatagcatagtcatttattatcattatgaagtattatgtactgtgcatagctgtatatgctagac

SEQ ID NO: 28062 - DNA, 120 bp, synthetic construct
  source 1..120: mol_type = other DNA
caggtccattaaactctcatgggacgacagtcatatatgcaattcatcattgacccaaacatcattatacaatgcatgactctataacacagtggggtgtgtgtgtgtgtgtttgtattt

SEQ ID NO: 28063 - DNA, 120 bp, synthetic construct; identical to SEQ ID NO: 8017
  source 1..120: mol_type = other DNA

SEQ ID NO: 28064 - DNA, 120 bp, synthetic construct
  source 1..120: mol_type = other DNA
gttcctgaaagggagattcacatccttatcagctttctttccagaagcatttgccaaaatacaatgaagagaaatggaacccaagcagagaaaatcagtctcatcggcaaaggaaacaga

SEQ ID NO: 28065 - DNA, 120 bp, synthetic construct
  source 1..120: mol_type = other DNA
tctaagaagcccactggagaacagcttcttggagattgcatgctaagtagaaatgtcacaggctccatagtgtgaggagatgttggaatttcagccctgcaaaacctgtgttgagacatc

SEQ ID NO: 28066 - DNA, 120 bp, synthetic construct
  source 1..120: mol_type = other DNA
actaaaggtgattctttgataattacctaactgtcaaactattaccagtctttggaggaagataacaaaacccagagcctctaaaatccatcatgtagaatatgtgccatgccaagcagc

SEQ ID NO: 28067 - DNA, 120 bp, synthetic construct; identical to SEQ ID NO: 8018
  source 1..120: mol_type = other DNA

SEQ ID NO: 28068 - DNA, 120 bp, synthetic construct
  source 1..120: mol_type = other DNA
agacggttgaacaaagccaacagaaaactaagtagaaaatataaataatcctatatccattaagaaattgagttctaaatacattccttcccaccagagaaactccatgcccagacttct

SEQ ID NO: 28069 - DNA, 120 bp, synthetic construct
  source 1..120: mol_type = other DNA
ttctagggcacctgtggataccaaaatccatggatgctcaggtcccatatataaaatagcctagtatttgcctattagctatgcacatcctcccatatactttaaatcatctctagatta

SEQ ID NO: 28070 - DNA, 120 bp, synthetic construct
  source 1..120: mol_type = other DNA
gtctatacatcttcagtacagacataaccactgtaggtactcctaactacagagtatacatcagcaacaacataacattttcaatcctaaggttgttgaattcacagatgtggaactcac

SEQ ID NO: 28071 - DNA, 120 bp, synthetic construct
  source 1..120: mol_type = other DNA
tcatgggggtggttcccctcatgctgttctcatgatagtgtgttctcacaatacttcatggttttataaggggctttttctgcttcggtttggcacttctccttgttgctgccatgtgag

SEQ ID NO: 28072 - DNA, 120 bp, synthetic construct; identical to SEQ ID NO: 8019
  source 1..120: mol_type = other DNA

SEQ ID NO: 28073 - DNA, 120 bp, synthetic construct
  source 1..120: mol_type = other DNA
atgaccaaatgggatttataagagaaatacatggtagatttaacttcaaaatgtcagaataatctaccccaagaatagagaaaagtaggacaacatgtggttatatcaatagatgcagga

SEQ ID NO: 28074 - DNA, 120 bp, synthetic construct
  source 1..120: mol_type = other DNA
tacagttatttacaacaaagaaatacaaagaaatacctaaatctaaagtcataattaatgaagaaatattaaacactcctctgaggtggggacaagagaaggatgtccactatcatcact

SEQ ID NO: 28075 - DNA, 120 bp, synthetic construct
  source 1..120: mol_type = other DNA
ctattaaaaataagtgaatttggcaaggccagtataaagcaaaaagtaacatttctatacgtgagtaataaacagtgagaagaactgacattctttaaatagctctatgtacaataccac

SEQ ID NO: 28076 - DNA, 120 bp, synthetic construct
  source 1..120: mol_type = other DNA
tattgctaagataccgtttatccacaaagtgatccatggagtcaatgcaattgtaataaaactcccaacagttttttttgtgggaattgacatgctccttctaaaatgtatacaaaaatg

SEQ ID NO: 28077 - DNA, 120 bp, synthetic construct; identical to SEQ ID NO: 8020
  source 1..120: mol_type = other DNA

SEQ ID NO: 28078 - DNA, 120 bp, synthetic construct
  source 1..120: mol_type = other DNA
gtaggtctctgatccattttgtgttgatttatacatatgctgtgaggtagggtttcaacttctttgttttttttcttttgcagagacagtgtctgtgtcacccaggctagagtgcagtgg

SEQ ID NO: 28079 - DNA, 120 bp, synthetic construct
  source 1..120: mol_type = other DNA
tagaatgtgggcatccaggtgcccagctccattagatgaagagtgtatactttaacacattgagttgtcttaacacctttactgaggttctttgcatatatctctttatgtgtctctgag

SEQ ID NO: 28080 - DNA, 120 bp, synthetic construct
  source 1..120: mol_type = other DNA
tctccttcatttattttaatttattaattgtgataaaatgcacataacataaaatttaccatcttaaccatttgtagtggtagtgttcagtagtgctaagaacactcacactgttttgca

SEQ ID NO: 28081 - DNA, 120 bp, synthetic construct; identical to SEQ ID NO: 8021
  source 1..120: mol_type = other DNA

SEQ ID NO: 28082 - DNA, 120 bp, synthetic construct
  source 1..120: mol_type = other DNA
ctctctctttctatctctcctctactttgggaactcccattatgcatctgtcagtccacttgatgctgtacagaggtgtcatagcctctgatcatttccctttatttttttttcttcctg

SEQ ID NO: 28083 - DNA, 120 bp, synthetic construct; identical to SEQ ID NO: 8022
  source 1..120: mol_type = other DNA

SEQ ID NO: 28084 - DNA, 120 bp, synthetic construct
  source 1..120: mol_type = other DNA
agagggggatttggcagggtcataggacaatagtggagggaaggttggcagataaacaagtgaacaaaggtctctggttttcctaggcagaggaccctgcggccttccgcagtgtttgtg

SEQ ID NO: 28085 - DNA, 120 bp, synthetic construct
  source 1..120: mol_type = other DNA
cagcacatgtttcagagagcacagggttgggggtaaggtcaccgatcaacaggatcccaaggcagaagaatttatcttagtacagaacaaaatgaaaagtctcccatgtctacttctttc

SEQ ID NO: 28086 - DNA, 120 bp, synthetic construct
  source 1..120: mol_type = other DNA
cagacgaggtggtggctgggcagaggggctcctcacttcctagtaggggtggccgggcagaggcgcccctcacctcccggacggggcagctggccgggcggggggctgacccccccacct

SEQ ID NO: 28087 - DNA, 120 bp, synthetic construct
  source 1..120: mol_type = other DNA
ccccccacctccctcccggagggggcggctggccgggcggggtgctgatccccccacctccctcccggacgggtcggctggccgggcggggggctgagccccccacctccctcccggacg

SEQ ID NO: 28088 - DNA, 120 bp, synthetic construct; identical to SEQ ID NO: 8023
  source 1..120: mol_type = other DNA

SEQ ID NO: 28089 - DNA, 120 bp, synthetic construct
  source 1..120: mol_type = other DNA
acccccacctccctcctggacggggtggctggccaggcagaggggctcctcacttcccagtaggggcggctgggcagaggcgcccctcacctcccggacggggcgtctggccgggcgggg

SEQ ID NO: 28090 - DNA, 120 bp, synthetic construct; identical to SEQ ID NO: 8024
  source 1..120: mol_type = other DNA

SEQ ID NO: 28091 - DNA, 120 bp, synthetic construct
  source 1..120: mol_type = other DNA
cccccacctccctcccggatggggcggctggccaggcagaggggctcctcacttcccagtaggggcggctgggcagaggcgcccctcacctcccggacggggcagctggccgggtggggg

SEQ ID NO: 28092 - DNA, 120 bp, synthetic construct
  source 1..120: mol_type = other DNA
ggctgccgggcagagggactcctcacttctcagatggggcggatgctgggcggagggtctcctcacttctcagacggggcagctgggcagagacgctcctcacctcccagacggggtcgc

SEQ ID NO: 28093 - DNA, 120 bp, synthetic construct
  source 1..120: mol_type = other DNA
gggaagaggcgctcctcacttcctagatgggatggcggccgggcagagacgctcctcactttccagactgggcagccaggcagaggggctcctcacgtcccagacgatgggcggccaggc

SEQ ID NO: 28094 - DNA, 120 bp, synthetic construct; identical to SEQ ID NO: 8025
  source 1..120: mol_type = other DNA

SEQ ID NO: 28095 - DNA, 120 bp, synthetic construct
  source 1..120: mol_type = other DNA
cagtgagccgagatggcagcagtacagtccagcttcggctcggcatcagagggagaccatggaaagagagggagagggagaccgagagggagaggggagaggggagaggggagaggggag

SEQ ID NO: 28096 - DNA, 120 bp, synthetic construct
  source 1..120: mol_type = other DNA
catatatatatacacacacatacacatatatgtgtatatatatacatatatatatacacacacatacacatatatgtgtatatatatacatatatatatacacacacatacacatatatg

SEQ ID NO: 28097 - DNA, 120 bp, synthetic construct
  source 1..120: mol_type = other DNA
cttggcttccttagggacaggttctgctgatgtatttttttctgcaaatgggccactttcttaaacttctaaatacctcaagaattttcgctgaaaactgaacactttgaatacaacaat

SEQ ID NO: 28098 - DNA, 120 bp, synthetic construct; identical to SEQ ID NO: 8026
  source 1..120: mol_type = other DNA

SEQ ID NO: 28099 - DNA, 120 bp, synthetic construct
  source 1..120: mol_type = other DNA
tctttttaaagagtgtgggcatccagggctaaatatccagtgtttagccctggccatgtatgtgacattctgatttcctcagtatatgcgggatattttgaaagccatattgccttatgt

SEQ ID NO: 28100 - DNA, 120 bp, synthetic construct
  source 1..120: mol_type = other DNA
ttgctatggagacctctccaatcttaataaagttccaagaggagtgaagcaaagaccagcctctaagctgatctttttgggggctatcatacatgtcaaaggacacaaacacaattcttt

SEQ ID NO: 28101 - DNA, 120 bp, synthetic construct
  source 1..120: mol_type = other DNA
gaatagtggcacatgctctcctaccaaaatctagagctcctttttcattaagcactactttggttgttgtaaaaaaaaaaaaaaaattcatagactccagagtacagaaaaacttaattt

SEQ ID NO: 28102 - DNA, 120 bp, synthetic construct; identical to SEQ ID NO: 8027
  source 1..120: mol_type = other DNA

SEQ ID NO: 28103 - DNA, 120 bp, synthetic construct
  source 1..120: mol_type = other DNA
gtacctcatgaatgtattattatatgtcaattaaaattatacatatatatatgtttttaaaaggttttttttctggaaatagaatctagtttgacagcagttgtctttcagaactttagc

SEQ ID NO: 28104 - DNA, 120 bp, synthetic construct
  source 1..120: mol_type = other DNA
ttctctccttctctggttttgaacaaatacatgttactctcactcacaactataaagcgaacttaggaaacaatctatagggagagtttgttgatgattggttatacattttcagaaaca

SEQ ID NO: 28105 - DNA, 120 bp, synthetic construct
  source 1..120: mol_type = other DNA
tcacctggacctggtgccaagatacgtggtcaagcattattctggatgatctttttaggatgtttcttggatatgattaacatataaattgctatactttgagtaaagtagattgacctc

SEQ ID NO: 28106 - DNA, 120 bp, synthetic construct; identical to SEQ ID NO: 8028
  source 1..120: mol_type = other DNA

SEQ ID NO: 28107 - DNA, 120 bp, synthetic construct
  source 1..120: mol_type = other DNA
tggaaaactggcctatgaaaagaatgcccatatgagacacagtcctatggaaatcactatggtaatttgaggggtgcattaacgtaagacatgttgatgcctgatatagattggatgttg

SEQ ID NO: 28108 - DNA, 120 bp, synthetic construct
  source 1..120: mol_type = other DNA
ttcaatacccatcagaataactcccttccaggtttggaaggtgattgaaatcaacaagcatttatctctaagtgcttgccaggtgcacctgtagtcccagctatgagagtgtctgaggca

SEQ ID NO: 28109 - DNA, 120 bp, synthetic construct
  source 1..120: mol_type = other DNA
tctacgaaataagtagacactgaggctgtagcaatgcagagatgggctgaatcaagacatactccccttgcatcccccacctctaataagcacaaaatactcagtaaaactgttcttttt

SEQ ID NO: 28110 - DNA, 120 bp, synthetic construct; identical to SEQ ID NO: 8029
  source 1..120: mol_type = other DNA

SEQ ID NO: 28111 - DNA, 120 bp, synthetic construct
  source 1..120: mol_type = other DNA
aaaacgtgaatgggaggtattgccaccatgtggaccactgagccacattacactaggaaacacacttgcccagaatgtccaacaatggtcagagaaatttgttcctcagaagaagagttt

SEQ ID NO: 28112 - DNA, 120 bp, synthetic construct
  source 1..120: mol_type = other DNA
atacaccttcatgagtgtgctcgctcttgacatgagtgtggacaaaggaatgtccccactagagagtgtcctctttttccctgctggatcagggaaaggtgctggtgtgattctacatac

SEQ ID NO: 28113 - DNA, 120 bp, synthetic construct
  source 1..120: mol_type = other DNA
ctcatacctgatgcagtggtctcaggactagggatgcaaataaaagtccaggcacaggaattattcctgagcaagaaaccgttaacatatttaaaaaccattatgcaagactgcctaagg

SEQ ID NO: 28114 - DNA, 120 bp, synthetic construct; identical to SEQ ID NO: 8030
  source 1..120: mol_type = other DNA

SEQ ID NO: 28115 - DNA, 120 bp, synthetic construct
  source 1..120: mol_type = other DNA
ttatctcatttttaccagatgtctgaaaggttgaagccgtatgttgctgagaccattgctatttttggactgcaatgggcgaattgataatgactaaacaggactctggtaatgggccag

SEQ ID NO: 28116 - DNA, 120 bp, synthetic construct
  source 1..120: mol_type = other DNA
aacagttgcagaacagcctggggcacataatgagactgcatttctacaaaatatttaaaaattagtcagccatggtggtgtgcacctatagtgccagctgctcaggagacttgaggcgga

SEQ ID NO: 28117 - DNA, 120 bp, synthetic construct
  source 1..120: mol_type = other DNA
aattataagaagaaataatgtggttaaagaccaggaagtgatctgtgatccaataaatatatttggtctttgcccctagtccctgacaggcaggtcctaaaacgcttgcagtccctcagt

SEQ ID NO: 28118 - DNA, 120 bp, synthetic construct; identical to SEQ ID NO: 8031
  source 1..120: mol_type = other DNA

SEQ ID NO: 28119 - DNA, 120 bp, synthetic construct
  source 1..120: mol_type = other DNA
acagaggcttctgcgcttatatctttctgtaaggcagacacccttgtttctaggagggacctagggtggactgtggattctttctctggggcaaataaaaatgtagaatcagaaaattca

SEQ ID NO: 28120 - DNA, 120 bp, synthetic construct
  source 1..120: mol_type = other DNA
cctgggataatctcctattccttggaaagttccagtatctgagggaggaacagtgacttctggtcctgacctgagtggagaccgagggactcagaagagctggaatcagacccccacaca

SEQ ID NO: 28121 - DNA, 120 bp, synthetic construct
  source 1..120: mol_type = other DNA
tcatggaaaaactgcctttcttttgtttctaaacaaatacctgcaaagacaaaagaccacataaatccccaggtgcacaactttttcagatttaaagaaaaaacaacccccgtctttccc

SEQ ID NO: 28122 - DNA, 120 bp, synthetic construct; identical to SEQ ID NO: 8032
  source 1..120: mol_type = other DNA

SEQ ID NO: 28123 - DNA, 120 bp, synthetic construct
  source 1..120: mol_type = other DNA
ttccacctttcccaacctgtgtcaggtccttttacctggatactcatgatgcggcctcagttctcacttccattgggtgttgggttcctagatcagccaatcagtgtcgccgcggttcct

SEQ ID NO: 28124 - DNA, 120 bp, synthetic construct
  source 1..120: mol_type = other DNA
ctgggcaggtgagtgcggggtcgggagggaaaaagcctctgcgggaaggagcgaggggcccgcccggaggagtaaatctgcacatatatttaattacagattacaattacaatcaaggca

SEQ ID NO: 28125 - DNA, 120 bp, synthetic construct
  source 1..120: mol_type = other DNA
aggagagaaggtgttttggatgcattctagaacacaggtaatctaaggagagttgatcaaggccgtggaagagtcctccagccactattggccatcaaaggagtcctctgtgtcccagga

SEQ ID NO: 28126 - DNA, 120 bp, synthetic construct; identical to SEQ ID NO: 8033
  source 1..120: mol_type = other DNA

SEQ ID NO: 28127 - DNA, 120 bp, synthetic construct
  source 1..120: mol_type = other DNA
actcctcttctcacccgctggtctctggacacatactgtccaattcccctgtggcagctgtaatgtgtagttcaatgggcactcatttgtccccttttaagggtaccctcctttagaatc

SEQ ID NO: 28128 - DNA, 120 bp, synthetic construct
  source 1..120: mol_type = other DNA
cgtgttcttcctactgagattacagaactgtagagatgtctttgatttttaaaatgcaccatgtcctgaaagatggcaccctcccacccgcagagtgcttcctgcaagctggcgttgagc

SEQ ID NO: 28129 - DNA, 120 bp, synthetic construct
  source 1..120: mol_type = other DNA
gggtcccccacgaagatactgcacggagagcagtgccaagcctgtggatcaggaatatcaacagcccccagagagtggtgctggctgagggtctgagagcaggacaggaaaacccaccta

SEQ ID NO: 28130 - DNA, 120 bp, synthetic construct; identical to SEQ ID NO: 8034
  source 1..120: mol_type = other DNA

SEQ ID NO: 28131 - DNA, 120 bp, synthetic construct
  source 1..120: mol_type = other DNA
gcttggttgttcagggccatttcaggtttgggtgttttctggggatgttaacatgggattcaggctcaactcacaagaaacttttccatctcatgatggatgctgttgggcatgtccaat

SEQ ID NO: 28132 - DNA, 120 bp, synthetic construct
  source 1..120: mol_type = other DNA
cattctatcttatcagggcctacagtaacatgccaaaagttgcttccaacatatttctctgctttggatggggcatatttctgtgctgtggatgacatggccttactccagaatcccagg

SEQ ID NO: 28133 - DNA, 120 bp, synthetic construct
  source 1..120: mol_type = other DNA
gctgcagtgtcctttcctgtggaggctccactcaaagctggcatcctcctatgtcacctagagtgtgggtcaaagcaatacacctacatgtagaatgtgatgtcagaactcaaacaggct

SEQ ID NO: 28134 - DNA, 120 bp, synthetic construct
  source 1..120: mol_type = other DNA
gatgcccctaaccactagacctgtaaaacttcactgcagtggccacttctgaatctctgtaaggtttatttatcttcaccctctggagagaagatgttttaccaaagcctctagtgtacc

SEQ ID NO: 28135 - DNA, 120 bp, synthetic construct; identical to SEQ ID NO: 8035
  source 1..120: mol_type = other DNA

SEQ ID NO: 28136 - DNA, 120 bp, synthetic construct
  source 1..120: mol_type = other DNA
gtttttggttttggttttgtttttgttttgtttttggacagagtttcactctttttgcccaggctggagtgcgatggcatgatctcagctcaccgcaatgtccgcctcccaggttcaagt

SEQ ID NO: 28137 - DNA, 120 bp, synthetic construct
  source 1..120: mol_type = other DNA
tcccagcctcaggtgatccgccctcctctgcctcccaaagtgctgggattacaggcatgagccaccacacccgggctatatccacttctaattggaatggaagggaatgcactcaccaca

SEQ ID NO: 28138 - DNA, 120 bp, synthetic construct
  source 1..120: mol_type = other DNA
aggactcctacttggtcacatctggagtaatcccattcattccttagtaatcccattcattccttaggctccatcaggcttatttgctaaattacatggagataataggcaaccccaaca

SEQ ID NO: 28139 - DNA, 120 bp, synthetic construct; identical to SEQ ID NO: 8036
  source 1..120: mol_type = other DNA

SEQ ID NO: 28140 - DNA, 120 bp, synthetic construct
  source 1..120: mol_type = other DNA
ctctgggcatcaatgtcatctcacacccaaagtcagtactcccccaagttctccctatttccctttcccagggtacagtctctaaagtaaatggctgtaggtccctttgcacaatggctc

SEQ ID NO: 28141 - DNA, 120 bp, synthetic construct
  source 1..120: mol_type = other DNA
aatggatcatgattttgtattggttcaaacaccctcagcctcctgctcctcaattcttgctttcttatcatagataccaagcagtgctcttgctggctgcccttctgttctgaccctgga

SEQ ID NO: 28142 - DNA, 120 bp, synthetic construct
  source 1..120: mol_type = other DNA
tctctatctcttcagggccacaccctctccgtggatattaatgagcccaactctgggacatcttttcctaccatcaccctcagccttcagagaacaatacaatgaaacttcttagtgatg

SEQ ID NO: 28143 - DNA, 120 bp, synthetic construct; identical to SEQ ID NO: 8037
  source 1..120: mol_type = other DNA

SEQ ID NO: 28144 - DNA, 120 bp, synthetic construct
  source 1..120: mol_type = other DNA
catgggggcaggtctttcccatgctgttctcatgatagtgaataagtctcatgagatctgatggttttaaaaggagaaatccctttcgcttggttctcattcttctcttatctgctgcca

SEQ ID NO: 28145 - DNA, 120 bp, synthetic construct
  source 1..120: mol_type = other DNA
catgaaatggactaatacatcatgccttgagaaagtgttcccaagtcaaaggatttttatctatctagcttgaaattctgtccctttgatcaaatgccctcaaattccaatcccagaagt

SEQ ID NO: 28146 - DNA, 120 bp, synthetic construct
  source 1..120: mol_type = other DNA
ttactggaaaaggcgagccttctctgcatgcccagagggtactggagggcacccatctgataatgctgtcctagtttgcagaatctcatgtttccccaccagggccctgattttccacaa

SEQ ID NO: 28147 - DNA, 120 bp, synthetic construct; identical to SEQ ID NO: 8038
  source 1..120: mol_type = other DNA

SEQ ID NO: 28148 - DNA, 120 bp, synthetic construct
  source 1..120: mol_type = other DNA
tatcacaccacctgccatagcacccggtaaccagggcatcttctcaggtcggtgctggggatatccacagcagctcagctgcaccttgtgccatggactttctctgtccccaaccaacgt

SEQ ID NO: 28149 - DNA, 120 bp, synthetic construct
  source 1..120: mol_type = other DNA
tgcaatacagaattaaatgtgccaggatttattaggggaaatagccatgaaagaaattggggagcaagacagaaaagactgggaaagccataagactgtgatgcaagtggcttttttatt

SEQ ID NO: 28150 - DNA, 120 bp, synthetic construct
  source 1..120: mol_type = other DNA
tttgtctttgtagtagaggcgggttttcaccatgttagctaggccggtctcaaactcctgacctcatgtgatctgcccaccttggcctcccaaagtgctgggattacaggcgtgagccac

SEQ ID NO: 28151 - DNA, 120 bp, synthetic construct; identical to SEQ ID NO: 8039
  source 1..120: mol_type = other DNA

SEQ ID NO: 28152 - DNA, 120 bp, synthetic construct
  source 1..120: mol_type = other DNA
agagaaaaaaaggtatgaactgatgaactgatacctttaagtagatgagaaggatgatgtttgggacaccagtagagggactgcctctggctgggagcgggaaggttaacccacaacaac

SEQ ID NO: 28153 - DNA, 120 bp, synthetic construct
  source 1..120: mol_type = other DNA
gctgaagtaagaatgcagatagaaggttggatgtgtgagcagagagaaggtgtgtgagagtcacccagaccagtaggaggctgagggtgagccatgcttggagagggtgattgctggtcg

SEQ ID NO: 28154 - DNA, 120 bp, synthetic construct
  source 1..120: mol_type = other DNA
tccaccagctgtgtagttttgccaaacaagtatggcaacgcaagggaggggcaagggagggatggaaattatttacaatagaattcaaaatggctgaagagggaggagaggacatcaagg

SEQ ID NO: 28155 - DNA, 120 bp, synthetic construct; identical to SEQ ID NO: 8040
  source 1..120: mol_type = other DNA

SEQ ID NO: 28156 - DNA, 120 bp, synthetic construct
  source 1..120: mol_type = other DNA
atgagacctaggactctttaggggagaacaacaacaaagcaacaggatcctggtgtcagggacagaccatggccatggcgggatgatagcagctctcctacaaaataatgcttatatgac

SEQ ID NO: 28157 - DNA, 120 bp, synthetic construct
  source 1..120: mol_type = other DNA
attaacacaaaacaagtggctttaaacagcatctctttatcatgtcacagtcatgtgtgttacaacttcaacagtctcatggggctaaaatcaaggtaaggggaggtctgtgttccttct

SEQ ID NO: 28158 - DNA, 120 bp, synthetic construct
  source 1..120: mol_type = other DNA
cctagagccctctctcagttcctcacacatatcccatgcaacatatccaatcctcctgcttggaacctctgacctcccccttctgcggtgtctcctctgccttcctcctctgcagcatct

SEQ ID NO: 28159 - DNA, 120 bp, synthetic construct; identical to SEQ ID NO: 8041
  source 1..120: mol_type = other DNA

SEQ ID NO: 28160 - DNA, 120 bp, synthetic construct
  source 1..120: mol_type = other DNA
aatggctgcaatgaggggagtggggcctgaatctgatgacagctttgggggcttaggaaggaaggaggcagaaaggtctgagaaccacagtgaggagtgaggatgccaccccacctctgg

SEQ ID NO: 28161 - DNA, 120 bp, synthetic construct
  source 1..120: mol_type = other DNA
gatgtggaggttttgctgatcatgggctgagaattccaaggggcacagcgggaagacttctggatttgggaatggggtatggggagacaaaataggggtgtgcagagccttgtggggatg

SEQ ID NO: 28162 - DNA, 120 bp, synthetic construct
  source 1..120: mol_type = other DNA
gaggctcaggggtggctttcacctgggctctgtccatggaggtgaggacagggagatagttgggcctcagtgctgtgtggaccctttcttgtctccctgatgactggatggagggcctgg

SEQ ID NO: 28163 - DNA, 120 bp, synthetic construct; identical to SEQ ID NO: 8042
  source 1..120: mol_type = other DNA

SEQ ID NO: 28164 - DNA, 120 bp, synthetic construct
  source 1..120: mol_type = other DNA
gtagtttgggcctcttatattctaatgattaagactttaagctgtgtacacattgcaatgcaagtatgcgtcatgcataaccctagcactaagagtcaagagggaaagtacctctcccct

SEQ ID NO: 28165 - DNA, 120 bp, synthetic construct
  source 1..120: mol_type = other DNA
aacattttacaaagtttctgtgttctttttccactgagtgggaacaagtcagctagtgaggaacatgaggcctttggcctcatctaaagttactttagctaccaattgtgagaagcactg

SEQ ID NO: 28166 - DNA, 120 bp, synthetic construct
  source 1..120: mol_type = other DNA
ggcagttttgccttctaagacattggtttttctctgaggacctccctgttttcagatgatcaaaactggggccatccactcccttctgaaccacctctgcccagtggcctgtggctgtgc

SEQ ID NO: 28167 - DNA, 120 bp, synthetic construct
  source 1..120: mol_type = other DNA
aggctcactagtccaacagagcttgagccctgtaccagtgtcatattccaggagccagagttacaagggatacaaagtgcccagacctaccagagaaggcaaacccctacagcatgcagg

SEQ ID NO: 28168 - DNA, 120 bp, synthetic construct; identical to SEQ ID NO: 8043
  source 1..120: mol_type = other DNA

SEQ ID NO: 28169 - DNA, 120 bp, synthetic construct
  source 1..120: mol_type = other DNA
tcgctgtggcaatttcttaaaataacacaacgaagtttgcagcaagattattctcctcacttggacacttagaggccattgtagggttactaatcggcctgccttcaatatttttgtgtc

SEQ ID NO: 28170 - DNA, 120 bp, synthetic construct
  source 1..120: mol_type = other DNA
atggtgtcccaaaacagttacgagagtaacttcaaagatcactgaccacaggtcaccatacaggtgtaataatgaacaaggttgaaatacttcaagaattaccaaaatgtgacacagaga

SEQ ID NO: 28171 - DNA, 120 bp, synthetic construct
  source 1..120: mol_type = other DNA
aagaaaaagcaaaggaaaaaatgcagtgtcagcaaacagtaataaaggaaagcacagtggaaggtgcacctgcaaaggggaaatcagcactgaagcaaagtcaggaaaagctttcaagtc

SEQ ID NO: 28172 - DNA, 120 bp, synthetic construct; identical to SEQ ID NO: 8044
  source 1..120: mol_type = other DNA

SEQ ID NO: 28173 - DNA, 120 bp, synthetic construct
  source 1..120: mol_type = other DNA
ggtggcagagtaggatgggggcaagggctgtggcagggcctggcactgaagtgaggccaaagcctggagagagtggctcctggtggcttttgggcagctcacgcaactccctgcctcacc

SEQ ID NO: 28174 - DNA, 120 bp, synthetic construct
  source 1..120: mol_type = other DNA
gtctgcaagttgaggtgcaagaaagccagtgatggatcagtccaagtcccaaaacctcaaaagtagggaagctgacagtgcagccttcagtctgtggccaaaggtgtttggctgcagatt

SEQ ID NO: 28175 - DNA, 120 bp, synthetic construct
  source 1..120: mol_type = other DNA
aggatgccttctgcctttctagctgggcctcaggtcagggctttgagcctgagcagggagaggagatggaagggagatggccttggagcaaacgtctgcccctgccagtgcatcccgtag

SEQ ID NO: 28176 - DNA, 120 bp, synthetic construct; identical to SEQ ID NO: 8045
  source 1..120: mol_type = other DNA

SEQ ID NO: 28177 - DNA, 120 bp, synthetic construct
  source 1..120: mol_type = other DNA
aacttagtgactatctagatttaagtctatcaaacagaagggaaacacaactaggattcctgtagtgtagggaagggaaatgcctagcccagctctctgattccccttttaatgggtttg

SEQ ID NO: 28178 - DNA, 120 bp, synthetic construct
  source 1..120: mol_type = other DNA
acgctgctgataaagacatactgggaagaaaaagaggtttaattggacttacaattccacatggctgaggaggcctcagaatcatggcggcaggtgaaaggcacttcttacatggcagtg

SEQ ID NO: 28179 - DNA, 120 bp, synthetic construct
  source 1..120: mol_type = other DNA
gggtccctcccacaacatgtgggaattctgggagataccattcaagttgagattcgaatggggacacagccaaaccgtatcactggatgagagcaattagattgatgtcatgatgtatat

SEQ ID NO: 28180 - DNA, 120 bp, synthetic construct; identical to SEQ ID NO: 8046
  source 1..120: mol_type = other DNA

SEQ ID NO: 28181 - DNA, 120 bp, synthetic construct
  source 1..120: mol_type = other DNA
ccagctgcccaacaacttccctttgctgatctgagccagactctgcttttatggcttacacccaaataattcaagttattttaaaaaaataataataaatcaagttattcatttatgagt

SEQ ID NO: 28182 - DNA, 120 bp, synthetic construct
  source 1..120: mol_type = other DNA
ctggtatatttaagtaaattccctgaagaatgtgaacaccgtaagcaggtgagtgcattattctctgcttcccctccacagagctgtggttcactctcctccatcctgccccctgcactg

SEQ ID NO: 28183 - DNA, 120 bp, synthetic construct
  source 1..120: mol_type = other DNA
acttccctcactccctttggacagctctgcggttctgtaatcattgccgtcctctacctacagccacaggcctgcagggctgcccctagtgaaagctacagatttccgtgagttctggaa

SEQ ID NO: 28184 - DNA, 120 bp, synthetic construct; identical to SEQ ID NO: 8047
  source 1..120: mol_type = other DNA

SEQ ID NO: 28185 - DNA, 120 bp, synthetic construct
  source 1..120: mol_type = other DNA
agcccttaacttgaaaatctgacagtataataaaagaaaaaaatagaagtattctggaaatggaagaggaaagaaggctaaggtggaaatcatcaatctgtgtcatctgagaagccccac

SEQ ID NO: 28186 - DNA, 120 bp, synthetic construct
  source 1..120: mol_type = other DNA
acggcgggatggtagtggctctcctatgaaataatgctcataaacatcccttgtgagaaggatcagatcaacatataaaaatatgccaaataaagtgaaactcaaggcaggagtgggact

SEQ ID NO: 28187 - DNA, 120 bp, synthetic construct
  source 1..120: mol_type = other DNA
cacccgcccctaaagaccaggcacaaatcccagcacatggagggatccagacaaatacacaagagatgaccacagcaggagctttactgggcacagagcgaggccacacaccactcagct

SEQ ID NO: 28188 - DNA, 120 bp, synthetic construct; identical to SEQ ID NO: 8048
  source 1..120: mol_type = other DNA

SEQ ID NO: 28189 - DNA, 120 bp, synthetic construct
  source 1..120: mol_type = other DNA
cagctgggggaagaaaagtcagggtccacagagatataagggggctgagaactatctgtgtcttgctggtctgcacaaggcagctctcaaactgtggagaacatggtaatgaccagattc

SEQ ID NO: 28190 - DNA, 120 bp, synthetic construct
  source 1..120: mol_type = other DNA
tatcaggccccaaggaagctgtgagcacgtctgcctgggaccctgtcaccatctggagaatgacaataaagaggacccagcagcctgcaggaggagactgtatttgaggcaggaccatgg

SEQ ID NO: 28191 - DNA, 120 bp, synthetic construct
  source 1..120: mol_type = other DNA
ggtgatatttctagagtacacccctgtgctgaaattcttatgaggaaagagacctgatgagatgctatggtgaagaggggccataagggtcttgaataccaagttaattttgctaccagc

SEQ ID NO: 28192 - DNA, 120 bp, synthetic construct; identical to SEQ ID NO: 8049
  source 1..120: mol_type = other DNA

SEQ ID NO: 28193 - DNA, 120 bp, synthetic construct
  source 1..120: mol_type = other DNA
ttttagtaaaggtatttcagggtatatgagaatcagattcctagggccctgggtacctcatcttgctgtttaaagtcctcatggaggatcagtggagtgcagagcccagaaatcatcctg

SEQ ID NO: 28194 - DNA, 120 bp, synthetic construct
  source 1..120: mol_type = other DNA
gccttcctggctgctaatattccagttcccagcagcctcctctctcacccttcacctcttctgactgggtgcgaatggtaactagaccaggcagtgccctccttgtcagtctgcctgtct

SEQ ID NO: 28195 - DNA, 120 bp, synthetic construct
  source 1..120: mol_type = other DNA
acttgtgaaagtcagttttccctgactaaagaaacaggacatttaccctgttagaagttgatgtctgccagagacctccacctgggaaatgctggttcatggcagggtctctcttttagt

SEQ ID NO: 28196 - DNA, 120 bp, synthetic construct; identical to SEQ ID NO: 8050
  source 1..120: mol_type = other DNA

SEQ ID NO: 28197 - DNA, 120 bp, synthetic construct
  source 1..120: mol_type = other DNA
attttactcatggcatagatagatactatccaacaattcgtttttattacctctacattacactgcttaggtagccactactggtacctctgcattttctttcttgtatgtgacattaac

SEQ ID NO: 28198 - DNA, 120 bp, synthetic construct
  source 1..120: mol_type = other DNA
caatgggaaaaggaggaaaacatacatatttgaaaaatctggttgagcaaatggatgggctaacaaagcagtgaagatttgcctggccaggaaccaggagaggggagaaatccagaagag

SEQ ID NO: 28199 - DNA, 120 bp, synthetic construct
  source 1..120: mol_type = other DNA
ctagaattcagtgctcatttagaccgggctaagaccctcacactcaatggctggaggatccaagcttatggcatgactgcctctggagcatttcatgctagagagatcccaacaggtgta

SEQ ID NO: 28200 - DNA, 120 bp, synthetic construct; identical to SEQ ID NO: 8051
  source 1..120: mol_type = other DNA

SEQ ID NO: 28201 - DNA, 120 bp, synthetic construct
  source 1..120: mol_type = other DNA
tgccgctcgttgccatcaggcacctcaggagctggacatggtattcattataatttctgatgaggaactagagaggtctcatagcatatagaccttgatcaaattgggtcatggtggagt

SEQ ID NO: 28202 - DNA, 120 bp, synthetic construct
  source 1..120: mol_type = other DNA
ctcagtagtcattcctttatgctgttgctgtgtttgtactgtgataactggtgcttgaagggaggacatatagttacatgttgcgggaaaacacatgtcattagaaaacttggcatgatt

SEQ ID NO: 28203 - DNA, 120 bp, synthetic construct
  source 1..120: mol_type = other DNA
ggaattcagagaatcagtggcagcctctgtctctccaggccccaaccctgcaggtttaaggaatggacttaggtctctggcactttgttctcaacacacattttccttcactcattcaga

SEQ ID NO: 28204 - DNA, 120 bp, synthetic construct; identical to SEQ ID NO: 8052
  source 1..120: mol_type = other DNA

SEQ ID NO: 28205 - DNA, 120 bp, synthetic construct
  source 1..120: mol_type = other DNA
ggctcactgaaagctccacctcctgggttcatgccattctcctgcctcagcctaccgagtagctgggactacaggcgctcaccaccacactcggctaattttttgtatttttagtggaga

SEQ ID NO: 28206 - DNA, 120 bp, synthetic construct
  source 1..120: mol_type = other DNA
aaaaatttaagtgatggcctttactcctagacagggcttttttaggaacatgcaccttaaaagtaggaggaaaacataatgccagcaacaccctgcctaaaagcccctttagtgatgata

SEQ ID NO: 28207 - DNA, 120 bp, synthetic construct
  source 1..120: mol_type = other DNA
tacctcaatatctcaaatcagttaaatatatcttctgatcatataccagtgtggacccacatgttttgctccaagtgaaaatgaaaaggaatgagaacatctccacctttgtgtggtgac

SEQ ID NO: 28208 - DNA, 120 bp, synthetic construct
  source 1..120: mol_type = other DNA
aaaaatctcattttcatatgtagggcagggtagaaaaggtgatatctctgttttaatttgctaagacttccataataaagtggcacagactgggtaagttaaacagtagaaatgtattat

SEQ ID NO: 28209 - DNA, 120 bp, synthetic construct; identical to SEQ ID NO: 8053
  source 1..120: mol_type = other DNA

SEQ ID NO: 28210 - DNA, 120 bp, synthetic construct
  source 1..120: mol_type = other DNA
tgcgccatccttggcggtgcatattataagaaataaaagagaatacaaccctttggctggactctgttgatattttgaaatgttggtcttgcaataagaacaccaccaaaggccaggcgc

SEQ ID NO: 28211 - DNA, 120 bp, synthetic construct
  source 1..120: mol_type = other DNA
agaaaaattagccgggcgtggtggtggatgcctgtagtcccagctgctcgggaggctgaggcgggagaatggtgtgaacccaggaggcagagcttgcagtgagccaagatctcgccactg

SEQ ID NO: 28212 - DNA, 120 bp, synthetic construct
  source 1..120: mol_type = other DNA
ggccgccccagggcagcaagacccagtgctatgtagttctccaaagtcctatttactttagtgattctgattctgtatttttaactgggaaaaggattctctttcaggaaagcaaccact

SEQ ID NO: 28213 - DNA, 120 bp, synthetic construct
  source 1..120: mol_type = other DNA
ttattgtactgagcttgttggtattttaataaaaattattggcatataatatttatacatactttggggtacacataatattttcatgcatgtgtagaatgtgaaatgatcgagtcagga

SEQ ID NO: 28214 - DNA, 120 bp, synthetic construct; identical to SEQ ID NO: 8054
  source 1..120: mol_type = other DNA

SEQ ID NO: 28215 - DNA, 120 bp, synthetic construct
  source 1..120: mol_type = other DNA
ccatgttgctgctagttattatgaggtagttctagctggaagaatagagaattaaaagaaatctttgtgaagcccctacccaggtttgtcaatttgtaacattttaatattattggctat

SEQ ID NO: 28216 - DNA, 120 bp, synthetic construct
  source 1..120: mol_type = other DNA
tgaaacacatacagtacagtactctatgtactgtacagtactactgtactgagtactggactgccagtggggagtggcggatgtcttgaatttggtgaatgcctttatattgctacaaag

SEQ ID NO: 28217 - DNA, 120 bp, synthetic construct
  source 1..120: mol_type = other DNA
tgcctcagcctcccaagtagctgggactacaggagcccaccaccacgaccggctaatttttttgtatttttagtacagacggggtttcactgtgttagccagggtggtctcggtctcctg

SEQ ID NO: 28218 - DNA, 120 bp, synthetic construct; identical to SEQ ID NO: 8055
  source 1..120: mol_type = other DNA

SEQ ID NO: 28219 - DNA, 120 bp, synthetic construct
  source 1..120: mol_type = other DNA
gatgtaggaatgggattactgtgcttttaccatgtgatgttataggatgtcaaattgttctctgaagaggttgtatcaactcccccctttaaaatcttctttgacattttacaggtcaag

SEQ ID NO: 28220 - DNA, 120 bp, synthetic construct
  source 1..120: mol_type = other DNA
ggttttactgcctcccaatcactctagtgtcctccactcccaggattttaaatatcgtctagacacagatggctcccaaatgtatatctctacatatttctataatcaaaaaactaatgg

SEQ ID NO: 28221 - DNA, 120 bp, synthetic construct
  source 1..120: mol_type = other DNA
tgtctaaattaaaaatgcatacacccagtagtcccacttctagaaatgtgtccaaaaatagacctgcattcctgaaaaatgactgtattcagaattatatgatgcaaccctgtttgtaaa

SEQ ID NO: 28222 - DNA, 120 bp, synthetic construct; identical to SEQ ID NO: 8056
  source 1..120: mol_type = other DNA

SEQ ID NO: 28223 - DNA, 120 bp, synthetic construct
  source 1..120: mol_type = other DNA
agatatatatacacatttatatttgcttgcatatgcataaaatatatttggaagaataagcaagaagatatccctggttgcctgttggggatgagacaaggtaagaaagagacattttac

SEQ ID NO: 28224 - DNA, 120 bp, synthetic construct
  source 1..120: mol_type = other DNA
aaaaaattcaaaatgaaaaaccttttaaaaactaatagaatttttttacctttattaaaataaattttaaaaattttctaaatattatattattcctttaacaaggaggtttactgccat

SEQ ID NO: 28225 - DNA, 120 bp, synthetic construct
  source 1..120: mol_type = other DNA
cagcatgattaattaaatgcaatttgtttggtgaaggaaattttgttcaaatcttggtctaagtgggaaagggattctaggggatccagtgcagcagttatgggtttcagtatgctcacg

SEQ ID NO: 28226 - DNA, 120 bp, synthetic construct
  source 1..120: mol_type = other DNA
atttgccaaatgttcaaggtcctattaatggcccatctgagtacttgtcatacgcggtcaccctatctttggatcagaaggtacactcagagctcctagtgtcacatcccaggcccaacc

SEQ ID NO: 28227 - DNA, 120 bp, synthetic construct; identical to SEQ ID NO: 8057
  source 1..120: mol_type = other DNA

SEQ ID NO: 28228 - DNA, 120 bp, synthetic construct
  source 1..120: mol_type = other DNA
gcatcacctgggaacttagatatgcaatcttcagggcctggcctggacctactgtatcagaaactctgcatttaacaagcccccagcagaattctgcttttcaaatcagatctctctctc

SEQ ID NO: 28229 - DNA, 120 bp, synthetic construct
  source 1..120: mol_type = other DNA
tcattcttggcctggcccagggaaagatgttcacttcctggattctgagcaaagctctcctatcctgggtgcctgtggggctcccacttacaccacaaaacaaagctcaaataatatttt

SEQ ID NO: 28230 - DNA, 120 bp, synthetic construct
  source 1..120: mol_type = other DNA
gattctgagcaaagctctcctatcctgggtgcctgtggggctcccacttacaccacaaaacaaagctcaaataatatttttttcttttatgagatttttggtattccttcattagtcaga

SEQ ID NO: 28231 - DNA, 120 bp, synthetic construct
  source 1..120: mol_type = other DNA
ggagttctttgtctcaccaccaagagaattaaggagcgtggatacaaagggtgaggttggagcaaaagtttaataagcaaaagaagaaagctctcccctgcagagaggggacttggaaga

SEQ ID NO: 28232 - DNA, 120 bp, synthetic construct; identical to SEQ ID NO: 8058
  source 1..120: mol_type = other DNA

SEQ ID NO: 28233 - DNA, 120 bp, synthetic construct
  source 1..120: mol_type = other DNA
cagtttcttccttttttctctctcaatttgtgttatgatttccttactgatctctgcctgagcaagactgggcacgccttgagggcaaggagggtttatttgctcttacctcagttccag

SEQ ID NO: 28234 - DNA, 120 bp, synthetic construct
  source 1..120: mol_type = other DNA
gcagacaggaaagcagaatgaaaacccacaggccaaaaatggctgggaaaagattttccaaatcctagtgctgggcacagggcccactgaaattcactttcggaaacttcccatctgtct

SEQ ID NO: 28235 - DNA, 120 bp, synthetic construct
  source 1..120: mol_type = other DNA
aaattctgaggctaatttcagtggagttagaggcttatcccttaggagtggcaatggctggctttaagattcgagaagtagtgtttacatctcaaaagagaagaccgctccaccagaaat

SEQ ID NO: 28236 - DNA, 120 bp, synthetic construct; identical to SEQ ID NO: 8059
  source 1..120: mol_type = other DNA

SEQ ID NO: 28237 - DNA, 120 bp, synthetic construct
  source 1..120: mol_type = other DNA
tctcagggactcagatgcccaaactatgaaaatgagggaatctatcccactctctcaggtgtggtgagattcctattatatgactatcggtcatctatacatggattgtactctcagagt

SEQ ID NO: 28238 - DNA, 120 bp, synthetic construct
  source 1..120: mol_type = other DNA
aaggtgccatcaacaggaatttctaccctgtggagtctagaggagactttccttgaagctgagttgggaatggacatttggacttttttttttaagagttagtaactccgtggagaacca

SEQ ID NO: 28239 - DNA, 120 bp, synthetic construct
  source 1..120: mol_type = other DNA
aaagattaaggctggggtaaagctggaacattactaggcgggaaggaacatctgaaacatttgctgaaatggagttgaccctttacctggccatagatttgttgcctcacgatttcatta

SEQ ID NO: 28240 - DNA, 120 bp, synthetic construct; identical to SEQ ID NO: 8060
  source 1..120: mol_type = other DNA

SEQ ID NO: 28241 - DNA, 120 bp, synthetic construct
  source 1..120: mol_type = other DNA
aacctcacaggcaaatttggtgatctcacctgagctaggaattcggttttttgatgttggttctctttgagccattgtgtgagctttaaaatgtgatgtggagattttgctatactggta

SEQ ID NO: 28242 - DNA, 120 bp, synthetic construct
  source 1..120: mol_type = other DNA
ggagtcaggggctcctccaatctcactctccttcataaaacagtgtcccttaagctttctgggggtgagggccttaacaccgtgctgttctgatgaatataattgtcccagctcccgaaa

SEQ ID NO: 28243 - DNA, 120 bp, synthetic construct
  source 1..120: mol_type = other DNA
gtttatgcccgtaatctcagcactttgggaggctgaggcatgagaattgcttgaagccagaagttcaagaccagcatgggtaacaaagcaagacccagtctctaccaaaaaaaaaaagaa

SEQ ID NO: 28244 - DNA, 120 bp, synthetic construct; identical to SEQ ID NO: 8061
  source 1..120: mol_type = other DNA

SEQ ID NO: 28245 - DNA, 120 bp, synthetic construct
  source 1..120: mol_type = other DNA
agaagtcctctgaagaaggcgggagatactcaggagcggggtccggagagggaaaaggatgaggaagtggagacaaagtggagggggcagggcaagaagggcacatgtgaggaatgggga

SEQ ID NO: 28246 - DNA, 120 bp, synthetic construct
  source 1..120: mol_type = other DNA
aaggacacgtgtgagtctcgtcctaatttgaactcatgagtagcagctgacagccaggacccttgcgtggggcgcgtgacgcccctttgcaaccagggcgttttctgcaccccaccagcc

SEQ ID NO: 28247 - DNA, 120 bp, synthetic construct
  source 1..120: mol_type = other DNA
tccttgactttcctccgctacccggaccccactacagcaaagcacatcctgcacactggcctggactccctttgtaaccacccagtgtgttcaccttgctgactgcctagacaaagccga

SEQ ID NO: 28248 - DNA, 120 bp, synthetic construct; identical to SEQ ID NO: 8062
  source 1..120: mol_type = other DNA

SEQ ID NO: 28249 - DNA, 120 bp, synthetic construct
  source 1..120: mol_type = other DNA
cgaggtcaggagatcgagaccatccttgctaacacggtgaaacccggtctctactaaaaatacaaaaaattagccgggtgtggtggcgggagcctgtagtcccagctactcagtaggctg

SEQ ID NO: 28250 - DNA, 120 bp, synthetic construct
  source 1..120: mol_type = other DNA
aagaaaagaaagaaagaaaaagaaaaaagaaatgcaaaatacatctcaaaaggccgctctgaggttcacaatagtgatgttaccttcaagagtaactggggaagttgcaaatcttatgac

SEQ ID NO: 28251 - DNA, 120 bp, synthetic construct
  source 1..120: mol_type = other DNA
aggctagttcggcctatgcccagaaatgaacaagggcaggttagcggttagaagcaagatagggtgagttaggtttgatatctttcactgtcatcatttccttacttataattttgcaaa

SEQ ID NO: 28252 - DNA, 120 bp, synthetic construct; identical to SEQ ID NO: 8063
  source 1..120: mol_type = other DNA

SEQ ID NO: 28253 - DNA, 120 bp, synthetic construct
  source 1..120: mol_type = other DNA
tgtaaatattgttacacatctctctattccactgaaaacatctctttcaaaggcactttaagaaagattcaatgacatgaaaatatgaaggatcctcttgaaagagtttctggtggtggg

SEQ ID NO: 28254 - DNA, 120 bp, synthetic construct
  source 1..120: mol_type = other DNA
ttattattttaaaattttatttatttttgttttggggacaggttctcctcctgtcacccaggctggattgcaatggcacaatcatagctcactgcagcctggaactccccggctcaagcg

SEQ ID NO: 28255 - DNA, 120 bp, synthetic construct
  source 1..120: mol_type = other DNA
aaagttatcccagtctctgaagtcactgtcaaaactttggtgaggaatcttccaggttttcccctacttaaaatatatattaatattatgtaagtaatattagcggcattttcacccagg

SEQ ID NO: 28256 - DNA, 120 bp, synthetic construct
  source 1..120: mol_type = other DNA
atttttgtattttcagtggagacagggtttcaccatattgaccaggctgatctccaactcctgacctcaggtgatctgcccaccttggccttccaaagttctgggattacaggcgtgagc

SEQ ID NO: 28257 - DNA, 120 bp, synthetic construct; identical to SEQ ID NO: 8064
  source 1..120: mol_type = other DNA

SEQ ID NO: 28258 - DNA, 120 bp, synthetic construct
  source 1..120: mol_type = other DNA
aaaacaaaaaccctgttcttgtgcccaggagacacaccctgacacatctggaggtagagggtcatgctgtctgcaacttaccctcacaggctctgaaataacaataatagcagtatattt

SEQ ID NO: 28259 - DNA, 120 bp, synthetic construct
  source 1..120: mol_type = other DNA
tacgtcttttaaattttatctctcctttattttttctctccccttttcttcctatctcttccctcctttcttaacacgtccccctatccttccctcctttcaccactctctgcacttgat

SEQ ID NO: 28260 - DNA, 120 bp, synthetic construct
  source 1..120: mol_type = other DNA
gctggtcttgtatcatttcagtggtccctcccgtctttgacggggccaaactcggggtgtaaattaggatcctcactgaagcggcgggaccctgagaggctttttcctggccccttagtt

SEQ ID NO: 28261 - DNA, 120 bp, synthetic construct
  source 1..120: mol_type = other DNA
tgaggcgcagttccctactcacccaggtccgaatccaccgcggtgctgtttccagcgagtcagattccagatcgcgctccagcctggactcggaattcctgccccgcgggtctgcatttt

SEQ ID NO: 28262 - DNA, 120 bp, synthetic construct; identical to SEQ ID NO: 8065
  source 1..120: mol_type = other DNA

SEQ ID NO: 28263 - DNA, 120 bp, synthetic construct
  source 1..120: mol_type = other DNA
aaatacaaaattagccgggggtggcgcatgcctgtaatcccagctagtcgggaggctgaggcaggagactcacttgaacccgggaggcggaggttgctgtgagccgagatcgcgccactg

SEQ ID NO: 28264 - DNA, 120 bp, synthetic construct
  source 1..120: mol_type = other DNA
ctctttcttttccggaccctgcagtggcgcctaaagtctgcgaggaggaagtcgcctctgtgctcgtgagtccagggatctaaggcaagtgctgagggagaaaacatagttgatggggca

SEQ ID NO: 28265 - DNA, 120 bp, synthetic construct
  source 1..120: mol_type = other DNA
ccttcttggcctcccctagcccaggggaggactggcttcatgtctccctgaaaccgcttctaaatgccttagaacaaaccttaaatattcattattattattgaactattaaaagtcttt

SEQ ID NO: 28266 - DNA, 120 bp, synthetic construct; identical to SEQ ID NO: 8066
  source 1..120: mol_type = other DNA

SEQ ID NO: 28267 - DNA, 120 bp, synthetic construct
  source 1..120: mol_type = other DNA
agggatgataggggaatagttagtaatgacagggatagttgaacttaaaaaaaaaggttgtgaggccaacaaaaaagaaatggacacagttcctgatcctggagggttcatagtctaatg

SEQ ID NO: 28268 - DNA, 120 bp, synthetic construct
  source 1..120: mol_type = other DNA
tgggaggattgcttgagcccaggcatttgaggctgcagtgagctataatcacaccactgcattccaactgagtgacacagcaagactcctctcttaaaaaaataaaataaagtaaatgaa

SEQ ID NO: 28269 - DNA, 120 bp, synthetic construct
  source 1..120: mol_type = other DNA
tgactacacatcggaatcacgtagggaactttaaaagatactaaggtttaggtccaacctaggtttactgatttaactggttgtggctgtggcctgggaacatggatattaaaaactctc

SEQ ID NO: 28270 - DNA, 120 bp, synthetic construct; identical to SEQ ID NO: 8067
  source 1..120: mol_type = other DNA

SEQ ID NO: 28271 - DNA, 120 bp, synthetic construct
  source 1..120: mol_type = other DNA
tctcagctcactgcaagctccgcctcccgggttgaccccattctcctgcctcagccttctgagcagctgggactacaggtacccgccaccacgcccagctaagttttttgtatttttagt

SEQ ID NO: 28272 - DNA, 120 bp, synthetic construct
  source 1..120: mol_type = other DNA
tcctttttttttttttttaaaggctagtcaagtgaaacagtgggagtgaagatgaaacaaaaacatctataactggttgtgatcaattagttgtaaacaccactgcactcagaccagcct

SEQ ID NO: 28273 - DNA, 120 bp, synthetic construct
  source 1..120: mol_type = other DNA
ccagagcccacgtttactgcaaccctggggaaatgtcaccagagaaatgggggtggtgccagacaatagattgtgggagctatggtttccatggtagagtagaagcatccaccatgtgtg

SEQ ID NO: 28274 - DNA, 120 bp, synthetic construct; identical to SEQ ID NO: 8068
  source 1..120: mol_type = other DNA

SEQ ID NO: 28275 - DNA, 120 bp, synthetic construct
  source 1..120: mol_type = other DNA
gagagcttggtgttgtaatgaaccatggggagccgcctcgttggccctgtgattacccaggaactgaatagagagggggccctgggagacctcagacacttagaggatataagggggtga

SEQ ID NO: 28276 - DNA, 120 bp, synthetic construct
  source 1..120: mol_type = other DNA
ctgagatctggaaacaggtctgcaaatctggtcactggtctcattgcagtaacgctgtgcgcggttgagggagtgtattgggagaaaaaccacgcgttgtctgtcccggaaggaacaagc

SEQ ID NO: 28277 - DNA, 120 bp, synthetic construct
  source 1..120: mol_type = other DNA
cgtgctcataagtttggagctgtactctcagctactcggggctggtccttgattttggctgcgctcgcgcacgctcccccttttctggccgccaggtcccgccttctaaatttccccagg

SEQ ID NO: 28278 - DNA, 120 bp, synthetic construct; identical to SEQ ID NO: 8069
  source 1..120: mol_type = other DNA

SEQ ID NO: 28279 - DNA, 120 bp, synthetic construct
  source 1..120: mol_type = other DNA
tcagggcggggctcaggtgtgctgtctggagtgcagggagctggacgccgcctgttcccgccacacctcagccctgctttcccatctcccgtctcttttttttttttttttttttttttt

SEQ ID NO: 28280 - DNA, 120 bp, synthetic construct
  source 1..120: mol_type = other DNA
ctagtagctgggactacaggcgcccgccaccacgcccggctaattttttgtgtttttagtagagatggggtttcaccgtgttagtcaggatggtctcgatctcctgacctcgtgatccgc

SEQ ID NO: 28281 - DNA, 120 bp, synthetic construct
  source 1..120: mol_type = other DNA
tgctctcctcgcctctcctccgtctcctctcacttttcggacaaaccagtccttctgaggcccctgggttcccgggctgctcctgtgaatggcattggaaggccgttccagcgcggccgc

SEQ ID NO: 28282 - DNA, 120 bp, synthetic construct; identical to SEQ ID NO: 8070
  source 1..120: mol_type = other DNA

SEQ ID NO: 28283 - DNA, 120 bp, synthetic construct
  source 1..120: mol_type = other DNA
atcttacggcgccctgggtcctgttgctctcccagctccctgctaccccttcctgtgtgctgttctctgatccatttctagggtgtcctctgccttcatcccccgcccccgccactgaag

SEQ ID NO: 28284 - DNA, 120 bp, synthetic construct
  source 1..120: mol_type = other DNA
ggggtcttccctccatcccactcccctccagacccccaaggagagccctgatgctaatggcagttgggccttaggcagggcgcagggcagcgcagatgccccctcccctccagtgcaggt

SEQ ID NO: 28285 - DNA, 120 bp, synthetic construct
  source 1..120: mol_type = other DNA
gcccctctccaccttgggaccttgtgctgctcctatctcttgcccagctgcctggggccctcagcaagttctcatctttcagtgggaaagtgggagtgctggagcatatgacagtgctga

SEQ ID NO: 28286 - DNA, 120 bp, synthetic construct; identical to SEQ ID NO: 8071
  source 1..120: mol_type = other DNA

SEQ ID NO: 28287 - DNA, 120 bp, synthetic construct
  source 1..120: mol_type = other DNA
gcacccccaccccttgctttgtttttaatttttaacttttgtttgggtacgtagtagatatgtatgtatatatttatggggtacatgggatattttgacacaggcctacaatatgtcata

SEQ ID NO: 28288 - DNA, 120 bp, synthetic construct
  source 1..120: mol_type = other DNA
tactcaccctgctgtgctatctactagatcttattcattctaactatatttttgtacccattaaccatccgcactcccccactccccactacccttctcagcctctggtagtcgtcattc

SEQ ID NO: 28289 - DNA, 120 bp, synthetic construct
  source 1..120: mol_type = other DNA
tctttgcaaatgacatgatggctgaatagtactccacatacacgtgtgcaccacattttctttctccattcgtctgttgatggacacttaggtcgcttgcagatcttggctattttgaat

SEQ ID NO: 28290 - DNA, 120 bp, synthetic construct; identical to SEQ ID NO: 8072
  source 1..120: mol_type = other DNA

SEQ ID NO: 28291 - DNA, 120 bp, synthetic construct
  source 1..120: mol_type = other DNA
ttttgagaaatgactattcagatcttttgctcatttttaagttggattattagatatttttcctatagagttgtttgagatccttatatgttttggttactaatcctttgtcagatgaat

SEQ ID NO: 28292 - DNA, 120 bp, synthetic construct
  source 1..120: mol_type = other DNA
ctctgcttgtggggtattacttaaaaaatctttgccagtccaatatcttagagagtttccccaatgttttctttcatagttttcatagtttgaggtcatagatttacatctttaatcctt

SEQ ID NO: 28293 - DNA, 120 bp, synthetic construct
  source 1..120: mol_type = other DNA
tggtaactttgttagaaataacttcactgtagatatatggatttgtttctgggttctctattctgtttcattggtccgtgtgtctgtttttatgccactaccgtgctgttttgattactc

SEQ ID NO: 28294 - DNA, 120 bp, synthetic construct; identical to SEQ ID NO: 8073
  source 1..120: mol_type = other DNA

SEQ ID NO: 28295 - DNA, 120 bp, synthetic construct
  source 1..120: mol_type = other DNA
aggcgtggtggcatatgcctgtaatcccagctactcaggaaagctgaggcaggagaatcgcttgaacccaggaggcagaggttgtggtgagctgagattgcaccattgcactccagcctg

SEQ ID NO: 28296 - DNA, 120 bp, synthetic construct
  source 1..120: mol_type = other DNA
atagtttttattggagagatctttcacttcttcagttaagtctattcctaggtattttattttatttgtagctaatgaaaatgggattcgtttcttgatttctttttcagattatttgct

SEQ ID NO: 28297 - DNA, 120 bp, synthetic construct
  source 1..120: mol_type = other DNA
accacatgatgtgcaaacaaggataatttgacttcttcttttccaattttgatgccctttatttccttctcctgtcagattgctctagctaggacttgcagtattgtgttgcataactgt

SEQ ID NO: 28298 - DNA, 120 bp, synthetic construct; identical to SEQ ID NO: 8074
  source 1..120: mol_type = other DNA

SEQ ID NO: 28299 - DNA, 120 bp, synthetic construct
  source 1..120: mol_type = other DNA
cctcaatgttcatcagggatataggcctgtagttttctttttttgatgtgtctttgcctgattttgatatcaggatattcctggctttgtaaaatgagtttggaagtattccctcctcct

SEQ ID NO: 28300 - DNA, 120 bp, synthetic construct
  source 1..120: mol_type = other DNA
gcattagatacattcacatttttgtgcaacccaaaactctgtacccattaatcagtaactccccattcctccctacctctggcccctggtaaccatcattctactttttgtttctatgaa

SEQ ID NO: 28301 - DNA, 120 bp, synthetic construct
  source 1..120: mol_type = other DNA
attccttttaatgatgaataatactcattatatgtatgtaccacatcttggttatccattcctcagacaatggacacttgggttacttctaccttttggatattggcaaatatttcattt

SEQ ID NO: 28302 - DNA, 120 bp, synthetic construct; identical to SEQ ID NO: 8075
  source 1..120: mol_type = other DNA

SEQ ID NO: 28303 - DNA, 120 bp, synthetic construct
  source 1..120: mol_type = other DNA
agaattggccattgaagtcttgcccatttttctcccccacatagcttctcatggctattttgcccatttttgagtgggttgactgttttgttgtttttgtcaaacttttttgcatattct

SEQ ID NO: 28304 - DNA, 120 bp, synthetic construct
  source 1..120: mol_type = other DNA
tagcttcatgccattctcccgcctcagcctcccgagtagctgggactacaggcgcccgccaccacacccggctaattttttgtatttttagtagagatagggtttcaccatgttagccag

SEQ ID NO: 28305 - DNA, 120 bp, synthetic construct
  source 1..120: mol_type = other DNA
ttgcaatatttatttcatttcaggggttgattgctttctcactctgattgtgccctttgatgcacagatattttgaatttttcatgagtccagtttgtcagttctttctattctatctgt

SEQ ID NO: 28306 - DNA, 120 bp, synthetic construct
  source 1..120: mol_type = other DNA
actctgattgtgccctttgatgcacagatattttgaatttttcatgagtccagtttgtcagttctttctattctatctgtgctttggcgtcatatccatgaaagcactgtcaaaccctat

SEQ ID NO: 28307 - DNA, 120 bp, synthetic construct; identical to SEQ ID NO: 8076
  source 1..120: mol_type = other DNA

SEQ ID NO: 28308 - DNA, 120 bp, synthetic construct
  source 1..120: mol_type = other DNA
cactataaacttcactggggctacaaccttcctaccccttgtgcctcatgaccaccccctcccttgtccccaccatgcccatgatgagtcttttctcaaggcagctcgccttgcctccat

SEQ ID NO: 28309 - DNA, 120 bp, synthetic construct
  source 1..120: mol_type = other DNA
cccttgcccctgcagggcagcctctccccttggcccctattcccttagggggcttgtggccacccagtcctggcacctgacctacaagtttgccatcttcattcccccttcttctgttca

SEQ ID NO: 28310 - DNA, 120 bp, synthetic construct
  source 1..120: mol_type = other DNA
gtgttaaacatcaatgtgaagttatttccaggaagaagtttcacctgtgatttcctcttccccagagccccacagtcttcgttacaacctcatggtgctgtcccaggatggatctgtgca

SEQ ID NO: 28311 - DNA, 120 bp, synthetic construct; identical to SEQ ID NO: 8077
  source 1..120: mol_type = other DNA

SEQ ID NO: 28312 - DNA, 120 bp, synthetic construct
  source 1..120: mol_type = other DNA
cagggaggcatggaggagggccagggaggggtcgctgctgggctgagttcctcacttgggtggaaaggtgatgggttcgggaatggagaagtcactgctgggtgggggcaggcttgcatt

SEQ ID NO: 28313 - DNA, 120 bp, synthetic construct
  source 1..120: mol_type = other DNA
tgccccagtcctccagagctcagaccttggctatgaacgtcacaaatttctggaaggaagatgccatgaagaccaagacacactatcgcgctatgcaggcagactgcctgcagaaactac

SEQ ID NO: 28314 - DNA, 120 bp, synthetic construct
  source 1..120: mol_type = other DNA
ctccctgtgctatggatgcaggcgtttcctgttggcatattgtgtcctgatttgcctctcctgttagagccattggataaagacagtgggtctgggactgaactgtccagtgttgtaatc

SEQ ID NO: 28315 - DNA, 120 bp, synthetic construct; identical to SEQ ID NO: 8078
  source 1..120: mol_type = other DNA

SEQ ID NO: 28316 - DNA, 120 bp, synthetic construct
  source 1..120: mol_type = other DNA
gcttcactggctctgccctttcttctccagtgccccccatggtgaatgtcacctgcagcgaggtctcagagggcaacatcaccgtgacatgcagggcttccagcttctatccccggaata

SEQ ID NO: 28317 - DNA, 120 bp, synthetic construct
  source 1..120: mol_type = other DNA
ggaacctaccagacctgggtggccaccaggattcgccaaggagaggagcagaggttcacctgctacatggaacacagcgggaatcacggcactcaccctgtgccctctggtgagcctggg

SEQ ID NO: 28318 - DNA, 120 bp, synthetic construct
  source 1..120: mol_type = other DNA
tttttcagggaaggcgctggtgcttcagagtcaacggacagactttccatatgtttctgctgctatgccatgttttgttattattattattctctgtgtcccttgttgcaagaagaaaac

SEQ ID NO: 28319 - DNA, 120 bp, synthetic construct; identical to SEQ ID NO: 8079
  source 1..120: mol_type = other DNA

SEQ ID NO: 28320 - DNA, 120 bp, synthetic construct
  source 1..120: mol_type = other DNA
aatcacgtgctgattgctgagggcctggatgatcatggtgtcagagggaggaaatagtaaaggtggctgtgatctggggagggccagaaactggagaggaatccaaggagaggcgatgcc

SEQ ID NO: 28321 - DNA, 120 bp, synthetic construct
  source 1..120: mol_type = other DNA
tgaatagataagcagatgtccctgggccatttgaggagcggggcccagcccctcatcagggcagatgtggtccctgttttcatcctacctccagcgtgttttcttctgcagtccctgagg

SEQ ID NO: 28322 - DNA, 120 bp, synthetic construct
  source 1..120: mol_type = other DNA
gggacagtcagaagcatttcccccacagtcaggttgtttgatgggagatgaaaagagacagcagaagttttgtgtttctgcaaaaacagaggcagtgcaggggacagtgagaggctgggg

SEQ ID NO: 28323 - DNA, 120 bp, synthetic construct; identical to SEQ ID NO: 8080
  source 1..120: mol_type = other DNA

SEQ ID NO: 28324 - DNA, 120 bp, synthetic construct
  source 1..120: mol_type = other DNA
tctataatcttaataggatttcctctaatactgctgttgtaaagcatattaaataaaacaggaactcaaatttggagccccctctccagaagggtctgtgtggagatggtggctgtggca

SEQ ID NO: 28325 - DNA, 120 bp, synthetic construct
  source 1..120: mol_type = other DNA
ctagggacagagcaggaaggcctcacagcctcaccaagcagcagccctggggtgaagtaagtggaccaggagtaagtggaccaggcaggagcagtagtgactcaacagcaggtcacaggc

SEQ ID NO: 28326 - DNA, 120 bp, synthetic construct
  source 1..120: mol_type = other DNA
cccccaggcttcctgatggggtccccagttaggagctgcctgctcagggctgggaggggaggagtgctgagctgcagatagagggcagggcccacagtgggcagggcctgccctggtgtg

SEQ ID NO: 28327 - DNA, 120 bp, synthetic construct; identical to SEQ ID NO: 8081
  source 1..120: mol_type = other DNA

SEQ ID NO: 28328 - DNA, 120 bp, synthetic construct
  source 1..120: mol_type = other DNA
agaaaagtccttagggaataaacacaacactgcacccagtggagcatttacccgtttccctcttctccagagcttgtgagcctgcaggtcctggatcaacacccagttgggacaggagac

SEQ ID NO: 28329 - DNA, 120 bp, synthetic construct
  source 1..120: mol_type = other DNA
ctcaccagcactttccctctgtttcctgacctatgaaacagagaaaataacatcacttatttattgttgttggatgctgcaaagtgttagtaggtatgaggtgtttgctgctctgccacg

SEQ ID NO: 28330 - DNA, 120 bp, synthetic construct
  source 1..120: mol_type = other DNA
agaaggtttgctgagggcattcactccatggtgctcattggagttatctactgggtcatctagagcctattgtttgaggaatgcagtcttacaagcctactctggacccagcagctgact

SEQ ID NO: 28331 - DNA, 120 bp, synthetic construct; identical to SEQ ID NO: 8082
  source 1..120: mol_type = other DNA

SEQ ID NO: 28332 - DNA, 120 bp, synthetic construct
  source 1..120: mol_type = other DNA
aatagctgggattacagacaggcaccaccacacccagctaatttttgtattttttgtagagacggggtttcgccaagttgaccagcccagtttcaaactcctgacctcaggtgatctgcc

SEQ ID NO: 28333 - DNA, 120 bp, synthetic construct
  source 1..120: mol_type = other DNA
taatatattttaatatattacatgtgcagtaattagattatcatgggtgaactttatgagtgagtatcttggtgatgactcctcctgaccagcccaggaccagctttcttgtcaccttga

SEQ ID NO: 28334 - DNA, 120 bp, synthetic construct
  source 1..120: mol_type = other DNA
ctctttaaatagacatttctggtctgtgttttatttcatgcgtctgggagcggataaagtgtgaggttcagggagaaggagaggtctgtctcaatgccttgacccagcatcaaagcaatc

SEQ ID NO: 28335 - DNA, 120 bp, synthetic construct
  source 1..120: mol_type = other DNA
gaggtgggacatctggcgccaatattcaggggctgaccctgtgagggaacatctgccctgaagagttggagccttcatgtgatgacacagagatctctgtcactgtattcagggaaagga

SEQ ID NO: 28336 - DNA, 120 bp, synthetic construct; identical to SEQ ID NO: 8083
  source 1..120: mol_type = other DNA

SEQ ID NO: 28337 - DNA, 120 bp, synthetic construct
  source 1..120: mol_type = other DNA
cttgttttgggagctcagtgtctggagaggggtgtggagagtaggctttctgcaaaacagtaatcatgacctataaattattttattcttcattagctttttgccataaaataaaacagg

SEQ ID NO: 28338 - DNA, 120 bp, synthetic construct
  source 1..120: mol_type = other DNA
accatcatttgccccagctcagtgataaaggcttcccttccccacataaaatcacagcctgacctttatgatgattgcttctttgttctattttatattttcatcctctgaaattgtagt

SEQ ID NO: 28339 - DNA, 120 bp, synthetic construct
  source 1..120: mol_type = other DNA
cgcctcacgggttcatgcgattctcctgcctcagcctcccgagtagctgggactacaggcgtctgccaccacgcccggctaatttttttgtatttttagtagagacagggtttcaccatg

SEQ ID NO: 28340 - DNA, 120 bp, synthetic construct; identical to SEQ ID NO: 8084
  source 1..120: mol_type = other DNA

SEQ ID NO: 28341 - DNA, 120 bp, synthetic construct
  source 1..120: mol_type = other DNA
ttaattgccattgcttttcaatggctaaatctgttaattcgttatgggttgcaaaagaattatagtctcagtctctcattccttccccattcactagctgaataatttctaaaataagag

SEQ ID NO: 28342 - DNA, 120 bp, synthetic construct
  source 1..120: mol_type = other DNA
tgtctctactaaaaacacagaactagccgggagtggtggcgcatgcctgtaatcccagctactcgggaggcggaagtaggagaattgcttgaaccgggaaggcggaggttgcagtgagcc

SEQ ID NO: 28343 - DNA, 120 bp, synthetic construct
  source 1..120: mol_type = other DNA
gcaagatgatgagcccagcaaagatgatgagcccaactacatgaaaacaacttctaatttcattcaatcagaaccaacagaactcatctacagtgttaaaaatcaagacagtggctactc

SEQ ID NO: 28344 - DNA, 120 bp, synthetic construct; identical to SEQ ID NO: 8085
  source 1..120: mol_type = other DNA

SEQ ID NO: 28345 - DNA, 120 bp, synthetic construct
  source 1..120: mol_type = other DNA
ataaatgcccatgactcagatataaaaaggagaatctacaagagcagtaggcttgggagctgacaccagaacagctttggaaagggctgtcgagccaggaactaggaatcaaaacccaaa

SEQ ID NO: 28346 - DNA, 120 bp, synthetic construct
  source 1..120: mol_type = other DNA
aattggcggatggaagagagaagtgtgcactgaccactttccatgggaagagcatgtgaagatagaggttgcatatggatgcctgccagagggtctccaaggggctggggctccctgtaa

SEQ ID NO: 28347 - DNA, 120 bp, synthetic construct
  source 1..120: mol_type = other DNA
tcaccactcaccaaggctgacctggcagctgccactgctgaggacccagcctgccaaaagcagctgtttctttgaacagagaaaaaaaacagacaatgttaattaagagcaagacagtgt

SEQ ID NO: 28348 - DNA, 120 bp, synthetic construct; identical to SEQ ID NO: 8086
  source 1..120: mol_type = other DNA

SEQ ID NO: 28349 - DNA, 120 bp, synthetic construct
  source 1..120: mol_type = other DNA
atcactattagtaattagatgtaaaatagatgagaaaaatagtagactgtgtccatcagtgtgctataaacaaattaaatatcttgaccaagttatgaatcccaagaataaaagaatatt

SEQ ID NO: 28350 - DNA, 120 bp, synthetic construct
  source 1..120: mol_type = other DNA
tttcttcagttatctccacttttaagaatttgtgatcagtgcagcactattcacaatagcaaaggtaaggaatcaacccagatgcccatcaacagtggaatggataaagaaaactgcggc

SEQ ID NO: 28351 - DNA, 120 bp, synthetic construct
  source 1..120: mol_type = other DNA
ctaaaaatacaaaaaattagccgggtgtggtggcgggcacctgtagtcccagctactcgggaggctgaggcaggagaatggcatgaacccaggaggtggagtttgcagtgagccgagatc

SEQ ID NO: 28352 - DNA, 120 bp, synthetic construct; identical to SEQ ID NO: 8087
  source 1..120: mol_type = other DNA

SEQ ID NO: 28353 - DNA, 120 bp, synthetic construct
  source 1..120: mol_type = other DNA
caaaattatctgcacaccaaacacccgtgatacacaatttacccatgtaacaaacctgaatatgtatcccttgaacctaaaaaatcaaaaagaaaaaagtaaaaaagaattcctgatcag

SEQ ID NO: 28354 - DNA, 120 bp, synthetic construct
  source 1..120: mol_type = other DNA
gagagacacagccatgcagatatttgaaggaagaaccttccagtatcccgctctaagcatacccaggactctgctctggggcagaccctaaagctgcagtggaaatggaggtggccacac

SEQ ID NO: 28355 - DNA, 120 bp, synthetic construct
  source 1..120: mol_type = other DNA
ggggaggctgaagtgtgtcccactctcactccacctctctgttctctatctcctgcatccggtgcctccccgacttccccaaagttgtggtccctgacaaggaagaccctgagggcaacc

SEQ ID NO: 28356 - DNA, 120 bp, synthetic construct; identical to SEQ ID NO: 8088
  source 1..120: mol_type = other DNA

SEQ ID NO: 28357 - DNA, 120 bp, synthetic construct
  source 1..120: mol_type = other DNA
gagcactcacatctcacccctcatctgtctctctaacctccttccttcctgctgcagcttctgccccagccccaggctctggcctctctctccccagttccaccctccagggggtgatgg

SEQ ID NO: 28358 - DNA, 120 bp, synthetic construct
  source 1..120: mol_type = other DNA
ggtatttccaaatcaccatttttctgtcatggtccaagggtgccatccttctcccaggcccagggatgtggaaagagcagcaggaattgggaaatactccacaggaaagaacaatgtgcc

SEQ ID NO: 28359 - DNA, 120 bp, synthetic construct
  source 1..120: mol_type = other DNA
tagtgcctaagccctgcatactgaaaaacagaagctttaagaaataaagacctgcatggaaaattgctcatcaagtcggggaagtcaaagtctgagctgaatcagctctttttttctttc

SEQ ID NO: 28360 - DNA, 120 bp, synthetic construct
  source 1..120: mol_type = other DNA
ttctcctgtctcaggctcccaagtagctgggattacaggcatgagccaccatgcccagctaatttttgtatttttcagcagagacgaggtttcgccatgttggccaggctggtctcaaac

SEQ ID NO: 28361 - DNA, 120 bp, synthetic construct; identical to SEQ ID NO: 8089
  source 1..120: mol_type = other DNA

SEQ ID NO: 28362 - DNA, 120 bp, synthetic construct
  source 1..120: mol_type = other DNA
ccgccacccatctcccaaccctcaccaccaaaaaataagggcatgtcagagggacacaggagtcagcctgaaagagctccctatggacaaagccggaataatccgagcaacaaagttaca

SEQ ID NO: 28363 - DNA, 120 bp, synthetic construct
  source 1..120: mol_type = other DNA
tcaaaacatatattacgagaatctctttcccaggagattggaattttatttctctcaccttgaatatgggctggacttgctgacttgcttccaaagactagagtatgaaaaaggaaaaat

SEQ ID NO: 28364 - DNA, 120 bp, synthetic construct
  source 1..120: mol_type = other DNA
aataactttacagtggagaaatgtagcagacactaccaagcaatcagagtcatgttaacatcttgccccccagaaatgatgtgatgaggacactcccctctatggtattcttcccttaaa

SEQ ID NO: 28365 - DNA, 120 bp, synthetic construct
  source 1..120: mol_type = other DNA
tcttcaaaactttcaaggtcatgaaaacaggtaaagactgagaaactcatgatcagaaagactagggagacccaaaagctaaatgcattaatgggccctggaaaaactggtgaagtccaa

SEQ ID NO: 28366 - DNA, 120 bp, synthetic construct; identical to SEQ ID NO: 8090
  source 1..120: mol_type = other DNA

SEQ ID NO: 28367 - DNA, 120 bp, synthetic construct
  source 1..120: mol_type = other DNA
ttagtagagatggggtttcgccatgttggccagggtggtctcgaactcccgacctcaggtgatctgtccgcctcggcctcccaaagttaaatctattattattcaaaacaaatttaacta

SEQ ID NO: 28368 - DNA, 120 bp, synthetic construct
  source 1..120: mol_type = other DNA
aaaaattaatttaaaaaatgaaatgaatagacatatattaaattaaatcgataattaataacattcagaaacagaaaacatcagccccaaatgggtttactgataaattctatcaaacat

SEQ ID NO: 28369 - DNA, 120 bp, synthetic construct
  source 1..120: mol_type = other DNA
catggaagggaacaaggaaaacatgaaacccaaagggaactgcagtgagagcacaaagattctagatactgcgagcagatggatggagggtgttctcctgagctacagaagcaatggtct

SEQ ID NO: 28370 - DNA, 120 bp, synthetic construct
  source 1..120: mol_type = other DNA
caacacggagaaaccccgtctctactaaaaatacagaattagccaggtgtggtggcgcatgcctgtaatcccagctactcgggaggctgaggcagaagaatcgcctgaactcaggaagca

SEQ ID NO: 28371 - DNA, 120 bp, synthetic construct; identical to SEQ ID NO: 8091
  source 1..120: mol_type = other DNA

SEQ ID NO: 28372 - DNA, 120 bp, synthetic construct
  source 1..120: mol_type = other DNA
tggtgaaaccctgtctctaataaaaatacaaatattagccaggcatggtggtgcatgcctgtaatcccagctactcaggaggctgaggcaggagaattgcttgaacctgggaggcggaag

SEQ ID NO: 28373 - DNA, 120 bp, synthetic construct
  source 1..120: mol_type = other DNA
catggacaagatgccaggacctgtatgctttaggatgaagttctcatcatcaaatttctccccgtagatggacttgccaccagtgccattatggcgtgtgaagtcaccaccctgacacat

SEQ ID NO: 28374 - DNA, 120 bp, synthetic construct
  source 1..120: mol_type = other DNA
gacacagcccaagggctcaccattgacagcgatgttgaaggacacggtggggttgaccatggctgatagtatggggctcctgatggtggcgtctgcaaagccaagacagacactttctat

SEQ ID NO: 28375 - DNA, 120 bp, synthetic construct; identical to SEQ ID NO: 8092
  source 1..120: mol_type = other DNA

SEQ ID NO: 28376 - DNA, 120 bp, synthetic construct
  source 1..120: mol_type = other DNA
atgattaaaaaaaaaaatctcttagcaagctaggaatagagaagaccttactcaacttgataaacaacatccacaaaacatccacagctaacatcacacttaatggtgagaaactaaaag

SEQ ID NO: 28377 - DNA, 120 bp, synthetic construct
  source 1..120: mol_type = other DNA
tggaacaagaaataaaactgtctttgtttacagatgatatgattgtctatgtagaaaatcaaaaagaatccacacataaaaaactcctggaactaacaagcaattatagcaaggttgcag

SEQ ID NO: 28378 - DNA, 120 bp, synthetic construct
  source 1..120: mol_type = other DNA
tgcagtggcgcgatctcaactcactgcaacctcctcctcccaggttcaagcaattctcctgcctcagcctcctgagtagctgggattacaggtgtgccccaccatgcccagctaattttt

SEQ ID NO: 28379 - DNA, 120 bp, synthetic construct; identical to SEQ ID NO: 8093
  source 1..120: mol_type = other DNA

SEQ ID NO: 28380 - DNA, 120 bp, synthetic construct
  source 1..120: mol_type = other DNA
tcaataaaaaacctcagtaagttattttgtggatattaacaaactgattcaaactttatatggtgaggcaaaagacctagccagcacaatataggagaaaaataaagtcaaagaccacca

SEQ ID NO: 28381 - DNA, 120 bp, synthetic construct
  source 1..120: mol_type = other DNA
atccagcaatcccactaatgggtatatatccaaaggatatgaaatcagtacgttgagatatttgcactcccatattcattgcatcattattctttttttttttttttcctttagagatag

SEQ ID NO: 28382 - DNA, 120 bp, synthetic construct
  source 1..120: mol_type = other DNA
agatatagaatccacctaagtgtccatcaatggatgaatggataaagaaaatgtggtatatataaaaaatggaatactattcagccttaaaaaacaaaatcctgtcatttgtgacaacat

SEQ ID NO: 28383 - DNA, 120 bp, synthetic construct; identical to SEQ ID NO: 8094
  source 1..120: mol_type = other DNA

SEQ ID NO: 28384 - DNA, 120 bp, synthetic construct
  source 1..120: mol_type = other DNA
aatgtgtgtgtatgtatgtgcatatatatataaacatgatgtacaccacaaatgtataaaattagtcaatcgaaaaattaattttagaaagacagagtggcattggcaaagaatagacaa

SEQ ID NO: 28385 - DNA, 120 bp, synthetic construct
  source 1..120: mol_type = other DNA
gtacaagaaaaatgaaaagagctctcttaaaaggttactgtgaaagccacctgtgacagtaacagaaagtgcccagcagggtctctgacacttagtaatgtaatctctctcactgtaatg

SEQ ID NO: 28386 - DNA, 120 bp, synthetic construct
  source 1..120: mol_type = other DNA
cccagtcctgccaatccactgggtaggatacaatattgaggggcccatcagcacactggccttagggggctctgcagccccttgaccttgtggatgatgctggccttaatctcctcttgt

SEQ ID NO: 28387 - DNA, 120 bp, synthetic construct; identical to SEQ ID NO: 8095
  source 1..120: mol_type = other DNA

SEQ ID NO: 28388 - DNA, 120 bp, synthetic construct
  source 1..120: mol_type = other DNA
acccgcacgaccacaccagctaatttttgtgtttttttgtagagatgggttttgccatgttgcccaggctggtctcaaactcctgggctcaagccttccacccaccttggcctcccaaag

SEQ ID NO: 28389 - DNA, 120 bp, synthetic construct
  source 1..120: mol_type = other DNA
tatgagggcctggctgcagtatcatcccatagtgagaggtggaagggcaaagaggctgaactgatttctatcatgccatacaatggcattaatctattcaatctaatcaaccctgaaagg

SEQ ID NO: 28390 - DNA, 120 bp, synthetic construct
  source 1..120: mol_type = other DNA
gtctctactaaaaatacaaaaattagctgggcgtggtggcatgtgcctgtaattccaactactcaggaggctgagacaggagaatcacttgaacatgggaggcggaggttgcagtgagct

SEQ ID NO: 28391 - DNA, 120 bp, synthetic construct; identical to SEQ ID NO: 8096
  source 1..120: mol_type = other DNA

SEQ ID NO: 28392 - DNA, 120 bp, synthetic construct
  source 1..120: mol_type = other DNA
ctcagcctcccgagtggctgggactacaggcgtgcaccaccatgcccggctaatttttgtatttttagtagagacggggtttcaccatgttggccaggatggtctcgatctcttgacctc

SEQ ID NO: 28393 - DNA, 120 bp, synthetic construct
  source 1..120: mol_type = other DNA
aaccgacccaaaggccagtgctttcttaattaagttcccacaggtgaacaaagccaaaattcagattctattttatttatggtttagaattacctactgtgaaaaaaaaaaaaaactagc

SEQ ID NO: 28394 - DNA, 120 bp, synthetic construct
  source 1..120: mol_type = other DNA
gtcactttcccaaaggattgttattagtgtatcatttagattgtcttgcaaaagtctcatttgttgttttttctaaatggctgctaatcttttaaattaacagatagagggccaggcacg

SEQ ID NO: 28395 - DNA, 120 bp, synthetic construct; identical to SEQ ID NO: 8097
  source 1..120: mol_type = other DNA

SEQ ID NO: 28396 - DNA, 120 bp, synthetic construct
  source 1..120: mol_type = other DNA
ttttttttttttttttttttttgagagacggagtcttgctctgtcgcccaggctggagtgcagtggcacaatctcagctcactgcaacctccgcctcccaggttcaagcaattctcctgc

SEQ ID NO: 28397 - DNA, 120 bp, synthetic construct
  source 1..120: mol_type = other DNA
taagcgatccccctgcctcggcctcccaaagtgccgggattacaagcatgagccactgcgcccggccaactttcaatgttaattagttgtggtttgtttaaccatatactgcatagtttc

SEQ ID NO: 28398 - DNA, 120 bp, synthetic construct
  source 1..120: mol_type = other DNA
aaagcccttctccccttaaacttttacaaaggttctgggttctttttccacttaagtgggaaaaagtcagctaatgaggaacgtaaagtctttggcctcatctaaaggtgctttggcccg

SEQ ID NO: 28399 - DNA, 120 bp, synthetic construct; identical to SEQ ID NO: 8098
  source 1..120: mol_type = other DNA

SEQ ID NO: 28400 - DNA, 120 bp, synthetic construct
  source 1..120: mol_type = other DNA
tcaggaggtgttgggggaggctcactagtccaacagaacttgaggccagttgtaccagtgtcatatcccaggagccaaggttacaagggatacaaagtgcccagacctaccagagaaggc

SEQ ID NO: 28401 - DNA, 120 bp, synthetic construct
  source 1..120: mol_type = other DNA
catagcaacaaagtgagtcacacaaactttttagtttcctattgtgcataaaagttatgtttgtactatattgtagtctgttaagtgtacagtagcattgtgtacaaaaaactgtgtata

SEQ ID NO: 28402 - DNA, 120 bp, synthetic construct
  source 1..120: mol_type = other DNA
actacaggtgcccatcaccatgcccagctaatttttgtatttttagtagagatgaggtttcaccatgttggccaggctaatcttgaactcctgacctcaagtgatccacccacctcggcc

SEQ ID NO: 28403 - DNA, 120 bp, synthetic construct; identical to SEQ ID NO: 8099
  source 1..120: mol_type = other DNA

SEQ ID NO: 28404 - DNA, 120 bp, synthetic construct
  source 1..120: mol_type = other DNA
gctcatggtgtcccaaaacaatcacaatagttaacttcagtaactgattacaggtcactgtaacaagtataataatgaaaacgcttgaaacattttgagaattccacagcgtgacatgga

SEQ ID NO: 28405 - DNA, 120 bp, synthetic construct
  source 1..120: mol_type = other DNA
ccaatctctaaataaaaaacagcatctgcaaagagcaataaagggaagcacaataaaaggtacatctgcaaaggggaatcagcacttaagcaaggtcaggatgagctttcaagtcaggtg

SEQ ID NO: 28406 - DNA, 120 bp, synthetic construct
  source 1..120: mol_type = other DNA
cagacacttccccagtgaatgctgaatgaaaccatctgagccagtttcctcaggtgcaaaccagtgaggtaattcctaccttgcagagtgaagtgagaaaagacagtgttaagaaatgcc

SEQ ID NO: 28407 - DNA, 120 bp, synthetic construct
  source 1..120: mol_type = other DNA
accctggctaacacggtgaaaccccgtctccactaaaaatacaaaaaattagccgggcgtagtggcgagcacctgtagtcccagctcctcgggagggtgaggcaggagaatggcgtgaac

SEQ ID NO: 28408 - DNA, 120 bp, synthetic construct; identical to SEQ ID NO: 8100
  source 1..120: mol_type = other DNA

SEQ ID NO: 28409 - DNA, 120 bp, synthetic construct
  source 1..120: mol_type = other DNA
gcaaggttatgttacatataagcgccacggtggctgaaaatctagttcctaagaaggcaacttaacagcaagcctgtctatcatggtgttaaccagctagtttgcttaaagccttcagtc

SEQ ID NO: 28410 - DNA, 120 bp, synthetic construct
  source 1..120: mol_type = other DNA
caaagtttttgaggctatcctagttgatccattccataacactatcagaaggaaacctgacacccagtggtccacaacaagcatagggagatgcgtaggctatctgcaggccaagagagc

SEQ ID NO: 28411 - DNA, 120 bp, synthetic construct
  source 1..120: mol_type = other DNA
ctaataaacactagatcaaaaaaaaaaaatcacagacctgtggtaggctgggcaccagtgctctaaagcaagttctgcctaaactggcagggacatttttcacatcaggaacaggagttg

SEQ ID NO: 28412 - DNA, 120 bp, synthetic construct; identical to SEQ ID NO: 8101
  source 1..120: mol_type = other DNA

SEQ ID NO: 28413 - DNA, 120 bp, synthetic construct
  source 1..120: mol_type = other DNA
ggcaccacaggtaggaacagagggtgtgagaatttacactggggtgtgggaaaaaaaaaccctcaatcccaccctgcaccaccccacaccatgcctacccctgcagctcttttcttagtt

SEQ ID NO: 28414 - DNA, 120 bp, synthetic construct
  source 1..120: mol_type = other DNA
acctaacagttaattatttcttagcggggaggagcagctgatcctctttccagtgaccccatatccttgttcaaggaagccagttacagcccctgggccagggaactctatttgctcccc

SEQ ID NO: 28415 - DNA, 120 bp, synthetic construct
  source 1..120: mol_type = other DNA
cagcctgcaacaaagcttcccagggcctcagccccctgccctggctgatgctccctcccttaattccctgaccagggccctgggacccaccgcacagctgagctggcccgagctgaagag

SEQ ID NO: 28416 - DNA, 120 bp, synthetic construct; identical to SEQ ID NO: 8102
  source 1..120: mol_type = other DNA

SEQ ID NO: 28417 - DNA, 120 bp, synthetic construct
  source 1..120: mol_type = other DNA
ataggaattcaccctggaccatgccctaaaataacctcaccccaaatacaataaagggacgaagcacttatagataccacagacacatgtgtttcatttttagttttgttaaaaaaaaat

SEQ ID NO: 28418 - DNA, 120 bp, synthetic construct
  source 1..120: mol_type = other DNA
tcctgaaggacagacggtcacattccaaaatgggcgagtcttctaccgtgtctgttcaactgagaagaaaacgtagcatggtcagaataaggcatgaaaaggggaaagtgaggcaggaac

SEQ ID NO: 28419 - DNA, 120 bp, synthetic construct
  source 1..120: mol_type = other DNA
atcccaacacagcatcaaagaccagggggcatgaaccagtcaagtgtccattatgcatcagatgcccatgacctatgtgatgggatttcggacaaacacactaaggaacagggaggacct

SEQ ID NO: 28420 - DNA, 120 bp, synthetic construct
  source 1..120: mol_type = other DNA
aaagggtttcatgagatcagtactcactgtaggaggagatgtctatctcatcaggcagctcactaatattgacctcaaagcgatcctgcacatcattgaggatcttggcatcattctcat

SEQ ID NO: 28421 - DNA, 120 bp, synthetic construct; identical to SEQ ID NO: 8103
  source 1..120: mol_type = other DNA

SEQ ID NO: 28422 - DNA, 120 bp, synthetic construct
  source 1..120: mol_type = other DNA
gaaagcctttgtgagaaaggaaatttaaaacatgttgagattcccttctctcaactgtctttttctcccaaggacacaaaatatctttcccatcttcagctcacctctcctcctggggca

SEQ ID NO: 28423 - DNA, 120 bp, synthetic construct
  source 1..120: mol_type = other DNA
caaattgggggaataggggtccatggtgtgtgagagacattacgtgggagaggggagtttctagtaattacgttctcaggaattcctcttcatttctcttattcccccactatatattta

SEQ ID NO: 28424 - DNA, 120 bp, synthetic construct
  source 1..120: mol_type = other DNA
gaaatcaaaattgccagacatgctaggagatgaggatgagatcacctcatgaaaaagtgataaaaaactagaattaagatctggaggggtaactgatattcctgctcaccaaaacattaa

SEQ ID NO: 28425 - DNA, 120 bp, synthetic construct; identical to SEQ ID NO: 8104
  source 1..120: mol_type = other DNA

SEQ ID NO: 28426 - DNA, 120 bp, synthetic construct
  source 1..120: mol_type = other DNA
atgagccactgccctgcacccagtcagaaatgcttctcttgaataagcagttattagaggaattaaacattcaagaaccctaacatgcccccaaacatcgtttcaagacttttaacaact

SEQ ID NO: 28427 - DNA, 120 bp, synthetic construct
  source 1..120: mol_type = other DNA
cactgcagcctcaatttcctgggctcaagctatcctctcacctcagccaccagagtatctgggactacaggcatacaccaccacacctggctaatttttttcttctttggtagtgatgaa

SEQ ID NO: 28428 - DNA, 120 bp, synthetic construct
  source 1..120: mol_type = other DNA
ttttgaagtttattttccttgaggttattgaggacatacccgtgccagccatagaatagaaaagcagctcccaccttactcatgctcagcccctaagatatttataccctcattattctc

SEQ ID NO: 28429 - DNA, 120 bp, synthetic construct; identical to SEQ ID NO: 8105
  source 1..120: mol_type = other DNA

SEQ ID NO: 28430 - DNA, 120 bp, synthetic construct
  source 1..120: mol_type = other DNA
ttgaaaaccccaccccactcccaaaaatacccacattttactgtggtctctctcacattacatctaatttccttcctatcagatgagttttaagactgcccaactaaaaactatcatggg

SEQ ID NO: 28431 - DNA, 120 bp, synthetic construct
  source 1..120: mol_type = other DNA
ggaaagaaaatgggagatgattctcaaagggagagcaaggaccaaacatctgggaaatgatgggaggcagtgactcaaggtcagaataactccatcagaggtgcttctaagaacatgggg

SEQ ID NO: 28432 - DNA, 120 bp, synthetic construct
  source 1..120: mol_type = other DNA
ttaagatcagaatgctgcaatggacagtcaaaatgccacttaaggagaaacaaaaattactcaagatgagttacttgccgtcagaccacaacaggatagttttagatgagactggtctct

SEQ ID NO: 28433 - DNA, 120 bp, synthetic construct
  source 1..120: mol_type = other DNA
atacacttttaagggacaggatctcaccatgttgcccaggctggagtgcagtggctattcactggcacaatcatagcacactatagcctcaaattcctgggctcaagtgatcctcctgct

SEQ ID NO: 28434 - DNA, 120 bp, synthetic construct; identical to SEQ ID NO: 8106
  source 1..120: mol_type = other DNA

SEQ ID NO: 28435 - DNA, 120 bp, synthetic construct
  source 1..120: mol_type = other DNA
aattacagcttactgccacctccacgtcccgggctcaagcaaaccctcctgcctcagcttcccaagtagctgggactacaggcatgcgccaccacgcccggtttttctggtagagacaaa

SEQ ID NO: 28436 - DNA, 120 bp, synthetic construct
  source 1..120: mol_type = other DNA
aaagagaagttccatggcctccttcaaatctcattctagccccaaatacagctaaagagtgatcatcccacgggaaggaacactgcagggaggggaagaacacactccactgcttatgca

SEQ ID NO: 28437 - DNA, 120 bp, synthetic construct
  source 1..120: mol_type = other DNA
accaccccattcaggacacccctccccaacacatattgggggaaacggggcacggcacgcgttgggttcaggaaaaaaaccgggaacggaaaaagaggctggtttggtcctcagcttcct

SEQ ID NO: 28438 - DNA, 120 bp, synthetic construct; identical to SEQ ID NO: 8107
  source 1..120: mol_type = other DNA

SEQ ID NO: 28439 - DNA, 120 bp, synthetic construct
  source 1..120: mol_type = other DNA
taagagacgatggatgggtgggtggtagggcagaaaaatcctgccctcccccaaagggagaagaggttcaaaaatgttgtgatttatgaaaaagtcgaacactacccgctctcacattaa

SEQ ID NO: 28440 - DNA, 120 bp, synthetic construct
  source 1..120: mol_type = other DNA
aggagtcattactcccagttgggcacaagccgccttcttggcacttgaatgacaagggagtctgaggaagagggcgaggaaggggaggaggcagcgggcggggagtggagggagagaagg

SEQ ID NO: 28441 - DNA, 120 bp, synthetic construct
  source 1..120: mol_type = other DNA
cctgcttctcgtggggggtcatgcgaaaaatttcctggacatcccgacgcatgtctacaagaacaaggaaaaaaattgtaggagaaaataagcaggtatgataaacaaagattagaggta

SEQ ID NO: 28442 - DNA, 120 bp, synthetic construct
  source 1..120: mol_type = other DNA
atcagattccagctgtttgttttaaccaagcaagaaataaggtaaaaccccaaagttcccaactatgaaatggggataaagcccagtgcagaggctctcaaggccttcaaaacatgcttt

SEQ ID NO: 28443 - DNA, 120 bp, synthetic construct; identical to SEQ ID NO: 8108
  source 1..120: mol_type = other DNA

SEQ ID NO: 28444 - DNA, 120 bp, synthetic construct
  source 1..120: mol_type = other DNA
tacaaacactctctacattaatcccagacctgagtctagacacttattcagctataaattctgactgtaaatgctgtgctggagatgccagaagggtactgtcttctctttcagtttaga

SEQ ID NO: 28445 - DNA, 120 bp, synthetic construct
  source 1..120: mol_type = other DNA
gtcccctattctcaaaggttaaaaacaaaaatcatagaaagatgatagatgacaccctttactgtgcttaaaagcataataaagaccaaccagggaacccagagccatcagtcatgggtg

SEQ ID NO: 28446 - DNA, 120 bp, synthetic construct
  source 1..120: mol_type = other DNA
gcatcttatcacattcatccaaaataaagtgtttaatgtgtttgaggttgaggctcttatttcgagccagggctaggatacggcctggagtccccacgacgatatgcgggcagttcttct

SEQ ID NO: 28447 - DNA, 120 bp, synthetic construct; identical to SEQ ID NO: 8109
  source 1..120: mol_type = other DNA

SEQ ID NO: 28448 - DNA, 120 bp, synthetic construct
  source 1..120: mol_type = other DNA
cgcctataattccagctactcaggaggctgaggcacgagaacctgggaggcagaggttgtggtgagccaagatcccaccgttgtactccagcctgggcaacaagagtgatactccatctc

SEQ ID NO: 28449 - DNA, 120 bp, synthetic construct
  source 1..120: mol_type = other DNA
cctggccaacacggtgaaaccccatctctactaaaatacaaaatttacaaatttactactaaaaaacaaaaaatacaaaatttagccgggaggctgaggcaggagaatcgcttgaacccg

SEQ ID NO: 28450 - DNA, 120 bp, synthetic construct
  source 1..120: mol_type = other DNA
ttagtgtaaagtaccacaaaaaacacatggaacattaaggtttcctaaataaacccagaatctcaaactcttttcacacaaaccccatgaaattactgcttcgggctaaatattatcatt

SEQ ID NO: 28451 - DNA, 120 bp, synthetic construct; identical to SEQ ID NO: 8110
  source 1..120: mol_type = other DNA

SEQ ID NO: 28452 - DNA, 120 bp, synthetic construct
  source 1..120: mol_type = other DNA
ttgaacgtgggaggcgcaggttgcagtgagctgagatcgcgccactacactcacagcctgagggacacagcgagactccatctcaaaacaaataaataaaaataaaataaaataactaac

SEQ ID NO: 28453 - DNA, 120 bp, synthetic construct
  source 1..120: mol_type = other DNA
gccacccaggctggagtgtaatggcacaatcccagctcactacaacctctgcttcctgggttcaagcgattcccctgcctcagcctcccaagcaggtgggactataggtgtgtgccacca

SEQ ID NO: 28454 - DNA, 120 bp, synthetic construct
  source 1..120: mol_type = other DNA
aggtgtaagccattgtgcacttggccagaatcctcaatattcacacaccactggagctgttttaaagtttccggctttctctgccacataccccaaaattattaaactgatatgattcaa

SEQ ID NO: 28455 - DNA, 120 bp, synthetic construct; identical to SEQ ID NO: 8111
  source 1..120: mol_type = other DNA

SEQ ID NO: 28456 - DNA, 120 bp, synthetic construct
  source 1..120: mol_type = other DNA
acggagacatatggtaaatgtagctcttcattatcccctctagggaagtgactgtcacaaaaacacacctgggccgataataaatgacttcaattatgtgatctaaatcatgaaccccac

SEQ ID NO: 28457 - DNA, 120 bp, synthetic construct
  source 1..120: mol_type = other DNA
tgtagctaggacaaaaacacccttcccttatagtcctaaccaaaatcccctccccagcactctccccaaatatacctgcccagtaactggctccagctgttgcagtgtggccaagacaaa

SEQ ID NO: 28458 - DNA, 120 bp, synthetic construct
  source 1..120: mol_type = other DNA
ggactaaaagttggggggggaggaagataaattagacttcagtctccagataactctacctttttcaccatgccaagcccatttcttaccactcaattctcaaagtctagtatttacctg

SEQ ID NO: 28459 - DNA, 120 bp, synthetic construct; identical to SEQ ID NO: 8112
  source 1..120: mol_type = other DNA

SEQ ID NO: 28460 - DNA, 120 bp, synthetic construct
  source 1..120: mol_type = other DNA
gttggcctggcccaacagagggagactacaggtccaagcaggacctttctggaaatttaaaattagaagtcaagtgacaaaattaaaaataagcagacaagaaaagccagtcacaagaat

SEQ ID NO: 28461 - DNA, 120 bp, synthetic construct
  source 1..120: mol_type = other DNA
tcctctatccaaaattgtttttgatacttatcccctgattttttcttcctcactgtcgccccggctggtgcacagtggtgcaatcacggctcactgaagcctcaaccttcacctgcttaa

SEQ ID NO: 28462 - DNA, 120 bp, synthetic construct
  source 1..120: mol_type = other DNA
agccactgcacctggccctgatctagccttaagtataaacccttaccaccacctgagcaacgacaaacacatctttgtattgtacccttaaagagcccaatgagcactacatgcccaaga

SEQ ID NO: 28463 - DNA, 120 bp, synthetic construct
  source 1..120: mol_type = other DNA
aaagccagagctgtggatggagacataggagcccttgacatccttcttggcaggggcctcagccccatctcccccagctgctgtctccacctcatcatcttcatagtccaagagctcatt

SEQ ID NO: 28464 - DNA, 120 bp, synthetic construct; identical to SEQ ID NO: 8113
  source 1..120: mol_type = other DNA

SEQ ID NO: 28465 - DNA, 120 bp, synthetic construct
  source 1..120: mol_type = other DNA
cataaaaacgaaaagcaaatataacagaacagaaaaagcagtaccagggaaagtggttaggacagaggttcccaacaagattagcaatcacagtagcggaaaccagaaaagttggaaggg

SEQ ID NO: 28466 - DNA, 120 bp, synthetic construct
  source 1..120: mol_type = other DNA
aacttagtaaagtggaaaatggagatgacaagtagagtcctgaaaagtcctcaaaggaagactccgctttccctattataatcccaccgttatggatgcctaactcagcagccatcagtc

SEQ ID NO: 28467 - DNA, 120 bp, synthetic construct
  source 1..120: mol_type = other DNA
cgctgtttaagcaagccttgtgtaattagcatgggggggaggggcggtgcaagacaaatggctcggccacaaaaaaacaaaattcatgtctccaccctacaataagaaagctaataggtg

SEQ ID NO: 28468 - DNA, 120 bp, synthetic construct
  source 1..120: mol_type = other DNA
agactccttttggagaaacatacaatgacaccaatcgtatcgtaaacacttggaaggcactccaaattaagttgggcaagtcaaggtgagaaaaatccaactgggcccagaaaccagctc

SEQ ID NO: 28469 - DNA, 120 bp, synthetic construct; identical to SEQ ID NO: 8114
  source 1..120: mol_type = other DNA

SEQ ID NO: 28470 - DNA, 120 bp, synthetic construct
  source 1..120: mol_type = other DNA
gcagatggaaacggattgtagcgaaggccaaagcttacctaaacagggagagcgcgtatggcggcagcaacagcgacgaaggagggaaatctgccttcacttccggttgcaggcttccct

SEQ ID NO: 28471 - DNA, 120 bp, synthetic construct
  source 1..120: mol_type = other DNA
aaatttgttttaaaaccgtttctaacttcactgctaccgccagtaacaaaagatataaaggaaactaacgtctcccccccactgttatctttattctcttatcctactcctctccatgcc

SEQ ID NO: 28472 - DNA, 120 bp, synthetic construct
  source 1..120: mol_type = other DNA
gcgaaggctgcgagttcccacggggtccttggcccggtagtgaaggtgacctgaggactgctgggcacgcactaggaaccggcaggccctagctgaggggagggaggagggaagtctcag

SEQ ID NO: 28473 - DNA, 120 bp, synthetic construct; identical to SEQ ID NO: 8115
  source 1..120: mol_type = other DNA

SEQ ID NO: 28474 - DNA, 120 bp, synthetic construct
  source 1..120: mol_type = other DNA
tcctgcctcagcctcccgagtagctaggattacaggcgcccgccaccacgcccagcaaatttttgtttttttagtagagacggggcttcacccatgtatgacctcaggtgatccacccac

SEQ ID NO: 28475 - DNA, 120 bp, synthetic construct
  source 1..120: mol_type = other DNA
ttttttcctgaatgaaacatttgctatccccgtctttgagatggggagctacaaaagtaagacctgatgtcctgctgtgtaataaaacaacaaacgtttggccctctccctgttaacata

SEQ ID NO: 28476 - DNA, 120 bp, synthetic construct
  source 1..120: mol_type = other DNA
ctcattctctattgtattctgcctccctgctcaaagaatctggttagtaaatacactgcaggttaccttattggttcaaattcttggtgaagtaagcttgtcttcagtgacaaatgaagt

SEQ ID NO: 28477 - DNA, 120 bp, synthetic construct; identical to SEQ ID NO: 8116
  source 1..120: mol_type = other DNA

SEQ ID NO: 28478 - DNA, 120 bp, synthetic construct
  source 1..120: mol_type = other DNA
aaattttaaaattagcaaggcatagtggcactcgcccgtaatcccagctactcaggaggctgaagtgggaggatcatttgagtccagggggtcaaggctgccgtgagctggaactccagc

SEQ ID NO: 28479 - DNA, 120 bp, synthetic construct
  source 1..120: mol_type = other DNA
gatctatagtcctcagattcccaaatgaggaaccatgtttctcactttagagaaataataaagtactacttgttcttgtttctccaagaagtttcaaaggatagccatttgggctgttta

SEQ ID NO: 28480 - DNA, 120 bp, synthetic construct
  source 1..120: mol_type = other DNA
ccagcctgaccaacatggcgaaaccccatctctactaaaaatacaaaaaatagccaggcgtggtggcacacacccataattccagcaacttgggaggctgaggcaggagaatcgcttgaa

SEQ ID NO: 28481 - DNA, 120 bp, synthetic construct; identical to SEQ ID NO: 8117
  source 1..120: mol_type = other DNA

SEQ ID NO: 28482 - DNA, 120 bp, synthetic construct
  source 1..120: mol_type = other DNA
agaggctacaaaatgcagttatctacctggaattataagagaggggctaaatgtagtcatctcctctttttggagatcagaaggtctctgggaaaagagaagaaccaatttttcagaaaa

SEQ ID NO: 28483 - DNA, 120 bp, synthetic construct
  source 1..120: mol_type = other DNA
actgaatcactgctacaacatgcaaggaactgtgctagactttacagaatgattcctaatcattgaagcaaccctcacaaggtaggcattattatcatcccagtttcacagaggaggaca

SEQ ID NO: 28484 - DNA, 120 bp, synthetic construct
  source 1..120: mol_type = other DNA
agacactgaagtcaggatgttttccacattcctacttccccatattacaaatttcacagagggtttaggtgagaatgacttggaagtttacaaagtcccagtgagggttaaagaacaaca

SEQ ID NO: 28485 - DNA, 120 bp, synthetic construct
  source 1..120: mol_type = other DNA
ggaaaattattggatcctgcctcccaggatttctaggggatggaaagaagacagggattatggtgggaggtgattttgattggaggatttctttgagggagggaactggcagaaggagtc

SEQ ID NO: 28486 - DNA, 120 bp, synthetic construct; identical to SEQ ID NO: 8118
  source 1..120: mol_type = other DNA

SEQ ID NO: 28487 - DNA, 120 bp, synthetic construct
  source 1..120: mol_type = other DNA
tttccccttagacctaacatgcaacttcatcctaaaacagaccgtaatatccccaccacctcaccatccatgaccataaaactctaccctccaccacaaatgttaatcatactccacata

SEQ ID NO: 28488 - DNA, 120 bp, synthetic construct
  source 1..120: mol_type = other DNA
tcccctcagcctcagccctctgccaccatattttcttgttgagtcacccttacacacctcactagatgcacccaccaacttgcagtggggtctcaacccgactctgcctcaactcaccgc

SEQ ID NO: 28489 - DNA, 120 bp, synthetic construct
  source 1..120: mol_type = other DNA
tgagtggggatggacccacacacacacaatgtaatagcaggagtcagtcccttccagaaagttatacagccttctctcagccaaccaggtgccagattctaatatccatccatttcttcc

SEQ ID NO: 28490 - DNA, 120 bp, synthetic construct; identical to SEQ ID NO: 8119
  source 1..120: mol_type = other DNA

SEQ ID NO: 28491 - DNA, 120 bp, synthetic construct
  source 1..120: mol_type = other DNA
ctgggtcttagtgctcccctgctcactcagcctcctgcaccgagtgtctctcccaatctcatcctcctattgatgactggtcctcctctccagcacttcttgctcaggcagtacccaaag

SEQ ID NO: 28492 - DNA, 120 bp, synthetic construct
  source 1..120: mol_type = other DNA
agaaggagaacttgattggtggtaacagaggaagcataaagggttgtgaatgcggtgaaaaggtaaggatgtcatcatgcaacctgtgttgggaaaagagcattctgggcttaattctaa

SEQ ID NO: 28493 - DNA, 120 bp, synthetic construct
  source 1..120: mol_type = other DNA
ccctcccctgcctcccgttgttaacatctccatctttttctacatatttctcaagtccaaatttttgcatctcacttgccccatcctacgatagtcttcttccgtcttttgtctgtattt

SEQ ID NO: 28494 - DNA, 120 bp, synthetic construct
  source 1..120: mol_type = other DNA
cctgtctttatctcctctattttctctgtcttctcatcttttcgtccatcactgaaccatctcctctctctgccaagttagaggaggcgggaaaaaacctccaaataactctcttttctc

SEQ ID NO: 28495 - DNA, 120 bp, synthetic construct; identical to SEQ ID NO: 8120
  source 1..120: mol_type = other DNA

SEQ ID NO: 28496 - DNA, 120 bp, synthetic construct
  source 1..120: mol_type = other DNA
ccaggttccagaggaagaagcctccacatctgtctgccgggtacatgatattcaatttctagatcattattggagattatctgtgactttttaaaactcagatttctgctgataaaaatt

SEQ ID NO: 28497 - DNA, 120 bp, synthetic construct
  source 1..120: mol_type = other DNA
taaacctctgatcctatcacccccctcaaaaaaaattttttttcaaatctatcatctgataaaggatcagggttaggttaggcctcatctcttgctgaagatattaaaaaaagacggaac

SEQ ID NO: 28498 - DNA, 120 bp, synthetic construct
  source 1..120: mol_type = other DNA
ccgccaacgccgagaacgtcgctttcgtcgttacttgtctgcaggacggctggtccgggcccaggccctcctccagcgacacccaggcctcgatgtagatgctgggcagcccccaccact

SEQ ID NO: 28499 - DNA, 120 bp, synthetic construct; identical to SEQ ID NO: 8121
  source 1..120: mol_type = other DNA

SEQ ID NO: 28500 - DNA, 120 bp, synthetic construct
  source 1..120: mol_type = other DNA
ttagtagctactttgtttcttgacagattgtttgctcgtagccaaaaagtagcatagaaggtaggctctggagttagattgcctggattcaaaccccagctccaaatcccagctccacac

SEQ ID NO: 28501 - DNA, 120 bp, synthetic construct
  source 1..120: mol_type = other DNA
ctcacaacaatcttaggaggtgagtactgatattatcccccatttcccagctgaggaaacagggcatagagaagtcatttgccagagttacagttattcactggtagagcagagattata

SEQ ID NO: 28502 - DNA, 120 bp, synthetic construct
  source 1..120: mol_type = other DNA
ttgtgcccatgttcagagtacccatgttgtgccatatatgttttgagaatcaactgacatagtacataattagagtacctggcacacacgataagcacttggtatatgctggcgattgtt

SEQ ID NO: 28503 - DNA, 120 bp, synthetic construct; identical to SEQ ID NO: 8122
  source 1..120: mol_type = other DNA

SEQ ID NO: 28504 - DNA, 120 bp, synthetic construct
  source 1..120: mol_type = other DNA
ttgttcctgtttttgttatcaacaggtccatactcccttaaccacaattctaaactcaaaaacactctgagaaccaacatttttcatcaggctgccaccaaaattcatttggtgacagaa

SEQ ID NO: 28505 - DNA, 120 bp, synthetic construct
  source 1..120: mol_type = other DNA
ctacctaatatagagtgagtgtacttttaggtcagccctatcaagtcccaaaaacatttgaattctgcaaaacctttggcactgaaggattcaaatggggaacctggtgatattataata

SEQ ID NO: 28506 - DNA, 120 bp, synthetic construct
  source 1..120: mol_type = other DNA
gagttcgagaccagcctgaccaacatagtgaaacccccatctgtactaaaaatacaaaaattagccaggcatggtggcacacacctgtagtctcagctacttgggaggctgaggcaggag

SEQ ID NO: 28507 - DNA, 120 bp, synthetic construct; identical to SEQ ID NO: 8123
  source 1..120: mol_type = other DNA

SEQ ID NO: 28508 - DNA, 120 bp, synthetic construct
  source 1..120: mol_type = other DNA
ttgtttcttgttgtttttacttaaaacagagtaggtttactgagtgcaggcatctaacttgacagctcatattgtaagaggcaggaccctggaaggcaaaagagcggattaccccgaagc

SEQ ID NO: 28509 - DNA, 120 bp, synthetic construct
  source 1..120: mol_type = other DNA
tgggagttttgttttttgttttgttttgtttttttgagatggagtttccctgttgttgcccaggctagagtgcaatggcgcgatttcagcccacctcaacctctgcctcctgggttcaag

SEQ ID NO: 28510 - DNA, 120 bp, synthetic construct
  source 1..120: mol_type = other DNA
cccgacctcaggtgacctgccagcctagcctcccaaagtgctgggattacaggcgtgagccaccgcgctcagccaaaatgcccctgatagtgtggtagggatttcctttattgtttgttt

SEQ ID NO: 28511 - DNA, 120 bp, synthetic construct
  source 1..120: mol_type = other DNA
tacctcgtgggctcaagcagtcctcccacctcagcctccctagtagctgggactacaagcacacaccaccatgcccagctaattgtttgtatttttggtagagactgttttgctatgtta

SEQ ID NO: 28512 - DNA, 120 bp, synthetic construct; identical to SEQ ID NO: 8124
  source 1..120: mol_type = other DNA

SEQ ID NO: 28513 - DNA, 120 bp, synthetic construct
  source 1..120: mol_type = other DNA
taactccttggttgaaaggcccatctcattcagcttccagcttcctttttcttttccttttgagacggagtcttgctttgtcgcccaggctggagtgcagtggcatgatctcggctcact

SEQ ID NO: 28514 - DNA, 120 bp, synthetic construct
  source 1..120: mol_type = other DNA
tttttatttgtttatttatttttgagacggagtctccctctgttccccaggctggagtgcagtggcagtatcttgactcactgccacctccgcctcctgggttcaagtgattctccttcc

SEQ ID NO: 28515 - DNA, 120 bp, synthetic construct
  source 1..120: mol_type = other DNA
gatgatccacctgcctcggcctcccaaagtgctgggattacaggcatgagccaccatgcccgacctaatttttgtgtttttagtagagatggggtttcaacatgttggccaggctggtct

SEQ ID NO: 28516 - DNA, 120 bp, synthetic construct
  source 1..120: mol_type = other DNA
gttttgttttgttttgtttgaaaaggagtctcattctgtcgcccaggctggagtgcagtggcacaatctcggctcactgcaacctccacctcccaggttcaagagattctcctgcctcag

SEQ ID NO: 28517 - DNA, 120 bp, synthetic construct; identical to SEQ ID NO: 8125
  source 1..120: mol_type = other DNA

SEQ ID NO: 28518 - DNA, 120 bp, synthetic construct
  source 1..120: mol_type = other DNA
tggagtgcagtagtgtgatctcggctcactgcaagctccgcttcccaggttcaagccattctcctgcctcagcctcccaagtagctgggattacaggcgcccgccaccacgcccagctaa

SEQ ID NO: 28519 - DNA, 120 bp, synthetic construct
  source 1..120: mol_type = other DNA
ccgcgccaggcctaaagggggcatttctaatactggagaaaggtgaacttttttttttttttttttccgagacagagtctcgctgtgtcacccaggctggagtgcaatggcgcaatctca

SEQ ID NO: 28520 - DNA, 120 bp, synthetic construct
  source 1..120: mol_type = other DNA
ccgtgttggccaggctggtcttaaactcctgtcctgacctgaggtgatccacccacctcagcttcccaaagtgctgggattacaggcatgagccactgtgcctgaccaggtgaactattt

SEQ ID NO: 28521 - DNA, 120 bp, synthetic construct; identical to SEQ ID NO: 8126
  source 1..120: mol_type = other DNA

SEQ ID NO: 28522 - DNA, 120 bp, synthetic construct
  source 1..120: mol_type = other DNA
ggagtccagtcgcgcaatcttggctcactgcaacctctgcctcccgggttcaagcagttctctgcctcagcctcccaagtagctgggattacaggcatccgccaccacgtcaggctaatt

SEQ ID NO: 28523 - DNA, 120 bp, synthetic construct
  source 1..120: mol_type = other DNA
cgcctggccgagttttttaatttctaaaaataaaaatgagtatacatctaaagtagtagaagaaaatgcagagaatgttttataatcttaaaatagagccttcctaagagtgaagtgaaa

SEQ ID NO: 28524 - DNA, 120 bp, synthetic construct
  source 1..120: mol_type = other DNA
gccaggagttcaagaccagcctgaacaacacagtgagacctggtctgtacaaaaaatacaaaattagccaggcgtggtggtacgtggctgtcgtcctgtagtcccagttactcaggaggc

SEQ ID NO: 28525 - DNA, 120 bp, synthetic construct; identical to SEQ ID NO: 8127
  source 1..120: mol_type = other DNA

SEQ ID NO: 28526 - DNA, 120 bp, synthetic construct
  source 1..120: mol_type = other DNA
ggaagacataggcacacttgtatattggcacaaacttattgagagcagtttgaccaaattgcgcatgtcctttgactcagaaattccacttatgaaaatctacccccacagaaagactgt

SEQ ID NO: 28527 - DNA, 120 bp, synthetic construct
  source 1..120: mol_type = other DNA
ggaacactaattataaagtcgtcaaaaagtatgaggtagactgtatatattcctgtggaaaaatataaatgagatgttaaatgaaagaagcaagttgccaagcaatatttgtagtatggt

SEQ ID NO: 28528 - DNA, 120 bp, synthetic construct
  source 1..120: mol_type = other DNA
atttcaacttaattatatccctttcacattaaaatgtcaaataaaattgggggaaaagccacctacagccccaccacccataggctagaatttttacatattttttgccagtctattttt

SEQ ID NO: 28529 - DNA, 120 bp, synthetic construct
  source 1..120: mol_type = other DNA
actgcaacctctgccttccaggttcaagtgattctcctgactcagcctcccaagtagctgggattacaggcacatgctaccacgcctggctaatttttgtatttttagtagagacaggat

SEQ ID NO: 28530 - DNA, 120 bp, synthetic construct; identical to SEQ ID NO: 8128
  source 1..120: mol_type = other DNA

SEQ ID NO: 28531 - DNA, 120 bp, synthetic construct
  source 1..120: mol_type = other DNA
aatataaaatataattatatatatattttgtttgtttgttttagtaaagacgggttttcaccatcttggccaggctggtattgaactcctgaccttgtgatccattgtccccccccccca

SEQ ID NO: 28532 - DNA, 120 bp, synthetic construct
  source 1..120: mol_type = other DNA
attatgtttttatagttggaggccctactccttaaaacctatgaatgtaaacctcccatgcaagcctgagcactcaccatgctcaccacctgagctcaggtggggaacaagcgaatgaga

SEQ ID NO: 28533 - DNA, 120 bp, synthetic construct
  source 1..120: mol_type = other DNA
ccttcgccagccacacctgggccattctgtcttcttgccttcctggccttgccttcccctattccagctttctgccaggtaaacagtactttccagcactaccaaataaagatttaagga

SEQ ID NO: 28534 - DNA, 120 bp, synthetic construct; identical to SEQ ID NO: 8129
  source 1..120: mol_type = other DNA

SEQ ID NO: 28535 - DNA, 120 bp, synthetic construct
  source 1..120: mol_type = other DNA
tcacctccccacccctctcccatcatcccctggtaaggctggctgagagaaattcccctgaaaacatttattttactcagtttattgataagtgataataaaagataagtattacatatt

SEQ ID NO: 28536 - DNA, 120 bp, synthetic construct
  source 1..120: mol_type = other DNA
gatttatatagtgacaatatttttaagtgaaaagtggaatacatagtcaaagaatttgggcactgccttggtggctggaggcaggtcagaaaatgtcagttggcatggtagaacttctag

SEQ ID NO: 28537 - DNA, 120 bp, synthetic construct
  source 1..120: mol_type = other DNA
ccacctcccgggttcacatcattctcctgcctcagcctgccgagtagctgggactgcaggcgcccgccaccaggcctggctaattttttgtattttttagtagagatgggatttcaccat

SEQ ID NO: 28538 - DNA, 120 bp, synthetic construct; identical to SEQ ID NO: 8130
  source 1..120: mol_type = other DNA

SEQ ID NO: 28539 - DNA, 120 bp, synthetic construct
  source 1..120: mol_type = other DNA
gccatgggaataaagaataaggatggggagacccctggccaaattttgggctggggacccccctgggattctgctgaagaggaggaagaagatgatgcctccaaggagcgggaatggaga

SEQ ID NO: 28540 - DNA, 120 bp, synthetic construct
  source 1..120: mol_type = other DNA
cagctgcccttccccactggctgctttccatctgcatgaatgcgtcacactaggctcctctgccccctcctctgtgcttccctgcttcttggggcccatcaccttctcacagcctctctc

SEQ ID NO: 28541 - DNA, 120 bp, synthetic construct
  source 1..120: mol_type = other DNA
agcagcgagaagcagagggatcccgtcgacccccacgtgctgagggctccagccagagctggcgacagcaggaggaggagcagcggctcttcagggagcgagcccgggccaaggaggaag

SEQ ID NO: 28542 - DNA, 120 bp, synthetic construct; identical to SEQ ID NO: 8131
  source 1..120: mol_type = other DNA

SEQ ID NO: 28543 - DNA, 120 bp, synthetic construct
  source 1..120: mol_type = other DNA
atgcagaggccctcaagtgaccctagggaagaagcaagaaacttcggggctgcagcctcaggatgaggcagaaggaagggtaagggaaaggatggggaccacaaggaagagccaggtgct

SEQ ID NO: 28544 - DNA, 120 bp, synthetic construct
  source 1..120: mol_type = other DNA
ctctgccgtttcctaataagacctggttccacatctcactcccagtgtctcctctgtctttttccattgctgtggttttcatcacccatgacatctcctttcccgccccgcctgctgaaa

SEQ ID NO: 28545 - DNA, 120 bp, synthetic construct
  source 1..120: mol_type = other DNA
gtctcactccactccctacactggggtcttgtccaccctgcaatctgtggctggagaaatagatgcgaacagaggcaaaaaggggaacaaaaccagtttccctcccctccctggctcccc

SEQ ID NO: 28546 - DNA, 120 bp, synthetic construct; identical to SEQ ID NO: 8132
  source 1..120: mol_type = other DNA

SEQ ID NO: 28547 - DNA, 120 bp, synthetic construct
  source 1..120: mol_type = other DNA
ctcatctccgccattcagctgctgccccatcctaaacctgagttcatctctgggcagcccaggcatggccttccctataaacatttccttttccaagaaccagtagttgaagtcctgaga

SEQ ID NO: 28548 - DNA, 120 bp, synthetic construct
  source 1..120: mol_type = other DNA
agggctgcaaggagagtacagacatgtgctggtgagtgcactgtctgcatagttacaccagagcatcttatcaatcagaaacttatctttcaggttttgagcccagttctctacaggaga

SEQ ID NO: 28549 - DNA, 120 bp, synthetic construct
  source 1..120: mol_type = other DNA
atccttgaataagacagcctgaagttcggaagagaccaaggcctctgaaggaccaggcagatgttcagggtgcaggagggggaagggctggtgagaaagatcctgtgagaggaagctgct

SEQ ID NO: 28550 - DNA, 120 bp, synthetic construct; identical to SEQ ID NO: 8133
  source 1..120: mol_type = other DNA

SEQ ID NO: 28551 - DNA, 120 bp, synthetic construct
  source 1..120: mol_type = other DNA
gctgttcactttctctgaccacatggtttccgcttctgtgtctcttgtttcctaggctgataaaaatactgagccctagaggccctggcttcctctgaccccttggggcaggcagcaggc

SEQ ID NO: 28552 - DNA, 120 bp, synthetic construct
  source 1..120: mol_type = other DNA
ggagttgagtctcagtggaggatgcattgggattcaattggaggaacaggcctggaaaagaataatgagattgaagagggtcagtttgaggactcaggttggggcaggtttggattaagt

SEQ ID NO: 28553 - DNA, 120 bp, synthetic construct
  source 1..120: mol_type = other DNA
cttcaagcttacaatctagtggggaggcagacccatacctagttaactgattcaaggcatgatgagtaaactttaagatgattacagaaagaggggagattaagtccatttgaaagcatc

SEQ ID NO: 28554 - DNA, 120 bp, synthetic construct
  source 1..120: mol_type = other DNA
taggcgaataacacgtcttgagcgagcctgacaagtcagaaaatgcagtatgttctgggaaaggagcgtcctgagggagaagaagcacaggtgtgagggaacatgtgatgaagaaaggac

SEQ ID NO: 28555 - DNA, 120 bp, synthetic construct; identical to SEQ ID NO: 8134
  source 1..120: mol_type = other DNA

SEQ ID NO: 28556 - DNA, 120 bp, synthetic construct
  source 1..120: mol_type = other DNA
gaaaccccgtctctactaaaaatataaaaactagctgggtgtggtcttgggcacctgtaatcccagctactcaggtgtctgaggcacaagaatcacttgaacccgggaggcagaggttgc

SEQ ID NO: 28557 - DNA, 120 bp, synthetic construct
  source 1..120: mol_type = other DNA
agcacctattaggagcagggcactgcttgacaataggtataaataataaagtcactgccttcatagaacttgcagtctaatgagacagtatacaaataataactatacattatagttata

SEQ ID NO: 28558 - DNA, 120 bp, synthetic construct
  source 1..120: mol_type = other DNA
aggaacagatttgggcatcattcccttcccagtagaggttgagcctttgagtggacaggatcttcaagggagggggcggagtgaccagaagagccctgagcatgatcaaaggaagagaac

SEQ ID NO: 28559 - DNA, 120 bp, synthetic construct; identical to SEQ ID NO: 8135
  source 1..120: mol_type = other DNA

SEQ ID NO: 28560 - DNA, 120 bp, synthetic construct
  source 1..120: mol_type = other DNA
gggctagtcttttgagacatcacacgaaaacggaaggtgagatagactggacatttgagggagaaatattccaaggaaggatcttttttgttgtttattttcaagaaataaaattgaagg

SEQ ID NO: 28561 - DNA, 120 bp, synthetic construct
  source 1..120: mol_type = other DNA
atggccaacatggcaaaaccgcatctctacgaaagatacaaaaattagccaggcgtggtggcacatgcctgtggtcccagctattcactgaggtgggagaatcgcttgaactcaggaggc

SEQ ID NO: 28562 - DNA, 120 bp, synthetic construct
  source 1..120: mol_type = other DNA
gcgctttgggaggctgaggtgggcagactatagatatcaggagttcaaaaccaacctagccaacatagtgaaatgctgtctttactaaaaatacaaaaattagctgggcgtggtggcaca

SEQ ID NO: 28563 - DNA, 120 bp, synthetic construct; identical to SEQ ID NO: 8136
  source 1..120: mol_type = other DNA

SEQ ID NO: 28564 - DNA, 120 bp, synthetic construct
  source 1..120: mol_type = other DNA
gagtgaagaacatcagaggcacggagatttagaacatcacgcacagtagtataatggggagtcaacaaagaatgagtaaaagttgtgtccaagaacactgatgactctctgagattagct

SEQ ID NO: 28565 - DNA, 120 bp, synthetic construct
  source 1..120: mol_type = other DNA
gcacagtagtataatggggagtcaacaaagaatgagtaaaagttgtgtccaagaacactgatgactctctgagattagctggccaggattagttataggcctcttatggtgactcagctg

SEQ ID NO: 28566 - DNA, 120 bp, synthetic construct
  source 1..120: mol_type = other DNA
atcttggttccctgcaacctctgcctcccgggttcaagcgattctcctccctcagcctccagagtagctgggattacagttgcccaccatcacgcccagctaatttttgtatttttagta

SEQ ID NO: 28567 - DNA, 120 bp, synthetic construct
  source 1..120: mol_type = other DNA
gagattctaaaatgcagacaaagtggagttgaaattgttgaccatgcagtacatgttaaatcaacaagcaaaaccaggaaagcagaagcagccggaagtcttggtaagaataaagaactg

SEQ ID NO: 28568 - DNA, 120 bp, synthetic construct; identical to SEQ ID NO: 8137
  source 1..120: mol_type = other DNA

SEQ ID NO: 28569 - DNA, 120 bp, synthetic construct
  source 1..120: mol_type = other DNA
ctctgtcacccaggctggagtgcagtggtgtgatctgggctcactgcaagatccgcctcccgggttaatgccattctctcgcctcagccttccgagtagctggggctacaggcacccacc

SEQ ID NO: 28570 - DNA, 120 bp, synthetic construct
  source 1..120: mol_type = other DNA
tgacctcgtgatccacccgcctcagcctcccaaagtgctgggattacaagtgtgagccactgcgcccagccgatctttgtggcttttaaagtcactaaagatggtggtaggaggccgggt

SEQ ID NO: 28571 - DNA, 120 bp, synthetic construct
  source 1..120: mol_type = other DNA
cctaggcaacatagcaaaaccctatctctggaaaaaaaaaaaaaatacaaaacttagccgggcacggtggtatgcgcctgtagtcctagctactcaggaggctgacgtgggaggatcact

SEQ ID NO: 28572 - DNA, 120 bp, synthetic construct
  source 1..120: mol_type = other DNA
gtggagaaagactgagctagttatacaagttgttaagagcataataaatattttgatggataagattgtgctgtgaagacaggaaaagcatggcaaatgcaaaaggcacgtgctttggga

SEQ ID NO: 28573 - DNA, 120 bp, synthetic construct; identical to SEQ ID NO: 8138
  source 1..120: mol_type = other DNA

SEQ ID NO: 28574 - DNA, 120 bp, synthetic construct
  source 1..120: mol_type = other DNA
cagtgggaattcagaagactaagtctggagagtttagcttctaggagcaggaggttgttgcctctggaattcagaatggaagatgcactgcatccattgtgaggggaaacaagtgcctca

SEQ ID NO: 28575 - DNA, 120 bp, synthetic construct
  source 1..120: mol_type = other DNA
ctctagcttggaccttgcccctgaaatccagatgtgtatctgcccagtggcatctctacttgcatgtctaatagacttagacttaccacacccaaaatagaattttttagtttttccatc

SEQ ID NO: 28576 - DNA, 120 bp, synthetic construct
  source 1..120: mol_type = other DNA
gaatgtataatatatcccaaacttgtctacttctctccatctccatggctgccactattttctcttcaccatcaatgccactgccacctgtctcctaccagccagcctaaacacaggagc

SEQ ID NO: 28577 - DNA, 120 bp, synthetic construct
  source 1..120: mol_type = other DNA
acatgatgaaaccctatctctactaaaaataccaaaattagccaggcacggtggcgcatgcctgtaatcccagctactcggggggccgaggcaagagaatcacttgaacctgggaggtgg

SEQ ID NO: 28578 - DNA, 120 bp, synthetic construct; identical to SEQ ID NO: 8139
  source 1..120: mol_type = other DNA

SEQ ID NO: 28579 - DNA, 120 bp, synthetic construct
  source 1..120: mol_type = other DNA
tatactaaaagtacaaaaattagccaggcatggtgacatgcacctataatcccagctacttgggagactgacataggtggattgcttaaacctgggaggcagaggttgcagtgagccgag

SEQ ID NO: 28580 - DNA, 120 bp, synthetic construct
  source 1..120: mol_type = other DNA
gcaagtggatcacctgaggtcaggagttcgagaccagcctggccaagatggtgtactttctctactaaaagtacaaaaattagccaggcatggtggcatgcacctataatcccagctact

SEQ ID NO: 28581 - DNA, 120 bp, synthetic construct
  source 1..120: mol_type = other DNA
agaaaaaaaatccagggccagtgtggtgactcatgcctgtaatcccaaaactttgggaggctggcccagcatggtggctcacacctgtaatcccaaaactttgggaggctgaggcaggcg

SEQ ID NO: 28582 - DNA, 120 bp, synthetic construct; identical to SEQ ID NO: 8140
  source 1..120: mol_type = other DNA

SEQ ID NO: 28583 - DNA, 120 bp, synthetic construct
  source 1..120: mol_type = other DNA
acacacctgtagtcctagatacttgggaagctgaggtggaaggatgacttgagcccatggttttgaggttgcagtgggctatgatggtgccactgcactccagcctaggccacagagcaa

SEQ ID NO: 28584 - DNA, 120 bp, synthetic construct
  source 1..120: mol_type = other DNA
acacacgcacgcatgcacgcaccacacactctgacgacctttaaaggcttcctgtggctggatgaaatctagaggctttacccttcttgcatggccctgcatgacctggcccctgccctc

SEQ ID NO: 28585 - DNA, 120 bp, synthetic construct
  source 1..120: mol_type = other DNA
tccctttacctgaaatgctttgctcccaaacttttacctggtcactattttttgtcatttgggtctcagctccagtgccacccaaacactcaaagaggattttgctgactactgtattta

SEQ ID NO: 28586 - DNA, 120 bp, synthetic construct; identical to SEQ ID NO: 8141
  source 1..120: mol_type = other DNA

SEQ ID NO: 28587 - DNA, 120 bp, synthetic construct
  source 1..120: mol_type = other DNA
ggggtagaggagaagttttatttagggggttattaattgggatgtgtttagatttaaggttagggttacagttggggttgagtttgagttgtgatttgggttgaggttaaatttgggtta

SEQ ID NO: 28588 - DNA, 120 bp, synthetic construct
  source 1..120: mol_type = other DNA
actataaagactgtatttccctgagtctggggcacaagactccagtcatcagctctcccacccagggaaagtcccaaaccaactgctggcctgcccaagaaagaaaccaaattcatacaa

SEQ ID NO: 28589 - DNA, 120 bp, synthetic construct
  source 1..120: mol_type = other DNA
atgtctccccatcacccttcttgccttcccttttttgtctttcaatgtcccattcttcctctttaatttaaatttctctctgtgtctcactgttaattgcaatacctttttttgtttgct

SEQ ID NO: 28590 - DNA, 120 bp, synthetic construct; identical to SEQ ID NO: 8142
  source 1..120: mol_type = other DNA

SEQ ID NO: 28591 - DNA, 120 bp, synthetic construct
  source 1..120: mol_type = other DNA
taataacattttatattttaatatagctcagctggggtcccagtccatcagctcataccattagagaagcagaaagagacaacaggaagcaaaaaggaccctgagagaaagggcaacaca

SEQ ID NO: 28592 - DNA, 120 bp, synthetic construct
  source 1..120: mol_type = other DNA
gttgggcgcagtggctcacgcccataatcccagcactttgggaggccaaggctggtgggtcacctgtggtcaggaattcaagaccaacctggccaacatggtgagaccccgtctctacta

SEQ ID NO: 28593 - DNA, 120 bp, synthetic construct
  source 1..120: mol_type = other DNA
gcttgaacctgggaggcagaggttgcagtgagccaagatcgtgccactgcactccagcctgtgcgacagtgagaaactgtctcaaaaaaaaaaaaaaaggaaaagaaattttctgaccta

SEQ ID NO: 28594 - DNA, 120 bp, synthetic construct
  source 1..120: mol_type = other DNA
agagaccaagaagaatatggccaggccttgctgggatccccccagtcccagtctgtgaccattagatgatactccttttgttcaattacatttctgcacagctgttcattcttcatcaaa

SEQ ID NO: 28595 - DNA, 120 bp, synthetic construct; identical to SEQ ID NO: 8143
  source 1..120: mol_type = other DNA

SEQ ID NO: 28596 - DNA, 120 bp, synthetic construct
  source 1..120: mol_type = other DNA
agactagtaaagcataaaaggcaaaggggcaggtcctcaagtagagaagaacaggagaaatagctcatacacacccagaatgttacttacatgtccctccatgttacaccaagacccctc

SEQ ID NO: 28597 - DNA, 120 bp, synthetic construct
  source 1..120: mol_type = other DNA
gcagtaataatatttgaggtgacaagttggtattatctcaaacttaggaaaagtgaataaagtcatctttagaaactgctttttttaaaccttgtaacttgcaagctaagtgaaaatggg

SEQ ID NO: 28598 - DNA, 120 bp, synthetic construct
  source 1..120: mol_type = other DNA
attttttttaaaaacattactgatacatacaaccacgtatatgaatctcacaaacataatgctgactgaaagaagtcaaacagaaatgagtacattctgtgtgatttcatttatatgatg

SEQ ID NO: 28599 - DNA, 120 bp, synthetic construct
  source 1..120: mol_type = other DNA
gctgggtggtggctacatacagatggaaaaattcatcagctgtacacttaagaggtgtccacctcatacctaagttacatatcaataaaaaggaaaaaaattttggaaactttttttttt

SEQ ID NO: 28600 - DNA, 120 bp, synthetic construct; identical to SEQ ID NO: 8144
  source 1..120: mol_type = other DNA

SEQ ID NO: 28601 - DNA, 120 bp, synthetic construct
  source 1..120: mol_type = other DNA
ccaccctaagtcaccacccttaagcctcacccatgtggaattctgaaacttcctttgtagaaaactttggaaggtgtctgccacattgatcctggaatgtgtgtttatttggggttatat

SEQ ID NO: 28602 - DNA, 120 bp, synthetic construct
  source 1..120: mol_type = other DNA
ttgactgtccagcatcatctctgagtaaggggaccaaaaaatttatcttccaaactaggacactttcaagagtggaagggggatccattaatattttcacctggacaagaggcaaacacc

SEQ ID NO: 28603 - DNA, 120 bp, synthetic construct
  source 1..120: mol_type = other DNA
gggacaagtatgatttgagttgtttgggacaaggacaggggtacaagagaaggaaatgggcaaagagagaagcctgtactcagccaagggtgcagagatgttatatatgattgctcttca

SEQ ID NO: 28604 - DNA, 120 bp, synthetic construct
  source 1..120: mol_type = other DNA
ctgacccgactccctttcccagaactcagtcgcctgaacccccagcctgtggttctctcctaggcctcagcctttcctgcctttgactgaaacagcagtatcttctaagccctgggggct

SEQ ID NO: 28605 - DNA, 120 bp, synthetic construct; identical to SEQ ID NO: 8145
  source 1..120: mol_type = other DNA

SEQ ID NO: 28606 - DNA, 120 bp, synthetic construct
  source 1..120: mol_type = other DNA
ctgtctctgactctccatctgtcagtctcattgtctctgtcacacattctctgtttctgccatgattcctctctgttcccttcctgtctctctctgtctccctctgctcaccttggggtt

SEQ ID NO: 28607 - DNA, 120 bp, synthetic construct
  source 1..120: mol_type = other DNA
ctctctctctctttctctgcaggttctccccatgacaccacctgaacgtctcttcctcccaagggtgtgtggcaccaccctacacctcctccttctggggctgctgctggttctgctgcc

SEQ ID NO: 28608 - DNA, 120 bp, synthetic construct
  source 1..120: mol_type = other DNA
ccttcagctgcccagactgcccgtcagcaccccaagatgcatcttgcccacagcaccctcaaacctgctgctcacctcattggtaaacatccacctgacctcccagacatgtccccacca

SEQ ID NO: 28609 - DNA, 120 bp, synthetic construct; identical to SEQ ID NO: 8146
  source 1..120: mol_type = other DNA

SEQ ID NO: 28610 - DNA, 120 bp, synthetic construct
  source 1..120: mol_type = other DNA
tctacttcgtctactcccaggtggtcttctctgggaaagcctactctcccaaggccacctcctccccactctacctggcccatgaggtccagctcttctcctcccagtaccccttccatg

SEQ ID NO: 28611 - DNA, 120 bp, synthetic construct
  source 1..120: mol_type = other DNA
atggcatcccccacctagtcctcagccctagtactgtcttctttggagccttcgctctgtagaacttggaaaaatccagaaagaaaaaataattgatttcaagaccttctccccattctg

SEQ ID NO: 28612 - DNA, 120 bp, synthetic construct
  source 1..120: mol_type = other DNA
accggagctttcaaagaaggaattctaggcatcccaggggaccacacctccctgaaccatccctgatgtctgtctggctgaggatttcaagcctgcctaggaattcccagcccaaagctg

SEQ ID NO: 28613 - DNA, 120 bp, synthetic construct; identical to SEQ ID NO: 8147
  source 1..120: mol_type = other DNA

SEQ ID NO: 28614 - DNA, 120 bp, synthetic construct
  source 1..120: mol_type = other DNA
cttttctctgaaatgctgtctgcttgtgtgtgtgtgtctgggagtgagaacttcccagtctatctaaggaatggagggagggacagagggctcaaagggagcaagagctgtggggagaac

SEQ ID NO: 28615 - DNA, 120 bp, synthetic construct
  source 1..120: mol_type = other DNA
gaggggcgggggtcagggagctcctgggagatatggccacatgtagcggctctgaggaatgggttacaggagacctctggggagatgtgaccacagcaatgggtaggagaatgtccaggg

SEQ ID NO: 28616 - DNA, 120 bp, synthetic construct
  source 1..120: mol_type = other DNA
atggccacacactggggccctgagaagtgagagcttcatgaaaaaaatcagggaccccagagttccttggaagccaagactgaaaccagcattatgagtctccgggtcagaatgaaagaa

SEQ ID NO: 28617 - DNA, 120 bp, synthetic construct; identical to SEQ ID NO: 8148
  source 1..120: mol_type = other DNA

SEQ ID NO: 28618 - DNA, 120 bp, synthetic construct
  source 1..120: mol_type = other DNA
cagggtcctacacacaaatcagtcagtggcccagaagacccccctcggaatcggagcagggaggatggggagtgtgaggggtatccttgatgcttgtgtgtccccaactttccaaatccc

SEQ ID NO: 28619 - DNA, 120 bp, synthetic construct
  source 1..120: mol_type = other DNA
cgccctcctctcgccccagggacatataaaggcagttgttggcacacccagccagcagacgctccctcagcaaggacagcagaggaccagctaagagggagagaagcaactacagacccc

SEQ ID NO: 28620 - DNA, 120 bp, synthetic construct
  source 1..120: mol_type = other DNA
aaagcatgatccgggacgtggagctggccgaggaggcgctccccaagaagacaggggggccccagggctccaggcggtgcttgttcctcagcctcttctccttcctgatcgtggcaggcg

SEQ ID NO: 28621 - DNA, 120 bp, synthetic construct; identical to SEQ ID NO: 2296
  source 1..120: mol_type = other DNA

SEQ ID NO: 28622 - DNA, 120 bp, synthetic construct
  source 1..120: mol_type = other DNA
aagcagatatataaataagatatggagacagatgtggggtgtgagaagagagatgggggaagaaacaagtgatatgaataaagatggtgagacagaaagagcgggaaatatgacagctaa

SEQ ID NO: 28623 - DNA, 120 bp, synthetic construct
  source 1..120: mol_type = other DNA
tgcctggaaggtgaatacacagatgaatggagagagaaaaccagacacctcagggctaagagcgcaggccagacaggcagccagctgttcctcctttaagggtgactccctcgatgttaa

SEQ ID NO: 28624 - DNA, 120 bp, synthetic construct
  source 1..120: mol_type = other DNA
gttagtaccggtatggaagcagtgggggaaatttaaagttttggtcttgggggaggatggatggaggtgaaagtaggggggtattttctaggaagtttaagggtctcagctttttctttt

SEQ ID NO: 28625 - DNA, 120 bp, synthetic construct; identical to SEQ ID NO: 8150
  source 1..120: mol_type = other DNA

SEQ ID NO: 28626 - DNA, 120 bp, synthetic construct
  source 1..120: mol_type = other DNA
ccagcaaaccctcaagctgaggggcagctccagtggctgaaccgccgggccaatgccctcctggccaatggcgtggagctgagagataaccagctggtggtgccatcagagggcctgtac

SEQ ID NO: 28627 - DNA, 120 bp, synthetic construct
  source 1..120: mol_type = other DNA
atcaagagcccctgccagagggagaccccagagggggctgaggccaagccctggtatgagcccatctatctgggaggggtcttccagctggagaagggtgaccgactcagcgctgagatc

SEQ ID NO: 28628 - DNA, 120 bp, synthetic construct
  source 1..120: mol_type = other DNA
accccctccttcagacaccctcaacctcttctggctcaaaaagagaattgggggcttagggtcggaacccaagcttagaactttaagcaacaagaccaccacttcgaaacctgggattca

SEQ ID NO: 28629 - DNA, 120 bp, synthetic construct; identical to SEQ ID NO: 8151
  source 1..120: mol_type = other DNA

SEQ ID NO: 28630 - DNA, 120 bp, synthetic construct
  source 1..120: mol_type = other DNA
gggacccaatgtaggagctgccttggctcagacatgttttccgtgaaaacggagctgaacaataggctgttcccatgtagccccctggcctctgtgccttcttttgattatgttttttaa

SEQ ID NO: 28631 - DNA, 120 bp, synthetic construct
  source 1..120: mol_type = other DNA
gggagttgtgtctgtaatcgccctactattcagtggcgagaaataaagtttgcttagaaaagaaacatggtctccttcttggaattaattctgcatctgcctcttcttgtgggtgggaag

SEQ ID NO: 28632 - DNA, 120 bp, synthetic construct
  source 1..120: mol_type = other DNA
ccctacataaacaaagcccaacagaatattccccatcccccaggaaacaagagcctgaacctaattacctctccctcagggcatgggaatttccaactctgggaattccaatccttgctg

SEQ ID NO: 28633 - DNA, 120 bp, synthetic construct
  source 1..120: mol_type = other DNA
tctcaggtacctgaatcacacagccaagggacttccagagattcgggtgtctaggcttcaaatcaccctgtcctaactctgcaacctgaaccagccacttaacctatctatccaatgggg

SEQ ID NO: 28634 - DNA, 120 bp, synthetic construct; identical to SEQ ID NO: 8152
  source 1..120: mol_type = other DNA

SEQ ID NO: 28635 - DNA, 120 bp, synthetic construct
  source 1..120: mol_type = other DNA
taaaaaagaatgaaacataggaataagatgtgggtgaaggactcacatgccggcttggtcccactggtctttgtggtgaaggaggggagaggtgagaggtgggtaatccggaaagagaaa

SEQ ID NO: 28636 - DNA, 120 bp, synthetic construct
  source 1..120: mol_type = other DNA
agcccactagttcaagaccagcctgtgcaacatagcaagaccttgtttctagaaaaaaaattaaagattagtcaggtgtagtggtgcatgcctgtaatcctagctcctcaggaggctgag

SEQ ID NO: 28637 - DNA, 120 bp, synthetic construct
  source 1..120: mol_type = other DNA
aatatggagacggaaattgagcccccctagactgggagcccccactgagttcggaaattaggctttacctccagccctggggtgccaggcaggagaaaaccatgtggtaggctgaggggg

SEQ ID NO: 28638 - DNA, 120 bp, synthetic construct; identical to SEQ ID NO: 8153
  source 1..120: mol_type = other DNA

SEQ ID NO: 28639 - DNA, 120 bp, synthetic construct
  source 1..120: mol_type = other DNA
tggaggagaagagttgactgtcgggtaggagacagagaggccttcaggcagctctagggggagaagtgcggggcccctccaggcttcattcctctgtcatgataggggcttactctgctg

SEQ ID NO: 28640 - DNA, 120 bp, synthetic construct
  source 1..120: mol_type = other DNA
ggatgcctagagaagcttcggagtttgagaagtcccccttcctcccaccctccaactgggctaatggtggggcctggccattcagaggcagggagggggtgggacaggcagaccatcatc

SEQ ID NO: 28641 - DNA, 120 bp, synthetic construct
  source 1..120: mol_type = other DNA
agcatctttatcggcagcactgaagctttccattctttattttcatcaggttcaaaatcaatttccaaacagtctcctacatttttcccactgccatggggtcctgggcgtccgggcccc

SEQ ID NO: 28642 - DNA, 120 bp, synthetic construct; identical to SEQ ID NO: 8154
  source 1..120: mol_type = other DNA

SEQ ID NO: 28643 - DNA, 120 bp, synthetic construct
  source 1..120: mol_type = other DNA
gacagtagaggtaatagaggccgtcctgcgggagcgccagcccctcggcgtccgagaactgcgtcccgctcgtcagaaacgcctgttccttcgtcgtctcccagcctagcccctgcccct

SEQ ID NO: 28644 - DNA, 120 bp, synthetic construct
  source 1..120: mol_type = other DNA
aggagggatggtgctgtttctgggatgagtgcgagttgggggccgagggaacacggatgtggggtgcagaacgctgtagtggggacctccaggccggcttttgcttgcaccggagggaag

SEQ ID NO: 28645 - DNA, 120 bp, synthetic construct
  source 1..120: mol_type = other DNA
aaccttcggattatttacactcttattcaggtcttggaggtccttacctatgaggtgggcagctgggagcccggggctgagatctgtttctggctcctcctctggcagcttctgaaaccc

SEQ ID NO: 28646 - DNA, 120 bp, synthetic construct; identical to SEQ ID NO: 8155
  source 1..120: mol_type = other DNA

SEQ ID NO: 28647 - DNA, 120 bp, synthetic construct
  source 1..120: mol_type = other DNA
agggagaacaagcaaggcataggtacttgggcggagaaacagatgtacctcgggaagaggagaggagacacaaggggcttatgtcgggacacaagcacaacatcacaggaacatggaaag

SEQ ID NO: 28648 - DNA, 120 bp, synthetic construct
  source 1..120: mol_type = other DNA
ccagggcctgttgcagccactcaccagtcctccctgatcctggggcactaaggccagcacagccaggacagtgataggcaccgccagcaacaaggtcaccagagaagtggctcctgccac

SEQ ID NO: 28649 - DNA, 120 bp, synthetic construct
  source 1..120: mol_type = other DNA
ccccctccctgtagacctgcacacctggctgggactttccgcacacccctgctcccctcacccagcttcctgtttacccagagctggggtggggcagctggatgcctgggttctctgaac

SEQ ID NO: 28650 - DNA, 120 bp, synthetic construct; identical to SEQ ID NO: 8156
  source 1..120: mol_type = other DNA

SEQ ID NO: 28651 - DNA, 120 bp, synthetic construct
  source 1..120: mol_type = other DNA
ctgagtgagaaagggagaggtaagccttagcctcaccactgactactgactcactaaggagggatggaaatggagctttacctcccttgctacaaaaagtaaagacagatggacgaggca

SEQ ID NO: 28652 - DNA, 120 bp, synthetic construct
  source 1..120: mol_type = other DNA
tgaataaaaggacaaataaatgcaggaataaccaaaacaaagcagcaaggaccacatgaatggtagatgtaggcagcatgagtggttaagagtcaagggagtagccggggtagtggctta

SEQ ID NO: 28653 - DNA, 120 bp, synthetic construct
  source 1..120: mol_type = other DNA
tggtgaaaccctgtctctactaaagatacaaaaagttagccgggcgtggtggcacgcgcctgtaattccagctacacaggaggctgaggcaggagaatcacttaaacctgggaggcagag

SEQ ID NO: 28654 - DNA, 120 bp, synthetic construct; identical to SEQ ID NO: 8157
  source 1..120: mol_type = other DNA

SEQ ID NO: 28655 - DNA, 120 bp, synthetic construct
  source 1..120: mol_type = other DNA
cctcagcctcctgaatagctgggactataggcacatgccaccatgcccagctaatttttgcattttttgtagagatggatttttgccacattgcccaggctgggctcaaactcctggact

SEQ ID NO: 28656 - DNA, 120 bp, synthetic construct
  source 1..120: mol_type = other DNA
taagaaacttatggagctcacagagtcagtggcagaaccagaatttgaacccaggcatctggctccagagccttgataacaagacagtttaaaaactgaatactggggctgggcgcagtg

SEQ ID NO: 28657 - DNA, 120 bp, synthetic construct
  source 1..120: mol_type = other DNA
tagcggggcgtggtggtaggcacctttaattccagctacttgggaggctgaggcaggagaatcacttgaacccaggaggcggaagttgcagtgagccgaaatcatgccattgcactccag

SEQ ID NO: 28658 - DNA, 120 bp, synthetic construct
  source 1..120: mol_type = other DNA
atcacttgaggtcaagagtttgagaccagcctggccaacatggtgaaaccccttctccattaaaaatacaaaaattagctggatatggtggcacaaacctgtagtcccagctacttggga

SEQ ID NO: 28659 - DNA, 120 bp, synthetic construct; identical to SEQ ID NO: 8158
  source 1..120: mol_type = other DNA

SEQ ID NO: 28660 - DNA, 120 bp, synthetic construct
  source 1..120: mol_type = other DNA
aggctaaggtggaaagattgcttgagaccaggagttcaaaatcagcctgggcaacatagtaagaccccatttctacaaagcctcatgtggtagctggtgtctgtagtcctagctactcag

SEQ ID NO: 28661 - DNA, 120 bp, synthetic construct
  source 1..120: mol_type = other DNA
aaaaaatgttaatagtagcatctaggtggtaagaatatgttcactgtacaattattctcatttcaccctatgtttgcactttttaataataaaatgtaaaaaaaacaaaacaaacaaaca

SEQ ID NO: 28662 - DNA, 120 bp, synthetic construct
  source 1..120: mol_type = other DNA
accacatctcctcctcaccccttgccttacaggcgctccccagtcttcaccctcctcaaggagtgggtgtgcaatcctccagcacccatctccttctccatcacagtgccactaagaagc

SEQ ID NO: 28663 - DNA, 120 bp, synthetic construct; identical to SEQ ID NO: 8159
  source 1..120: mol_type = other DNA

SEQ ID NO: 28664 - DNA, 120 bp, synthetic construct
  source 1..120: mol_type = other DNA
gtaagaggtaatagagaagagttaatcaaggaagacacctgaaggtggtgggtgtttgctgactagtggcaggatcagtgaaatgactggagctgaggcagattatggccctagctacag

SEQ ID NO: 28665 - DNA, 120 bp, synthetic construct
  source 1..120: mol_type = other DNA
atgtctgaggtggcaacacttctcttcagccagacagcactggccagtttggagtctgtccatcctgcaggccacaagctctgggtaagctgggaatgggcagggaccttggtggaagga

SEQ ID NO: 28666 - DNA, 120 bp, synthetic construct
  source 1..120: mol_type = other DNA
catttctgtgcccacggcccttatggcctccacctgcacttctgctccccaccccccagaattcctcttaaacccagaagggtcccagtttccagaccctagtcagtatatctggctctg

SEQ ID NO: 28667 - DNA, 120 bp, synthetic construct; identical to SEQ ID NO: 8160
  source 1..120: mol_type = other DNA

SEQ ID NO: 28668 - DNA, 120 bp, synthetic construct
  source 1..120: mol_type = other DNA
cagaggaaagggctgggctctggagttgggcagagctggccttaaaccccagctccacctttctgggatgggtgacctagtaaagtccaggcttgaatctcgggtctttacttgggcaac

SEQ ID NO: 28669 - DNA, 120 bp, synthetic construct
  source 1..120: mol_type = other DNA
cttcacagatgaggaacttgaggcaagtcaccagcccctgatcatttcgcctaaaagagcaaggactagagttcctgacctccaggccagtccctgatccctgacctaatgttatcgcgg

SEQ ID NO: 28670 - DNA, 120 bp, synthetic construct
  source 1..120: mol_type = other DNA
tggtacaggagggaaagggacctcacgggaggcccagaaacctggtaagaggtgaggtattaaggtctgggatggagaagctctgagggtatatttttctgcctctaaaactgttggaga

SEQ ID NO: 28671 - DNA, 120 bp, synthetic construct; identical to SEQ ID NO: 8161
  source 1..120: mol_type = other DNA

SEQ ID NO: 28672 - DNA, 120 bp, synthetic construct
  source 1..120: mol_type = other DNA
tgggctgtgttgagcttcttcttttcttccagtaaagaggctggagaggagctgggtgagtctggggacagggaagggggagggcaagagagatcctgagtgggtgagtggggagaagca

SEQ ID NO: 28673 - DNA, 120 bp, synthetic construct
  source 1..120: mol_type = other DNA
aggcaaaagagaaagagaaaatgagacagaaaccaagagaaaaagtgagacagaggataggagagacagggagaaaatgagagtgagagagacacaaagagaagagcaatgaaagagaga

SEQ ID NO: 28674 - DNA, 120 bp, synthetic construct
  source 1..120: mol_type = other DNA
cttgagctcaggggttgaagacaatcctggacaacatagtgggactctgtctccaaagaaaaaagagagagagagagagagagagagagagggagagagagagagagagagggagagaag

SEQ ID NO: 28675 - DNA, 120 bp, synthetic construct
  source 1..120: mol_type = other DNA
catctctgcagaggctgccagtgcccagcagtgagggacctgacctcaggggcagagacaagagaggcaccaaggaggatccaagagctgactatgcctgcattgctgagaacaaaccca

SEQ ID NO: 28676 - DNA, 120 bp, synthetic construct; identical to SEQ ID NO: 8162
  source 1..120: mol_type = other DNA

SEQ ID NO: 28677 - DNA, 120 bp, synthetic construct
  source 1..120: mol_type = other DNA
cagggacccaagctcccctaacagccagaagagggtatgtgtgggcctggcaggaaagggcagttgccaaggaggagtcatatctgatccttcccatttctcaggacaatcaggctcagc

SEQ ID NO: 28678 - DNA, 120 bp, synthetic construct
  source 1..120: mol_type = other DNA
gttcagagttgggggaatccggagagagtagatttggcatctggagaatggagaagaaaacacttgagactcatgaggagttagtggtggggcagatttattggggtcttttgaagagga

SEQ ID NO: 28679 - DNA, 120 bp, synthetic construct
  source 1..120: mol_type = other DNA
aggctctcctcttcctggtctctgtcctccctcctcccactctcttactgcccctcccatcccgtccactattgcccctggctccattactcacatttgccctggtaatagacggtgctg

SEQ ID NO: 28680 - DNA, 120 bp, synthetic construct; identical to SEQ ID NO: 8163
  source 1..120: mol_type = other DNA

SEQ ID NO: 28681 - DNA, 120 bp, synthetic construct
  source 1..120: mol_type = other DNA
gaggaaacgggaagaagcaagtggggccaggcggcccctgaactctggggttccattcctcacctccttccctggaaccacctcatctcggaaccacgtgacggagccaatggccagtct

SEQ ID NO: 28682 - DNA, 120 bp, synthetic construct
  source 1..120: mol_type = other DNA
aaacacctccccagttattccaaagagaaaagacaacagagcttggagtagaacatcccagctttctccaggcatagggtgcatgggaatagatactttgggtgcctcattaaacccttc

SEQ ID NO: 28683 - DNA, 120 bp, synthetic construct
  source 1..120: mol_type = other DNA
gagatcgagaccatcctggccaacatggtgaaaccccgtctctactaaaaaaatacaaaaattagccgggcatggtggtgtgcacctgtaatcccagctactcgggaggctgaggcagga

SEQ ID NO: 28684 - DNA, 120 bp, synthetic construct; identical to SEQ ID NO: 8164
  source 1..120: mol_type = other DNA

SEQ ID NO: 28685 - DNA, 120 bp, synthetic construct
  source 1..120: mol_type = other DNA
gtaaaccatcatggtgaaattaagctcattaatgaatgcagctgcctagttaactaatatcactcattatattatccaggtattattttagtacaaatggcattgtacagtaagccatcc

SEQ ID NO: 28686 - DNA, 120 bp, synthetic construct
  source 1..120: mol_type = other DNA
gcctcagcctcccaagtagctgggactacaggcacccaccaccacgactggctaatttttgtattttcagtcgagacagggtttcaccatctggtctcaaactcctgacctcaagtgatc

SEQ ID NO: 28687 - DNA, 120 bp, synthetic construct
  source 1..120: mol_type = other DNA
ccaggtgaagacgtggccttaattggttgagattcctatttaacccgtccatgttgatgaattaaaccaaatattaaaatccctgattaaattatctacttagggaaatttacaagtcat

SEQ ID NO: 28688 - DNA, 120 bp, synthetic construct
  source 1..120: mol_type = other DNA
aatttgttctaggttcccagaaatccacattttgagaactcctgcatttagttaataatatgcctgatagttaaggtctctcagttcattaaaaacagtttcggccgggtgcagtggctc

SEQ ID NO: 28689 - DNA, 120 bp, synthetic construct; identical to SEQ ID NO: 8165
  source 1..120: mol_type = other DNA

SEQ ID NO: 28690 - DNA, 120 bp, synthetic construct
  source 1..120: mol_type = other DNA
ccaggcgggcgcagtggctcatgcctataattccagtaatttgggagaccgaggcaggcagatcacttgagatcaggagtttgagaccaacctggccaacatagcaaaaccccatctcta

SEQ ID NO: 28691 - DNA, 120 bp, synthetic construct
  source 1..120: mol_type = other DNA
ctgaggtcaggagttcaagaccagcccggccaacatggtaaaaccctgtctctactaaaaatacaaaaattagttgggtgtggtggtgcgcgcttgtaatcccagctacctaggaggctg

SEQ ID NO: 28692 - DNA, 120 bp, synthetic construct
  source 1..120: mol_type = other DNA
agagcaagactccgtctcaaaaaaaaaaaaaattagccaggtgtggtcgtgcgtgcgtgtagtcccagctactcaggaggctgaggcaggagaatcacctgaacatgggaggcagaggtt

SEQ ID NO: 28693 - DNA, 120 bp, synthetic construct
  source 1..120: mol_type = other DNA
ttcaccaagaaatttatcatagatttacttggatctctcaaactaaaaagcctcacagtgggtgacacagagagactgtgaattgggggagtccactgagtgtcacctttggagcagtcc

SEQ ID NO: 28694 - DNA, 120 bp, synthetic construct; identical to SEQ ID NO: 8166
  source 1..120: mol_type = other DNA

SEQ ID NO: 28695 - DNA, 120 bp, synthetic construct
  source 1..120: mol_type = other DNA
tccctgaggagagaggacagatgctgctggaggagatgtcagggtctctaggaggccaaggggccagcttgtggcaggctagctaagcgtgtgagggggagggtggggcttagatggctg

SEQ ID NO: 28696 - DNA, 120 bp, synthetic construct
  source 1..120: mol_type = other DNA
cagaagctaacctacttaccctccctgctgctcaccagtacccagacccatcccacccattcccttcctggaatctggcctcactgcaccccagggctactccaagatttctatgaggga

SEQ ID NO: 28697 - DNA, 120 bp, synthetic construct
  source 1..120: mol_type = other DNA
ttttgttttttgttttttttttgagctggagtctcactctgttgcccaggctggaatgcagtggcacaatctcggctcactgcaacctctgcctcctgggttcaagcaattctcttgcct

SEQ ID NO: 28698 - DNA, 120 bp, synthetic construct; identical to SEQ ID NO: 8167
  source 1..120: mol_type = other DNA

SEQ ID NO: 28699 - DNA, 120 bp, synthetic construct
  source 1..120: mol_type = other DNA
gttgcccaggccggtatccaactcctgggctcaaacaatccatccacttaggcctcccaaagtgcatgagtcaccatgcctggcgaaatgtatttcttaaataatgagacttgaaagtct

SEQ ID NO: 28700 - DNA, 120 bp, synthetic construct
  source 1..120: mol_type = other DNA
gaggatcacctgaggtcaggagtccgagaccagtctgatcaacatagagaaaccccgtctctactaaaaatacaaaattagccgggtgtggtggggcgcacctgtaatcccagctactcg

SEQ ID NO: 28701 - DNA, 120 bp, synthetic construct
  source 1..120: mol_type = other DNA
aagaaaaagaaaacaacattcgtctctttggacatctccatcagagctcttggataactatgtacattgtcaatgagcagtaatcattttaaagaaatcttgtttttcggagcagtagac

SEQ ID NO: 28702 - DNA, 120 bp, synthetic construct; identical to SEQ ID NO: 8168
  source 1..120: mol_type = other DNA

SEQ ID NO: 28703 - DNA, 120 bp, synthetic construct
  source 1..120: mol_type = other DNA
aaaaaaaaataattttggctaggtatggtgggtcacacctgtaatcccagtactttgggaagcccaggagggcagatcacttgagttaaagagttggaggccaggccaggcatggtggct

SEQ ID NO: 28704 - DNA, 120 bp, synthetic construct
  source 1..120: mol_type = other DNA
tgggtgtggtggcatctgcctgtagtcccagctactcaggaggctgaggcaggagaatcacttgaaccttggaggcagaggttgcagttagccgagattgcgccactgcactccagcctg

SEQ ID NO: 28705 - DNA, 120 bp, synthetic construct
  source 1..120: mol_type = other DNA
ggctcatgtctgtggtcccaactactcaggaggctgaggtaggaggatcatttgactctggaaggcagaggtttcaatgagttgagatcatgctgctgtactacagcctgggcaacatat

SEQ ID NO: 28706 - DNA, 120 bp, synthetic construct; identical to SEQ ID NO: 8169
  source 1..120: mol_type = other DNA

SEQ ID NO: 28707 - DNA, 120 bp, synthetic construct
  source 1..120: mol_type = other DNA
acctcagcttcccaaagtgctgggattataggcatgagccaccacatccagccatctaggctttattgttccatttacacagcgtggcagagtaaatttagctaattcttgccaagtgca

SEQ ID NO: 28708 - DNA, 120 bp, synthetic construct
  source 1..120: mol_type = other DNA
tccagcctgggcaacagagcaagaccttctctctctctctctctttttgagacaaggtctcactctgttgcctaggctagagtgcagtggcacaatcacggctcactgcagcttcaacct

SEQ ID NO: 28709 - DNA, 120 bp, synthetic construct
  source 1..120: mol_type = other DNA
caaactcctgggctcaagtgatttgcccactcgacctctcaaagtactgggattacaagcatgagccactgcgcttggccaacctcagctctacaaaaaagaaaaaaaaagtccaggcac

SEQ ID NO: 28710 - DNA, 120 bp, synthetic construct; identical to SEQ ID NO: 8170
  source 1..120: mol_type = other DNA

SEQ ID NO: 28711 - DNA, 120 bp, synthetic construct
  source 1..120: mol_type = other DNA
gatttcgaggctgcagtgagctatgatcttgccactgcactccagcctgaatgacagggtgagaccctgtctcaaaaaaaaaaaatcactactgacagatcataacagataaaataatca

SEQ ID NO: 28712 - DNA, 120 bp, synthetic construct
  source 1..120: mol_type = other DNA
aatatataaaaaaatgcacatctgtggaacacaataaaacaaggtaatacctctacagggattggtacaagagtatgccagacactcttgtatgtgtatcacacagctacaggagataat

SEQ ID NO: 28713 - DNA, 120 bp, synthetic construct
  source 1..120: mol_type = other DNA
ctattacattttttagagacaagggtctcactctatcactcaagcaggaatacagtggtgtgatcattgctcactgcagcctcgatctcctggactcaagcaatcctcctgcctcagcct

SEQ ID NO: 28714 - DNA, 120 bp, synthetic construct
  source 1..120: mol_type = other DNA
atttattttatttatttatttattttgagatggagtcttgttcttgttgcccaggctggagtgcaatggctcaatctcagctcactgcaacctctgcctcccgggttcaagcgattctcc

SEQ ID NO: 28715 - DNA, 120 bp, synthetic construct; identical to SEQ ID NO: 8171
  source 1..120: mol_type = other DNA

SEQ ID NO: 28716 - DNA, 120 bp, synthetic construct
  source 1..120: mol_type = other DNA
attcacgtgcctcagcctcccgagtatctgggttcacaggcgtgtgccaccacactcggctaatttttgtgtttttagtactgacggagttttgccatgttggccaggctggtcttaaac

SEQ ID NO: 28717 - DNA, 120 bp, synthetic construct
  source 1..120: mol_type = other DNA
cacagtacttttgtagactgtccagttcccacccatcactgaagtaattcagagctttcttttggagaagcagtcatctcatggttaagaatgctggtttggaatgagtctaggttcaaa

SEQ ID NO: 28718 - DNA, 120 bp, synthetic construct
  source 1..120: mol_type = other DNA
tggccttgaactttgaactcctgagctcaagtgaccctcccacgtcagcctccagagtatttgggactacagacacacatcatcacgtttggctcacttatttttattttttgtacagac

SEQ ID NO: 28719 - DNA, 120 bp, synthetic construct; identical to SEQ ID NO: 8172
  source 1..120: mol_type = other DNA

SEQ ID NO: 28720 - DNA, 120 bp, synthetic construct
  source 1..120: mol_type = other DNA
ccgatcccctaccttgcttgcctccttctatcaacaccccattcacaccccaaaggatcaatataggaaaaattgtctctactatctcagctgtaagaagcccacggtttggggagggag

SEQ ID NO: 28721 - DNA, 120 bp, synthetic construct
  source 1..120: mol_type = other DNA
cagatcacctgaggtcgggagttcgagaccagtctggccaacatggtgaatccccatctctactaaaaatacaaaacttagccagacgtggtggtgcgtgcctgtaatcccagctacttg

SEQ ID NO: 28722 - DNA, 120 bp, synthetic construct
  source 1..120: mol_type = other DNA
caaactccactcttccacagtgtacactcaatcacatggttctactccacgtcccaaggcaatgtggcttagaagacaaatcagcctaggttggagtcctggtgccactactgtaaactg

SEQ ID NO: 28723 - DNA, 120 bp, synthetic construct; identical to SEQ ID NO: 8173
  source 1..120: mol_type = other DNA

SEQ ID NO: 28724 - DNA, 120 bp, synthetic construct
  source 1..120: mol_type = other DNA
ctttttttttcttttttttttcttgagacagagtcttgttctgttacccaggctagagtgcagtggtgcgatctcggctcactgcaacctccgcctcccgggttcaagagattctcctgc

SEQ ID NO: 28725 - DNA, 120 bp, synthetic construct
  source 1..120: mol_type = other DNA
gtgatccacccacgtcggcctcccaaagtgctgggattacaggcgtgagccactgcatccatcctggccaaggatggaacttttctaaagaaattattcccaggcactcaagaggaaagg

SEQ ID NO: 28726 - DNA, 120 bp, synthetic construct
  source 1..120: mol_type = other DNA
gtgatttccgctcactgcaacctctgcctcccgggttcaagcgattctcctgcctcagcctcccaagtagctgggactacagcgcctgtcaccatgcctggctaacttttttgtattttt

SEQ ID NO: 28727 - DNA, 120 bp, synthetic construct; identical to SEQ ID NO: 8174
  source 1..120: mol_type = other DNA

SEQ ID NO: 28728 - DNA, 120 bp, synthetic construct
  source 1..120: mol_type = other DNA
cttatcaatatttttcaactaatgaatggctcccaggtgatgatactttcagcttctgagaacagcttctcctctgaggctcatagcatctgacctcacgaccttcaatctctccttggt

SEQ ID NO: 28729 - DNA, 120 bp, synthetic construct
  source 1..120: mol_type = other DNA
tgttgttgctggagtgcaatggcgtgatcttggttcaccgcaacctctgcctcccaggttcaagcgattctcctgccccagcctccagagtagctgggattacaggcacctgccaccatg

SEQ ID NO: 28730 - DNA, 120 bp, synthetic construct
  source 1..120: mol_type = other DNA
gtgagccaccatgcccagcccacttcctctctatttcaacctctgccaactccttaatggacttaatgtccatatgaatgactttttttttttttttttttgagagagagtcttgctctg

SEQ ID NO: 28731 - DNA, 120 bp, synthetic construct
  source 1..120: mol_type = other DNA
acctggctaatttttttgtattttttagtagagacagggtttcaccatgttagccaggatggtctcaatctcctgacctcgtgatccacctgcctcggcctcccaaagtgctgggattac

SEQ ID NO: 28732 - DNA, 120 bp, synthetic construct; identical to SEQ ID NO: 8175
  source 1..120: mol_type = other DNA

SEQ ID NO: 28733 - DNA, 120 bp, synthetic construct
  source 1..120: mol_type = other DNA
ctcctgagtagctacgactacaggcatatgccaccgcacccagctaattttttaacagtttttttgtaggctgggtgcagtggtttaggcctataatcctagcactttgggaggccgagg

SEQ ID NO: 28734 - DNA, 120 bp, synthetic construct
  source 1..120: mol_type = other DNA
gtcccagctactcgggaggctgaggcaggagaattgcttgaacctgggaggcagaggttgcagtgagccgagatcgcgtcattgcactccagcccgggtgacagagcaagactctgtctc

SEQ ID NO: 28735 - DNA, 120 bp, synthetic construct
  source 1..120: mol_type = other DNA
aggcctgagccactgcgctcggcctctatagattagtctgttcttgaacatcatattaatggagtcatatagtacatactcttgtatctggctcctttcattctgcttaatgtctgtgag

SEQ ID NO: 28736 - DNA, 120 bp, synthetic construct; identical to SEQ ID NO: 8176
  source 1..120: mol_type = other DNA

SEQ ID NO: 28737 - DNA, 120 bp, synthetic construct
  source 1..120: mol_type = other DNA
cctctttcccaaggacataaaagccatccaacctgagtcccccagactcctgtaccctaaacgtgtgcttttataccactgtcctgttggaaaatttttgggttgtttctcccacttttt

SEQ ID NO: 28738 - DNA, 120 bp, synthetic construct
  source 1..120: mol_type = other DNA
ctccgcctcctgcgttcaagtgattcttctgccttagcctcccaagtagctgggattacaggcatgtgccaccacacccagctaattttgtatttttggtagagatggggtttcaccatg

SEQ ID NO: 28739 - DNA, 120 bp, synthetic construct
  source 1..120: mol_type = other DNA
attatatattttttattatatatatttttgagatgagatctcactatgttgcccaggctagtctcaaagtcctgactccgggctttaggtgttcctccgacctcagcctttcacgtagct

SEQ ID NO: 28740 - DNA, 120 bp, synthetic construct; identical to SEQ ID NO: 8177
  source 1..120: mol_type = other DNA

SEQ ID NO: 28741 - DNA, 120 bp, synthetic construct
  source 1..120: mol_type = other DNA
ccaaaagatctccaggccctgtccattttgcttctgaaagatcgcaggtgtctttcccttgctcttcattccactggttgctaaatccctcatcaactcaaggggaaacgagcagagttg

SEQ ID NO: 28742 - DNA, 120 bp, synthetic construct
  source 1..120: mol_type = other DNA
ccctatcttcatctctcttaatcgctcttttcagtatctctctccttatctctcatatttcccacagctctgtccacaactctttctgtctcaccatgttattcatattacttgtttctt

SEQ ID NO: 28743 - DNA, 120 bp, synthetic construct
  source 1..120: mol_type = other DNA
tattcactcattcaacaaatattcagcgagcaccttccacgtgagacattctattttttttctttttttttttttgcgctctcagctcactgtaacctccacctcccaggttcaaatgat

SEQ ID NO: 28744 - DNA, 120 bp, synthetic construct
  source 1..120: mol_type = other DNA
gatggggttttgccatgttggccaggctggtcttgaactcctggcctcaagtgatccacctgcctcagcctcccaaagtgctgggattacaggtgtgagctgccgtgtctggtctgcctc

SEQ ID NO: 28745 - DNA, 120 bp, synthetic construct; identical to SEQ ID NO: 8178
  source 1..120: mol_type = other DNA

SEQ ID NO: 28746 - DNA, 120 bp, synthetic construct
  source 1..120: mol_type = other DNA
tgtaatcccaacactttgggaggccgaggagggtgcatcacgaggtcaggagttcgagaccagcctgaccaatatggtgaaactccgtctctactaaaaatacaaaaagtagccaggcgt

SEQ ID NO: 28747 - DNA, 120 bp, synthetic construct
  source 1..120: mol_type = other DNA
ccatctcaaaaaaaaaaaaaaatttgtgcagcagcgacagaaaagtaacctacaatattagaggaagactcacatctctcagaaactatatattaagcaggcaaaaaaattattaaagac

SEQ ID NO: 28748 - DNA, 120 bp, synthetic construct
  source 1..120: mol_type = other DNA
aatacaaaaaattagccaggcgtggtggcatgcatctgtagtcccagctactagggaggctgaggcaggagaatcgcttgaacctgggaggtggaggttgcactgagctgacatcacttc

SEQ ID NO: 28749 - DNA, 120 bp, synthetic construct; identical to SEQ ID NO: 2329
  source 1..120: mol_type = other DNA

SEQ ID NO: 28750 - DNA, 120 bp, synthetic construct
  source 1..120: mol_type = other DNA
gtctctactaaaaacaaaaaattagctaggcatggtggtcggcgcctgtaatcttaactacctgggaggctgaggcaggagaattgctggaaccgggaggcggaggttgcagtgagccga

SEQ ID NO: 28751 - DNA, 120 bp, synthetic construct
  source 1..120: mol_type = other DNA
ttgaaactgtcccaagattgacaagaattgcatgctgggatctgggcagaaatatagttataattaagcataaaccaggctgcactttggctcactgctctattcctgcaagtctccaga

SEQ ID NO: 28752 - DNA, 120 bp, synthetic construct
  source 1..120: mol_type = other DNA
tgtaatcctgacactttgggaggctgaggagggcggatcacgaggtcaagaaatccagaccatcctggccaacatggcaaaaccctgtctctactaaacatacaaaaaaattagctgggc

SEQ ID NO: 28753 - DNA, 120 bp, synthetic construct; identical to SEQ ID NO: 8180
  source 1..120: mol_type = other DNA

SEQ ID NO: 28754 - DNA, 120 bp, synthetic construct
  source 1..120: mol_type = other DNA
agagcgagactccgtctcaaaaaaaaaaaaaaattgctggacgtggtggcgggtgcctgcaatcctagctacttgggaggctgaggcaggggtatcacttgaatccggaaggtggaggtt

SEQ ID NO: 28755 - DNA, 120 bp, synthetic construct
  source 1..120: mol_type = other DNA
aatcccagcactttaggagggcaaggcaggtggatcacctgaggtcaggagttcgagatcagccagagccaacatgatgaaactccttctctcctaaaaaatacaaaacttagctgggcg

SEQ ID NO: 28756 - DNA, 120 bp, synthetic construct
  source 1..120: mol_type = other DNA
gtgagctgagatcatgtcactgcactccagcctgggtgacagagagagactccatctcaaaaaaaaaaaaaaaaaaaacctaaggcgtggtggcacatgcctgtcgtcccagctactcag

SEQ ID NO: 28757 - DNA, 120 bp, synthetic construct; identical to SEQ ID NO: 8181
  source 1..120: mol_type = other DNA

SEQ ID NO: 28758 - DNA, 120 bp, synthetic construct
  source 1..120: mol_type = other DNA
cccagcatcttcttgcatgtctattcttttcccctcatctctgtttccttctcagaaggccctgagtttccttctccacccgcttgtcttcctatatacccttcagtattcacttttttt

SEQ ID NO: 28759 - DNA, 120 bp, synthetic construct
  source 1..120: mol_type = other DNA
tgggattacaggcatgcgccaccatgcctggctaattttgtacatttagtagaaacggggtttctccatgtttgtcgggctgatctcaaactcctgacctcaggtgatctgcctgcctcg

SEQ ID NO: 28760 - DNA, 120 bp, synthetic construct
  source 1..120: mol_type = other DNA
tgtcattctctctatcccaggcagtttttctgagcatctaagcactgtctcaccccagtagtctgtcaagccattctcaatggaaagaccagtctgggaggcagtctcactcagaataaa

SEQ ID NO: 28761 - DNA, 120 bp, synthetic construct; identical to SEQ ID NO: 8182
  source 1..120: mol_type = other DNA

SEQ ID NO: 28762 - DNA, 120 bp, synthetic construct
  source 1..120: mol_type = other DNA
gtagtcccagctactcgggaggctgaggcaggagaatggcgtgaaaccaggaggcggagcttgcagtgagccgagatcgccactgcactccagcctgggcgacagagcgagactccatcc

SEQ ID NO: 28763 - DNA, 120 bp, synthetic construct
  source 1..120: mol_type = other DNA
ccccgtctctactaaaaacacaaaaaattagccgggcgtggtggcaggcgcctgtagtcccagctactcaggaggctgaggcaggagaatggcgtgaacctgggaggtggagcttgcagt

SEQ ID NO: 28764 - DNA, 120 bp, synthetic construct
  source 1..120: mol_type = other DNA
agcactctagaaggctgagaccagaggatcacttgagcccaggagttcaagaccagcctgggcaacctggcgagacttcatctctacaaaaaattttaaaatgagccaggcatggtggtg

SEQ ID NO: 28765 - DNA, 120 bp, synthetic construct; identical to SEQ ID NO: 8183
  source 1..120: mol_type = other DNA

SEQ ID NO: 28766 - DNA, 120 bp, synthetic construct
  source 1..120: mol_type = other DNA
ggaggtcaaagctgcagtagccatgtttgtgccactgcactccagcctggataacagaacgagaccctgtctccctgtctcaaaatattaatgtgtgtgtgcgtgcgtgtgtgtgtgtgt

SEQ ID NO: 28767 - DNA, 120 bp, synthetic construct
  source 1..120: mol_type = other DNA
acaactgagtttatgttagtaagttgacttttagaaagcccctaaggttggggtttgttgccaaggtaggcaactgtgtgattagagagttagaacttttagctccaaccctctgacctc

SEQ ID NO: 28768 - DNA, 120 bp, synthetic construct
  source 1..120: mol_type = other DNA
cagagaggacaagaaaactccaaatcccccttccccgatactttgtccggagcaactcttccatctgactgttcctaagttttatccttcataataaactagctaacataagtaaagtgt

SEQ ID NO: 28769 - DNA, 120 bp, synthetic construct; identical to SEQ ID NO: 8184
  source 1..120: mol_type = other DNA

SEQ ID NO: 28770 - DNA, 120 bp, synthetic construct
  source 1..120: mol_type = other DNA
gaccatcctggctaacatggtgaaaccctgtctctactaaaaatacaaaaaattagccaggcatggtggcgggtgcctgtagtcccagctactcgggaggctgaggcaggagaatcactt

SEQ ID NO: 28771 - DNA, 120 bp, synthetic construct
  source 1..120: mol_type = other DNA
ctttgcaaagagcctggaataacttccttttagtcctggactataatgatgatgataaatatacctcgatgtaaccctgagatcccaagattcactagcccttgaataaaaaaaaggaaa

SEQ ID NO: 28772 - DNA, 120 bp, synthetic construct
  source 1..120: mol_type = other DNA
ctatttgcctaagccaaaaatccatgaggttcacatggacttatagttacacaaattagaaacaaatgttatatttaaaaccatagagaaatgcccaggtgatgaaagctggggtgaagg

SEQ ID NO: 28773 - DNA, 120 bp, synthetic construct
  source 1..120: mol_type = other DNA
agtctgcacattcatttcaaactgttaaaggatttgtgggccatgcaatggtcccttgcattagagaagtcaaagagctttgtgcaatcctctcctgtctgtgatctggaagacacgtgc

SEQ ID NO: 28774 - DNA, 120 bp, synthetic construct; identical to SEQ ID NO: 8185
  source 1..120: mol_type = other DNA

SEQ ID NO: 28775 - DNA, 120 bp, synthetic construct
  source 1..120: mol_type = other DNA
cgagaccatcttggccaacatggtgaaacctcgtctccactaaaattacaaaaattagttgaacatggtggtgcgcacctgtagtcccagctacttgggaggctgaggcaggagagtcgc

SEQ ID NO: 28776 - DNA, 120 bp, synthetic construct
  source 1..120: mol_type = other DNA
tcaaaaaaaaaaaaataagtatttttctttctagccgtatatccaccttacatggtccctcaactccccaagcccactctgcctgccccatctcctccttccacatcctctcctcaacct

SEQ ID NO: 28777 - DNA, 120 bp, synthetic construct
  source 1..120: mol_type = other DNA
tacccaaagaaatacataaagtttgaccagaatggaaacagagatatcagtgaaaaaaggtgatttggggaagtgtgcaggcctaggaagacagaggcttgttcctttgcttgcttaaaa

SEQ ID NO: 28778 - DNA, 120 bp, synthetic construct
  source 1..120: mol_type = other DNA
ccgtctcactaaaaatacaaaaaattagccagctgggcgtggtggcaggtgcctgtaatcccagctactctggaggctgaggcaggagaatcacttgaacccgggaggtggaggttgcag

SEQ ID NO: 28779 - DNA, 120 bp, synthetic construct; identical to SEQ ID NO: 8186
  source 1..120: mol_type = other DNA

SEQ ID NO: 28780 - DNA, 120 bp, synthetic construct
  source 1..120: mol_type = other DNA
aggccaaggtgggaggatcacaaggttaggagttcaagaccagcctggccaacttggtgaaaccccatctctactaaaaatacaaaaattagccgggtatagtggtgatcgcctgtaatc

SEQ ID NO: 28781 - DNA, 120 bp, synthetic construct
  source 1..120: mol_type = other DNA
aaaaaaagctgggtgcagtggctcacgcctgtaatcctagcactttgggagtccgaggtgggtagatcacctaaggtcaggagttcaagaccagcctggtcaacatggtgaaaccccgcc

SEQ ID NO: 28782 - DNA, 120 bp, synthetic construct
  source 1..120: mol_type = other DNA
tcaagccattgcactctagcctgggcgacagagtgagactccgtttaaaaaaaaaacaaaaaacaaaaaacaaaaaactggggaccattggcaataatactcctatgtcccctcttccct

SEQ ID NO: 28783 - DNA, 120 bp, synthetic construct
  source 1..120: mol_type = other DNA
cctctgcctcccgggtttaagcgattcgcctgcgtcagcctcctgagcagctgggattacaggcacgcaccaccaggccctgctaatttttgtatttttagtagagatggggtttcacca

SEQ ID NO: 28784 - DNA, 120 bp, synthetic construct; identical to SEQ ID NO: 8187
  source 1..120: mol_type = other DNA

SEQ ID NO: 28785 - DNA, 120 bp, synthetic construct
  source 1..120: mol_type = other DNA
ctgcagcaggagaatgtagctgcaataaagggaagtcaagaagccagagtccagccaggtgcagtggctcatgcctgtaatcccagcactttgggaggctgaggtgggtggatcacaagg

SEQ ID NO: 28786 - DNA, 120 bp, synthetic construct
  source 1..120: mol_type = other DNA
gagaattgcttgaacccaggaggcagtggttgcagtgagccgagattgcaccattgcactcccgcctgggcgacagagcaagactccgactcaaaaaaaaaaaaaaaagcagcagcagca

SEQ ID NO: 28787 - DNA, 120 bp, synthetic construct
  source 1..120: mol_type = other DNA
cttcatcaatgccggggcagggtagatggagccctgggcagggagtttggaccaggaaatctcaatgagggaaatgtgctgtcctcacctctccaagaagcgactggccaaacagagtga

SEQ ID NO: 28788 - DNA, 120 bp, synthetic construct; identical to SEQ ID NO: 8188
  source 1..120: mol_type = other DNA

SEQ ID NO: 28789 - DNA, 120 bp, synthetic construct
  source 1..120: mol_type = other DNA
gggttacgttgcacattctaaagcaaacaaattaaaatgttttgttagacatttccatatttttaagggcctccttggagctgccaggctgggagtgaggtttctctccctttctaaacc

SEQ ID NO: 28790 - DNA, 120 bp, synthetic construct
  source 1..120: mol_type = other DNA
actcatgaaacctgacaaaatgcaaggtcttatcattacctgaaccttggacctgttcaaaaatactagttcctgagaataaatatccctggtgtcttcctgcccttcctgcacacctcc

SEQ ID NO: 28791 - DNA, 120 bp, synthetic construct
  source 1..120: mol_type = other DNA
agtggcttatcaaaatatttgtttcatgcgcacactgggctctcatttaagaggaatttgggagaatgttattttctaatctgcatttcacaccaggctccccctccttcctggggtgct

SEQ ID NO: 28792 - DNA, 120 bp, synthetic construct
  source 1..120: mol_type = other DNA
gcagacagaggcctccagcttggtctgtctccccacctctaccagcatctgctgagctatgagccaaaccagggatttacagggtagggagggtgggataggcagcggcattagatcgga

SEQ ID NO: 28793 - DNA, 120 bp, synthetic construct; identical to SEQ ID NO: 8189
  source 1..120: mol_type = other DNA

SEQ ID NO: 28794 - DNA, 120 bp, synthetic construct
  source 1..120: mol_type = other DNA
taggcggtggagacagggctgggggtaggagggttaggatttccacaagaacaaggcaggaacagcagagataaaaagtttacttttgtggtagcaaaaggggaacctgcctttattgcc

SEQ ID NO: 28795 - DNA, 120 bp, synthetic construct
  source 1..120: mol_type = other DNA
tccttccacgttgtctcctccacctagcagttggttggcaaccccttcctcagtcccctgctgaaaaccctccagtcagcgcttatcccttctgctctctcccctcacccagagaaatac

SEQ ID NO: 28796 - DNA, 120 bp, synthetic construct
  source 1..120: mol_type = other DNA
ttgggagggggcccacctaccacagtgggaggaaggagaatggggatgcggaagtgggagaggagagagagggtctccccaccttctccccatccccatcctctgcccccagatatcatg

SEQ ID NO: 28797 - DNA, 120 bp, synthetic construct; identical to SEQ ID NO: 8190
  source 1..120: mol_type = other DNA

SEQ ID NO: 28798 - DNA, 120 bp, synthetic construct
  source 1..120: mol_type = other DNA
caccctcacatccccatccccttctagcctttcctagcaccctatgatttattcccttgagaggagtgttccctgatccctgtgcctcttcccatctcaaccaggatcctgatgtatgag

SEQ ID NO: 28799 - DNA, 120 bp, synthetic construct
  source 1..120: mol_type = other DNA
aagggatgatgggattgaaggggcttctaatgacccagatatggaaacagaagacaaaattgtaagccagagtcaacaaattaaataaattaccccctcctccagatcaagtcagcttag

SEQ ID NO: 28800 - DNA, 120 bp, synthetic construct
  source 1..120: mol_type = other DNA
tgaacaatccatcaacaacgctatagtgtgtccactacagcagatggtttcacgcaccaagggggattccagctgtgtaagacagccttaacctcaaagaatgcaggcaggtcaaaaaca

SEQ ID NO: 28801 - DNA, 120 bp, synthetic construct; identical to SEQ ID NO: 8191
  source 1..120: mol_type = other DNA

SEQ ID NO: 28802 - DNA, 120 bp, synthetic construct
  source 1..120: mol_type = other DNA
ctctactaaaaatacaaaattagcctggtgtggtggcgcatgcctgtaatcccagctacttgggaagctgaggcaggagaatctcttgaacccaggaggtggaggttgtggtgatccgag

SEQ ID NO: 28803 - DNA, 120 bp, synthetic construct
  source 1..120: mol_type = other DNA
ctattaaataaagcaaagaatttacagctgggcgtggtggctcacgcctgtaatcccagcacttcaggaggccgaagcgggcagattacctgaaatcaggagttggagaccagcctggcc

SEQ ID NO: 28804 - DNA, 120 bp, synthetic construct
  source 1..120: mol_type = other DNA
gaggttgcggtgagccgagatcacgccatggcactccagcctgggtgacaagagtgagactctgtctcaaaaaaaaaaaaaaaaaaaaaaaaagactggaaggagaaactcattggagac

SEQ ID NO: 28805 - DNA, 120 bp, synthetic construct; identical to SEQ ID NO: 8192
  source 1..120: mol_type = other DNA

SEQ ID NO: 28806 - DNA, 120 bp, synthetic construct
  source 1..120: mol_type = other DNA
tatctactccgatcattcttcatatcatttttttttttttttcctgagatggagtctcatgttggccaggctggtctccaactcctgacctcaggtgacccacccaccttggcctctcaa

SEQ ID NO: 28807 - DNA, 120 bp, synthetic construct
  source 1..120: mol_type = other DNA
gtgatctcagctcactgcaacctccgtctcccaggttcaagcgattctcctgcctcagcctcccaagtagctgagactacaggcacgcgccaccagtccagctaatttttgtatttttag

SEQ ID NO: 28808 - DNA, 120 bp, synthetic construct
  source 1..120: mol_type = other DNA
atctcttaataagagtttttctagaaacatttctcaatcaccccaggcataatcatattttatttctctacttctttcttttttttttttttttgagatagagtttcgctcttgttgccc

SEQ ID NO: 28809 - DNA, 120 bp, synthetic construct
  source 1..120: mol_type = other DNA
gtaattgtatttttagtagagacggggtttctccatgttggtcaggctggtctcgaactcgtgacctcaggtgatccgcccgcctgagcctcccaaagtgctgggattacaggcgtgagc

SEQ ID NO: 28810 - DNA, 120 bp, synthetic construct; identical to SEQ ID NO: 8193
  source 1..120: mol_type = other DNA

SEQ ID NO: 28811 - DNA, 120 bp, synthetic construct
  source 1..120: mol_type = other DNA
ttgaatgatctgttgaatgggtataactctgatgggagcagagagttctagaatcgggtagtaagagacaaaggagggtaacagtactgcatttcacaaaatgaaacccattgttaagaa

SEQ ID NO: 28812 - DNA, 120 bp, synthetic construct
  source 1..120: mol_type = other DNA
ctatctttgttcaaatgatttgcatacattatgcaaataggtagaactgcccgaagaatgcctacgctgcgtggtgcggacgaaacgcttcccggggcctttggattggtctgtctagcc

SEQ ID NO: 28813 - DNA, 120 bp, synthetic construct
  source 1..120: mol_type = other DNA
gcctgcggaaactcagccctccggcagctaatcccgcccgccagcccccgtcctctctctctttctccctagctgaaggcgccacgggccgtgtgtcgttgccttccacttttggcgtcc

SEQ ID NO: 28814 - DNA, 120 bp, synthetic construct; identical to SEQ ID NO: 8194
  source 1..120: mol_type = other DNA

SEQ ID NO: 28815 - DNA, 120 bp, synthetic construct
  source 1..120: mol_type = other DNA
gagggggtgctcccgggggcggcggttgcccggatgggccgttagtcggggctcagccgcggagtgagcgagggagacgggaggagccgaacccggcgccatccgccgccatcctccccc

SEQ ID NO: 28816 - DNA, 120 bp, synthetic construct
  source 1..120: mol_type = other DNA
tggcggtggcggtggcggcggcggcggcggtggtgggccggggggaggagaagctgccattagccgccgccattttgtcctcctgctgccgggcctgcttgcccctccccctccggtacc

SEQ ID NO: 28817 - DNA, 120 bp, synthetic construct
  source 1..120: mol_type = other DNA
gctgcgctcctggcttttcacccccatttgtgggccccctccccggctgccgccccgtggtggtgggccgcgcccgacggttctctcggaagggcgcttttcctccatattggaccccct

SEQ ID NO: 28818 - DNA, 120 bp, synthetic construct; identical to SEQ ID NO: 8195
  source 1..120: mol_type = other DNA

SEQ ID NO: 28819 - DNA, 120 bp, synthetic construct
  source 1..120: mol_type = other DNA
acacctacgaagcaacatccatcttatctctagcttgtcataaagttctttctccccaattttagctttcattctgggcctgtctggatttccctgctttcttccccactatttctcatc

SEQ ID NO: 28820 - DNA, 120 bp, synthetic construct
  source 1..120: mol_type = other DNA
atttttaatgaggataggaaaacgaagatggctctggccttggccctctgttttctggcccatggttacagggtgctaaggtggctccataatgctttttctcagttcttcatatggtaa

SEQ ID NO: 28821 - DNA, 120 bp, synthetic construct
  source 1..120: mol_type = other DNA
tgttctatgaggatttctctggtaccaacccccattccggctgagcaagctcataaaatccttaaactcccagcataccttcctgcaaaccttcccagatggacacgaggctgctgggct

SEQ ID NO: 28822 - DNA, 120 bp, synthetic construct; identical to SEQ ID NO: 8196
  source 1..120: mol_type = other DNA

SEQ ID NO: 28823 - DNA, 120 bp, synthetic construct
  source 1..120: mol_type = other DNA
tttacatagactggaggaaaagacaccagagggcctcatatctgagtccctaatgataatgcaatggagtttttaagtttctgttatggtctgtacaggggacagagactgagacacttg

SEQ ID NO: 28824 - DNA, 120 bp, synthetic construct
  source 1..120: mol_type = other DNA
aagaagtattcctcgctcaacctgtttgatacgtataagggcaagtccttagagatccagaaacccgctggtgagagtcctgcaaagatgcttctgatggttgaaagctaggcatgcatg

SEQ ID NO: 28825 - DNA, 120 bp, synthetic construct
  source 1..120: mol_type = other DNA
ccagttatcctcctacaaaggcgtgtctgtggttccctgtctttggacacgtaagaattggaggaaaataaatgtggatttgggaaactttgaggccagcttgcttcttgcaggctcatg

SEQ ID NO: 28826 - DNA, 120 bp, synthetic construct
  source 1..120: mol_type = other DNA
ggctggagtgcaatggtgtgatcttgacttaccacaacctccacctcctgggtttaagcgattatcctgcctcagcctcctgagtagctgggattacaggcatgcgccaccacacccggc

SEQ ID NO: 28827 - DNA, 120 bp, synthetic construct; identical to SEQ ID NO: 8197
  source 1..120: mol_type = other DNA

SEQ ID NO: 28828 - DNA, 120 bp, synthetic construct
  source 1..120: mol_type = other DNA
cagagtctcgggaaagttgccattgcccggcgtatgccacctccagccaaccttccaagcctgaaagccgagaacaaaggcaatgaccccaatgtctcactagtgccaaaagacggaaca

SEQ ID NO: 28829 - DNA, 120 bp, synthetic construct
  source 1..120: mol_type = other DNA
cacgtctgagccagagacgaagaggtccctttcttacctattgcaggttccttgttaaatgactaaggaatggtactaaactttagctttttgtcttggagagagagcatgaaaaaatag

SEQ ID NO: 28830 - DNA, 120 bp, synthetic construct
  source 1..120: mol_type = other DNA
tatttgtaaatggtagcaatgggcatgatttcagtcctgagtctccaccagttggagaagtcagggaggcatctcaggtgtgaataaccttcccattctgtcccctcagttccgatgcct

SEQ ID NO: 28831 - DNA, 120 bp, synthetic construct
  source 1..120: mol_type = other DNA
gaatggttcatagctgccccacccacatcatttatcatctttctgaacacttccccagaacactcctttggttccaagcggggtaaagtcctgggcacaagccagcgtcacccatggagc

SEQ ID NO: 28832 - DNA, 120 bp, synthetic construct; identical to SEQ ID NO: 8198
  source 1..120: mol_type = other DNA

SEQ ID NO: 28833 - DNA, 120 bp, synthetic construct
  source 1..120: mol_type = other DNA
cactgcaacctctgcctcctgggttcaagcgattttcctgcctcagcctccagagtagcgggactacaggcacacgccaacacacccagctaattttttgtgtgtttttagtagagatgg

SEQ ID NO: 28834 - DNA, 120 bp, synthetic construct
  source 1..120: mol_type = other DNA
ttatagcatgtcctcaggaaatgtcttctgtctcctgttctgcatccccatcctaataggtggaagggcatcaagcctactgtcacgattctctcgagaggaatttccgaccctgcaggc

SEQ ID NO: 28835 - DNA, 120 bp, synthetic construct; identical to SEQ ID NO: 2352
  source 1..120: mol_type = other DNA

SEQ ID NO: 28836 - DNA, 120 bp, synthetic construct; identical to SEQ ID NO: 8199
  source 1..120: mol_type = other DNA

SEQ ID NO: 28837 - DNA, 120 bp, synthetic construct
  source 1..120: mol_type = other DNA
gacttagtctttgacctatgagatagaagggagggtgggaggatgattgatagcaggcttaaggagctagaagggtatatgactgtccctctgagcagctactgttggacccttttacag

SEQ ID NO: 28838 - DNA, 120 bp, synthetic construct
  source 1..120: mol_type = other DNA
aagcttattgggggaggagatggttttctagccaggaggctcagtctaggatcagtctcgcatgtggttatacaacatgccatatttcattttcttttttgtgtacagccgttttccccg

SEQ ID NO: 28839 - DNA, 120 bp, synthetic construct
  source 1..120: mol_type = other DNA
tggttgggcaggtaagtggatattaagggtcaagaatttggatcttgaaaggcaaaacctaatgaggaaaaaaaaatacagggttatgtgggtgaaaggcagacattgaagtgtaggaag

SEQ ID NO: 28840 - DNA, 120 bp, synthetic construct
  source 1..120: mol_type = other DNA
aaaaaaaaaaaaattttttagttgggtgtggactgtgcatctgtggtcccagctactctggaggttgtggtgggaggatcagttgagcccaggagttggaggtcacagtgagctatgatc

SEQ ID NO: 28841 - DNA, 120 bp, synthetic construct; identical to SEQ ID NO: 8200
  source 1..120: mol_type = other DNA

SEQ ID NO: 28842 - DNA, 120 bp, synthetic construct
  source 1..120: mol_type = other DNA
ggccatcaggggagaagaggagggggtcttggtttgtattttggtaatatactcttagaggagtatattagttgcagctgattttaatttcactgttgatctgctcacagcagggattcc

SEQ ID NO: 28843 - DNA, 120 bp, synthetic construct
  source 1..120: mol_type = other DNA
gagccgggacctcctgccccaaagcctcccctacccccacctcaccggggccccgccgggaactggggcccccctggggactacccagtgagtgtctccaataagggattgagagggtca

SEQ ID NO: 28844 - DNA, 120 bp, synthetic construct
  source 1..120: mol_type = other DNA
tctttggtaataggggagtctgggtaagaagtgagaaactgggatgctaatgaggaaagaagaaaaaggagccctgggtgtttgggtttcggaaggagagagggaacagaaaaataaaaa

SEQ ID NO: 28845 - DNA, 120 bp, synthetic construct; identical to SEQ ID NO: 8201
  source 1..120: mol_type = other DNA

SEQ ID NO: 28846 - DNA, 120 bp, synthetic construct
  source 1..120: mol_type = other DNA
ccagcacctgaagatgaggatgaggcatggcggcagcgacgaaagcagtcgtcatctgagatttccctggcagtggagcgggcccggcgacggcgagaagaagaggagcggcgcatgcaa

SEQ ID NO: 28847 - DNA, 120 bp, synthetic construct
  source 1..120: mol_type = other DNA
ccaccacctgcagtccctaaagaactccctgcacctccagctccacctccagcatcagccccaacaccagagacagaacctgaagagccagcacaggcccctcctgcccaatctactcct

SEQ ID NO: 28848 - DNA, 120 bp, synthetic construct
  source 1..120: mol_type = other DNA
cagatcactgcttcaaggtgcttaaaggtgcagggtggtaaggctggggataaatgaagtagaaggcagttgttttggtttattggactatcagtgatagtgttctatcatttgtatatc

SEQ ID NO: 28849 - DNA, 120 bp, synthetic construct; identical to SEQ ID NO: 8202
  source 1..120: mol_type = other DNA

SEQ ID NO: 28850 - DNA, 120 bp, synthetic construct
  source 1..120: mol_type = other DNA
aatcgctttaacccgggaggcagagatttctgtgagccaagaccatgccattgcactccagcctgggtgacagagcaagactctgtctcaaaaaaaaatcctgtctcacaagaaatacat

SEQ ID NO: 28851 - DNA, 120 bp, synthetic construct
  source 1..120: mol_type = other DNA
tgggtcttaaatgggaggggcttcaatagaatagatgttgaatagaatattttagtcttaagggagctagagatgagacgtgagattcctggggtgttcatggagtgtctattgttggac

SEQ ID NO: 28852 - DNA, 120 bp, synthetic construct
  source 1..120: mol_type = other DNA
caagggtgatgggattggtcccacccgccagccccctagtcagggcttgggctaccccaaatatcagaagtcgttgcctcctcgtttccagcggcagcagcaggtgaaatcaagttgttt

SEQ ID NO: 28853 - DNA, 120 bp, synthetic construct; identical to SEQ ID NO: 8203
  source 1..120: mol_type = other DNA

SEQ ID NO: 28854 - DNA, 120 bp, synthetic construct
  source 1..120: mol_type = other DNA
aggctccacccccgccccccaaggccctgtacccaggtgctctgggccggcccccacccatgcccccaatgaactttgatccccgatggatgatgattcctccttatgtggacccccggc

SEQ ID NO: 28855 - DNA, 120 bp, synthetic construct
  source 1..120: mol_type = other DNA
tcttactgtgactctggtacgataggttttgcccatcatagtgatgagggaagggcatatgcttggcactgctgagatagctctgttgcaaaaatgggcttagttaagaaataagcagtg

SEQ ID NO: 28856 - DNA, 120 bp, synthetic construct
  source 1..120: mol_type = other DNA
ttcgagaccaccatggctaacgtggtaaaaccccatttctactaaaaatacaaaaaagtagccggcgtggtggcgctcgcctgtagtcccagctactcgggagactgaggcaggagaaac

SEQ ID NO: 28857 - DNA, 120 bp, synthetic construct; identical to SEQ ID NO: 8204
  source 1..120: mol_type = other DNA

SEQ ID NO: 28858 - DNA, 120 bp, synthetic construct
  source 1..120: mol_type = other DNA
atgaataggattatttttctttttctttggtttcttcaggcctagttccccgagagcgttcagacagtgggggctcaagctcagagccatttgaccgtcatgcacctgctatgttacggg

SEQ ID NO: 28859 - DNA, 120 bp, synthetic construct
  source 1..120: mol_type = other DNA
aggggatgaggtgagtcttggtcatgagaaatgggtgagttcacagtgaaaggatctaggcctgggagaaaggtactttgggttagtggtagggatagggatgaacgggaaaggagaggc

SEQ ID NO: 28860 - DNA, 120 bp, synthetic construct
  source 1..120: mol_type = other DNA
cagaaaaatagtaaaagagagtctgcatcataataaagtgttcttttcccacctagttctggttttcctgagatacttatttccattctttctgtctgtctcttcaggagcgagactcct

SEQ ID NO: 28861 - DNA, 120 bp, synthetic construct; identical to SEQ ID NO: 8205
  source 1..120: mol_type = other DNA

SEQ ID NO: 28862 - DNA, 120 bp, synthetic construct
  source 1..120: mol_type = other DNA
cgccgggctgggcctataaagaaacctccaccacctacaaaagtagaagagctgcctcccaagcccctcgaacagggggatgaaacccccaaacccccaaagccagacccactcaagata

SEQ ID NO: 28863 - DNA, 120 bp, synthetic construct
  source 1..120: mol_type = other DNA
ggccgaggcgagtattttgccagagggaggggttttcgggggacctatgggggacgagggcggggagcccgaagccgggaattccgcagttaccgagagtttcgaggagatgatgggcgt

SEQ ID NO: 28864 - DNA, 120 bp, synthetic construct
  source 1..120: mol_type = other DNA
gaaacaggcagcgagacccatgagagtgatctggctccttcagacaaggaggctcccacacccaaggagggaacactcacccaggtccctctcgctcccccaccaccaggagccccacct

SEQ ID NO: 28865 - DNA, 120 bp, synthetic construct; identical to SEQ ID NO: 8206
  source 1..120: mol_type = other DNA

SEQ ID NO: 28866 - DNA, 120 bp, synthetic construct
  source 1..120: mol_type = other DNA
gccgcaagggggtctgagggcaagccctccctaacccttccagcctccgctcctggacctgaggaggccctcacaacagtcacagtggccccagcacctcgccgggcagctgccaagtct

SEQ ID NO: 28867 - DNA, 120 bp, synthetic construct
  source 1..120: mol_type = other DNA
acacccaaggctgtgggaactcctgggggaggtggaggtggagccgtaccaggtatttcagccatgtcccgcggagatctgagccagagagccaaggatttgagtaaacggagcttctca

SEQ ID NO: 28868 - DNA, 120 bp, synthetic construct
  source 1..120: mol_type = other DNA
cgaggcgacaagaggagctggccctctcccaagaaccgaaggtgggtaggaacaaacaaatttattgtggtttaaaaattggaggagggggaaaaagcctgagggaaagataagtttggg

SEQ ID NO: 28869 - DNA, 120 bp, synthetic construct; identical to SEQ ID NO: 8207
  source 1..120: mol_type = other DNA

SEQ ID NO: 28870 - DNA, 120 bp, synthetic construct
  source 1..120: mol_type = other DNA
actttaatagggaagagaataggttgtaagcagaagttgggaaacataacttgtgggaaaaagtaacgatttagtggatactggagctaatgctctgttttctccagtcgtcctccagag

SEQ ID NO: 28871 - DNA, 120 bp, synthetic construct
  source 1..120: mol_type = other DNA
agccgtcaagggagtgtaactgcaccagggggtcatccaaggcacaagcctgggcttccccaagcccctcagggcccctctcctaggcccccaacccgatacgagccccagagggtcaac

SEQ ID NO: 28872 - DNA, 120 bp, synthetic construct
  source 1..120: mol_type = other DNA
cgtttctgcagggagcaagggtagaagaattgggaggtggagtagagaggaaaagttagggtcagtggcagagccaggcagatgctgaccctttttctctttcccagacccccactttga

SEQ ID NO: 28873 - DNA, 120 bp, synthetic construct
  source 1..120: mol_type = other DNA
aagggatgggtttgagattgtgcttcactgcactcttactcgtgaaaattcttctgggttatgttttctctgttttctttcctgtttctttcactgtgtttttactccagaattctcagt

SEQ ID NO: 28874 - DNA, 120 bp, synthetic construct; identical to SEQ ID NO: 8208
  source 1..120: mol_type = other DNA

SEQ ID NO: 28875 - DNA, 120 bp, synthetic construct
  source 1..120: mol_type = other DNA
ccgtttacatactggtgagtaaagctgagtgaaaggactatggtagaagggttaagaatgagaggggcttctgaactgtcatctcctcacttctcttctggttggtgctcccttctccag

SEQ ID NO: 28876 - DNA, 120 bp, synthetic construct
  source 1..120: mol_type = other DNA
acttttttgagcactggtcataccccccacctgctctgggttgagtctggagctgttctctcacttggctgtcccctttctgcagtttgtatgtgtgcatcagtcaggtattggggtgct

SEQ ID NO: 28877 - DNA, 120 bp, synthetic construct
  source 1..120: mol_type = other DNA
tctcaggtgtcatcaggtccctgcagccagcgaagttcccctgatggaggactcaagggggcagcagagggaccccccaagaggcctggaggctcctcacccctgaatgctgttccttgt

SEQ ID NO: 28878 - DNA, 120 bp, synthetic construct
  source 1..120: mol_type = other DNA
aaggataaggggaatgtttccaggaatctgactttggccctacctttttctgctttttctctctgcgtgtgtgttctgggcattccaatttggatttccctttccctcccccaatgcact

SEQ ID NO: 28879 - DNA, 120 bp, synthetic construct; identical to SEQ ID NO: 8209
  source 1..120: mol_type = other DNA

SEQ ID NO: 28880 - DNA, 120 bp, synthetic construct
  source 1..120: mol_type = other DNA
gggagtaagagtttggtggaaaggcccaagatttctggggaagattgctgggagtgaccagggcgtccaggatgccagacatccctctccacgaggcctctccttcccaggccattcctg

SEQ ID NO: 28881 - DNA, 120 bp, synthetic construct
  source 1..120: mol_type = other DNA
aggttttctatggcagtgctgggccttccagttctcaggtaggccccgcttcccattgcatgaccccttcagtgaataataatttttttctgcctggtatgtatttataatcaagccttt

SEQ ID NO: 28882 - DNA, 120 bp, synthetic construct
  source 1..120: mol_type = other DNA
gctcctctcctgcagatctctgggggagccatggactctcaattacatccaaacagtggaggcttccgccctgggacaccctcactgcacccttacaggtaagactcgatgcctgtggat

SEQ ID NO: 28883 - DNA, 120 bp, synthetic construct; identical to SEQ ID NO: 8210
  source 1..120: mol_type = other DNA

SEQ ID NO: 28884 - DNA, 120 bp, synthetic construct
  source 1..120: mol_type = other DNA
caggtattagatattgggggatagggtagggagaatgattttgtgggggttgatatatttctccctgtttcccgacaggtacgccaggatctgccatccccttcggatttttattctact

SEQ ID NO: 28885 - DNA, 120 bp, synthetic construct
  source 1..120: mol_type = other DNA
ccttcatttgatttctctgtccagttgctggctttgattttccctggttttctgacattcctccctgcccccaacatgcacacccaaatttcttgttacagatgcttctacccatggtag

SEQ ID NO: 28886 - DNA, 120 bp, synthetic construct
  source 1..120: mol_type = other DNA
ccccacctgctcctgctactcgggtgctgccttcacctgccaggcccttccccgctagcttggggcgagcagaggtaaggtacaggaactgaggggctagggagcgccaagacttgggag

SEQ ID NO: 28887 - DNA, 120 bp, synthetic construct; identical to SEQ ID NO: 8211
  source 1..120: mol_type = other DNA

SEQ ID NO: 28888 - DNA, 120 bp, synthetic construct
  source 1..120: mol_type = other DNA
cctttaccagcaggtgaaggagaaacccttgtggccccaactctaaattcgagttgccacctgatttcctgtccttccgtctcatcgctgacctctcactgtgactcactgtttaacaca

SEQ ID NO: 28889 - DNA, 120 bp, synthetic construct
  source 1..120: mol_type = other DNA
gggacaaggagcctgggttgcccccaccccgctgagggagttcctcttgccccctacccccggggcttgtatatagattataaatatataagggggaaaggggtgggcggggaggggttc

SEQ ID NO: 28890 - DNA, 120 bp, synthetic construct
  source 1..120: mol_type = other DNA
atgagttgtttgcattgtcttaaagcatggtgctgagtgatctgtagtttcagtcagggaaatattcattacttattccagtgagctgttgaaactaaaaacatgaccatcgtattggat

SEQ ID NO: 28891 - DNA, 120 bp, synthetic construct; identical to SEQ ID NO: 8212
  source 1..120: mol_type = other DNA

SEQ ID NO: 28892 - DNA, 120 bp, synthetic construct
  source 1..120: mol_type = other DNA
gggggtttagaagggacttcaactgcatctcaaagggactagcaaagaatttgcagccatgggacttcagttctttatgatgaactaaggggaaatctctgttaaggcctcaatgttgga

SEQ ID NO: 28893 - DNA, 120 bp, synthetic construct
  source 1..120: mol_type = other DNA
catgctagttatgctaaagactatacttaggtctgcagctgctcagaaactttttttgatgggtaatttgagagctctatgctagtgtgcacctggaatatgctcccaactcaaaataca

SEQ ID NO: 28894 - DNA, 120 bp, synthetic construct
  source 1..120: mol_type = other DNA
aggagttcgagaccagcctggccaatatggtgaaaccctgtctctactaaaaatacaaaaattagccgggcgtcgtggcggacgcctgtagtcccagctactcaggaggctgaggcatga

SEQ ID NO: 28895 - DNA, 120 bp, synthetic construct
  source 1..120: mol_type = other DNA
caaaactggcttgtacaatttagcgtgctgagtagaacacaacagtgttccaaggaagtattaatttaaaaaagttcacacaagattaagggacacactacctaatggagacaatgtaga

SEQ ID NO: 28896 - DNA, 120 bp, synthetic construct; identical to SEQ ID NO: 8213
  source 1..120: mol_type = other DNA

SEQ ID NO: 28897 - DNA, 120 bp, synthetic construct
  source 1..120: mol_type = other DNA
ccatgatcccagcaagcacacaaggccatccctcagaagctaacatttccccccccaagcacactgtcaaatagcccggggtggcactgtcaagccttcccagatgccaaaggggaaaac

SEQ ID NO: 28898 - DNA, 120 bp, synthetic construct
  source 1..120: mol_type = other DNA
gctctcctgaacctctggtgcctccaggtcccggctcaggctctcggggctcgtcaggggccgagctccggctgccttagctgcccggctcacagcctctgagagaagcagctgggggcc

SEQ ID NO: 28899 - DNA, 120 bp, synthetic construct
  source 1..120: mol_type = other DNA
tagtggagagaggggaaattaagagtccaggatgtggtttttacagcagaaatgccttcctaattctctttggcactagccaaaactaaagtgaatgtgcttgaacgtgctcttcaaaac

SEQ ID NO: 28900 - DNA, 120 bp, synthetic construct; identical to SEQ ID NO: 8214
  source 1..120: mol_type = other DNA

SEQ ID NO: 28901 - DNA, 120 bp, synthetic construct
  source 1..120: mol_type = other DNA
ggcatcactcagagggggctgcggtttcaccttccgctggctctgaatgtcctgctggataatagggacccattcctggggaggaaaagagaaaatagtaatgtccttgactttcagctg

SEQ ID NO: 28902 - DNA, 120 bp, synthetic construct
  source 1..120: mol_type = other DNA
acctcgggacatggcctcttctgctgttgttccaggggctggggaagcattctcccgctgggtgtcagatggcgggaagagccaggcttcagaatttttagcctccaaacctttctcccc

SEQ ID NO: 28903 - DNA, 120 bp, synthetic construct
  source 1..120: mol_type = other DNA
tccctgaacttccattggctcctcaggaagtggctgtgaaattaaagaacaccatacttcctctcagatctctccagttctctcaagtaccctgaccccatcgcccaacaggtcccttac

SEQ ID NO: 28904 - DNA, 120 bp, synthetic construct; identical to SEQ ID NO: 8215
  source 1..120: mol_type = other DNA

SEQ ID NO: 28905 - DNA, 120 bp, synthetic construct
  source 1..120: mol_type = other DNA
cattgataacagcagcaagctccatctgctgtccccccaagcagtgcaggtttagggccaggcattcaaacaggccttggttacacaactccagcaaccgggccccaaatccactatctg

SEQ ID NO: 28906 - DNA, 120 bp, synthetic construct
  source 1..120: mol_type = other DNA
ttaaactgctcttggagaaattccaggtttgtccggatgatgtccacacctggctgaacctgcaccaaggactgagagacaagataacacaaagatcccaaaatcaagaatcataagact

SEQ ID NO: 28907 - DNA, 120 bp, synthetic construct
  source 1..120: mol_type = other DNA
tctgtggaggaaacagaacaggtttagttcaaagcctcagtcctcccaagacttccacctcgaccccaacaagtccagggcttgtgtgggggcaattggagctttacctggcagagaagc

SEQ ID NO: 28908 - DNA, 120 bp, synthetic construct; identical to SEQ ID NO: 8216
  source 1..120: mol_type = other DNA

SEQ ID NO: 28909 - DNA, 120 bp, synthetic construct
  source 1..120: mol_type = other DNA
gccccttcctggagcaagccaaagcatcctttttgctcaccaagggccccatcagctccaggctcaaagatgttgctggatccactgaggcgttgtatgaaggcagcaatactttcactg

SEQ ID NO: 28910 - DNA, 120 bp, synthetic construct
  source 1..120: mol_type = other DNA
gaaggggagcctggtgggggcatggtctgctgctctggggcaggtggtgggggtggaggaggtgggggtggtggaggggctgtctgtgttgcctggcaaataaagaaagaacaaagaaca

SEQ ID NO: 28911 - DNA, 120 bp, synthetic construct
  source 1..120: mol_type = other DNA
taggtatttaacagagtcaggcagcacaacttacctacctcttcctctgaacaggctgtcagaaagcagtgacactaattactatactttctttttctaaacctcattttcttcatcttt

SEQ ID NO: 28912 - DNA, 120 bp, synthetic construct; identical to SEQ ID NO: 8217
  source 1..120: mol_type = other DNA

SEQ ID NO: 28913 - DNA, 120 bp, synthetic construct
  source 1..120: mol_type = other DNA
ctgtggtagctgtgttggtggtgccagcactggcagaagcagtggcaggggctggcggtggagccatacctggggtcccctgagctgtaagaaaccaaaaaaagaaagctgggctgagca

SEQ ID NO: 28914 - DNA, 120 bp, synthetic construct
  source 1..120: mol_type = other DNA
tactagccaggagctagtactgctagctactcaggaggctgaggtgggagaactgtttgagcccaggagttcaaggttacagtgagctttaactcactggattgcaccattgcactccag

SEQ ID NO: 28915 - DNA, 120 bp, synthetic construct
  source 1..120: mol_type = other DNA
aagagttcgagaccatcctggccaacatggtgaaacccccttctctactaaaaacataaaaaattagctgggcgtggtggcgtgcacctgtagtcccagctactcaggaggctgaggcag

SEQ ID NO: 28916 - DNA, 120 bp, synthetic construct; identical to SEQ ID NO: 8218
  source 1..120: mol_type = other DNA

SEQ ID NO: 28917 - DNA, 120 bp, synthetic construct
  source 1..120: mol_type = other DNA
agggagaatttcagacctgcccttccatgcaccaccacaggagtctctccctagactgttacgcactagaactccccgacccttgctcaccagtgtcccagagactgggggccctccagg

SEQ ID NO: 28918 - DNA, 120 bp, synthetic construct
  source 1..120: mol_type = other DNA
gggccaggcccttgccagccagctgccaccatggactgtgccctacctcccaagcctccccttccaggtcattacctgcggccgcggaggcaacagctgccaccatggcctgatgagtga

SEQ ID NO: 28919 - DNA, 120 bp, synthetic construct
  source 1..120: mol_type = other DNA
cccttccctttctctacccagagctcagcctgccctgatgccctcactcttacccagggtttggccatgaccagggggtcccagggggccagtgggagcactcggaacaccaccaggctg

SEQ ID NO: 28920 - DNA, 120 bp, synthetic construct; identical to SEQ ID NO: 8219
  source 1..120: mol_type = other DNA

SEQ ID NO: 28921 - DNA, 120 bp, synthetic construct
  source 1..120: mol_type = other DNA
tgttcatgtgcatcatgaccacgggttccacactctggtgggaaatccggatgaccctcgggtggctggtggctggcgggggagctggacctggcgggggagccccctcagctgaggact

SEQ ID NO: 28922 - DNA, 120 bp, synthetic construct
  source 1..120: mol_type = other DNA
cattgatctgaaaaagacagatggacaggcagatgtgagaaaaatacaagagcctaaccaagaaaacctcatgataaacctctaaagtatctccagccttcatcaccatgtttccagtct

SEQ ID NO: 28923 - DNA, 120 bp, synthetic construct
  source 1..120: mol_type = other DNA
agcaccatgggggtggtgtagtgagacataggccggaccacatgcaggtgtcgtgggggcgtgcaggccagattgcagcgcaggtcagacagtgcaacaaaggtgttgcccagcagtcgc

SEQ ID NO: 28924 - DNA, 120 bp, synthetic construct; identical to SEQ ID NO: 8220
  source 1..120: mol_type = other DNA

SEQ ID NO: 28925 - DNA, 120 bp, synthetic construct
  source 1..120: mol_type = other DNA
aaggggtacgatacgaggacagtgcttacagcaaagattatcaccttctctgtaagggaggacaaaatcacttacaggtttagagagaaattgttttgttgcaatgtgtgtttttttgtt

SEQ ID NO: 28926 - DNA, 120 bp, synthetic construct
  source 1..120: mol_type = other DNA
agtagctgggattacaggtgtgcaccactacatccagctaatgtttatattttcagtagagatggggttgcaccatgttggccaggctggtctcaaactcccaatctcagatgatccgcc

SEQ ID NO: 28927 - DNA, 120 bp, synthetic construct
  source 1..120: mol_type = other DNA
aaagagttatctgcatttcagcctgttctgttttgggagtactggggctgaggagaaagggcagggccatcaaagggctcacattgttattgtagtccgtggtggcagcagcacccagaa

SEQ ID NO: 28928 - DNA, 120 bp, synthetic construct; identical to SEQ ID NO: 8221
  source 1..120: mol_type = other DNA

SEQ ID NO: 28929 - DNA, 120 bp, synthetic construct
  source 1..120: mol_type = other DNA
gagacagagtctcgctctatcacccaggctggagtgcagtggtgcgacctcagctcactgcaagctccgtctcctgggttcacaccattctcctgactcagcctcccgagtagctgggac

SEQ ID NO: 28930 - DNA, 120 bp, synthetic construct
  source 1..120: mol_type = other DNA
caaagtgctgggattacaggcgtgagccactgtgcccggcctgtattttttagtagagacagggtttcaccatgttggccaggctggtctcgaactcctgacctcaggtgatctgcccgc

SEQ ID NO: 28931 - DNA, 120 bp, synthetic construct
  source 1..120: mol_type = other DNA
caccacaatcctgcacctacaatggtgaaagactaattctaagaaagagagcaggccttcgtgaactcagaggagaattccgatcaggctcaggagataccatttggatttccttgccgt

SEQ ID NO: 28932 - DNA, 120 bp, synthetic construct; identical to SEQ ID NO: 8222
  source 1..120: mol_type = other DNA

SEQ ID NO: 28933 - DNA, 120 bp, synthetic construct
  source 1..120: mol_type = other DNA
gtgcttcactttcaactggttctgatgtttgagagctcaaggctactggctccggggtcacagccggtggctgcgggggcggctgactgtgctgcggttggggccctcctcgacactgaa

SEQ ID NO: 28934 - DNA, 120 bp, synthetic construct
  source 1..120: mol_type = other DNA
atcctaactagactccctgaaggcatggctctgcaattttatctccgactcgctagcaactagcataagactgacacaaattagatgcataataagcatctgtaattttttttttttttt

SEQ ID NO: 28935 - DNA, 120 bp, synthetic construct
  source 1..120: mol_type = other DNA
cctacaggcgcgtgccaccacacccaactaatttttgtacttgtagtagagacagggtttcaccatgttggccaggctggattggaactcctgaccacacgttatccccctgccatggcg

SEQ ID NO: 28936 - DNA, 120 bp, synthetic construct; identical to SEQ ID NO: 8223
  source 1..120: mol_type = other DNA

SEQ ID NO: 28937 - DNA, 120 bp, synthetic construct
  source 1..120: mol_type = other DNA
gagagggagggtggagagagaccctagccagccttgcccacttacctccatccgggatagtaaggtctgtatatccctgatcatgtgctgagccatcaccagccgtacccggggctcact

SEQ ID NO: 28938 - DNA, 120 bp, synthetic construct
  source 1..120: mol_type = other DNA
ccagatccccttccctgaccctcggaggcccctcaatacctgaatcggggcctgttccatgttgatgtgaacatccacagcagagccgtcactctggggaaagggtaagggaagttgttc

SEQ ID NO: 28939 - DNA, 120 bp, synthetic construct
  source 1..120: mol_type = other DNA
gatggaagcatctatcttattaattccctggtgctaccacaaccaaagctacccacaaaagccctcccctgtggaacataagcttacaggaagattgaaggttccaaccatgacatagct

SEQ ID NO: 28940 - DNA, 120 bp, synthetic construct; identical to SEQ ID NO: 8224
  source 1..120: mol_type = other DNA

SEQ ID NO: 28941 - DNA, 120 bp, synthetic construct
  source 1..120: mol_type = other DNA
tattcctgaagcttcttatcatcttgcagaactcgtccctggtaaatgagccgttgtttttcagatgggatgctgacagaggcagcaatgtgctccttaaactcttttacattcatctga

SEQ ID NO: 28942 - DNA, 120 bp, synthetic construct
  source 1..120: mol_type = other DNA
gggtaaaaaccaccacagaatcactacccgtttgtcttgaccgtgagatcattactgtgcaaacccttaaactaaagtaacagctgtcaaaatacagacaataaatttggcttggcgcgg

SEQ ID NO: 28943 - DNA, 120 bp, synthetic construct
  source 1..120: mol_type = other DNA
aaataagccaggcatggtggtcgcctgtaatcccagctactagggaggctgaagcaagagaatcacttgaattcgggaggcggaggttgcagtgagccgagatcgcatcactacactcta

SEQ ID NO: 28944 - DNA, 120 bp, synthetic construct
  source 1..120: mol_type = other DNA
tatattatctgtctggcatccaagggagtatgtgtctagagacatcagtgacccctttccaaacacaagatgataccagtttatttaccagactctcctgtgatttccaagattaaaaaa

SEQ ID NO: 28945 - DNA, 120 bp, synthetic construct; identical to SEQ ID NO: 8225
  source 1..120: mol_type = other DNA

SEQ ID NO: 28946 - DNA, 120 bp, synthetic construct
  source 1..120: mol_type = other DNA
gccaacacggtaaaaccctgtctctactaaaaatacaaaaattagccgggcgtggtagtaggcgtcgtctgtaatcccagatactcaggaggctgaggcaggaaaattgcttgaacccag

SEQ ID NO: 28947 - DNA, 120 bp, synthetic construct
  source 1..120: mol_type = other DNA
aactgactcttgggaagtaccagagtatttatatacatctaatcacaagtctatatatggctttcttatatccaggtaatatcacattttagaaaaccatggaccaccccacatgcaatt

SEQ ID NO: 28948 - DNA, 120 bp, synthetic construct
  source 1..120: mol_type = other DNA
aaaattagtaatttcactcaacagtctatcaaggacctatctccattatgggttctgatttctaccctttaagaacacagcatagacctgaccaatgtctatcagtaagacacacttgct

SEQ ID NO: 28949 - DNA, 120 bp, synthetic construct; identical to SEQ ID NO: 8226
  source 1..120: mol_type = other DNA

SEQ ID NO: 28950 - DNA, 120 bp, synthetic construct
  source 1..120: mol_type = other DNA
aacatggtgaaaccccgtctctactaaaaatacaaaaatcagctgggtatagtggcacacgcctataatcccagctactcaggaggctgagataggaaaatcgcttgaacccaagaggtg

SEQ ID NO: 28951 - DNA, 120 bp, synthetic construct
  source 1..120: mol_type = other DNA
aaaaagaaaatctggtgaccagaaaatcaagctcatctctcaggctaaggggcctaaacgaggaaaagctaaaggtgtcttccagaactagtgaggtgtctcacctgggcccccacaata

SEQ ID NO: 28952 - DNA, 120 bp, synthetic construct
  source 1..120: mol_type = other DNA
ggaaggaaggcccgctgttgcccagaccagagtgtacccgaaagactccctagcattaatccctgccccaatacctaaaaagtttctcctgcacacacacacattcacacctgtccccat

SEQ ID NO: 28953 - DNA, 120 bp, synthetic construct; identical to SEQ ID NO: 8227
  source 1..120: mol_type = other DNA

SEQ ID NO: 28954 - DNA, 120 bp, synthetic construct
  source 1..120: mol_type = other DNA
tgccttcccacggtgttccagcagaacggcacaactaacccacagccaaacacacacacacacacacacacacacacacacacacacacccaccaccccgcggctccgcccccgacttcc

SEQ ID NO: 28955 - DNA, 120 bp, synthetic construct
  source 1..120: mol_type = other DNA
cttttgtggggcacgacgagaaagtccgcagccccaaacagtgagtttctgagggcgagtcgggccggggccggcctaggtgggagggagccgagcaccccgaggagccgccaccgctgt

SEQ ID NO: 28956 - DNA, 120 bp, synthetic construct
  source 1..120: mol_type = other DNA
gaagattgaggtggctaccgtaaatgcctgaaaaacagtcaccagctgggactctaccactgcctcgagaggggctatggacggtcgtatggaccttggactttggagatgggggattat

SEQ ID NO: 28957 - DNA, 120 bp, synthetic construct; identical to SEQ ID NO: 8228
  source 1..120: mol_type = other DNA

SEQ ID NO: 28958 - DNA, 120 bp, synthetic construct
  source 1..120: mol_type = other DNA
agtaaacgtgctactaagttgcacgacttgtcaagaaaagaggcgcttccgagtttgagaattgggagcaaatggagtccgagtggacagaaagacaagaccctgaccgtggggaattta

SEQ ID NO: 28959 - DNA, 120 bp, synthetic construct
  source 1..120: mol_type = other DNA
aaagacacatcgctgttggggtgtccaacctttctgggattcgtagtttatacccaggtcctggttatattttagttaagagttctaataagcagctgtttaatgagcacttgtgccagc

SEQ ID NO: 28960 - DNA, 120 bp, synthetic construct
  source 1..120: mol_type = other DNA
cgaacataagtgtcagaattgacaaatccaggcctacaggactccagatcgagcacttgtactttactgccccaataaaaagctgttaacattttagcttatttttttgagagagggtct

SEQ ID NO: 28961 - DNA, 120 bp, synthetic construct; identical to SEQ ID NO: 8229
  source 1..120: mol_type = other DNA

SEQ ID NO: 28962 - DNA, 120 bp, synthetic construct
  source 1..120: mol_type = other DNA
gtcaggagttcaagaccagcctggccaaaatggtgaaaccccatctctactaaaaatacaaaaattagcctggcgtggtggcgggcgcctgtaatcccagctacttgggaggctgaggca

SEQ ID NO: 28963 - DNA, 120 bp, synthetic construct
  source 1..120: mol_type = other DNA
attacaccaaaatagaacagtattaataaactctaatatactggtcacccaaattttgtttgttttttaactaaatcgcaagcctcagccctcggcaaattttttgtggcagtccatggg

SEQ ID NO: 28964 - DNA, 120 bp, synthetic construct
  source 1..120: mol_type = other DNA
aactccgtgtctacaaaaaattagctaggcgtgatggcgtgcacctatacctcctactcgggaatcatctgagccggggaagtcaaagtcatgcctgggcgacagagtgagaccctgtct

SEQ ID NO: 28965 - DNA, 120 bp, synthetic construct; identical to SEQ ID NO: 8230
  source 1..120: mol_type = other DNA

SEQ ID NO: 28966 - DNA, 120 bp, synthetic construct
  source 1..120: mol_type = other DNA
agtgcagtggcacaatcagggctcattgcagcctcgacatcccaggctcaagcaatcctccctcctcagcctccctagtagctgggactacaggcgtgtgccaccacatcggctaatttt

SEQ ID NO: 28967 - DNA, 120 bp, synthetic construct
  source 1..120: mol_type = other DNA
gccctgcctgtagttagggtttggacacattctgcctgacaccaacatctatcctctctaacagccagattacatagcctctttgtagtaataaatgttgagtgaatgtgtcagtgaaca

SEQ ID NO: 28968 - DNA, 120 bp, synthetic construct
  source 1..120: mol_type = other DNA
acagctagttttccctctaacgacttcttcaagatcaggggctatgtcttattcgtttttttatgtccccggggattagctagttcttgggaaacaactgggacttgggattcaaaacag

SEQ ID NO: 28969 - DNA, 120 bp, synthetic construct; identical to SEQ ID NO: 8231
  source 1..120: mol_type = other DNA

SEQ ID NO: 28970 - DNA, 120 bp, synthetic construct
  source 1..120: mol_type = other DNA
ccctcctgcctgaagatgttccaccaaatttgggcagctctgctctacttctatggtattatccttaactccatctaccagtgccctgagcacagtcaactgacaactctgggcgtggat

SEQ ID NO: 28971 - DNA, 120 bp, synthetic construct
  source 1..120: mol_type = other DNA
gtgttgtgataatgaaagcaagaagaaaaatatcagtactgtggccatcaatgcagaggcatggcagaattggggggtggggtggttacccaggttgactggggaggggcaaagaggaaa

SEQ ID NO: 28972 - DNA, 120 bp, synthetic construct
  source 1..120: mol_type = other DNA
tggaacccaccctcttttgctcccttcattgtctctccagttcccagaggtccacttgggccagtggtactttatcgcaggggcagctcccaccaaggaggagttggcaacttttgaccc

SEQ ID NO: 28973 - DNA, 120 bp, synthetic construct; identical to SEQ ID NO: 8232
  source 1..120: mol_type = other DNA

SEQ ID NO: 28974 - DNA, 120 bp, synthetic construct
  source 1..120: mol_type = other DNA
tgaggcggacagatcacgaggtcaggagatcgagaccatcctggctaacacagtgaaaccccgtctctactaaaaatataaaaaactagctgggcatggtggtgggcacctgtagtccca

SEQ ID NO: 28975 - DNA, 120 bp, synthetic construct
  source 1..120: mol_type = other DNA
aaaaaaaagaagctgggacactatggttggggtgatgctcattctttcctccttgccaccaccacctctgcaggaaagatgggctctgtgtgccccggaaatggatctaccacctgactg

SEQ ID NO: 28976 - DNA, 120 bp, synthetic construct
  source 1..120: mol_type = other DNA
tgaagactgagctcttttccagctcatgcccaggtggaatcatgctgaatgagacaggccagggttaccagcgctttctcctctacagtgagtagggatacaaggcaggaagggttggag

SEQ ID NO: 28977 - DNA, 120 bp, synthetic construct; identical to SEQ ID NO: 8233
  source 1..120: mol_type = other DNA

SEQ ID NO: 28978 - DNA, 120 bp, synthetic construct
  source 1..120: mol_type = other DNA
tcaaaagagaggtttctgagtttgcactggataaagggggcagagggtcatacgtggagggaaaagagccttagagactcccctttgacacagggaatgaaagaacacgttctcccccac

SEQ ID NO: 28979 - DNA, 120 bp, synthetic construct
  source 1..120: mol_type = other DNA
cagatgggtacaatgggagctgagttgttggagggagaagctggagacttccagctccagctcccactcaagataataaagataatttttcaatcctcatctcattctggggtttgtctc

SEQ ID NO: 28980 - DNA, 120 bp, synthetic construct
  source 1..120: mol_type = other DNA
taagaacagagtggcagtaactctcactttgtagtggtatatttaggatttgatgtgacacagttatttattgctgagtgagcaaacccctagcccccaagtggggactacaggcttcag

SEQ ID NO: 28981 - DNA, 120 bp, synthetic construct; identical to SEQ ID NO: 8234
  source 1..120: mol_type = other DNA

SEQ ID NO: 28982 - DNA, 120 bp, synthetic construct
  source 1..120: mol_type = other DNA
aagtggaggtggaaaaaaaaaaaaaactgaaggtgggagaaaagtaaaagcaaaaataacagctggtgaatccaagagcagtgccctcactgtccataaacacaaacaccctaaatagtt

SEQ ID NO: 28983 - DNA, 120 bp, synthetic construct
  source 1..120: mol_type = other DNA
actctcttcaccctttgcccccaccccacggtcacagcccctttcccgggtctcccctctgctcctcaccttccctctccaacccctcactctcccagtcagtggccgcctcatccccat

SEQ ID NO: 28984 - DNA, 120 bp, synthetic construct
  source 1..120: mol_type = other DNA
ggaaggacagtaggccatgtagccagaggcccagcggtccacgcaggcccagtgtgtccaaggctgcccgcagtggtcgtgagcacagggccagcagggcagaggccagcagctccagaa

SEQ ID NO: 28985 - DNA, 120 bp, synthetic construct; identical to SEQ ID NO: 8235
  source 1..120: mol_type = other DNA

SEQ ID NO: 28986 - DNA, 120 bp, synthetic construct
  source 1..120: mol_type = other DNA
ccctcaatgcccccgagtccttagtcttgggatgccccacatcttccatggtttctggggcactatcccagtcacttcctgaattctccgaggagctgtccacccgtctgggttctgggt

SEQ ID NO: 28987 - DNA, 120 bp, synthetic construct
  source 1..120: mol_type = other DNA
ggcactactcagactctcaggatctcctcagaagccagagtctttctggctcagaacaggtatttgcctggtgatgcagtcctactctgaattcagaagtggctcctcccttctctgaat

SEQ ID NO: 28988 - DNA, 120 bp, synthetic construct
  source 1..120: mol_type = other DNA
accatccacacccccacaatctgagattccaagaatctcagatctgacaaggcctgggtcaccaccagagagtcctctctgcgtttccggatttccttcccagcaggcagcaccccaagt

SEQ ID NO: 28989 - DNA, 120 bp, synthetic construct; identical to SEQ ID NO: 8236
  source 1..120: mol_type = other DNA

SEQ ID NO: 28990 - DNA, 120 bp, synthetic construct
  source 1..120: mol_type = other DNA
cccagttacgaagcaaagcgcgggcctacttcgggacctacgcgtccgggcgctgtgcgcggggaccgctcccgggcccagcgtcggggccgcggccttggggagccgccgggagccgcg

SEQ ID NO: 28991 - DNA, 120 bp, synthetic construct
  source 1..120: mol_type = other DNA
accgcccccgtataccccgcgctgtctgtgcgcgccggaccgccaaaccgagattagcaaggaccaggaccttaatataaacccagctccccattttcccgggtttctcatgcttcccta

SEQ ID NO: 28992 - DNA, 120 bp, synthetic construct
  source 1..120: mol_type = other DNA
ttcatgaaaggctttcccagaaaagaaaaaatgaggagtcttgcgacttgaacagccctcccctgcccgtctgcaaatttgaattcctggatttcacaacagtgagctcttcttgtgcct

SEQ ID NO: 28993 - DNA, 120 bp, synthetic construct; identical to SEQ ID NO: 8237
  source 1..120: mol_type = other DNA

SEQ ID NO: 28994 - DNA, 120 bp, synthetic construct
  source 1..120: mol_type = other DNA
ccaacatggagaaaccccgtctctactaaaaatacaaaattagctgggcgtggtggggcatgcctgtaatcccagctactggggaggctgaggcaggagaatcccttgaactcggggggc

SEQ ID NO: 28995 - DNA, 120 bp, synthetic construct
  source 1..120: mol_type = other DNA
aactctttgagggttgggaatgtctttacctgtattcttggcacatagtatatggacttatgtttgtgaaatcagtgaattggctgtagtcagggaactcctcctgggggaagtgagact

SEQ ID NO: 28996 - DNA, 120 bp, synthetic construct
  source 1..120: mol_type = other DNA
ctggagaggctgccccttctgactcaggtgggacttgcatgtggctcccaggcttctgtttggcttcctcaaaatagcttccagaaaagtgaataaaccacaaatggttgatttatttct

SEQ ID NO: 28997 - DNA, 120 bp, synthetic construct; identical to SEQ ID NO: 8238
  source 1..120: mol_type = other DNA

SEQ ID NO: 28998 - DNA, 120 bp, synthetic construct
  source 1..120: mol_type = other DNA
ggacagtggggatgggattggcacggccctcaccccggggtcccagccccattcctggctcccagccccccctcagcagcagtttgaagcccgggctggagatgggcaccccaagtggaa

SEQ ID NO: 28999 - DNA, 120 bp, synthetic construct
  source 1..120: mol_type = other DNA
tgcagagaaagaagaaaaagcattaagggcaggggaaggaaaaggggaagagttgaggcctcagagggggctggcagggtagaataggatcttttcagcttttctgctaaggaacaaatt

SEQ ID NO: 29000 - DNA, 120 bp, synthetic construct
  source 1..120: mol_type = other DNA
tttttttttttttttgagatggagtcttgctctgctgcccaggttggagtgcagtgccatgatcctggctcactgcaacttccaccttagcgattctcctgcctcagcctcccaagtagc

SEQ ID NO: 29001 - DNA, 120 bp, synthetic construct; identical to SEQ ID NO: 8239
  source 1..120: mol_type = other DNA

SEQ ID NO: 29002 - DNA, 120 bp, synthetic construct
  source 1..120: mol_type = other DNA
cagagcagaatagttgaaagaaaaaaatggtaaccagacctagcaaactcttgggcaaggggagggacattagtcataatgactatagctaacattcatgtattgcatactatgcggcat

SEQ ID NO: 29003 - DNA, 120 bp, synthetic construct
  source 1..120: mol_type = other DNA
tggaatcaggctttaaatccagggagctcatgtttataaccacttgactatactaccctgtcaacctacacatgaggataaggaaagaactcttcagcactgtgctggggcgtctggtgt

SEQ ID NO: 29004 - DNA, 120 bp, synthetic construct
  source 1..120: mol_type = other DNA
gaagccagcttcttcagcgagctgagccgcatccctgccactcagctcacagacccccacccaggcagccccacggcccaggagatagctcacagctgccccctggcccgctcgagcagc

SEQ ID NO: 29005 - DNA, 120 bp, synthetic construct; identical to SEQ ID NO: 8240
  source 1..120: mol_type = other DNA

SEQ ID NO: 29006 - DNA, 120 bp, synthetic construct
  source 1..120: mol_type = other DNA
ctcgggctgtggctgctgctgcccatccttccagaggtcgctggggtcagtggctggggtgaaggtgatgagcaagggccgggacatggcttttgggagaactgagaaaatgataccagg

SEQ ID NO: 29007 - DNA, 120 bp, synthetic construct
  source 1..120: mol_type = other DNA
cacaacttaggactctgcagggcctaagggagagagactttgcgtaaaaacatggaaccctacaataccgactttgctccttagtaaagattaataaaactccatgagactgttgtccag

SEQ ID NO: 29008 - DNA, 120 bp, synthetic construct
  source 1..120: mol_type = other DNA
aagtcttccgcgatcccatttcggagtttcctcttcccaaacaaaaatagatgggtcactccctagaagatctcggggagagtctcctatacgtgttgctgtgtagcttccgtaccgcaa

SEQ ID NO: 29009 - DNA, 120 bp, synthetic construct; identical to SEQ ID NO: 8241
  source 1..120: mol_type = other DNA

SEQ ID NO: 29010 - DNA, 120 bp, synthetic construct
  source 1..120: mol_type = other DNA
gaatgccgagaagccgtgtaatgaaataacgtcacgcctgcccctcaccattactctgaccagggttcgaaggtcacacttagagcctaaggggaaatggagaagtgcaaagggacgagc

SEQ ID NO: 29011 - DNA, 120 bp, synthetic construct
  source 1..120: mol_type = other DNA
ggagcccggaggaaacagtatgcccgtcaagggtctctggcgggactgattcgcactaggggcccaacaggcaataaggacccagcggattggccgaggataggccagtcccctgggcag

SEQ ID NO: 29012 - DNA, 120 bp, synthetic construct
  source 1..120: mol_type = other DNA
cccagactcccgggccccgaacgccatacctggcttccgcttccggtggcttctcgttgtgccccgcccgcaagcgccctcctccgggccttcgtgacagccaggtcgtgcgcgggtcat

SEQ ID NO: 29013 - DNA, 120 bp, synthetic construct; identical to SEQ ID NO: 8242
  source 1..120: mol_type = other DNA

SEQ ID NO: 29014 - DNA, 120 bp, synthetic construct
  source 1..120: mol_type = other DNA
gcacgaaggagggagaggtggcctgaggagcggaggggggatgtgtggattccggtgaaagggacctgacaatcgcccccaacccgtgagaaaaggaggagcccagttcttgcttgagaa

SEQ ID NO: 29015 - DNA, 120 bp, synthetic construct
  source 1..120: mol_type = other DNA
ggagctccagggatgtgggtcgggctggtgggtcaaagtatctgttggcttctttcaagtggtgggaccccaaagaatgtttaacttcaaagaaaaggggctgagatgtaaattagagga

SEQ ID NO: 29016 - DNA, 120 bp, synthetic construct
  source 1..120: mol_type = other DNA
gagctttactgacactgttctttttctagctgacgtgaagatgagcagctcagaggaggtgtcctggatttcctggttctgtgggctccgtggcaatgaattcttctgtgaagtgagttc

SEQ ID NO: 29017 - DNA, 120 bp, synthetic construct; identical to SEQ ID NO: 8243
  source 1..120: mol_type = other DNA

SEQ ID NO: 29018 - DNA, 120 bp, synthetic construct
  source 1..120: mol_type = other DNA
caagtgcctgccaccatgcctggctaatttttgtatttttagtagagacagggtttcactatgttggccaggctggtctcgaactccagacctcaggtgatctgcctgcctcggcctccc

SEQ ID NO: 29019 - DNA, 120 bp, synthetic construct
  source 1..120: mol_type = other DNA
atgttttgttcagaaaccatgctgttcagcttccaccttccttagccagctgagaggacaaaactggttcctagagacgggatacaggagtggagtagggacaaagatcttgaaaagaat

SEQ ID NO: 29020 - DNA, 120 bp, synthetic construct
  source 1..120: mol_type = other DNA
tagggagagacacaagtacttctgctgagttgggagtgagaaacaagcacaacagatgcagttgtgttgatgataaggcatcacttagagcattttgcccaggtcaaagatgaggatttt

SEQ ID NO: 29021 - DNA, 120 bp, synthetic construct; identical to SEQ ID NO: 8244
  source 1..120: mol_type = other DNA

SEQ ID NO: 29022 - DNA, 120 bp, synthetic construct
  source 1..120: mol_type = other DNA
tgcgtttcctcatgggtctggtttgttgtctgtttctcctgctttgcaccttccagtctagaatttcatcttctgcattgacattgttgcagttatgtattgaggagggagttgggaggg

SEQ ID NO: 29023 - DNA, 120 bp, synthetic construct
  source 1..120: mol_type = other DNA
aaaagtaggtgctaggcaaactgaatagcccgcagcccctggatatgggcagggcacctaggaaagctgaaaaacaagtagttgcatttggccgggctgtgtttcagatgaagaactgga

SEQ ID NO: 29024 - DNA, 120 bp, synthetic construct
  source 1..120: mol_type = other DNA
ctacctgcctccttctgagcagtaagagacacaggttcctgcagcaagaagtcatgtttaagccctgtttaaggaagctagctgagaagaggggaagaaccccagaacttgggcctggga

SEQ ID NO: 29025 - DNA, 120 bp, synthetic construct; identical to SEQ ID NO: 8245
  source 1..120: mol_type = other DNA

SEQ ID NO: 29026 - DNA, 120 bp, synthetic construct
  source 1..120: mol_type = other DNA
caaggagactttggttactgtcctcgtgtgtactgtgagaaccagccaatgcttcccattggtgagtgttgaagaagggaaaggaaagcaccgtgtggcagtcttatgggaaggagttgg

SEQ ID NO: 29027 - DNA, 120 bp, synthetic construct
  source 1..120: mol_type = other DNA
agctctactgccccaagtgcatggatgtgtacacacccaagtcatcaagacaccatcacacggatggcgcctacttcggcactggtttccctcacatgctcttcatggtgcatcccgagt

SEQ ID NO: 29028 - DNA, 120 bp, synthetic construct
  source 1..120: mol_type = other DNA
tgaggtctgcttctcccagaatcagggcatctccctgctgagtgactgtgggaaagttatttgattatctgtgcttgagttaccttattgtagaatgttcttgagctgagaagttgggaa

SEQ ID NO: 29029 - DNA, 120 bp, synthetic construct; identical to SEQ ID NO: 8246
  source 1..120: mol_type = other DNA

SEQ ID NO: 29030 - DNA, 120 bp, synthetic construct
  source 1..120: mol_type = other DNA
cctgtatggtttttagtttaaattaaaggagtcgttatcgtggtgggaatatgaaataaagtagaagaaaaggccatgagctagtctgctggtgcttgctgttggggaagggaaggtgat

SEQ ID NO: 29031 - DNA, 120 bp, synthetic construct
  source 1..120: mol_type = other DNA
aggactgcgtgtgatgaaatgcaaggtcaaaaggaaaagacaaagcatatttcaaagatgagaaatatttgtttggatatctatgactgtctgtttatactgtaaggggcttaatcagca

SEQ ID NO: 29032 - DNA, 120 bp, synthetic construct
  source 1..120: mol_type = other DNA
tggtggagctgagactgctcatctcagaaggatggggatgcttgatttcctggccaggttgtcccagcacagtggggattggccctgttgtatgacgaagacagcacatggtggcagaga

SEQ ID NO: 29033 - DNA, 120 bp, synthetic construct; identical to SEQ ID NO: 8247
  source 1..120: mol_type = other DNA

SEQ ID NO: 29034 - DNA, 120 bp, synthetic construct
  source 1..120: mol_type = other DNA
tgaaggtccatatgcttgtaggtgtgctggtcatggtgggcttcacagtaggaaagggtaagtggggcccaggggcagggagggaggaaggggtaactgagtccaggaagggggtggagc

SEQ ID NO: 29035 - DNA, 120 bp, synthetic construct
  source 1..120: mol_type = other DNA
tcgtagaagacccttctgtaggatgcatttcaggctcagagaagtgtaccatcagcagctcatccctgtgcatggtgatcaccatctattatggtaaataaggtcccaggaaggggctgc

SEQ ID NO: 29036 - DNA, 120 bp, synthetic construct
  source 1..120: mol_type = other DNA
ttgggaggctgaggcaggtggatcacttaagctctagagttcaagaccagcctaggcaacatagtgagaccctgtctctacaaaaaaatagccaggcatggtggtatgcacctgtagtcc

SEQ ID NO: 29037 - DNA, 120 bp, synthetic construct; identical to SEQ ID NO: 8248
  source 1..120: mol_type = other DNA

SEQ ID NO: 29038 - DNA, 120 bp, synthetic construct
  source 1..120: mol_type = other DNA
gttcgcttcatcgttcgaggctgtggacagtacatttcctaccgctgccaagaaaaacgcaacacctactttgcagagtactggtatcaggcccagtgctgtcagtacgattattgcaac

SEQ ID NO: 29039 - DNA, 120 bp, synthetic construct
  source 1..120: mol_type = other DNA
ctccccaatttccatgctgggacggagcctgatggcctggaccccatggtcacactgtccctgaacctgggcttgtcttttgctgagctgcgccgcatgtacttgttcctcaatagttca

SEQ ID NO: 29040 - DNA, 120 bp, synthetic construct
  source 1..120: mol_type = other DNA
accctcagcatcctgcactgccctctctgaaaacacccacattctttggtcactgtgatttcttaggcctccgtctgttgtaccactagcatctatatgacttttgtgtaattttctctc

SEQ ID NO: 29041 - DNA, 120 bp, synthetic construct
  source 1..120: mol_type = other DNA
ctcctgcctcagcctcccgagtagctgggactacaggcgtgcaccaccacgcctggctaattttttgtatttttagtagagacggggtttcaccatgttggtcaggctggtctcgaactc

SEQ ID NO: 29042 - DNA, 120 bp, synthetic construct; identical to SEQ ID NO: 8249
  source 1..120: mol_type = other DNA

SEQ ID NO: 29043 - DNA, 120 bp, synthetic construct
  source 1..120: mol_type = other DNA
gaggtgggcggatcacttgagattgggagtttgagaccagcctggccaacatggtaaaacccgctctctattaaaaatagaaaaatcagctgggtgtggtggcacacctctgtaatccca

SEQ ID NO: 29044 - DNA, 120 bp, synthetic construct
  source 1..120: mol_type = other DNA
aaaggatgaggaatagaattctgtgcagatgtcctgacttggcaattttgtgtccctgcctcactgtctccaccaacccccgcctgtcctagtgttgttctgcctcctgtcctctcttgc

SEQ ID NO: 29045 - DNA, 120 bp, synthetic construct
  source 1..120: mol_type = other DNA
attttcctccacaataaactgggactgggctaaaactgtgtcacattgtttgtggggtcaggctcaggtgtgggcaggtaaacacagattaaagagggttaatgcctggcgcagtggctc

SEQ ID NO: 29046 - DNA, 120 bp, synthetic construct; identical to SEQ ID NO: 8250
  source 1..120: mol_type = other DNA

SEQ ID NO: 29047 - DNA, 120 bp, synthetic construct
  source 1..120: mol_type = other DNA
gcctcctgtaaagggcacacatccctccccaccctctgcttagctggagatcaaagcatggggactgtgattcttcccagccttaaacataccctacaaaacctggaaagttagaccctg

SEQ ID NO: 29048 - DNA, 120 bp, synthetic construct
  source 1..120: mol_type = other DNA
ccagcctgaccaacatggtgaaatcttgtctctactaaatatgaaaaattagctgggcatggtggctcatgcttgtaatcccagctacttgggaggctgaggcaggagaattgcttgaac

SEQ ID NO: 29049 - DNA, 120 bp, synthetic construct
  source 1..120: mol_type = other DNA
tcccagcactttgggaggccgaagcaggcggatcatgaggtcaggagttcgacaccagcctgaccaacatggtgaaagcccatctctactaaaaaaaaaaaaaaaaaaattagttgggca

SEQ ID NO: 29050 - DNA, 120 bp, synthetic construct; identical to SEQ ID NO: 8251
  source 1..120: mol_type = other DNA

SEQ ID NO: 29051 - DNA, 120 bp, synthetic construct
  source 1..120: mol_type = other DNA
ttaattttgaaatagtgcaaacgtatagaaagcaaggatggatacaacagccttttccatacactggataaacatgctggacataacgctgctctgagtcaggcttggtattgagcagca

SEQ ID NO: 29052 - DNA, 120 bp, synthetic construct
  source 1..120: mol_type = other DNA
cccctctaccacttggatatgtcagtctcttcagccccaccttggtcacctgtcaagtagggatagtgcctcagatgattgagaaaacacatgtaaatgtgcatacacaagtagaagtta

SEQ ID NO: 29053 - DNA, 120 bp, synthetic construct
  source 1..120: mol_type = other DNA
cttggtcacctgtcaagtagggatagtgcctcagatgattgagaaaacacatgtaaatgtgcatacacaagtagaagttaaggccttttccccctcaaaaaaatatatttgccctagagt

SEQ ID NO: 29054 - DNA, 120 bp, synthetic construct
  source 1..120: mol_type = other DNA
agatgcacaccaccatgctcacctggctgatttacttattttcaaacctttttggtaaaacattcagaagcttgcacatatcacaagatggatttttgtaaaccacacatctgtgtaacc

SEQ ID NO: 29055 - DNA, 120 bp, synthetic construct; identical to SEQ ID NO: 8252
  source 1..120: mol_type = other DNA

SEQ ID NO: 29056 - DNA, 120 bp, synthetic construct
  source 1..120: mol_type = other DNA
aaaggcccaggtttatagcaggtcaacctggaagacaccctcagaggctgaagaacttggcccagaattgaagagaccaggactccaataaggtctaacatctctttgagagtggccttc

SEQ ID NO: 29057 - DNA, 120 bp, synthetic construct
  source 1..120: mol_type = other DNA
taaaatataaaaattagccaggtgtggtggcatgtgcttgtaatcccagctactcgggaggctgaggcagaagaatcacttgaacctgggaggcagaagttgcaatgagccaagatcaca

SEQ ID NO: 29058 - DNA, 120 bp, synthetic construct
  source 1..120: mol_type = other DNA
taaacgcccctagcccccacacagctctggtctgacagcactgccgaggatgcccactaactttctggcattcaccataggagggctttcatttcctctttctctttttgtgtctagagc

SEQ ID NO: 29059 - DNA, 120 bp, synthetic construct; identical to SEQ ID NO: 8253
  source 1..120: mol_type = other DNA

SEQ ID NO: 29060 - DNA, 120 bp, synthetic construct
  source 1..120: mol_type = other DNA
gctggaaactggtggaattttacaccaaagtttgctgcagtcacactaaggagtatagagccctctgttttgagggtcattgcagaaatccaggaagcagtattgagagaatatccagaa

SEQ ID NO: 29061 - DNA, 120 bp, synthetic construct
  source 1..120: mol_type = other DNA
gaagtccccaggaagagccccaaatcctctcatccccacactcataagtcaaaaaaaaaagaaaaagaaaagattcctgtagttaggcatgggtggacatgcccagtgttcaccagccat

SEQ ID NO: 29062 - DNA, 120 bp, synthetic construct
  source 1..120: mol_type = other DNA
tactgagccaagtgaggagaactagcaccataggaccatgtgagaaaaagctgggaaatgttttggagattgggtggcaggaaggaggtgtattgttatttatttttcagaccaaaagag

SEQ ID NO: 29063 - DNA, 120 bp, synthetic construct; identical to SEQ ID NO: 8254
  source 1..120: mol_type = other DNA

SEQ ID NO: 29064 - DNA, 120 bp, synthetic construct
  source 1..120: mol_type = other DNA
gagggatcatccagaaagtaaaaaaagtggtcacatgtgcaggggagccaggtgggttagggtagtagcgggagactttggtttgatggtattgtatactctgatatttgacccacatct

SEQ ID NO: 29065 - DNA, 120 bp, synthetic construct
  source 1..120: mol_type = other DNA
caggcaaggttatgacctttctgcacctgtttcctcatctgtaaaatgcacatagtaataatacctgcctcagcggattgcaagtgtttagaacagtgcctagcacatattatgtgttac

SEQ ID NO: 29066 - DNA, 120 bp, synthetic construct
  source 1..120: mol_type = other DNA
acattcagattcagaaggaagtggtatgtggctgctggttgaagccagcaaagcagataaaatcctctgcttttgagtatatgaagtgggaagacagctaaggaccaaaccttggtgaac

SEQ ID NO: 29067 - DNA, 120 bp, synthetic construct; identical to SEQ ID NO: 8255
  source 1..120: mol_type = other DNA

SEQ ID NO: 29068 - DNA, 120 bp, synthetic construct
  source 1..120: mol_type = other DNA
gtggatcacctgaggtcaggagttcgagaccagcctggccaacatggtgaatccccatctctactaaaaatacaaaaaattagctgggcgtggtggcgtgcacctttaatcccagctgct

SEQ ID NO: 29069 - DNA, 120 bp, synthetic construct
  source 1..120: mol_type = other DNA
cctgggtgacagagcagcaaaaaaaaaaagacaggattggagcaatgtcttatgggattatgggaacaagacttggggtgcagcttaggaggctgagagagtttccgtttgggagagtgc

SEQ ID NO: 29070 - DNA, 120 bp, synthetic construct
  source 1..120: mol_type = other DNA
gaggcatcggtagcagcgcaggtatttggggaatggaagtggttgagggggttcccaattgacaggaacaaacttacctagaacacagagaagtgctgaccccactcacaccccattcta

SEQ ID NO: 29071 - DNA, 120 bp, synthetic construct
  source 1..120: mol_type = other DNA
ccccaattctctgcttccttccccaactgcatacacatacatcccccttttcctctggtcctaaggccagaccacatgttaacaaatccccagacccagcagagcacttggtgttaggca

SEQ ID NO: 29072 - DNA, 120 bp, synthetic construct; identical to SEQ ID NO: 8256
  source 1..120: mol_type = other DNA

SEQ ID NO: 29073 - DNA, 120 bp, synthetic construct
  source 1..120: mol_type = other DNA
aggtcaggagttcgagaccagcctggccaacatggtgaaaccccgtctctactaaatatacaaaaattagctgggcttggtggcttatgcctgtaatcccagttattcgggaggctgagg

SEQ ID NO: 29074 - DNA, 120 bp, synthetic construct
  source 1..120: mol_type = other DNA
taaaaatcttcagattgcacatcagtccatgagcaggcattccctaccaaacccatctgtcccatctctcctcctgcatgggtttacctgagcatcctggacaggtgtacccagacactt

SEQ ID NO: 29075 - DNA, 120 bp, synthetic construct
  source 1..120: mol_type = other DNA
ctgctgtggaagcacaggggacccagactctggctccctgcagggcctgccataaaacgcatgactgcctgctggcctccagtttgggcttatattggtggaagagaggttggccaagag

SEQ ID NO: 29076 - DNA, 120 bp, synthetic construct; identical to SEQ ID NO: 8257
  source 1..120: mol_type = other DNA

SEQ ID NO: 29077 - DNA, 120 bp, synthetic construct
  source 1..120: mol_type = other DNA
tgaccagagggatttcggcagaggagtaacttgatcggatttctgtttataaaagattgccatggctgcacattgcatttgggtcaagagtggaggccgccgggaagtaggacgctattc

SEQ ID NO: 29078 - DNA, 120 bp, synthetic construct
  source 1..120: mol_type = other DNA
acagttagaagactggacagatttgctgttggactgaacgaggggtgagggaacaggggtaggcttgcacaaggaagtggtaccattttccaagataggaaacatgtggtctgtctcaaa

SEQ ID NO: 29079 - DNA, 120 bp, synthetic construct
  source 1..120: mol_type = other DNA
ctcccttggggttccaggaacccagcgccttccctcacctcatcctttttcctgccccgcctgtgctcagctgcggctcagtgggcctgaactccggagcccacagaatctggcgctggg

SEQ ID NO: 29080 - DNA, 120 bp, synthetic construct; identical to SEQ ID NO: 8258
  source 1..120: mol_type = other DNA

SEQ ID NO: 29081 - DNA, 120 bp, synthetic construct
  source 1..120: mol_type = other DNA
ggggaggaggtggtcctcagcgtcctggaacgacaccacctgctccaatttcccgtctggaggttctggtcgaggctccgaactcgggttccctgctacctcccagactattcaagaatt

SEQ ID NO: 29082 - DNA, 120 bp, synthetic construct
  source 1..120: mol_type = other DNA
aagccttggaatgaatgaatttaaaaactatattagggccggactgcggtggctcacgcctgtaatcccagcactttgggaggccaaggcgggtggactacctgaggtcaggagttcgca

SEQ ID NO: 29083 - DNA, 120 bp, synthetic construct
  source 1..120: mol_type = other DNA
ggtcaggagttcgcaaccagcctgagcaacatggtgaaaccccgtctctatcaaaaaatacaaaaacattagccaggtgtggtggcgcacgcctgtagtcctggctactcgggaggctga

SEQ ID NO: 29084 - DNA, 120 bp, synthetic construct; identical to SEQ ID NO: 8259
  source 1..120: mol_type = other DNA

SEQ ID NO: 29085 - DNA, 120 bp, synthetic construct
  source 1..120: mol_type = other DNA
aattagccaggagtggtggcgcctgcctgtagtcccagctactcaggaggctgaggcaggagaatcgcttgaacccgggagacggaggttgcagtgagccgagatcgcgccactgcactc

SEQ ID NO: 29086 - DNA, 120 bp, synthetic construct
  source 1..120: mol_type = other DNA
cgcggcgccctctgaagctccctctcgaatataatcgcaacgaaaaggccaacgactagaggctttgcgaggctgaggctgggcttcgggaggggattgccctgagaggtccgggaggac

SEQ ID NO: 29087 - DNA, 120 bp, synthetic construct
  source 1..120: mol_type = other DNA
ggccttcttcggagggggcgcggcctccgagtaattaatcccgtctttgttgcgttttgctcctctcctgtccacccagcagggccagcccagggcgcgctaagagtccagagagttcgt

SEQ ID NO: 29088 - DNA, 120 bp, synthetic construct; identical to SEQ ID NO: 8260
  source 1..120: mol_type = other DNA

SEQ ID NO: 29089 - DNA, 120 bp, synthetic construct
  source 1..120: mol_type = other DNA
gcttgttgattggatagatggatggatggatggacggacggacggaccgatggatggaaatctggctatcactgacgcctgagctccccaccctcttgggccctccacctccggagccct

SEQ ID NO: 29090 - DNA, 120 bp, synthetic construct
  source 1..120: mol_type = other DNA
aggtcgatgagacggcgtaggatgaggctttttggcccagctgggaaccacttctttccagatttcccgtccagagtctaactttcctttctcccagcgccatcttttctgctagtttgc

SEQ ID NO: 29091 - DNA, 120 bp, synthetic construct
  source 1..120: mol_type = other DNA
ctttgctatatagggtgaggagtggacaggggcctgcttccacccctgggtggggattagttctgaaaacaaacacagctgctctgaaccttattgcatagggagtaatctgaagtaggc

SEQ ID NO: 29092 - DNA, 120 bp, synthetic construct; identical to SEQ ID NO: 8261
  source 1..120: mol_type = other DNA

SEQ ID NO: 29093 - DNA, 120 bp, synthetic construct
  source 1..120: mol_type = other DNA
caacctaccgtgatcctcagccaagcgatcctcttacctcagcctccagagtagcttggaacacgggtgcatgccaccatgcctgggtaatttttaaattttttgtactgatggagtctc

SEQ ID NO: 29094 - DNA, 120 bp, synthetic construct
  source 1..120: mol_type = other DNA
agcttcccttagctgaacaaaaatttagttttcaggggattaactcttctgttggatctgggaggatgggattcagaactgtgcagctggctccagagcttcatgttccacacttcccat

SEQ ID NO: 29095 - DNA, 120 bp, synthetic construct
  source 1..120: mol_type = other DNA
catcacatcacctgattaagtctcagatctccacttccagtggagactcagtatatcttcccttaaggagttgcagcgctaatgggggcacacacagcctctgccctggggtttcaagaa

SEQ ID NO: 29096 - DNA, 120 bp, synthetic construct
  source 1..120: mol_type = other DNA
cggtggctcacgcctgtaatcccagcactttgggaggcagaggcgggtggatcacgaggtcaggagatcgagaccatcctggctaacacagtgaaaccccgtctctactaagaatacaaa

SEQ ID NO: 29097 - DNA, 120 bp, synthetic construct; identical to SEQ ID NO: 8262
  source 1..120: mol_type = other DNA

SEQ ID NO: 29098 - DNA, 120 bp, synthetic construct
  source 1..120: mol_type = other DNA
atgagctgagatcgtgccactgcactccagcctaggcgacagagtgagaatccatctcaaaaaacaaacaaaaaaccatccccaacaaaataaaacaaaacaaaaatggactcagggcga

SEQ ID NO: 29099 - DNA, 120 bp, synthetic construct
  source 1..120: mol_type = other DNA
tcacctgaggtcaggagttcgagaccaacttggccaacatggcgaaacctcatcttcactaaaaatacaaaaatcaactgggtatggtggcgcatacctgtaatcccagctactagaggg

SEQ ID NO: 29100 - DNA, 120 bp, synthetic construct
  source 1..120: mol_type = other DNA
tgccaggcaacaaaccaatgggtggaagagggatttattcactgtgttccacaaggtccaaagttagagatagatggcagttatagggaaccaatttcctcaggtacaacctaagcatct

SEQ ID NO: 29101 - DNA, 120 bp, synthetic construct; identical to SEQ ID NO: 8263
  source 1..120: mol_type = other DNA

SEQ ID NO: 29102 - DNA, 120 bp, synthetic construct
  source 1..120: mol_type = other DNA
gttgtatgcaggaagaactgaagaaggaggcgggaggggccagggaggctgcacagttgtgataacagtaggcacatcagggaccggggaggtttggggacctgctgcctgaggaaagct

SEQ ID NO: 29103 - DNA, 120 bp, synthetic construct
  source 1..120: mol_type = other DNA
tgcccctggctccctggacacttgagaagttatacaattagcctgatagtagaaaaaatacctttttattaattattaggaataatccattcatgtaatgcaggatgtatgttggagaag

SEQ ID NO: 29104 - DNA, 120 bp, synthetic construct
  source 1..120: mol_type = other DNA
aactataaacagcaacatgaacacagagaatcacaaataagagggtctttcctcatgtctcctctcaccccattcttccataatgagtcccagttggtccctagaggtgccagggcatct

SEQ ID NO: 29105 - DNA, 120 bp, synthetic construct; identical to SEQ ID NO: 8264
  source 1..120: mol_type = other DNA

SEQ ID NO: 29106 - DNA, 120 bp, synthetic construct
  source 1..120: mol_type = other DNA
ccccttcctaggcccttcccaccctctctcctgccccaggagctccttacccacgctccaggggaagtcgggcccgtgttctgcctggtaggagcggaggacagacagacaccagtcctc

SEQ ID NO: 29107 - DNA, 120 bp, synthetic construct
  source 1..120: mol_type = other DNA
agctgtgaggaggcctccaaccactgcctcaccactcgaagaccctcctctgccatcacccggggatacctacggaggaagtgccaggacaggtcagggctgattttttttcattcacca

SEQ ID NO: 29108 - DNA, 120 bp, synthetic construct
  source 1..120: mol_type = other DNA
tgcctcggttggacatgatgtcctcaggaaccctgggggtgagaagaatgtaccctggaggggctggaggttaggaggaagggtctagatacccaggtttctggtgggcagaggtagaag

SEQ ID NO: 29109 - DNA, 120 bp, synthetic construct; identical to SEQ ID NO: 8265
  source 1..120: mol_type = other DNA

SEQ ID NO: 29110 - DNA, 120 bp, synthetic construct
  source 1..120: mol_type = other DNA
cccaggggacctgggaggggttaggccagttgaggtggtggcagggtcactcaggatgtgagccagtggccttttaccaacttgcactttagtactagtttcagggtttgagcgcccagc

SEQ ID NO: 29111 - DNA, 120 bp, synthetic construct
  source 1..120: mol_type = other DNA
gtgggataaaggtgaagggatggcagagacaaagcccttgcccaacataaaggtcctcactattcacggagaaagaaaactgaggcccccagacaaaggagtcctcctgcttccaacaat

SEQ ID NO: 29112 - DNA, 120 bp, synthetic construct
  source 1..120: mol_type = other DNA
accttcaaggccaagggcaccaggtcatcaaaggaggcatccaggatcatggcactaacatctgggtaggacatggctgcccacgtggctggtaccagggcagggaagaagagtaagaac

SEQ ID NO: 29113 - DNA, 120 bp, synthetic construct; identical to SEQ ID NO: 8266
  source 1..120: mol_type = other DNA

SEQ ID NO: 29114 - DNA, 120 bp, synthetic construct
  source 1..120: mol_type = other DNA
tctctcttcttccttgagcctccaccccaccccatttccccacctctcccgggtggggctgggtggtcatgaatgtgtctacagtgggggatgggagggaggctggtaccagtgaagccg

SEQ ID NO: 29115 - DNA, 120 bp, synthetic construct
  source 1..120: mol_type = other DNA
agaaagggcaaagtcaggagtgtgtcagcaccaaaggccagctcacctgtccctcccaacgtggacccctcctgcagccacctatgacaggcagagaaggtgtagaaggaagggatggta

SEQ ID NO: 29116 - DNA, 120 bp, synthetic construct
  source 1..120: mol_type = other DNA
gaccccagccctcaggtgagtgggacgccttcaagaaatccacagcccctctcctccctccaatggctgaccagagggaaacagacataattcaggaaaaggaagggattcctgagatgg

SEQ ID NO: 29117 - DNA, 120 bp, synthetic construct; identical to SEQ ID NO: 8267
  source 1..120: mol_type = other DNA

SEQ ID NO: 29118 - DNA, 120 bp, synthetic construct
  source 1..120: mol_type = other DNA
aaacctcacccagagaaagcagaggccaggggaggtcaggtcagtgtgggaggcagggacattccctttcaaagggcggagataaggaggctgagtcaccgtcctaccttccaggggcgt

SEQ ID NO: 29119 - DNA, 120 bp, synthetic construct
  source 1..120: mol_type = other DNA
gggcagcccatgaagagctttgcagggaagaggaaagggcaggtttctgttttctccaaggggaatggaagcttctcattccacagggtccataagaggagaagcaaagggattacaaat

SEQ ID NO: 29120 - DNA, 120 bp, synthetic construct
  source 1..120: mol_type = other DNA
gggactatggagatgtttttcctttctcgttttcgggtctgttatcttctgtgaccattgctattgtgtggtatgctgattgctctccctatccctctctgagctccagtcttatggtca

SEQ ID NO: 29121 - DNA, 120 bp, synthetic construct; identical to SEQ ID NO: 8268
  source 1..120: mol_type = other DNA

SEQ ID NO: 29122 - DNA, 120 bp, synthetic construct
  source 1..120: mol_type = other DNA
aagtggtaactattaatattagtttctcgtccttgaacgtctctcctacttcatctgtttctctatcacagggtttcactacatcacaaggtctttagcgtggagctaggacatgagatt

SEQ ID NO: 29123 - DNA, 120 bp, synthetic construct
  source 1..120: mol_type = other DNA
tggggctcagctgtcccccgccggtccacaaacatggtgtcaatctcattgccatcacaggccagcagctttgcccggcgcccattacactgagtacggaagacgcaatggccaagatgc

SEQ ID NO: 29124 - DNA, 120 bp, synthetic construct
  source 1..120: mol_type = other DNA
agcagcacaggcatgagggccttctgcagcaggtacacagagcctggatacagcatccggcgccctagggtgtgcgccaccaggtagctgtggggaacacaggttaacaaaccccaaccc

SEQ ID NO: 29125 - DNA, 120 bp, synthetic construct; identical to SEQ ID NO: 8269
  source 1..120: mol_type = other DNA

SEQ ID NO: 29126 - DNA, 120 bp, synthetic construct
  source 1..120: mol_type = other DNA
tccccaaataaataatgctttaaaaaatgatggttataattcaaaacctcaaatatggcttgcctccctgactaattagcacactgtcaacaaccaaccactaagtccaccctgttcctt

SEQ ID NO: 29127 - DNA, 120 bp, synthetic construct
  source 1..120: mol_type = other DNA
ttatttgggatttaccatgtgctctcaagcacccaggcaaggcaggagcccttcagaacatgttaccttacttaatctcctcagcaaccttgcagggcaggttcatcacaggtgcagaca

SEQ ID NO: 29128 - DNA, 120 bp, synthetic construct
  source 1..120: mol_type = other DNA
ccccacccccactgctccttttcagcctcactgaaggagcttttgttcatatcccagttctttacttactacatttgagactccagacctctctgagcctcttttcttcaaacataaata

SEQ ID NO: 29129 - DNA, 120 bp, synthetic construct; identical to SEQ ID NO: 8270
  source 1..120: mol_type = other DNA

SEQ ID NO: 29130 - DNA, 120 bp, synthetic construct
  source 1..120: mol_type = other DNA
ggaacgacataatggcattggaaggcaggcactgtgacctgagagggcatggaggtgggagggcagagcagagattttctggaatggttctaaggggagagatacagcaaaagaactggg

SEQ ID NO: 29131 - DNA, 120 bp, synthetic construct
  source 1..120: mol_type = other DNA
tctgcagtgggcacgagaggcaaaggggtactgagaactcaggggaggctctcctacccaccctcaacaacaccttcgttatccaggggtctgatccccacacatcatggggaaaccaag

SEQ ID NO: 29132 - DNA, 120 bp, synthetic construct
  source 1..120: mol_type = other DNA
ggtatcaggactggcctgtctgccctcttccaagctaagaacctaacactctgcttttctaaaaaactaagtctgacccatccccaggaggagtggctgaaggtgctagtgcttttgagt

SEQ ID NO: 29133 - DNA, 120 bp, synthetic construct; identical to SEQ ID NO: 8271
  source 1..120: mol_type = other DNA

SEQ ID NO: 29134 - DNA, 120 bp, synthetic construct
  source 1..120: mol_type = other DNA
ttggtgcaatcatagctcactgcagcctcaaactcccaggcccaagtgatcctcctaccttagcctctggagtagctgggactacagacatgtgctaccatgcccagctaatttttaaaa

SEQ ID NO: 29135 - DNA, 120 bp, synthetic construct
  source 1..120: mol_type = other DNA
agctccacgttttttgacggcagtgggagctgtgtctttttttttttttttttttttgagatggagtctcactctgtcgcccaggctggagtgcagtggcacgatctcggatcactgcaa

SEQ ID NO: 29136 - DNA, 120 bp, synthetic construct
  source 1..120: mol_type = other DNA
catgttagccaggatggtcttgatctcctgacctcgtgatccacccgcctcggccttccaaagtgctgggattacaggtgtgagccaccgcgcccggcctagctgtgtcttaatacttga

SEQ ID NO: 29137 - DNA, 120 bp, synthetic construct; identical to SEQ ID NO: 8272
  source 1..120: mol_type = other DNA

SEQ ID NO: 29138 - DNA, 120 bp, synthetic construct
  source 1..120: mol_type = other DNA
atagtacagggcatcattacgcagctccatagtgtggagtagccaggaatgtgatgatggtggtcatagctgtttgatcctagaaacctcccataacagaaaagagctctatggggcccc

SEQ ID NO: 29139 - DNA, 120 bp, synthetic construct
  source 1..120: mol_type = other DNA
gacacacctgtccaccttgtcccatccacaaacaaggatagcatggtattcaatgcatacaacaaaattaaacatttatagaactgagctgctgtgatacagagaaaactaccttctaag

SEQ ID NO: 29140 - DNA, 120 bp, synthetic construct
  source 1..120: mol_type = other DNA
tcaggagtttgagaccagcctgaccaacacagctaaaccccatctctactaaaaatacaatattagctgggcgtggtggcgcatgcctgtaatcccagctacttgggaggctgaggcagg

SEQ ID NO: 29141 - DNA, 120 bp, synthetic construct; identical to SEQ ID NO: 8273
  source 1..120: mol_type = other DNA

SEQ ID NO: 29142 - DNA, 120 bp, synthetic construct
  source 1..120: mol_type = other DNA
cgtctctactaaaaataaaaaaattagccgggcgtggtggcaggcgcctgtagtcccagctactcagggggctgaggcaggacaatggcatgaacccgggaggccgagcttgcagtaagc

SEQ ID NO: 29143 - DNA, 120 bp, synthetic construct
  source 1..120: mol_type = other DNA
gaggcatgagcattgtttgaacccgggagttggaggttgtagtaaactgagattgtaccactatactccagcctgagtaagagtgagactctgtctcaaagaagaaaaaaaaaaaaagag

SEQ ID NO: 29144 - DNA, 120 bp, synthetic construct
  source 1..120: mol_type = other DNA
aaaatacaaaaattagagggtgtgggtggtgcgtgcctgtaatcctagctactcaggaagctgagacaggagaatcacttgaacctgggaggtggagagtgcagtgagccgagatcgtgc

SEQ ID NO: 29145 - DNA, 120 bp, synthetic construct; identical to SEQ ID NO: 8274
  source 1..120: mol_type = other DNA

SEQ ID NO: 29146 - DNA, 120 bp, synthetic construct
  source 1..120: mol_type = other DNA
ttttctgaagactggttccgatgtgttgcttccaagatggtgatgaactgccggtactgggggttggtccagcggccaatgcctggtagaaaaaggacaggaaacagtgctaggaaaact

SEQ ID NO: 29147 - DNA, 120 bp, synthetic construct
  source 1..120: mol_type = other DNA
caacccccttcctccaaatccagcaactggctacaggacgcttcttctccctagcttctgcagtttgtgtctttatagacaatccttaacctaccatcttccagaatgttcctcttcctc

SEQ ID NO: 29148 - DNA, 120 bp, synthetic construct
  source 1..120: mol_type = other DNA
tgctttctgcctcttttctgtatattctagccccttgccatctggcttcagagtctccgactcctgcccataattacttcctcactgaattcctgactcttctatcctcattctcttcaa

SEQ ID NO: 29149 - DNA, 120 bp, synthetic construct; identical to SEQ ID NO: 8275
  source 1..120: mol_type = other DNA

SEQ ID NO: 29150 - DNA, 120 bp, synthetic construct
  source 1..120: mol_type = other DNA
tacagccaggagaagacaataaacaacatttcagagagggataagtgctacagagaaaatacaacaagaatgaaccagaactttatgtgtcatcaatggtattcccccaaaacgatatga

SEQ ID NO: 29151 - DNA, 120 bp, synthetic construct
  source 1..120: mol_type = other DNA
ttttaacccttgaaaactctgaaattagaattcattttacaattgatggcagcttagacttgaggaactgaggtatatgtttcataaaagtatgtgccagaaaaaaaaaaaacccacacc

SEQ ID NO: 29152 - DNA, 120 bp, synthetic construct
  source 1..120: mol_type = other DNA
tcacaaaactatatataaaaaaaaaatcacaaaactatacatcaaaaaatttaaaaaggcttttatattttgttctctggacttttctgtattttttcttttttcttttttttgagacag

SEQ ID NO: 29153 - DNA, 120 bp, synthetic construct; identical to SEQ ID NO: 8276
  source 1..120: mol_type = other DNA

SEQ ID NO: 29154 - DNA, 120 bp, synthetic construct
  source 1..120: mol_type = other DNA
gcccatcacctggttgtcatcttatgtacccactaggggtaggtgatctgtcctctttatttttttaaattgcgagatacaacatatgtacataaaacatatattcagtttaaaaaatac

SEQ ID NO: 29155 - DNA, 120 bp, synthetic construct
  source 1..120: mol_type = other DNA
aaaaccatgcccttgctgggcgcggtggctcaagcctgtaatctcagcactttgggaggccgaggcgggtggatcacgaggtcaggagattgagaccatcctggctaacacggtgaaacc

SEQ ID NO: 29156 - DNA, 120 bp, synthetic construct
  source 1..120: mol_type = other DNA
tgagccgagatcgcgccactgcactccagcctgggggacagagcgagactccgtctcaaaaaaaaaaaaaaaaaaaaagaaaaccatgcccttgttgtcttcggtgttctacctcaaaca

SEQ ID NO: 29157 - DNA, 120 bp, synthetic construct; identical to SEQ ID NO: 8277
  source 1..120: mol_type = other DNA

SEQ ID NO: 29158 - DNA, 120 bp, synthetic construct
  source 1..120: mol_type = other DNA
ctcttggattcaagcaattctactgcctcagcctcccgaatagctgggattacaggtgctcaccaccatacctggctaatttttttttgtatgtttagtagagacggggtttcaccatgt

SEQ ID NO: 29159 - DNA, 120 bp, synthetic construct
  source 1..120: mol_type = other DNA
acagtttgttcatttgcattgctatatagtgttctcttgcatggctattgcatggaacttttttttttttttgagacggagtcttgctctgttgcccaggatggagtgcagtagcgcaat

SEQ ID NO: 29160 - DNA, 120 bp, synthetic construct
  source 1..120: mol_type = other DNA
cgtgccaccatgcccagctaatttttgtatttttggtagagacggggttttaccatgttggtcaggctggtctcaaattcctgacctcgtgatccactggcctctgcctcccaaagtgct

SEQ ID NO: 29161 - DNA, 120 bp, synthetic construct; identical to SEQ ID NO: 8278
  source 1..120: mol_type = other DNA

SEQ ID NO: 29162 - DNA, 120 bp, synthetic construct
  source 1..120: mol_type = other DNA
ctttttgttacttttcagttattttttcatatttataacccaagtcttttaaggaaaagatcatgccttaaaccattctcaatgattccctctcggaggcccatcactaaaatgtatttg

SEQ ID NO: 29163 - DNA, 120 bp, synthetic construct
  source 1..120: mol_type = other DNA
tgagaaaacggcaccactttggacaaactcaagtaacctgggaagggagagggacaatgtgagaccctctccgcaatgtccctcagctcctcttcccagttcagccccaacctccacccc

SEQ ID NO: 29164 - DNA, 120 bp, synthetic construct
  source 1..120: mol_type = other DNA
cctgcccatttgctaccccaccacctttgaaaccacactgacctttcctgtacaagtagaagaaggcgaagggagaggagtaataagagatggaccagaatactgaagcctgcagcagag

SEQ ID NO: 29165 - DNA, 120 bp, synthetic construct
  source 1..120: mol_type = other DNA
acaacctgagggatatcatatcatatttggtgtatgacaccatgaatacagtaggtgctcagtatttgttgaaaagtagtgtgtcaatgtaatggaggctgggaaaatttggtacaggct

SEQ ID NO: 29166 - DNA, 120 bp, synthetic construct; identical to SEQ ID NO: 8279
  source 1..120: mol_type = other DNA

SEQ ID NO: 29167 - DNA, 120 bp, synthetic construct
  source 1..120: mol_type = other DNA
tggggaactgcaggacttagcacctgcagatggtcccaagagtaaacatgttttccttacggctcaggttgcccccagagaaagcagtgctacataccaaaggggagtgccaagtatgca

SEQ ID NO: 29168 - DNA, 120 bp, synthetic construct
  source 1..120: mol_type = other DNA
ggtctgaaagatgcagagtcccagatgccagggtagacataccagtgccaggatgctgtcagcatgtttctccagggcacggggctgatagtacgtatcctgccaaaacagatggcctcc

SEQ ID NO: 29169 - DNA, 120 bp, synthetic construct
  source 1..120: mol_type = other DNA
cctcttcctcaccctcactctgaacctaatttcccacccctgaccatgggaacaaacacagggagctggatttggaagcaaaagtgaaagcagcattggacgatttttgctccttttcca

SEQ ID NO: 29170 - DNA, 120 bp, synthetic construct; identical to SEQ ID NO: 8280
  source 1..120: mol_type = other DNA

SEQ ID NO: 29171 - DNA, 120 bp, synthetic construct
  source 1..120: mol_type = other DNA
attctgaaattcaaggcgagggtaaagggaagataaaaacagagccgggggaggcatgaagaggcactgaagaagaggaaactgggagtctgacagcaaaattcaacggctccccagtcc

SEQ ID NO: 29172 - DNA, 120 bp, synthetic construct
  source 1..120: mol_type = other DNA
aaagagcgaaaaagaaaggaggcggccagtccgtaggcgtgactttaactcaggaagcacacagagcgcagattttgcggataactggcttgacaagcaggctccccttatttcccatta

SEQ ID NO: 29173 - DNA, 120 bp, synthetic construct
  source 1..120: mol_type = other DNA
agggacgctggccggggccctttcagagtccctctcccggtagattttgtagagccgggggcctaggacgcagctcagcagcttcgccatggccccggctcgggccgctgctcttccagc

SEQ ID NO: 29174 - DNA, 120 bp, synthetic construct; identical to SEQ ID NO: 8281
  source 1..120: mol_type = other DNA

SEQ ID NO: 29175 - DNA, 120 bp, synthetic construct
  source 1..120: mol_type = other DNA
aaaactataaaaagttattgaaaaggcaaactggcccggcccggcgcagtggctcacgcctgtagtcctagcactttgggaggccgaggcggggggatcacttgaggccaggagttcgag

SEQ ID NO: 29176 - DNA, 120 bp, synthetic construct
  source 1..120: mol_type = other DNA
aacgcgggaggcagaggttgcagtgagccgagatcttcccactgcacttcagccttggtgacagagcaagactctgtctctaaataaataaataaaggtaaactggcccagcgcggtggc

SEQ ID NO: 29177 - DNA, 120 bp, synthetic construct
  source 1..120: mol_type = other DNA
cgccctggagttccaagccagcccaggcaacatagtgagaccccatctctacacaaaataccaagggggaaaaaaaaaagacctagcagggtgtggtggtgcccacctgtagtcccagct

SEQ ID NO: 29178 - DNA, 120 bp, synthetic construct; identical to SEQ ID NO: 8282
  source 1..120: mol_type = other DNA

SEQ ID NO: 29179 - DNA, 120 bp, synthetic construct
  source 1..120: mol_type = other DNA
gtgatactagtatattagattcaaaaacacataaaatttaatgataaagcaagtggagaagaaagagaaaattcagaattgtggttacacagcatagaggatctctgactgaaacggaat

SEQ ID NO: 29180 - DNA, 120 bp, synthetic construct
  source 1..120: mol_type = other DNA
aaccatctttctgcctcaacctcctgagtagctgggactataggcccacaccaccatactcggctaattttacaaggtctcaccatgttgcccaggctggtctcgaactcctgggctcaa

SEQ ID NO: 29181 - DNA, 120 bp, synthetic construct
  source 1..120: mol_type = other DNA
tgcccaggctggagtgcaatggcccgatctcggctcaccacaacctctgcctctggggttcaagcgattctcctgcctcagcctcccaagtagctgagattacaggcatgtaccaccatg

SEQ ID NO: 29182 - DNA, 120 bp, synthetic construct; identical to SEQ ID NO: 8283
  source 1..120: mol_type = other DNA

SEQ ID NO: 29183 - DNA, 120 bp, synthetic construct
  source 1..120: mol_type = other DNA
agagacagggtttcaccatgttggccaggatagtctcgatctcttgacctcgtgatccgcctgcctcagcctcccaaagtgctgggattacaggcgtgagccacggcgtctggcctttat

SEQ ID NO: 29184 - DNA, 120 bp, synthetic construct
  source 1..120: mol_type = other DNA
ttcttttactctcattatattgtgagattcaactttgttgcaaatcactaggtttgttcattctcattgctgtccagtcttctactctgttaagcatttatccattatatagttgtactt

SEQ ID NO: 29185 - DNA, 120 bp, synthetic construct
  source 1..120: mol_type = other DNA
ggatgaatcagcccgttagccttgtccctgagtaataatttaatacacttattagggtttcaggagaggtccggggtatgccagacaaccacagggaaagtcattccaaatcatttacgg

SEQ ID NO: 29186 - DNA, 120 bp, synthetic construct
  source 1..120: mol_type = other DNA
ttttttttttttttttttttgagatgaagtctcgctctgtctcccaggctggagtgcagtagcacgatctcggctcactgcaacctccacctcccgggttcaagcgattctggtgcctct

SEQ ID NO: 29187 - DNA, 120 bp, synthetic construct; identical to SEQ ID NO: 8284
  source 1..120: mol_type = other DNA

SEQ ID NO: 29188 - DNA, 120 bp, synthetic construct
  source 1..120: mol_type = other DNA
agtctttatttgagccccttagctgatgtggaatcagaagagcaaaaaggtcatcttcagagtggcctgggctgggtccttttctctccaggatagaaaagtggtggtcactttatccct

SEQ ID NO: 29189 - DNA, 120 bp, synthetic construct
  source 1..120: mol_type = other DNA
ggtcttggagcaagagaacttggcaggctctccccatggcagtcttattcctcctcctgttcctatgtggaactccccaggctgcaggtaaggggcaagaggtacgggattccttagcta

SEQ ID NO: 29190 - DNA, 120 bp, synthetic construct
  source 1..120: mol_type = other DNA
agaggcaacgagggtccaggttatgcagtttcctttataaaataagaagaatgagtaaatgcttccagaaaagtagaaatgagtagaagagatgtgggcatttgccaactttcagccttt

SEQ ID NO: 29191 - DNA, 120 bp, synthetic construct
  source 1..120: mol_type = other DNA
ttttgtagctgtcacttgagaaatgtggtcaccagccaggcctgtgctgggggaccccagaagggaaggaagccagggttgaagatcaaatggggggttattgatctgatggaggtctct

SEQ ID NO: 29192 - DNA, 120 bp, synthetic construct; identical to SEQ ID NO: 8285
  source 1..120: mol_type = other DNA

SEQ ID NO: 29193 - DNA, 120 bp, synthetic construct
  source 1..120: mol_type = other DNA
gtgggggcatgcagaccaggggctactgtggcccaggaagtccaggtgaagaactgaggaatccctctctcccctacaggatcccagttatctgcaagggctgcagatggatccccctgc

SEQ ID NO: 29194 - DNA, 120 bp, synthetic construct
  source 1..120: mol_type = other DNA
ttggtgtgtcctggggaggggctttctgagcccaggagccgaagaccaagaatcatccgctgcctcatgactcacaacaaaggggtcagctttagcctggcaggtaaactgaggaaggag

SEQ ID NO: 29195 - DNA, 120 bp, synthetic construct
  source 1..120: mol_type = other DNA
gctggtatcaacctcctgacttctagtgatctgcctgcctcagtctcccaaagtgctgggattataggcatgagccaccgcacctttaaattttttgtagagacaggatcttgctatgtt

SEQ ID NO: 29196 - DNA, 120 bp, synthetic construct; identical to SEQ ID NO: 8286
  source 1..120: mol_type = other DNA

SEQ ID NO: 29197 - DNA, 120 bp, synthetic construct
  source 1..120: mol_type = other DNA
atcccagcactttgggaggccgaagcaggcggatcacttgaggttgggagttcaagaccagcctgactaacatggagaaattctgtctctactaaaaatacaaaattagccgggtatggt

SEQ ID NO: 29198 - DNA, 120 bp, synthetic construct
  source 1..120: mol_type = other DNA
gcgaagctctatctcaaaaaaaaaattgtatttttagtagagacggggtttcaccatgttggccaggatggccttgatctcttgacctcatgatctgcctgcctcagtctcccaaagtgt

SEQ ID NO: 29199 - DNA, 120 bp, synthetic construct
  source 1..120: mol_type = other DNA
aacctctgcctcttgggttcaagctattctcccatctcagcctcctgagtagctggactacaggtgcctgccaccacgcctggctaacttttgtgtgtgtgtgtgtgtttttttttgttt

SEQ ID NO: 29200 - DNA, 120 bp, synthetic construct; identical to SEQ ID NO: 8287
  source 1..120: mol_type = other DNA

SEQ ID NO: 29201 - DNA, 120 bp, synthetic construct
  source 1..120: mol_type = other DNA
gatccacccacctcggcctcccaaagtgctgggattacaggtgtgaaccactgcgcctggcctcaatttttatactttcagtagagatgaggtttcatcatgttgaccaggctggtcttg

SEQ ID NO: 29202 - DNA, 120 bp, synthetic construct
  source 1..120: mol_type = other DNA
ccattctctatgggtcagggtgagaggcctggaaaggggcagagtagggtggaggatattgtgggcagggaagcttacaaagtcttctgttggaagagcccaccagactgtggaggggaa

SEQ ID NO: 29203 - DNA, 120 bp, synthetic construct
  source 1..120: mol_type = other DNA
ggacatgccttggattctgatgctgctgctcacaatgggccagggagttgtcatcctggccctcagcatcgtgctctggaggcagagggtccgtggggctccaggcagaggtgagtccct

SEQ ID NO: 29204 - DNA, 120 bp, synthetic construct; identical to SEQ ID NO: 8288
  source 1..120: mol_type = other DNA

SEQ ID NO: 29205 - DNA, 120 bp, synthetic construct
  source 1..120: mol_type = other DNA
tgaggatgtgaaaagtagaggtatccttaatctgtctctctggaaaaccccacagcccacctgcccacaagcccaggtgattttggtgacatctgctgggaagtgtgacctgctgtctcg

SEQ ID NO: 29206 - DNA, 120 bp, synthetic construct
  source 1..120: mol_type = other DNA
ggggactgaaggaaaggaggagcattattctgtgatgtaacctacaaaaaggtttggtctcctgtcttgtagcagcagtggagggatggccctgagcccatagtactgtggggttgaggg

SEQ ID NO: 29207 - DNA, 120 bp, synthetic construct
  source 1..120: mol_type = other DNA
gaggaatccattgcagtggagctgaaggacaaatggggaaaacgggggaagagagagaagggaagagactcaagtcagagaaagtggaaagagatggacagagggagaaaaatagaagca

SEQ ID NO: 29208 - DNA, 120 bp, synthetic construct
  source 1..120: mol_type = other DNA
gtctcatcctcacaaagaagagagggaacaggcatatttaatcaaccccagacttcctcacatgcaaggggagggaactgagtcaggatagagatgcctgtgctcagctcccacccgggg

SEQ ID NO: 29209 - DNA, 120 bp, synthetic construct; identical to SEQ ID NO: 8289
  source 1..120: mol_type = other DNA

SEQ ID NO: 29210 - DNA, 120 bp, synthetic construct
  source 1..120: mol_type = other DNA
tctgctcaagcttgggccttactggaaaaaagctttctcagaagtctcacctaaaggcttcaggctgcaggggcttaaactaagccattggcaagaaaaaggacgaaaatgacacagatg

SEQ ID NO: 29211 - DNA, 120 bp, synthetic construct
  source 1..120: mol_type = other DNA
cacacactgcagtatctgcagtattactggactcctagatagaccttttattaaaggtactcttcatagtcccccaagccctccatcctgagttcccgacctaccacattagtctttcct

SEQ ID NO: 29212 - DNA, 120 bp, synthetic construct
  source 1..120: mol_type = other DNA
gcatctagaaaagacaaaagacgcagaataggtgttctttatgaggttggactctgggcaggtgcctccccaggccttgtgaggggtctgtgaggggtctgctgagagatctggggtctc

SEQ ID NO: 29213 - DNA, 120 bp, synthetic construct; identical to SEQ ID NO: 8290
  source 1..120: mol_type = other DNA

SEQ ID NO: 29214 - DNA, 120 bp, synthetic construct
  source 1..120: mol_type = other DNA
gggccacaggaaaggccggatggatggaggtagggagcctcctggagaagggccattggaccagagtcctacctgaagtgccaatactgatgccacaagcttcatcgtcccgacactcgg

SEQ ID NO: 29215 - DNA, 120 bp, synthetic construct
  source 1..120: mol_type = other DNA
ctccctgtggggcaggcagaggccagatccggagagggatcacagagagaggtgacacatgaagcagagagaggaaagctgtggaataagggaggaaagctgacagaagtagaaaaaata

SEQ ID NO: 29216 - DNA, 120 bp, synthetic construct
  source 1..120: mol_type = other DNA
accatcctggctaacacagtgaaaccccgtctctactaaaaatacaaaaaattagccgggcatggtggcacatgcctctagtcccagctacttgggaggctgaggcaggagaatctcttg

SEQ ID NO: 29217 - DNA, 120 bp, synthetic construct
  source 1..120: mol_type = other DNA
aaaaaaaaagagggagacgatgcaggaaaagaaacagagatggaggcaagaggggtacagggattgagagatgcgcagacatgaacagaagccacaagaatcagagaccaacataaaaag

SEQ ID NO: 29218 - DNA, 120 bp, synthetic construct; identical to SEQ ID NO: 8291
  source 1..120: mol_type = other DNA

SEQ ID NO: 29219 - DNA, 120 bp, synthetic construct
  source 1..120: mol_type = other DNA
ctctcctccccagccctcaggttcctccacatgcccttgtccccacccccagccccctgaccactgaaggttccccagcccacccttacccagtgccccacagaggaacagcacgcagag

SEQ ID NO: 29220 - DNA, 120 bp, synthetic construct
  source 1..120: mol_type = other DNA
taaacaaacacacctagggagtgaatctggggggcggaaccatgaccagattcaccagcctgacccagcaggcagcgggggcccccagcctgcccctgcaaggagtctgcccttgcctgg

SEQ ID NO: 29221 - DNA, 120 bp, synthetic construct
  source 1..120: mol_type = other DNA
tccctggctctctcagcttctctctgtctttgttttctctgtctttccccctcagtgctttcatgtctctcaaagtcaccctcctaaacagccccggcgtggatctgtttgagtgtagaa

SEQ ID NO: 29222 - DNA, 120 bp, synthetic construct; identical to SEQ ID NO: 8292
  source 1..120: mol_type = other DNA

SEQ ID NO: 29223 - DNA, 120 bp, synthetic construct
  source 1..120: mol_type = other DNA
tgaagataggggagacacaggtgcccaggagagcagctcttttcaaaaatattgatctcaggacctctttacacttttcaaagttacttaagactctgaagagcttttctttatgaggtt

SEQ ID NO: 29224 - DNA, 120 bp, synthetic construct
  source 1..120: mol_type = other DNA
ataactattatttctccacagcacagtgagaagctgagcattgctttacatttttgtgaatctagtgtcaggcttcgtgggagatgcctgggttttcctatctgcttctgcattcagtct

SEQ ID NO: 29225 - DNA, 120 bp, synthetic construct
  source 1..120: mol_type = other DNA
tcttgttggtccacagactgctgctgaggataaaggagtttgaggactccagaggatgctgagagcatgctgtggggcccctccctgtccccactggggcccttggtgcctgctggggga

SEQ ID NO: 29226 - DNA, 120 bp, synthetic construct; identical to SEQ ID NO: 8293
  source 1..120: mol_type = other DNA

SEQ ID NO: 29227 - DNA, 120 bp, synthetic construct
  source 1..120: mol_type = other DNA
caggcctggaacagatcaagctacctggaaaccgtgagtcctcagtttctccctcttccagcagcctttccctgcctccagccccatgtcaatccttctggcttccagaaccctccaggc

SEQ ID NO: 29228 - DNA, 120 bp, synthetic construct
  source 1..120: mol_type = other DNA
ttattctcctaaaagaatctcataggcccattagctcacaaatgaagagctctggccctgaaaggccaaagttaaaaccaaacttcaaattttcggcattagttaaggaccagggagggg

SEQ ID NO: 29229 - DNA, 120 bp, synthetic construct
  source 1..120: mol_type = other DNA
catcttacataaccatagcacaattatcaaaatcacaaaataactgatacaatactactaactaatctacagactttatttgatttagcaagatcctacattgcatttagctctcatgtc

SEQ ID NO: 29230 - DNA, 120 bp, synthetic construct; identical to SEQ ID NO: 8294
  source 1..120: mol_type = other DNA

SEQ ID NO: 29231 - DNA, 120 bp, synthetic construct
  source 1..120: mol_type = other DNA
acaatgagccatgatcacgccactacactccagcctggggaacaaaatgagaccctgtctcaaaaataataataataataatttttaggctaggcttggtggcacacacttgtaatccca

SEQ ID NO: 29232 - DNA, 120 bp, synthetic construct
  source 1..120: mol_type = other DNA
tggcacacacctgtaatctcagtttcctgagaggctgaggcaggaggattacttgagcccaggagtttgaggctatagggaggtatgattgcaccaccacactccagcctgagtgagaga

SEQ ID NO: 29233 - DNA, 120 bp, synthetic construct
  source 1..120: mol_type = other DNA
cctgaggtcgggagttcaagaccagcctgatcaatgtggagaaatctcgtctctactaaaaatacaaaattagccgggtgtagtggtgcccgcctgtaataccagctactcgggaacctg

SEQ ID NO: 29234 - DNA, 120 bp, synthetic construct; identical to SEQ ID NO: 8295
  source 1..120: mol_type = other DNA

SEQ ID NO: 29235 - DNA, 120 bp, synthetic construct
  source 1..120: mol_type = other DNA
atccttcttgctgcatcacatcaggagtttacaaggtcaatgcattaactttgatcacttggtttcagggaggtgttttttgagggggctgaaaatccctttgggctccttgaaatcaca

SEQ ID NO: 29236 - DNA, 120 bp, synthetic construct
  source 1..120: mol_type = other DNA
gcaatcaagtggagacagagtcggtgggagacgtgacttatccagcccacagggactgctacctgggagacctgtgcaacagcgccgtggcaagccatgtggcccctgcaggcattttgg

SEQ ID NO: 29237 - DNA, 120 bp, synthetic construct
  source 1..120: mol_type = other DNA
gaagagaaacatccttctgtgagtcattaaaatctatgaaccactctacagctgactggaaaattacatctatctttggttgatgggagggctaaaagcgtaatatggggcatccaggtt

SEQ ID NO: 29238 - DNA, 120 bp, synthetic construct
  source 1..120: mol_type = other DNA
ttgaatcttccttagcaatgagattcattgagtggggttgccagggttttgtgagcctgagtctgggtttgctcccctatttcccatttgcaagttggctcccaataggactattttgaa

SEQ ID NO: 29239 - DNA, 120 bp, synthetic construct; identical to SEQ ID NO: 8296
  source 1..120: mol_type = other DNA

SEQ ID NO: 29240 - DNA, 120 bp, synthetic construct
  source 1..120: mol_type = other DNA
cctgaaggattcctgtgtaagggagggagattgagagtattatttcctgggaggtgacctgacccttaggtcttcttataataaatgtacattttatcagactcagacatttattactca

SEQ ID NO: 29241 - DNA, 120 bp, synthetic construct
  source 1..120: mol_type = other DNA
tcaggtccttgtgggagccttcactggggacaacacagaagccccatttcaggcccagatcccaatccctcctcaagtaggggacagcagagtataggaagcaaagtggggagcccttct

SEQ ID NO: 29242 - DNA, 120 bp, synthetic construct
  source 1..120: mol_type = other DNA
atgaggagaccactcggaacagtgtttaattaaagaaatgggagctagggagagacgattctgtaaagccaggggatacagagacacagggagagaggctcaggccaaggcaggtgggag

SEQ ID NO: 29243 - DNA, 120 bp, synthetic construct
  source 1..120: mol_type = other DNA
cttgttgcagcaggtggtgttatatgtcagacccagcttgcggttggtttggttgaaggcctcctgacagggctcttctggtgtgccacagcgcagattggagaaaacccacatcttacc

SEQ ID NO: 29244 - DNA, 120 bp, synthetic construct; identical to SEQ ID NO: 8297
  source 1..120: mol_type = other DNA

SEQ ID NO: 29245 - DNA, 120 bp, synthetic construct
  source 1..120: mol_type = other DNA
gattacaggcgcccactaccatgcctggctaatttttgtatatttagtagaaatggggtttcaccatgttggccaggctggtcttgaactcctgacctcaagtgatccaaccaccttggc

SEQ ID NO: 29246 - DNA, 120 bp, synthetic construct
  source 1..120: mol_type = other DNA
aattgaaaaaaaggcatgcaaagacataggatgttgcctggcacacaaccatctttggccaaatattatcattgctataatcctctgcttctccatctcagtcttagacccatttgggcc

SEQ ID NO: 29247 - DNA, 120 bp, synthetic construct
  source 1..120: mol_type = other DNA
tccacacagcccagcacagggaccttgtagcaggagtgacagcgaatgtcagctgggaagacacaagtcaggctgaggtgatggggtctctgacttacctggggataagctgagctgggg

SEQ ID NO: 29248 - DNA, 120 bp, synthetic construct; identical to SEQ ID NO: 8298
  source 1..120: mol_type = other DNA

SEQ ID NO: 29249 - DNA, 120 bp, synthetic construct
  source 1..120: mol_type = other DNA
aaaaatgaaaatcatgagggttacaacactgtcagaaatgccttggaacttgaggctggcgagaaagccatctgtggccagctttagcaatttacaatttactcttcacctcctggagct

SEQ ID NO: 29250 - DNA, 120 bp, synthetic construct
  source 1..120: mol_type = other DNA
tgagagacagatcaccagattccatcttagcaccttatcaaaatggagagggtggatacagaaggtggcaccccaagtttcctgcttcagttaattcaaggtttgggcaggcaagatttg

SEQ ID NO: 29251 - DNA, 120 bp, synthetic construct
  source 1..120: mol_type = other DNA
gttgtcccctcttcagaaggctcaagaaaacgctctgtttccatggaggctcttagatgtcactgcaaccatctagaaagtttgtatcccctgtatgggaggaggtatgcaacccaggag

SEQ ID NO: 29252 - DNA, 120 bp, synthetic construct
  source 1..120: mol_type = other DNA
gaggacaccttactgagcacagcagatagaggagaaggcaggtaagctagactctggagagttgcatattgaagtggggctggttggggaactggataccagagtttccaaggaggagac

SEQ ID NO: 29253 - DNA, 120 bp, synthetic construct; identical to SEQ ID NO: 8299
  source 1..120: mol_type = other DNA

SEQ ID NO: 29254 - DNA, 120 bp, synthetic construct
  source 1..120: mol_type = other DNA
cagctgatagagtagattttcaaggatccagctctaggagttgagtggcctttttggaatttataaacccaaaggctcctcccttccctgcctctggtagcccctcccttctcacttact

SEQ ID NO: 29255 - DNA, 120 bp, synthetic construct
  source 1..120: mol_type = other DNA
gttcttggtttcaggccaagatgcccttcctggtccccagctaagagtcctgctgctcagtcctctgaatgagcatcatcaaaggcctctgtgatttacagtgtccatggtggcagcttc

SEQ ID NO: 29256 - DNA, 120 bp, synthetic construct
  source 1..120: mol_type = other DNA
tgataggggcatgctggtggaaattgggggaggaatgggtcaaattaatctccattcagcccccactcggtctttccaatgcctgctcagcaataagtgactcactgatggcttctgtga

SEQ ID NO: 29257 - DNA, 120 bp, synthetic construct; identical to SEQ ID NO: 8300
  source 1..120: mol_type = other DNA

SEQ ID NO: 29258 - DNA, 120 bp, synthetic construct
  source 1..120: mol_type = other DNA
ggatcacaaggtcaagagatcgagaccatcctggccaacatggtgaaaccccatctctactgaaaatacaaaaattagtcaggtgtggtggcatgcacctgtagttccagctactcagga

SEQ ID NO: 29259 - DNA, 120 bp, synthetic construct
  source 1..120: mol_type = other DNA
aaatagtaataataatggcaagcacttacatagtgatcctatgtattctaagcagtttacatgtattactttatttcgttatcacaatcccctacaaaacaggagttttttttgttgttg

SEQ ID NO: 29260 - DNA, 120 bp, synthetic construct
  source 1..120: mol_type = other DNA
agctgggattacaggcgcacctgaaaagttaagcaggccaaagcatttgtgtaaatggcccgagcacacattttaagtgagaaccatttgaagactccgagtttgcctgcgaggattccc

SEQ ID NO: 29261 - DNA, 120 bp, synthetic construct; identical to SEQ ID NO: 8301
  source 1..120: mol_type = other DNA

SEQ ID NO: 29262 - DNA, 120 bp, synthetic construct
  source 1..120: mol_type = other DNA
tcttgccctgtggacgtgccctaaccacagcctccggcctctcctagcttctctggacggccgccctggggaccgggtgaatctctcctgcggaggagtctctcatcccatccgctgggt

SEQ ID NO: 29263 - DNA, 120 bp, synthetic construct
  source 1..120: mol_type = other DNA
ctccctggactctggtatccggcggctggagctcctcttgagcgcgggggactcgggcacttttttctgcaagggccgccacgaggacgagagccgtacagtgcttcacgtgctggggga

SEQ ID NO: 29264 - DNA, 120 bp, synthetic construct
  source 1..120: mol_type = other DNA
gcgggactgctggctgtccctcgtcaaacccctgacctcagcatccctccccgccacgcctttcccccagggtccgtgtatccccagctcctgatcccgctgctgggcgctgggttggtg

SEQ ID NO: 29265 - DNA, 120 bp, synthetic construct; identical to SEQ ID NO: 8302
  source 1..120: mol_type = other DNA

SEQ ID NO: 29266 - DNA, 120 bp, synthetic construct
  source 1..120: mol_type = other DNA
ctggtggttctcaaagactcatatgtcccttacaggcgcctgcccccgcaaccgattcgaccactccctagatttggtgagactaattccaccccattttctttctcctacatgcccact

SEQ ID NO: 29267 - DNA, 120 bp, synthetic construct
  source 1..120: mol_type = other DNA
ggccagtaaaggaggaagagcccaagattccaggggacctggaccaggaaccggtaagggcatggggatgggaaggggatagccagaatctctgaggaaaatggaccaaaaaaaaaaagg

SEQ ID NO: 29268 - DNA, 120 bp, synthetic construct
  source 1..120: mol_type = other DNA
accatctagccctcagcaggccccgccggctgtccacagcggaccctgctgatgcctccaccatctatgcagttgtagtttgaagggaagcccttactccaaacctcccaagctagggga

SEQ ID NO: 29269 - DNA, 120 bp, synthetic construct; identical to SEQ ID NO: 8303
  source 1..120: mol_type = other DNA

SEQ ID NO: 29270 - DNA, 120 bp, synthetic construct
  source 1..120: mol_type = other DNA
attctcctgcctcaggctcctgagtagctgggactacaggcgcccgccaccacgcccagctaattttttgtatttttagtagagacggggtttcactgtgttagccaggatggtcttgat

SEQ ID NO: 29271 - DNA, 120 bp, synthetic construct
  source 1..120: mol_type = other DNA
ctttaagctgtttttctttgttgctggtgttttctttttggactcctcttccttgctccatatccctacagtatttcccaccattctaggtttgtccctttctcttcttctgggacactc

SEQ ID NO: 29272 - DNA, 120 bp, synthetic construct; identical to SEQ ID NO: 2463
  source 1..120: mol_type = other DNA

SEQ ID NO: 29273 - DNA, 120 bp, synthetic construct; identical to SEQ ID NO: 8304
  source 1..120: mol_type = other DNA

SEQ ID NO: 29274 - DNA, 120 bp, synthetic construct
  source 1..120: mol_type = other DNA
tccaggcttacctgtgtcattccacatgcacatcttagaaaatgccagccttagagaattctccctagccccaaaatgtctttgcccagtgcaattccttcttcctgtattacccctttc

SEQ ID NO: 29275 - DNA, 120 bp, synthetic construct
  source 1..120: mol_type = other DNA
cccctttatttccctcatagaaacagccttctgtaaattgttccatgacaacctgtatttcaatttgtaagaaatttgcatgtactgtgagctccccaacgtcaggagactgaccctttt

SEQ ID NO: 29276 - DNA, 120 bp, synthetic construct
  source 1..120: mol_type = other DNA
catttagataaattcagtgagcaatccacccatacactcttttctctgccctggacacacttcccatgatagaaattctgtcttgttcatcttgtgctcaagtacctatgacatggttgg

SEQ ID NO: 29277 - DNA, 120 bp, synthetic construct; identical to SEQ ID NO: 8305
  source 1..120: mol_type = other DNA

SEQ ID NO: 29278 - DNA, 120 bp, synthetic construct
  source 1..120: mol_type = other DNA
gggagctgagcccggcgccagccttctccagttctgagcaggacacaggtaccagggtgacatcagagagcttctgcagtgcctgcacagggaagacatggagtggggagaggggagtga

SEQ ID NO: 29279 - DNA, 120 bp, synthetic construct
  source 1..120: mol_type = other DNA
gcttggtgttggagttcctgccctctctcacctcctggctgttgggcagatccccacctccacggtgcaggaggaaagggggcacaccaggcaacccaggacgaagaaagagacagtcag

SEQ ID NO: 29280 - DNA, 120 bp, synthetic construct
  source 1..120: mol_type = other DNA
caaccaccactaagggctggggacggactgacatttgtggaaaataatgacagcaagcacatagagcttacgatatgtcagacactaagtactttagttacctttgctaatttccacctt

SEQ ID NO: 29281 - DNA, 120 bp, synthetic construct; identical to SEQ ID NO: 8306
  source 1..120: mol_type = other DNA

SEQ ID NO: 29282 - DNA, 120 bp, synthetic construct
  source 1..120: mol_type = other DNA
tgccgcagagaccgcgcaggtgggagggacccgagactggcacagtggagacggcgaagtcctagggagagcgaagggaggtattcaggggcgcgggaggggtgatggggtatcttcaaa

SEQ ID NO: 29283 - DNA, 120 bp, synthetic construct
  source 1..120: mol_type = other DNA
ctcagctcctcggtgattggtccatttggagaggcctacgaaaaactcccggcctgagtccgggaggccgcggaggtttgagggcgggagtgagttagaaacaaggctccagacggccga

SEQ ID NO: 29284 - DNA, 120 bp, synthetic construct
  source 1..120: mol_type = other DNA
ccaggtcttgcagggctttgcggactccatcgaccttaggataggagaagagggcacggagctgtgacacccccatcctcaattcttccccaaagccccgacatccagttccttctgcct

SEQ ID NO: 29285 - DNA, 120 bp, synthetic construct; identical to SEQ ID NO: 8307
  source 1..120: mol_type = other DNA

SEQ ID NO: 29286 - DNA, 120 bp, synthetic construct
  source 1..120: mol_type = other DNA
tcggatttcttagttttcttgtttcttcacctgtctgggagaagaaacagaaaaggaggagacagagaaaaagacatgcagacaagggcgttgggggtggttaagagcgcccaggtcttc

SEQ ID NO: 29287 - DNA, 120 bp, synthetic construct
  source 1..120: mol_type = other DNA
gcaccctcaggggtcagattctttaagaggagcctgaggaacaaggctagggtctctaatctccaaaacacctgttgcccctgcttgggggcttgtgaggtccctgtcgggcgcccctct

SEQ ID NO: 29288 - DNA, 120 bp, synthetic construct
  source 1..120: mol_type = other DNA
agaaggagaaagctggagaggcaggggctggggaatggaagtcctgaatacccgaacgagaagggagagaggtgggtaggaagggaggagttcgagcctaaggagttaagcatcctctct

SEQ ID NO: 29289 - DNA, 120 bp, synthetic construct; identical to SEQ ID NO: 8308
  source 1..120: mol_type = other DNA

SEQ ID NO: 29290 - DNA, 120 bp, synthetic construct
  source 1..120: mol_type = other DNA
gacagagttggtggagaagggagtccccgtcttcaagcctcggggactgggagctctggcttttagcgcgggtccttgtgtaggcgagctcatatactacgatggggcaggggcgcgacg

SEQ ID NO: 29291 - DNA, 120 bp, synthetic construct
  source 1..120: mol_type = other DNA
ggcaccgcccagcgagcgctgcccaggcccacccagatctggccggccctggcgacggggctgcaaacgcttcgtagacctcagaacagcgcaacggcggaccggcggaccggcacgaaa

SEQ ID NO: 29292 - DNA, 120 bp, synthetic construct
  source 1..120: mol_type = other DNA
cacttgatttttattctgtattttattactgaaatatgttgtcctactcatcccaccccacaataaaaatctgacccaggccccccatttctttccctcatcccctcttccaccacacca

SEQ ID NO: 29293 - DNA, 120 bp, synthetic construct; identical to SEQ ID NO: 8309
  source 1..120: mol_type = other DNA

SEQ ID NO: 29294 - DNA, 120 bp, synthetic construct
  source 1..120: mol_type = other DNA
cccaggccgacatgataaaaccagctcaactcctcactgtcttgtactgtcgttagccttccttctcacttactgaaatcctggcttttaataaccagccatttttcctgagtttttaaa

SEQ ID NO: 29295 - DNA, 120 bp, synthetic construct
  source 1..120: mol_type = other DNA
ttttttttttgagatggagtcttgctgtcacccaggctggagtgcaatggcgcgatcttggctcactgcaacctccgcctcccgggttcaagtgattctcctgcctcagcctcccaaata

SEQ ID NO: 29296 - DNA, 120 bp, synthetic construct
  source 1..120: mol_type = other DNA
ttggccgcccaaagtgttgggattataggcgtgagccaccacgcccggcccatctgacttttcatcatatattcttaactttcatgtgaatattttattgtctcagatttcaaccctttg

SEQ ID NO: 29297 - DNA, 120 bp, synthetic construct; identical to SEQ ID NO: 8310
  source 1..120: mol_type = other DNA

SEQ ID NO: 29298 - DNA, 120 bp, synthetic construct
  source 1..120: mol_type = other DNA
tcaaaagtaatactgggatgtattcctctttgctagtctgtttgcacccatgacttacatcatggaatataattatctcaagcagtggtcttgttagcaatgactgctgcaaaggactgg

SEQ ID NO: 29299 - DNA, 120 bp, synthetic construct
  source 1..120: mol_type = other DNA
ctctcctcccgcaataaccacacacctgtactatgtgtaactttggcaacaggttgcagtcagccagggtgagctcgttgccatccaaaaacttcctctgagagacaccttcatcttcag

SEQ ID NO: 29300 - DNA, 120 bp, synthetic construct
  source 1..120: mol_type = other DNA
gaaaagattgacatagtccgaaaaggcccgttgggggtggatactaatggtgagtccaaaataataatagctaacactcatgtagttacttttctatgtgttattctaagcactttacat

SEQ ID NO: 29301 - DNA, 120 bp, synthetic construct; identical to SEQ ID NO: 8311
  source 1..120: mol_type = other DNA

SEQ ID NO: 29302 - DNA, 120 bp, synthetic construct
  source 1..120: mol_type = other DNA
gggagttcaagaccagcctggccaacatggtgaaaccctgtctctactaaaaatacaaaaattagctgggcgtggtgatgcacgtctgtaatcccagctactcaggaggctgaggcagga

SEQ ID NO: 29303 - DNA, 120 bp, synthetic construct
  source 1..120: mol_type = other DNA
ccatgaaataggtattgtcatcctaattttgtggatctggaaatggacttacagagaggtgaaatgattgctcaaaattatacggctagttggatttgtactcaggtagtctggatctag

SEQ ID NO: 29304 - DNA, 120 bp, synthetic construct
  source 1..120: mol_type = other DNA
gaggctagggaacaaatgagaaaagcttaaaagtcttggccaatgaaaatgcagggaaatatagaggtaaagcaaaaatgggaagctgggggaaatttacgaacatctgcttcatctccc

SEQ ID NO: 29305 - DNA, 120 bp, synthetic construct; identical to SEQ ID NO: 8312
  source 1..120: mol_type = other DNA

SEQ ID NO: 29306 - DNA, 120 bp, synthetic construct
  source 1..120: mol_type = other DNA
atacctgggagggcacagcactgcctccagaaattcctcaatcttgttggtgtctgtgtgcacttcagtgccatacagcaggaatgggagctgcccccctgggcacagcttctgcactgt

SEQ ID NO: 29307 - DNA, 120 bp, synthetic construct
  source 1..120: mol_type = other DNA
tcatgacagaaggactcgggtgggtgtgtgtttgcacacatgtgtacaccaggggtgtttcaaggaacataagcaggcctaccttttggtgtcaacggtggtaacattgaaggtgactcc

SEQ ID NO: 29308 - DNA, 120 bp, synthetic construct
  source 1..120: mol_type = other DNA
ccctaggccagtccctgcattcccactcccagaccagctgttttctgcctagtcatgacacatacactgtcccctcactatgggctctttgcccttgggcctgggtcaaacctaaggcag

SEQ ID NO: 29309 - DNA, 120 bp, synthetic construct; identical to SEQ ID NO: 8313
  source 1..120: mol_type = other DNA

SEQ ID NO: 29310 - DNA, 120 bp, synthetic construct
  source 1..120: mol_type = other DNA
ggtgacctcattggcccaagggacacctccccctaagctgagggtgattcatctctctgtctccggcttccttcctgtcaaggatgtgggggaagggacagtgaggatgaggcctgggca

SEQ ID NO: 29311 - DNA, 120 bp, synthetic construct
  source 1..120: mol_type = other DNA
aaatagccccggaggcgaatgtgagagtgaggtggggaccacacctaagggggcggacccaagcaggctccgacttccctgggcccagggagagggaatggctgcccgagaaacccaagc

SEQ ID NO: 29312 - DNA, 120 bp, synthetic construct
  source 1..120: mol_type = other DNA
acaaacggagcggggagaagaggacactgttaaggaagggagggaggggcacagccaggaggtcccaagactgggaaatgaatgcagcagcggtagggaggggagcggccgctgcaatca

SEQ ID NO: 29313 - DNA, 120 bp, synthetic construct; identical to SEQ ID NO: 8314
  source 1..120: mol_type = other DNA

SEQ ID NO: 29314 - DNA, 120 bp, synthetic construct
  source 1..120: mol_type = other DNA
ttgctctcactctcaggcctccctcaacacaccgtcttccctgaagcgtctccatccacacacacacacacacacacacacacacacacacacacacacctctcctactgcactactcac

SEQ ID NO: 29315 - DNA, 120 bp, synthetic construct
  source 1..120: mol_type = other DNA
tgggaattctcctttttctccacttcccttcctttagtctgctagaaacttgcacttttacaaacttttcagggttgatcctagaattctcattacttgctaacaagttaatgtcttccc

SEQ ID NO: 29316 - DNA, 120 bp, synthetic construct
  source 1..120: mol_type = other DNA
ggctggaccgggggaaaggtgagagttggcttccaggaatttgggtggctgaggagagaagtgttcttaccttcacgaacaattcgacctgcggttgttcttcagccatggttgcgtcgg

SEQ ID NO: 29317 - DNA, 120 bp, synthetic construct; identical to SEQ ID NO: 8315
  source 1..120: mol_type = other DNA

SEQ ID NO: 29318 - DNA, 120 bp, synthetic construct
  source 1..120: mol_type = other DNA
tcctgaaaacctccttgtttctccgacctctcctgaacacaggactcttttctgcctcagtttccctgcttcattaatctgagtacaacccgactgaccctcatataaaaaacttgacac

SEQ ID NO: 29319 - DNA, 120 bp, synthetic construct
  source 1..120: mol_type = other DNA
cttcaaatggaaaggtggtcgtttaatcattctgcatttcttccagactccaatccaaattctgggttgctgggactgtggtctgagagaagaactcggaagtggaaggctgggactgca

SEQ ID NO: 29320 - DNA, 120 bp, synthetic construct
  source 1..120: mol_type = other DNA
ccagctcagcactaggacttgcagtccttgtggcctacacttgggattgggcataggaaatagagttaggggccgggtgaggtggctcacgcctgtaatcccaacactttaggaggccaa

SEQ ID NO: 29321 - DNA, 120 bp, synthetic construct
  source 1..120: mol_type = other DNA
tacttgggaggctgaggcaggagaatcaattgaacccgggaggtgaaggttgcagtgagctgagatggtgccattgcactccagcctgggcaataagagcgaaactccatctcaaaaaaa

SEQ ID NO: 29322 - DNA, 120 bp, synthetic construct; identical to SEQ ID NO: 8316
  source 1..120: mol_type = other DNA

SEQ ID NO: 29323 - DNA, 120 bp, synthetic construct
  source 1..120: mol_type = other DNA
taaagaaagatcagacagaatagtgggagtagagtccttggggacacctaaataaataagcagggaggacataggaggagcagctctctctccagtaaccttgatttctattaaaccttt

SEQ ID NO: 29324 - DNA, 120 bp, synthetic construct
  source 1..120: mol_type = other DNA
cctcctcatcaccctctgtccaacaaaagacctacagttccagaaaaccatggtggagtgcaagaacacagaactaaaacagagcttgaaacttaaagaaagggagagacttgggggagg

SEQ ID NO: 29325 - DNA, 120 bp, synthetic construct
  source 1..120: mol_type = other DNA
aaaggctatctttggtgttcgttcccttgaactgtaacatcctgtaagggtatgattccatgcctctgtgtgggtgtgaattccctcatggtgaccctcaaaatctgcacacaggacccc

SEQ ID NO: 29326 - DNA, 120 bp, synthetic construct; identical to SEQ ID NO: 8317
  source 1..120: mol_type = other DNA

SEQ ID NO: 29327 - DNA, 120 bp, synthetic construct
  source 1..120: mol_type = other DNA
ctcagtagctcctctttccctctctgggcttctctttccactccctccccttcctgggcttggtaaactagtccctaatctcttcacaccccagattggaaggtgggtccctccctgaca

SEQ ID NO: 29328 - DNA, 120 bp, synthetic construct
  source 1..120: mol_type = other DNA
gattttccaattactggttagcacagctaggtcatctcacccccaccatctttcctaacttcttgggttggggggctggggaggaatctccccatctcagggtactaggaacaaagctgg

SEQ ID NO: 29329 - DNA, 120 bp, synthetic construct
  source 1..120: mol_type = other DNA
acgcacaaataagctttatggagcagtgacttcattatgttcaccgctttgagtccaacccctggcccaaaataggcactaaatagttgccgaatgcatgaatgatagatacctctctgt

SEQ ID NO: 29330 - DNA, 120 bp, synthetic construct; identical to SEQ ID NO: 8318
  source 1..120: mol_type = other DNA

SEQ ID NO: 29331 - DNA, 120 bp, synthetic construct
  source 1..120: mol_type = other DNA
aggcactgttctaagctctgtataaatattaactcagagggtacaaatattaacttaagagttgttgcaggaaaaaaaataagcgcctctggctctttaagtttggcctccccctcaaaa

SEQ ID NO: 29332 - DNA, 120 bp, synthetic construct
  source 1..120: mol_type = other DNA
tgctaagcaacggcagagggcgggaagtttgaacgttctggacccgccccgaaggcaaataggccaatcagcgtccagactcttcagctacggcagtccgcttctcctcctcgccctgtc

SEQ ID NO: 29333 - DNA, 120 bp, synthetic construct
  source 1..120: mol_type = other DNA
gcggggcgttctcccacctgtagcgactcaggttactgaaaaggcgggaaaacgctgcgatggcggcagctgggggaggaggaagataagcgcgtgaggctggggtcctggcgcgtggtt

SEQ ID NO: 29334 - DNA, 120 bp, synthetic construct; identical to SEQ ID NO: 8319
  source 1..120: mol_type = other DNA

SEQ ID NO: 29335 - DNA, 120 bp, synthetic construct
  source 1..120: mol_type = other DNA
agacctggggcggcctcctccggcttccccagcccggccccagtgccgggccccagggaggccgaggaggaggaagtcgaggaggaggaggagctggccgaggtctctgaggggagtaga

SEQ ID NO: 29336 - DNA, 120 bp, synthetic construct
  source 1..120: mol_type = other DNA
ggagttggagaccagcctgggcaacatggcgaaaccccgtctctactaaaaatataaaaattagccgagcgtggtggcacgtgcctgttatcccagctactgggaaggctgaggcaggag

SEQ ID NO: 29337 - DNA, 120 bp, synthetic construct
  source 1..120: mol_type = other DNA
gaagagctgggcaagtctcttacctcctgagtggctgtttcacattcactaaatgggggtgatgatgcctatctcagagatttgagaaaatgattaaattatataagacatggtaaaccc

SEQ ID NO: 29338 - DNA, 120 bp, synthetic construct; identical to SEQ ID NO: 8320
  source 1..120: mol_type = other DNA

SEQ ID NO: 29339 - DNA, 120 bp, synthetic construct
  source 1..120: mol_type = other DNA
ttttctagacagagtcttgctctgttacccaggctcaagtgcagtggcgcaatcttggctcactgcagcctccacctcctgggttcaagcaattctcctgactcaacctcccgagtagct

SEQ ID NO: 29340 - DNA, 120 bp, synthetic construct
  source 1..120: mol_type = other DNA
ttggcctcctaaagtgctgggactacaggtgtgagtcaccacgcccagccatgttttacttacattaactcacctcactgtctagcatattttgtgttgctgtaaggaaatacctgactc

SEQ ID NO: 29341 - DNA, 120 bp, synthetic construct
  source 1..120: mol_type = other DNA
aagggaaggcagggtgtgtagaggtcacatggcagagaagaagcaagggggagggagatgccaggctctttttgacaaccagctctctcaggaactaatagagtgagaacctctcactca

SEQ ID NO: 29342 - DNA, 120 bp, synthetic construct; identical to SEQ ID NO: 8321
  source 1..120: mol_type = other DNA

SEQ ID NO: 29343 - DNA, 120 bp, synthetic construct
  source 1..120: mol_type = other DNA
gattcaagcaattctcctgcctcagtctcccgagtagctgggattacaagaatctgccatcacgcctggctaatttttatatttttagtagaggcagggtttcaccacgttggctaggct

SEQ ID NO: 29344 - DNA, 120 bp, synthetic construct
  source 1..120: mol_type = other DNA
tgcttcagattcagccctgggcaaatcagtcatgtctgttctccaggggtttacagcctagtgacaacatccagaacatcccacttccctctcaccatcccaccactcttaactactttt

SEQ ID NO: 29345 - DNA, 120 bp, synthetic construct
  source 1..120: mol_type = other DNA
agacaaagatcctttaactcatttgatctctgttctccttccaagttctggatgagatcaatccccagtctgttgttacgagtgccaaacaggatgagaatatgactcgatttctgggaa

SEQ ID NO: 29346 - DNA, 120 bp, synthetic construct; identical to SEQ ID NO: 8322
  source 1..120: mol_type = other DNA

SEQ ID NO: 29347 - DNA, 120 bp, synthetic construct
  source 1..120: mol_type = other DNA
atcctaaacctttgtgctcctcatgccctatgacctgtccccccaagatctctcctgctccctaccctttaataacctgcagcttattgggaagcctctgcttaagtcatgtctagggat

SEQ ID NO: 29348 - DNA, 120 bp, synthetic construct
  source 1..120: mol_type = other DNA
tatcaccaaaccaaaaggcactgcctcagtgacccttattatgatccataaggcacttctataactttcctaggtttacaataagaacaggagtgtactatcctaattagatattaaggc

SEQ ID NO: 29349 - DNA, 120 bp, synthetic construct
  source 1..120: mol_type = other DNA
tattatatgtagaataaaaagagaattagactaagagtctgaaaatttggttcttgctctagctttccattaactgcctgtgtgagcttgggcaagtcaaataatctctcttgcttctat

SEQ ID NO: 29350 - DNA, 120 bp, synthetic construct; identical to SEQ ID NO: 8323
  source 1..120: mol_type = other DNA

SEQ ID NO: 29351 - DNA, 120 bp, synthetic construct
  source 1..120: mol_type = other DNA
tcgagcacttggagggctgctgaagttcctgggtcgaagaagaatcggggttgaactggaagactataatgtcagcgtccccatcctgggctttaagaaatttatgttgtaggtgattca

SEQ ID NO: 29352 - DNA, 120 bp, synthetic construct
  source 1..120: mol_type = other DNA
ggctaatgagactttgggaagaagactgggacaatattcagagagggggacaaaggaagtggagttgtggaacgaactcagactgcttcctgcttttttgttttctgtcctcaggactca

SEQ ID NO: 29353 - DNA, 120 bp, synthetic construct
  source 1..120: mol_type = other DNA
aatcctggggctattaagatctctctccttgaaggaaagggaaggggggttttgagggaaagagaggaagaaaagcataaagatactagctttcttttctatagggagaaactgaggcaa

SEQ ID NO: 29354 - DNA, 120 bp, synthetic construct; identical to SEQ ID NO: 8324
  source 1..120: mol_type = other DNA

SEQ ID NO: 29355 - DNA, 120 bp, synthetic construct
  source 1..120: mol_type = other DNA
aaaaaaaaaaaaaaagacgtgatctcaggaggatatcccctgtccccattccatttatcagtcctcaattcttattcccttcaaaagtccaagttaccccaaactcctccatttctcctc

SEQ ID NO: 29356 - DNA, 120 bp, synthetic construct
  source 1..120: mol_type = other DNA
aaagacctaccagaaaagcaattggctccaaagatgtgtcccagcctcccttcccacttcactcccattgtcagatatctctttcatgccaatccaaatttcttacctatttgtaccccc

SEQ ID NO: 29357 - DNA, 120 bp, synthetic construct
  source 1..120: mol_type = other DNA
gggtacctgttagggactttgggagaccttgtgtatagagaagagttttgtaactgcataactgcctatttgatttgtatagagtctttatcagttgtctctggctttagggtatattag

SEQ ID NO: 29358 - DNA, 120 bp, synthetic construct; identical to SEQ ID NO: 8325
  source 1..120: mol_type = other DNA

SEQ ID NO: 29359 - DNA, 120 bp, synthetic construct
  source 1..120: mol_type = other DNA
gtccagttttgtgtgtgtgtgtgtgtgtgtgtgtgtgtgtgtgagacgaagtctcgctcttgtcccccaggctggagtgcaatggtgcgatctcggctcaatgcaacctctgcctcctgg

SEQ ID NO: 29360 - DNA, 120 bp, synthetic construct
  source 1..120: mol_type = other DNA
gtcttgaactcctgacctcaggggatccactcgcctcagcctcccaaggtgctgggattacaggcatgagcgaccgcgcccggccgtccagttttttacatatgtgtgttgggctcttga

SEQ ID NO: 29361 - DNA, 120 bp, synthetic construct
  source 1..120: mol_type = other DNA
cctcatcctacctcagcctcctgaatagctggaactacaggcctgcaccaccatgcccagctaatttttttgtatttttagtagagatggtgtttcgccatgttgcccaggctggtctca

SEQ ID NO: 29362 - DNA, 120 bp, synthetic construct; identical to SEQ ID NO: 8326
  source 1..120: mol_type = other DNA

SEQ ID NO: 29363 - DNA, 120 bp, synthetic construct
  source 1..120: mol_type = other DNA
gatggtctcgatctcctgaccacgtgatccgtctgcctcggcctcccagagtgctgggattacaggcgtgagccaccgtgcctggccagttcttgagttttaactaggtctgctttgtgt

SEQ ID NO: 29364 - DNA, 120 bp, synthetic construct
  source 1..120: mol_type = other DNA
agcttcctcaacaaccagcacctctgacctggatgcctcagcttagacacataaacacattccattccctgtccctgccttgtaacaagttcactccctgccttatccctcacaggaatc

SEQ ID NO: 29365 - DNA, 120 bp, synthetic construct
  source 1..120: mol_type = other DNA
tatacagattctcacatacaccaccccacctagtagtagtaaagcaactgccctttactgagcactggctaactgcatttcatccttataacagctttgtgtagtagctgatatgcatct

SEQ ID NO: 29366 - DNA, 120 bp, synthetic construct
  source 1..120: mol_type = other DNA
aaagcaactgccctttactgagcactggctaactgcatttcatccttataacagctttgtgtagtagctgatatgcatctcattttttgttgtcagcgcaggtacacatatacccattga

SEQ ID NO: 29367 - DNA, 120 bp, synthetic construct; identical to SEQ ID NO: 8327
  source 1..120: mol_type = other DNA

SEQ ID NO: 29368 - DNA, 120 bp, synthetic construct
  source 1..120: mol_type = other DNA
atggctatgttagcatggttatctttagttatagaaaacacacttcacatttctgtgatgactctcaaatttgtgtctctagttttgaactccgtatgtgaatgttaattgcatatcacc

SEQ ID NO: 29369 - DNA, 120 bp, synthetic construct
  source 1..120: mol_type = other DNA
tttgctggttaatggcattgctggcagtacaccttctcaagccatgaaccttggattgatgctagaaacaaaaaacctgtcattccaaaacagagatctaagcatgtcactccttttttt

SEQ ID NO: 29370 - DNA, 120 bp, synthetic construct
  source 1..120: mol_type = other DNA
ccaagtagctgggattacaggcgcccaccaccacacctggctaatttttgtattttcagtagaggcggggtttcaccatgttggtcaggctggtctcgaactcctggtgatccgcccacc

SEQ ID NO: 29371 - DNA, 120 bp, synthetic construct; identical to SEQ ID NO: 8328
  source 1..120: mol_type = other DNA

SEQ ID NO: 29372 - DNA, 120 bp, synthetic construct
  source 1..120: mol_type = other DNA
gtcacccaggctggagtgcagtggcgcggtctttgctcactgcaacctccacctcccaggttcaagcaattctcctgcctcagcctccggagtagctgggattacagggacccaccacca

SEQ ID NO: 29373 - DNA, 120 bp, synthetic construct
  source 1..120: mol_type = other DNA
gcataagccactgtgcccggcctggaaagtcttttccttgttctgtacctatcaaaatcttacatccaggtcaggcgcggtggctcacgcctgtagtctcagcattttgggaggctgagg

SEQ ID NO: 29374 - DNA, 120 bp, synthetic construct
  source 1..120: mol_type = other DNA
ctcaggaggctgaggcaggagaattgcttgaactcgggaggtagaggttgaagtgagcccagattgccccactgcactccagcctgggcaacagagtgagattctgtcttaaaaaaaaaa

SEQ ID NO: 29375 - DNA, 120 bp, synthetic construct; identical to SEQ ID NO: 8329
  source 1..120: mol_type = other DNA

SEQ ID NO: 29376 - DNA, 120 bp, synthetic construct
  source 1..120: mol_type = other DNA
aatatgtatcttgtaggagttaatttaggataatctctgaggtcatctccaggtaatcagcatctccaggaatcggcagggtaatttaattacccacacattcttcagtgcttcaggtgc

SEQ ID NO: 29377 - DNA, 120 bp, synthetic construct
  source 1..120: mol_type = other DNA
gcgtattccccaaatggaatcagacagggcatgagatcatataacttgaagaatcatcatataatctaatgaactaaggacaggtgacatatttattaatatttctgtatacgaatttat

SEQ ID NO: 29378 - DNA, 120 bp, synthetic construct
  source 1..120: mol_type = other DNA
gaggccaggagttcaagaactaaaagctgtacaggcaccaagaatatgactgaatgtcacagtatgctctaaagggcactgtcctaggagtctggagacatgattttgagacttagctgt

SEQ ID NO: 29379 - DNA, 120 bp, synthetic construct; identical to SEQ ID NO: 8330
  source 1..120: mol_type = other DNA

SEQ ID NO: 29380 - DNA, 120 bp, synthetic construct
  source 1..120: mol_type = other DNA
tgttggctcttatataagatggcatccttagtacttgttctatgtagaaaagaatttgtgggctcacaagtccctacagagtctcacactctcatggccaataagtatacagggataccc

SEQ ID NO: 29381 - DNA, 120 bp, synthetic construct
  source 1..120: mol_type = other DNA
cattgcaagctccacctcccgggtttacaccattctgcctcaccctcccgagtagctgggactataggtgcccgccaacacgcccggctaattttgttgtgtttttagtagagacggggt

SEQ ID NO: 29382 - DNA, 120 bp, synthetic construct
  source 1..120: mol_type = other DNA
tattaggaaatacctccaacacacaaaaagatgtaaataattagccgggcgtggtggctcatgactgtaatcccagcactttgggaggccgaggcaggtggaacaccagaggtccggagt

SEQ ID NO: 29383 - DNA, 120 bp, synthetic construct; identical to SEQ ID NO: 8331
  source 1..120: mol_type = other DNA

SEQ ID NO: 29384 - DNA, 120 bp, synthetic construct
  source 1..120: mol_type = other DNA
aaaaactattaatagtaatacaaatggccaggcgcagtagctcatgcctgtaattccagcactttaggaggctgaggcaggcagatcacctgaggtcacgattttgagaccagcctggcc

SEQ ID NO: 29385 - DNA, 120 bp, synthetic construct
  source 1..120: mol_type = other DNA
gaggttgcagtgacccgagatcccgccactgtaccctagcctgggcgacagagcaagactccatctcaaaaataataataataatacaaatatctatatatccatcagccaatttaagaa

SEQ ID NO: 29386 - DNA, 120 bp, synthetic construct
  source 1..120: mol_type = other DNA
ctactaaaaatacaaaaattagctgagcacagtggcgggtgcctgtaattccagaacctgggaggtggaggttgcagtaagccaagattgtgctactgcactctagcctgggcgacagag

SEQ ID NO: 29387 - DNA, 120 bp, synthetic construct; identical to SEQ ID NO: 8332
  source 1..120: mol_type = other DNA

SEQ ID NO: 29388 - DNA, 120 bp, synthetic construct
  source 1..120: mol_type = other DNA
gttgaagccccttaaatgtccctccccaatccttttttctctgcagtgttgaccattattatgaattaaagcttatcatccctaatgggacagttatgttttcacaggaagaatatgaaa

SEQ ID NO: 29389 - DNA, 120 bp, synthetic construct
  source 1..120: mol_type = other DNA
tactcagcctcagagtgagctgcagtgttggcacacaaatacctcaacacactgctctccttctaaaatattgacaagctccgttacttatatacatggaatgacacacggtcttatccg

SEQ ID NO: 29390 - DNA, 120 bp, synthetic construct
  source 1..120: mol_type = other DNA
aggacactgcacttgccactacattcccatagcacatcgtggatacatattgccacaatccccagggactgcaagcacactttttggcaaactgagatcaagatgatagatgtaacttgt

SEQ ID NO: 29391 - DNA, 120 bp, synthetic construct; identical to SEQ ID NO: 8333
  source 1..120: mol_type = other DNA

SEQ ID NO: 29392 - DNA, 120 bp, synthetic construct
  source 1..120: mol_type = other DNA
aaggccttccttcttgaatcccaaaagtccaggtaaaggccctcagcctgtattccagactgtctgtaccctagacatgctgtccaattttattctaccctcttttttttttttttggag

SEQ ID NO: 29393 - DNA, 120 bp, synthetic construct
  source 1..120: mol_type = other DNA
cccgccaccatgcctggcaaatttttgtatttttagtagagacaggatttcaccatgttggccaggctggtcttgaactcctgacttcaggtgatccacctgcctcagcctcccaaggtg

SEQ ID NO: 29394 - DNA, 120 bp, synthetic construct
  source 1..120: mol_type = other DNA
agtttcaacactttaacttacgccaatttttttttatttctttttctttttttttttagacagagtcttgctctgtcgcccaggctggattgcagtggtgcgatctcggctcactgcaac

SEQ ID NO: 29395 - DNA, 120 bp, synthetic construct; identical to SEQ ID NO: 8334
  source 1..120: mol_type = other DNA

SEQ ID NO: 29396 - DNA, 120 bp, synthetic construct
  source 1..120: mol_type = other DNA
gcctctaacttctgggctcaagcaatcctcccaccttagcctccagagtaactgggactataagcctgagatgctgcacctggctttcttggattattttgaagcaagtcccagccatta

SEQ ID NO: 29397 - DNA, 120 bp, synthetic construct
  source 1..120: mol_type = other DNA
acctccgcctcccaggttcaagcgattctcctgcctcagcctcccatgtagctgggataacaggcacatgccaccatgcccaagttttttttttgtatttttagtagagacagggtttca

SEQ ID NO: 29398 - DNA, 120 bp, synthetic construct
  source 1..120: mol_type = other DNA
aaaagaaaattattttttaaaaagaataacagtattgttatcttactttaaaaattgtattatttggtatcatcaaatatctgaaatttttcttttttgagacagggtctcactctgtca

SEQ ID NO: 29399 - DNA, 120 bp, synthetic construct; identical to SEQ ID NO: 8335
  source 1..120: mol_type = other DNA

SEQ ID NO: 29400 - DNA, 120 bp, synthetic construct
  source 1..120: mol_type = other DNA
gggtttctccctgttggtcgggctggtctcgaactcccgacctcagatgatctgcctgccccggcctcccaaagtgctgggattacaggcgtgagccattgcacctgaccaattttttat

SEQ ID NO: 29401 - DNA, 120 bp, synthetic construct
  source 1..120: mol_type = other DNA
agtcagatgatggccctagtcctttttaatctaccggttccttctctatcttttctctcttgttctttctttctttttctctttttcttctcctggcaatttgttgaagaaactagatta

SEQ ID NO: 29402 - DNA, 120 bp, synthetic construct
  source 1..120: mol_type = other DNA
tgattaggttcagagttttttttttttcaatactgttttagaagtagaggaacataatgtctgatatgtccgattgtctctctttttctgatgttggcaaatgttctgatgtttaatacc

SEQ ID NO: 29403 - DNA, 120 bp, synthetic construct
  source 1..120: mol_type = other DNA
gtgattctcctgcctcagcctcctgagtagctgggacttacaggcgcacaccaccacgcccagctaatttttgtatttttagtagagacgggatttcaccatgttggccaggatggtctt

SEQ ID NO: 29404 - DNA, 120 bp, synthetic construct; identical to SEQ ID NO: 8336
  source 1..120: mol_type = other DNA

SEQ ID NO: 29405 - DNA, 120 bp, synthetic construct
  source 1..120: mol_type = other DNA
tgcctcagcctcccgagtagctgggactataggcgtgtgccaccatgcctggctaatttttgtatttttagtagagacagggtttcaccatgatggccaggatggtcttgatctcttgac

SEQ ID NO: 29406 - DNA, 120 bp, synthetic construct
  source 1..120: mol_type = other DNA
agtggccgtgctaatccctgtaaccttcgaaatttcagtatatgtgctgcagaaatgagcaccccccacctttatttactagctatcaatatggtaaattagttccctaacattctccaa

SEQ ID NO: 29407 - DNA, 120 bp, synthetic construct
  source 1..120: mol_type = other DNA
cctcccgggttcgcgccattctcctacctcagcctcctgagtgcctgggactacaggcgcccgccaccacgcctggctaattttttgtacttttagtagagacagggtttcaccctctta

SEQ ID NO: 29408 - DNA, 120 bp, synthetic construct; identical to SEQ ID NO: 8337
  source 1..120: mol_type = other DNA

SEQ ID NO: 29409 - DNA, 120 bp, synthetic construct
  source 1..120: mol_type = other DNA
tcggccaggctggagtgcaatggcgtgatctggctataacctccacctcccgggttcaagagattctcctgcctcagcctcccaagtagctggaattacatgtgcatgccaccaagccca

SEQ ID NO: 29410 - DNA, 120 bp, synthetic construct
  source 1..120: mol_type = other DNA
gagccactgtgcctggccaggaccatatcttaattgtctttgtagtttcagtgtttggtacagtgcctctcactgtttctttttgcctttgagatcttccctctttgttactgtgatctt

SEQ ID NO: 29411 - DNA, 120 bp, synthetic construct
  source 1..120: mol_type = other DNA
gatgcctgccgctccctgccgcagtccatccagctctttcgggacattgcccaagagttctctgatgacctgcaccatatcgccagcctcattgggaaagtagtgagtagaaggaaaaag

SEQ ID NO: 29412 - DNA, 120 bp, synthetic construct; identical to SEQ ID NO: 8338
  source 1..120: mol_type = other DNA

SEQ ID NO: 29413 - DNA, 120 bp, synthetic construct
  source 1..120: mol_type = other DNA
catccttggcaggtggtcaccacagctggggatcttcatagcaaccagggcaggagactcacttttgataaccacgtgtcttccaccctcgtagaaaagcgaagactgatgggacttccc

SEQ ID NO: 29414 - DNA, 120 bp, synthetic construct
  source 1..120: mol_type = other DNA
ttttgggggagatattaggcttatgaaagacatactggtagataagaaaacttgtggggcagcctgaagaacatgaacacttttttgtggggatacagggatcttttaagctccctctag

SEQ ID NO: 29415 - DNA, 120 bp, synthetic construct
  source 1..120: mol_type = other DNA
ttgagattaatggactggacttcatggtaagaccctcaacctctgtaaggtgagtgatgaggaaaatgagtcagcagctgaggaagagcgttactctacagcagcactgcccaatatggg

SEQ ID NO: 29416 - DNA, 120 bp, synthetic construct; identical to SEQ ID NO: 8339
  source 1..120: mol_type = other DNA

SEQ ID NO: 29417 - DNA, 120 bp, synthetic construct
  source 1..120: mol_type = other DNA
cttggggatgcttccaacaggcccctcctcttcctgctctctgtctcgctcactctgactctatcttttcctctgaatgtcttgaggtctcagattgtatctgcaacctgtttccagatc

SEQ ID NO: 29418 - DNA, 120 bp, synthetic construct
  source 1..120: mol_type = other DNA
acgagcagctgtcttaacccgagtattggaccttgcctcccgcctggacgtcctgctggctcttgccagtgctgcccgggactatggctactcaaggccgcgttactccccacaagtcct

SEQ ID NO: 29419 - DNA, 120 bp, synthetic construct
  source 1..120: mol_type = other DNA
cctctccgcccactgcagacatcctctgatggaactctgtgcccgaacctttgtgcccaactccacagaatgtggtggggacaaagggagggtcaaagtcatcactggacccaactcatc

SEQ ID NO: 29420 - DNA, 120 bp, synthetic construct; identical to SEQ ID NO: 8340
  source 1..120: mol_type = other DNA

SEQ ID NO: 29421 - DNA, 120 bp, synthetic construct
  source 1..120: mol_type = other DNA
ttagcccacagggctatggtcaggattcggggaggagagacagagtcagtgtgtctgttacctatttctcctgtttcaccctgtccatttctctttgatgtgccattcatgccttgagcc

SEQ ID NO: 29422 - DNA, 120 bp, synthetic construct
  source 1..120: mol_type = other DNA
tggggcagtagacgccatcttcacacgaattcatagctgcgaatccatctcccttggcctctccaccttcatgatcgacctcaaccaggtcaaagggaacaaagggaggtgggattgagg

SEQ ID NO: 29423 - DNA, 120 bp, synthetic construct
  source 1..120: mol_type = other DNA
cataaacatttcttgaacccttgtttcatgtgagtcactgttggcaaagaggatgaacaaagcgtgcacctcaccattcaagaacttgcagtgcagtagggagggcatgtatacagcttt

SEQ ID NO: 29424 - DNA, 120 bp, synthetic construct; identical to SEQ ID NO: 8341
  source 1..120: mol_type = other DNA

SEQ ID NO: 29425 - DNA, 120 bp, synthetic construct
  source 1..120: mol_type = other DNA
gtggatgggctcgcgcttctggccgctgtgctccgacactggctggcacgtggacccacatgcccccacatctttgtggccaccaactttctgagccttgttcagctacaactgctgcca

SEQ ID NO: 29426 - DNA, 120 bp, synthetic construct
  source 1..120: mol_type = other DNA
cagagaccacatcccttcccttttctccctccccacaggattggccaagggtttcaggacaggaaggaggtgattgatgatacactgtcttttattctcttttaagaccatggagacctg

SEQ ID NO: 29427 - DNA, 120 bp, synthetic construct
  source 1..120: mol_type = other DNA
ggaggtgatgagatccaaatgtgcaaccacctccacatcagagctccctttcattcctagtcctactgggcctgggtctaggtccacaggatttctgacccttatttccccttctcttcc

SEQ ID NO: 29428 - DNA, 120 bp, synthetic construct; identical to SEQ ID NO: 8342
  source 1..120: mol_type = other DNA

SEQ ID NO: 29429 - DNA, 120 bp, synthetic construct
  source 1..120: mol_type = other DNA
aaatcttgcgattttctctcttcttcagttgccagacattagtggataagtttatgaaactggatttggaagatcctaacctggacttgaacgttttcatgagccaggaagtgctgcctg

SEQ ID NO: 29430 - DNA, 120 bp, synthetic construct
  source 1..120: mol_type = other DNA
tagaaattttgtttcatattaggaataaagtttattttgaagaaagatattgtttctttagtctcaaaacaagagactaggaaagatccaaaacacagagcaggagtccacaggggaacc

SEQ ID NO: 29431 - DNA, 120 bp, synthetic construct
  source 1..120: mol_type = other DNA
acagaggggtccaagggagatggtctctcttctcaagtaggaacaccccagcctcagacagacacagcaggaaggggcctgagaggctgacagaggcaggatgggtgcaaggcaggggtg

SEQ ID NO: 29432 - DNA, 120 bp, synthetic construct; identical to SEQ ID NO: 8343
  source 1..120: mol_type = other DNA

SEQ ID NO: 29433 - DNA, 120 bp, synthetic construct
  source 1..120: mol_type = other DNA
aagggccataacccagagccctactgtggcgtgagagtcagcctctgtgattgcctttcccagctacgcaggatgcaggctctggagagagaacaggatgccctgtggcagggtctggag

SEQ ID NO: 29434 - DNA, 120 bp, synthetic construct
  source 1..120: mol_type = other DNA
accagggagggaggaacagggaatgtgtagacacagcctgagaccactctggagaggggagagttaatggtcagggatcatgagttggaggcagcatcgtaatgacaggatgccaccaag

SEQ ID NO: 29435 - DNA, 120 bp, synthetic construct
  source 1..120: mol_type = other DNA
gacagggaggctccatgaagagtagtgaaagggggtattgtgctatttgagggagatggaggaactgatgtgctaaagagatggaggtggagagtactggattttcccacctgcctggga

SEQ ID NO: 29436 - DNA, 120 bp, synthetic construct; identical to SEQ ID NO: 8344
  source 1..120: mol_type = other DNA

SEQ ID NO: 29437 - DNA, 120 bp, synthetic construct
  source 1..120: mol_type = other DNA
attcaaaggaaagacgaagggagcagaacttgtggcagcaacaggtaaacttcaagaaggagggcaggagccccaccctacagggctgggaggagcccagaggccccatctgtttctcct

SEQ ID NO: 29438 - DNA, 120 bp, synthetic construct
  source 1..120: mol_type = other DNA
agcctggtgaaagagtcagaagccccaggctcctttttctgtttcttaactcaacagctaaaaaatggctccaggtagtgagtcaatgaagttcagacatgttggtgtaaagtttctcct

SEQ ID NO: 29439 - DNA, 120 bp, synthetic construct
  source 1..120: mol_type = other DNA
tcagccttaaatacaaaaataaaactgaaactgctccagaaagcagctttctccaaaaatgtctttggtttgtttctcatagggttaggaaaagtgcattgtgggaatatccattgccct

SEQ ID NO: 29440 - DNA, 120 bp, synthetic construct; identical to SEQ ID NO: 8345
  source 1..120: mol_type = other DNA

SEQ ID NO: 29441 - DNA, 120 bp, synthetic construct
  source 1..120: mol_type = other DNA
gtttgagaccagcctggccaacatagtgaaaccctgtctctactaaaaatacaaaaaattagccgggcgtggtggcgggcacctgtgatcccagctacttgggaggctgaggcaggagaa

SEQ ID NO: 29442 - DNA, 120 bp, synthetic construct
  source 1..120: mol_type = other DNA
cttcatcccagctaggagaggtaaggtcctaagacctatgtgacaaatgtgtcccaggtcttcttaccaatggggcaggttgaaaatagtgctggagacccatccctttagagcccgttg

SEQ ID NO: 29443 - DNA, 120 bp, synthetic construct
  source 1..120: mol_type = other DNA
gcaggggtggccgtggtgaggatcgggtcagatgagccggtaggggtggtgtgccggtcctgtggggaaaaggaagagaatgacagggtgtgctagagctgtactcaaattaaacctaca

SEQ ID NO: 29444 - DNA, 120 bp, synthetic construct; identical to SEQ ID NO: 8346
  source 1..120: mol_type = other DNA

SEQ ID NO: 29445 - DNA, 120 bp, synthetic construct
  source 1..120: mol_type = other DNA
aagcattggccgggcaagatgccagagggagctggagggttcatgagcctcacctggagaggttggaggtgagggagaagctggggttgacgaaagtcctaaggtcaagatcctgagggc

SEQ ID NO: 29446 - DNA, 120 bp, synthetic construct
  source 1..120: mol_type = other DNA
gaagggttcttcagggaaggggccgctctaactctctccagccccagccgcactttcccctggcgtctcacctccagaaggacagggactacagtgctaggctgaggggcagccctgtgc

SEQ ID NO: 29447 - DNA, 120 bp, synthetic construct
  source 1..120: mol_type = other DNA
ggctgcgaggagacctcgctccggaggtcccacgggctccaagggcacctggcctagttcggcaccctctgggacccctcgaaggatgacgtgggagaaatgcggctgaggatccccagg

SEQ ID NO: 29448 - DNA, 120 bp, synthetic construct
  source 1..120: mol_type = other DNA
attgtgagattcggagacacagggagaaaagaattaatggccttcaaaataggggttccctctggggagtatggatgggaaaataggttaccttcgaggggtattgatggggagcatcag

SEQ ID NO: 29449 - DNA, 120 bp, synthetic construct; identical to SEQ ID NO: 8347
  source 1..120: mol_type = other DNA

SEQ ID NO: 29450 - DNA, 120 bp, synthetic construct
  source 1..120: mol_type = other DNA
cagagcccttcctgaaaggaatgtgactgatcgtgttctctgaggcctgcagtctctgcttccccttcccaggaacacctccctccttaccttgcactctcaccccaggggtgtcctcag

SEQ ID NO: 29451 - DNA, 120 bp, synthetic construct
  source 1..120: mol_type = other DNA
cccctggggtcagggaagagattgtcacatgaagcacttgctctccttgagtacatcccctcgattgtctattccccggtcccctctcttccctctaccttcagaggtacctgcagggtt

SEQ ID NO: 29452 - DNA, 120 bp, synthetic construct
  source 1..120: mol_type = other DNA
caccttgagggattggcaggaccagaaaatggggaagaagatgaggtatgggatgaggaacaaagaagaaaggggagatagaaagaaaccacgtcattgggccgggcgcagttggtcacg

SEQ ID NO: 29453 - DNA, 120 bp, synthetic construct; identical to SEQ ID NO: 8348
  source 1..120: mol_type = other DNA

SEQ ID NO: 29454 - DNA, 120 bp, synthetic construct
  source 1..120: mol_type = other DNA
gtcaaacaggcagaaagggataccagtaagagaggggcacggggccagggatgaagttattatggtcagagacaaagttggaggcaagggattcaggatgagacaatcacatcttgtgcc

SEQ ID NO: 29455 - DNA, 120 bp, synthetic construct
  source 1..120: mol_type = other DNA
gactctgtctctgcaaaatacaagccacctccccaaaaagatggtaggacttcctgtggtaaccctggaggcagaatactggaagccaagtggggagaggtttactgatataaaaggaca

SEQ ID NO: 29456 - DNA, 120 bp, synthetic construct
  source 1..120: mol_type = other DNA
gctctactaaaaaaatacaaaaattagccaggcctggtggtgggcactggtaactctagcgacttgggaggctgaggcaggagaatcccttgaacccgggaggtggaggttgcaatgagc

SEQ ID NO: 29457 - DNA, 120 bp, synthetic construct; identical to SEQ ID NO: 8349
  source 1..120: mol_type = other DNA

SEQ ID NO: 29458 - DNA, 120 bp, synthetic construct
  source 1..120: mol_type = other DNA
gccgagctcgaccctgaacccttgatgtatcttcagtcaccaggaatgttacctgtacccagaagagagctcagtgattggggtgtccaagtgccatccactattatgaatgagaatccc

SEQ ID NO: 29459 - DNA, 120 bp, synthetic construct
  source 1..120: mol_type = other DNA
ccttgtaactgtcacagtggatttttggcgactagagccccagttcttcacattgtttattaggcagggtcaaataaaaattcagcgttattaagggtagggcctcttacgtatatcatt

SEQ ID NO: 29460 - DNA, 120 bp, synthetic construct
  source 1..120: mol_type = other DNA
cagttcttcacattgtttattaggcagggtcaaataaaaattcagcgttattaagggtagggcctcttacgtatatcattaaaggtatcaggaaatgttccactcattgtctgcttctcc

SEQ ID NO: 29461 - DNA, 120 bp, synthetic construct
  source 1..120: mol_type = other DNA
cacccggcagcgccgctcctgagtcagggattccacctggttggtgagaaaggcatccttgggggaggcatccgtgaagacaaagatatctgagagtggaggtgtgtgcagcagggccag

SEQ ID NO: 29462 - DNA, 120 bp, synthetic construct; identical to SEQ ID NO: 8350
  source 1..120: mol_type = other DNA

SEQ ID NO: 29463 - DNA, 120 bp, synthetic construct
  source 1..120: mol_type = other DNA
agctcccctcattcttacccagagccacctccccagttgaggggcctggtgtgcttctggagccgacaggtattgaaataacaatactccattataagactcatacttggccgggtgcgg

SEQ ID NO: 29464 - DNA, 120 bp, synthetic construct
  source 1..120: mol_type = other DNA
ttagctgggcatggtgatgcatgcccgtagcctccccagtagcctccccagaggctccccagtagcctccccagctactggggaggctgaggcaggagaatcacttgaacccgggaggca

SEQ ID NO: 29465 - DNA, 120 bp, synthetic construct
  source 1..120: mol_type = other DNA
gggcagacctaggtgtccctggtgggaaggtggcctccactccctgaaaaaaatggtggcatttcctgtaggcctttattggctacatgtgcgtatataaaaaaaaaaatggtcacacct

SEQ ID NO: 29466 - DNA, 120 bp, synthetic construct; identical to SEQ ID NO: 8351
  source 1..120: mol_type = other DNA

SEQ ID NO: 29467 - DNA, 120 bp, synthetic construct
  source 1..120: mol_type = other DNA
accgaatagcacttacctcagaggtttattgggaggactaaatgagttgattttgcaaatcttaagatagtgctttgacacataagtgctaagttcttagttatacctttatttatatct

SEQ ID NO: 29468 - DNA, 120 bp, synthetic construct
  source 1..120: mol_type = other DNA
tgggagttaggcaggatgagggaggtgtcaggcctctgagcccaagctaaccaatcatatcccctgtgactggcacttatacatccagatggcctgaagcaactgaagatccacaaaaga

SEQ ID NO: 29469 - DNA, 120 bp, synthetic construct
  source 1..120: mol_type = other DNA
acacacagtcagactcaagccagagagtctaacttctaatcaatggaaaaggaatacaatgtagctagttatctcagatgcttcccagaagcctggccccaacaaccccatcttgatacc

SEQ ID NO: 29470 - DNA, 120 bp, synthetic construct
  source 1..120: mol_type = other DNA
accatcctggttaacacggtgaaactccgtctctactaaaaatacaaaaattagccgggcgtggtggcgggcgcctgtagtcccagctactcaggaggctgagacaggagaatggcgtga

SEQ ID NO: 29471 - DNA, 120 bp, synthetic construct; identical to SEQ ID NO: 8352
  source 1..120: mol_type = other DNA

SEQ ID NO: 29472 - DNA, 120 bp, synthetic construct
  source 1..120: mol_type = other DNA
agtagctgggactataggcatgtgccaccacacccacacataatttttattaatttttttgtagagacctgtgtttctctgtgttgcccaggttggtcttgaaatcctgggctcaaacga

SEQ ID NO: 29473 - DNA, 120 bp, synthetic construct
  source 1..120: mol_type = other DNA
cccgagcccacttcctcaccacaggcctttatcccttacctttttatcttttcttttttttttctttcttttcttttttttttttttttttttttttttttgtgacagagctttttgctc

SEQ ID NO: 29474 - DNA, 120 bp, synthetic construct
  source 1..120: mol_type = other DNA
accacgcccggctaattttgtatttttagtagagacggggtttctccatattagtcaggctggtctcaaactcccgacctcaggtgatccacctgcctcagcctcccaaagtgctgggat

SEQ ID NO: 29475 - DNA, 120 bp, synthetic construct; identical to SEQ ID NO: 8353
  source 1..120: mol_type = other DNA

SEQ ID NO: 29476 - DNA, 120 bp, synthetic construct
  source 1..120: mol_type = other DNA
ggccactcacctggagaaatccctgtctcccaggcggcttcgcagaaggctgaaggcctggatggaggctagaagggccagttttgcagcctggaggtgcagcatgtggtgaggggagaa

SEQ ID NO: 29477 - DNA, 120 bp, synthetic construct
  source 1..120: mol_type = other DNA
caaaaacccactgcctcctaagaaaatgaggccctttcaggcctggcctgaccctctcacccctcagcaagggttcagcaagaaatgatgacggggttggcgcggtggctcacgcctgga

SEQ ID NO: 29478 - DNA, 120 bp, synthetic construct
  source 1..120: mol_type = other DNA
tggcgcgtgcttgtaatcccagctacttaggaggctgaggaaggaaaatagcttgatcccaagaggcggaggttgcagtgaaccgagatcacgccactgcactccagcctgggtggcaga

SEQ ID NO: 29479 - DNA, 120 bp, synthetic construct
  source 1..120: mol_type = other DNA
tgagacaagcctggccaacatgatgaaaccctgtctctactaaaagtacaaaattagccgggcgtggtggcacatgcccgtaatcccagctactcgggaggctgaggcaggagaatcgct

SEQ ID NO: 29480 - DNA, 120 bp, synthetic construct; identical to SEQ ID NO: 8354
  source 1..120: mol_type = other DNA

SEQ ID NO: 29481 - DNA, 120 bp, synthetic construct
  source 1..120: mol_type = other DNA
aaaggcatacgggcctacaggacagagatcctgtaagggaatgactttctccccttacttctggggaactttcttgtctggtacctggaggtttcgggggatgagttccaaagtagccag

SEQ ID NO: 29482 - DNA, 120 bp, synthetic construct
  source 1..120: mol_type = other DNA
agcctttatccccacccacccaaaccttttcagcttctcctcccagctgggatgaggcgaacacccagaagttccctagcaaagctttctgaactaaaacctaggatcatgggcccgcag

SEQ ID NO: 29483 - DNA, 120 bp, synthetic construct
  source 1..120: mol_type = other DNA
cacagtgagacctcatctctaaaaaataaatacataaataaataataagaaaaaaacaaacacagtacgtgtagggaccaatcctatggggattatgccctctgtgagttgtggacagga

SEQ ID NO: 29484 - DNA, 120 bp, synthetic construct; identical to SEQ ID NO: 8355
  source 1..120: mol_type = other DNA

SEQ ID NO: 29485 - DNA, 120 bp, synthetic construct
  source 1..120: mol_type = other DNA
tcgcccagctccacccagttgctatgactgtagaaatcctggtccggaggacaggagaaggggagtgaggcactagtctggcctttctcaccatctccagcactaatatgccactccttt

SEQ ID NO: 29486 - DNA, 120 bp, synthetic construct
  source 1..120: mol_type = other DNA
agcatctcttcccagctcagagtctaacccaaggcctctctcggcctgcagagtcctgctgcgtgtgctgctccctcagctctctgacctcgcagccttcctctctcaccctcacttctc

SEQ ID NO: 29487 - DNA, 120 bp, synthetic construct
  source 1..120: mol_type = other DNA
acatgatcaagaaggcaccataggacgcgctccatcccggacaggcacggaagtgaagacccctctgaccatcaacccaaccctgttctcacctgcagggcatgaagtgcagccccgagg

SEQ ID NO: 29488 - DNA, 120 bp, synthetic construct; identical to SEQ ID NO: 8356
  source 1..120: mol_type = other DNA

SEQ ID NO: 29489 - DNA, 120 bp, synthetic construct
  source 1..120: mol_type = other DNA
gcaactgacactcaaggctgggtatgagggtcctgagccccacaaaggagggacagtcccggacctttctaaggagggggactcctaatttcaggaccaagactactgggtattattgct

SEQ ID NO: 29490 - DNA, 120 bp, synthetic construct
  source 1..120: mol_type = other DNA
gtcctcaagacgaagaggggggcggcctgggggtggctgctccaggaagagctgcagggtgacgttgagcgctgcctcctcagttaggtcttggtgggtgatggagccaggggcagccag

SEQ ID NO: 29491 - DNA, 120 bp, synthetic construct
  source 1..120: mol_type = other DNA
gacctgggagacagaaggctctcaagggaggaggaagcagccgcgattccagggcaggccggctctgcgggtctccatgggaacctgctttacctcaaaagtcgtgtctgctccagcctg

SEQ ID NO: 29492 - DNA, 120 bp, synthetic construct; identical to SEQ ID NO: 8357
  source 1..120: mol_type = other DNA

SEQ ID NO: 29493 - DNA, 120 bp, synthetic construct
  source 1..120: mol_type = other DNA
cacaggcagcagcccacgccagggcgggcctcccttggctgcagtgcggaggtgagtgagagctggggaggaggaagggagtaagcagcgtgactcaggcctggcacagtgccagggaca

SEQ ID NO: 29494 - DNA, 120 bp, synthetic construct
  source 1..120: mol_type = other DNA
agaggattttgtgggaaaatattttattgctgccatccccatggtgagccgctgggggtgaggggtgaagctgggtggtggatcacagcatcttctggaatagggcgatggcctcatcca

SEQ ID NO: 29495 - DNA, 120 bp, synthetic construct
  source 1..120: mol_type = other DNA
aggaccatgggaggtcagtagctcagaggaggcgtgaacctggctggcctggctccccacccattcccaccagcacccccacttccaccaccacctcttgggtcttgcctttttccacca

SEQ ID NO: 29496 - DNA, 120 bp, synthetic construct; identical to SEQ ID NO: 8358
  source 1..120: mol_type = other DNA

SEQ ID NO: 29497 - DNA, 120 bp, synthetic construct
  source 1..120: mol_type = other DNA
gtaagtggtgggaggcccagggctccccgactacatgtggaccccaagcccagccccaggcatgcaggtttccacattttgggcagctgggtggggtacgaagggtctggctgggagata

SEQ ID NO: 29498 - DNA, 120 bp, synthetic construct
  source 1..120: mol_type = other DNA
tgtgtaaggggagggccttctatggtccctgctcaaagcgcctgggctccatgctccccagtggattccccagggttgggtacagagtccagcttccagaccaggattggtttttgtttt

SEQ ID NO: 29499 - DNA, 120 bp, synthetic construct
  source 1..120: mol_type = other DNA
cccgagtagctgggaccccaagtgtgtgccactatggccagctaatttttgtatttttgttgtagagatgggatttcaccatgttggctggtctcaaacccctgggctcaagtgatccac

SEQ ID NO: 29500 - DNA, 120 bp, synthetic construct; identical to SEQ ID NO: 8359
  source 1..120: mol_type = other DNA

SEQ ID NO: 29501 - DNA, 120 bp, synthetic construct
  source 1..120: mol_type = other DNA
agcccctgaagctgcaggtggatggagcagcgatcagaagccagagccacagcgcaaccctggggggcgggagcccccagggccagaacagccaccacacctgcgctggccagggcctgc

SEQ ID NO: 29502 - DNA, 120 bp, synthetic construct
  source 1..120: mol_type = other DNA
ctgccggacactgggtcccagagtaggctgaggggacagtgggatggggcggacatgggggcctgaggctcacagtcaggccggatccgggtgaggttgtagtcggcccgcagggagcgc

SEQ ID NO: 29503 - DNA, 120 bp, synthetic construct
  source 1..120: mol_type = other DNA
ccaggccatgccatacctctgagggctccgggtagggggtaacacagaggctagggggagcttgcggcatcctccggggcagcctctggaacagctcctccgtcacgaagggcatgaagg

SEQ ID NO: 29504 - DNA, 120 bp, synthetic construct; identical to SEQ ID NO: 8360
  source 1..120: mol_type = other DNA

SEQ ID NO: 29505 - DNA, 120 bp, synthetic construct
  source 1..120: mol_type = other DNA
ggaagccttgattgctgagcctcacagcctctgtcaggcggctgcggatccagcggtccaccaggctctcatggcctccgggcttggggagagagggtgtatcagccggcgggccagggg

SEQ ID NO: 29506 - DNA, 120 bp, synthetic construct
  source 1..120: mol_type = other DNA
atgcgctgggctttccctttaactgtctgtctctgtgtctatctgtccccccagctacatggaggctgctccggacaggggtacagcctgtgtgagtgctgccagctttgctgcccacca

SEQ ID NO: 29507 - DNA, 120 bp, synthetic construct
  source 1..120: mol_type = other DNA
caggttgatgtcacgacctgggtcgggggtgagatgtgagtcctcatcaccctcttcccagcccatgcccaccagaggctcagggtggagaagagggatgggcctcacagaaggaggaag

SEQ ID NO: 29508 - DNA, 120 bp, synthetic construct; identical to SEQ ID NO: 8361
  source 1..120: mol_type = other DNA

SEQ ID NO: 29509 - DNA, 120 bp, synthetic construct
  source 1..120: mol_type = other DNA
ccatagatgacgtccaggggatcgatgacattgcctagagacttgctcatcttccggccgtgagcatctcgcacgatggcatggaggtagacctgcagagcaggtggggaggcccatgag

SEQ ID NO: 29510 - DNA, 120 bp, synthetic construct
  source 1..120: mol_type = other DNA
tcagaagcactccttcctctgggaagatgaagccctgggcacaggaatcactgagcagggcccaggctggatttcaaccccacaccagcccccgggtcaggcctgcccacagctaacccc

SEQ ID NO: 29511 - DNA, 120 bp, synthetic construct
  source 1..120: mol_type = other DNA
aggcccagcatgaccatccgggccacccagaagaagaggatgtcatgaccggtctccagcagtgtcccggggtagaacacactcaggtcttctgactgagggcagaccagggtgtgaagg

SEQ ID NO: 29512 - DNA, 120 bp, synthetic construct; identical to SEQ ID NO: 8362
  source 1..120: mol_type = other DNA

SEQ ID NO: 29513 - DNA, 120 bp, synthetic construct
  source 1..120: mol_type = other DNA
cttctggctcaccctgcccctccccccaccaaggacccagtaaacccaccactccagcagggtgtcccagcagctagctctggccctctgctcacctccccagggggcaccgctgggtca

SEQ ID NO: 29514 - DNA, 120 bp, synthetic construct
  source 1..120: mol_type = other DNA
tgagccctgctcagccctcggcaagcccctcccacactgaggaccctacacaccggatgttgtccatccaggcatgccatgtgcgctgatgggcctcaggcaggatgcggaggtcacccc

SEQ ID NO: 29515 - DNA, 120 bp, synthetic construct
  source 1..120: mol_type = other DNA
ggcggtaaaaccctgaggagccctccatcttcctcccgtcccaggcccccaccctcacttgcaaagtggcaccaccatggggttgtcctcaatgccacggaacagtccccgctccttcag

SEQ ID NO: 29516 - DNA, 120 bp, synthetic construct; identical to SEQ ID NO: 8363
  source 1..120: mol_type = other DNA

SEQ ID NO: 29517 - DNA, 120 bp, synthetic construct
  source 1..120: mol_type = other DNA
acttgtctaatacagtcccttgagaaccaccccaagctctgtctatttggctgaagcttattttctttttctctgagagaagatggacagctagggtgcagctccagtcttttcctctcc

SEQ ID NO: 29518 - DNA, 120 bp, synthetic construct
  source 1..120: mol_type = other DNA
ggcggaaagataccaaaaacgcatgaagcagggccagacgccgtgattcccacctgtaatcccagaactttgggaggctgaggtgggcagatcacttgaggccgggagttggagaccagc

SEQ ID NO: 29519 - DNA, 120 bp, synthetic construct
  source 1..120: mol_type = other DNA
cccgggaggtggaggttgcagtgagccaagatggtgccactgcactctagcctgggcgatagagtgagaccctctctcaaaaataaataaataaataaaagcatgaaggggcctggtgcc

SEQ ID NO: 29520 - DNA, 120 bp, synthetic construct
  source 1..120: mol_type = other DNA
ttttttttgagacggagtctcgctctgtcaccaaggctggagtgcagcagagtgatctcagctcactgcaacctccgcatcccaggttcaagcgattctcctgcctcagcctcctgagta

SEQ ID NO: 29521 - DNA, 120 bp, synthetic construct; identical to SEQ ID NO: 8364
  source 1..120: mol_type = other DNA

SEQ ID NO: 29522 - DNA, 120 bp, synthetic construct
  source 1..120: mol_type = other DNA
cccataaggatgggagccctttttggccagaactccttccctaactgtggacagtcccccacctggtatctggtatctttggggtgcacagctacagccacatctcccagcattgtctcg

SEQ ID NO: 29523 - DNA, 120 bp, synthetic construct
  source 1..120: mol_type = other DNA
acctgagccttggaccttataggcaaaggacacgaggaccccgaactccaccttctccttgtagccaggcacggagagcagggtgcgacctgtcagctccttcttatccacctgtaaaat

SEQ ID NO: 29524 - DNA, 120 bp, synthetic construct
  source 1..120: mol_type = other DNA
cacctcaatgtcagagatggcggagttgagggtgcaggaccagttaacaaggcgggtactgcgatagatgatgccttcctcgtgaagccggacaaaggcctctgtcacagctgctgagag

SEQ ID NO: 29525 - DNA, 120 bp, synthetic construct; identical to SEQ ID NO: 8365
  source 1..120: mol_type = other DNA

SEQ ID NO: 29526 - DNA, 120 bp, synthetic construct
  source 1..120: mol_type = other DNA
atggaaagggccatggcgaggggtgggaagtggcatttgcagctgagccctccatggtgttttacatgggccagctcctgagagagggccacaacacctctgctttctcctgtgggggtc

SEQ ID NO: 29527 - DNA, 120 bp, synthetic construct
  source 1..120: mol_type = other DNA
aatccggtcacctttcctggaagcagacaggctgaggtcagcactcgtgcctgggctagagggagacatcaggtggctgactgggcagtgtggagatcacccatccccctgaaatttacc

SEQ ID NO: 29528 - DNA, 120 bp, synthetic construct
  source 1..120: mol_type = other DNA
ggatgctgcatactcactcctccttccacttccagacttcctgtagaaaggcctcgcggcccagctggtgccggctcagtccctgctcacgccatagcttcttctccaccaccacctggg

SEQ ID NO: 29529 - DNA, 120 bp, synthetic construct; identical to SEQ ID NO: 8366
  source 1..120: mol_type = other DNA

SEQ ID NO: 29530 - DNA, 120 bp, synthetic construct
  source 1..120: mol_type = other DNA
gggtggatcacctgaggtggggacttcaagataagcctggccaatatggtaaaaccctgtctgtattaaaaatacaaaattagctgggcgtggtggcatgtgcctgtaatcccagctact

SEQ ID NO: 29531 - DNA, 120 bp, synthetic construct
  source 1..120: mol_type = other DNA
aaaaaaaaaaagaaagaagcaggggtggagctggaacccttgtgattctaaagctagtcaaggagaaaagatttgaaggaagagccaaggcaatatggaaaaagaacaaagacaggcatg

SEQ ID NO: 29532 - DNA, 120 bp, synthetic construct
  source 1..120: mol_type = other DNA
gcctgaccaacatggcaagaccctgtctctaccaaaaatataaaaattagccaggatggtggtgcatacctgtaatcccagctacttgggaggctgaagcacgagaatcgcttgaagctg

SEQ ID NO: 29533 - DNA, 120 bp, synthetic construct; identical to SEQ ID NO: 8367
  source 1..120: mol_type = other DNA

SEQ ID NO: 29534 - DNA, 120 bp, synthetic construct
  source 1..120: mol_type = other DNA
acagtggctcaagcctataaccccaacactttgggaggccaaggtgagaggactgcttgagcccaggagttgcagactagcctgggcaacatagtgagacctagtctctgcaaaaaaaaa

SEQ ID NO: 29535 - DNA, 120 bp, synthetic construct
  source 1..120: mol_type = other DNA
acacagtgagagagactctgtctcaaaaataaataaataaacaaataaataaaaataaaaagttgatataactctattccattaaagtaatgggagtgtctcacattttatttaaaccac

SEQ ID NO: 29536 - DNA, 120 bp, synthetic construct
  source 1..120: mol_type = other DNA
gttaggagttcaagaccagcttggccaacatggcaaaactctgtctactaaaaatgcaaaagaattagctgggcgtggtggtgcgtgcctgtagtcccagctactcaggagactgagaca

SEQ ID NO: 29537 - DNA, 120 bp, synthetic construct; identical to SEQ ID NO: 8368
  source 1..120: mol_type = other DNA

SEQ ID NO: 29538 - DNA, 120 bp, synthetic construct
  source 1..120: mol_type = other DNA
atcgagaccatcttggctaacacggtgaaaccccgtctctactaaaaatacaaaaaaaattagccaggcgtggtggtgggctcctatagtcccagctactcaggaggctgaggcaggaga

SEQ ID NO: 29539 - DNA, 120 bp, synthetic construct
  source 1..120: mol_type = other DNA
aacaaaaacgcaaacacaaacgcaaacaacttggccattgtatgttatgtgtatttaacagaactgttggctggacgaagtggctcatgcctgtcatcctagcactttgggagaccgaag

SEQ ID NO: 29540 - DNA, 120 bp, synthetic construct
  source 1..120: mol_type = other DNA
cagaaggctgaggcaggagaatcgcttgagctcaggaggcagaggttgcagtaagcgcgcatcactgcactccagcctgggaaaccgagagagactctgtctcaaaaaaacaaaaaaaac

SEQ ID NO: 29541 - DNA, 120 bp, synthetic construct
  source 1..120: mol_type = other DNA
ctgtctctactaaaaaaaatacaaaaaattagccaggcgtggtggcgggcgcctgtagtcccagctactcaggaggctgaggcaggagtatgctgtgaacctgggaagcagagcttgcag

SEQ ID NO: 29542 - DNA, 120 bp, synthetic construct; identical to SEQ ID NO: 8369
  source 1..120: mol_type = other DNA

SEQ ID NO: 29543 - DNA, 120 bp, synthetic construct
  source 1..120: mol_type = other DNA
tattaacagtgaaaacaaatagtaacagaaaacaggagaaacatttacaattaacaggaaaactaccacacaataatacaacaaaaacatttacaatatttaacaaaaaaattgataccc

SEQ ID NO: 29544 - DNA, 120 bp, synthetic construct
  source 1..120: mol_type = other DNA
aacatgaaaataggcacaacttcaatagcaatcagaaaggtacaaagtaaaacaacagaggtatttttttgcccatcagattggcaaaactaattaggcaaccctaatgctcaggcttag

SEQ ID NO: 29545 - DNA, 120 bp, synthetic construct
  source 1..120: mol_type = other DNA
gcttccgtttgtacttaatataggtgtgcccctgccgacctagcagtttcacttcttgatagctacaccagcgaaacccttccacacatgcttcagcaagcatatagagcaggggtatcc

SEQ ID NO: 29546 - DNA, 120 bp, synthetic construct
  source 1..120: mol_type = other DNA
ggctcacgcctgtaatcccagcactttgggagtccgaggcgggcggatcacgaggtcaggagatcgagaccatcctggctaacatggtgaaaccccgtctctactaaaaatacaaaaaaa

SEQ ID NO: 29547 - DNA, 120 bp, synthetic construct; identical to SEQ ID NO: 8370
  source 1..120: mol_type = other DNA

SEQ ID NO: 29548 - DNA, 120 bp, synthetic construct
  source 1..120: mol_type = other DNA
gcatgtggcccacaggctgcaggttggacaaacttgatatacagggatgtgcattagagtaaggttttcaacagaaaaaaaacaaaaaacaaaaaacagaatgaatcattaattaaaaag

SEQ ID NO: 29549 - DNA, 120 bp, synthetic construct
  source 1..120: mol_type = other DNA
aggagtttgagaccagcctggccaacatggtgaaaccccatctctactaaaaatacaaaaattagccaggcgcggtggcaggtgcctgtaatgccagctacttgggaggctgaggcaaga

SEQ ID NO: 29550 - DNA, 120 bp, synthetic construct
  source 1..120: mol_type = other DNA
gaatgacttcactatggtacagccacactatgagatattatggaacaattaaaaagaaggaagtcagtatgtgtggtatgtgtgtaaggacaaggaaagatctccaagagaaagtattaa

SEQ ID NO: 29551 - DNA, 120 bp, synthetic construct; identical to SEQ ID NO: 8371
  source 1..120: mol_type = other DNA

SEQ ID NO: 29552 - DNA, 120 bp, synthetic construct
  source 1..120: mol_type = other DNA
acccaggaggcagcggttgccatgagccgagatggcgtcactgcactccggcctgggcaacagaacaagactctgtccccccaaaaaaaaatatatatattcatatgttcctaattaaat

SEQ ID NO: 29553 - DNA, 120 bp, synthetic construct
  source 1..120: mol_type = other DNA
accagactgagcaacaaagtgaaaactcatctttacaaaaaattaaattaaattaaattaaaattaaataaagaaagaagggatagaagagagtctgcaagtggcggtgttgcatgggag

SEQ ID NO: 29554 - DNA, 120 bp, synthetic construct
  source 1..120: mol_type = other DNA
aaaggagagagccagactaggcagagggaaccagaggaaggtgcagatagaagctcaccatcgagtcagggagtcctggatggcgttggtgagtgcatggcccaggtgcagggagcctgt

SEQ ID NO: 29555 - DNA, 120 bp, synthetic construct; identical to SEQ ID NO: 8372
  source 1..120: mol_type = other DNA

SEQ ID NO: 29556 - DNA, 120 bp, synthetic construct
  source 1..120: mol_type = other DNA
gctggcagagagggatcgggatctccgtcactcacatcataggacaggcatttgaggggcctagaggcagggcagggggtctgcaattcctcaccaaacaaagtggtgagagcaagaata

SEQ ID NO: 29557 - DNA, 120 bp, synthetic construct
  source 1..120: mol_type = other DNA
gtggggttgggaggtcataggtaatgaccccaggatcccgtttctccctcttctctggttttggtttcttctgcttgggagggagaagacataggcccaggcatcagccaacccatcacc

SEQ ID NO: 29558 - DNA, 120 bp, synthetic construct
  source 1..120: mol_type = other DNA
tgttggaatttctctagcttctcccgtttctttgcctctttcttgagctgagcagctgtctttgggagggcaggagcctcggggcctagagagaggtgcagaaattcagactcagccagc

SEQ ID NO: 29559 - DNA, 120 bp, synthetic construct; identical to SEQ ID NO: 8373
  source 1..120: mol_type = other DNA

SEQ ID NO: 29560 - DNA, 120 bp, synthetic construct
  source 1..120: mol_type = other DNA
atgactcttctcagtcaccctacagtgaggtctgaggagagcagtcttgttcttccccaggcctggtgactcacgtatcggaaaggcagcagcaaggctgtgacagccgccaggtcagcc

SEQ ID NO: 29561 - DNA, 120 bp, synthetic construct
  source 1..120: mol_type = other DNA
gtttggcccacctccatctcccaccacaacccaatccatgtggcctccctccaccccactctcacaaatcaccacctctgagtcccatttcttcactcaaatagtcacaataaaaatact

SEQ ID NO: 29562 - DNA, 120 bp, synthetic construct
  source 1..120: mol_type = other DNA
gctactcgggaggctgaggcaggagaatggcatgaacccaggaggtggagcttgcagtgagccgagatcacgccactgcactccagcctgggcaacacagcgagactccgtctcagaaaa

SEQ ID NO: 29563 - DNA, 120 bp, synthetic construct; identical to SEQ ID NO: 8374
  source 1..120: mol_type = other DNA

SEQ ID NO: 29564 - DNA, 120 bp, synthetic construct
  source 1..120: mol_type = other DNA
gcgagcagaccatctgaggttaggagttcgagaccagcctggtcaacatgacaaaaccccatctctactaaaaatacaaaaaattagccggacaaggtggtgggcgcctgtaatcccagc

SEQ ID NO: 29565 - DNA, 120 bp, synthetic construct
  source 1..120: mol_type = other DNA
gaaaagaaaagaaataaaagaggggaacaaacagggaattccagaagagagggactctattttatttgtttgtttggacagacattctgaatgcaaggactctattgtagatagggtgat

SEQ ID NO: 29566 - DNA, 120 bp, synthetic construct
  source 1..120: mol_type = other DNA
taccatgcaaggaggcagagttgaaagtacaccaaggcacaggtctcctttggaaggactgatagttacaatctggcagggttatctctcctctcacttaccttcctcatttcatttctc

SEQ ID NO: 29567 - DNA, 120 bp, synthetic construct
  source 1..120: mol_type = other DNA
ttcagactcatcaaacttttactaagagactttaaaagtgcctggcactaaactatgtgctctgcgcacatcttttaatcctattaactcagtgaggcaagcattacatcaacttgcctg

SEQ ID NO: 29568 - DNA, 120 bp, synthetic construct; identical to SEQ ID NO: 8375
  source 1..120: mol_type = other DNA

SEQ ID NO: 29569 - DNA, 120 bp, synthetic construct
  source 1..120: mol_type = other DNA
ccccctgggccccccaggcctgctggccacagcagctgggccacagccgtggccccccacacccagagcccaccgggcccctgctccagggccggcaggcggggtgggggaaagggagtc

SEQ ID NO: 29570 - DNA, 120 bp, synthetic construct
  source 1..120: mol_type = other DNA
tgaggggagacgtagagggtggacatagttatgagaaggtccgaacgaagtggaaaaacctaaggagaaagagagacaggggaagactgcgggatcgaggtgggtcctatgtttgagtag

SEQ ID NO: 29571 - DNA, 120 bp, synthetic construct
  source 1..120: mol_type = other DNA
ggagttcctggggaagaggaactatccaccatcgcggggcttcggggagtgtggaaggctctcaggagcgggtcggcgtctggttggatgcgggttcgagccgcgtgtacgtactggagg

SEQ ID NO: 29572 - DNA, 120 bp, synthetic construct; identical to SEQ ID NO: 8376
  source 1..120: mol_type = other DNA

SEQ ID NO: 29573 - DNA, 120 bp, synthetic construct
  source 1..120: mol_type = other DNA
gagcacgacgctcccgtcaggcgccgccacgggcaccttgtgcgggtcctcggccgggtggcgagggcggcgcccagcgggcagctagggaactggcccaagagggtcggccggccctgc

SEQ ID NO: 29574 - DNA, 120 bp, synthetic construct
  source 1..120: mol_type = other DNA
tctcctcatgtatgaaaaaagggtgacggccgggcgcagtggctcacgcctataatcccagcactttgggaggccgaggtgggcggatcacctgaggtcagaagttcaagactagcctgg

SEQ ID NO: 29575 - DNA, 120 bp, synthetic construct
  source 1..120: mol_type = other DNA
actaaaaatacaaaaattagccaggtgtggtggcaggcgcctgtaatcccagctaccccggagcctgaggcagggaattgcttgaaccctggaggttgaggttgcagtgaactgagatcg

SEQ ID NO: 29576 - DNA, 120 bp, synthetic construct; identical to SEQ ID NO: 8377
  source 1..120: mol_type = other DNA

SEQ ID NO: 29577 - DNA, 120 bp, synthetic construct
  source 1..120: mol_type = other DNA
agactcccgtctcaaaaacaaaaaggagggtcacactagatggtctctaagggtcccttaaggctgagaagtctcatctgtatcatgaactcatatttgctgaatgagtgaatgaagttt

SEQ ID NO: 29578 - DNA, 120 bp, synthetic construct
  source 1..120: mol_type = other DNA
gaactgatttggttggattggtgaagtctggtagcatgaaatgtatcttatgacactatcacattaatggaaggacagcaagcactccagttgcaggtatggtataagcaaaaggccaca

SEQ ID NO: 29579 - DNA, 120 bp, synthetic construct
  source 1..120: mol_type = other DNA
gtaacaggggcttggatgaattcgacatccttttccatgtcccagccccctgcccaacacatagtaacagaaccaaaacacaaatttgcatcataaattttattcccgatgcgggacaga

SEQ ID NO: 29580 - DNA, 120 bp, synthetic construct; identical to SEQ ID NO: 8378
  source 1..120: mol_type = other DNA

SEQ ID NO: 29581 - DNA, 120 bp, synthetic construct
  source 1..120: mol_type = other DNA
catcctgtagcaactgtgtgtcgacctcatctgctggcagctgcacgtatcggaccactgagccccgaatgaagcagttcttcactgataactagacaaagatggacaaatatgaaaaca

SEQ ID NO: 29582 - DNA, 120 bp, synthetic construct
  source 1..120: mol_type = other DNA
ttagaggtgtttcctcttctccacagaccccaactcaccatgtgagggtatttctcagggtctgtgacactgatgtcagttagtttgatgttgagatactaggaaaggaagatgaacacc

SEQ ID NO: 29583 - DNA, 120 bp, synthetic construct
  source 1..120: mol_type = other DNA
gctcactgcaatctccgcctcctgggttcaaatgattttcctgcctcagcctctcgactagctgggattacaggtgcccaccaccacgcccagctaattttttgtatttttagtagagac

SEQ ID NO: 29584 - DNA, 120 bp, synthetic construct
  source 1..120: mol_type = other DNA
ctagagacatgatgtaagaacccaacccttaagtctcccctctccttctccaggaaccaattctggggcccgtgctatatctcacctgatccacagaatggagggttccacagatgctgt

SEQ ID NO: 29585 - DNA, 120 bp, synthetic construct; identical to SEQ ID NO: 8379
  source 1..120: mol_type = other DNA

SEQ ID NO: 29586 - DNA, 120 bp, synthetic construct
  source 1..120: mol_type = other DNA
gttcaagcgattctcctgcctcagtctcctgagtagctaggacttcaggcgcatgccatcatgcccggctaattttttatttttagtagagatggggtttcaccatgttggccaggctgt

SEQ ID NO: 29587 - DNA, 120 bp, synthetic construct
  source 1..120: mol_type = other DNA
ggccaaaccaacctattcttaacagctaccattaaacaactggtaaaggctagacctgtattctatatagtatttgtaatctttacagccatctttcaaagtagttattaccttccaggg

SEQ ID NO: 29588 - DNA, 120 bp, synthetic construct
  source 1..120: mol_type = other DNA
tcagctattttttttttatttttgcgacagggtctcactctatggccaaggctggagtgaaatggcgtgatcatggctcactgtggccacttgagtagctgtgattacaggcttgagcca

SEQ ID NO: 29589 - DNA, 120 bp, synthetic construct
  source 1..120: mol_type = other DNA
tcagcctcccgagtagctgggactacagatgccggccaccactcctggctaattttttgtatttttagtagagacggggtttcaccgtgttagccaggatggtctcgatctcctgacctc

SEQ ID NO: 29590 - DNA, 120 bp, synthetic construct; identical to SEQ ID NO: 8380
  source 1..120: mol_type = other DNA

SEQ ID NO: 29591 - DNA, 120 bp, synthetic construct
  source 1..120: mol_type = other DNA
ctttgagagaatggtgcaaaaatttaaaaaaacagcctttggctgggaatggttgttcacgcctataatccaagcattctgggaggctgaggcaggaggatcgcctgaagccagctggag

SEQ ID NO: 29592 - DNA, 120 bp, synthetic construct
  source 1..120: mol_type = other DNA
gaatcacgaggtcaggagttcgacaccagcctggccaacatcgtgaaaccccatctctactaaaaatacaaaaaattagctgggcatagtggcagacgcctgtaatcccagctactcggg

SEQ ID NO: 29593 - DNA, 120 bp, synthetic construct
  source 1..120: mol_type = other DNA
taaaaataatcgtaataaatagcagttttaaaaacgtccttatcttgccaaaaataaagttggcagttctctgccccaatttttgtaaaattctgaaagtctttaaaacccagcgtctag

SEQ ID NO: 29594 - DNA, 120 bp, synthetic construct
  source 1..120: mol_type = other DNA
aaaatacaaaaattggccgggcgtggtggctcacgcctataatctcagcactttgggaggccgaggcgggtggatcacgaggtcaggagatcgagaccatcctggctaacacggtgaaac

SEQ ID NO: 29595 - DNA, 120 bp, synthetic construct; identical to SEQ ID NO: 8381
  source 1..120: mol_type = other DNA

SEQ ID NO: 29596 - DNA, 120 bp, synthetic construct
  source 1..120: mol_type = other DNA
gaggcacgagaatcatttgaacacaggaggtagaggttgcagtgagccaagatcatgccactgcattccagcctcggtgacagagtaaggatctgtctcaaaaaaaaaaaaaaaaaaaaa

SEQ ID NO: 29597 - DNA, 120 bp, synthetic construct
  source 1..120: mol_type = other DNA
gtatctgaaacccactgcctcagtaatgttctcaccatattgctagctgctgaaaaacatttgacagcaccccaccatctccagcagtgaaataacatttgggaattgtacaaagtggtg

SEQ ID NO: 29598 - DNA, 120 bp, synthetic construct
  source 1..120: mol_type = other DNA
tgggaggctgaggcaggaggatcacttgaggtcaggagtttgaggccagcctggccaacatggtgaaaccccatccctactaaaaatacaaaaaattagctgggagtggtggcatgcacc

SEQ ID NO: 29599 - DNA, 120 bp, synthetic construct; identical to SEQ ID NO: 8382
  source 1..120: mol_type = other DNA

SEQ ID NO: 29600 - DNA, 120 bp, synthetic construct
  source 1..120: mol_type = other DNA
agcactttgggaggccgaggcaggtggatcacgaggtcaggagttcaagaccagcctgacgaagatggtgaaacccgatgtctactaaaaatacaaaaattagccaggtatggtggcagg

SEQ ID NO: 29601 - DNA, 120 bp, synthetic construct
  source 1..120: mol_type = other DNA
cccatctcaaacaaaaataaataaataaatagaaaaaaaagaaggctgggcgcagtggctcacacctgtaatcacagtactttgggaggccgaggtgggcagatcacaaggtcaggagat

SEQ ID NO: 29602 - DNA, 120 bp, synthetic construct
  source 1..120: mol_type = other DNA
ttgaaccagggagtcggaggttacagcaccactgcactccagcctggcgtagactcgaccagagcgagactcgtctcaataaaaaaaagaaaaaagaaaaagaaaagaaatgttactacg

SEQ ID NO: 29603 - DNA, 120 bp, synthetic construct; identical to SEQ ID NO: 8383
  source 1..120: mol_type = other DNA

SEQ ID NO: 29604 - DNA, 120 bp, synthetic construct
  source 1..120: mol_type = other DNA
aggcccaggaaggagaaaagaggagaatcaaaaacaagtcatcacaccaaattgcctaagactgatagtgattaccgtacttgtcttgctctgtggccccaatctatacacatcaatatc

SEQ ID NO: 29605 - DNA, 120 bp, synthetic construct
  source 1..120: mol_type = other DNA
agaaatgtggaagacagccagacacagtggcacacacctgtaattccagcactttgggaggccaaggtggcaggactgcttgagcccaagagtttcagactagcctcggcaacacagtga

SEQ ID NO: 29606 - DNA, 120 bp, synthetic construct
  source 1..120: mol_type = other DNA
agacccccatctcaaaaaaataaatgtggaagacgcttttgggaagagaatacaattgatcccatctttctaaaggataatgaggtaacaggtatcaatattttaaatgtactttttttt

SEQ ID NO: 29607 - DNA, 120 bp, synthetic construct; identical to SEQ ID NO: 8384
  source 1..120: mol_type = other DNA

SEQ ID NO: 29608 - DNA, 120 bp, synthetic construct
  source 1..120: mol_type = other DNA
ccagcactttgggaagctgaagcaagaggactgcttgaactcaaagaatttgaaaccagcctgagcaacaaagtgaggcactgtctctaatttttaaataaataaatattattttaagaa

SEQ ID NO: 29609 - DNA, 120 bp, synthetic construct
  source 1..120: mol_type = other DNA
agagttcaagaccagcctggcctagatggtgaaactccatctctactaaaaatacaaaatttagccgggcatggtggtgggcacttgtaatcacagctactagggaggctgaggcagaga

SEQ ID NO: 29610 - DNA, 120 bp, synthetic construct
  source 1..120: mol_type = other DNA
acagaatcatatttcagttgtgtcacttactagttttgtagacttgaacaagtggtatagctgatctaagcctcagtttcctcgtgtaaaacagcaatagtatatattacttagcagtgt

SEQ ID NO: 29611 - DNA, 120 bp, synthetic construct; identical to SEQ ID NO: 8385
  source 1..120: mol_type = other DNA

SEQ ID NO: 29612 - DNA, 120 bp, synthetic construct
  source 1..120: mol_type = other DNA
ttcttttttttctttttttttttttttttttttgagacggagtcttgctctgtcacccaggctggagtgcggtggcaccatcttggctcactgcaagttccgcctcccaggttcacgcca

SEQ ID NO: 29613 - DNA, 120 bp, synthetic construct
  source 1..120: mol_type = other DNA
tcctgaccttgtgatccgcctgcctcggcctcccaaagtgctgggattacaggcgtgagccaccgcgcccggcctggcctgttctttttttgagacagagtcttcctctgtcaaccaggc

SEQ ID NO: 29614 - DNA, 120 bp, synthetic construct
  source 1..120: mol_type = other DNA
tttttatagaaatagaggtctcatcactatgttgcccagactagtctcgacatcctggactcaagtgatcctcctgcctcagcctcccaaagtgctgagattacaggtgtgagccaccat

SEQ ID NO: 29615 - DNA, 120 bp, synthetic construct
  source 1..120: mol_type = other DNA
ctcctgcctcaccctcccgagtagctgggattacaggcaccagccaccgtgcccggctaatttttgtatttttagtagagacagggtttcaccatcttgaccgggctggtcttgaactcc

SEQ ID NO: 29616 - DNA, 120 bp, synthetic construct; identical to SEQ ID NO: 8386
  source 1..120: mol_type = other DNA

SEQ ID NO: 29617 - DNA, 120 bp, synthetic construct
  source 1..120: mol_type = other DNA
tatccatttatttcttctgtacatcttccacctcgcctagccctgaaatatttctcaaattaaagaggttccagggccctgggcacacccacccccaacagacttgttggaacaggtacc

SEQ ID NO: 29618 - DNA, 120 bp, synthetic construct
  source 1..120: mol_type = other DNA
gaggagtgtcctttgacagtattaccaaatactggtattgtgaaccccactgcatccctgacagttctcaaaatttcacaggaaagaataattggttgacagagctgaaaggctggagcc

SEQ ID NO: 29619 - DNA, 120 bp, synthetic construct
  source 1..120: mol_type = other DNA
actcctttcaatgaattgtagaaaatatcccacccgcaccctgccgaagcttgcctggcagagaagtgctctgaggtctaacttttccgtctcccgctatcctcactgaatctctctcag

SEQ ID NO: 29620 - DNA, 120 bp, synthetic construct; identical to SEQ ID NO: 8387
  source 1..120: mol_type = other DNA

SEQ ID NO: 29621 - DNA, 120 bp, synthetic construct
  source 1..120: mol_type = other DNA
gcagcgggaagcgacgcagaaagctccaagcgctgacgggcaaagcgcggccgacttgcggctggggagcgcaagctgggtagagtagaggggaggaggaagccgggaaaggggcggggt

SEQ ID NO: 29622 - DNA, 120 bp, synthetic construct
  source 1..120: mol_type = other DNA
tccagaatcctgccatctacagcgtgatgtgtttgtgccctacacacacttcctatcgagaattgtggggagtttgttaagattatgaagtgtgcacttttctatatttgttaaagtaaa

SEQ ID NO: 29623 - DNA, 120 bp, synthetic construct
  source 1..120: mol_type = other DNA
ggtgggtggattgtgtgaggtcaggagttcgagaccagtctagccaacatggtgaaaccccatcttcactaaaaatacaaaaaaaattaggcgtggtcgcaggctcctgtaataccagct

SEQ ID NO: 29624 - DNA, 120 bp, synthetic construct; identical to SEQ ID NO: 8388
  source 1..120: mol_type = other DNA

SEQ ID NO: 29625 - DNA, 120 bp, synthetic construct
  source 1..120: mol_type = other DNA
gcaaaactccatcccaaaaaacaaaaaatgttgaggcctgtaaatcccagcatttggggaggctgaggcaggaggatcatttgaacccaagagttacagtgagctacaatctccccactg

SEQ ID NO: 29626 - DNA, 120 bp, synthetic construct
  source 1..120: mol_type = other DNA
gttaccaataaatacatttctccaaaggagccaacctcaatctccgcatttcttacacacttttgccaagactgtcctgtaaaggactgtgtaaaactaaagagactgtggctcacagat

SEQ ID NO: 29627 - DNA, 120 bp, synthetic construct
  source 1..120: mol_type = other DNA
ggtaaaagaaaaaaatgtttttgagatggagtctcgctctatcaccaggctggagtgtggtgccacgatctcagctcactgcaacctccacgtcccgggttcaagcgattcctctgcctc

SEQ ID NO: 29628 - DNA, 120 bp, synthetic construct; identical to SEQ ID NO: 8389
  source 1..120: mol_type = other DNA

SEQ ID NO: 29629 - DNA, 120 bp, synthetic construct
  source 1..120: mol_type = other DNA
agttcagaacagcctggtcaacatggtgaaatcccgtctctactaaaaacacaaacattagccgggcatggtggtgagcgcctgtaatcccagctactcatgaggctgaggcaggagaat

SEQ ID NO: 29630 - DNA, 120 bp, synthetic construct
  source 1..120: mol_type = other DNA
atgtaatggatgtaaacaatgaactctgtgagtgcatagatgctgaatctcctggaccttacctataagtgacatcaggacatcaagcaggatttgtccctccacccccagttgagtcct

SEQ ID NO: 29631 - DNA, 120 bp, synthetic construct
  source 1..120: mol_type = other DNA
aaactccaaaaccagcttgtaactgattaaaagcagttatagtttgccatctgttccatctgtgctaaaggtgtctgaggatcaaaaattatgtggctgattgaaacaatgagttcatgg

SEQ ID NO: 29632 - DNA, 120 bp, synthetic construct
  source 1..120: mol_type = other DNA
acaatacaaaaaattagccgggcatggtggggggcacctgcagtcccagctactcgggaggctgaggcaggagaatggcgtgaacccaggaggcagagcttgcagtaagctgagattgtg

SEQ ID NO: 29633 - DNA, 120 bp, synthetic construct; identical to SEQ ID NO: 8390
  source 1..120: mol_type = other DNA

SEQ ID NO: 29634 - DNA, 120 bp, synthetic construct
  source 1..120: mol_type = other DNA
agtcagaaacaggatgtgagggagtgtgataggtggtgcatgagactccttctccagaatttccaagggatggtaacttagattcaggtctggtcaagaataataatgatgtttgaagat

SEQ ID NO: 29635 - DNA, 120 bp, synthetic construct
  source 1..120: mol_type = other DNA
caggcccagtgcatcctccttggtagagttttgtgatgatagggttacacatctgctccaattcctttctcttatgatcaaactcatctttctctgccagttgattgacctccagccacg

SEQ ID NO: 29636 - DNA, 120 bp, synthetic construct
  source 1..120: mol_type = other DNA
acactcttcatgttaaaagcataggattctaaggcattctttgcagcaattttctccctctggacctcatcttcagctttatatttctcagcatccagaaccatgcgctcaatctcctcc

SEQ ID NO: 29637 - DNA, 120 bp, synthetic construct; identical to SEQ ID NO: 8391
  source 1..120: mol_type = other DNA

SEQ ID NO: 29638 - DNA, 120 bp, synthetic construct
  source 1..120: mol_type = other DNA
agcaggtcctgtaccttctcagacttgtcccccatcaggatggctgcttgtaccgcagccccatatgctacggcctcatcagggttgatgctcttgttgagatcacgtccattgaagtag

SEQ ID NO: 29639 - DNA, 120 bp, synthetic construct
  source 1..120: mol_type = other DNA
cttggcatcccgaagcgctttttctacaggctccagggtacccctaaacaggtctgcacacaactcttcaaatcgagctctggtgatggatgtatagaagtcaatgccttcataaagtga

SEQ ID NO: 29640 - DNA, 120 bp, synthetic construct
  source 1..120: mol_type = other DNA
gaactcctccacgaagtggctcacaagcctgttgtcaaagtcctccccacccaggtgagtgtccccagcagtggcctttacctcaaaaatcccatcatctatggtcagaattgacacatc

SEQ ID NO: 29641 - DNA, 120 bp, synthetic construct; identical to SEQ ID NO: 8392
  source 1..120: mol_type = other DNA

SEQ ID NO: 29642 - DNA, 120 bp, synthetic construct
  source 1..120: mol_type = other DNA
ctccttcattaatcacttgaaaaggccaaagtttcatatctgcttgtacaacaggatcattaaatttcctgccgatcagacgtttagcatcaaaaacagtgttctggggattcattgcta

SEQ ID NO: 29643 - DNA, 120 bp, synthetic construct
  source 1..120: mol_type = other DNA
ccacacaggagtaggtggtgcccaggtcgatgcctatggcgattcccttggcagtagccatggttctctgaggcctatggagaaagaataagatactgttttgggagagtgcttttcaat

SEQ ID NO: 29644 - DNA, 120 bp, synthetic construct
  source 1..120: mol_type = other DNA
cagaataactggagacaacatgcccggctaattttttttttttttgagacggagtcttgctttggactgcagtggtgtgatctaggctcactgcaacctccacctcctgagttcaagcga

SEQ ID NO: 29645 - DNA, 120 bp, synthetic construct; identical to SEQ ID NO: 8393
  source 1..120: mol_type = other DNA

SEQ ID NO: 29646 - DNA, 120 bp, synthetic construct
  source 1..120: mol_type = other DNA
tttttattgtggtaaaatacatacaaattgtaccatcttaaccatttttaagtgtagagtttggtagtgagttcaatcacagcggtgttcaaccaatttccagaattctgttcatctcgc

SEQ ID NO: 29647 - DNA, 120 bp, synthetic construct
  source 1..120: mol_type = other DNA
actgcagtggtgtaatcatggctcactgcagtcttgacctcccaggctcataggatccttttgtctcagcctcccaagtagcttggaccacaggtgaatgccaccacacccagctaattt

SEQ ID NO: 29648 - DNA, 120 bp, synthetic construct
  source 1..120: mol_type = other DNA
ggcgcccgacctcttttttctatctctatgaatttgactactcttgtaacttcatataagtggaattatacagtatttatccttttgtgactttgcttatgtcacttagcttatgtgcac

SEQ ID NO: 29649 - DNA, 120 bp, synthetic construct
  source 1..120: mol_type = other DNA
ggagtgcagtggcatgatcttggctcactgcaacctccacctcctgggttcaagctaattctccagcctcagcctcccgaggagctgggactacaggcgtgcactgccacgcccagataa

SEQ ID NO: 29650 - DNA, 120 bp, synthetic construct; identical to SEQ ID NO: 8394
  source 1..120: mol_type = other DNA

SEQ ID NO: 29651 - DNA, 120 bp, synthetic construct
  source 1..120: mol_type = other DNA
ttgttttcaatttcccaagtgacctaattctactgtcctgttcctatatattttactgtgggattctgtctctttatgacccaagagtagtgtacattctggtctcttcaagagacatca

SEQ ID NO: 29652 - DNA, 120 bp, synthetic construct
  source 1..120: mol_type = other DNA
tgaagatgactgctagaaaaccacaagccttccagttttctcaaacgacatggcactccagacagtatctgtatccttctcctaaataaaactcctgttttctggagccaataactgatc

SEQ ID NO: 29653 - DNA, 120 bp, synthetic construct
  source 1..120: mol_type = other DNA
aacacggtgaaacctcgtctctactaaaaaatagaaaaaattagctgggcgtggtggcgggcgccagtagttccagctactcggatggctgaggcaggagaatagcttgaacccgggagg

SEQ ID NO: 29654 - DNA, 120 bp, synthetic construct; identical to SEQ ID NO: 8395
  source 1..120: mol_type = other DNA

SEQ ID NO: 29655 - DNA, 120 bp, synthetic construct
  source 1..120: mol_type = other DNA
gctccgaccaatcaatctgaagccatcttagctttccccaagtgctcctcctacccggatcagccaacgcccacatacctcaggcttaaaccaactagggaactttccagtactttccca

SEQ ID NO: 29656 - DNA, 120 bp, synthetic construct
  source 1..120: mol_type = other DNA
gtgggggctccctcaatatcaaactgcacaaccggggtccccccaccccccaccccgtccctccctgcaaatttgagacggctccaactcagtaatctttttccaaactggcccatgagg

SEQ ID NO: 29657 - DNA, 120 bp, synthetic construct
  source 1..120: mol_type = other DNA
cagcaagcccccacaattaaaagcccagcgccgacccttcctgtcaattaggcgctgaagcgcaggcggtcagcatcgccatggagaccaacacccttcccaccgccactcccccttcct

SEQ ID NO: 29658 - DNA, 120 bp, synthetic construct; identical to SEQ ID NO: 8396
  source 1..120: mol_type = other DNA

SEQ ID NO: 29659 - DNA, 120 bp, synthetic construct
  source 1..120: mol_type = other DNA
aaggaccgagctcttctcgcggatccagtgttccgtttccagcccccaatctcagagcggagccgacagagagcagggaaccggcatggccaaagccgcggcgatcggcatcgacctggg

SEQ ID NO: 29660 - DNA, 120 bp, synthetic construct
  source 1..120: mol_type = other DNA
ggatgcggccaagaaccaggtggcgctgaacccgcagaacaccgtgtttgacgcgaagcggctgattggccgcaagttcggcgacccggtggtgcagtcggacatgaagcactggccttt

SEQ ID NO: 29661 - DNA, 120 bp, synthetic construct
  source 1..120: mol_type = other DNA
ggcgtacctgggctacccggtgaccaacgcggtgatcaccgtgccggcctacttcaacgactcgcagcgccaggccaccaaggatgcgggtgtgatcgcggggctcaacgtgctgcggat

SEQ ID NO: 29662 - DNA, 120 bp, synthetic construct; identical to SEQ ID NO: 8397
  source 1..120: mol_type = other DNA

SEQ ID NO: 29663 - DNA, 120 bp, synthetic construct
  source 1..120: mol_type = other DNA
aggccagcctggagatcgactccctgtttgagggcatcgacttctacacgtccatcaccagggcgaggttcgaggagctgtgctccgacctgttccgaagcaccctggagcccgtggaga

SEQ ID NO: 29664 - DNA, 120 bp, synthetic construct
  source 1..120: mol_type = other DNA
gtgcagaagctgctgcaggacttcttcaacgggcgcgacctgaacaagagcatcaaccccgacgaggctgtggcctacggggcggcggtgcaggcggccatcctgatgggggacaagtcc

SEQ ID NO: 29665 - DNA, 120 bp, synthetic construct
  source 1..120: mol_type = other DNA
cagatcttcaccacctactccgacaaccaacccggggtgctgatccaggtgtacgagggcgagagggccatgacgaaagacaacaatctgttggggcgcttcgagctgagcggcatccct

SEQ ID NO: 29666 - DNA, 120 bp, synthetic construct
  source 1..120: mol_type = other DNA
caagagcaccggcaaggccaacaagatcaccatcaccaacgacaagggccgcctgagcaaggaggagatcgagcgcatggtgcaggaggcggagaagtacaaagcggaggacgaggtgca

SEQ ID NO: 29667 - DNA, 120 bp, synthetic construct; identical to SEQ ID NO: 8398
  source 1..120: mol_type = other DNA

SEQ ID NO: 29668 - DNA, 120 bp, synthetic construct
  source 1..120: mol_type = other DNA
tggagcttcaagactttgcatttcctagtatttctgtttgtcagttctcaatttcctgtgtttgcaatgttgaaattttttggtgaagtactgaacttgctttttttccggtttctacat

SEQ ID NO: 29669 - DNA, 120 bp, synthetic construct
  source 1..120: mol_type = other DNA
tttattcctttatttgggggtcagtagggtctgcataggttgtttttcccatagcgtctaaaatggaatggcatttttgcttccagtaagggcagattttgcagaggtgtgactattgta

SEQ ID NO: 29670 - DNA, 120 bp, synthetic construct
  source 1..120: mol_type = other DNA
tgaggtcaggagttccagaccaacctggccaatgtggtgaaaccctgtctctactaaaaacacaaaaattagctgggcgtggtggtgcgtgcctgtagtcccagggaggctgaggcagga

SEQ ID NO: 29671 - DNA, 120 bp, synthetic construct; identical to SEQ ID NO: 8399
  source 1..120: mol_type = other DNA

SEQ ID NO: 29672 - DNA, 120 bp, synthetic construct
  source 1..120: mol_type = other DNA
gtgtcctaaatttcaaagtgaaaaaacgggtacattcactggcttgctgagttatacacatgtgctttagttgtcatcttttaaaatggaagggtttggctcgatgcctctctcatgact

SEQ ID NO: 29673 - DNA, 120 bp, synthetic construct
  source 1..120: mol_type = other DNA
agatgcttcatgccccagccgctagcatcctagaagtaattccctcctccttggaaaacgcccactacaatccttaaagctcccggagtgagcccttttaaaaatgaattgtatctggcc

SEQ ID NO: 29674 - DNA, 120 bp, synthetic construct
  source 1..120: mol_type = other DNA
cctcctgcactaaaagtacaaaaatcagccaggcgcgatggtgtgcgcctgtaatcccagctattcgggaggctgaggcaggcgaatcgtttgaactcaaaggcagaggtttcagtgagc

SEQ ID NO: 29675 - DNA, 120 bp, synthetic construct
  source 1..120: mol_type = other DNA
aggtgggtggatcacctgaggtcaggagttcaagaccagcctggccaacagggtgaaaccccatctctactaaaaatacaaaaaattagctgggcgtggtggcgggcacctataatccca

SEQ ID NO: 29676 - DNA, 120 bp, synthetic construct; identical to SEQ ID NO: 8400
  source 1..120: mol_type = other DNA

SEQ ID NO: 29677 - DNA, 120 bp, synthetic construct
  source 1..120: mol_type = other DNA
tatgagcttatgtgtacctcaaagcccatcaaaccattcactaaatacttgttaatgaagaaaatccagtgttatgggaaatgatacataaaggtagaccttgctttggaagtttgaaaa

SEQ ID NO: 29678 - DNA, 120 bp, synthetic construct
  source 1..120: mol_type = other DNA
tacagaggaacatttatctcttatggtagttaaactgtagtactgtggactctggccacaatgtaaatcaatcttcatgggaatatgcctttgctataggacctcctctccccttcagag

SEQ ID NO: 29679 - DNA, 120 bp, synthetic construct
  source 1..120: mol_type = other DNA
aggacctaccaaatgcctttgttgacacagtagagaagtcatcagacataacattgaatggaggcaataagagagttcctatggccctatcaagcttattagtaggtgttttaacaagaa

SEQ ID NO: 29680 - DNA, 120 bp, synthetic construct
  source 1..120: mol_type = other DNA
ggctcactaggtcaggagttcaagacaagcctggccaagatggtgaaaccccacctctactaaaaatacaaaaattagctaggcgtggtggtgggcgcctgtaatcccagctactcagga

SEQ ID NO: 29681 - DNA, 120 bp, synthetic construct; identical to SEQ ID NO: 8401
  source 1..120: mol_type = other DNA

SEQ ID NO: 29682 - DNA, 120 bp, synthetic construct
  source 1..120: mol_type = other DNA
accttcctataccaggcctcagaaggcagcaggctatgataataaatttgattttatatggctttgaacccaggattttattttataacatatacacttactgttattcctggtcttcaa

SEQ ID NO: 29683 - DNA, 120 bp, synthetic construct
  source 1..120: mol_type = other DNA
aggttatttcttgggggagccaatattggcgatttctgagggagcgatccttacgtgaatataaaaaattgtgacagccaccattcctcctgctaactgatctaaatccatccccttggg

SEQ ID NO: 29684 - DNA, 120 bp, synthetic construct
  source 1..120: mol_type = other DNA
tccagacacggagttaaacccgccccaccccgctggcccacgtccagcccgatcaagaattggaggagagaggagcagggcgtggtggcgcgggcctggagtcccagctacccgggaggc

SEQ ID NO: 29685 - DNA, 120 bp, synthetic construct; identical to SEQ ID NO: 8402
  source 1..120: mol_type = other DNA

SEQ ID NO: 29686 - DNA, 120 bp, synthetic construct
  source 1..120: mol_type = other DNA
ctcttctcgcctctggccacccaatgcatctgatttagttgtatgaaagttacaaaattctccaatattttcgtcttgtaaatcacctagtatgagagaaactcgaaaggtcctttcttt

SEQ ID NO: 29687 - DNA, 120 bp, synthetic construct
  source 1..120: mol_type = other DNA
ccccccgcactccccacctttcctcccctttggctgaggctttttcccccgtcgctggctctgcccgaagtttctagagttttctgaccttcaaggcgagaactgctgtgtcattcttag

SEQ ID NO: 29688 - DNA, 120 bp, synthetic construct
  source 1..120: mol_type = other DNA
actctatatttaacgtccggaagattctgtgaactatatgccaaccttgccctagtaacggggctcccccctcctttcccctctttctgcttgagcaatctgttctatcggaaaggagag

SEQ ID NO: 29689 - DNA, 120 bp, synthetic construct; identical to SEQ ID NO: 8403
  source 1..120: mol_type = other DNA

SEQ ID NO: 29690 - DNA, 120 bp, synthetic construct
  source 1..120: mol_type = other DNA
aaatgaaaaggtttgactgaatggcctgtgcccgcagatcttaggacagtttttacattaagctgaaagcagctgtagtcctaataatggtccccaacttttaaacacctaaataagaat

SEQ ID NO: 29691 - DNA, 120 bp, synthetic construct
  source 1..120: mol_type = other DNA
gctggaatgcagtggcgtgatcatagctcactgcagccttgacctcttgtgctcaagcgatcctcctgcctcagcctcccaagtagctgggactacaggcacctgccaccacgcccagct

SEQ ID NO: 29692 - DNA, 120 bp, synthetic construct
  source 1..120: mol_type = other DNA
cacacgcagttcagttattgttaattatgttttagagatgaacacgtcgaaacttgtgttatttagtcaatgtacaagtacttccttgttgaaaagaaaaacagcctcaccaaagaagta

SEQ ID NO: 29693 - DNA, 120 bp, synthetic construct; identical to SEQ ID NO: 8404
  source 1..120: mol_type = other DNA

SEQ ID NO: 29694 - DNA, 120 bp, synthetic construct
  source 1..120: mol_type = other DNA
caacctccacctcccaggttcaagtgattctcctgcctcagctcctgagtagctgggattacagatgtgcaccaccacgtccggctaatttttgtgtttttaggagagaaggggttttgc

SEQ ID NO: 29695 - DNA, 120 bp, synthetic construct
  source 1..120: mol_type = other DNA
aacaaaattaagaaaactactgtttgaggaactataaaaaggagagggagaaggaaggaaaagaccctgcagcgtcagcctgaagaaggctgtcttaccccacactgctgtagcaattat

SEQ ID NO: 29696 - DNA, 120 bp, synthetic construct
  source 1..120: mol_type = other DNA
aaattaatcacattaaagttctgaaaaatctcctggggttcttatatattcaccttagacagcaattaaacttgtgactggatttctgccttgggaagcatccagtctgaaaggaaagaa

SEQ ID NO: 29697 - DNA, 120 bp, synthetic construct
  source 1..120: mol_type = other DNA
taaaaatacaaaaattagccaggcgtggtggtgtgcacctgtaatcccagccactcaggaggctgaggcaggagaatcgcttgaacctgggaggtggaggttgcagtgagccaagactgt

SEQ ID NO: 29698 - DNA, 120 bp, synthetic construct; identical to SEQ ID NO: 8405
  source 1..120: mol_type = other DNA

SEQ ID NO: 29699 - DNA, 120 bp, synthetic construct
  source 1..120: mol_type = other DNA
ccactccccactttttatgtttctcagcagaatcagagaagtattttatttttgagaaggagtttcgctcttgttgcccaggctggagtgcagtggcgcgatctcggctcaccgcaacct

SEQ ID NO: 29700 - DNA, 120 bp, synthetic construct
  source 1..120: mol_type = other DNA
ccggctttctccatgttggtcaggctggtctcgaatttctgacctcaggtgatctgctgcttcggcctcccaaagtgctgggattacaggtgtgagccactgtgctggccttttaaattg

SEQ ID NO: 29701 - DNA, 120 bp, synthetic construct
  source 1..120: mol_type = other DNA
gctaagatgaacatagtttgggagaatctccagccagacatttcatagagaaatgtttgggaaaattcctgaagtttgaccggtttgactagtttagagaggtgattcattagggagcta

SEQ ID NO: 29702 - DNA, 120 bp, synthetic construct; identical to SEQ ID NO: 8406
  source 1..120: mol_type = other DNA

SEQ ID NO: 29703 - DNA, 120 bp, synthetic construct; identical to SEQ ID NO: 2574
  source 1..120: mol_type = other DNA

SEQ ID NO: 29704 - DNA, 120 bp, synthetic construct
  source 1..120: mol_type = other DNA
ggctgaggcagcagaattgtttgaaccccaggggcagaggttgcaatgagcagagatctcaccactgcactccagcctgggcgacagagtgagactcagtctcaaaacaaacaaacaaaa

SEQ ID NO: 29705 - DNA, 120 bp, synthetic construct
  source 1..120: mol_type = other DNA
caggagttcgagaccagcctgaccaacatggggaaaccctgtctctactaaaaatacaaaaattagccaggcgtggtggcgcacgcctgtaatcctagctactcaggaggctgaggtagg

SEQ ID NO: 29706 - DNA, 120 bp, synthetic construct; identical to SEQ ID NO: 8407
  source 1..120: mol_type = other DNA

SEQ ID NO: 29707 - DNA, 120 bp, synthetic construct
  source 1..120: mol_type = other DNA
tgtgaggtcctacttctacacaccgtccaggagtgaaccaggaattgagaaagtaggaaggaggtgtcccagaccccaagctaggaatggggagggaaatggaggaatcccaaatgcctt

SEQ ID NO: 29708 - DNA, 120 bp, synthetic construct
  source 1..120: mol_type = other DNA
tcccttcctccttggatgggtgcccctgtcttgctaagaactgcctgtttacacaactgctttccttgtgaaaatttaaaggctcctattcccagttgttctatccttgtaggttaaaga

SEQ ID NO: 29709 - DNA, 120 bp, synthetic construct
  source 1..120: mol_type = other DNA
ggacccaaggctgctccgtccttcacagacacagtccaatcagagtttcccaggcacatcgatgcaccgcctccttcgagaaacaaggtaactttcgggttctggttgtctccaaagtca

SEQ ID NO: 29710 - DNA, 120 bp, synthetic construct; identical to SEQ ID NO: 8408
  source 1..120: mol_type = other DNA

SEQ ID NO: 29711 - DNA, 120 bp, synthetic construct
  source 1..120: mol_type = other DNA
aggagctgctgcgagggtccgcttcgtctttcgagagtgactcccgcggtcccaaggctttccagagcgaacctgtgcggctgcaggcaccggcgtgttgagtttccggcgttccgaagg

SEQ ID NO: 29712 - DNA, 120 bp, synthetic construct
  source 1..120: mol_type = other DNA
ctactcctgcgtgggggtgttccaacacggcaaggtggagatcatcgccaacgaccagggcaaccgcaccacccccagctacgtggccttcacggacaccgagcggctcatcggggatgc

SEQ ID NO: 29713 - DNA, 120 bp, synthetic construct
  source 1..120: mol_type = other DNA
gatcaacgacggagacaagcccaaggtgcaggtgagctacaagggggagaccaaggcattctaccccgaggagatctcgtccatggtgctgaccaagatgaaggagatcgccgaggcgta

SEQ ID NO: 29714 - DNA, 120 bp, synthetic construct; identical to SEQ ID NO: 8409
  source 1..120: mol_type = other DNA

SEQ ID NO: 29715 - DNA, 120 bp, synthetic construct
  source 1..120: mol_type = other DNA
ccagaacaagcgagccgtgaggcggctgcgcaccgcctgcgagagggccaagaggaccctgtcgtccagcacccaggccagcctggagatcgactccctgtttgagggcatcgacttcta

SEQ ID NO: 29716 - DNA, 120 bp, synthetic construct
  source 1..120: mol_type = other DNA
ggtcctggtcgggggctccacccgcatccccaaggtgcagaagctgctgcaggacttcttcaacgggcgcgacctgaacaagagcatcaaccccgacgaggctgtggcctacggggcggc

SEQ ID NO: 29717 - DNA, 120 bp, synthetic construct
  source 1..120: mol_type = other DNA
caagcgcaactccaccatccccaccaagcagacgcagatcttcaccacctactccgacaaccaacccggggtgctgatccaggtgtacgagggcgagagggccatgacgaaagacaacaa

SEQ ID NO: 29718 - DNA, 120 bp, synthetic construct; identical to SEQ ID NO: 8410
  source 1..120: mol_type = other DNA

SEQ ID NO: 29719 - DNA, 120 bp, synthetic construct
  source 1..120: mol_type = other DNA
tcaagaggtcatctcgtggctggacgccaacaccttggccgagaaggacgagtttgagcacaagaggaaggagctggagcaggtgtgtaaccccatcatcagcggactgtaccagggtgc

SEQ ID NO: 29720 - DNA, 120 bp, synthetic construct
  source 1..120: mol_type = other DNA
ggactgttgggactcaaggactttgctgctgttttcctatgtcatttctgcttcagctctttgctgcttcacttctttgtaaagttgtaacctgatggtaattagctggcttcattattt

SEQ ID NO: 29721 - DNA, 120 bp, synthetic construct
  source 1..120: mol_type = other DNA
tttttttttttttttttttgcttggcgaaaacactacaaaggctgggaatgtatgtttttataatttgtttatttaaatatgaaaaataaaatgttaaactttttcttgtctgttaatat

SEQ ID NO: 29722 - DNA, 120 bp, synthetic construct; identical to SEQ ID NO: 8411
  source 1..120: mol_type = other DNA

SEQ ID NO: 29723 - DNA, 120 bp, synthetic construct
  source 1..120: mol_type = other DNA
tttgagacggagtctcactctcactcttgtcgcccaggctggagtgcagtggcgcaatctcagctcacggtaacttccgcctcccgggttcaagcgattctcctgcctcagcctcctgag

SEQ ID NO: 29724 - DNA, 120 bp, synthetic construct
  source 1..120: mol_type = other DNA
ttatatgtggaatctaaacagtagaactcagaagcagagaagtggtggtcaccaagggctgtgggatgggggaatggggagacgtgcaagggaaacaaagccttagtcaggagaaataaa

SEQ ID NO: 29725 - DNA, 120 bp, synthetic construct
  source 1..120: mol_type = other DNA
actgggtctacaggtatgtgccatcatgctcagctaattttttgtattttgtagagacgaagtcttgctgtgttgcccaggttggtctcgaactcttcagctcaagcgatccccttgtct

SEQ ID NO: 29726 - DNA, 120 bp, synthetic construct; identical to SEQ ID NO: 8412
  source 1..120: mol_type = other DNA

SEQ ID NO: 29727 - DNA, 120 bp, synthetic construct
  source 1..120: mol_type = other DNA
aggtccggagttcaaaaccagcctggccaacatagcgaaaacccatctctacaaaaaacaatagaattagctggccgggcgtgggggctcacgcctgtaatcccagcactttgggagacc

SEQ ID NO: 29728 - DNA, 120 bp, synthetic construct
  source 1..120: mol_type = other DNA
aggctgaggaaggagaatcacttgaaccctggaggcggaggttgtagtgagttgagattgcgccactgtactccaccctgggtgacagagcaatacttcatctcaaaaaaacataaataa

SEQ ID NO: 29729 - DNA, 120 bp, synthetic construct
  source 1..120: mol_type = other DNA
tataaaagaaaaggaatatagtaagtttctttggttttggggccaagttttttttttttttttttttttttgagacagagtttcacttttgttgcccaggctggagtacagtggagcaat

SEQ ID NO: 29730 - DNA, 120 bp, synthetic construct; identical to SEQ ID NO: 8413
  source 1..120: mol_type = other DNA

SEQ ID NO: 29731 - DNA, 120 bp, synthetic construct
  source 1..120: mol_type = other DNA
agttcgagaccagcctgaccaacatggagaaaccccatctctactaaaaatacaaaattagccgggtgtggtggcgcatgcctgtaatcccagctaccctggaggctgaggcaggagaat

SEQ ID NO: 29732 - DNA, 120 bp, synthetic construct
  source 1..120: mol_type = other DNA
agcctctgaccatagcacttagtaaaggcagcttaactgccaaaacagcaggaattagggctttctgtatatatatatattttttttaaggcagggtctcactctgttgcccaggctaga

SEQ ID NO: 29733 - DNA, 120 bp, synthetic construct
  source 1..120: mol_type = other DNA
tacacgtgtatgccaccacccatagctaatcttttttttatatacttgccaggcagtagagggaacaaatactttagctttgagccatggctctccaccgtaatggaacaataaaacgat

SEQ ID NO: 29734 - DNA, 120 bp, synthetic construct; identical to SEQ ID NO: 8414
  source 1..120: mol_type = other DNA

SEQ ID NO: 29735 - DNA, 120 bp, synthetic construct
  source 1..120: mol_type = other DNA
tagtaagccgagatcatgccactgcactccaatctgggtaacagagcaagaccctatctcaaaaaaaaaaaaaaagaaaaagaaaaaaaaaaaaaggaagaggccaggctcggtggctca

SEQ ID NO: 29736 - DNA, 120 bp, synthetic construct
  source 1..120: mol_type = other DNA
caggcatggttgtgtgcacctgtaatccttgctacttcggaggctgaggcaggaaaatcgcttgaaccgaggaagcggaggttgcagtgagccgagatcccgccactgctctccagcctg

SEQ ID NO: 29737 - DNA, 120 bp, synthetic construct
  source 1..120: mol_type = other DNA
aaatgacttatgagtttcaataatttttttttttttgagacagagtctcgccctgtcgcccaggctggagtgcagtggcgcaatctcggctcactgcaagctcggcgtcctgggttcacg

SEQ ID NO: 29738 - DNA, 120 bp, synthetic construct; identical to SEQ ID NO: 8415
  source 1..120: mol_type = other DNA

SEQ ID NO: 29739 - DNA, 120 bp, synthetic construct
  source 1..120: mol_type = other DNA
ttgtttaattgaaggttagggtgcctgacagtctgcgggatcgaactgggaggcaaattcagatttcgctgggggaacggagtgcgaagtgtcagggtagctggacgctaaactggcgca

SEQ ID NO: 29740 - DNA, 120 bp, synthetic construct
  source 1..120: mol_type = other DNA
cttccgcctggccagacagatccctgttttttgtttttcaaaattcagaaagcatctccgaatatttgcccagaggagtgtgaaacatactttcctggtctttctttcactttgttttat

SEQ ID NO: 29741 - DNA, 120 bp, synthetic construct
  source 1..120: mol_type = other DNA
agttctttttgcgaagtgggctcgtgggttggcagtatgagagttgtaatggcccgactgttgagtgagggggagcaggggatcccaacggcttgcgctgcctttgcgcagcagccggcg

SEQ ID NO: 29742 - DNA, 120 bp, synthetic construct; identical to SEQ ID NO: 8416
  source 1..120: mol_type = other DNA

SEQ ID NO: 29743 - DNA, 120 bp, synthetic construct
  source 1..120: mol_type = other DNA
tgtttcatttccccgttaggagttgtaagacgttcatcgccgtgttatccttgagtaaaggtgagtattaggtgcgagagccttttgaatgcctcttcggaaagctttgttcccaagcaa

SEQ ID NO: 29744 - DNA, 120 bp, synthetic construct
  source 1..120: mol_type = other DNA
tctgggatcaagcgattctcctgcctcagcctcccgattagctgggattacaggcgcatgccaccaagcctggctaattttttgtattttttaatagataaggggtttcactgtgttagc

SEQ ID NO: 29745 - DNA, 120 bp, synthetic construct
  source 1..120: mol_type = other DNA
cctgtcaccctggctggaatgcagtggcaagaacacaattcagtgcggccttcaactcccgggtttaaccgattctcccaccttagccaattttttcctttttttttttttttttttgag

SEQ ID NO: 29746 - DNA, 120 bp, synthetic construct; identical to SEQ ID NO: 8417
  source 1..120: mol_type = other DNA

SEQ ID NO: 29747 - DNA, 120 bp, synthetic construct
  source 1..120: mol_type = other DNA
ttccacctcagcttcctgggactgcaggcacgtgctaccaccacgcctggctaatttttagtttttttacagaagcgggcttttgccatgttgtccaggctggtctctactcctgggctc

SEQ ID NO: 29748 - DNA, 120 bp, synthetic construct
  source 1..120: mol_type = other DNA
ttttacttttttggggggcggggggacagtcttactctttttagtttacatcattttccttgtgactattctatttttacttttttagggggcggggggacatgagtctcactcatgttg

SEQ ID NO: 29749 - DNA, 120 bp, synthetic construct
  source 1..120: mol_type = other DNA
cactttgcccggcctgtatttttacgttttaataaatccccgtatttttgttaaaggctgggtaacctgactcctcccctcatttctactgcaaaataggagtacactggggcctcccag

SEQ ID NO: 29750 - DNA, 120 bp, synthetic construct
  source 1..120: mol_type = other DNA
atatatactgggactgttgtgttttctttgagtgtactagatctctttccagaagagcttcccttgatccagatctccctaattgggaatgatgatttcacagactagagtctccgatgc

SEQ ID NO: 29751 - DNA, 120 bp, synthetic construct; identical to SEQ ID NO: 8418
  source 1..120: mol_type = other DNA

SEQ ID NO: 29752 - DNA, 120 bp, synthetic construct
  source 1..120: mol_type = other DNA
tatggtgagtatcttttgttttggctctcagtgggagtggtaatgatgatctggttggacaagagtctctgagcttttctctgaggatctttgaacccacctgatccaccttcatcctgc

SEQ ID NO: 29753 - DNA, 120 bp, synthetic construct
  source 1..120: mol_type = other DNA
gggcctcaggaaactatattgcataaggtacagagggaagcagggatgtagcatggccagagcagcagcaaaggcagggaggtgccacacatttttaataaattgatctctagagaactg

SEQ ID NO: 29754 - DNA, 120 bp, synthetic construct
  source 1..120: mol_type = other DNA
atatgagatttggtggggagacagatctaaactgtattacagggtctcactttgtgcacaggctggtcttcaactcctgcctcagtgagccactgtgccccaccccaacatgttttgtgt

SEQ ID NO: 29755 - DNA, 120 bp, synthetic construct; identical to SEQ ID NO: 8419
  source 1..120: mol_type = other DNA

SEQ ID NO: 29756 - DNA, 120 bp, synthetic construct
  source 1..120: mol_type = other DNA
agctcattgtaacctcagcctcccgagtacttgggattacaggcatgcgccaccatgcccagctaattttgtatttttagtagagatgggagttttcaccatgttggtcttgaactcctg

SEQ ID NO: 29757 - DNA, 120 bp, synthetic construct
  source 1..120: mol_type = other DNA
tgcagtggtgcagtcacagctcactgcagcctcaacctcctgggtggaagctcacctctcacctcacccttggagtagctaatgacttacaggcatgcaccactatccccggctaatttt

SEQ ID NO: 29758 - DNA, 120 bp, synthetic construct
  source 1..120: mol_type = other DNA
gaaaccctgtctactaaaaatacaaaaattagctgggcatgggtggcgggcgcctgtaattccagctacttgggaggctgaggcagaagaatcgcttgaacctgggaggtggaggttgca

SEQ ID NO: 29759 - DNA, 120 bp, synthetic construct; identical to SEQ ID NO: 8420
  source 1..120: mol_type = other DNA

SEQ ID NO: 29760 - DNA, 120 bp, synthetic construct
  source 1..120: mol_type = other DNA
atcacccaggtagtgggcatagtacccaatagttattaaacctttgccccatttcctctccccagtgtctgttgccatctttatgtccatgtatactcaacatttagctcccacttacaa

SEQ ID NO: 29761 - DNA, 120 bp, synthetic construct
  source 1..120: mol_type = other DNA
tggttctaatgttctttttattatttttcaggaatttgctgacacaatatcttccgcctggtgctgggcatatcctaagaacttacaactttcctgtattatcctgtgtgagcagctgtc

SEQ ID NO: 29762 - DNA, 120 bp, synthetic construct
  source 1..120: mol_type = other DNA
caagtatttgcttttatcaaaataattccaataaagcattttaaagtaaagaagacgtggtttggtctcagaacaatggtacaaaaagattaagggggctgggcgcaagttgctcatgcc

SEQ ID NO: 29763 - DNA, 120 bp, synthetic construct; identical to SEQ ID NO: 8421
  source 1..120: mol_type = other DNA

SEQ ID NO: 29764 - DNA, 120 bp, synthetic construct
  source 1..120: mol_type = other DNA
agcctaatattagagattcttggttgggtgacatagtattatgtataatacactagacttttgacaatcatttgagatggtttttctggcaggggaggaggtggagtttcgcccttgttg

SEQ ID NO: 29765 - DNA, 120 bp, synthetic construct
  source 1..120: mol_type = other DNA
gcctcctgagtagctgggattacaggcgcctggcacctcccctagctattttttgtacttttagtagagacaaggtttcaccatgttggccaggctggtctcgaactcctgacctcaggt

SEQ ID NO: 29766 - DNA, 120 bp, synthetic construct
  source 1..120: mol_type = other DNA
tacccaattagccatctttttttttttgagacagttgcaccttgtcacctgggctggaatatagtggcgcagtttgggttcactgcagcctctccccgggttcaagtgattttcgtgcct

SEQ ID NO: 29767 - DNA, 120 bp, synthetic construct; identical to SEQ ID NO: 8422
  source 1..120: mol_type = other DNA

SEQ ID NO: 29768 - DNA, 120 bp, synthetic construct
  source 1..120: mol_type = other DNA
gtcgcccaggctagagtgcagtggcgtgatctcgactcatactgcaatctctgcctcccaggttcaccccattattctgcctgggcctcccaaatcactgggactacaggtgcccgccac

SEQ ID NO: 29769 - DNA, 120 bp, synthetic construct
  source 1..120: mol_type = other DNA
acaaacagccaccatgctggcccatttttcatttttcaaaaagaataaatcttcatgtgttctactgcaactttctgcttttctggggggcgggggggacagagtcttgctctgtcgcca

SEQ ID NO: 29770 - DNA, 120 bp, synthetic construct
  source 1..120: mol_type = other DNA
atttttgtatttttactagagacggggtttcaccacattggccagggtggtctccaactcctagcctcaccgtccgcccgcctcggcctcctgaaatgctgggattacaggcgtgagcca

SEQ ID NO: 29771 - DNA, 120 bp, synthetic construct; identical to SEQ ID NO: 8423
  source 1..120: mol_type = other DNA

SEQ ID NO: 29772 - DNA, 120 bp, synthetic construct
  source 1..120: mol_type = other DNA
actatcttggctcaccacaacctctgcctcctgggttcaagcgattctcctgccttatcctgccaagtagctgggattatatgccaccacgcccggctaattttgtatttttattagaga

SEQ ID NO: 29773 - DNA, 120 bp, synthetic construct
  source 1..120: mol_type = other DNA
ttgttgttgttcatgtattttcctgtagttcatttggagtccacccttccatacacatttgtggacataaaaaacttcagggcctggcatggtggctcatgcccgtaatcgcagctgagg

SEQ ID NO: 29774 - DNA, 120 bp, synthetic construct
  source 1..120: mol_type = other DNA
gaggccgaggcgggcagatcacgaggtcaggagatcaagaccatcctgtctaacacggtgaaaccccgtctctactaaaaatacaaaaatcagccgggcgtggtggcgggcgcctgtagt

SEQ ID NO: 29775 - DNA, 120 bp, synthetic construct
  source 1..120: mol_type = other DNA
ttagggccaggcatggtggctcacgcctgtaatcccagcactttgggaggccgaggcaggtggatcacctaaggtcaggagttcgagaccagcctggccaacatggcaaaaccctgtctc

SEQ ID NO: 29776 - DNA, 120 bp, synthetic construct; identical to SEQ ID NO: 8424
  source 1..120: mol_type = other DNA

SEQ ID NO: 29777 - DNA, 120 bp, synthetic construct
  source 1..120: mol_type = other DNA
agactgaacacttactgctaggttaactttggctaagttcctcagtgattcccataacaatttccttgtttgtaaatagataacagagttcctacccaccctcttttttttttttttctt

SEQ ID NO: 29778 - DNA, 120 bp, synthetic construct
  source 1..120: mol_type = other DNA
ccctctcttttttttgagacagggtgtcactgttgcccaggctcgagtacagtggcaagattacagctcactacagccttgacctcctgggctcaagtgatcctcccacctcagcctctg

SEQ ID NO: 29779 - DNA, 120 bp, synthetic construct
  source 1..120: mol_type = other DNA
tccacctcctgggttcacaccattctcctgcctcagcctcccgactagctgggactacaggcacccaccaccacggccagctaattttttgtatttttagtaaagatggggtttcaccgt

SEQ ID NO: 29780 - DNA, 120 bp, synthetic construct
  source 1..120: mol_type = other DNA
gtcttgctctgtcacccaggctggagtgcagtggcgcgatcttggctcactgcaagctctgcctctcaggttcacgccattctcctgcctcagcctcccgagtagcaggaactacaggtg

SEQ ID NO: 29781 - DNA, 120 bp, synthetic construct; identical to SEQ ID NO: 8425
  source 1..120: mol_type = other DNA

SEQ ID NO: 29782 - DNA, 120 bp, synthetic construct
  source 1..120: mol_type = other DNA
ggaggccatggtgggcagatctcttgaacccaggagtttgagaccagtctgcctgggcaacacggtgaaatccagttcctacaaaaaattttaaaaattagccggttgtgatggcatgcc

SEQ ID NO: 29783 - DNA, 120 bp, synthetic construct
  source 1..120: mol_type = other DNA
ccactgcactccaatctgggcaacagagtgagccttatctctaaataaataaatgaagaggtagagtcatgctctgttgcccaggtctgacttgaactcctgggctgaagtgatcctccc

SEQ ID NO: 29784 - DNA, 120 bp, synthetic construct
  source 1..120: mol_type = other DNA
cctcccctgtgtggtgggtgctaatcccaggtttggggtataagactgagctacagccatggtaagatggtcacgtgaacttcttttctcacacagtggtgatgctgaaagacctcaacc

SEQ ID NO: 29785 - DNA, 120 bp, synthetic construct
  source 1..120: mol_type = other DNA
acgccattctcctgcctcagcctcccgattagctgggaatacaggcgtccaccactacacccggctaattttttgtatatttagtagagacggggtttcaccgtgttagccaggatggtc

SEQ ID NO: 29786 - DNA, 120 bp, synthetic construct; identical to SEQ ID NO: 8426
  source 1..120: mol_type = other DNA

SEQ ID NO: 29787 - DNA, 120 bp, synthetic construct
  source 1..120: mol_type = other DNA
gacccttggaatctgcctgactgctctcctgttctcacatgctacatctaatttgtcagcaaatcatactgtctgtatcttagaaatgacacgaggatctgtgtctcacacctttactgc

SEQ ID NO: 29788 - DNA, 120 bp, synthetic construct
  source 1..120: mol_type = other DNA
gttccttccaaatcaggagtcaggtcatgtctcccctcttctgaagatcctgtaacagctgccatttcactcagagtaaaagtctccatcttacaagggccacccaacaaggtcctccca

SEQ ID NO: 29789 - DNA, 120 bp, synthetic construct
  source 1..120: mol_type = other DNA
aggagctgcttggagctcttttgtcagtgttcgaggagtaaaatttctacccattggccagagtcacagccgcaggctttgtggggtacacccaaacctgcaccaacagaactcatggat

SEQ ID NO: 29790 - DNA, 120 bp, synthetic construct
  source 1..120: mol_type = other DNA
gtggatcacttgaggccaggagtttgagaccaacctggtcaacatggcgaaaccctgtctctactaaaaatacaaaaattagccaagtgtggtggtgcacacctgtaatcccagatactc

SEQ ID NO: 29791 - DNA, 120 bp, synthetic construct; identical to SEQ ID NO: 8427
  source 1..120: mol_type = other DNA

SEQ ID NO: 29792 - DNA, 120 bp, synthetic construct
  source 1..120: mol_type = other DNA
tgggaggccaaggtgggaggatcacctgagcccaggagttcgagaccagcctgggtaatattgcaagacaccatctctaaaaataaaaaccaaaaaaaacaacaaagatacacaataaac

SEQ ID NO: 29793 - DNA, 120 bp, synthetic construct
  source 1..120: mol_type = other DNA
tggagggagaaataatccataatgtggagcagagaaatcagaggtgatatgaaaaggaagttttgaaacatgaaggatggaatgagatactccaactccagagctgctttgtttttgttt

SEQ ID NO: 29794 - DNA, 120 bp, synthetic construct
  source 1..120: mol_type = other DNA
gattacaggtggtgccaccacgtctggataatttttgtatttttagtagagacaaggtttcaccgtgttggtcaggttggtcttgaactcctgaccttgtgattcacctgcctcgccctc

SEQ ID NO: 29795 - DNA, 120 bp, synthetic construct
  source 1..120: mol_type = other DNA
gtacaggggtacctggtttttagcatctcaggcccatctgttagtttgttgattgtagtactttcttttcattagcattctactttcccatgactttttttgggggggagtggggtggac

SEQ ID NO: 29796 - DNA, 120 bp, synthetic construct; identical to SEQ ID NO: 8428
  source 1..120: mol_type = other DNA

SEQ ID NO: 29797 - DNA, 120 bp, synthetic construct
  source 1..120: mol_type = other DNA
ggttaaagtacctgctgactcttgaaatgttaaactttattgcctccagtcaggtgaacctcaggtggaagtgggtcacattctaggctggctgttgcctgtcttaaattctaaagaatg

SEQ ID NO: 29798 - DNA, 120 bp, synthetic construct
  source 1..120: mol_type = other DNA
agggagcaagtcccatctcctagtgccacccagggaatacctgtgctccacactgggttgattgcctctaaaagaggcagaggaactgttataaaacaaaaaaaaaacttttaaaagttt

SEQ ID NO: 29799 - DNA, 120 bp, synthetic construct
  source 1..120: mol_type = other DNA
aaaaattaggtgtactcccaagcacctgtagtcccagctacttgggaggctgagatggaaggatcacttgagcccagaaggtcgaggctacagagccatgattgttccactcactgctct

SEQ ID NO: 29800 - DNA, 120 bp, synthetic construct
  source 1..120: mol_type = other DNA
aaagagattatgacattttatccctttgtatttgagtatgcatctccaaaaaataaggatgttcatctgcatattcacaatactattatacctgagaaaagcaaatttaattccctaata

SEQ ID NO: 29801 - DNA, 120 bp, synthetic construct; identical to SEQ ID NO: 8429
  source 1..120: mol_type = other DNA

SEQ ID NO: 29802 - DNA, 120 bp, synthetic construct
  source 1..120: mol_type = other DNA
gcaggtggatcacctgaggtcaggagtttgagaccagcctggccaacatggagaaaccccatcgctactaaaaatacaaaaattagccgggtgtggtggtgaacacctgtaatcccagct

SEQ ID NO: 29803 - DNA, 120 bp, synthetic construct
  source 1..120: mol_type = other DNA
aaaaaaaaaaaaagtgtgtgtgtgagtgtggctggggggagagagtgagagagtagaggaggaaaaagtttaaaacagtttgggagtttggagagtttttcgtgaaacacagactcatca

SEQ ID NO: 29804 - DNA, 120 bp, synthetic construct
  source 1..120: mol_type = other DNA
ccattctcctgcttcagcttcccaagtagctgggactacaggctcccgccaccacgcccggctaatattttgtatttttagtagagacagtgtttcaccgtgttagccaggaggtctgga

SEQ ID NO: 29805 - DNA, 120 bp, synthetic construct; identical to SEQ ID NO: 8430
  source 1..120: mol_type = other DNA

SEQ ID NO: 29806 - DNA, 120 bp, synthetic construct
  source 1..120: mol_type = other DNA
gatctgcccgtcttggccttccaaagtactgggactgggattacaggcatgtaattaccgcctctggccagctttttttttttttttttttttttgagacagagtctcgctcttgttgcc

SEQ ID NO: 29807 - DNA, 120 bp, synthetic construct
  source 1..120: mol_type = other DNA
gctaatttttgtatttttagtagagacgggggtttcaccatgttggccaggctggtcttgaactcctgacctcaggtgatccgcccgccttggcctccccaaagtgctgggtggcgtgag

SEQ ID NO: 29808 - DNA, 120 bp, synthetic construct
  source 1..120: mol_type = other DNA
gattacagacatgagccaccgcgcccggcctcttttttttttttttttgggacagagtctcactgtgtcaccaggctggagtgcagtggcatgatctcggcttactgcaacctctgcctc

SEQ ID NO: 29809 - DNA, 120 bp, synthetic construct
  source 1..120: mol_type = other DNA
acccatctctactaaaaatacaaaaaattagccaggtgtggtggtgggcacctataatcccaaatactcaggaggctgaggcaggagaatcacttgaacctgggacacggaggttgcagt

SEQ ID NO: 29810 - DNA, 120 bp, synthetic construct; identical to SEQ ID NO: 8431
  source 1..120: mol_type = other DNA

SEQ ID NO: 29811 - DNA, 120 bp, synthetic construct
  source 1..120: mol_type = other DNA
gaaaatattagctgggcttggtggcaagtgcctgtagtcccagctactcaggaggctgaggtgggaagattgcttgaacccaggtggtcaaggttgcagtgagctgtgatcatgctactg

SEQ ID NO: 29812 - DNA, 120 bp, synthetic construct
  source 1..120: mol_type = other DNA
ggtccctggtccctggtatttgctgttcaggtcagtgttcattgttactgtctctttcccttatttaagggacagctgagaagacagagagagcttgagctggtttgatcctaagcaaag

SEQ ID NO: 29813 - DNA, 120 bp, synthetic construct
  source 1..120: mol_type = other DNA
atgatgtgcaaagtccaccgtaaaaagaaaacaaaacttcaggactctaagtttatgccaagatggaagttaagccttggagactgagtcatgtagcatgtttgcaattctgcttcttac

SEQ ID NO: 29814 - DNA, 120 bp, synthetic construct; identical to SEQ ID NO: 8432
  source 1..120: mol_type = other DNA

SEQ ID NO: 29815 - DNA, 120 bp, synthetic construct
  source 1..120: mol_type = other DNA
gtgggagccttctctgggctggccgaggccggagccggctccctcggcttgcggggaggtgtggagggagaggcgcgggcgggaaccggggctgcacgcagcgcttgtgggccagcgcaa

SEQ ID NO: 29816 - DNA, 120 bp, synthetic construct
  source 1..120: mol_type = other DNA
cacggggccttagctgcctcaccacaggacaggactcaggacctgcagcccgccatgcctgagccccaaccccgccgtgggctcctgtgctgcagagcctccccgacgagcgccaccccc

SEQ ID NO: 29817 - DNA, 120 bp, synthetic construct
  source 1..120: mol_type = other DNA
tgggctcctgagtgtggtggggacttggagaacctttatgtctagctaagggattgtaaatacaccaatcggcactctgtatctagctcaaggtttgtaaatataccaatcagcatcctg

SEQ ID NO: 29818 - DNA, 120 bp, synthetic construct; identical to SEQ ID NO: 8433
  source 1..120: mol_type = other DNA

SEQ ID NO: 29819 - DNA, 120 bp, synthetic construct
  source 1..120: mol_type = other DNA
caggggtatgcagtttcactcctgacgctagcgagagcacgaaccccccgggaggaacaaacaactccagaggcgccgcatttaagaactgtaacactccccgtgagggtctgcggcctc

SEQ ID NO: 29820 - DNA, 120 bp, synthetic construct; identical to SEQ ID NO: 8434
  source 1..120: mol_type = other DNA

SEQ ID NO: 29821 - DNA, 120 bp, synthetic construct
  source 1..120: mol_type = other DNA
cttccgcagtgtttgtgtccctgattacttgagattagggattggtgatgactcccaacgagcaccctgccttcaagcatctgtttaacaaagcacatcttgcaccgcccttaatccatt

SEQ ID NO: 29822 - DNA, 120 bp, synthetic construct
  source 1..120: mol_type = other DNA
catgtctacttctttctacacagacacggcaaccatccgatttctcaatcttttccccacctttcctgcctttctattccacaaagccgccattgtcatcctggcccgttctcaatgagc

SEQ ID NO: 29823 - DNA, 120 bp, synthetic construct
  source 1..120: mol_type = other DNA
ggctgaccccccccacctccctcccggacggggcggctggccgggcggggggctgacacccccacctccctcccggacggggcggctggccgggcagaggggctcctcacttcccagtag

SEQ ID NO: 29824 - DNA, 120 bp, synthetic construct
  source 1..120: mol_type = other DNA
cctccctcccggaccgggcggctggccgggtgggggggctgacccccccatctccctcccggacggggtggctggccgggctgaggggctcctcacttcccagtaggggtggccgggcag

SEQ ID NO: 29825 - DNA, 120 bp, synthetic construct; identical to SEQ ID NO: 8435
  source 1..120: mol_type = other DNA

SEQ ID NO: 29826 - DNA, 120 bp, synthetic construct
  source 1..120: mol_type = other DNA
gtctcctcacttctcagacggggcggccgggcagagacgctcctcacctcccagacggggtctcggccaggcagaggcactcctcacatcccagatggggcggcggggcagaggcgctcc

SEQ ID NO: 29827 - DNA, 120 bp, synthetic construct
  source 1..120: mol_type = other DNA
cactttccagactgggcagccaggcagaggggctcctcacatcccagacgatgggcggccaggcagagacgctcctcacttcccagacggggtggcggccgggcagaggctgcaatctcg

SEQ ID NO: 29828 - DNA, 120 bp, synthetic construct
  source 1..120: mol_type = other DNA
cccggcacctcgggaggctgaggttggcgggatcactcgcggttaggggctggagacctgcccggccaacacagcgaaaccccgtctccaccaaaaccagtcaggcatggcggcgcgtgc

SEQ ID NO: 29829 - DNA, 120 bp, synthetic construct; identical to SEQ ID NO: 8436
  source 1..120: mol_type = other DNA

SEQ ID NO: 29830 - DNA, 120 bp, synthetic construct
  source 1..120: mol_type = other DNA
gtctcccagactggaatgcaatggtatgatcttggcccactgtaacctctcgctcccgggttcaagcgattctccttcctcagtctcctgaatagctgggactacaggcgcgacccacaa

SEQ ID NO: 29831 - DNA, 120 bp, synthetic construct
  source 1..120: mol_type = other DNA
aggtgtgagccacagcgcctggcctagattctgaactttttaattattattttttagattgataacacttaccccgatttttttttttttgagggagagtctcgctccatagcccaggct

SEQ ID NO: 29832 - DNA, 120 bp, synthetic construct
  source 1..120: mol_type = other DNA
tttttgaatttttagtagagacagtgtttcaccatgttggccagactggtcttgaactcctgacctcaagtgatcccccttcctcagcctcccaaagtgctaggattacaggcgtgagcc

SEQ ID NO: 29833 - DNA, 120 bp, synthetic construct; identical to SEQ ID NO: 8437
  source 1..120: mol_type = other DNA

SEQ ID NO: 29834 - DNA, 120 bp, synthetic construct
  source 1..120: mol_type = other DNA
aaaaaaaatttcctcacagagtagagctaactcataagcagtgtgcccagagtcggcccactttgtcccattagtacaaacaagctctttcccctttcagtctcctgccacttgtcccaa

SEQ ID NO: 29835 - DNA, 120 bp, synthetic construct
  source 1..120: mol_type = other DNA
tgcctcaggctcccgagtagctgggactacaggcgtgtgccaccacatatggctaatatttgtatttttagtagagatggggttttaccatgttggccaggctggtctagaacccctgac

SEQ ID NO: 29836 - DNA, 120 bp, synthetic construct
  source 1..120: mol_type = other DNA
ctatttctgcaactttgacatacatataattcattttagctggacacttgcacttgtttaaaagttctgaccctggttttcaaacttaaacgtattacgaatcacccagaaggcttgtta

SEQ ID NO: 29837 - DNA, 120 bp, synthetic construct; identical to SEQ ID NO: 8438
  source 1..120: mol_type = other DNA

SEQ ID NO: 29838 - DNA, 120 bp, synthetic construct
  source 1..120: mol_type = other DNA
ctgagccaccacacctagccaggaaggtagtgtctgtctctcaagcctcccagcacttctgtttctaacaggtagtagttcatgggtcagacattcatagtgtcctttcctttttgtctt

SEQ ID NO: 29839 - DNA, 120 bp, synthetic construct
  source 1..120: mol_type = other DNA
tctgcctggggaatattttcttacataatttgccataggaagtgctcacttctctgtcaggctagctgggacaggattcccatctgcatttcacacacttgcaccctatttcatggagga

SEQ ID NO: 29840 - DNA, 120 bp, synthetic construct
  source 1..120: mol_type = other DNA
gcctcctggttcaagtgattctcctgcctcagccacctgagtagctgggactataagtgtaagccaacacgcctggctagtttttgtatttttagtagagatgggatttcaccatattgg

SEQ ID NO: 29841 - DNA, 120 bp, synthetic construct; identical to SEQ ID NO: 8439
  source 1..120: mol_type = other DNA

SEQ ID NO: 29842 - DNA, 120 bp, synthetic construct
  source 1..120: mol_type = other DNA
aaactccgtctctactaaaaatacaaaaattagccgggtgtggtggtgggcacctgtaatcccagctattcgggaagctgaggcagaagaatcgcttgaacctgggaggcagaggttgca

SEQ ID NO: 29843 - DNA, 120 bp, synthetic construct
  source 1..120: mol_type = other DNA
aaaataaataaataaaaaataaaaaatatcttatggcactcccttcatactcattacacctgtgaagatcaacctgtttctcggtgataagaaggaatgtaggctgggtgcggtggctca

SEQ ID NO: 29844 - DNA, 120 bp, synthetic construct
  source 1..120: mol_type = other DNA
tagcgcaaccttgtctctactgaaaataaaaattaaaaaaattaaccaggcatggtgtcactgacctgtagtcccaactactccggaggctgagacgtgaggatcacttgagcccaggag

SEQ ID NO: 29845 - DNA, 120 bp, synthetic construct
  source 1..120: mol_type = other DNA
caacaaaaaaagagggcatgtcaaaaggaaaagaggatttgatttgccaaagtcagattttcacaggcagtacgcacatcaggtctctccccagaactcacccaggctcacaaggataca

SEQ ID NO: 29846 - DNA, 120 bp, synthetic construct; identical to SEQ ID NO: 8440
  source 1..120: mol_type = other DNA

SEQ ID NO: 29847 - DNA, 120 bp, synthetic construct
  source 1..120: mol_type = other DNA
ggccacacttagccatatggaaagacagtattctcagatgagggcaggacttttttgtgggagaggacgcctagctttcagtcctaaaggaagtgatttccctggtaaagggaaggtgat

SEQ ID NO: 29848 - DNA, 120 bp, synthetic construct
  source 1..120: mol_type = other DNA
gcacagctcagagtgtcccatagacactgattttggccacggagatgctctctgtgtagtggttccggcctttctcatacaggacgtagagctggggggcctgctcctctccatccatgc

SEQ ID NO: 29849 - DNA, 120 bp, synthetic construct
  source 1..120: mol_type = other DNA
agagcaggagagtcagggagagagggtctctgcccaggccttgtctagacacagggctctccctgctgaccccacccatgaggcactcacggaactctggatgtgctgggttggagaaga

SEQ ID NO: 29850 - DNA, 120 bp, synthetic construct; identical to SEQ ID NO: 8441
  source 1..120: mol_type = other DNA

SEQ ID NO: 29851 - DNA, 120 bp, synthetic construct
  source 1..120: mol_type = other DNA
tcctgacctggcattcatcaggattgaaatcattttcctgcttgggctgaccgtaggggatgccgctgaccccacttccgtagcgccaggaggcaccatgatcatcgctgaggagacaga

SEQ ID NO: 29852 - DNA, 120 bp, synthetic construct
  source 1..120: mol_type = other DNA
ggcagggacagagaacccaccacttcccaaatgcaatcacatgtatggtccccttgagttcagcccttgctcactgagggttccagtcagatcccataaatacacaccctgtttgaatta

SEQ ID NO: 29853 - DNA, 120 bp, synthetic construct
  source 1..120: mol_type = other DNA
gtctgtccaaagaggcagtgcctttttctactttgcatgagggtattgcatggactaacgcagtcctgttgacaatgccaaatgggaagccaatggcagagttccctcttctcctgataa

SEQ ID NO: 29854 - DNA, 120 bp, synthetic construct
  source 1..120: mol_type = other DNA
tgtgttcctaccaggatgccctgtctttcaaggaatcccacccaagccagaaaatctgacttcagagaatcttccccttggaaaggagtccatttgggggtatccctcagactctccaca

SEQ ID NO: 29855 - DNA, 120 bp, synthetic construct; identical to SEQ ID NO: 8442
  source 1..120: mol_type = other DNA

SEQ ID NO: 29856 - DNA, 120 bp, synthetic construct
  source 1..120: mol_type = other DNA
tcccgttaatttcccaccttctgctagggacctcaggccttccgatggtcccagggtgcaatccaacacttgcactatctatacctcttgtcctgttttatttttctccattgcatttat

SEQ ID NO: 29857 - DNA, 120 bp, synthetic construct
  source 1..120: mol_type = other DNA
acctaaaatagtgcctggtataggtatatagtacccaataaatgtttgctaagtgaatgtccaactccttggtgatcccaatttccagatcactgtcctagacacttgcccttctcgggt

SEQ ID NO: 29858 - DNA, 120 bp, synthetic construct
  source 1..120: mol_type = other DNA
cacccatccaacctagcaccggctctttcacccagacatctttataccctggtccatggacctccgcagggcgatgaacttggccccctcatcggatgaggacattttcctcgcctcagc

SEQ ID NO: 29859 - DNA, 120 bp, synthetic construct; identical to SEQ ID NO: 8443
  source 1..120: mol_type = other DNA

SEQ ID NO: 29860 - DNA, 120 bp, synthetic construct
  source 1..120: mol_type = other DNA
tcgaatgaggagaaggacggggacccggagagggagaggggctgggagcggtaggaggaaacggggtctgggagaaagaaaagggtcctgtcgcggaaagtcggctcagccgcccgcgtt

SEQ ID NO: 29861 - DNA, 120 bp, synthetic construct
  source 1..120: mol_type = other DNA
gaagatcgcggcaaacacccaaaccctacagcctccccagaagcccagaatccgcggcccccagcgtctgtccgggagcgccgtgctgggtcgctccccagtcatctctccccgcagctg

SEQ ID NO: 29862 - DNA, 120 bp, synthetic construct
  source 1..120: mol_type = other DNA
taattggtcttcaagtagctcatctcctcccacgtgatcacgcagcatctcgaagcttgcccttccgattggccctcttggaggccctcttggaggcccggagcgcgtgacccgaacggg

SEQ ID NO: 29863 - DNA, 120 bp, synthetic construct; identical to SEQ ID NO: 8444
  source 1..120: mol_type = other DNA

SEQ ID NO: 29864 - DNA, 120 bp, synthetic construct
  source 1..120: mol_type = other DNA
agtagctgggatgacaggtgcatgccaccactctcggctaatttttgtatttttaatagagacggaggtttcaccatgttggccaggctggtctcgaactcctgactcaggtgatccgcc

SEQ ID NO: 29865 - DNA, 120 bp, synthetic construct
  source 1..120: mol_type = other DNA
gggtggggtgcagtcctggatcagggccggagctgtcacttcttcctcttcttgttgtccgggggcgcctcgttcttcttgcccagaatctttagaaggctcttggacatgtagtagggc

SEQ ID NO: 29866 - DNA, 120 bp, synthetic construct
  source 1..120: mol_type = other DNA
aatccaagctgcaccaccacccttacccccgggcaggttatgtaatctcagtttcctcctgtgaagtggggtcgggaatattatgttgcatagagcgatgataagaattagcggaaaaaa

SEQ ID NO: 29867 - DNA, 120 bp, synthetic construct; identical to SEQ ID NO: 8445
  source 1..120: mol_type = other DNA

SEQ ID NO: 29868 - DNA, 120 bp, synthetic construct
  source 1..120: mol_type = other DNA
gtgatctgcccacctcggtcccccaaagtgctggcatgacaggcgtgagccaccatgcctggcctctaatggctaacttctacccgagatttcttagggaagatagcagagacctctcca

SEQ ID NO: 29869 - DNA, 120 bp, synthetic construct
  source 1..120: mol_type = other DNA
gcattgtttctagaagcaccaaatctccaaaaaaaaaaaaaaatgcttgaacggctcagtactttaaggttggggacaggtggctgggggtgtcactcacggaagcagaggaagagcgtg

SEQ ID NO: 29870 - DNA, 120 bp, synthetic construct
  source 1..120: mol_type = other DNA
gcagcagagaggggagtcactcaccatgatgggcagccagtaatagttgaggtgggggctcttaaagtctttacccagccccgggatgcgaccggagaaaaaaaagaaggacaggacccc

SEQ ID NO: 29871 - DNA, 120 bp, synthetic construct; identical to SEQ ID NO: 8446
  source 1..120: mol_type = other DNA

SEQ ID NO: 29872 - DNA, 120 bp, synthetic construct
  source 1..120: mol_type = other DNA
gatcagaggagggagccacaaagcggggggggagcagcctaacctgacaatgtttcgcatgagtagcatgaacgcatttttggctgagacacagaaattcttcccgtagatggcgatctg

SEQ ID NO: 29873 - DNA, 120 bp, synthetic construct
  source 1..120: mol_type = other DNA
tgcggtttaggaacttgataaatttttccagacaccagaggcagcacttgaaacagcacatgatgcagcgggctacagggttctgcactcctgggagcgaggaaggctcatgtttggtca

SEQ ID NO: 29874 - DNA, 120 bp, synthetic construct
  source 1..120: mol_type = other DNA
agggctccaaatgccaatgacccagtgtggtaactgcagagggtgttatgcagtcagagacagctccaggacccctggggcccccgtgcctacaatgaccaggcccctgccccatcctta

SEQ ID NO: 29875 - DNA, 120 bp, synthetic construct; identical to SEQ ID NO: 8447
  source 1..120: mol_type = other DNA

SEQ ID NO: 29876 - DNA, 120 bp, synthetic construct; identical to SEQ ID NO: 2618
  source 1..120: mol_type = other DNA

SEQ ID NO: 29877 - DNA, 120 bp, synthetic construct
  source 1..120: mol_type = other DNA
tttgtgagatgtgataatgatatagtggctatgcttttaaacagttcttatctgttgagatccatctcgatgcatgtacaggtgaaatggcatgatgtccagaatttgccttaaaagtct

SEQ ID NO: 29878 - DNA, 120 bp, synthetic construct
  source 1..120: mol_type = other DNA
gtgaaatcccatctctactgaaaatacaaaaaattagccgggcgtggtggcagacgcctattatcccagctattcaggaggctgaggcaggataattgcttgaacccaggaggcagaggt

SEQ ID NO: 29879 - DNA, 120 bp, synthetic construct; identical to SEQ ID NO: 8448
  source 1..120: mol_type = other DNA

SEQ ID NO: 29880 - DNA, 120 bp, synthetic construct
  source 1..120: mol_type = other DNA
gcttcaacctcccaagtagctgggactgcaggtgtgtgccaccatgcctggctaatcaaaaaatcttttttttttttttgagatggagtctcactctgtcaccatattggccaggttggt

SEQ ID NO: 29881 - DNA, 120 bp, synthetic construct
  source 1..120: mol_type = other DNA
aacaacactcacgtcatacccagcacagttgctcatgtgtataatcccaacacttttggaggctgaagcaggcaaattgcttgagcccatttgtttgagaccagcctgggcaacatagtg

SEQ ID NO: 29882 - DNA, 120 bp, synthetic construct
  source 1..120: mol_type = other DNA
gccatgatcgcatcactgcactccagcctgtgtaacagcctttttttcattaaaaaagaaaaaaaaaagaaaaagaaaaagaaccacatcattttgggctttgtatacccagtgcctggc

SEQ ID NO: 29883 - DNA, 120 bp, synthetic construct
  source 1..120: mol_type = other DNA
agttcaagcaattctcctgcctcagcctcctgagtagctgggattacaggcacctgctaccatgcctggctaatttttgtacttttagtggagacaggtttttgtcatgttggccaggct

SEQ ID NO: 29884 - DNA, 120 bp, synthetic construct; identical to SEQ ID NO: 8449
  source 1..120: mol_type = other DNA

SEQ ID NO: 29885 - DNA, 120 bp, synthetic construct
  source 1..120: mol_type = other DNA
gccaggcattgtactaagcactttatgtgcccaaagtcatttcatcttctcagccaccccagggatgggtattataattatcctcattttacagaggaatggagctgcatgtggtggctc

SEQ ID NO: 29886 - DNA, 120 bp, synthetic construct
  source 1..120: mol_type = other DNA
acaaaaagcttaaaattagcctggcgtggtgtcatacgctagtagttccagctgctcaggaggctgaggtgggaagattgcttgagcctgggggatggaggttgcagtgagctgagattg

SEQ ID NO: 29887 - DNA, 120 bp, synthetic construct
  source 1..120: mol_type = other DNA
tcctcaagtcagagcaatgtcctggggaggggtggagtaagtcctggtatccagggctgtctctcccagcctcagtttccctccccacatgatggatggctcaacaggagtaccaggtat

SEQ ID NO: 29888 - DNA, 120 bp, synthetic construct; identical to SEQ ID NO: 8450
  source 1..120: mol_type = other DNA

SEQ ID NO: 29889 - DNA, 120 bp, synthetic construct
  source 1..120: mol_type = other DNA
gctgcacagagagggctgaaattcagcctgtgtgcaccctttcaactctgttcaggcacagtgctggtgtgtctgcccagagaaaggggcacctcttccagtgacaccaaggcactctac

SEQ ID NO: 29890 - DNA, 120 bp, synthetic construct
  source 1..120: mol_type = other DNA
ggtgaccagtgggtagaacatggtagacatcatctgtcccacagccctgcagggagacaaagctgttaaccggcaccgccccagctgtccatcttctcaaggggctgaccccggccgggc

SEQ ID NO: 29891 - DNA, 120 bp, synthetic construct
  source 1..120: mol_type = other DNA
aaaattagccgggcatggtggcgggcgcctgtagtgccagctactccggaggctgaggcaggagaatggcgtgaacccgggaggcggagtttgcagtgagctgacatcgcaccactgcac

SEQ ID NO: 29892 - DNA, 120 bp, synthetic construct; identical to SEQ ID NO: 8451
  source 1..120: mol_type = other DNA

SEQ ID NO: 29893 - DNA, 120 bp, synthetic construct
  source 1..120: mol_type = other DNA
cggattcctgccgttccactcagccaccaccactcccaccaacccctctagaaggcctatgtcatattccaggcactcattgaatcctcaagacaaccctagaaggcaggaattattgtt

SEQ ID NO: 29894 - DNA, 120 bp, synthetic construct
  source 1..120: mol_type = other DNA
cctgggtccacgctgtcctcaaccccatctccctcccaggcaggccctaacttgctggcctccttcaggagggcgatggcaatacgaatccgctgccgcaggaagatgagcatcagcagc

SEQ ID NO: 29895 - DNA, 120 bp, synthetic construct
  source 1..120: mol_type = other DNA
ggggtgggcaggacactcacgggcggccagccaggtctcctgcacgctctggtaggcactgaggttggtggtgaaacccagctgggagatggaggcgcccttgtcccgcagcactcggta

SEQ ID NO: 29896 - DNA, 120 bp, synthetic construct; identical to SEQ ID NO: 8452
  source 1..120: mol_type = other DNA

SEQ ID NO: 29897 - DNA, 120 bp, synthetic construct
  source 1..120: mol_type = other DNA
aagaaggcaaggacacaagaggaggggaatctggtgactcacacaagaatccaataccaggactgggcaaaatcttcaaagatcttaacactgatgtctcgggcattgaggctgtcaata

SEQ ID NO: 29898 - DNA, 120 bp, synthetic construct
  source 1..120: mol_type = other DNA
tgggagcgccggtggagtaacgttggtccatggaaagcagcgccccagagctggaagggagagccgggctgctgggttgggggccaggagctctgcctggagggtctctggccccctccc

SEQ ID NO: 29899 - DNA, 120 bp, synthetic construct
  source 1..120: mol_type = other DNA
cctgtcgtgccttggtttggaccctcctctccgctggcctcaactcttagaacaccctgtcacccttccatccaccctccacccgagtggagtgccagggagaccgtggcactgcctgga

SEQ ID NO: 29900 - DNA, 120 bp, synthetic construct; identical to SEQ ID NO: 8453
  source 1..120: mol_type = other DNA

SEQ ID NO: 29901 - DNA, 120 bp, synthetic construct
  source 1..120: mol_type = other DNA
atttatttattttcttatttttgagtcaaggtcttgctctgtcacccaggctagagtgcagctgcatgatcatagcttactgcaacattgaacttctgggctcaagcgatcctccccact

SEQ ID NO: 29902 - DNA, 120 bp, synthetic construct
  source 1..120: mol_type = other DNA
gcaatcctcccacctcagccccccaaagtgttgggattacaggtgtgagtcacctcacctagcttatttattttttagaggcagggtttctcactctattgcccaggctggagtgcagtg

SEQ ID NO: 29903 - DNA, 120 bp, synthetic construct
  source 1..120: mol_type = other DNA
aaagatgaggaaacaaggttcagagaggttgcatagttgggtcaagaccatagggctggaaagtgctagaatttatattcagatctacttgactttgaagtattcacttgagatactcct

SEQ ID NO: 29904 - DNA, 120 bp, synthetic construct; identical to SEQ ID NO: 8454
  source 1..120: mol_type = other DNA

SEQ ID NO: 29905 - DNA, 120 bp, synthetic construct
  source 1..120: mol_type = other DNA
acggagtctcgctctgtcagcaaggctagagtacagtggcacgatcttggctcactgcaaagctcactgcaacctctgccacccgggttcaagcaattctcctgcctcagcctcctgagt

SEQ ID NO: 29906 - DNA, 120 bp, synthetic construct
  source 1..120: mol_type = other DNA
ctcagcctcccaaagtgctaggattacaagcatgagccaccatgcctggcctaaaaattgttttatattaaaaatgacatttgcaactgggtgtcggggctcatgtctgtaatcccagca

SEQ ID NO: 29907 - DNA, 120 bp, synthetic construct
  source 1..120: mol_type = other DNA
acactgtaaaagaaaaaaagttcaactgtgatcctaccacccagccacgttcacttataacatttgaacaaatatccttctagccttttccctgtgcatatataaaaatgatatgtgtgc

SEQ ID NO: 29908 - DNA, 120 bp, synthetic construct; identical to SEQ ID NO: 8455
  source 1..120: mol_type = other DNA

SEQ ID NO: 29909 - DNA, 120 bp, synthetic construct
  source 1..120: mol_type = other DNA
caaaaaaaaaaaaatgtgtgtgtagattcacccatgtatgttttcatgagattttcatacagtctctttgtgaacaactctaatctcttcacctagaatgtagctgaagcagggagcagt

SEQ ID NO: 29910 - DNA, 120 bp, synthetic construct
  source 1..120: mol_type = other DNA
acaaagagcaaaatgaagacctgatgctaattccaattttgccaccaacaagctatgtgacttcactctctctgggcctgatttcttcattcaagcaatgaaaacactggactagatgac

SEQ ID NO: 29911 - DNA, 120 bp, synthetic construct
  source 1..120: mol_type = other DNA
gatcaccgtctgtggcaggagtgaaaggacagacacacagacacagagcaggatgaagaagcaggtcccctcaccaccaccatggggctcagcctgtcccacactccccaggagagccaa

SEQ ID NO: 29912 - DNA, 120 bp, synthetic construct
  source 1..120: mol_type = other DNA
aatattcaccatattccagggtacccctggcagacaaaagttcctgttttttgtatagaagacttccccaacagtctgtgagaactcgttttttcccacagtccatgggtcctccgggca

SEQ ID NO: 29913 - DNA, 120 bp, synthetic construct; identical to SEQ ID NO: 8456
  source 1..120: mol_type = other DNA

SEQ ID NO: 29914 - DNA, 120 bp, synthetic construct
  source 1..120: mol_type = other DNA
atgcctagaagatctctcagagtaagtcaccattgcagcagctgacaaatagctcagagcatgaacttggagctccacaacttcatatcatctttatgatcttgagcaagtcacctgttc

SEQ ID NO: 29915 - DNA, 120 bp, synthetic construct
  source 1..120: mol_type = other DNA
gcctgcctggaacatagtaaatgctatataaatatttgaggttttattatttattggacatctgtatgtgaggactgttggcattgcttctggaattccccttgaatttcaaataaggaa

SEQ ID NO: 29916 - DNA, 120 bp, synthetic construct
  source 1..120: mol_type = other DNA
ctctgaactgtaaaactcatacacttaacacgactctccactgcctcccatttctggggggactcaagaagctaactgtccagcaatggttcttaacgtggcctggagttgtcagattca

SEQ ID NO: 29917 - DNA, 120 bp, synthetic construct; identical to SEQ ID NO: 8457
  source 1..120: mol_type = other DNA

SEQ ID NO: 29918 - DNA, 120 bp, synthetic construct
  source 1..120: mol_type = other DNA
gatgtaacctagaatgaagagcaggaagaggacgcagcagatgacatctgtgcagcttctgagagagaaacgaaacgggaggctgagctaaggagacttggggaggtagggcttatggtc

SEQ ID NO: 29919 - DNA, 120 bp, synthetic construct
  source 1..120: mol_type = other DNA
ttacttttttattttgagacagggtctcactctgtcacacagactggagtgcagtggtgcaatcttggctcactgcagcctctgcctcctgggttcaagcaattctcctgccttagcctc

SEQ ID NO: 29920 - DNA, 120 bp, synthetic construct
  source 1..120: mol_type = other DNA
ggcacagtggctcacgactgtaatactagctacttgggaggctgaggcagggcaatcccttgaggccaggagtttgagaccagcctgggcaacatagtgagatcccatctcaaagaaatt

SEQ ID NO: 29921 - DNA, 120 bp, synthetic construct
  source 1..120: mol_type = other DNA
gagcctgcagtgaacccccatctccaaaacacaaaaagaaagaaaacctttttctgggtgggtaaactttcttctgaagtaaaagacagaaaagcacacaactcgcaagggctcagctgg

SEQ ID NO: 29922 - DNA, 120 bp, synthetic construct; identical to SEQ ID NO: 8458
  source 1..120: mol_type = other DNA

SEQ ID NO: 29923 - DNA, 120 bp, synthetic construct
  source 1..120: mol_type = other DNA
gactggcttccctgagggacatgagaagaggtgtggaggatgagtctctctctgcatatcttgtcctgctgagtcctcctagccccaggatcctacccaggcctcaggtgtttggaggga

SEQ ID NO: 29924 - DNA, 120 bp, synthetic construct
  source 1..120: mol_type = other DNA
aaggaaggcctttatagtttccggctcacatctcaaggcagtcagtctgggaaatggccttggtcccctgccctaccctggcacggttctcctgagtctccctttagctgggatgtggga

SEQ ID NO: 29925 - DNA, 120 bp, synthetic construct
  source 1..120: mol_type = other DNA
ccctaccttaccctctggttcaaggctatggggaaagaaactggagacaaaggtgtcaaccccagcagggcctggggagggaagcggccctgtacatcctcactctggtgggacctcagt

SEQ ID NO: 29926 - DNA, 120 bp, synthetic construct; identical to SEQ ID NO: 8459
  source 1..120: mol_type = other DNA

SEQ ID NO: 29927 - DNA, 120 bp, synthetic construct
  source 1..120: mol_type = other DNA
aggggttccttccccttcagaccagaagaccaggggggcctccgcaggtgagtccccagccttcactgctcgtggggatctggaggccagtccccagctccctctctcctcagaacccca

SEQ ID NO: 29928 - DNA, 120 bp, synthetic construct
  source 1..120: mol_type = other DNA
ctgctcctagctcctcacagagacccctaggcaggaccccagccccctttccacaaagaccctcagccccaactcctcacagggacccccagcagaacccactccctctgccacttctcc

SEQ ID NO: 29929 - DNA, 120 bp, synthetic construct
  source 1..120: mol_type = other DNA
cttacagggaccctggcctcactggttgcaggctctgcagcacaggacactcccagcatccagccctattctgctcagggccccaacctgccaccttccatctcggctttgtttcctagg

SEQ ID NO: 29930 - DNA, 120 bp, synthetic construct; identical to SEQ ID NO: 8460
  source 1..120: mol_type = other DNA

SEQ ID NO: 29931 - DNA, 120 bp, synthetic construct
  source 1..120: mol_type = other DNA
cggagtgattggagccctggagacctggcgtctcacctgctgcccgccccgccctcccacacgtcacagccccacccccgcctgtggtccccgacacactctagttccttcttctcaact

SEQ ID NO: 29932 - DNA, 120 bp, synthetic construct
  source 1..120: mol_type = other DNA
acgacctggcatgctctgataagaaaacgctttataatctcgccaactaccttaactgccgtacactcccaacacgctcccgccaaagattaaagtgtggaaattggacctgttttttcc

SEQ ID NO: 29933 - DNA, 120 bp, synthetic construct
  source 1..120: mol_type = other DNA
caggattacaggtgcctgccaccacgcccagcaaattttttctattttgaaagatggggtttcaccaagttggccaggctggtcttgaactcctgatctcaggtgattcgcctgccttgg

SEQ ID NO: 29934 - DNA, 120 bp, synthetic construct; identical to SEQ ID NO: 8461
  source 1..120: mol_type = other DNA

SEQ ID NO: 29935 - DNA, 120 bp, synthetic construct
  source 1..120: mol_type = other DNA
ctgaagttgccctcccagggaggaaccagctctgggagggaggggctgtcagacctccagggcctggctgggatctctggtcaggaatgtgtgaaagggtggtggggagagaagatggca

SEQ ID NO: 29936 - DNA, 120 bp, synthetic construct
  source 1..120: mol_type = other DNA
agctcgggcagcagctcagggtgtgggtccaggcgggccagacggctctgctccagggcaatggcttcggctgagtgcttgcacttctcagagccacattggcaggtgaaatatttgctt

SEQ ID NO: 29937 - DNA, 120 bp, synthetic construct
  source 1..120: mol_type = other DNA
gagcccaccccgaagaccctgtggatcctgctccctgagagggacccgacacccaacctatcttctccagatgggatctgagccccttgtatgttctatggactttcagcatcagcattg

SEQ ID NO: 29938 - DNA, 120 bp, synthetic construct
  source 1..120: mol_type = other DNA
ctgtttccccaagtcctccaggaaatacttatgtacactgaaatctgagaagctctgcactactccatgcctggacaccaggtacatgccagccttcaggtcccaggtttgctgcatctc

SEQ ID NO: 29939 - DNA, 120 bp, synthetic construct; identical to SEQ ID NO: 8462
  source 1..120: mol_type = other DNA

SEQ ID NO: 29940 - DNA, 120 bp, synthetic construct
  source 1..120: mol_type = other DNA
gtaaggagggtctcctgctcaccttgttgtctaagtcgaagaggtaagaatcatcctctctcacatcagcctcagcatcagagatcagctccccgacatacctgtgggacaggaatccat

SEQ ID NO: 29941 - DNA, 120 bp, synthetic construct
  source 1..120: mol_type = other DNA
cagtggtgggcaagtgaaagggcagcattccagccttgacagaggaagccttcagtcagcacagagacagacaacaagctctgtggttaaggggattaatgtgtaggggcagttggcctg

SEQ ID NO: 29942 - DNA, 120 bp, synthetic construct
  source 1..120: mol_type = other DNA
ggcaaggaactcaaggcatgattcggggcaagagcacccacacatatctggacaccagagggaggagaggagccagctatctaaggagggtgagcagacatgggagattcagacacacgg

SEQ ID NO: 29943 - DNA, 120 bp, synthetic construct; identical to SEQ ID NO: 8463
  source 1..120: mol_type = other DNA

SEQ ID NO: 29944 - DNA, 120 bp, synthetic construct
  source 1..120: mol_type = other DNA
aaaattagccgggtgtggtggtgcgcacctgtaatcccagctacttgggaggctgaggcaggagaatcgcttgaacctgggaggtggagactgcagtgagccaagattgtgccattgcac

SEQ ID NO: 29945 - DNA, 120 bp, synthetic construct
  source 1..120: mol_type = other DNA
ggggagattacagatgctgggcagagaaagaactgatggagagggacaggcccctgaggaggtggacagataggtagctgttatcacctccactctacagacaagaaaaataaggctcaa

SEQ ID NO: 29946 - DNA, 120 bp, synthetic construct
  source 1..120: mol_type = other DNA
ctttctccagctaggaagggcgaggagggggtggaggggaaggtagagggtggaggtggaggggagggaagacaagctctgtggtctgggcagagtggaggcaggtgccattctcagctg

SEQ ID NO: 29947 - DNA, 120 bp, synthetic construct; identical to SEQ ID NO: 8464
  source 1..120: mol_type = other DNA

SEQ ID NO: 29948 - DNA, 120 bp, synthetic construct
  source 1..120: mol_type = other DNA
gggctgtggagcagggcctcacttgatgccactctgtacgacccggttcttgcagtttctccagcatgagcacgcctggttacactcgaaaatcagcggaggctcaatcttgttaaattc

SEQ ID NO: 29949 - DNA, 120 bp, synthetic construct
  source 1..120: mol_type = other DNA
aaccccaagactctacagagacagggaagttggggttggggaggtcacacaggctctgagatccgagagcacgaaatgcaggagcatcatccctggtttgcatagacctgggcacacgcc

SEQ ID NO: 29950 - DNA, 120 bp, synthetic construct
  source 1..120: mol_type = other DNA
tcctctgaaggaggggccgggtgtctgtggccaaggcaaggggcacgcaccttgtcataccagcaccggatgctgagctggccgcacaggcagttggagctagagcagtcgtccacacac

SEQ ID NO: 29951 - DNA, 120 bp, synthetic construct; identical to SEQ ID NO: 8465
  source 1..120: mol_type = other DNA

SEQ ID NO: 29952 - DNA, 120 bp, synthetic construct
  source 1..120: mol_type = other DNA
ggccccctactcacctgcaggtgggtgatgttgcgatcgatgttcatggtggacgtctcgcagttctctgagatgtacttgtaatcctcagggcagggctccccatccacaccgttgaca

SEQ ID NO: 29953 - DNA, 120 bp, synthetic construct
  source 1..120: mol_type = other DNA
aggttcctggggctgggggcaggggagtaaggttgccaggtaagatgcaggacagcgagttaacatagaattttagataaacaagaaatagctttttagtatgtcccaaaaattacacag

SEQ ID NO: 29954 - DNA, 120 bp, synthetic construct
  source 1..120: mol_type = other DNA
ctggggattcagtggtgcatggggaggggttggggaatgttgtgaggatgcaatggagcctggggagggtatgggtggggaggaggtggtcttgggtgcagagaggggcccagggctcac

SEQ ID NO: 29955 - DNA, 120 bp, synthetic construct; identical to SEQ ID NO: 8466
  source 1..120: mol_type = other DNA

SEQ ID NO: 29956 - DNA, 120 bp, synthetic construct
  source 1..120: mol_type = other DNA
ggcggcgctgcccgtgaaggaggcccagtgcaggcagatgttctcctcctgtggaggtaggaggggaacagatgaggtgcaggcagctgggcccttgaatccagcctccaccttgctcag

SEQ ID NO: 29957 - DNA, 120 bp, synthetic construct
  source 1..120: mol_type = other DNA
tgatgggcgtccaccccccactgtcctgtgggtgggaagggagtgagggtgggggcagctggccctgctcaccaaagcagcaaatggtcaagattggctgtgtgtgtgaatcccagctcc

SEQ ID NO: 29958 - DNA, 120 bp, synthetic construct
  source 1..120: mol_type = other DNA
ctttgggaggccgaggcgggcggatcacgaggtcaggagatggaggccattgtggccaacacggtgaaaccctgtctctactaaaaaatagaaaaaattagctgggcgtggtggcaggcg

SEQ ID NO: 29959 - DNA, 120 bp, synthetic construct; identical to SEQ ID NO: 8467
  source 1..120: mol_type = other DNA

SEQ ID NO: 29960 - DNA, 120 bp, synthetic construct
  source 1..120: mol_type = other DNA
agcaagaccctgtctcttaaaagaaaaaacgaacaaaaatttcctaagtctgcccactcaaaagtcctagaagcagcgacaacccaataacaataaacactcctaggaacatagattgta

SEQ ID NO: 29961 - DNA, 120 bp, synthetic construct
  source 1..120: mol_type = other DNA
tggtgggcgcctgtaatcccagctactcgggaggctgaggcaggagaatggcgtgaacctgggaggcggagcttgcagtaagctgtgatcacgccattgcactccagcctgggcaacaga

SEQ ID NO: 29962 - DNA, 120 bp, synthetic construct
  source 1..120: mol_type = other DNA
aaggccactgggccactgggtcatgtcacagccacagaggcctcttaaaggggcttcttctggacaatgatggaataattcaaagactgagaagaatgccaataaatgactaaaacacat

SEQ ID NO: 29963 - DNA, 120 bp, synthetic construct; identical to SEQ ID NO: 8468
  source 1..120: mol_type = other DNA

SEQ ID NO: 29964 - DNA, 120 bp, synthetic construct
  source 1..120: mol_type = other DNA
caagttcccgattttggctgcgtggtggaggcaggtggaaccgtcctcctcctgagggagacacgggcaaatgagcctttgggctggcaccccaaacctggtccctgactccgggggcca

SEQ ID NO: 29965 - DNA, 120 bp, synthetic construct
  source 1..120: mol_type = other DNA
tccactgcatttatgttggctccagcctgtgagggggcaggagggctggcaccagggaggcatggggcaggggaggggcctaagggcctggtgaatgaggcatggggccgggcccgtgct

SEQ ID NO: 29966 - DNA, 120 bp, synthetic construct
  source 1..120: mol_type = other DNA
agcccgccacaccgggagagggagggacaagtggtaagcaagctagggggcaggtggcacttctttcaggaaggcttctcagggccccaagctggatcagggcccctcctggcattctcc

SEQ ID NO: 29967 - DNA, 120 bp, synthetic construct; identical to SEQ ID NO: 8469
  source 1..120: mol_type = other DNA

SEQ ID NO: 29968 - DNA, 120 bp, synthetic construct
  source 1..120: mol_type = other DNA
tgctgaaggaatgggtggcactcacacagcatcaggatcaccttctgcagctcgccctgcttcacggacaggtacaactgccgagggtggaaacggagcttcttccgcctgccaagggag

SEQ ID NO: 29969 - DNA, 120 bp, synthetic construct
  source 1..120: mol_type = other DNA
ggatgaccagggccttttccagggcctcccggcctggccccagtggcagccccacggctgaaaggcagcccccattgggcagggtcagggagggccctgagctgtcaatggtgtcagcca

SEQ ID NO: 29970 - DNA, 120 bp, synthetic construct
  source 1..120: mol_type = other DNA
ggccagtacctgggctgagaagtgtctgctctcccggggacatcctgggacaggggtgggggtgcaggagctgcagtgccggccggtggggtcaccccgtcaccccgggggatggtcacc

SEQ ID NO: 29971 - DNA, 120 bp, synthetic construct; identical to SEQ ID NO: 8470
  source 1..120: mol_type = other DNA

SEQ ID NO: 29972 - DNA, 120 bp, synthetic construct
  source 1..120: mol_type = other DNA
cgcagtgaggatgggtgagaagagagcgtgaggctggggccggggactggacgccctggcacctctcccaccagcccacggccccacctctccgtccacactctcagtggccatgcactt

SEQ ID NO: 29973 - DNA, 120 bp, synthetic construct
  source 1..120: mol_type = other DNA
gatggaggaaaagaggagctgagggaggctctgcacctcacctactgggacccctggcgggtcctctcactccctccctaccccaccccgccatgccccagaacccctaaagcctggcca

SEQ ID NO: 29974 - DNA, 120 bp, synthetic construct
  source 1..120: mol_type = other DNA
ccctcgctgggcagctccagggaccccagagggacctccatgtactcactggggcctgaggagcccacaccattcactcctgacacagagacagagagagtgagagtgcgagctcacagg

SEQ ID NO: 29975 - DNA, 120 bp, synthetic construct; identical to SEQ ID NO: 8471
  source 1..120: mol_type = other DNA

SEQ ID NO: 29976 - DNA, 120 bp, synthetic construct
  source 1..120: mol_type = other DNA
tctgactgattccctgactcctcatcttcctcttcttcttcctcttcctcctcctcttcctcttcttcttcttcctcctcttcctcctcctcctcttcacttagttgttcagttagagct

SEQ ID NO: 29977 - DNA, 120 bp, synthetic construct
  source 1..120: mol_type = other DNA
tggggataagtgtgggtagcagaggagacaaagggccacataaagagagggtgcatggaatattacacagcagtgaaaaagttacagacagcaatgtgcacagatcttggtaatgtgata

SEQ ID NO: 29978 - DNA, 120 bp, synthetic construct
  source 1..120: mol_type = other DNA
accaccaatggttgctaaaaacactagacacaaagctcatgagaaactttatatgaaaggttcaggctgacatcacctgaacccactggtcaatcttatcactaacaagaaaaatgacca

SEQ ID NO: 29979 - DNA, 120 bp, synthetic construct; identical to SEQ ID NO: 8472
  source 1..120: mol_type = other DNA

SEQ ID NO: 29980 - DNA, 120 bp, synthetic construct
  source 1..120: mol_type = other DNA
attcaagcaattctcttgcctcagcctcctgagtagctgggattataggcacccgccaccacacccagctaattttcgtatttttattagagatgtgttttcaccatgttggctaggctg

SEQ ID NO: 29981 - DNA, 120 bp, synthetic construct
  source 1..120: mol_type = other DNA
gtggtggctcacgcctgtaatcccagcgctttgggaggccgaggtgggcagatcacgagatcaggagtttgagaccagcctggccaacatagtgaaaccctgcctctactaaaaatacaa

SEQ ID NO: 29982 - DNA, 120 bp, synthetic construct
  source 1..120: mol_type = other DNA
tccagcctgggtgacagtgtgagactccatctcaaaaaacaaaaacaaacaaacaaacaaacacaaagaagatggggaaacctaaatactgagagagacctaagacaaaaaaaaattttt

SEQ ID NO: 29983 - DNA, 120 bp, synthetic construct
  source 1..120: mol_type = other DNA
tcccaggttcaagcgattctcctgcctcagcctcccgagtagctggaattacaggcacgtaccactacgtccagctaattttgtatttttttcagtagagacggggtttctccatgttga

SEQ ID NO: 29984 - DNA, 120 bp, synthetic construct; identical to SEQ ID NO: 8473
  source 1..120: mol_type = other DNA

SEQ ID NO: 29985 - DNA, 120 bp, synthetic construct
  source 1..120: mol_type = other DNA
tgctgggagatgtacagatgggtcaagatggactgtgtactgataatggctggagctgtgtattgggtacatgggggctccctattctactcttttgattatgcttgcaagttttcatga

SEQ ID NO: 29986 - DNA, 120 bp, synthetic construct
  source 1..120: mol_type = other DNA
ttgaattttatataaacagcataacgtatgttttaaaaaagtgctttctggtcatttctttttttgttttctttttttaaacagtacatgtctgttaaatggtcatttcattagctgatt

SEQ ID NO: 29987 - DNA, 120 bp, synthetic construct
  source 1..120: mol_type = other DNA
agcactttgggaggccaaggtgggtggatcaactaaggtcaggagttagagaccagcctggccaacacagggaaaccccgtctctactaaaaatacaaaaattagccgggcgtggtggca

SEQ ID NO: 29988 - DNA, 120 bp, synthetic construct; identical to SEQ ID NO: 8474
  source 1..120: mol_type = other DNA

SEQ ID NO: 29989 - DNA, 120 bp, synthetic construct
  source 1..120: mol_type = other DNA
ccaccaccgtctcccactcctccagggacccggggtcccctttcgtcagggtcacttctcctgaacgccgggcagaacctaactcctctgactagaaaaagatcagaaaaattgaggcca

SEQ ID NO: 29990 - DNA, 120 bp, synthetic construct
  source 1..120: mol_type = other DNA
aggctctgcctctgctgcttaccaggccacctcctgagttcagcttcctccttttggccagatctggaagaagagagagaatggtgtggggcctatcaccgaaaccttcagaacagacca

SEQ ID NO: 29991 - DNA, 120 bp, synthetic construct
  source 1..120: mol_type = other DNA
tgtgggccgagagggagcacactgagggtcagagagcacctacagttttgcctgggttagcctggagccccaggcgggggtggggtagtgagccacacctccaaatgccatgtgaggctc

SEQ ID NO: 29992 - DNA, 120 bp, synthetic construct; identical to SEQ ID NO: 8475
  source 1..120: mol_type = other DNA

SEQ ID NO: 29993 - DNA, 120 bp, synthetic construct
  source 1..120: mol_type = other DNA
ctcacttcagcctcgaactggactcaagccattctcctgcctcagcttcctgggaagctgggattacaggcacatgtcacaatgcctaactaatgtcttcttaatttttttttttggtag

SEQ ID NO: 29994 - DNA, 120 bp, synthetic construct
  source 1..120: mol_type = other DNA
aaacttcttttagagatggggtcttggtatgctgcccaggtgaaaggaaagaaattctgacatggtacaacatagatgaaccttgaggacattatgctaagtgaaataagccagtcacaa

SEQ ID NO: 29995 - DNA, 120 bp, synthetic construct
  source 1..120: mol_type = other DNA
aggggctagggggtggagggaatggagagttatgttttaatgggtacagagtttcagttttacaagatgagttatggtgactgatgattgcacatgatgaaagtatttaataccattaaa

SEQ ID NO: 29996 - DNA, 120 bp, synthetic construct; identical to SEQ ID NO: 8476
  source 1..120: mol_type = other DNA

SEQ ID NO: 29997 - DNA, 120 bp, synthetic construct
  source 1..120: mol_type = other DNA
taattttgtatttttaatagagatggggtttcaccatgttcgtccggctggtctcgaactcctgacctcaggtgatccacctgccttggcctcccaaagtgctgggattacatgcgtgag

SEQ ID NO: 29998 - DNA, 120 bp, synthetic construct
  source 1..120: mol_type = other DNA
gattacaggcgtgagccactgcgcctggcctaaaattgttttttagatggtaaattttacgtgacactagtcccctcttatccagttcatcagcagtgatggtggcatattgttagaatt

SEQ ID NO: 29999 - DNA, 120 bp, synthetic construct
  source 1..120: mol_type = other DNA
ccaccacacctggctaatttattattattattattattttagttagagacggggtttggacatgtttaccaggctggtctcgaactcctgacctcaagtgattgccggccttggcctctg

SEQ ID NO: 30000 - DNA, 120 bp, synthetic construct; identical to SEQ ID NO: 8477
  source 1..120: mol_type = other DNA

SEQ ID NO: 30001 - DNA, 120 bp, synthetic construct
  source 1..120: mol_type = other DNA
acccattatcttcatgtgcctaatatctgtgagacaaagaacaatgtatagcagatcaatagcttgttattctaatgtaaactggtaaacaatttaggaactgcctcttcttttcctttg

SEQ ID NO: 30002 - DNA, 120 bp, synthetic construct
  source 1..120: mol_type = other DNA
tcacgtcatccaatcttcttttcctttaaaaacctacttgtgggctggttgtggtggcttgcacctgtaatcccagcactttgcgaggtcaaggcaggaagattgctgaagcccagcagt

SEQ ID NO: 30003 - DNA, 120 bp, synthetic construct
  source 1..120: mol_type = other DNA
gctcctaaaggctgtcctcaaaacctgaccaaatatactttacttaatgttaagtttgcctcagttttttcctttaggtcaacaataggtatgacccaagaaccctagaacttggtcata

SEQ ID NO: 30004 - DNA, 120 bp, synthetic construct
  source 1..120: mol_type = other DNA
aaactttacaaatagagcagtgacagatgagttccccaagggcttgctttgaggtagaaaggaagagtggtttgaaattcccttaccttgtcattatcataagagtaattaagacattaa

SEQ ID NO: 30005 - DNA, 120 bp, synthetic construct; identical to SEQ ID NO: 8478
  source 1..120: mol_type = other DNA

SEQ ID NO: 30006 - DNA, 120 bp, synthetic construct
  source 1..120: mol_type = other DNA
accctgctgctgcagctccctgggctcctggcatactcagtagcctcatagccaaactctggacagatggaggtgattttcccgcccctgtcattgacatcttggcccggctaggacagg

SEQ ID NO: 30007 - DNA, 120 bp, synthetic construct
  source 1..120: mol_type = other DNA
gaaggcaagagtcagaaatttcccaccaaccccccaggctacccagcctctcacccagcaggatccggcccccacggaggtccccatctccctcaagattctcagattcatccccaatga

SEQ ID NO: 30008 - DNA, 120 bp, synthetic construct
  source 1..120: mol_type = other DNA
cactacgaggggtgtcccccaaagagccatgaactgtagaggaagagaaaaagttcagagctaagggctcaggagatcctgtgtttagggaaggtgacggtccaattggggcccgtttta

SEQ ID NO: 30009 - DNA, 120 bp, synthetic construct; identical to SEQ ID NO: 8479
  source 1..120: mol_type = other DNA

SEQ ID NO: 30010 - DNA, 120 bp, synthetic construct
  source 1..120: mol_type = other DNA
ggctgcacgcgccgctccccctttgtcccccaggccgcggggaccccgggcaccaacccctccagcacccgctgccccccagcccggtggacggcccctcgtgcccctcacgcgtgctcc

SEQ ID NO: 30011 - DNA, 120 bp, synthetic construct
  source 1..120: mol_type = other DNA
ggattgctgcaagtcccgcccgggccccccggccccgttgcacccccggagcattgcacgggcgcgcgcttcccccgggcgcgcgcgcgggcatgcacccgcctctccccctccccttcc

SEQ ID NO: 30012 - DNA, 120 bp, synthetic construct
  source 1..120: mol_type = other DNA
gagccttaaaggagccgctacatgctttttggccattttcccctgagagcggcctcggagatggctgtgactgtcctaagctgggagctgcaagggagaattcctgtcattcctggcctc

SEQ ID NO: 30013 - DNA, 120 bp, synthetic construct; identical to SEQ ID NO: 8480
  source 1..120: mol_type = other DNA

SEQ ID NO: 30014 - DNA, 120 bp, synthetic construct
  source 1..120: mol_type = other DNA
tttatatcaggcgtgttacaccttcacacgcactagggatccaggtaagcccagcggcccgaacgtcattactgactggtgacactgcagtaagtaaaccttttttgccgaacacttcat

SEQ ID NO: 30015 - DNA, 120 bp, synthetic construct
  source 1..120: mol_type = other DNA
gatagctgtatttagggtaccatccctttaggtattacgttttggtcgagtttggaaaagatctgtatgatttcacacgcagtatttgacacaggcaggtggggcacctgaggccaatta

SEQ ID NO: 30016 - DNA, 120 bp, synthetic construct
  source 1..120: mol_type = other DNA
agacatgacctatttaccccagacaaaatatgaccaaacagactcctgcttacaatttccgtgggcaggttggccacctgtagctcatccctagcactgatcctaagtccctcaaataga

SEQ ID NO: 30017 - DNA, 120 bp, synthetic construct; identical to SEQ ID NO: 8481
  source 1..120: mol_type = other DNA

SEQ ID NO: 30018 - DNA, 120 bp, synthetic construct
  source 1..120: mol_type = other DNA
taaaaaatatgttttttcttaaaaaatactgtatgtctctactcctctccctccctcccaacagcccttcttgtgttctttcttttctaagtgccctatcccccccacccccatgactat

SEQ ID NO: 30019 - DNA, 120 bp, synthetic construct
  source 1..120: mol_type = other DNA
actttgttctccctcaaatttcagcaagcctcatactcgcagtctcatttccccagcatgcaagaactgtctcccacttccttttctgggactcagtaatcttttccccttaccactccc

SEQ ID NO: 30020 - DNA, 120 bp, synthetic construct
  source 1..120: mol_type = other DNA
tatctcgagaaatgtcagaaccttcccctgggcagccttagccaggaataaaacatttttgtcttccctcattctataggacccttttccctccctccacatatacatgcacttctaaga

SEQ ID NO: 30021 - DNA, 120 bp, synthetic construct
  source 1..120: mol_type = other DNA
agagcaagtctctccaaggaatcatcttccctctctcaggatgtgtgcatctgctcagcctcccactcttacctttctgccccagaccccccaccccccaattctcctgggccaaagagc

SEQ ID NO: 30022 - DNA, 120 bp, synthetic construct; identical to SEQ ID NO: 8482
  source 1..120: mol_type = other DNA

SEQ ID NO: 30023 - DNA, 120 bp, synthetic construct
  source 1..120: mol_type = other DNA
gatgaagtgctgcgcccgcatgtggaagaccagcttctccacgccctggaacacttccgggcacttggtgcacttgatgttctttaaggggtttccacctgagaagcccccaggcagggg

SEQ ID NO: 30024 - DNA, 120 bp, synthetic construct
  source 1..120: mol_type = other DNA
caggccctccccttctgcatcttccgacaggctatagcaggccttcaccacaccctgcggtggggctacagtgctggggggaacgctgctctgggccagctccccaaggtggccacccac

SEQ ID NO: 30025 - DNA, 120 bp, synthetic construct
  source 1..120: mol_type = other DNA
atcctcttcctcggctttcagctccaagtcttcatccagtgggaactccagcttcactggccgcaggagtggagggggtagaggaggtgggggtgggggcttcggggctggctttggggt

SEQ ID NO: 30026 - DNA, 120 bp, synthetic construct; identical to SEQ ID NO: 8483
  source 1..120: mol_type = other DNA

SEQ ID NO: 30027 - DNA, 120 bp, synthetic construct
  source 1..120: mol_type = other DNA
cacaatggtcacgtcgcagaaccgctcctctgcccggagctggttcatgttccgtagcgttgcggcctcgtggccgggcagctggaagcgcaggacttccaccccagaggccattgtggc

SEQ ID NO: 30028 - DNA, 120 bp, synthetic construct
  source 1..120: mol_type = other DNA
ccggtcttcagatttcttcctcagtttccccaaccctggggaggtgctgtccctctgagaggagggaggcgtggttctcgggggcggggcagcggcgtccacaccccccagcccagcagc

SEQ ID NO: 30029 - DNA, 120 bp, synthetic construct
  source 1..120: mol_type = other DNA
ctttaccggctgcctcattcctccgccccccccttacacgtttgcacgcgcttttcacgtcctcccccccgccgccagcacgcaccgtgcacgccctgcccccacgctcagagctccgtg

SEQ ID NO: 30030 - DNA, 120 bp, synthetic construct; identical to SEQ ID NO: 8484
  source 1..120: mol_type = other DNA

SEQ ID NO: 30031 - DNA, 120 bp, synthetic construct
  source 1..120: mol_type = other DNA
cgcggttaaagggccggacggccttgcctcctctttggccgggattatttgtccgccagagcggaaatacgttccacacccccctctttctcgctccccctcctctgtacctccaagccc

SEQ ID NO: 30032 - DNA, 120 bp, synthetic construct
  source 1..120: mol_type = other DNA
gcatcccgcagcgcgcgcgcgcacccgttctctcggctgcgggcgctgccacctgctcccaggggtggtgcgtctccggtccagctgtgccgagcgctgccctgggtgcatccgtggcac

SEQ ID NO: 30033 - DNA, 120 bp, synthetic construct
  source 1..120: mol_type = other DNA
ttgtaaagctagtaaccgcctcagcccttcaggcctgaaatatgatttcactttccacaaagccagacgatccagtgccctcaactttcctccactccatgtcagtcctttaaaatcaca

SEQ ID NO: 30034 - DNA, 120 bp, synthetic construct; identical to SEQ ID NO: 8485
  source 1..120: mol_type = other DNA

SEQ ID NO: 30035 - DNA, 120 bp, synthetic construct
  source 1..120: mol_type = other DNA
ctcgtacctacacccacttccccacctatccaagtccgcgtgaagatgccactgtttcctgccaattggatttcttttttacgtccttcaggagactagtgcgttttccatacatttcaa

SEQ ID NO: 30036 - DNA, 120 bp, synthetic construct
  source 1..120: mol_type = other DNA
tgaagatgccactgtttcctgccaattggatttcttttttacgtccttcaggagactagtgcgttttccatacatttcaattctgatgaagtttcttattatgtgttcaatatctggttt

SEQ ID NO: 30037 - DNA, 120 bp, synthetic construct
  source 1..120: mol_type = other DNA
ggccgaggcaggtggatcacctgaggtcaggagttcgagaccagcctggccaacatggtgaaaccctgactctactaaatatacaaaaattagctggacgtggtggcaggtgcctgtaat

SEQ ID NO: 30038 - DNA, 120 bp, synthetic construct
  source 1..120: mol_type = other DNA
aacaaaacaccaaaaaaggtcatgcaacaaatgattgttgaagtaattcctctttggctcagccagcatccacccataaaaagtttgttcttgagctgaaactgaattcttgaactcaag

SEQ ID NO: 30039 - DNA, 120 bp, synthetic construct; identical to SEQ ID NO: 8486
  source 1..120: mol_type = other DNA

SEQ ID NO: 30040 - DNA, 120 bp, synthetic construct
  source 1..120: mol_type = other DNA
aaaaaaataaaataaaagccctattcctgtaccaaatgaggcccactgggcaagttacttaattctctgaatcacagtgtccttatctttgtctcccccgcccatccttagctcatctga

SEQ ID NO: 30041 - DNA, 120 bp, synthetic construct
  source 1..120: mol_type = other DNA
aatgtgaggtttaaatgagcctggcatgcagtagttgctgagtaaacaatagctctgttctccttttcctaatctgggaaacggactatgaaattttcaaaagaattttattttatttta

SEQ ID NO: 30042 - DNA, 120 bp, synthetic construct
  source 1..120: mol_type = other DNA
acctcccaagtagctgggattacaggtgcccgccaccatgcctagctaattttcgcatttttagtagagacggggtttcaccatgttggccaggctggtctcgaactcctgacctcgggt

SEQ ID NO: 30043 - DNA, 120 bp, synthetic construct
  source 1..120: mol_type = other DNA
acttctcagaagaatagttcacattccagtgagagcagaaatacaaaaagctgtcaagttaagaattagagtttgtaaaattttgtttcttgtccctttcttgctacttttcctttctag

SEQ ID NO: 30044 - DNA, 120 bp, synthetic construct; identical to SEQ ID NO: 8487
  source 1..120: mol_type = other DNA

SEQ ID NO: 30045 - DNA, 120 bp, synthetic construct
  source 1..120: mol_type = other DNA
ggtcaggctcaatggttcattcctgtaatcccagcactttgggaggccgaggcaggaggatcccttgagcccagcagtttgagaccagtctgggcaacatagcaagaccccatctctaca

SEQ ID NO: 30046 - DNA, 120 bp, synthetic construct
  source 1..120: mol_type = other DNA
agtgccactgtactccagcctgggcaacagaatgagaccctgtcttttaaaaaaaaaattaggattcttagtgagctttagaaataaaatctgggctgggcactgtggcttatgcctgta

SEQ ID NO: 30047 - DNA, 120 bp, synthetic construct
  source 1..120: mol_type = other DNA
tacattttttaaaggaaataaaatttgactagggatgcaaggaataactaggagacaaaaggtccaggttccagtccatcttgaagtcatcaaggctccccaggtttcagtattctcttt

SEQ ID NO: 30048 - DNA, 120 bp, synthetic construct; identical to SEQ ID NO: 8488
  source 1..120: mol_type = other DNA

SEQ ID NO: 30049 - DNA, 120 bp, synthetic construct
  source 1..120: mol_type = other DNA
tttaaatccataggctgatgaaactgtcttacattacaacaaaacctccaacttctttctctttctcctttgatctgcactcagctctgccctcagcgcaggaaccctggtaaaaactgc

SEQ ID NO: 30050 - DNA, 120 bp, synthetic construct
  source 1..120: mol_type = other DNA
atccatctgcaaaaccaccttttctgaactcccatccatcccccttgactgctcctcaatgctggctcctcctccttcttcagagctccttatccctagctcttcggagccctctcccag

SEQ ID NO: 30051 - DNA, 120 bp, synthetic construct
  source 1..120: mol_type = other DNA
cagatccaggtctatctggggaaatggaggcagattctcccagcaccttgtgaattccagacagaaaaagactcttccacttctcgacaaatattctatcctctgagcctcaccaagtct

SEQ ID NO: 30052 - DNA, 120 bp, synthetic construct; identical to SEQ ID NO: 8489
  source 1..120: mol_type = other DNA

SEQ ID NO: 30053 - DNA, 120 bp, synthetic construct
  source 1..120: mol_type = other DNA
tagctgggcgtggtggtgcatgcctgtaatcccagctactcaggaggctgacgcaggagaattgcttgaacctgggaggcagaggttgcagtgagttgagatcacgccactgcactccag

SEQ ID NO: 30054 - DNA, 120 bp, synthetic construct
  source 1..120: mol_type = other DNA
tgttcaaaattcaaaatgtgtaagtacaattccaaattcaaattgtaaagttttgttcaaaatttaaaaaatataagagggtacaaggctgggtgtggtggcttacgcctgtaaactcag

SEQ ID NO: 30055 - DNA, 120 bp, synthetic construct
  source 1..120: mol_type = other DNA
ttcaacaggctgaagtgggaggattgattcagcccagggaggagaaggctgcagtgagccttgttcgcactgctgcactccagcttgggtgatggcgcaagaccctgtcaaaaaaaaaaa

SEQ ID NO: 30056 - DNA, 120 bp, synthetic construct; identical to SEQ ID NO: 8490
  source 1..120: mol_type = other DNA

SEQ ID NO: 30057 - DNA, 120 bp, synthetic construct
  source 1..120: mol_type = other DNA
ttctcctgcctcagcctcctgagtagctaggattacggacgtctgccaccacgcccagctaatgttttgtatttttagtagagatggggtttcaccatgttggccaggctggtcttgaac

SEQ ID NO: 30058 - DNA, 120 bp, synthetic construct
  source 1..120: mol_type = other DNA
gtgttgcccagtcattgatcttgaattcttgggttcaagtgatactcctgccttggcctcccaaagtgttgagtctacaggcatgagccaccgtgctcggcccagataaatctttttata

SEQ ID NO: 30059 - DNA, 120 bp, synthetic construct
  source 1..120: mol_type = other DNA
acctgaggtcaggagttcgaggccagcctgggccaacatggtgaaacccaatctctactaaaaacacaaaaattagctgggtgtggtgggggtgcctgtagtcccagccacttgggaggc

SEQ ID NO: 30060 - DNA, 120 bp, synthetic construct; identical to SEQ ID NO: 8491
  source 1..120: mol_type = other DNA

SEQ ID NO: 30061 - DNA, 120 bp, synthetic construct
  source 1..120: mol_type = other DNA
ctgggaaaccaaaaagttgttgatatgactggctttattgaggggatctggaacgaagcccaaaatatctctgaggtatgaccgtgtatacttcatttgcttattgtaatagtttcagta

SEQ ID NO: 30062 - DNA, 120 bp, synthetic construct
  source 1..120: mol_type = other DNA
ctggggctggccttttcactcaacattatggttttgttgacttgtgtagctgtaattcattcattgtcttttaattggatgcttatactagaatttgtttgtatacctatttacagttct

SEQ ID NO: 30063 - DNA, 120 bp, synthetic construct
  source 1..120: mol_type = other DNA
agtggtgtgatcttggctcactgcaacctccacctcccaggcttagcctcccgccttagcctcccgagtagctaggactacaggtatgcaccaccatgcctggctaatttttgcattttt

SEQ ID NO: 30064 - DNA, 120 bp, synthetic construct; identical to SEQ ID NO: 8492
  source 1..120: mol_type = other DNA

SEQ ID NO: 30065 - DNA, 120 bp, synthetic construct
  source 1..120: mol_type = other DNA
ttcaatttctccatatccttgccaacagttgttattttctgtttttttttgttttttgtttttttttgagacagcgtctcactctgttgccccggctagagtacagtggtgcgatcttgg

SEQ ID NO: 30066 - DNA, 120 bp, synthetic construct
  source 1..120: mol_type = other DNA
ggtttcaccatattggccaggctggtctcgaactcctgaccttgtgatccgcccacctcagcctcccaaagtgctgggattacagacgtgagccaccgcgcctggcttgttttttttttt

SEQ ID NO: 30067 - DNA, 120 bp, synthetic construct
  source 1..120: mol_type = other DNA
gagaaatatctattcaagtcctttgctcatttttttttttttgacaaggtctcactctgttgcccaggctggaatgcacaatcatgactcactgcaggcttgacctccccaggaacaggt

SEQ ID NO: 30068 - DNA, 120 bp, synthetic construct; identical to SEQ ID NO: 8493
  source 1..120: mol_type = other DNA

SEQ ID NO: 30069 - DNA, 120 bp, synthetic construct
  source 1..120: mol_type = other DNA
gatgaatcacttgaggtcaggagttcaagaccagcctggccaacatgatgaaaccccatctctactaaaaatacaaaaattagccaggcgtggtggcgcatgcctgtaatcccagctact

SEQ ID NO: 30070 - DNA, 120 bp, synthetic construct
  source 1..120: mol_type = other DNA
aaaaataaataaataaaatgaattgggctgggtgtggtggctcatgcctgtaatcccagcactttgggagaccaaagcgggtggatcacctgaagtcaggagttcgagaccagcctgagc

SEQ ID NO: 30071 - DNA, 120 bp, synthetic construct
  source 1..120: mol_type = other DNA
gaggttgcagtgagccgagatggcgccactgcactccagcctaggagacagagggagactcttgtctcaaaaaataaacaaataaatacataaaaaaaaaaataaaatgaatcatgaagg

SEQ ID NO: 30072 - DNA, 120 bp, synthetic construct; identical to SEQ ID NO: 8494
  source 1..120: mol_type = other DNA

SEQ ID NO: 30073 - DNA, 120 bp, synthetic construct
  source 1..120: mol_type = other DNA
ctccgcctcccgggttcaagcaattctcctgcctcagcctcccaagtagctgggactacaggcacatgccaccacgcctggctaatttttgtatttttagtagaaatggggtttcaccat

SEQ ID NO: 30074 - DNA, 120 bp, synthetic construct
  source 1..120: mol_type = other DNA
aatttgagaccgggtcactacgttgccaaggctggtctctaactcctgggctcaagcgatccgcccactgcagtctcccaaagtgctgggattacaggcgttgagccaccgtgcctggcc

SEQ ID NO: 30075 - DNA, 120 bp, synthetic construct
  source 1..120: mol_type = other DNA
ctgttcagcttccctgctaatgctaaactattttctgaagcagttgtacaccagccatgagactgttgcttcttgggaaaaaagatataaaggcttcaaatttaatggatattattcagt

SEQ ID NO: 30076 - DNA, 120 bp, synthetic construct; identical to SEQ ID NO: 8495
  source 1..120: mol_type = other DNA

SEQ ID NO: 30077 - DNA, 120 bp, synthetic construct
  source 1..120: mol_type = other DNA
tctactgaaaatacaaaaaattaaccagggtgatggtgtgtgcctgtaatcccagctactcaggaggctgaggcaggagaatcgcttgaacctgggaggcagaggctgcagtgagctgag

SEQ ID NO: 30078 - DNA, 120 bp, synthetic construct
  source 1..120: mol_type = other DNA
ggccaagcgcagtggctcacgcctgtaatcccagcactttaggagggcaaggtgggaggattacttgagcccaggatttcaagaccactctgggtaagatggtgaaaccctgtttccaca

SEQ ID NO: 30079 - DNA, 120 bp, synthetic construct
  source 1..120: mol_type = other DNA
tccaggctgaacttgaactcccagtctcaagtgattctcctgcctcagcctcctgggtatctgggactacaagcatgccaccatgcctgactgtagtctggatacttcagtgagggcatt

SEQ ID NO: 30080 - DNA, 120 bp, synthetic construct
  source 1..120: mol_type = other DNA
atggtgaaccgctatctctactaaaaatacaaaaattagctgggtgtggtggcaggcacctgtaatcccagctagttgggaggctgaggcacaagaatcatttgaacctggaaggcagag

SEQ ID NO: 30081 - DNA, 120 bp, synthetic construct; identical to SEQ ID NO: 8496
  source 1..120: mol_type = other DNA

SEQ ID NO: 30082 - DNA, 120 bp, synthetic construct
  source 1..120: mol_type = other DNA
tcgtgatctgcccgccttggcctccagaagtgctgggattacaggcatgagccaccgtgcctggcccttttttttttaagacggaatctcgctctgtcacccaggcgcgatcttggctca

SEQ ID NO: 30083 - DNA, 120 bp, synthetic construct
  source 1..120: mol_type = other DNA
tatgttggccaggatggtctcaatctcatgaccttgtgatccgcctgcctcggcctctcaaagtgctgggatttcaggtgtgagccaccacgcccagccaggagattactcttgatattg

SEQ ID NO: 30084 - DNA, 120 bp, synthetic construct
  source 1..120: mol_type = other DNA
ggaggccgaggtgggcggatcatgaggtcaggagttcgagaccagcctggccaatatggtgaaaccccatctctactaaaaatacaaaaattagctgggcgtagtggtgtatgcctgtag

SEQ ID NO: 30085 - DNA, 120 bp, synthetic construct; identical to SEQ ID NO: 8497
  source 1..120: mol_type = other DNA

SEQ ID NO: 30086 - DNA, 120 bp, synthetic construct
  source 1..120: mol_type = other DNA
gaacccgggaggcggagcttgcagtgagccaagatcacaccactgcactccagcctgggcgacagagcaagactccatcacaacaacaacaacaacaacaaaaacaatgaacaagcagtc

SEQ ID NO: 30087 - DNA, 120 bp, synthetic construct
  source 1..120: mol_type = other DNA
agcccctgttgtcttgccaggactctaaatgtctcttaactggtcttccagcccctacatactgattccagaataatatttctgaaatgcaaatcaaatcatatcacttccttatctaaa

SEQ ID NO: 30088 - DNA, 120 bp, synthetic construct
  source 1..120: mol_type = other DNA
ctgaacttgcagttcctttaatgcgctctggggtttcattgctcacctggatgcttgcatctcttccttgtcaggtaaacactcatcttttaaggctatctcaagttcattgatgaaacc

SEQ ID NO: 30089 - DNA, 120 bp, synthetic construct; identical to SEQ ID NO: 8498
  source 1..120: mol_type = other DNA

SEQ ID NO: 30090 - DNA, 120 bp, synthetic construct
  source 1..120: mol_type = other DNA
gcctcttgcagtggcctaacttcaggagggctgaggaattccatcctatcatgtgcctggaaggcagaaaacgggaaaattcatgaagagcctcaatggctgcctcaactcggtgtagcg

SEQ ID NO: 30091 - DNA, 120 bp, synthetic construct
  source 1..120: mol_type = other DNA
ataactctgtgttaatgttacagtctgggtttgctggcgtggaaggagtttgtggaagaagggcagtagtttatagggagaggaggatggaaagggatgatcttaattttggtgaccctg

SEQ ID NO: 30092 - DNA, 120 bp, synthetic construct
  source 1..120: mol_type = other DNA
atgttggccgggtatggtggctcacgcctgtaatcccagcactttgggaggctgaggtgggtggatcacctgaggtcaggagttcgagaccagcctggccaacacgacgaaaccctgtct

SEQ ID NO: 30093 - DNA, 120 bp, synthetic construct; identical to SEQ ID NO: 8499
  source 1..120: mol_type = other DNA

SEQ ID NO: 30094 - DNA, 120 bp, synthetic construct
  source 1..120: mol_type = other DNA
tttttttttttttttttgagacagagttttgctccttttgcccaggctggagttgtagtgagctgagatagcgccactgtactccagcctgggtgacagggcgagactccatctcaacaa

SEQ ID NO: 30095 - DNA, 120 bp, synthetic construct
  source 1..120: mol_type = other DNA
tgaaacctcgtctctactaaaaatacaaaaattagccggcgtgctggtgggcacttgtaatccgagctacttgggaggctgaggcaggagaatcgcttgaacccaggaggcggaggttgc

SEQ ID NO: 30096 - DNA, 120 bp, synthetic construct
  source 1..120: mol_type = other DNA
tatagttcaaaagaaacattttattttggtaaaagccaagaagtgaaagataaatagttttgcagccataaaaaaaaaaaattaaatcatgtcctttgcagcaacatggatggagctgga

SEQ ID NO: 30097 - DNA, 120 bp, synthetic construct; identical to SEQ ID NO: 8500
  source 1..120: mol_type = other DNA

SEQ ID NO: 30098 - DNA, 120 bp, synthetic construct
  source 1..120: mol_type = other DNA
cctggccaacatggtgaaaccccgtctctactaaaaatgcaaaaattagctgggcgtggtgtcagccgtttgtaatcccagctacttgggaggctgaggcaggagaattgcttgaacccg

SEQ ID NO: 30099 - DNA, 120 bp, synthetic construct
  source 1..120: mol_type = other DNA
tgaaaaaagaaaaaagagaaatattttaaaatgaaaaatttgagcttttccgtaaaaaaatttttaatgaattcccagcactttgggaggcctaggttggaggattgcttgaggctagtt

SEQ ID NO: 30100 - DNA, 120 bp, synthetic construct
  source 1..120: mol_type = other DNA
ggaggattgtggaagcccaggagtttgaggctgccgtgagctatgatcaggtctctgcactccagcctgggcaacaaagcaagaccccatctcaaaaaaaaaatattcctcgaggccagg

SEQ ID NO: 30101 - DNA, 120 bp, synthetic construct; identical to SEQ ID NO: 8501
  source 1..120: mol_type = other DNA

SEQ ID NO: 30102 - DNA, 120 bp, synthetic construct
  source 1..120: mol_type = other DNA
ggcggatcacgaggtcaggagttcaagaccagcctggccaagttggtgaaaccccatctctactaaaaatacaaaaaaattagctgggtgtagtggcgggcacctgtaatcccagctact

SEQ ID NO: 30103 - DNA, 120 bp, synthetic construct
  source 1..120: mol_type = other DNA
aaggaatggttggtgggtggtatatagacatgaacccagaccgtctatgaaccgagaccgtctatgaactgaagctagatgatggatacatacatgaaagttcattttactattctctct

SEQ ID NO: 30104 - DNA, 120 bp, synthetic construct
  source 1..120: mol_type = other DNA
agtagggtatttcttttcttttcttttcttttcttttttttttttttctggagacggagttttgttcttgttgcccaggttggagtgcagtggtgcaatctcagctcacagcaacctctg

SEQ ID NO: 30105 - DNA, 120 bp, synthetic construct; identical to SEQ ID NO: 8502
  source 1..120: mol_type = other DNA

SEQ ID NO: 30106 - DNA, 120 bp, synthetic construct
  source 1..120: mol_type = other DNA
acttttccagtgaaattatatacacacagagagcatatgtggctactatcctctttccctcctttttttgcataaatggtggcatcccatacatacagttctgaatgtctatctagttta

SEQ ID NO: 30107 - DNA, 120 bp, synthetic construct
  source 1..120: mol_type = other DNA
tgtcccctattaatggacgtgggagtttccaaacatttcctcttggtaacagtgaatgctaaagcaaatatcctggtaccttttatacctgtagggtagccgatcttctccttttgatgg

SEQ ID NO: 30108 - DNA, 120 bp, synthetic construct
  source 1..120: mol_type = other DNA
taaggctacgaaatagctaatgaatttgccaagccaaacctgaggttccaggctgtcttaagtcaaagcctgaattcctcataccacactggggctggggccagagacggggcaggagga

SEQ ID NO: 30109 - DNA, 120 bp, synthetic construct; identical to SEQ ID NO: 8503
  source 1..120: mol_type = other DNA

SEQ ID NO: 30110 - DNA, 120 bp, synthetic construct
  source 1..120: mol_type = other DNA
ccctggcccatcctcagctgacccctgagcacctgagttgtgtttaccaccctcttacctgggttacccagggcagctcccctgatgggtagcaagaagtgggtgataacatgcaccatg

SEQ ID NO: 30111 - DNA, 120 bp, synthetic construct
  source 1..120: mol_type = other DNA
tgaaagagatatggcgcctacaggaggtcagggacaggccttctgtttcttgggaggccctaccccaccccttagttcctcgttccattctcaggaattgtttgtgcaatggatggacaa

SEQ ID NO: 30112 - DNA, 120 bp, synthetic construct
  source 1..120: mol_type = other DNA
gaggctctaagggtgatgtatgtggagattcctcaagatcatagttgggcaatcacttcaaagttagtaggcagtgcctgctaggatgggggatggtgtgtgtaccgaggaacttagcag

SEQ ID NO: 30113 - DNA, 120 bp, synthetic construct; identical to SEQ ID NO: 8504
  source 1..120: mol_type = other DNA

SEQ ID NO: 30114 - DNA, 120 bp, synthetic construct
  source 1..120: mol_type = other DNA
ttggaaatgcaaggggctggggtagacttcagggatgcgcaaggagctcccagcagtcactaaagagaagacgtgaggaagaggcactaccacttggtggctatgagtgtggacccagga

SEQ ID NO: 30115 - DNA, 120 bp, synthetic construct
  source 1..120: mol_type = other DNA
acctgtgtcataagcttgctgtgaggattaagtgagcacctacatttaagacttaaaaatactgtctggcactatgtcctgctaatatgaagtcttcctcccccagaagcagacctggag

SEQ ID NO: 30116 - DNA, 120 bp, synthetic construct
  source 1..120: mol_type = other DNA
tgggtgagtggaggtcaatcccactcaggaaccctggagtggtgcagagttatcccatggtccagggtgagggagcccagtatttataccaatcagtcattggttgaaggccttaattct

SEQ ID NO: 30117 - DNA, 120 bp, synthetic construct; identical to SEQ ID NO: 8505
  source 1..120: mol_type = other DNA

SEQ ID NO: 30118 - DNA, 120 bp, synthetic construct
  source 1..120: mol_type = other DNA
cggcctctgctatatgccacgtttcctcagaaattttcagctgcaaggtgctgagctctccaggggagaataaggcatcctgagaggccatcagagcatcatttctgatttttaaactct

SEQ ID NO: 30119 - DNA, 120 bp, synthetic construct
  source 1..120: mol_type = other DNA
tctctactaaaaatacaaaaattagctgggcatggtagcacatgcctgtaatcccagctacttgggagtctgaggcaggagaatcccttgaacccaggaggtggaggttgcagtgagccg

SEQ ID NO: 30120 - DNA, 120 bp, synthetic construct
  source 1..120: mol_type = other DNA
gtattggttttttctctttggaattgtacccttggaagcagatattagaagcctagaattgataagaagaaatttggacaagatggaagaagctggcaggagaggcatgtctgtttttta

SEQ ID NO: 30121 - DNA, 120 bp, synthetic construct
  source 1..120: mol_type = other DNA
gatattattcacctgcttccctctacctggagtgaaaacacggttacatttgctgggcttttgaatggtacaagaaatagagaagccaaggtcgccctcatctggtggggtctactgaaa

SEQ ID NO: 30122 - DNA, 120 bp, synthetic construct; identical to SEQ ID NO: 8506
  source 1..120: mol_type = other DNA

SEQ ID NO: 30123 - DNA, 120 bp, synthetic construct
  source 1..120: mol_type = other DNA
cttgctctgtcacccaggctggagtgcagtggcacgatctccgctcactgcaagctccatctcccgggttcacgccattcgcctgcctcagcctcccgagtagctgggactacaggcgcc

SEQ ID NO: 30124 - DNA, 120 bp, synthetic construct
  source 1..120: mol_type = other DNA
gtgctgggattacaggcgtaagccaccgcacccggcctctgaggctcttatttatttattttttttgagatggagtctcgctctgtctcccaggctggagtgcagtagcgcgatctcagc

SEQ ID NO: 30125 - DNA, 120 bp, synthetic construct
  source 1..120: mol_type = other DNA
gggtttcaccgtgttagccaggattgtctcgatctcctgaccttgtgatccacccgcctcggcctcccaaagtgctgggattacaggcgtgaaccaccgcgcccggcctctgaggctctt

SEQ ID NO: 30126 - DNA, 120 bp, synthetic construct; identical to SEQ ID NO: 8507
  source 1..120: mol_type = other DNA

SEQ ID NO: 30127 - DNA, 120 bp, synthetic construct
  source 1..120: mol_type = other DNA
tgggaagggaagaagttttatacattgaggagtaaacacttctccttaagaacatactctgtgggcccagaaaacttgggagttttattacttaagcaggaagagagaatgaattctgcc

SEQ ID NO: 30128 - DNA, 120 bp, synthetic construct
  source 1..120: mol_type = other DNA
tagtgatttgaatgttcagtcaggttaggcttcattacgttctggtaaccaacaacctagaaatatttgttgccataggagggcttacaaaatatagccatcagtctctcctattctgat

SEQ ID NO: 30129 - DNA, 120 bp, synthetic construct
  source 1..120: mol_type = other DNA
gtgatgttatgtgacttttggggctaggcctcgagagaccttgcagcttatgttttggattcctcagaagttgtcctgagactgccatgctatgagggctagggaggaaggacctgctgt

SEQ ID NO: 30130 - DNA, 120 bp, synthetic construct; identical to SEQ ID NO: 8508
  source 1..120: mol_type = other DNA

SEQ ID NO: 30131 - DNA, 120 bp, synthetic construct
  source 1..120: mol_type = other DNA
acaggcgtatgccaccacgcccagctaatttttgtatttttagtagagatggggtttcaccatgttggtcaggctggtctctaactcctgaactcaggtgatccccctgcctcggcctcc

SEQ ID NO: 30132 - DNA, 120 bp, synthetic construct
  source 1..120: mol_type = other DNA
agagcagggtgaagactacattgagcttccatcaggaagtgatacatatcacttgtactcacatcttattggctaaaacaagtggctggggaaatcctatcctaccatgtgattgaaaga

SEQ ID NO: 30133 - DNA, 120 bp, synthetic construct
  source 1..120: mol_type = other DNA
agtggctggggaaatcctatcctaccatgtgattgaaagaagacaaggctacagtatttgtgaacatccttaaataccccccacctttacgatagtttatttctctcttgtaacaatcta

SEQ ID NO: 30134 - DNA, 120 bp, synthetic construct
  source 1..120: mol_type = other DNA
ctaggtttatattccagcccatgaaaagaaaaggcacactgcctttttattttagggacataacttggaaatgacatacataagttctactaacatcccattagccagaaccaagtcacc

SEQ ID NO: 30135 - DNA, 120 bp, synthetic construct; identical to SEQ ID NO: 8509
  source 1..120: mol_type = other DNA

SEQ ID NO: 30136 - DNA, 120 bp, synthetic construct
  source 1..120: mol_type = other DNA
aagtgattctcctgcctcagcctcccgagtagctgggattacaggcccctgccaccacacccggctaattttttgtaattttagtagagacggggtttcaccatgttggccgggctggtc

SEQ ID NO: 30137 - DNA, 120 bp, synthetic construct
  source 1..120: mol_type = other DNA
ttgcccaggctggagtgcagtggcacaatcttggctcactgcaacctccatcttctaggttcaatcagttctctaaggactcacttataaatcaaaagggtttttacgaacctaaatgat

SEQ ID NO: 30138 - DNA, 120 bp, synthetic construct
  source 1..120: mol_type = other DNA
tttctttgcttcctgcatttcatacaagtgtaggttatgatttaaaggcatatcccagcccccgcaaaagttttattcctttgagtaaccaaccccaaatgtatttactttgccagttgg

SEQ ID NO: 30139 - DNA, 120 bp, synthetic construct; identical to SEQ ID NO: 8510
  source 1..120: mol_type = other DNA

SEQ ID NO: 30140 - DNA, 120 bp, synthetic construct
  source 1..120: mol_type = other DNA
ctttagactattgactattcacacaagagcaaggtgcatgtgtgcacacacgagcccaaatatgtgtttgcctgcgtgtttgtgagcatgcgtgtatggtgcacatgtgcacgcatgggt

SEQ ID NO: 30141 - DNA, 120 bp, synthetic construct
  source 1..120: mol_type = other DNA
ttattatttccctaacagaagaccatcccccttgccactccctggtttttcttctctggcagcaatgaagcagctgctgacccagctctagttttcgggaagtcagatgaccttttccct

SEQ ID NO: 30142 - DNA, 120 bp, synthetic construct
  source 1..120: mol_type = other DNA
tgtgtgtgaggttggtgctcccagcttgaattcccatgtgtgaaacagtctcttttgctttccttttctcatctgtgtcttccttctttctccattgctgtctccttgttcccacggctc

SEQ ID NO: 30143 - DNA, 120 bp, synthetic construct; identical to SEQ ID NO: 8511
  source 1..120: mol_type = other DNA

SEQ ID NO: 30144 - DNA, 120 bp, synthetic construct
  source 1..120: mol_type = other DNA
aattgccagtagcaaggaattgggaacaggtcttgatggagactgtggggtactaaagccagggatgactttttatgtacaattgactgcctagtagtgaccattcagaacagatgctga

SEQ ID NO: 30145 - DNA, 120 bp, synthetic construct
  source 1..120: mol_type = other DNA
ttggcaatattcaatcagttgccaaaaacagcaatttcacatgttgcaacctaatatttcagtgttttgacagccagttgaccattcccatgcattccagcataaaatcacctgcttaat

SEQ ID NO: 30146 - DNA, 120 bp, synthetic construct
  source 1..120: mol_type = other DNA
cctatcccgtgggtggcaatgtgagcttcgagtgtgaggatggcttcatattgcggggctcgcctgtgcgtcagtgtcgccccaacggcatgtgggatggagaaacagctgtgtgtgata

SEQ ID NO: 30147 - DNA, 120 bp, synthetic construct; identical to SEQ ID NO: 8512
  source 1..120: mol_type = other DNA

SEQ ID NO: 30148 - DNA, 120 bp, synthetic construct
  source 1..120: mol_type = other DNA
ggagagagtcaagtactgtgctttaatgccttgcctttaaagccaggtttgggttccaagccctactctgactttgacagactttgggaaggctatttaacctttctagccctcagtttt

SEQ ID NO: 30149 - DNA, 120 bp, synthetic construct
  source 1..120: mol_type = other DNA
gcactttgggaggccaaggggggtggatcacaaggtcaggagtttgagaccagcttggccaacatggtgaaaccccgtctctagtaaaaatacaaaaattagccgggtgcggtggcgcat

SEQ ID NO: 30150 - DNA, 120 bp, synthetic construct
  source 1..120: mol_type = other DNA
tgtctcaaaaaaaaaaaaaaaaaaaaaaaatgccagcctcggtgcctcacgcctgtaatcccagcactttgggaggctgaggtgggtggatcacctgaggtcaggagattgagaccagcc

SEQ ID NO: 30151 - DNA, 120 bp, synthetic construct; identical to SEQ ID NO: 8513
  source 1..120: mol_type = other DNA

SEQ ID NO: 30152 - DNA, 120 bp, synthetic construct
  source 1..120: mol_type = other DNA
ctgcctcagcctcccaagaagctgggattacaggcatgcgccaccatgcctcggtaattttctattcttagtagggacagggtttctccatgttggccaggctggtctcaaactcctgac

SEQ ID NO: 30153 - DNA, 120 bp, synthetic construct
  source 1..120: mol_type = other DNA
cttcaaactcctgagctcaagtgatcttcctacctcagcctcctcagtagctgggaatgcaggcatgtgccaccacacctggccataagcacttttgtcatagttattgctgcccctgtg

SEQ ID NO: 30154 - DNA, 120 bp, synthetic construct
  source 1..120: mol_type = other DNA
cttggatcatggttcttagcacatcatacagaagacacggagtccacaagatggcaggaccaccttcacctagtggcccagaccatggatccccactcatgcccttgggttttggcaaat

SEQ ID NO: 30155 - DNA, 120 bp, synthetic construct; identical to SEQ ID NO: 8514
  source 1..120: mol_type = other DNA

SEQ ID NO: 30156 - DNA, 120 bp, synthetic construct
  source 1..120: mol_type = other DNA
tggcatcctttgttctatattctgcctgtgagatttatccatgctgttgtgtgtatcagtactttgttcttttttattgctgtgtagtattccattatatgggtatattacaatttatcc

SEQ ID NO: 30157 - DNA, 120 bp, synthetic construct
  source 1..120: mol_type = other DNA
ttttttttttaattgatcattcttgggtgtttctcacagagggggatttggcagggtcacaggacaatagtggagggaaggtcagcagataaacaagtgaacaaaggtctctggttttcc

SEQ ID NO: 30158 - DNA, 120 bp, synthetic construct
  source 1..120: mol_type = other DNA
tgcaccgctcttaatccattcaaccctgagtggatacagcacatgtttcagagagcacagggttgggggtaaggtcaccgatcaacaggatcccaaggcagaagaatttttcttagtaca

SEQ ID NO: 30159 - DNA, 120 bp, synthetic construct; identical to SEQ ID NO: 8515
  source 1..120: mol_type = other DNA

SEQ ID NO: 30160 - DNA, 120 bp, synthetic construct
  source 1..120: mol_type = other DNA
tgacccccccacctccctcccggacagagtggctggccgggcagaggggctcctcacttcccagcaggggcggccgggcagaggcgcccctcacttcccggatggggcggctggccgggc

SEQ ID NO: 30161 - DNA, 120 bp, synthetic construct
  source 1..120: mol_type = other DNA
gccgggctgggggctgacccccccacctccctcccggacggggcggctggccgggcggggggctgacccccccacctccctcccggaccaggtggctgctgggcggaggggctcctcact

SEQ ID NO: 30162 - DNA, 120 bp, synthetic construct
  source 1..120: mol_type = other DNA
cggatggggcggccgggcagaggtgctccccacatctcagacgatgggcggcagggcagagacgctcctcacttcccagatgtgatggcggccgggaagaggcgctcctcacttcctaga

SEQ ID NO: 30163 - DNA, 120 bp, synthetic construct
  source 1..120: mol_type = other DNA
gtggcggccgggcagaggctgcaatctcggcactttgggaggccaaggcaggctgctgggaggtggaggttgtagcgagccaagatcacgccactgcactccagcctgggcatcattgag

SEQ ID NO: 30164 - DNA, 120 bp, synthetic construct; identical to SEQ ID NO: 8516
  source 1..120: mol_type = other DNA

SEQ ID NO: 30165 - DNA, 120 bp, synthetic construct
  source 1..120: mol_type = other DNA
tgcacttgcttctcttgagtaaatgatctaaatgtggaattgtcacatcacaggctggcatatgtttagttgtagtagaggctgagaaagtttcacccacgtacatgccagcaaggtaac

SEQ ID NO: 30166 - DNA, 120 bp, synthetic construct
  source 1..120: mol_type = other DNA
gaaggagtggagggaccatcagctgacttcttccctgggtctctgggggctctgggacagacatgggtgcatccctgggttggaactgggaagcttctgctggcaactgaggccgctgag

SEQ ID NO: 30167 - DNA, 120 bp, synthetic construct
  source 1..120: mol_type = other DNA
catggggacaaggtccgctatcgctgctcctcgaatcttgtgctcacggggtcttcggagcgggagtgccagggcaacggggtctggagtggaacggagcccatctgccgccgtgagtag

SEQ ID NO: 30168 - DNA, 120 bp, synthetic construct; identical to SEQ ID NO: 8517
  source 1..120: mol_type = other DNA

SEQ ID NO: 30169 - DNA, 120 bp, synthetic construct
  source 1..120: mol_type = other DNA
ccacatttctccagaaagcctgggccgtaaaatccaaatccagcgctctggtcatctgaacctctacctgctcctggactgttcgcagagtgtgtcggaaaatgactttctcatcttcaa

SEQ ID NO: 30170 - DNA, 120 bp, synthetic construct
  source 1..120: mol_type = other DNA
ccacctcctccaagaagtcttctcagattatactcatgccatgtaggaatcatgaattcaatttatacaatcataatttttattccacaagcactgttgggacactgtgctggggctggg

SEQ ID NO: 30171 - DNA, 120 bp, synthetic construct
  source 1..120: mol_type = other DNA
cctgtggaataatttaaatcagattaataatttaatatttaataatttccttttaaaacttcaacattttgtgcaggctttaaaatgtgtgtgatagactgggcatggtggctagtgcct

SEQ ID NO: 30172 - DNA, 120 bp, synthetic construct; identical to SEQ ID NO: 8518
  source 1..120: mol_type = other DNA

SEQ ID NO: 30173 - DNA, 120 bp, synthetic construct
  source 1..120: mol_type = other DNA
cttttcacaatacttcatgtaacattatagatggttttccctcccagctacattttaaagagggcagtttctgtgctctcttgggactcaaaattaagtaactcattgcactgcgaggcg

SEQ ID NO: 30174 - DNA, 120 bp, synthetic construct
  source 1..120: mol_type = other DNA
atccataaaataggggtcatcatgcccctcacagggtggagtgaagagagtctgtcaaagagaaagatgttcaacaaaggtttcttccttagctgctgctgttccttatttttattatta

SEQ ID NO: 30175 - DNA, 120 bp, synthetic construct
  source 1..120: mol_type = other DNA
cctgagtagctgggattataggtgcttgccaccataccaggctaatttttgtatttttagtagagatgggttttgccatgttggtcaggctggtctcgaactcctgacctcaggtgatcc

SEQ ID NO: 30176 - DNA, 120 bp, synthetic construct; identical to SEQ ID NO: 8519
  source 1..120: mol_type = other DNA

SEQ ID NO: 30177 - DNA, 120 bp, synthetic construct
  source 1..120: mol_type = other DNA
catcacgtgatggtgatgagagaggagaagatggaccctctcagggcctgcaaacaaattctggatgagttaaaaagagagtgaggcctcttggtggcacctgagtcccacgagtctggg

SEQ ID NO: 30178 - DNA, 120 bp, synthetic construct
  source 1..120: mol_type = other DNA
accacactgtctggtttgcatggctgcacactgccatctccccatgtcattagccacccatacaccatgtaaagtgcctggttggcacttagcaaatggctgaagccactcaaggttttg

SEQ ID NO: 30179 - DNA, 120 bp, synthetic construct
  source 1..120: mol_type = other DNA
ggcttgagtgcagtggcacgatcttggctcactgcaacctctgcctccagggttcaggcaattctcctgcctcagcttcccgagtagctgagatttcgggcacctgccaccatgcctggc

SEQ ID NO: 30180 - DNA, 120 bp, synthetic construct; identical to SEQ ID NO: 8520
  source 1..120: mol_type = other DNA

SEQ ID NO: 30181 - DNA, 120 bp, synthetic construct
  source 1..120: mol_type = other DNA
accccatctctactaaaaatacaaaaaattagctgggcatggtggctggcacctgtaatcccagctacttgggagactgaggcatgagaatcacttgaactggggaggtggaggttgcag

SEQ ID NO: 30182 - DNA, 120 bp, synthetic construct
  source 1..120: mol_type = other DNA
gtaggtgggaagtttctaagagagtccttccttttggcatattccagatcatgaaaatggaactgggactaacacctatgcggccttaaacagtgtctatctcatgatgaacaaccaaat

SEQ ID NO: 30183 - DNA, 120 bp, synthetic construct
  source 1..120: mol_type = other DNA
gtctctgagtgtgtctggaatagtggaaggggcaccaatatggggtcagaagccctgaattctgattctccctctgcctgccactttgggccccagttttgtttttgtttttagagatgg

SEQ ID NO: 30184 - DNA, 120 bp, synthetic construct; identical to SEQ ID NO: 8521
  source 1..120: mol_type = other DNA

SEQ ID NO: 30185 - DNA, 120 bp, synthetic construct
  source 1..120: mol_type = other DNA
gcaggcgcctgtaatcccagctacttgggaggctgaggcaggagaattgcttgaacctgggaggcagaggttgcagtgagccaagatcatgccactgcactccagcctgggtgacagacc

SEQ ID NO: 30186 - DNA, 120 bp, synthetic construct
  source 1..120: mol_type = other DNA
gcaatgatgatcatgatggctgtcctcctttccttacacaatttttatggaaagctatttaagttgcctgtgtgaaagtgctctgtgttagctcttgttaccatctgggaggtaacttgg

SEQ ID NO: 30187 - DNA, 120 bp, synthetic construct
  source 1..120: mol_type = other DNA
ctccaggacttagtatataaaatgaggatacccactctacctggggtttcatgagaattaaatgagttaaagtataggaagcacctggcctggtgcctggaatgtagaacatttcagtaa

SEQ ID NO: 30188 - DNA, 120 bp, synthetic construct
  source 1..120: mol_type = other DNA
tgcgatctcggctcactgcaacctctgcctcccaggctgaagcaattctcgtgcctcagcctccagagtagctgggactacaggcatgtgtcaccatgcctggctaatttttatttttat

SEQ ID NO: 30189 - DNA, 120 bp, synthetic construct; identical to SEQ ID NO: 8522
  source 1..120: mol_type = other DNA

SEQ ID NO: 30190 - DNA, 120 bp, synthetic construct
  source 1..120: mol_type = other DNA
cacacctggctaattttttgtggttttagtagagacagggtttcaccatgttgcccaggctggtctggaactcctgagctcaggcaatccgccttcttcggtctcccaaagtgctaggat

SEQ ID NO: 30191 - DNA, 120 bp, synthetic construct
  source 1..120: mol_type = other DNA
gatattacctagaagaattctttattctctttgttctaggaaagtccaatatgggtggctctcccaagacagctgttgaccatatcagagagatcctgaacatcaaccagaagaggaatg

SEQ ID NO: 30192 - DNA, 120 bp, synthetic construct
  source 1..120: mol_type = other DNA
ctgcgttgttctgtacaaaggcaactcatgttgaagagcctggggtcaaactactgcccatggtctcaaccttaccttctttttttttttttttttttttaagacagtgtctcactgaca

SEQ ID NO: 30193 - DNA, 120 bp, synthetic construct; identical to SEQ ID NO: 8523
  source 1..120: mol_type = other DNA

SEQ ID NO: 30194 - DNA, 120 bp, synthetic construct
  source 1..120: mol_type = other DNA
gattacaggtgtgtgccaccatgcccggctcatttttgcatttttaatagagacagagtttcaccatgttggcagtctggtgtcaaacccctggcctcaagtgatccgcctgccttggtc

SEQ ID NO: 30195 - DNA, 120 bp, synthetic construct
  source 1..120: mol_type = other DNA
gctgtggccatgggcagtttcttcatctgcaaaaggggagtagtactaggacccagctcacaagctgacaggggaagatgctcagacaaacactgcctgcctggcatagaaaaatgccca

SEQ ID NO: 30196 - DNA, 120 bp, synthetic construct
  source 1..120: mol_type = other DNA
ggtggttgctctttcagcagcacagctggctaactaaggctttggcagttgcagcctctaaaggaaaaattcctcaggttcagactaaacacaaattgcactgacctttgatcagaaagt

SEQ ID NO: 30197 - DNA, 120 bp, synthetic construct; identical to SEQ ID NO: 8524
  source 1..120: mol_type = other DNA

SEQ ID NO: 30198 - DNA, 120 bp, synthetic construct
  source 1..120: mol_type = other DNA
ctcttggtccacctaagcaccttgctttttacacacaacgcggggctctctgagaacaaaaatgggccacaaggggtgcaaaggctgggagaggagtagactctgtggtctgtctgaggg

SEQ ID NO: 30199 - DNA, 120 bp, synthetic construct
  source 1..120: mol_type = other DNA
ccagatctgaggtttagtttccatgttgtgttctgagttctttctattcattcagtcatttaaaagtacttaccaaactaccacaaacctgggtggcttagaacacagaatttctttttc

SEQ ID NO: 30200 - DNA, 120 bp, synthetic construct
  source 1..120: mol_type = other DNA
ttgcggcagcataaacccattctctgcctctgtcttcaactcgccttcttttctgtgtgtgcctctgtgtcattacatgctgttctcttatatagataggagacccactacctgtgtctt

SEQ ID NO: 30201 - DNA, 120 bp, synthetic construct
  source 1..120: mol_type = other DNA
tcgccttcttttctgtgtgtgcctctgtgtcattacatgctgttctcttatatagataggagacccactacctgtgtctttgtgtccaaattcctttcttctttttctgttcatttgttt

SEQ ID NO: 30202 - DNA, 120 bp, synthetic construct; identical to SEQ ID NO: 8525
  source 1..120: mol_type = other DNA

SEQ ID NO: 30203 - DNA, 120 bp, synthetic construct
  source 1..120: mol_type = other DNA
gcagtggtgcaatctcggctcactgcaacatccgcctcccggttcaagcgattctcctgcctcagcctcctgagtagctgggattacaggtgtgtgccagcatgtctggctaatttttgt

SEQ ID NO: 30204 - DNA, 120 bp, synthetic construct
  source 1..120: mol_type = other DNA
ggctcacctcttctttttttttttttgagacggggttttgctcttgttgcccaggctggagtgcaatggcgcgatcttggctcaccacaaccaccgcctcctggtgattacaggtgtgag

SEQ ID NO: 30205 - DNA, 120 bp, synthetic construct
  source 1..120: mol_type = other DNA
aaataaagtcacagatactggggattaggactcgaacacatctttctgggggacacaattccaccattacagggaataaacaggataagaaaaccatagaacccagcaggtggtaggtga

SEQ ID NO: 30206 - DNA, 120 bp, synthetic construct; identical to SEQ ID NO: 8526
  source 1..120: mol_type = other DNA

SEQ ID NO: 30207 - DNA, 120 bp, synthetic construct
  source 1..120: mol_type = other DNA
aggaacttcaaagaggctgtgtgctgcaggagagtgaagggcagggagtggcaggaaatgaaggcagacaggtagcagtggggaggacgcaggggtccagctcatgtaggtcttgattgg

SEQ ID NO: 30208 - DNA, 120 bp, synthetic construct
  source 1..120: mol_type = other DNA
tggactggagagaactgaatgagctagggtccaagaaggatggtgagaggcatgccttcattctgcaggacacaaaggctctgcaccaggtctttgaacatatgctgggtgagtgagctt

SEQ ID NO: 30209 - DNA, 120 bp, synthetic construct
  source 1..120: mol_type = other DNA
caagctcacagacaccatctgcggggtggggaacatgtcagcaaacgcctctgaccaggagaggacaccctggcatgtcactattaaggtaccaggaaggaggggcagggcttggattcc

SEQ ID NO: 30210 - DNA, 120 bp, synthetic construct; identical to SEQ ID NO: 8527
  source 1..120: mol_type = other DNA

SEQ ID NO: 30211 - DNA, 120 bp, synthetic construct
  source 1..120: mol_type = other DNA
attccttattgagaaggcggtgatctccccagggtttgatgtctttgccaaaaagaaccagggaatcctggagttctatggtgatgacatagctctgctgaagctggcccagaaagtaaa

SEQ ID NO: 30212 - DNA, 120 bp, synthetic construct
  source 1..120: mol_type = other DNA
gagatactggggacaggctggtgtgacccttgctcttctccccaggcccatctgccttccctgcacgatggaggccaatctggctctgcggagacctcaaggcagcacctgtagggacca

SEQ ID NO: 30213 - DNA, 120 bp, synthetic construct
  source 1..120: mol_type = other DNA
acatccccttctcttgactatagagaatgaactgctgaacaaacagagtgttcctgctcattttgtcgccttgaatgggagcaaactgaacattaaccttaagatgggagtggaggtgag

SEQ ID NO: 30214 - DNA, 120 bp, synthetic construct; identical to SEQ ID NO: 8528
  source 1..120: mol_type = other DNA

SEQ ID NO: 30215 - DNA, 120 bp, synthetic construct
  source 1..120: mol_type = other DNA
gatggtcttgaactcctgacctcaagtgatctgcctgcctcaacctcccaaagtgctgagattacaggcgtgagccactgcacccacccgggtctgcttattctacccttctctctggtt

SEQ ID NO: 30216 - DNA, 120 bp, synthetic construct
  source 1..120: mol_type = other DNA
gaggatgagagtccctgcaagggtgagtccctcaccatgcctggattcccaaggggaaggccacctgtgtctctgtggccagcatgcatgccagaacaccagtccactgccctagatgac

SEQ ID NO: 30217 - DNA, 120 bp, synthetic construct
  source 1..120: mol_type = other DNA
tcagccttgttggggggatgagggaggcctttgagggatctagggaggttggggcttacagttggggctgtggcagcctcccagccagttctctccttttctccaggtgggtctggtgag

SEQ ID NO: 30218 - DNA, 120 bp, synthetic construct; identical to SEQ ID NO: 8529
  source 1..120: mol_type = other DNA

SEQ ID NO: 30219 - DNA, 120 bp, synthetic construct
  source 1..120: mol_type = other DNA
cccacctcccgctccttggcctgtccccagattccttccctggttgacttgactcatgcttgtttcactttcacatggaatttcccagttatgaaattaataaaaatcaatggtttccac

SEQ ID NO: 30220 - DNA, 120 bp, synthetic construct
  source 1..120: mol_type = other DNA
gactctgcaccataacacacaatcaacaggggagtgagctggatccttatttctggtccctaagtgggtggtttgggcttactggggaggagctaaggccggagaggaggtactgaaggg

SEQ ID NO: 30221 - DNA, 120 bp, synthetic construct
  source 1..120: mol_type = other DNA
cggggcgagccgcaggtgccagaacacagattgtataaaaggctgggggctggtggggagcaggggaagggaatgtgaccaggtctaggtctggagtttcagcttggacactgagccaag

SEQ ID NO: 30222 - DNA, 120 bp, synthetic construct; identical to SEQ ID NO: 8530
  source 1..120: mol_type = other DNA

SEQ ID NO: 30223 - DNA, 120 bp, synthetic construct
  source 1..120: mol_type = other DNA
gtaccctgtgcagacacgtacctgcagatctacggggtcctggagcaccctgaagactcaagaccaaaagactgtcaggaaggcagagtgcagaggtttgagggcaatgagtgtgggcag

SEQ ID NO: 30224 - DNA, 120 bp, synthetic construct
  source 1..120: mol_type = other DNA
gcaagaaaaagcggagttaacccttactaagcatttaccctgggcttccaggcagccctggaagtcaagagaacactcagaaatggggagggagaagcagtggaaatccatatgggttga

SEQ ID NO: 30225 - DNA, 120 bp, synthetic construct
  source 1..120: mol_type = other DNA
ccccccttctcaaagcaatccactgtccaagaccacacgacttcgagaacggggaatactggccccggtctccctactacaatgtgagtgatgagatctctttccactgctatgacggtt

SEQ ID NO: 30226 - DNA, 120 bp, synthetic construct; identical to SEQ ID NO: 8531
  source 1..120: mol_type = other DNA

SEQ ID NO: 30227 - DNA, 120 bp, synthetic construct
  source 1..120: mol_type = other DNA
aacgtgtcaggaaggtggctcttggagcgggacggagccttcctgccaaggtgacctttgacctgtacccccaggtcagatcctggtcttccatcctactgtcttctctccccacctcaa

SEQ ID NO: 30228 - DNA, 120 bp, synthetic construct
  source 1..120: mol_type = other DNA
gacatttgacctcatttctgactctcccagactccttcatgtacgacacccctcaagaggtggccgaagctttcctgtcttccctgacagagaccatagaaggagtcgatgctgaggatg

SEQ ID NO: 30229 - DNA, 120 bp, synthetic construct
  source 1..120: mol_type = other DNA
acagaagcggaagatcgtcctggacccttcaggctccatgaacatctacctggtgctagatggatcagacagcattggggccagcaacttcacaggagccaaaaagtgtctagtcaactt

SEQ ID NO: 30230 - DNA, 120 bp, synthetic construct; identical to SEQ ID NO: 8532
  source 1..120: mol_type = other DNA

SEQ ID NO: 30231 - DNA, 120 bp, synthetic construct
  source 1..120: mol_type = other DNA
aagccaagatatggtctagtgacatatgccacataccccaaaatttgggtcaaagtgtctgaagcagacagcagtaatgcagactgggtcacgaagcagctcaatgaaatcaattatgaa

SEQ ID NO: 30232 - DNA, 120 bp, synthetic construct
  source 1..120: mol_type = other DNA
gcaggatcgttgggcaatggaggttagtgggaacctgttgggggctggaagggccactttgtggtcaaagggaagtccgtgtaatgatgattaacttaaaaagttgaaagatgtgggatt

SEQ ID NO: 30233 - DNA, 120 bp, synthetic construct
  source 1..120: mol_type = other DNA
cacaagttgaagtcagggactaacaccaagaaggccctccaggcagtgtacagcatgatgagctggccagatgacgtccctcctgaaggctggaaccgcacccgccatgtcatcatcctc

SEQ ID NO: 30234 - DNA, 120 bp, synthetic construct
  source 1..120: mol_type = other DNA
ttgtaacactatacccatggttggggccctgaatgtgactcatagctggctgttcatctctcctgtgacccttcataaggaattcttcctaagccctgtgatcaactatctctaaccctt

SEQ ID NO: 30235 - DNA, 120 bp, synthetic construct; identical to SEQ ID NO: 8533
  source 1..120: mol_type = other DNA

SEQ ID NO: 30236 - DNA, 120 bp, synthetic construct
  source 1..120: mol_type = other DNA
tttggcttccaagaaagacaatgagcaacatgtgttcaaagtcaaggatatggaaaacctggaagatgttttctaccaaatgatcggtagggagatacaagggaataaagaacacaactc

SEQ ID NO: 30237 - DNA, 120 bp, synthetic construct
  source 1..120: mol_type = other DNA
ttctctacctcagtgtcactattcttgtttcctggcactgttcacttaaccttagaatcacagagctctgagcacttcagagatctttctatagtcctacatttgacacgtggaaacaga

SEQ ID NO: 30238 - DNA, 120 bp, synthetic construct
  source 1..120: mol_type = other DNA
aacacgaggaaacaaatacccgtggtctttccctttctccttttgggcctttgctccccatagactcctacccaaaaggctgctgccatttgggaatgaagtgttccgagttttcagcac

SEQ ID NO: 30239 - DNA, 120 bp, synthetic construct; identical to SEQ ID NO: 8534
  source 1..120: mol_type = other DNA

SEQ ID NO: 30240 - DNA, 120 bp, synthetic construct
  source 1..120: mol_type = other DNA
aggtcagcgtaggtaaggatgcaactgaaggtcctgggctgcacctatgctctccaggcaacacctcccactttctacagatcctacactccacccatcctcaatgcagccccattcctt

SEQ ID NO: 30241 - DNA, 120 bp, synthetic construct
  source 1..120: mol_type = other DNA
ggacctggagatagaagtagtcctatttcaccccaactacaacattaatgggaaaaaagaagcaggaattcctgaattttatgactatgacgttgccctgatcaagctcaagaataagct

SEQ ID NO: 30242 - DNA, 120 bp, synthetic construct
  source 1..120: mol_type = other DNA
atttgtctcccctgcaccgagggaacaactcgagctttgaggcttcctccaactaccacttgccagcaacaaagtaagacatacttggcaagaggataaggatgagatcccaagagacaa

SEQ ID NO: 30243 - DNA, 120 bp, synthetic construct; identical to SEQ ID NO: 8535
  source 1..120: mol_type = other DNA

SEQ ID NO: 30244 - DNA, 120 bp, synthetic construct
  source 1..120: mol_type = other DNA
tgagagagatgctcaatatgccccaggctatgacaaagtcaaggacatctcagaggtggtcacccctcggttcctttgtactggaggagtgagtccctatgctgaccccaatacttgcag

SEQ ID NO: 30245 - DNA, 120 bp, synthetic construct
  source 1..120: mol_type = other DNA
tcgtttcattcaagtgagtcctccctttcctatctggggagatgccaagtggtcagcatgggccccaaagcaggaaagctcaatgcatgtggctagtaattcgaggtaggcagagcctgc

SEQ ID NO: 30246 - DNA, 120 bp, synthetic construct
  source 1..120: mol_type = other DNA
ggaattctactgaatgatccatggcaccccactgcctctgcaggttggtgtaatcagctggggagtagtggatgtctgcaaaaaccagaagcggcaaaagcaggtacctgctcacgcccg

SEQ ID NO: 30247 - DNA, 120 bp, synthetic construct; identical to SEQ ID NO: 8536
  source 1..120: mol_type = other DNA

SEQ ID NO: 30248 - DNA, 120 bp, synthetic construct
  source 1..120: mol_type = other DNA
ccacaaggttttccttgtagacgtcatcactgtagacaatctgggtcctcttgtcccggtggcaacccttagggctgttctggacagctagggagggaggagaggaacagttaaggtcta

SEQ ID NO: 30249 - DNA, 120 bp, synthetic construct
  source 1..120: mol_type = other DNA
ctcctttgtgccaacccatggccaagaaaagtataagtggacattttgatgaatgttttgttcttagaaaaatcccaaatgtcattgttgagacacgtgaatgatattaacccactactt

SEQ ID NO: 30250 - DNA, 120 bp, synthetic construct
  source 1..120: mol_type = other DNA
ctcactcctttcccaggaaaatctactttcagggaaaatggattattcacactaagaaatgctactagctccaccagaactcattcagggtgtagctttggccctcaccattctctctca

SEQ ID NO: 30251 - DNA, 120 bp, synthetic construct; identical to SEQ ID NO: 8537
  source 1..120: mol_type = other DNA

SEQ ID NO: 30252 - DNA, 120 bp, synthetic construct
  source 1..120: mol_type = other DNA
aaactgagtcctgggtcgtttttttttctctgaaatcagagtctccctgatgatcctattgtttggcagccaccctgtgatgtggatgacttaatctatgttttccttccttacctcaca

SEQ ID NO: 30253 - DNA, 120 bp, synthetic construct
  source 1..120: mol_type = other DNA
tccctgttccagtcactgctttggaagctgttttcaatccttttctctcctttctttacctctaactgacagaggatctgaaattttccttcccattcccatagcctccgcacacactct

SEQ ID NO: 30254 - DNA, 120 bp, synthetic construct
  source 1..120: mol_type = other DNA
aagaatcccattcttaccgagggagccccagacagacttgccagtagcggcatccagcatgggctgttttcgggctatgttgactttgagctgtacagactccacctgggtcccgttgag

SEQ ID NO: 30255 - DNA, 120 bp, synthetic construct; identical to SEQ ID NO: 8538
  source 1..120: mol_type = other DNA

SEQ ID NO: 30256 - DNA, 120 bp, synthetic construct
  source 1..120: mol_type = other DNA
aaacccagtgataataggcggctgcagggagggcagcttcttccctcaggtctcacaccccaggattctcccaggacttctcatcatgccctgttgtcatccttactttctgggtgggtc

SEQ ID NO: 30257 - DNA, 120 bp, synthetic construct
  source 1..120: mol_type = other DNA
tgaatccgaccctttgggagcacaaatcatagtcacaagacatagaccatgccacatttcacttagtaggacccacataaacctcagttaaggtcaccttgacctccagccaaaatcact

SEQ ID NO: 30258 - DNA, 120 bp, synthetic construct
  source 1..120: mol_type = other DNA
cgatcccgatccctgtcccgctctctgtctctgtctcgatcccggtctcgatcccgctcccgatctcggtctctgtcccggttcctctcatggctgcggtcccggctgcggcttcgggga

SEQ ID NO: 30259 - DNA, 120 bp, synthetic construct; identical to SEQ ID NO: 8539
  source 1..120: mol_type = other DNA

SEQ ID NO: 30260 - DNA, 120 bp, synthetic construct
  source 1..120: mol_type = other DNA
agaacagttaagatgatttccagttgctgacatgtggtccaaaatatatttgtctctcatattcctccatccccaacccctcagggacagaaattaggagcctttacctcttgcaggtca

SEQ ID NO: 30261 - DNA, 120 bp, synthetic construct
  source 1..120: mol_type = other DNA
tacctcagtgtggagcaggaggttgcccaaccatggaccagaggtgttcctcttccctcaccctcttctaggtttcctctgatcttttcttcccttttaattctacatacatttcttatt

SEQ ID NO: 30262 - DNA, 120 bp, synthetic construct
  source 1..120: mol_type = other DNA
aatcctcctacctcagcctccctagtagctgggactagagatgtgctctaccatgcttggctaatttctgtatttttttttttttttgtagagatagggtttcactatgttgccagggct

SEQ ID NO: 30263 - DNA, 120 bp, synthetic construct; identical to SEQ ID NO: 8540
  source 1..120: mol_type = other DNA

SEQ ID NO: 30264 - DNA, 120 bp, synthetic construct
  source 1..120: mol_type = other DNA
acaatctcgactcactgcaagctccgcctcctgggttcaagcaattctcctgcctcagcctcccaagtagctgggactacaggcgcccgccaccacgcccggctaatttttgtattttta

SEQ ID NO: 30265 - DNA, 120 bp, synthetic construct
  source 1..120: mol_type = other DNA
caccctgctgatttttgtatttttagtagagacggggttttaccatgttggccaggttggtcttaaactcctaatctcaagtgatctgcccacctcagcctcccaaagtgctgggattac

SEQ ID NO: 30266 - DNA, 120 bp, synthetic construct
  source 1..120: mol_type = other DNA
tgaacctgataacattttcagccctttccatcccttagggcaacatattccaagagctccaatccaaggtggattagaaccacagaatttgtaaaatggagaattcaggagtcgtctagt

SEQ ID NO: 30267 - DNA, 120 bp, synthetic construct; identical to SEQ ID NO: 8541
  source 1..120: mol_type = other DNA

SEQ ID NO: 30268 - DNA, 120 bp, synthetic construct
  source 1..120: mol_type = other DNA
agtccatccccatttcccctgtcactcacagcgtttgacaccaccttggctggttgtgctgctgctactttgcttcttcagagccagcaatgcctttttctgggaacaagggtgagaaga

SEQ ID NO: 30269 - DNA, 120 bp, synthetic construct
  source 1..120: mol_type = other DNA
cctctggtcccctagatcatgtatgatgctggaaattcctaatctaaccaaaccacggaacccagaggttttccagagtgttacatttttgaagttgaagacaaataactcaatcatgga

SEQ ID NO: 30270 - DNA, 120 bp, synthetic construct
  source 1..120: mol_type = other DNA
tattgaatgaggcccagccatgacttcgtaacagggatatccaggaggctaatgcattgttcctaccctcaagaagcttacagtctgagaaataaaatacattgagttagcaatacaatt

SEQ ID NO: 30271 - DNA, 120 bp, synthetic construct; identical to SEQ ID NO: 8542
  source 1..120: mol_type = other DNA

SEQ ID NO: 30272 - DNA, 120 bp, synthetic construct
  source 1..120: mol_type = other DNA
ttgttgagagaccattacaatggcccacatgaatgtcaataaagccctgctcgggggaatgcacagtgaagaataaacaggaaaaattacttcaaaagaagaaacaataagacttggcaa

SEQ ID NO: 30273 - DNA, 120 bp, synthetic construct
  source 1..120: mol_type = other DNA
tatctgaagtttttcagtataacactggatagaactggaaaaaacaaacttggggatcatcagctcttaagcggtactaaaagccatgggaaaggaagacaatccatggcaaattgcata

SEQ ID NO: 30274 - DNA, 120 bp, synthetic construct
  source 1..120: mol_type = other DNA
tgggccagaaaaacttccccattcgctcacactcaccccatatcttctcagagtgcagagtctgtgaaaggttaggccatgtccacacacagtccctcacctttttcttgagcttgttga

SEQ ID NO: 30275 - DNA, 120 bp, synthetic construct; identical to SEQ ID NO: 8543
  source 1..120: mol_type = other DNA

SEQ ID NO: 30276 - DNA, 120 bp, synthetic construct
  source 1..120: mol_type = other DNA
ccgtcggaaagacgatggcacccgacccccctaccctcgctagggtaaggacaaccgcggggtttgaacggcagagaaggcggtggagccagcgtagcgcccgcagagcaacgcaaagag

SEQ ID NO: 30277 - DNA, 120 bp, synthetic construct
  source 1..120: mol_type = other DNA
agcgggctcacaacgatgacgtagcgaggagcggaaaacgcggtaaccaaggcggccccaggcgcgcacttccgcccggccttccaccggtccaggtctgcccctccgcagcgatagttc

SEQ ID NO: 30278 - DNA, 120 bp, synthetic construct
  source 1..120: mol_type = other DNA
gatgatggagacagagcgacttggtgagggggaggggagggaaatggaacggagtagccgatatggaatgaactttgacccctgacttttgacctttccccgtagtgctaccccctccag

SEQ ID NO: 30279 - DNA, 120 bp, synthetic construct; identical to SEQ ID NO: 8544
  source 1..120: mol_type = other DNA

SEQ ID NO: 30280 - DNA, 120 bp, synthetic construct
  source 1..120: mol_type = other DNA
acttggtgactgagatgataggctttgagcctccaacctttcatccttaggtctgggacccctttttctaaaatcagtgagtctccaatttcagtgtgcttcatgattagccagggagct

SEQ ID NO: 30281 - DNA, 120 bp, synthetic construct
  source 1..120: mol_type = other DNA
gtttttggccaagcctgattgtcctagtctgtttgacacatctgccatttctgatctgaacacaagtcccatcatctcttttgtctgcattttatcctctttccttacctaatgcctctc

SEQ ID NO: 30282 - DNA, 120 bp, synthetic construct
  source 1..120: mol_type = other DNA
tcagcccggtgaggagtctggaggggcttagactagggtgatgggttcctgaaggaagctgggacagaggaagaaagaagacccaaaagttactatttttctctccagaaaatggcagag

SEQ ID NO: 30283 - DNA, 120 bp, synthetic construct; identical to SEQ ID NO: 8545
  source 1..120: mol_type = other DNA

SEQ ID NO: 30284 - DNA, 120 bp, synthetic construct
  source 1..120: mol_type = other DNA
tcttgtggagatgggatggtagaagagggtgtctttaatctccagggaagggttccccacctatctcgtattaccctcatcccatgaatccctgtctgtcctgtctcttcccagggggga

SEQ ID NO: 30285 - DNA, 120 bp, synthetic construct
  source 1..120: mol_type = other DNA
actgggctactgctagccctcccatgtttttgagaaaattagaaaaagatattctgtccataacaacctttactgtcatctgctgggaaatttctacaacaacctttactgtcatctgtt

SEQ ID NO: 30286 - DNA, 120 bp, synthetic construct
  source 1..120: mol_type = other DNA
atttgttcaccagtgtgcagtgacctgatttcatgtccctatcctacagatcttcttactattccacctggtttcaagaaaggcatggactttgcaccaaaaggttagttttagtttttg

SEQ ID NO: 30287 - DNA, 120 bp, synthetic construct
  source 1..120: mol_type = other DNA
tcagattgtccaactccagctcctggactactaagccttagctgtatgttggagcctctggatttgggtgggggtgacgaggatgagaatgaggcagtgggacagccaggaggtcccaga

SEQ ID NO: 30288 - DNA, 120 bp, synthetic construct; identical to SEQ ID NO: 8546
  source 1..120: mol_type = other DNA

SEQ ID NO: 30289 - DNA, 120 bp, synthetic construct
  source 1..120: mol_type = other DNA
ccaggtactttggccccatcttcacacgctcctctacctctttctgggtcacactcccagccgaccccttgtctcctctattggccagaggtcagatccatcccaggccagtcttggtac

SEQ ID NO: 30290 - DNA, 120 bp, synthetic construct
  source 1..120: mol_type = other DNA
gcatttgagccagatgtgtttcagaaacaggccatcctgcacttggaacggcatgactctgtctttgtcgcagctcacacatctgcaggaaaaacagttgtggctgaatatgccattgcc

SEQ ID NO: 30291 - DNA, 120 bp, synthetic construct
  source 1..120: mol_type = other DNA
cctttgaaaatctcatctcttcccccacctctctagctcatcctttaagtgagaggttcagggctaagactgagacaagagcccagagagaaatgaaaagacatggtggggagaaagttt

SEQ ID NO: 30292 - DNA, 120 bp, synthetic construct; identical to SEQ ID NO: 8547
  source 1..120: mol_type = other DNA

SEQ ID NO: 30293 - DNA, 120 bp, synthetic construct
  source 1..120: mol_type = other DNA
cctcctgcctcatcatgaccacagagatccttcggtgagagatggacactcaatacaggggagttttggctgggaagatgtggccgttgtggagagtgtgctgtctgaggagggggtgga

SEQ ID NO: 30294 - DNA, 120 bp, synthetic construct
  source 1..120: mol_type = other DNA
tgtcgaggtaagggccatgggctccccagaacccggcagtcctctcctttgggaccagttgagcgtctcccttattccacacactcagggccccttactgctttctttacccccatatgg

SEQ ID NO: 30295 - DNA, 120 bp, synthetic construct
  source 1..120: mol_type = other DNA
ttctatcatccttctgagtgccaccgtccccaacgcccttgagtttgctgactggattgggtgagacgtgtgtcccgggttgcctgggtgaagggggctacagtactccttgattcgggt

SEQ ID NO: 30296 - DNA, 120 bp, synthetic construct; identical to SEQ ID NO: 8548
  source 1..120: mol_type = other DNA

SEQ ID NO: 30297 - DNA, 120 bp, synthetic construct
  source 1..120: mol_type = other DNA
ggagctctttttgttgctggactcccgaggagccttccatacaaaagggtaagcctcgagatgggggaaagagttagggctgggcccccagctggacattgtggctacccctccctgtgc

SEQ ID NO: 30298 - DNA, 120 bp, synthetic construct
  source 1..120: mol_type = other DNA
ttgtacctgccagcacctgtttttcctcctatcttttttttccccttgtcccccaggggttttgacttgagctttgagcactgccccagttaacactagctcacctctcattggttcagg

SEQ ID NO: 30299 - DNA, 120 bp, synthetic construct
  source 1..120: mol_type = other DNA
ggggccgctgtgatgagcaggcctcaggcctcacctcccttgacctcaccaccagttcggagaagagcgagatccacctcttcctgcagcgctgccttgctcgcctccgtggctctgacc

SEQ ID NO: 30300 - DNA, 120 bp, synthetic construct; identical to SEQ ID NO: 8549
  source 1..120: mol_type = other DNA

SEQ ID NO: 30301 - DNA, 120 bp, synthetic construct
  source 1..120: mol_type = other DNA
tacctgggtttgaatcccaggtacaccatgtattcacagtatcatcctggaccaattatttaaccttcctgaactttaggtttcccatcttaaaatggggatgcataagatatgaatacg

SEQ ID NO: 30302 - DNA, 120 bp, synthetic construct
  source 1..120: mol_type = other DNA
tcacaagatacgactttacagctattagactggtaaaatttaggaaactagttcatgccgagtgttgccagagatataggaggttgtagggttctgggaatcctttacgggatgcctagc

SEQ ID NO: 30303 - DNA, 120 bp, synthetic construct
  source 1..120: mol_type = other DNA
gatcgagaccatcctggccaacatggtgaaaccctgtctctactaaaaatacaaaaattagctgggcatggtggcaggtgcctgtagtcccagctacttgggaggctgaggcaggagaat

SEQ ID NO: 30304 - DNA, 120 bp, synthetic construct; identical to SEQ ID NO: 8550
  source 1..120: mol_type = other DNA

SEQ ID NO: 30305 - DNA, 120 bp, synthetic construct
  source 1..120: mol_type = other DNA
gtgggttagatgtggccacaggaacatggacagatgttgaaacactaggtggagaaaaagaagcaaaaaaaaatcagatatataaccactttttatatgaattataaactacaagctcac

SEQ ID NO: 30306 - DNA, 120 bp, synthetic construct
  source 1..120: mol_type = other DNA
gggaatgggatatgaaggtaaaagttaagaaatagaaataagtagctacataagtaaaatgaggaaaacaataatacctgccctatagatttgcctggagagttcagtgagatcccataa

SEQ ID NO: 30307 - DNA, 120 bp, synthetic construct
  source 1..120: mol_type = other DNA
tgctgatcctttctgttctcctctgtcccaggtcttgtttgccacagagacctttgccatgggagtaaacatgcctgctcgtacagtagtgtttgactccatgcgcaaacacgatggctc

SEQ ID NO: 30308 - DNA, 120 bp, synthetic construct
  source 1..120: mol_type = other DNA
agacctgcaccgcatgatgatggtgagcgggccagcatgctcggcagggccccagctccaggaccttgctggattctgtcttcgattctcctctcttctttttcttcttccttttttttt

SEQ ID NO: 30309 - DNA, 120 bp, synthetic construct; identical to SEQ ID NO: 8551
  source 1..120: mol_type = other DNA

SEQ ID NO: 30310 - DNA, 120 bp, synthetic construct
  source 1..120: mol_type = other DNA
tggagcccatctcttccagttttctcccatgtgaatatggagctagatggggcctttgagtccatttatttcagtttgctcccttatgttacagaagaggtgagcaagtggtttgtccaa

SEQ ID NO: 30311 - DNA, 120 bp, synthetic construct
  source 1..120: mol_type = other DNA
aagccgtcccagctgcagtcccagttccgcctcacgtacactatgatcctcaacttgctgcgagtggatgccctcagggtggaggacatgatgaagaggagcttctctgagtttccctcc

SEQ ID NO: 30312 - DNA, 120 bp, synthetic construct
  source 1..120: mol_type = other DNA
aggcatccagaggccagtgtgttgagggtggggagtgtgacagattgggcctggagactcccctttcacagcttcccctgctcccacccaaggcccatgaacaggccctggctgaactga

SEQ ID NO: 30313 - DNA, 120 bp, synthetic construct
  source 1..120: mol_type = other DNA
gaactgacagagacccagcacatgatccaggtgagcaagtgtgagtgctgaggaggtgataggagaagggaagagaagatcgtgttactctaggtgctactaaacttagtccaagtgtct

SEQ ID NO: 30314 - DNA, 120 bp, synthetic construct; identical to SEQ ID NO: 8552
  source 1..120: mol_type = other DNA

SEQ ID NO: 30315 - DNA, 120 bp, synthetic construct
  source 1..120: mol_type = other DNA
caccccaagaagtctgctctgatcgcttgacttggttgcccctctctactggtgagctctgcatggttgcttcctgattcctgcccaagggtgggtatctggtctctgcctttgatgtct

SEQ ID NO: 30316 - DNA, 120 bp, synthetic construct
  source 1..120: mol_type = other DNA
cagggggccagccactgcagaggtgccctatccagatgacctcgtgggattcaagctgttcctgcctgaaggtgagagtgtggcagatgtctgttttctgccagcagtataagcaggatg

SEQ ID NO: 30317 - DNA, 120 bp, synthetic construct
  source 1..120: mol_type = other DNA
tggggagaagatcttggaggacttcagcaagaggcagcagccaaaattcaagtcagagatgctagggaggcccttctcctccagaggggcacgtagaggcagggaggggcagtggtctgg

SEQ ID NO: 30318 - DNA, 120 bp, synthetic construct; identical to SEQ ID NO: 8553
  source 1..120: mol_type = other DNA

SEQ ID NO: 30319 - DNA, 120 bp, synthetic construct
  source 1..120: mol_type = other DNA
gtacacagcccccgttttcctgcccaggtaggaccctgggtggtaactcccaagctgggagtaggggcttttcctctgtggtcccctgtagactgaccgcccccatctcagcccttgtcc

SEQ ID NO: 30320 - DNA, 120 bp, synthetic construct
  source 1..120: mol_type = other DNA
gatcagtcattgctgctgcttcctgagtaccatcagcgagtagaggtgggtggggcagtggttggggcaggggggctaggggacagcagtgtgtccaatgcccaccctttttcttgcagg

SEQ ID NO: 30321 - DNA, 120 bp, synthetic construct
  source 1..120: mol_type = other DNA
gcaccctgcggcctgaggagattgctgccttgctctctggcctggtctgccagagccctggggacgctggggatcagctcccaaacaccctcaagcaggtaggggacaccacccctttct

SEQ ID NO: 30322 - DNA, 120 bp, synthetic construct; identical to SEQ ID NO: 8554
  source 1..120: mol_type = other DNA

SEQ ID NO: 30323 - DNA, 120 bp, synthetic construct
  source 1..120: mol_type = other DNA
cccaggctgagtgcatccagtcctcaccctactttccccacagcccttctccgagttggcagggctctcagggacccctgagggcctggtggtccgctgcattcagcgcctggctgagat

SEQ ID NO: 30324 - DNA, 120 bp, synthetic construct
  source 1..120: mol_type = other DNA
gtgaatgccccatgtaaaaacatgatgataaaacagcaaagcactgttgtgtgcttgagttgctggacagggatgactcagctaagaagacagcgagagaacctcttagaaatatgcttt

SEQ ID NO: 30325 - DNA, 120 bp, synthetic construct
  source 1..120: mol_type = other DNA
ggcgtaaggtgcatcttggtgtacagacacggtgactgggccgccaggctcccaagagaagagatgaacgagcctggggggcagatggaggcatcagttgagggccagaggctggatcct

SEQ ID NO: 30326 - DNA, 120 bp, synthetic construct; identical to SEQ ID NO: 8555
  source 1..120: mol_type = other DNA

SEQ ID NO: 30327 - DNA, 120 bp, synthetic construct
  source 1..120: mol_type = other DNA
ggacccctgggaggaatgactgagcccaccatttcaggagcttgtgtctgacaggaaaagcaagggatcagtgggacccctcgtgcaccctccattctgccttcaccctcctccccaagt

SEQ ID NO: 30328 - DNA, 120 bp, synthetic construct
  source 1..120: mol_type = other DNA
gttgggggctgtgtggatggggcttgggggtctgtgcagtctacctcccctgagaagagcagagggtggcttcccaggcggctgcgtagcacagagcagaaggccacgttggtgttaacc

SEQ ID NO: 30329 - DNA, 120 bp, synthetic construct
  source 1..120: mol_type = other DNA
ctgcacacatgtactgctcaaatttgtatcccatgtacataagctcccggaggagcggtggccgagcaagcctctgggcccgagcgttcggtgtctccacttcactcaggtatagtgttc

SEQ ID NO: 30330 - DNA, 120 bp, synthetic construct; identical to SEQ ID NO: 8556
  source 1..120: mol_type = other DNA

SEQ ID NO: 30331 - DNA, 120 bp, synthetic construct
  source 1..120: mol_type = other DNA
cggggctggtatcgatccgggtatccgtctctgaggtcaaagttggggcctggaccgttagtggggggtgggctatagtagcgcagggctcgggcatctccatggtactggcgttgagca

SEQ ID NO: 30332 - DNA, 120 bp, synthetic construct
  source 1..120: mol_type = other DNA
acctctgtcttctcagctcctctcttggtccccctgggatccatgaggtcctaagacaagcaggggtacagagtttccattctacagaggaggcctggagaaggatgactggtttaggac

SEQ ID NO: 30333 - DNA, 120 bp, synthetic construct
  source 1..120: mol_type = other DNA
ctccaaatgcagtgaggttaggaaggacgtctgcgctcagatcaagaatccagttacctcaaagctccccaacttccacctccgcagagctatgacgtcatggcaggcacgccagaggcc

SEQ ID NO: 30334 - DNA, 120 bp, synthetic construct; identical to SEQ ID NO: 8557
  source 1..120: mol_type = other DNA

SEQ ID NO: 30335 - DNA, 120 bp, synthetic construct
  source 1..120: mol_type = other DNA
attttcaggttctcttccctccattcctaccccttccccggtaccataaaatcccgggatatgagctggaagaggcatcacctgatcccggagacctttggagttaagaggcggcggaag

SEQ ID NO: 30336 - DNA, 120 bp, synthetic construct
  source 1..120: mol_type = other DNA
cctgtccgtgagccgatttatctgcccagggtcggcgcgcgcggctgtctcagaactcatgcagctgttcccgcgaggcctgtttgaggacgcgctgccgcccatcgtgctgaggagcca

SEQ ID NO: 30337 - DNA, 120 bp, synthetic construct
  source 1..120: mol_type = other DNA
cagccgttcagcaagcattaggcctttcaggcgagggcactgtgccaggcactggggtgccacagagaccctgttaaaagtcccgcaggtagtacagggcatttcaaatcatggaggtag

SEQ ID NO: 30338 - DNA, 120 bp, synthetic construct; identical to SEQ ID NO: 8558
  source 1..120: mol_type = other DNA

SEQ ID NO: 30339 - DNA, 120 bp, synthetic construct
  source 1..120: mol_type = other DNA
cgtggctggtggtattaggagcacatttagttgttggactacagataatgtgtttaattttatacaagttgagttgatggtgcatgtggagcatccaaagacaaaggtattagacagttg

SEQ ID NO: 30340 - DNA, 120 bp, synthetic construct
  source 1..120: mol_type = other DNA
ctgtgatgtggtgagatccagtaggaagagtgggtagaggagtgatttctaacctttttgtaatctttagaaggtgataaaagctatggctatctctctccagaaaaatgcacgtttgcc

SEQ ID NO: 30341 - DNA, 120 bp, synthetic construct
  source 1..120: mol_type = other DNA
ttagagtggaagttaatagggtcaaatccacaatgctgggaaacaccatcatttaaggcagtgttactgaatatatgagctgagttattatgcctgtgtcaaaattacgtgggctgcttg

SEQ ID NO: 30342 - DNA, 120 bp, synthetic construct
  source 1..120: mol_type = other DNA
ttttgaactgcctcaagtgctttttaagtgtgccttaaaatttgagatccactgacataaagggaaagcagaagaagaggaatctgtgacagaggcagagagggacttgcctgagttaag

SEQ ID NO: 30343 - DNA, 120 bp, synthetic construct; identical to SEQ ID NO: 8559
  source 1..120: mol_type = other DNA

SEQ ID NO: 30344 - DNA, 120 bp, synthetic construct
  source 1..120: mol_type = other DNA
aggcctactgtgaaagtaaagagatttttgagaaagtgaagtagttggcagtattagaacctgtgattcaagacagtggtctaagaagagggaagaggtaaagtaaaatataaactgaaa

SEQ ID NO: 30345 - DNA, 120 bp, synthetic construct
  source 1..120: mol_type = other DNA
tactaaataactgagatcccatctctactaaataaataaattaaaacacaaaaattcttagctgggcatggtggtgtgcacctattgttctagctgtttgggaagttgaggcagaaggag

SEQ ID NO: 30346 - DNA, 120 bp, synthetic construct
  source 1..120: mol_type = other DNA
actgaaatctgtccattggatttagcaggtagaaggttaatagtgatctttcaagaaaagaggaaagaaaaggaaggcagtctagcactcacttgaggtgagctagtctccctgactagg

SEQ ID NO: 30347 - DNA, 120 bp, synthetic construct; identical to SEQ ID NO: 8560
  source 1..120: mol_type = other DNA

SEQ ID NO: 30348 - DNA, 120 bp, synthetic construct
  source 1..120: mol_type = other DNA
actcactgcaacctctgcctcctgggttcaagcaattctcctgcctcactgtcctgattagctgagactacaggcacgcgccaccatgcccagctaattttggtatttttagtagagatg

SEQ ID NO: 30349 - DNA, 120 bp, synthetic construct
  source 1..120: mol_type = other DNA
ttttatagggatggggtttcaccctgttggccaggctggtctcaaactcctgactcagatgatctgcctgcctcggcctcccaaagtgctgttttttttttttttaattgtctttttgat

SEQ ID NO: 30350 - DNA, 120 bp, synthetic construct
  source 1..120: mol_type = other DNA
tcaatcttttccccaccttttcccgctttctagtccacaaaaccaccattgtcatcgtggcccgttctcaatgagctgttgggcacacctcccagatggggtggtggccgggcagagggg

SEQ ID NO: 30351 - DNA, 120 bp, synthetic construct
  source 1..120: mol_type = other DNA
agaggggctcctcacttcccagtaggggcggccgggcagaggcgcccctcacctcccggacgaggcggctggccgggcggggggggctgaccccaccacctccctcccagacggggcggc

SEQ ID NO: 30352 - DNA, 120 bp, synthetic construct; identical to SEQ ID NO: 8561
  source 1..120: mol_type = other DNA

SEQ ID NO: 30353 - DNA, 120 bp, synthetic construct
  source 1..120: mol_type = other DNA
tcacatcccagacggggcggcggggcaaaggcgctccccacatctcagacgatgagcggccgggcagagacgctcctcacttcctagatgggatggcggccgggcagagacactcctcac

SEQ ID NO: 30354 - DNA, 120 bp, synthetic construct
  source 1..120: mol_type = other DNA
ctttgggaggccaaggcaggcggctgggaggtggaggttgtagcaagccgagatcccgccactgcactccagcctgggcaccattgagcactgagtgaaccagacaccgtctgcaatcgc

SEQ ID NO: 30355 - DNA, 120 bp, synthetic construct
  source 1..120: mol_type = other DNA
tctccactaacaaaatacgaaaaccagtcaggcgtggcggcgcgcgcctgcaatcgcaggcactcggcaggctgaggcaggagagtcaggcagggaggttgcagtgagctgagatggcag

SEQ ID NO: 30356 - DNA, 120 bp, synthetic construct; identical to SEQ ID NO: 8562
  source 1..120: mol_type = other DNA

SEQ ID NO: 30357 - DNA, 120 bp, synthetic construct
  source 1..120: mol_type = other DNA
caggcacctgacaccacgcccagctaattttttttttttttttttttttgagacggagtctcgctctgtcacccaggctggagttcagtggcatgatcttggcttactgcaagctctgcc

SEQ ID NO: 30358 - DNA, 120 bp, synthetic construct
  source 1..120: mol_type = other DNA
tgttagccaggatggtcttgatctccggacctcgtgatccacccgtctcagcctgccaaagtgctgggattacaggcatgagccaccgcatctggcctatttttgtatttttaatggaga

SEQ ID NO: 30359 - DNA, 120 bp, synthetic construct
  source 1..120: mol_type = other DNA
tatttttatttttattttttgagttagagtctcactctgtcacccaggctggagcgcagtggcatgatctcggctcacagcaactttctgggttcaagcagttctcctgtgtcagcctcc

SEQ ID NO: 30360 - DNA, 120 bp, synthetic construct; identical to SEQ ID NO: 8563
  source 1..120: mol_type = other DNA

SEQ ID NO: 30361 - DNA, 120 bp, synthetic construct
  source 1..120: mol_type = other DNA
gtctgcccccacgcctggctgtttttacattttttgtagagatgtggcgggtgggggggtctcactgtgttgcccagactggtctcgaactcctgtcctcaattgatcctgctacctcag

SEQ ID NO: 30362 - DNA, 120 bp, synthetic construct
  source 1..120: mol_type = other DNA
tctcgtaaacagaagtcctggtttatttttatttgttttaaacattgaatcccatactcctccccaccttaccctacccagaatttagactgttaatgttttgaagccacagcctgcatc

SEQ ID NO: 30363 - DNA, 120 bp, synthetic construct
  source 1..120: mol_type = other DNA
tgcttgattattttctcacacagtttttcctttactaagagaaaatgcccccatattggcaaacaaaatctccctgcctgagagcgcccagagtatagcagagcatcttaccctgatacg

SEQ ID NO: 30364 - DNA, 120 bp, synthetic construct; identical to SEQ ID NO: 8564
  source 1..120: mol_type = other DNA

SEQ ID NO: 30365 - DNA, 120 bp, synthetic construct
  source 1..120: mol_type = other DNA
gggggaggaggagggggggaggaagagggggaggaggatgaagaggaggaggaagaagaagggtatgagaggtggaaggatctgagcaagaggtaagacaggaagagaaatgctgtcctg

SEQ ID NO: 30366 - DNA, 120 bp, synthetic construct
  source 1..120: mol_type = other DNA
cagtacttccagcctgtggggaccttagtttccagcaggaccaaatgacacagacctttggcttcagggactcagaaatcacgtgagacttgtggaaccaaccaaagtcaggcatctggt

SEQ ID NO: 30367 - DNA, 120 bp, synthetic construct
  source 1..120: mol_type = other DNA
tgactcttcttgttaataaaatgacccaagtttgtattcctccccacaagagaggaggcctatcttacctgggccttagaaagagccctgaaatagaattcagttcttggtggcttatca

SEQ ID NO: 30368 - DNA, 120 bp, synthetic construct; identical to SEQ ID NO: 8565
  source 1..120: mol_type = other DNA

SEQ ID NO: 30369 - DNA, 120 bp, synthetic construct
  source 1..120: mol_type = other DNA
gagcgcagaagactctgattcctctcctcggtcctaagaccgaatgtgtgtcaggacatgtggtcagggaagagaagctatttaactgaaccagtaatagtagcaggaaaagaaaaagtg

SEQ ID NO: 30370 - DNA, 120 bp, synthetic construct
  source 1..120: mol_type = other DNA
caggctgggattttgttatccagtctctcttgcatggttgcccgtgtttctggagacttgtgtaaacattaatggatgaggaggagagatggttctcagagcccagccctcatctctgct

SEQ ID NO: 30371 - DNA, 120 bp, synthetic construct
  source 1..120: mol_type = other DNA
tcccatctgcagctcaagcctgcagcccctcaccttttggtggctcctcaggcctctaggccttattcacctttcccctttcctgtgccacttctcctctagggcgccaggctgtcctta

SEQ ID NO: 30372 - DNA, 120 bp, synthetic construct; identical to SEQ ID NO: 8566
  source 1..120: mol_type = other DNA

SEQ ID NO: 30373 - DNA, 120 bp, synthetic construct
  source 1..120: mol_type = other DNA
tctcctgcacagcatctctaccacttcaggaaccctcctccgcctgccagagacatgaagattctgctcatcattgctcagctcctcagagtgggccgggaggggactagaagagctgca

SEQ ID NO: 30374 - DNA, 120 bp, synthetic construct
  source 1..120: mol_type = other DNA
gtggggtttgagcaatgcttctctgcccttccatggaaagtggaaccagaaatggtgccaaggctgtggctgttccctttcgtgtaaaatggtgctgttattactctgtcttgaaatagg

SEQ ID NO: 30375 - DNA, 120 bp, synthetic construct
  source 1..120: mol_type = other DNA
tacctctgcctgtgatattttctggatgtcctttatttactgtgacgtgtgtttgggtgccttgtttaggggtagaggtgaagtctgagctttgcctcattcagagaggaaaggggtcag

SEQ ID NO: 30376 - DNA, 120 bp, synthetic construct; identical to SEQ ID NO: 8567
  source 1..120: mol_type = other DNA

SEQ ID NO: 30377 - DNA, 120 bp, synthetic construct
  source 1..120: mol_type = other DNA
tggacacccaggtgtccggggtgcccccacaactctgggcctgaggccagttgcacttcttggctgtcacgtggtttcccagcttagctgggctgggggaggagcaaggtccagagtcaa

SEQ ID NO: 30378 - DNA, 120 bp, synthetic construct
  source 1..120: mol_type = other DNA
cttatctctgcagaagcccaggtcctggaggcgggatgctgggtgcttggattggggcagggctggcatcgggacccgattcaggagtgagggagagcaggggtggaggtgtcagagcga

SEQ ID NO: 30379 - DNA, 120 bp, synthetic construct
  source 1..120: mol_type = other DNA
agtgaaaggatcagtgttcctgagaaacccatctcgtaataatgtcccctgctccccaaaggtggacttcacccttagctcagaaagagacttcgcactcctcagtctccaggtaaccag

SEQ ID NO: 30380 - DNA, 120 bp, synthetic construct; identical to SEQ ID NO: 8568
  source 1..120: mol_type = other DNA

SEQ ID NO: 30381 - DNA, 120 bp, synthetic construct
  source 1..120: mol_type = other DNA
acctctttttgcagacggaccagcccatttacaaccctggccagcggggtgagtctcagccccagggcctcaacctttaaccccctccgagccctctcaggatgagtttggtgcccccta

SEQ ID NO: 30382 - DNA, 120 bp, synthetic construct
  source 1..120: mol_type = other DNA
tcctcctccactcccagttcggtaccgggtctttgctctggatcagaagatgcgcccgagcactgacaccatcacagtcatggtggaggtgagtccccgacctctggccttcctgatcct

SEQ ID NO: 30383 - DNA, 120 bp, synthetic construct
  source 1..120: mol_type = other DNA
cccagacatctcagagtgagcgctcccaatgtgggggctgcccccaagctacaccaccccaattcctgttaggctctccacctcccacacagaggcacgtccccagatgccctgaccctc

SEQ ID NO: 30384 - DNA, 120 bp, synthetic construct; identical to SEQ ID NO: 8569
  source 1..120: mol_type = other DNA

SEQ ID NO: 30385 - DNA, 120 bp, synthetic construct
  source 1..120: mol_type = other DNA
ggtcagtccttcccaactttgaggtgaagatcacccctggaaagccctacatcctgacggtgccaggccatcttgatgaaatgcagttagacatccaggccaggtaatacctccctcccc

SEQ ID NO: 30386 - DNA, 120 bp, synthetic construct
  source 1..120: mol_type = other DNA
ggtacatctatgggaagccagtgcagggggtggcatatgtgcgctttgggctcctagatgaggatggtaagaagactttctttcgggggctggagagtcagaccaaggtaggaaggagaa

SEQ ID NO: 30387 - DNA, 120 bp, synthetic construct
  source 1..120: mol_type = other DNA
gcagagttccaggacgccctggagaagctgaatatgggcattactgacctccaggggctgcgcctctacgttgctgcagccatcattgagtctccaggtgggtgactttcccttattgta

SEQ ID NO: 30388 - DNA, 120 bp, synthetic construct; identical to SEQ ID NO: 8570
  source 1..120: mol_type = other DNA

SEQ ID NO: 30389 - DNA, 120 bp, synthetic construct
  source 1..120: mol_type = other DNA
atgagaagagacaggttaagagttcataaagagtgggggccagggggccaattgcaaaatggaggctgcaaaaggctcagagctctggtctccacactattttttgagtacagtcactca

SEQ ID NO: 30390 - DNA, 120 bp, synthetic construct
  source 1..120: mol_type = other DNA
ttatcggagagtagctggtggaagtgggcttagctagaagactgcatgtctgtccaatgcttcaaaggagggtctttctccttgaacagagtgtttacagataagacagggggtctcact

SEQ ID NO: 30391 - DNA, 120 bp, synthetic construct
  source 1..120: mol_type = other DNA
tttcccaacatgcccccctccctttttttttttttaaccgctattgctattatggcttatttgtggtgtttggtctgttttcagaagtgtcttttgcatctgtagactaaaagtaaacag

SEQ ID NO: 30392 - DNA, 120 bp, synthetic construct; identical to SEQ ID NO: 8571
  source 1..120: mol_type = other DNA

SEQ ID NO: 30393 - DNA, 120 bp, synthetic construct
  source 1..120: mol_type = other DNA
aagtttattgtacgatcttccatttaaataacagtctgtctaagatcatttgtttgatttgtcaattgttggtctatttgggtctgagaattccacaattttgaggaattttttgttaac

SEQ ID NO: 30394 - DNA, 120 bp, synthetic construct
  source 1..120: mol_type = other DNA
tttggtaaacacttttttttaaaacatttttgtgacaatatgaatggaaggagaggctttctaaggtctattgagggaaaccagtatccaaactcctttcttagtttttatcagtaacac

SEQ ID NO: 30395 - DNA, 120 bp, synthetic construct
  source 1..120: mol_type = other DNA
gaatgtcaatatttttgaccattaacataaaaggagggttgacacaactctgaatgggcactgttttgttggaagaaaactgatacgcaaattgaagtttttaaccttttttttttaaag

SEQ ID NO: 30396 - DNA, 120 bp, synthetic construct; identical to SEQ ID NO: 8572
  source 1..120: mol_type = other DNA

SEQ ID NO: 30397 - DNA, 120 bp, synthetic construct
  source 1..120: mol_type = other DNA
ttaaggttgttggcacctcttttttgggggcttaaactgttaattgaattgaactctgtgaatgatccgggctccatccagaaaataaatgataggatactggtctttgattatgacctg

SEQ ID NO: 30398 - DNA, 120 bp, synthetic construct
  source 1..120: mol_type = other DNA
gtgagagggcccatgagtatttgtaggcttagggatccaaacgctattattaacataaacttcaactgggggttttaaccatgtgacaggcctaattaaaggcaggaatgggacacatgc

SEQ ID NO: 30399 - DNA, 120 bp, synthetic construct
  source 1..120: mol_type = other DNA
tagtaacttttttttttagtaaaagagtgacctgtagtgttacttggcatcttagtttactatatgttattaatgaggaaccccactgggggtatgttaatttattctagctaagcagtt

SEQ ID NO: 30400 - DNA, 120 bp, synthetic construct; identical to SEQ ID NO: 8573
  source 1..120: mol_type = other DNA

SEQ ID NO: 30401 - DNA, 120 bp, synthetic construct
  source 1..120: mol_type = other DNA
gcaggttagtgttttaagaaaaacttgtgttttattttaatgtttagtttatagaaaactggatgatatctttttaactttagtaaatacgtttacacacggaattttttacaattatca

SEQ ID NO: 30402 - DNA, 120 bp, synthetic construct
  source 1..120: mol_type = other DNA
ataatttttttactaaaggtacatttttataactttttaaatttttttacttttttgtatttttttgatttttgtcttagtcttttttttacttttatttttttaaatgtgtaataatta

SEQ ID NO: 30403 - DNA, 120 bp, synthetic construct
  source 1..120: mol_type = other DNA
aaggagggtatgtgcctgtgagctggtaatctgggcattgtgggataatttgtttagccagcctctgtgtaagttgaaattatttagataagtttctccaattttggtggaataatcgat

SEQ ID NO: 30404 - DNA, 120 bp, synthetic construct; identical to SEQ ID NO: 8574
  source 1..120: mol_type = other DNA

SEQ ID NO: 30405 - DNA, 120 bp, synthetic construct
  source 1..120: mol_type = other DNA
ctccaccagactgttgctttttcatgtttaccagacccaccagtaaaaacagctatggctccttccaaaggggcatcacaagtaatttttggaagaacctatgtagttaattttaagaat

SEQ ID NO: 30406 - DNA, 120 bp, synthetic construct
  source 1..120: mol_type = other DNA
ttttattgggctcagtgccacaaaatttaataattcatatatgagcctgtccaattagaattgccatctgatttaagtatactgtaagtgcttttatggtattatgtggcaaaaaggacc

SEQ ID NO: 30407 - DNA, 120 bp, synthetic construct
  source 1..120: mol_type = other DNA
aggcaagtctgagtcaatcctactgacctgggcttgctgaattttgttttcaattactgataactctttcatggcctcgggtgttagttctctgttactgcgtaagttggtatttcccct

SEQ ID NO: 30408 - DNA, 120 bp, synthetic construct
  source 1..120: mol_type = other DNA
ttgaaccttttgaggcttaatggctctatcctgtacttgtattttcaaatactgaaaaggagtggttgtttgaattttgtcaggtgctataagtaattcagcatttgtaattgtcttttg

SEQ ID NO: 30409 - DNA, 120 bp, synthetic construct; identical to SEQ ID NO: 8575
  source 1..120: mol_type = other DNA

SEQ ID NO: 30410 - DNA, 120 bp, synthetic construct
  source 1..120: mol_type = other DNA
tttttgaaatctgcctctgctaaaggaattgtaaaaaagcagtcttttaaatctataataacaagcggtcagtctttagggagcacagtgggggatgggagcccaggttgtaaggctccc

SEQ ID NO: 30411 - DNA, 120 bp, synthetic construct
  source 1..120: mol_type = other DNA
tgggtgaaatatatcctttttttagtagtttattttataaagcacccccaacttttccttagggagcggccactgttcaacccagacggggcgccgggtcatccattttaagggaaattg

SEQ ID NO: 30412 - DNA, 120 bp, synthetic construct
  source 1..120: mol_type = other DNA
cggctgaggaggaggtggccattctggacatttctctacaggaaccgtgggctgaacaattttttgagtaggtttagggagactggggagattggcataaatcatcttcagactctcctt

SEQ ID NO: 30413 - DNA, 120 bp, synthetic construct
  source 1..120: mol_type = other DNA
aagcgaccaaacaggcaaaggaatttcctttccttctctatatgctcttttaaggtcctttccaactccttcttaatgttttaatttcaaagtttcctgttttgggaaccaagggcaaaa

SEQ ID NO: 30414 - DNA, 120 bp, synthetic construct; identical to SEQ ID NO: 8576
  source 1..120: mol_type = other DNA

SEQ ID NO: 30415 - DNA, 120 bp, synthetic construct
  source 1..120: mol_type = other DNA
aaagagtggaggccagggggccaattgcaaaatggaggctgcaaaaggctcagagctctggtctccacactatttattgagtacaataacttagatctaagaagcagatgttcagggcaa

SEQ ID NO: 30416 - DNA, 120 bp, synthetic construct
  source 1..120: mol_type = other DNA
gcttaactaggagcctgcacgtctgtccacattccaatgcttcaaaggagggtctttctccttgaatacagtgtttacagataagagagagcaggtctcgctctgagcatggcaattagg

SEQ ID NO: 30417 - DNA, 120 bp, synthetic construct
  source 1..120: mol_type = other DNA
ctgtgccctgggagctcactgtcttgtgggagggaaccactcaagccactccccacttgtcctcctgtccctctcttcttgggctctgtcccccacctctctctgtcctttgtcttgcag

SEQ ID NO: 30418 - DNA, 120 bp, synthetic construct; identical to SEQ ID NO: 8577
  source 1..120: mol_type = other DNA

SEQ ID NO: 30419 - DNA, 120 bp, synthetic construct
  source 1..120: mol_type = other DNA
ttatccctcagaccatctcagagctgcagctctcagtaggactcctcggacccctgggagatggtgggggaaggggaggagggtgagctggggtcccaaggatccatggcctgacttggg

SEQ ID NO: 30420 - DNA, 120 bp, synthetic construct
  source 1..120: mol_type = other DNA
ggaggccccgggtttctgtctattgagcggccggattctcgacctcctcgtgttggggacactctgaacctgaacttgcgagccgtgggcagtggggccaccttttctcattactactac

SEQ ID NO: 30421 - DNA, 120 bp, synthetic construct
  source 1..120: mol_type = other DNA
ccattcttggcccagatcctatcccgagggcagatcgtgttcatgaatcgagagcccaagaggaccctgacctcggtctcggtgtttgtggaccatcacctggcaccctccttctacttt

SEQ ID NO: 30422 - DNA, 120 bp, synthetic construct; identical to SEQ ID NO: 8578
  source 1..120: mol_type = other DNA

SEQ ID NO: 30423 - DNA, 120 bp, synthetic construct
  source 1..120: mol_type = other DNA
agcaagtcccacaagcccctcaacatgggcaaggtttgtccagaccctctccacagctctctcacccctccatggctcatccccctgcttccctgagccttgggcgcagcccctggatcc

SEQ ID NO: 30424 - DNA, 120 bp, synthetic construct
  source 1..120: mol_type = other DNA
ccctcagccacacttggctcctagcattcctgcctttcttgcaggtctttgaagctatgaacagctatgacctcggctgtggtcctgggggtggggacagtgcccttcaggtgttccagg

SEQ ID NO: 30425 - DNA, 120 bp, synthetic construct
  source 1..120: mol_type = other DNA
gctggaagagtccgggcaggaagggctgggcaggggaaggggaggaggggaggaggccgagtgcctgacggctggactgcagcctttctctctaccaggactaagctgtcccaaggagaa

SEQ ID NO: 30426 - DNA, 120 bp, synthetic construct; identical to SEQ ID NO: 8579
  source 1..120: mol_type = other DNA

SEQ ID NO: 30427 - DNA, 120 bp, synthetic construct
  source 1..120: mol_type = other DNA
gtgacacgtctgcccatgatgcgttcctgcgagcagcgggcagcccgcgtgcagcagccggactgccgggagcccttcctgtcctgctgccaatttgctgagagtctgcgcaagaagagc

SEQ ID NO: 30428 - DNA, 120 bp, synthetic construct
  source 1..120: mol_type = other DNA
agccctggagatcctgcaggaggaggacctgattgatgaggatgacattcccgtgcgcagcttcttcccagagaactggctctggagagtggaaacagtggaccgctttcaaatgtgaga

SEQ ID NO: 30429 - DNA, 120 bp, synthetic construct
  source 1..120: mol_type = other DNA
ggagatccatggcctgagcctgtccaaaaccaaaggtgatgtcaccctgtctgggcctcaggtgaccctgcttccatttccctgtaccccagctccctgttccctttgctcttagtgtag

SEQ ID NO: 30430 - DNA, 120 bp, synthetic construct; identical to SEQ ID NO: 8580
  source 1..120: mol_type = other DNA

SEQ ID NO: 30431 - DNA, 120 bp, synthetic construct
  source 1..120: mol_type = other DNA
gcccagtgaggggtggggaggctaaccgggccaggactctggccatcctcgttttcctgccctcaggtgagcgtccacgtgtccccagtggaggggctgtgcctggctgggggcggaggg

SEQ ID NO: 30432 - DNA, 120 bp, synthetic construct
  source 1..120: mol_type = other DNA
gtgggagatgcggtgtccaaggttctgcagattgaggtgaatggagcacccctgaatataagtccccgggcccccagctttgtcctccaccctcagcactctctctgctggccaggccag

SEQ ID NO: 30433 - DNA, 120 bp, synthetic construct
  source 1..120: mol_type = other DNA
agtcctgtgtgacctcacaaccatgttttccctgagacagaaggaaggggccatccatagagaggagctggtctatgaactcaaccccttgggtgagtgaccctctacctccagccattg

SEQ ID NO: 30434 - DNA, 120 bp, synthetic construct; identical to SEQ ID NO: 8581
  source 1..120: mol_type = other DNA

SEQ ID NO: 30435 - DNA, 120 bp, synthetic construct
  source 1..120: mol_type = other DNA
ctcttgaggcttcctcgaggctgtggggagcaaaccatgatctacttggctccgacactggctgcttcccgctacctggacaagacagagcagtggagcacactgcctcccgagaccaag

SEQ ID NO: 30436 - DNA, 120 bp, synthetic construct
  source 1..120: mol_type = other DNA
ggcccctgatgaggatggggagcatggccttgggctcaaacagcagaagggtgagtgtcacctgagcggccacctctcctctccaaggctacatgcggatccagcagtttcggaaggcgg

SEQ ID NO: 30437 - DNA, 120 bp, synthetic construct
  source 1..120: mol_type = other DNA
gagggtggataaccaggcacctgggggcgtgggcataatgagaagcaagtccttatccccaaccctcctttcctgccctccaggctcacagcctttgtgttgaaggtcctgagtttggcc

SEQ ID NO: 30438 - DNA, 120 bp, synthetic construct; identical to SEQ ID NO: 8582
  source 1..120: mol_type = other DNA

SEQ ID NO: 30439 - DNA, 120 bp, synthetic construct
  source 1..120: mol_type = other DNA
ctggcccccagctctctccctttttcctcaggaacccaggggtccaggcccaagaccctcctcccgttttcttccaggaagcctccatctcaaaggcaaactcatttttgggggagaaag

SEQ ID NO: 30440 - DNA, 120 bp, synthetic construct
  source 1..120: mol_type = other DNA
agactggaggtgaggggtgaggcgctcctggcagtgagcctgaggcccaggggaccttaggatccctgagtgtgcccagagggagaggctggatgaagactcagaggaggaatgaagtta

SEQ ID NO: 30441 - DNA, 120 bp, synthetic construct
  source 1..120: mol_type = other DNA
acctgtactggggctcagtcactggttctcagagcaatgccgtgtcgcccaccccggctcctcgcaacccatccgaccccatgccccaggccccagccctgtggattgaaaccacagcct

SEQ ID NO: 30442 - DNA, 120 bp, synthetic construct; identical to SEQ ID NO: 8583
  source 1..120: mol_type = other DNA

SEQ ID NO: 30443 - DNA, 120 bp, synthetic construct
  source 1..120: mol_type = other DNA
gtgaaccactccctggtgaaccactccctcgcctgggtagccaggacacctgggcctcgtggccaggccagaagccgtccccaccctcccacccgtggaatccccgcagcacttcttcct

SEQ ID NO: 30444 - DNA, 120 bp, synthetic construct
  source 1..120: mol_type = other DNA
tgagataattcatgtgctggtataaactttgtggaaatgtgaggtggggagaggaggtggggctgttttgaggaaggagataagttattggagccgcaaaaacaggtttgcttgtgccct

SEQ ID NO: 30445 - DNA, 120 bp, synthetic construct
  source 1..120: mol_type = other DNA
ggcactggtggaggagagggtgtggagtgagaggcctgtgggcagaggcacatggtccggggaaggaggcagacacctcagggttggtgtcccgtgcttccgtcctgggtgtttttcccc

SEQ ID NO: 30446 - DNA, 120 bp, synthetic construct; identical to SEQ ID NO: 8584
  source 1..120: mol_type = other DNA

SEQ ID NO: 30447 - DNA, 120 bp, synthetic construct
  source 1..120: mol_type = other DNA
cttggtgctgcatcctagattctgtgctgagacggccttctccctacctggaacttctctctacctcctgtctcccctgtctgatccactgtccacacggcagtgacactgaccttccaa

SEQ ID NO: 30448 - DNA, 120 bp, synthetic construct
  source 1..120: mol_type = other DNA
ctttcctgtccttccctgcttcttggcccacaggacaagctctttcttctccttcaagccttggccagaagcctttcctgagcttttcagtccagcctcttcccagcacagtctggagtg

SEQ ID NO: 30449 - DNA, 120 bp, synthetic construct
  source 1..120: mol_type = other DNA
gcctcaaatcctgtagcccagggagatgcccttaggtatggcaccagagaggtctgtggcctcacatgtcccacgtcctctccctgccccttgctgagccaggtccttcgtacctacaat

SEQ ID NO: 30450 - DNA, 120 bp, synthetic construct; identical to SEQ ID NO: 8585
  source 1..120: mol_type = other DNA

SEQ ID NO: 30451 - DNA, 120 bp, synthetic construct
  source 1..120: mol_type = other DNA
gtgggcgccgggagctgccctgggccaggggagggagggcaggacccaggctggggctgggcttctggagcccgcgcaggcagaacctggacgacagctcacacgtctccacaggcggaa

SEQ ID NO: 30452 - DNA, 120 bp, synthetic construct
  source 1..120: mol_type = other DNA
caggtactgagccctgtcatgtgcagggcctgtgaccaactccccttttccacagctgacctccctctctgaccgttacgtgagtcactttgagaccgaggggccccacgtcctgctgta

SEQ ID NO: 30453 - DNA, 120 bp, synthetic construct
  source 1..120: mol_type = other DNA
tctcaggagacagctgtgtcagcggctggtgctcttgagaacttgtgatgtcatcagagagaaggacaagaatgtgagcccgtgagacacagcagagtaaggggcagacctgcaggcggc

SEQ ID NO: 30454 - DNA, 120 bp, synthetic construct; identical to SEQ ID NO: 8586
  source 1..120: mol_type = other DNA

SEQ ID NO: 30455 - DNA, 120 bp, synthetic construct
  source 1..120: mol_type = other DNA
gccaccatgcccggccttcaaaaaaagttttggaacatttactgtaacctctgggagaaaatgtgagaaaggtgtggtggctgtcattagccagctgtttgtaggtcagggagaccccta

SEQ ID NO: 30456 - DNA, 120 bp, synthetic construct
  source 1..120: mol_type = other DNA
gcagcctagctcaggagggacactggcacggcaccgtgtggactgggcccgcgtgggcacgaggaggggtcaggcctgggacctgagtcggggggtcaggcaggatgacagaacctgcag

SEQ ID NO: 30457 - DNA, 120 bp, synthetic construct
  source 1..120: mol_type = other DNA
atcctaatgcaaggatggagctgcaagttcagtttgggaatcatcagcctggattggtttggtggaagccagggagtggttgagacccccacaggggagctctgaggaaggaagttccga

SEQ ID NO: 30458 - DNA, 120 bp, synthetic construct; identical to SEQ ID NO: 8587
  source 1..120: mol_type = other DNA

SEQ ID NO: 30459 - DNA, 120 bp, synthetic construct
  source 1..120: mol_type = other DNA
gcgtgggctttgaggctgtgcaggaagtgccggtggggctggtgcagccggccagcgcaaccctgtacgactactacaaccccggtgagcactgcaggacaccctgaaattcaggagaac

SEQ ID NO: 30460 - DNA, 120 bp, synthetic construct
  source 1..120: mol_type = other DNA
gttctccagagcgcagatgttctgtgttttacggggcaccaagtaagagcagactcttggccaccttgtgttctgctgaagtctgccagtgtgctgagggtgagactgagggcctggggc

SEQ ID NO: 30461 - DNA, 120 bp, synthetic construct
  source 1..120: mol_type = other DNA
tacaggatgaagtttgcctgctactacccccgtgtggagtacggtcagtcttcccaccgaggccctggcctgaccctccctcggggaccggccgttttggtctctctgggtgtagcctgc

SEQ ID NO: 30462 - DNA, 120 bp, synthetic construct; identical to SEQ ID NO: 8588
  source 1..120: mol_type = other DNA

SEQ ID NO: 30463 - DNA, 120 bp, synthetic construct
  source 1..120: mol_type = other DNA
gaatgagaggatctacacagagtccccagcctgggctcaccctgcaccttctcttcccctctgaccacttttgcgcacgtcatccccgcagccaaggatgtcaaggccgctgctaatcag

SEQ ID NO: 30464 - DNA, 120 bp, synthetic construct
  source 1..120: mol_type = other DNA
cctcagtctcttgtcctccccatgcctcgccacctaggccttgcccctcagaagccagatgcctgtgctctccgtttccacctgccatcctcccgagccctgctgactgcccctttgccc

SEQ ID NO: 30465 - DNA, 120 bp, synthetic construct
  source 1..120: mol_type = other DNA
agtatggcactcaggggtgccaggtgtgagggctgccctcccacctccgctgggaggaacctgaacctgggaaccatgaagctggaagcactgctgtgtccgctttcatgaacacagcct

SEQ ID NO: 30466 - DNA, 120 bp, synthetic construct; identical to SEQ ID NO: 8589
  source 1..120: mol_type = other DNA

SEQ ID NO: 30467 - DNA, 120 bp, synthetic construct
  source 1..120: mol_type = other DNA
gctgacacctgtgacacagctcttctgcctcatgagctgttgtccagctacacctccccgactctgtcctcgtgctgctggcggttctgaggtctgcagattttagctgagttccgggct

SEQ ID NO: 30468 - DNA, 120 bp, synthetic construct
  source 1..120: mol_type = other DNA
gtctgactttggtgtgtttgtgaatcctctgaggaagccgctgttctcctggggtctccccttcccaccggacctgcctaactttcccccatttagtggcacacctggggtcttcagaga

SEQ ID NO: 30469 - DNA, 120 bp, synthetic construct
  source 1..120: mol_type = other DNA
ccctgtgccaggtgccagagatacagctgctcactccagggctcatcgctggggagacagataagaggacgggcagtccccaccctctgtgaaagatgtgatgtcagggagcagtgtggt

SEQ ID NO: 30470 - DNA, 120 bp, synthetic construct; identical to SEQ ID NO: 8590
  source 1..120: mol_type = other DNA

SEQ ID NO: 30471 - DNA, 120 bp, synthetic construct
  source 1..120: mol_type = other DNA
gtggcagaggtttcctgaggctcttgcatacatggccctatggttgctcatcagatctttctcccagtagctgctcagcatggtggtggcataagcccattttccggagccagggattca

SEQ ID NO: 30472 - DNA, 120 bp, synthetic construct
  source 1..120: mol_type = other DNA
cagcagcgaactcgccaatgtagtgggtggcacagccagggtcttgactctggctctgcagtagcacagtctggaaaagctctgaggggagagagacccccactggtccgagggtctggc

SEQ ID NO: 30473 - DNA, 120 bp, synthetic construct
  source 1..120: mol_type = other DNA
caaatccccaaactgcctccttactcacaaaagtggtctctgagtgtcagtccagtgggacccccaccccttatggcttcagttccccaaatagggctggacccttgatcctgatccagc

SEQ ID NO: 30474 - DNA, 120 bp, synthetic construct; identical to SEQ ID NO: 8591
  source 1..120: mol_type = other DNA

SEQ ID NO: 30475 - DNA, 120 bp, synthetic construct
  source 1..120: mol_type = other DNA
aaaggtgctcctggtggctaaaggtacatattcgacagctagatttccaggctggaatcctgccctccacaacatgcgaacaatacccgtgttgcatatagagcatggctgtgaagagtt

SEQ ID NO: 30476 - DNA, 120 bp, synthetic construct
  source 1..120: mol_type = other DNA
aatcacactgggatacctgtatatactggaatgccccaggcaaaccaggcttaaactgtattactctatctgtagcttaaactaacaaacaaacccacacaaatcacattttgttcttca

SEQ ID NO: 30477 - DNA, 120 bp, synthetic construct
  source 1..120: mol_type = other DNA
ccttgcctgcacgggtgatgtggaaccagaaagctgactctggatgcaggaaaaaggtcagggttgcatttcccttccttgcttctcgatgggtgattaattttttttgaaatacggacg

SEQ ID NO: 30478 - DNA, 120 bp, synthetic construct; identical to SEQ ID NO: 8592
  source 1..120: mol_type = other DNA

SEQ ID NO: 30479 - DNA, 120 bp, synthetic construct
  source 1..120: mol_type = other DNA
ctccaccttgggctgcaaggtgagaggctgatctcgctctggccctcaccataggagggggcggaggtgacggagagggtcctctctccgctgacgctgctttggctgtctcccagatgt

SEQ ID NO: 30480 - DNA, 120 bp, synthetic construct
  source 1..120: mol_type = other DNA
aattttttttttgttagagatggggtcttgctatgttgcccaggctggtcttgaattcctggtctcaagtgatcctcccacctcggcctcaagtgggagccaccttcgggggcttcccca

SEQ ID NO: 30481 - DNA, 120 bp, synthetic construct
  source 1..120: mol_type = other DNA
agctcctcctgcagacaagctggtgtctaagaactacccggacctgtcgttggtctctgctctggaaagcccacaagaagctcacccgctcagccctgctgctgggcatccgtgactcca

SEQ ID NO: 30482 - DNA, 120 bp, synthetic construct; identical to SEQ ID NO: 8593
  source 1..120: mol_type = other DNA

SEQ ID NO: 30483 - DNA, 120 bp, synthetic construct
  source 1..120: mol_type = other DNA
tccatcctttcctggcaggaggacaacttaatgcctgcctattacaaatgtatccaggaggtgttaaaaacctggagccactggtccatccaaattgtggacgtgattccctttctcagg

SEQ ID NO: 30484 - DNA, 120 bp, synthetic construct
  source 1..120: mol_type = other DNA
tccggaggctgaagcaggccatagagaagagggaccacaacgaggagaagcagctgaggcagcacaaggtggggactgtgtgtggacggcctcccctcggcccacagccagtgatgctac

SEQ ID NO: 30485 - DNA, 120 bp, synthetic construct
  source 1..120: mol_type = other DNA
agcctggtggcaggccagtggagggacatgatggactacatgctccaaggggtggcgcagccgagcatggaagagggctctggacagctcctggaagggcacttgcacatggctgcagtg

SEQ ID NO: 30486 - DNA, 120 bp, synthetic construct; identical to SEQ ID NO: 8594
  source 1..120: mol_type = other DNA

SEQ ID NO: 30487 - DNA, 120 bp, synthetic construct
  source 1..120: mol_type = other DNA
gcacggctgcccttgctcaatgccaccatcgccgaggtgctgcgcctgtggcccgttgtgcccttagccttgccccaccgcaccacacggcccagcaggtgactcccgagggttggggat

SEQ ID NO: 30488 - DNA, 120 bp, synthetic construct
  source 1..120: mol_type = other DNA
acctggatgagacggtctgggagaggccacatgagttctggcctggtatgtggggggccgggggcctgccatgaaaatgtggtggaggctggtccccgctgccgctgaacgcctccccac

SEQ ID NO: 30489 - DNA, 120 bp, synthetic construct
  source 1..120: mol_type = other DNA
gtggtgctgacccgactgctgcaggccttcacgctgctgccctccggggacgccctgccctccctgcagcccctgccccactgcagtgtcatcctcaagatgcagcctttccaagtgcgg

SEQ ID NO: 30490 - DNA, 120 bp, synthetic construct; identical to SEQ ID NO: 8595
  source 1..120: mol_type = other DNA

SEQ ID NO: 30491 - DNA, 120 bp, synthetic construct
  source 1..120: mol_type = other DNA
ctccctgggaaaggggttgtcaagagagagtcaaagccggatgtcccatctgctcctcccgttccccttaaggaggtggctcccagcactcaaccaacctccccgcagagctcccttcct

SEQ ID NO: 30492 - DNA, 120 bp, synthetic construct
  source 1..120: mol_type = other DNA
ccttgcctgttacactgtggggctgaaacctaggcaggccgagccccagccaccccagctctgagccgcctccccacccctcacctgatggtccactgtgctcccgtagagcccgttgag

SEQ ID NO: 30493 - DNA, 120 bp, synthetic construct
  source 1..120: mol_type = other DNA
ggagtcccctgggcagggtggaggaaggagccatgagggcctcccctcccagcctcaccctcccagcctcacagcctctgcttacctgcggtgccgtggtagccctccaagtggaggcgg

SEQ ID NO: 30494 - DNA, 120 bp, synthetic construct; identical to SEQ ID NO: 8596
  source 1..120: mol_type = other DNA

SEQ ID NO: 30495 - DNA, 120 bp, synthetic construct
  source 1..120: mol_type = other DNA
aacagccccttgccctgcacagacccctgggcttcccaatgccacccaccagccagccgcccccatcagtctccatgtcccaaaacacgttcaggggccgctcccggttgccgttgagga

SEQ ID NO: 30496 - DNA, 120 bp, synthetic construct
  source 1..120: mol_type = other DNA
taggccctggctgcccacccagcccccggccccgggcccgtgcgtccaggtacccgtggtgaaagaggtggacacgggcggcaggaggctctggccccacatggcctggagccgtgcatt

SEQ ID NO: 30497 - DNA, 120 bp, synthetic construct
  source 1..120: mol_type = other DNA
gggccagaggcagcacctcctggaatcacccagggaggggagttgggtcagtggggccggggcacctggttctgtccaccaggggtgtggaagctgagcaggtagcctgcgggccggact

SEQ ID NO: 30498 - DNA, 120 bp, synthetic construct; identical to SEQ ID NO: 8597
  source 1..120: mol_type = other DNA

SEQ ID NO: 30499 - DNA, 120 bp, synthetic construct
  source 1..120: mol_type = other DNA
ccagagtccagcctcccccctgcaatccccaccctgaacaagtcccctccagaggcctcaggcctgctcacccccaggggctgtgacctggacgtcataggtgtccacaggattctgggg

SEQ ID NO: 30500 - DNA, 120 bp, synthetic construct
  source 1..120: mol_type = other DNA
cgtgcctccccagactccactggcctcccgtccgcaatcggagcctccaccacctccctttcaccctcctcgttctctctcaactcccacccatgccgttttcttgactcccacctggag

SEQ ID NO: 30501 - DNA, 120 bp, synthetic construct
  source 1..120: mol_type = other DNA
agaggaaatgcgaggcgatgagcacatggcaaaggcaccacctccgtccgccagctggtaggagactttgaagctgtccgcccgggatggtgggggcatccagttgaccttggctgaggt

SEQ ID NO: 30502 - DNA, 120 bp, synthetic construct; identical to SEQ ID NO: 8598
  source 1..120: mol_type = other DNA

SEQ ID NO: 30503 - DNA, 120 bp, synthetic construct
  source 1..120: mol_type = other DNA
agtgtcaggctgtacagagtcccggaacgcaggtcccggagcacggccgagtgccgcgtccccggcaccatcagctcgcgctgcagcagtggacgcggatgcggctccagagtgcttggt

SEQ ID NO: 30504 - DNA, 120 bp, synthetic construct
  source 1..120: mol_type = other DNA
tcctctgaggtctgaccagcaggagccagccctgcacggagtgggtgggggagaagggattggagacagaagcacaccagcttggtgacccagagcacgtcccttccacccccctccctg

SEQ ID NO: 30505 - DNA, 120 bp, synthetic construct
  source 1..120: mol_type = other DNA
tttccctgcgaccaccccttctgagcccccgtttctcccttctgagtcctaggctagaggccggagacgcctggtggtacctgtggtgccctcagctgagaggggccccaggcgcttccc

SEQ ID NO: 30506 - DNA, 120 bp, synthetic construct; identical to SEQ ID NO: 8599
  source 1..120: mol_type = other DNA

SEQ ID NO: 30507 - DNA, 120 bp, synthetic construct
  source 1..120: mol_type = other DNA
aaggctgaggtgggaagtttataggtccaggcccagtcagacaatgaagtcgctgtggcctcgtgactcctgcgagctcccgcgctgtctgagtcaggtgctcgcttcccccttccacac

SEQ ID NO: 30508 - DNA, 120 bp, synthetic construct
  source 1..120: mol_type = other DNA
tggctggttgaggtgactggcaaatcccaccagccgtgccgtggtcaggcctgtctgaggtgggcatcagcgagctctggaagaggagcctgtaccacaaatgcagccactgctgttggt

SEQ ID NO: 30509 - DNA, 120 bp, synthetic construct
  source 1..120: mol_type = other DNA
gcagccccagcgagtaatgaggagcagcggcagtgacggggcagagtcggggctgggagattagagagcccctcccagggcctttccctcccgcctggcctggctcctgctctggactcc

SEQ ID NO: 30510 - DNA, 120 bp, synthetic construct; identical to SEQ ID NO: 8600
  source 1..120: mol_type = other DNA

SEQ ID NO: 30511 - DNA, 120 bp, synthetic construct
  source 1..120: mol_type = other DNA
acctcattggggcccagctagtggactggtgagtctttccctggcctctggcagattatggagcaatgacccaaagtgggatttcctcccagctcatgcttagtttcctagtgaaggcca

SEQ ID NO: 30512 - DNA, 120 bp, synthetic construct
  source 1..120: mol_type = other DNA
tggctccagccttgtctttctcctgcacagcatctctaccacttcaggaaccctcctccgcctgccagagacatgaagattctgctcatcattgctcagctcctcagagtgggccgggag

SEQ ID NO: 30513 - DNA, 120 bp, synthetic construct
  source 1..120: mol_type = other DNA
ctggtttctgacccagtggtggggtttgagcaatgcttctctgcccttccatggaaagtggaaccagaaatggtgccaaggctgtggctgttccctttcgtgtaaaatggtgctgttatt

SEQ ID NO: 30514 - DNA, 120 bp, synthetic construct; identical to SEQ ID NO: 8601
  source 1..120: mol_type = other DNA

SEQ ID NO: 30515 - DNA, 120 bp, synthetic construct
  source 1..120: mol_type = other DNA
ctagtatagttcaatttgtgttggaatgaaagtaagagacaagtgtcttagaagcctgtcattgttttgtgagggcctttaaatatcctgtactcgtgggccatgttgggcccttgtacg

SEQ ID NO: 30516 - DNA, 120 bp, synthetic construct
  source 1..120: mol_type = other DNA
aagattcagagtttcccatggacacccaggtgtccggggtgcccccacaactctgggcctgaggccagttgcacttcttggctgtcacgtggtttcccagcttagctgggctgggggagg

SEQ ID NO: 30517 - DNA, 120 bp, synthetic construct
  source 1..120: mol_type = other DNA
ggcatccagcttcttcaccttatctctgcagaagcccaggtcctggaggcgggatgctgggtgcttggattggggcagggctggcatcgggacccgattcaggagtgagggagagcaggg

SEQ ID NO: 30518 - DNA, 120 bp, synthetic construct; identical to SEQ ID NO: 8602
  source 1..120: mol_type = other DNA

SEQ ID NO: 30519 - DNA, 120 bp, synthetic construct
  source 1..120: mol_type = other DNA
accctggcattctccttccacgtttctcccttggtctctgtcctttttggtcagctgtctcttgctctgtgacccgctccctctccctctccctctcctgacaggtgcccttgaaagatg

SEQ ID NO: 30520 - DNA, 120 bp, synthetic construct
  source 1..120: mol_type = other DNA
tctcctctcgccgggggcacctctttttgcagacggaccagcccatttacaaccctggccagcggggtgagtctcagccccagggcctcaacctttaaccccctccgagccctctcagga

SEQ ID NO: 30521 - DNA, 120 bp, synthetic construct
  source 1..120: mol_type = other DNA
gacccctgctcacctctctcctcctccactcccagttcggtaccgggtctttgctctggatcagaagatgcgcccgagcactgacaccatcacagtcatggtggaggtgagtccccgacc

SEQ ID NO: 30522 - DNA, 120 bp, synthetic construct; identical to SEQ ID NO: 8603
  source 1..120: mol_type = other DNA

SEQ ID NO: 30523 - DNA, 120 bp, synthetic construct
  source 1..120: mol_type = other DNA
tccattctcaggccagggacctggaagatctcagcccgattctcagatggcctggaatccaacagcagcacccagtttgaggtgaagaaatatggtgagagctggaaactggagggacag

SEQ ID NO: 30524 - DNA, 120 bp, synthetic construct
  source 1..120: mol_type = other DNA
gcctatcccttcaccctgggtcagtccttcccaactttgaggtgaagatcacccctggaaagccctacatcctgacggtgccaggccatcttgatgaaatgcagttagacatccaggcca

SEQ ID NO: 30525 - DNA, 120 bp, synthetic construct
  source 1..120: mol_type = other DNA
cttctctctgccacgacaggtacatctatgggaagccagtgcagggggtggcatatgtgcgctttgggctcctagatgaggatggtaagaagactttctttcgggggctggagagtcaga

SEQ ID NO: 30526 - DNA, 120 bp, synthetic construct; identical to SEQ ID NO: 8604
  source 1..120: mol_type = other DNA

SEQ ID NO: 30527 - DNA, 120 bp, synthetic construct
  source 1..120: mol_type = other DNA
cacttctcacatctcatctcagactcaaaaccaggaaacacccaggagacctggtttctctccaactctgtctctgtgactcggcccttttccctggctgagtttatttatttctttgct

SEQ ID NO: 30528 - DNA, 120 bp, synthetic construct
  source 1..120: mol_type = other DNA
tccattggtgacacaggaatgagaagagacaggttaagagttcataaagagtgggggccagggggccaattgcaaaatggaggctgcaaaaggctcagagctctggtctccacactattt

SEQ ID NO: 30529 - DNA, 120 bp, synthetic construct
  source 1..120: mol_type = other DNA
aaacagcatgtctttaaattatcggagagtagctggtggaagtgggcttagctagaagactgcatgtctgtccaatgcttcaaaggagggtctttctccttgaacagagtgtttacagat

SEQ ID NO: 30530 - DNA, 120 bp, synthetic construct; identical to SEQ ID NO: 8605
  source 1..120: mol_type = other DNA

SEQ ID NO: 30531 - DNA, 120 bp, synthetic construct
  source 1..120: mol_type = other DNA
tttaagaggatttatgtttgaaagtccgtcagtagctccaatgagaatgtcagtctcaggcaggagggttaaatgagcctgagatgctttaaaaacctgtttttttaaaatttggttata

SEQ ID NO: 30532 - DNA, 120 bp, synthetic construct
  source 1..120: mol_type = other DNA
gggagttatgtagaaattggaagtatttcaattacattgtacttctaattgatgttttaagtttattgtacgatcttccatttaaataacagtctgtctaagatcatttgtttgatttgt

SEQ ID NO: 30533 - DNA, 120 bp, synthetic construct
  source 1..120: mol_type = other DNA
gctgtgactgcaataaggcccataagactgttataagggtaaaaataaatctctttgttttggtaaacacttttttttaaaacatttttgtgacaatatgaatggaaggagaggctttct

SEQ ID NO: 30534 - DNA, 120 bp, synthetic construct
  source 1..120: mol_type = other DNA
tagtttgagaattaggtcgaatgtcaatatttttgaccattaacataaaaggagggttgacacaactctgaatgggcactgttttgttggaagaaaactgatacgcaaattgaagttttt

SEQ ID NO: 30535 - DNA, 120 bp, synthetic construct; identical to SEQ ID NO: 8606
  source 1..120: mol_type = other DNA

SEQ ID NO: 30536 - DNA, 120 bp, synthetic construct
  source 1..120: mol_type = other DNA
ttgatgggtacaattaactgtaaaggtcccctcaggggaccaattaatgacaatttcataggaattattttgtagtaccatagtgtgatcagagatgtaattttttttaattaatatttt

SEQ ID NO: 30537 - DNA, 120 bp, synthetic construct
  source 1..120: mol_type = other DNA
gtctttgattatgacctggaattttaactagtcaatgttgtcggtagccttttaggcaaccgatagttggccttatgtaaagaggggggaactgataacctatggacacatttattaact

SEQ ID NO: 30538 - DNA, 120 bp, synthetic construct
  source 1..120: mol_type = other DNA
caggaatgggacacatgcccaataggtataattttgggctgttgtagccacaggtttgttaggcgaggaggtcactgtttttattttggctttgtattctaggattagtaaataacagaa

SEQ ID NO: 30539 - DNA, 120 bp, synthetic construct; identical to SEQ ID NO: 8607
  source 1..120: mol_type = other DNA

SEQ ID NO: 30540 - DNA, 120 bp, synthetic construct
  source 1..120: mol_type = other DNA
ttagacttttgtttttttagtataatgtctgaggcctgtgttgtttgtggaagtcgcattgttgaggctgtagttcctgtagggtcttttttaggctggttcaaatgtttttttattttt

SEQ ID NO: 30541 - DNA, 120 bp, synthetic construct
  source 1..120: mol_type = other DNA
ttttacaatttttaaagagcaggttagtgttttaagaaaaacttgtgttttattttaatgtttagtttatagaaaactggatgatatctttttaactttagtaaatacgtttacacacgg

SEQ ID NO: 30542 - DNA, 120 bp, synthetic construct
  source 1..120: mol_type = other DNA
cttaactttttatgttttataatttttttactaaaggtacatttttataactttttaaatttttttacttttttgtatttttttgatttttgtcttagtcttttttttacttttattttt

SEQ ID NO: 30543 - DNA, 120 bp, synthetic construct
  source 1..120: mol_type = other DNA
tacggttaacacctattgaaggagggtatgtgcctgtgagctggtaatctgggcattgtgggataatttgtttagccagcctctgtgtaagttgaaattatttagataagtttctccaat

SEQ ID NO: 30544 - DNA, 120 bp, synthetic construct; identical to SEQ ID NO: 8608
  source 1..120: mol_type = other DNA

SEQ ID NO: 30545 - DNA, 120 bp, synthetic construct
  source 1..120: mol_type = other DNA
catgtttaccagacccaccagtaaaaacagctatggctccttccaaaggggcatcacaagtaatttttggaagaacctatgtagttaattttaagaattgaaaagtttttaggataatga

SEQ ID NO: 30546 - DNA, 120 bp, synthetic construct
  source 1..120: mol_type = other DNA
atttattggaactataatttttattgggctcagtgccacaaaatttaataattcatatatgagcctgtccaattagaattgccatctgatttaagtatactgtaagtgcttttatggtat

SEQ ID NO: 30547 - DNA, 120 bp, synthetic construct
  source 1..120: mol_type = other DNA
gaacacaatgaattataaaggcaagtctgagtcaatcctactgacctgggcttgctgaattttgttttcaattactgataactctttcatggcctcgggtgttagttctctgttactgcg

SEQ ID NO: 30548 - DNA, 120 bp, synthetic construct
  source 1..120: mol_type = other DNA
gaaagaatctcttctaatttgaaccttttgaggcttaatggctctatcctgtacttgtattttcaaatactgaaaaggagtggttgtttgaattttgtcaggtgctataagtaattcagc

SEQ ID NO: 30549 - DNA, 120 bp, synthetic construct; identical to SEQ ID NO: 8609
  source 1..120: mol_type = other DNA

SEQ ID NO: 30550 - DNA, 120 bp, synthetic construct
  source 1..120: mol_type = other DNA
ggaatggtaaaggcaaattttttgaaatctgcctctgctaaaggaattgtaaaaaagcagtcttttaaatctataataacaagcggtcagtctttagggagcacagtgggggatgggagc

SEQ ID NO: 30551 - DNA, 120 bp, synthetic construct
  source 1..120: mol_type = other DNA
tagtagtttattttataaagcacccccaacttttccttagggagcggccactgttcaacccagacggggcgccgggtcatccattttaagggaaattgctccttcactgtaataactgta

SEQ ID NO: 30552 - DNA, 120 bp, synthetic construct
  source 1..120: mol_type = other DNA
tctggacatttctctacaggaaccgtgggctgaacaattttttgagtaggtttagggagactggggagattggcataaatcatcttcagactctcctttttgttagtactcggtagaggt

SEQ ID NO: 30553 - DNA, 120 bp, synthetic construct
  source 1..120: mol_type = other DNA
tgcatgcaccaatgaccaaagcgaccaaacaggcaaaggaatttcctttccttctctatatgctcttttaaggtcctttccaactccttcttaatgttttaatttcaaagtttcctgttt

SEQ ID NO: 30554 - DNA, 120 bp, synthetic construct; identical to SEQ ID NO: 8610
  source 1..120: mol_type = other DNA

SEQ ID NO: 30555 - DNA, 120 bp, synthetic construct
  source 1..120: mol_type = other DNA
gacaggttaagagttcataaagagtggaggccagggggccaattgcaaaatggaggctgcaaaaggctcagagctctggtctccacactatttattgagtacaataacttagatctaaga

SEQ ID NO: 30556 - DNA, 120 bp, synthetic construct
  source 1..120: mol_type = other DNA
ctcctttgtgctcaaacagcatatctttaacttatcggagagtagctagtgggagtgggcttaactaggagcctgcacgtctgtccacattccaatgcttcaaaggagggtctttctcct

SEQ ID NO: 30557 - DNA, 120 bp, synthetic construct
  source 1..120: mol_type = other DNA
ccagtttatacaggcaccccacaagtccttttcccaacacagacaggaatacggcagcctgtgccctgggagctcactgtcttgtgggagggaaccactcaagccactccccacttgtcc

SEQ ID NO: 30558 - DNA, 120 bp, synthetic construct; identical to SEQ ID NO: 8611
  source 1..120: mol_type = other DNA

SEQ ID NO: 30559 - DNA, 120 bp, synthetic construct
  source 1..120: mol_type = other DNA
caaagtttctgccacggtgtcttctcctgggtctgttcctgaagtccaggacattcagcaaaacacagacgggagcggccaagtcagcattccaataattatccctcagaccatctcaga

SEQ ID NO: 30560 - DNA, 120 bp, synthetic construct
  source 1..120: mol_type = other DNA
tccatggcctgacttggggggaaggtggggtacttggctctgagctactaccctattcgcacctgaccccctctccaggtatctgcaggctccccacatccagcgatagccaggctcact

SEQ ID NO: 30561 - DNA, 120 bp, synthetic construct
  source 1..120: mol_type = other DNA
ttttctcattactactacatggtgtgcatgagctggggagtcacggagggctggggtgcagggaagagccctctgggtggggctgggggggttcaaggctgaggctgtcccatgaagagg

SEQ ID NO: 30562 - DNA, 120 bp, synthetic construct; identical to SEQ ID NO: 8612
  source 1..120: mol_type = other DNA

SEQ ID NO: 30563 - DNA, 120 bp, synthetic construct
  source 1..120: mol_type = other DNA
cgcccctgccagctggagctcagcgtggacggtgccaagcagtaccggaacggggagtccgtgaagctccacttagaaaccgactccctagccctggtggcgctgggagccttggacaca

SEQ ID NO: 30564 - DNA, 120 bp, synthetic construct
  source 1..120: mol_type = other DNA
ggcgcagcccctggatcccactgaggctccccacagtctcttccccacttggccctgtggtctccatctcctggctctgtatcctttcctatccccccatgtgctgccctctcacctgtg

SEQ ID NO: 30565 - DNA, 120 bp, synthetic construct
  source 1..120: mol_type = other DNA
cccttcaggtgttccaggcagcgggcctggccttttctgatggagaccagtggaccttatccagaaagagtgagaacagagaaggaaggggagtgggtggcgggaagataaggaaggagg

SEQ ID NO: 30566 - DNA, 120 bp, synthetic construct; identical to SEQ ID NO: 8613
  source 1..120: mol_type = other DNA

SEQ ID NO: 30567 - DNA, 120 bp, synthetic construct
  source 1..120: mol_type = other DNA
ggattacgagtggaaggtgggcagctctctccagcagcctctcttatgttgctggtctcaaggggtcggggcgggggctgaggtgtatgtcctttttgtcctctcatgctcacccccacc

SEQ ID NO: 30568 - DNA, 120 bp, synthetic construct
  source 1..120: mol_type = other DNA
ctgccgggagcccttcctgtcctgctgccaatttgctgagagtctgcgcaagaagagcagggacaagggccaggcgggcctccaacgaggtgaggggctgggtggggctagggcacaggt

SEQ ID NO: 30569 - DNA, 120 bp, synthetic construct
  source 1..120: mol_type = other DNA
tcttcccagagaactggctctggagagtggaaacagtggaccgctttcaaatgtgagagtgtgtgccggcccggccttttctctgtgctgtgtctcggggccagccggggtagacgggcc

SEQ ID NO: 30570 - DNA, 120 bp, synthetic construct; identical to SEQ ID NO: 8614
  source 1..120: mol_type = other DNA

SEQ ID NO: 30571 - DNA, 120 bp, synthetic construct
  source 1..120: mol_type = other DNA
tggccaccccagtccagctccgggtgttccgcgagttccacctgcacctccgcctgcccatgtctgtccgccgctttgagcagctggagctgcggcctgtcctctataactacctggata

SEQ ID NO: 30572 - DNA, 120 bp, synthetic construct
  source 1..120: mol_type = other DNA
tcaggtgagcgtccacgtgtccccagtggaggggctgtgcctggctgggggcggagggctggcccagcaggtgctggtgcctgcgggctctgcccggcctgttgccttctctgtggtgcc

SEQ ID NO: 30573 - DNA, 120 bp, synthetic construct
  source 1..120: mol_type = other DNA
tccccgggcccccagctttgtcctccaccctcagcactctctctgctggccaggccaggggcccaacacccaaaccaatgccttggtctgttcccatcttctacaattctgatccaactc

SEQ ID NO: 30574 - DNA, 120 bp, synthetic construct; identical to SEQ ID NO: 8615
  source 1..120: mol_type = other DNA

SEQ ID NO: 30575 - DNA, 120 bp, synthetic construct
  source 1..120: mol_type = other DNA
ccttcccagtggccaccttcggattcatgtgggacttgtggatccctgcttggtcccactccccgtgagcctctgacacagagtcctcagacctccaccctctccctcccatgtagcctc

SEQ ID NO: 30576 - DNA, 120 bp, synthetic construct
  source 1..120: mol_type = other DNA
tgcttcccgctacctggacaagacagagcagtggagcacactgcctcccgagaccaaggaccacgccgtggatctgatccagaaaggttctgggtgcaagggcaagcaggaggggggcca

SEQ ID NO: 30577 - DNA, 120 bp, synthetic construct
  source 1..120: mol_type = other DNA
tgagcggccacctctcctctccaaggctacatgcggatccagcagtttcggaaggcggatggttcctatgcggcttggttgtcacggggcagcagcacctggtgagcttgggagagtggt

SEQ ID NO: 30578 - DNA, 120 bp, synthetic construct; identical to SEQ ID NO: 8616
  source 1..120: mol_type = other DNA

SEQ ID NO: 30579 - DNA, 120 bp, synthetic construct
  source 1..120: mol_type = other DNA
cctcctgtttgacatcttttctccccttactaggggggtttggtgggcaatgatgagactgtggcactcacagcctttgtgaccatcgcccttcatcatgggctggccgtcttccaggat

SEQ ID NO: 30580 - DNA, 120 bp, synthetic construct
  source 1..120: mol_type = other DNA
cccgttttcttccaggaagcctccatctcaaaggcaagctcatttttgggggagaaagcaagtgctgggctcctgggtgcccacgcagctgccatcacggcctatgccctgacactgacc

SEQ ID NO: 30581 - DNA, 120 bp, synthetic construct
  source 1..120: mol_type = other DNA
ccctgagtgtgcccagagggagaggctggatgaagactcagaggaggaatgaagttataagcaggggtgggttgggggagactcaggagagcccagcagggggtggctaagggccagggg

SEQ ID NO: 30582 - DNA, 120 bp, synthetic construct; identical to SEQ ID NO: 8617
  source 1..120: mol_type = other DNA

SEQ ID NO: 30583 - DNA, 120 bp, synthetic construct
  source 1..120: mol_type = other DNA
cctccctaggacacggtgattgccctggatgccctgtctgcctactggattgcctcccacaccactgaggagaggggtctcaatgtgactctcagctccacaggccggaatgggttcaag

SEQ ID NO: 30584 - DNA, 120 bp, synthetic construct
  source 1..120: mol_type = other DNA
caggccagaagccgtccccaccctcccacccgtggaatccccgcagcacttcttcctggggtcttcgggggaagactgacttcctggctgcgtgacctggagctctgagcttcagttttc

SEQ ID NO: 30585 - DNA, 120 bp, synthetic construct
  source 1..120: mol_type = other DNA
tgttttgaggaaggagataagttattggagccgcaaaaacaggtttgcttgtgcccttctaacatcgccttcccttttctgttgctgaagttttccttgggcagcaagatcaatgtgaag

SEQ ID NO: 30586 - DNA, 120 bp, synthetic construct; identical to SEQ ID NO: 8618
  source 1..120: mol_type = other DNA

SEQ ID NO: 30587 - DNA, 120 bp, synthetic construct
  source 1..120: mol_type = other DNA
tctcttgtctggctggtgggagcccctcccagccaggagcccagccactactctagaggccgtgttagtggcccctctcccaagcctgtccttatgtccctagtgactcctcctctgctc

SEQ ID NO: 30588 - DNA, 120 bp, synthetic construct
  source 1..120: mol_type = other DNA
tgacactgaccttccaaaagccccagccagatcagccttggggaaaagtcactccccgctgcccacggctcagatggctgggcctctgcccacccctccggccagacagctctccttgtc

SEQ ID NO: 30589 - DNA, 120 bp, synthetic construct
  source 1..120: mol_type = other DNA
cagcacagtctggagtgttggcctctgggggcaggcccctgcttctttacctctctgtctcgcctgacgcctgtggcgaatgtggtgccactcgtgtgtgtggactgtgcagtgacgggg

SEQ ID NO: 30590 - DNA, 120 bp, synthetic construct; identical to SEQ ID NO: 2765
  source 1..120: mol_type = other DNA

SEQ ID NO: 30591 - DNA, 120 bp, synthetic construct
  source 1..120: mol_type = other DNA
aaggatgacccagatgcccctctgcagcccgtgacacccctgcagctgtttgagggtcggaggaaccgccgcaggagggaggcgcccaaggtggtggaggagcaggagtccagggtgcac

SEQ ID NO: 30592 - DNA, 120 bp, synthetic construct
  source 1..120: mol_type = other DNA
cgtctccacaggcggaacggcaaggtggggctgtctggcatggccatcgcggacgtcaccctcctgagtggattccacgccctgcgtgctgacctggagaaggtgtggtcagccacccag

SEQ ID NO: 30593 - DNA, 120 bp, synthetic construct
  source 1..120: mol_type = other DNA
ccccacgtcctgctgtattttgactcggtgagtggggagagatgaggcaggaagggactcgatggcaccgggtttactgagtatgcgttaggaggtttctcaggagacagctgtgtcagc

SEQ ID NO: 30594 - DNA, 120 bp, synthetic construct; identical to SEQ ID NO: 8620
  source 1..120: mol_type = other DNA

SEQ ID NO: 30595 - DNA, 120 bp, synthetic construct
  source 1..120: mol_type = other DNA
acagggtctcgctctgttgcccaggctggtcttgaactcccggcctcaagcgatcctctggcctaggcctttcaaagtaccggatttacaggccagagccaccatgcccggccttcaaaa

SEQ ID NO: 30596 - DNA, 120 bp, synthetic construct
  source 1..120: mol_type = other DNA
cccccatcagctggggaagcctggctgacacatctgggttgaacacaatagaaaacacagagccaacaagattcccggatagggagctgacggtgcagcagcctagctcaggagggacac

SEQ ID NO: 30597 - DNA, 120 bp, synthetic construct
  source 1..120: mol_type = other DNA
gacccagttgtatccatgacaaagatgaggccgcgaggagggcgagtgggtttgggggcaggcagagtgccttggagaacttacaggtcctgccacaatcctaatgcaaggatggagctg

SEQ ID NO: 30598 - DNA, 120 bp, synthetic construct; identical to SEQ ID NO: 8621
  source 1..120: mol_type = other DNA

SEQ ID NO: 30599 - DNA, 120 bp, synthetic construct
  source 1..120: mol_type = other DNA
aggccaaggaaacccagtacagggggctgcagggcccagggagtgggtccctcatctctcctccccacgcttggccaggtccccacctcccgggagtgcgtgggctttgaggctgtgcag

SEQ ID NO: 30600 - DNA, 120 bp, synthetic construct
  source 1..120: mol_type = other DNA
ggacaatggacaccggggtagtgagggggcagagagccctggggctccctgggactgaggaggcagaatggaggggcctgtgccctaactcctctctgttctccagagcgcagatgttct

SEQ ID NO: 30601 - DNA, 120 bp, synthetic construct
  source 1..120: mol_type = other DNA
ggggccccccccacactgtctgatgggttccccaacttcagggaagtgccctcgccagcgtcgcgccctggagcggggtctgcaggacgaggatggctacaggatgaagtttgcctgcta

SEQ ID NO: 30602 - DNA, 120 bp, synthetic construct; identical to SEQ ID NO: 8622
  source 1..120: mol_type = other DNA

SEQ ID NO: 30603 - DNA, 120 bp, synthetic construct
  source 1..120: mol_type = other DNA
atctggaagtgtgaaaatccccttgggctgtcagaagccttgggcttggccataaatagggaggcagtggcacctctccatgggggtggcgaaggtggaatgagaggatctacacagagt

SEQ ID NO: 30604 - DNA, 120 bp, synthetic construct
  source 1..120: mol_type = other DNA
ctcctgccgccttcgcttggaacctgggaaagaatatttgatcatgggtctggatggggccacctatgacctcgagggacagtgagtcatctggtcccctcagtctcttgtcctccccat

SEQ ID NO: 30605 - DNA, 120 bp, synthetic construct
  source 1..120: mol_type = other DNA
gactcgaatagctggatcgaggagatgccctctgaacgcctgtgccggagcacccgccagcgggcagcctgtgcccagctcaacgacttcctccaggagtatggcactcaggggtgccag

SEQ ID NO: 30606 - DNA, 120 bp, synthetic construct; identical to SEQ ID NO: 8623
  source 1..120: mol_type = other DNA

SEQ ID NO: 30607 - DNA, 120 bp, synthetic construct
  source 1..120: mol_type = other DNA
ggaccagagtccatgccaagaccacccttcagcttccaaggccctccactgcccggctgtcgccagtcaccacggcctcagacagggcttgtgctcagctgacacctgtgacacagctct

SEQ ID NO: 30608 - DNA, 120 bp, synthetic construct; identical to SEQ ID NO: 2807
  source 1..120: mol_type = other DNA

SEQ ID NO: 30609 - DNA, 120 bp, synthetic construct
  source 1..120: mol_type = other DNA
gtttggtgagatcagtttccgtagaggtcatgacagttcagcagcctgccatccagtcattcgacagaaattcgggaatctttcacttcatgccatgccctgtgccaggtgccagagata

SEQ ID NO: 30610 - DNA, 120 bp, synthetic construct; identical to SEQ ID NO: 8624
  source 1..120: mol_type = other DNA

SEQ ID NO: 30611 - DNA, 120 bp, synthetic construct
  source 1..120: mol_type = other DNA
agacaagtagtaagcacgtcagccttccaggtgcgctcctttccgatgagcactgtcttatcccacgtaactttgagaagtttgggcctttcccactgtggcagaggtttcctgaggctc

SEQ ID NO: 30612 - DNA, 120 bp, synthetic construct
  source 1..120: mol_type = other DNA
ctgggaggtcaaccatgaagaaggcagtagctgtcattgcccaaccccagaaatcccaatcctgttttctccctctcagtcctgatcatggattcagcagcagcgaactcgccaatgtag

SEQ ID NO: 30613 - DNA, 120 bp, synthetic construct
  source 1..120: mol_type = other DNA
ggtatggggctgggtcgcctctgacctctcaggtaccatccaggaggccctggcctctcactgaacccggccactcctctttggcatggcctcttcccaaatccccaaactgcctcctta

SEQ ID NO: 30614 - DNA, 120 bp, synthetic construct; identical to SEQ ID NO: 8625
  source 1..120: mol_type = other DNA

SEQ ID NO: 30615 - DNA, 120 bp, synthetic construct
  source 1..120: mol_type = other DNA
tcctctgcttctttttcctgagttctgtgaaattccccaattcttattttttatctcaaaccagctcaaggtgggctgttttcctttcaaccaaagaaaggtgctcctggtggctaaagg

SEQ ID NO: 30616 - DNA, 120 bp, synthetic construct
  source 1..120: mol_type = other DNA
atggctgtgaagagttgagtgagtgcccacaaagcacttagagcagtgtctggtacatgctattactccgcagcgggaaaccacttcctcctttgtcttctgggcacttttgtgagtgaa

SEQ ID NO: 30617 - DNA, 120 bp, synthetic construct
  source 1..120: mol_type = other DNA
tctatctgtagcttaaactaacaaacaacccacacaaatcacattttgttcttcaggcgattcaggaaggcctattaggcagggactgccattttctctctgagacaaacatcatgccag

SEQ ID NO: 30618 - DNA, 120 bp, synthetic construct
  source 1..120: mol_type = other DNA
ccagaaagctgactctggatgcaggaaaaaggtcagggttgcatttcccttccttgcttcttgatgggtgatcaatttttttgaaatacggacgtcccaaggccaatgagactggtgtca

SEQ ID NO: 30619 - DNA, 120 bp, synthetic construct; identical to SEQ ID NO: 8626
  source 1..120: mol_type = other DNA

SEQ ID NO: 30620 - DNA, 120 bp, synthetic construct
  source 1..120: mol_type = other DNA
gctgatctcgctctggccctcaccataggagggggcggaggtgacggagagggtcctctctccgctgacgctgctttggctgtctcccagatgtggtggtgctgaactccaagaggacca

SEQ ID NO: 30621 - DNA, 120 bp, synthetic construct
  source 1..120: mol_type = other DNA
gctatgctgcccaggctggtcttaaattcctagtctcaaatgatcctcccacctcagcctcaagtgtgagccacctttggggcatccccaatccaggtccctggaagctcttgggggggc

SEQ ID NO: 30622 - DNA, 120 bp, synthetic construct
  source 1..120: mol_type = other DNA
actacccggacctgtccttgggagactactccctgctctggaaagcccacaagaagctcacccgctcagccctgctgctgggcatccgtgactccatggagccagtggtggagcagctga

SEQ ID NO: 30623 - DNA, 120 bp, synthetic construct; identical to SEQ ID NO: 8627
  source 1..120: mol_type = other DNA

SEQ ID NO: 30624 - DNA, 120 bp, synthetic construct
  source 1..120: mol_type = other DNA
taaaaacctggagccactggtccatccaaattgtggacgtgattccctttctcagggtgaggacctggagcctagacacccctgggttgtaggggagaggctggggtggagggagaggct

SEQ ID NO: 30625 - DNA, 120 bp, synthetic construct
  source 1..120: mol_type = other DNA
caaggtggggactgtacgtggacggcctcccctcggcccacagccagtgatgctaccggcctcagcattgctatgaggcgggttcttttgcataccccagttatgggcctgttgccactc

SEQ ID NO: 30626 - DNA, 120 bp, synthetic construct
  source 1..120: mol_type = other DNA
gcatggaagagggctctggacagctcctggaagggcacgtgcacatggctgcagtggacctcctgatcggtggcactgagaccacagcaaacaccctctcctgggccgtggtttttttgc

SEQ ID NO: 30627 - DNA, 120 bp, synthetic construct; identical to SEQ ID NO: 8628
  source 1..120: mol_type = other DNA

SEQ ID NO: 30628 - DNA, 120 bp, synthetic construct
  source 1..120: mol_type = other DNA
agccttgccccaccgcaccacacggcccagcaggtgactcccgagggttggggatgagtgaggaaagcccgagcccagggaggtcctggccagcctctaactccagcccccttcagcatc

SEQ ID NO: 30629 - DNA, 120 bp, synthetic construct
  source 1..120: mol_type = other DNA
ctgccgtgaaaatgtggtggaggctggtccccgctgccgctgaacgcctccccacccacctgtccacccgcccgcagatcgcttcctggagccaggcaagaactccagagctctggcctt

SEQ ID NO: 30630 - DNA, 120 bp, synthetic construct
  source 1..120: mol_type = other DNA
gcagcccctgccccactgcagtgtcatcctcaagatgcagcctttccaagtgcggctgcagccccgggggatgggggcccacagcccgggccagagccagtgatggggcaggaccgatgc

SEQ ID NO: 30631 - DNA, 120 bp, synthetic construct; identical to SEQ ID NO: 8629
  source 1..120: mol_type = other DNA

SEQ ID NO: 30632 - DNA, 120 bp, synthetic construct
  source 1..120: mol_type = other DNA
ccttaaggaggtagctcccagcactcaaccaacctccccgcagagctcccttcctgaccctccgctgcagaggattgaggcttaattctgagctggccctttccagccaataaatcaact

SEQ ID NO: 30633 - DNA, 120 bp, synthetic construct
  source 1..120: mol_type = other DNA
ccgcctccccacccctcacctgatggtccactgtgctcccgtagagcccgttgaggttggcgtagtggcagttcctgtaccaccaggcccctcggtaggagacagcgcaggagatgagca

SEQ ID NO: 30634 - DNA, 120 bp, synthetic construct
  source 1..120: mol_type = other DNA
gcctcacagcctctgcttacctgcggtgccgtggtagccctccaagtggaggcggtagtactccgcagccgagtctacgtggaaggagtcgtactgggcgaacacagcctcgtccccagc

SEQ ID NO: 30635 - DNA, 120 bp, synthetic construct; identical to SEQ ID NO: 8630
  source 1..120: mol_type = other DNA

SEQ ID NO: 30636 - DNA, 120 bp, synthetic construct
  source 1..120: mol_type = other DNA
cagtctccatgtcgcaaaacacgttcaggggccgctcgcggttgccgttgaggaagatggtgctggtcctggaggcaccggctccgttctgcatctcctccccgcagtccctggggaagg

SEQ ID NO: 30637 - DNA, 120 bp, synthetic construct
  source 1..120: mol_type = other DNA
ggtggacacgggcggcaggaggctctggccccacatggcctggagccgtgcattgtaggaggtggagggaaagaggccaaggagctggtgagatgtgatccctcctgggagcaggatctc

SEQ ID NO: 30638 - DNA, 120 bp, synthetic construct
  source 1..120: mol_type = other DNA
tggttctgtccaccaggggtgtggaagctgagcaggtagcctgcgggccggactgggggctcagtccaagtgagcagggcggtgcggggggtcacttccttggcctccaagtcccgaggg

SEQ ID NO: 30639 - DNA, 120 bp, synthetic construct; identical to SEQ ID NO: 8631
  source 1..120: mol_type = other DNA

SEQ ID NO: 30640 - DNA, 120 bp, synthetic construct
  source 1..120: mol_type = other DNA
ctcacccccaggggctgtgacctggacgtcataggtgtccacaggattctgggggggcttccagtgcagcacggcgaatccctcggtcaagttcagtgcacgcaactgtgtgggaccgtc

SEQ ID NO: 30641 - DNA, 120 bp, synthetic construct
  source 1..120: mol_type = other DNA
tcctcgttctctctcaactcccacccatgccgttttcttggctcccacctcttgccccgggtcccagtccatctcacccgtggtgaggaagcctgtgagaggctcactctcctcaaagcc

SEQ ID NO: 30642 - DNA, 120 bp, synthetic construct
  source 1..120: mol_type = other DNA
agggttacccagggaaccccagggcagctggagggtgggcagagtgcaggggggagaggaaatgcgaggcgatgagcacatggcaaaggcaccacctccgtccgccagctggtaggagac

SEQ ID NO: 30643 - DNA, 120 bp, synthetic construct; identical to SEQ ID NO: 8632
  source 1..120: mol_type = other DNA

SEQ ID NO: 30644 - DNA, 120 bp, synthetic construct
  source 1..120: mol_type = other DNA
gtgcgggcggttccctggatgctgtcggccttgtggggtcctcgcagcccatacagtgtcaggctgtacagagtcccggaacgcaggtcccggagcacggccgagtgccgcgtccccggc

SEQ ID NO: 30645 - DNA, 120 bp, synthetic construct
  source 1..120: mol_type = other DNA
agtgaactggtggtcacgtcagtcacagacagctgggacaggcggggccttgactcctctgaggtctgaccagcaggagccagccctgcacggagtgggtgggggagaagggattggaga

SEQ ID NO: 30646 - DNA, 120 bp, synthetic construct
  source 1..120: mol_type = other DNA
ggccactcgcatccagcccatccatcctctctccctggtacccgcctcacgctctttccctgcgaccaccccttctgagcccccgtttctcccttctgagtcctaggctagaggccggag

SEQ ID NO: 30647 - DNA, 120 bp, synthetic construct; identical to SEQ ID NO: 8633
  source 1..120: mol_type = other DNA

SEQ ID NO: 30648 - DNA, 120 bp, synthetic construct
  source 1..120: mol_type = other DNA
atctgagtgaggggcgccatggggtgctccatttttatcttccaggcttggcccaaggctgaggtgggaagtttataggtccaggcccagtcagacaatgaagtcgctgtggcctcgtga

SEQ ID NO: 30649 - DNA, 120 bp, synthetic construct
  source 1..120: mol_type = other DNA
tcactgagcttgaggagtgtggtgctcccttctgagagaagctgagggtggaactggctggttgaggtgactggcaaatcccaccagccgtgccgtggtcaggcctgtctgaggtgggca

SEQ ID NO: 30650 - DNA, 120 bp, synthetic construct
  source 1..120: mol_type = other DNA
acggcagggaggtttgccgctatctggacaaggccacccttcggggaggcgacagcagccccagcgagtaatgaggagcagtggcagtgacggggcagagtcggggctgggagattagag

SEQ ID NO: 30651 - DNA, 120 bp, synthetic construct; identical to SEQ ID NO: 8634
  source 1..120: mol_type = other DNA

SEQ ID NO: 30652 - DNA, 120 bp, synthetic construct
  source 1..120: mol_type = other DNA
ggctgcccgtccgtgtccctgtactggaccacgaaggagtcaaaggggccctgggctaccgtccaggacaggcgcagagagctggaggtctcctcagccacggtcagttcccccaggtgg

SEQ ID NO: 30653 - DNA, 120 bp, synthetic construct
  source 1..120: mol_type = other DNA
ctccagtgtagccccagggacagctccttgaggagacacacaggcctgctcccgccatgccccacaggaatgagggagaacagccccctcctcctctggaggctgctgcccaaactcctt

SEQ ID NO: 30654 - DNA, 120 bp, synthetic construct
  source 1..120: mol_type = other DNA
tgagcaagaatgaggccagagctgagagagactccccggaggtctctgggttgtcacggagacaccccaaacatcgagagctggtctgggcagccggccaatgcacggctcccatcactg

SEQ ID NO: 30655 - DNA, 120 bp, synthetic construct; identical to SEQ ID NO: 8635
  source 1..120: mol_type = other DNA

SEQ ID NO: 30656 - DNA, 120 bp, synthetic construct
  source 1..120: mol_type = other DNA
gagtcataggcatagtgacaccaggtttttccatcgtctttccatagccaagccctcccttttcttccacccctcggctccgagtcagggaggagggaggaggatgggaaccactactga

SEQ ID NO: 30657 - DNA, 120 bp, synthetic construct
  source 1..120: mol_type = other DNA
ccaaagcccgtgtcccttttatttcctcagcagtcagcgaatgaaaggaagtaatgcatatgcttcagaactgtgcctgacacacagagggactcactttcggagttaagatggttgtgt

SEQ ID NO: 30658 - DNA, 120 bp, synthetic construct
  source 1..120: mol_type = other DNA
agatggggcccagtcgtttcctgcctgacagaccatagagcaggaacctgtatttcctactgggctccaggccctggactgtgacctcccgctggttggctgccaccggcaccacctgga

SEQ ID NO: 30659 - DNA, 120 bp, synthetic construct; identical to SEQ ID NO: 8636
  source 1..120: mol_type = other DNA

SEQ ID NO: 30660 - DNA, 120 bp, synthetic construct
  source 1..120: mol_type = other DNA
ctgggttttcctggacccaataaatcagtgggtgctgaggactggagtgtggggcacagaacgtgaaattccaacaggtgccacaagggggcgaaggctctggccgcgggaggcctccag

SEQ ID NO: 30661 - DNA, 120 bp, synthetic construct
  source 1..120: mol_type = other DNA
gaggtctccgctcacaggcactgcctggggctgcccctgcgcgtccctgtactgtaccaggaaggagtcaaaggggccctgggccaccgtccatgagaggcccactgagtccgaggtcac

SEQ ID NO: 30662 - DNA, 120 bp, synthetic construct
  source 1..120: mol_type = other DNA
ctctcccaggactggagtgagcatttcttagcggcctcctctaaaacgcttgttttagaatctgtgccctgcattgctgtaagcagctcacaaacagtggtgcatttaaccctcgcacaa

SEQ ID NO: 30663 - DNA, 120 bp, synthetic construct; identical to SEQ ID NO: 8637
  source 1..120: mol_type = other DNA

SEQ ID NO: 30664 - DNA, 120 bp, synthetic construct
  source 1..120: mol_type = other DNA
catgggagaaaagacagaaacctagaggcccagtcaaaagaggtgccaagatccaaaggagaaacacaagggggctgcagaggtaaacctggggacgagggcctgtccccccactcaccc

SEQ ID NO: 30665 - DNA, 120 bp, synthetic construct
  source 1..120: mol_type = other DNA
acacgcaccacctggggctgcccgtccctgtccttgtactgcacggtgaaggagtcgaagcggccctgggggacggtccaggagaggctcagcgagtcaggggaggatcctgtcactgtc

SEQ ID NO: 30666 - DNA, 120 bp, synthetic construct
  source 1..120: mol_type = other DNA
ggtcctggggaaaaggagggagaagccaaggctatgactgggggacctgaggtcatttcagagaagtccattcttggggctgggtggtcctgctcagctgacagctaacacacgtaacaa

SEQ ID NO: 30667 - DNA, 120 bp, synthetic construct; identical to SEQ ID NO: 8638
  source 1..120: mol_type = other DNA

SEQ ID NO: 30668 - DNA, 120 bp, synthetic construct
  source 1..120: mol_type = other DNA
gccccggcacccgcaccgccttgggctgcccatccccattcctgtactggaccaggaagtggtcaaactggccctcgggaaccatccaggacaggctgagggagtcgggggtggcatctg

SEQ ID NO: 30669 - DNA, 120 bp, synthetic construct
  source 1..120: mol_type = other DNA
ccctgggttctcagttcagcatagaaaggatgtgtcacaaaacacaaagtgcccaagaacaggacgatgctgcccacagcgcctccagcacagctcttcatcctctcctcccctgcggcc

SEQ ID NO: 30670 - DNA, 120 bp, synthetic construct
  source 1..120: mol_type = other DNA
tggcctctgcacccttaccctccctgcactggggtctcctcgccatcttttgttcactgggcttctgtctttgctctgcaacaagctcagcacactcctcccgaggccagagcctggggt

SEQ ID NO: 30671 - DNA, 120 bp, synthetic construct; identical to SEQ ID NO: 8639
  source 1..120: mol_type = other DNA

SEQ ID NO: 30672 - DNA, 120 bp, synthetic construct
  source 1..120: mol_type = other DNA
cacacaccatgctctttctagcctcctggcctttgcaccacctgtgctgatctgacacgcttcaccttctctctaaagctgtcaccaagctaaggcctgcctggcctcagatcctgactg

SEQ ID NO: 30673 - DNA, 120 bp, synthetic construct
  source 1..120: mol_type = other DNA
ccccattaggacaggaacttttcccattaggacaggaaccctaactctgagcctaacctctgtgaggattcatgaatgcaagaaaaattcgcttcaacaaattctaagagagtttccaaa

SEQ ID NO: 30674 - DNA, 120 bp, synthetic construct
  source 1..120: mol_type = other DNA
aaggatgagcaaagtgtggtctgtatgtgtaaaacgaaacattattcagcctgaaaaggaaggaagttctggccaggtgcagtggctcttgcctataatcccagcactttgggaggtcaa

SEQ ID NO: 30675 - DNA, 120 bp, synthetic construct; identical to SEQ ID NO: 8640
  source 1..120: mol_type = other DNA

SEQ ID NO: 30676 - DNA, 120 bp, synthetic construct
  source 1..120: mol_type = other DNA
tggactgcaaactagaaagcgattagaatggcgaattatgtcaagtgtactttactacaataaaaaacaacaaaaaaagtgtgttccttggaccagtggcatcaagatagatgagaatct

SEQ ID NO: 30677 - DNA, 120 bp, synthetic construct
  source 1..120: mol_type = other DNA
aaacccatctctactaaaaatatgaaaaaattagctgggcgtggtggcgcacgcctgtagtcccagttactcaggaggctgaggtaggagaatcacttgaacccaggaggcggaggttcc

SEQ ID NO: 30678 - DNA, 120 bp, synthetic construct
  source 1..120: mol_type = other DNA
gcctgctgaatccaaatctgctttttaacaaaaatctccaggcatttggatacacaaaggaaggaatactcttcagagtatgttttcacgaagactggagagacagcagtgtcttccagg

SEQ ID NO: 30679 - DNA, 120 bp, synthetic construct; identical to SEQ ID NO: 8641
  source 1..120: mol_type = other DNA

SEQ ID NO: 30680 - DNA, 120 bp, synthetic construct
  source 1..120: mol_type = other DNA
agctgagaagaggggacagagaaggtgaggcagcttccctgggggatgtccttgggtcttgtgaggaaggagagcgaagctgtggccatgagtgggggtcctggggtcagcttggagagg

SEQ ID NO: 30681 - DNA, 120 bp, synthetic construct
  source 1..120: mol_type = other DNA
caggaagatctgtcagtcctcagggaagtggggaaagacaaaaaagtaccatggctcagccaagagcagaggggcttcctgggccagttcacccatcaccagagaaagggagaccctccc

SEQ ID NO: 30682 - DNA, 120 bp, synthetic construct
  source 1..120: mol_type = other DNA
ccaggcctgagatggtgaccccgtcctcgtgccccggcacccgcaccaccttgggctgcccatccccattcctgtactggaccaggaagtggtcaaactggccctcggggaccatccagg

SEQ ID NO: 30683 - DNA, 120 bp, synthetic construct; identical to SEQ ID NO: 8642
  source 1..120: mol_type = other DNA

SEQ ID NO: 30684 - DNA, 120 bp, synthetic construct
  source 1..120: mol_type = other DNA
caccgcctctcttttgagcacagccccactcggcctctgcacccttagcctccctgcactggtgtctcctcgccatcttttgttcactgggcttctgtctttgctccgcaacaagctcag

SEQ ID NO: 30685 - DNA, 120 bp, synthetic construct
  source 1..120: mol_type = other DNA
agtccccaatcctagtttgagccactgtcacctctcaccagggccaccaactgcctactggcctccctgcctccaggctccctgccaccccatccccatctttagctcccacggatgaac

SEQ ID NO: 30686 - DNA, 120 bp, synthetic construct
  source 1..120: mol_type = other DNA
tccaccaactgcaaaggacaccccactcaatcctcagtgtctctcacacaccatgctctttctagcctcctggcctttgcactagctgtgatgatttgacatgcttcacttcctctccaa

SEQ ID NO: 30687 - DNA, 120 bp, synthetic construct; identical to SEQ ID NO: 8643
  source 1..120: mol_type = other DNA

SEQ ID NO: 30688 - DNA, 120 bp, synthetic construct
  source 1..120: mol_type = other DNA
cagttgaacagacaatttcatggaacatcaacatcagactaggccatttgtcagtaggatggatcaagacaagaacaaggccagtctgtgatcatgtctcagtaaggatgaactctaaca

SEQ ID NO: 30689 - DNA, 120 bp, synthetic construct
  source 1..120: mol_type = other DNA
tgagacgcccggtaatagggttatcccttcttcctgacagcgtctaataaagagcaaaaccttgcttccttaaatgctttcctaaaacaccaaacacaagcccagttccttaacaatctc

SEQ ID NO: 30690 - DNA, 120 bp, synthetic construct
  source 1..120: mol_type = other DNA
agtttctggaggtcgttggccagaggacattgataccctaaaattacagtgtccggatcagggcaaggaattctttgctgaatgaacaaattggcccattggtgagaaaggtctgttcct

SEQ ID NO: 30691 - DNA, 120 bp, synthetic construct
  source 1..120: mol_type = other DNA
ctagtcaactccacagagaaagcacactaccaggaatcagggacgcagaaaaattctcttcaacagatttcaaaagagggtccaattcctttgtcgtgaagaactttgctactcaagggg

SEQ ID NO: 30692 - DNA, 120 bp, synthetic construct; identical to SEQ ID NO: 8644
  source 1..120: mol_type = other DNA

SEQ ID NO: 30693 - DNA, 120 bp, synthetic construct
  source 1..120: mol_type = other DNA
gcccgtccctgtccttgtactgcacggtgaaggagtcgaagtggccctgggggatggtccaggagaggctcagcgagtcaggggaggatcctgtcactgtcagctcccccaggagcggct

SEQ ID NO: 30694 - DNA, 120 bp, synthetic construct
  source 1..120: mol_type = other DNA
caagggaaggagggagaaaccatggccactactgggtatgtgaggtcatttcagaaaagcccattcttggggctgggtggtcctgctcaactgacagctaacacacatgacaagttccag

SEQ ID NO: 30695 - DNA, 120 bp, synthetic construct
  source 1..120: mol_type = other DNA
agcaggtctgtggtgctgaccggacccctggcccattccccaccagtcatcaccaaagagcaagagggtgaccctcccacggctcccaccctggggctgccatcatccactcacccgtca

SEQ ID NO: 30696 - DNA, 120 bp, synthetic construct; identical to SEQ ID NO: 8645
  source 1..120: mol_type = other DNA

SEQ ID NO: 30697 - DNA, 120 bp, synthetic construct
  source 1..120: mol_type = other DNA
agttcagcatagaaaggatgtgtcacaaaacacaaagtgcccaagagcaggacgatgctgcccacagcccctccagcacagctcttcatcctctcctctcctgtggcctttcctatccct

SEQ ID NO: 30698 - DNA, 120 bp, synthetic construct
  source 1..120: mol_type = other DNA
ccctggcctcccagcactggggtctcttcgccatcttttgttcactgggcttctgtctttgctccgcaacaagctcagcacactcctcccgaggccagagcctggggtgtgttcctggat

SEQ ID NO: 30699 - DNA, 120 bp, synthetic construct
  source 1..120: mol_type = other DNA
gccaccaactgcctactggcctcgctgcctccaggctccctgccaccccatccccatcttcagcccccacggatgagcttcacacaggcacagctgctggggccatctcagcacagacct

SEQ ID NO: 30700 - DNA, 120 bp, synthetic construct; identical to SEQ ID NO: 8646
  source 1..120: mol_type = other DNA

SEQ ID NO: 30701 - DNA, 120 bp, synthetic construct
  source 1..120: mol_type = other DNA
tctctccatgacatgtctttccataatgttgctatattcctttcactgtgagccccatcaagacagaaatatgtataggaaaatggtagagaagggcacattttctagggctgtcttcca

SEQ ID NO: 30702 - DNA, 120 bp, synthetic construct
  source 1..120: mol_type = other DNA
cacagtgaccttgctctcctggcccccaacacgcaccgcctggggccgcccgtccctgtccttgtactgcacggtgaaggagtcaaagcggccctgggggacggtccaggaaaggctcag

SEQ ID NO: 30703 - DNA, 120 bp, synthetic construct
  source 1..120: mol_type = other DNA
tgaaaggtaatatagggggatacagagtttaagggtttaagggcaacttgctttgctggtgctgtcaacagaggtcatacatcaaatgtgcccctccagagcaggctgagggctggggca

SEQ ID NO: 30704 - DNA, 120 bp, synthetic construct; identical to SEQ ID NO: 8647
  source 1..120: mol_type = other DNA

SEQ ID NO: 30705 - DNA, 120 bp, synthetic construct
  source 1..120: mol_type = other DNA
acgcatcaaataaccattgaaacgatgatgaatgctggttgtgtagccgtgaggtgaatgattacaatgtacttgtgtacaaaaaaggaagtgccaagaactttatgaacactgattgca

SEQ ID NO: 30706 - DNA, 120 bp, synthetic construct
  source 1..120: mol_type = other DNA
gagaaagtaggactatgagattcttgttttctgtttttcaagctttccacataatgttgctgtattattttcactagaaaaacgtgggctaaaaaagaaattctgggctgggagcagtgg

SEQ ID NO: 30707 - DNA, 120 bp, synthetic construct
  source 1..120: mol_type = other DNA
aatatcatgaaacccggtctctactgaaaatacaaaaattagccaggcgtggtggcatgcacctgtaatcccagctactcaggaggctgaggcaggacaatcacttgaacctgggaggca

SEQ ID NO: 30708 - DNA, 120 bp, synthetic construct
  source 1..120: mol_type = other DNA
aaaaagaaaaagaaagaaagaaattctgggctacaacaattaataatagagtgtggggtgggggtggggcagcaatacacatagaacaggaggggcaggggtgggtccctcagcctgtcc

SEQ ID NO: 30709 - DNA, 120 bp, synthetic construct; identical to SEQ ID NO: 8648
  source 1..120: mol_type = other DNA

SEQ ID NO: 30710 - DNA, 120 bp, synthetic construct
  source 1..120: mol_type = other DNA
ccatcggtaggaattctcgaaaaatactctaagccaggcataacaacctggctgaggatgacttagaaaaggcagcctgactgagcatttggaattcaattaacctcatgatctccaccc

SEQ ID NO: 30711 - DNA, 120 bp, synthetic construct
  source 1..120: mol_type = other DNA
atcacctgaggtcaggagtttgagcagcctgaccaacatggagaaactccctctctactaaaaatacaaaattagccagatgtggtggcgcatgcctgtaatcccagctactcgggaggc

SEQ ID NO: 30712 - DNA, 120 bp, synthetic construct
  source 1..120: mol_type = other DNA
ataaatgaaataagccacaagagcgatagaggagtaggacagatggagtgtaaagaaggagaagacattatatattttctcttttccctttccctgattgtaaaagaaatgtttgccatt

SEQ ID NO: 30713 - DNA, 120 bp, synthetic construct; identical to SEQ ID NO: 8649
  source 1..120: mol_type = other DNA

SEQ ID NO: 30714 - DNA, 120 bp, synthetic construct
  source 1..120: mol_type = other DNA
cctccacctcccaagtaactgggattacaggcatgtgccaccatgcttggctaatttttgtatttttagtagagatggggtttcaccatgttggctagactggtctggaactcctgacct

SEQ ID NO: 30715 - DNA, 120 bp, synthetic construct
  source 1..120: mol_type = other DNA
atttcagtggcggcataatagctctttttatagatgttgcctaaattatttagtcatcccaacgtggtttgacgttggattgttcctcttgtgtgcatttgtgtatgtggttataacaaa

SEQ ID NO: 30716 - DNA, 120 bp, synthetic construct
  source 1..120: mol_type = other DNA
tgttcctcttgtgtgcatttgtgtatgtggttataacaaagaatgctgttattaagatggaaagaaaggaaaattctcgtaagtcaggcttggtgtgcgcctgacatatttcactcttgg

SEQ ID NO: 30717 - DNA, 120 bp, synthetic construct
  source 1..120: mol_type = other DNA
cacagggcttggtgaaagggcacagcagtaaaccaggtacccatgagggaaaggtggttaccccgagactccaagcactactcaccagtcacgcccacggtggacaccgggcccacgcgc

SEQ ID NO: 30718 - DNA, 120 bp, synthetic construct; identical to SEQ ID NO: 8650
  source 1..120: mol_type = other DNA

SEQ ID NO: 30719 - DNA, 120 bp, synthetic construct
  source 1..120: mol_type = other DNA
gagaaggctatgactaggggacatatgaaatagccaaggctatgactaggggacctgaggtcagttcagagaggcccattcttggggtcctgctcagctgacagctaacacacatgacaa

SEQ ID NO: 30720 - DNA, 120 bp, synthetic construct
  source 1..120: mol_type = other DNA
agccccagccacaagtaggtctgtggtgctgaccagacccgtcccattccccaccagtcatcaccaaagagcaagagggtgaccctcccatggctcccaccctggggctcccatcgtcca

SEQ ID NO: 30721 - DNA, 120 bp, synthetic construct
  source 1..120: mol_type = other DNA
tcctggcacccgtgttgccttgggctgcccatccccattcttgtactggaccaggaagtggtcaaactgtccctcgggaaccgtccaggacaggctgagggagtcaggggtcgcatctgt

SEQ ID NO: 30722 - DNA, 120 bp, synthetic construct; identical to SEQ ID NO: 8651
  source 1..120: mol_type = other DNA

SEQ ID NO: 30723 - DNA, 120 bp, synthetic construct
  source 1..120: mol_type = other DNA
gctttataagaacaccaaccagggccgggtgtggtggctcaggcctgtaatctcagcactttgggaggccgaggcgggcggatcatgaggtcaggagattgagaccatcctggctaacac

SEQ ID NO: 30724 - DNA, 120 bp, synthetic construct
  source 1..120: mol_type = other DNA
ttgcggtgagccaagatcacgccactgcactccatcctgggagacagcgagactccttctcaagaaaaaaacaaacaaacaaaaacaaacaaacaaacaaaaaacagcaatcagggccag

SEQ ID NO: 30725 - DNA, 120 bp, synthetic construct
  source 1..120: mol_type = other DNA
acaaaaattagccagatgtgctggtgcatgcctgtaatcccagctactcggaaggctgaggcaggagaactgcttggacctgggaggcagaggttgcaatgagctgagatcgcaccacgg

SEQ ID NO: 30726 - DNA, 120 bp, synthetic construct; identical to SEQ ID NO: 8652
  source 1..120: mol_type = other DNA

SEQ ID NO: 30727 - DNA, 120 bp, synthetic construct
  source 1..120: mol_type = other DNA
tcatagggttttattctgccttgatagtggtattacaaattcatcacatttcatttgtctgttctttttgagaactgagtcttaagcatctagggggtaacagctataaaagagcttaca

SEQ ID NO: 30728 - DNA, 120 bp, synthetic construct
  source 1..120: mol_type = other DNA
taaaaataaatgggtattaatttgggagcttagagaacacatacaatttttcccactgaaatcagtgataattatgagaatttgccctaagcggttttcaggaactacctaccttcctca

SEQ ID NO: 30729 - DNA, 120 bp, synthetic construct
  source 1..120: mol_type = other DNA
gtcgtgtgtctgttttttgtttgcttgttttgtttttttgagacagggtctcactctgtcacacaggctggagtgcagtggctcgatctcggctcactgcaacctccgcctcctgggttc

SEQ ID NO: 30730 - DNA, 120 bp, synthetic construct; identical to SEQ ID NO: 8653
  source 1..120: mol_type = other DNA

SEQ ID NO: 30731 - DNA, 120 bp, synthetic construct
  source 1..120: mol_type = other DNA
gtctcggagtgaaggcaccagcagaaccattcccaggagcttgggaggcttggtctcagggaaagtaaaataaagccaccagatactgacaataaaagggaaactgagtctagttcaggg

SEQ ID NO: 30732 - DNA, 120 bp, synthetic construct
  source 1..120: mol_type = other DNA
cgagatggtgaccccatcctcgtgtcccggcacccgcaccgccttgggctgcccgtccccattcttaaactggaccaagaaatggtcaaactggccctcggggactgtccaggagaggct

SEQ ID NO: 30733 - DNA, 120 bp, synthetic construct
  source 1..120: mol_type = other DNA
ctgcaaggaggtgttgaggccccagctgtcttgaattcaggtcagaaggtgggcccagtctggccctaacttaagatcgatttctgattataatcataatcagattttgtggcttcctta

SEQ ID NO: 30734 - DNA, 120 bp, synthetic construct; identical to SEQ ID NO: 8654
  source 1..120: mol_type = other DNA

SEQ ID NO: 30735 - DNA, 120 bp, synthetic construct
  source 1..120: mol_type = other DNA
caacaattatgagacactcgggagactgtagcactacctggatacttgatatcaaggcatgattgttcacttatcaaggtatgctaattgtattgtggaattttattatttatttattta

SEQ ID NO: 30736 - DNA, 120 bp, synthetic construct
  source 1..120: mol_type = other DNA
agctgggactacaggcacgtgccaccacgctccgcttttttgtactttttaaaatttattattattattattatttttagtagagacggggtttcaccatgttggtcaggctggtcttga

SEQ ID NO: 30737 - DNA, 120 bp, synthetic construct
  source 1..120: mol_type = other DNA
tacctttaaatatttagtgatgaaagcataggatgtctgtggttcgtttttaaaatactgcagtagtataaccacacaatgcaatactgtttggcaataaaaagcagtgtagtggctgag

SEQ ID NO: 30738 - DNA, 120 bp, synthetic construct; identical to SEQ ID NO: 8655
  source 1..120: mol_type = other DNA

SEQ ID NO: 30739 - DNA, 120 bp, synthetic construct
  source 1..120: mol_type = other DNA
gaacctcaaaaacattatgctcagtgaaagaagctagacacaaaagaatacatattgtttgagtccatttatacgaaatgttctggaacagcaatctacagagaaaaaagtagattagtt

SEQ ID NO: 30740 - DNA, 120 bp, synthetic construct
  source 1..120: mol_type = other DNA
taagttgtacactaaaaacaagtgtattttatgccacatgaattatatctccataaaggtgttaataaagaaaacattcaggccgggtgtggcggctcacgcctggaatcctatcacttt

SEQ ID NO: 30741 - DNA, 120 bp, synthetic construct
  source 1..120: mol_type = other DNA
tcccagctattcgggaggctgaagtgggaggatcccttaagcccaggaggttgaggctgcagtgcagtgaattgtgactgtgccagtacactctagcccaggcgacagagtgagaccttg

SEQ ID NO: 30742 - DNA, 120 bp, synthetic construct; identical to SEQ ID NO: 8656
  source 1..120: mol_type = other DNA

SEQ ID NO: 30743 - DNA, 120 bp, synthetic construct
  source 1..120: mol_type = other DNA
atttcaaaaatgtgttccaatctcacaaaaagagttatgtatagagttccaaggaaaagcggagagccacaaaccagccagtgaatcacctcccaagaggcctcagtccctgggggcctt

SEQ ID NO: 30744 - DNA, 120 bp, synthetic construct
  source 1..120: mol_type = other DNA
ggtgtattacaggtttgaggtcttggggttctgggtccctagtggaggagatgctggaggctgtactttgctaagacccaacccagagggctctgcagtgcacactcacccgtgacgccc

SEQ ID NO: 30745 - DNA, 120 bp, synthetic construct
  source 1..120: mol_type = other DNA
acctggggccgcccgtccctgtccttgtactgcacggtgaaggagtcgaagcggccctgggggacggtccaggagaggctcagcgagtcaggggaggatcctgtcactgttagctccccc

SEQ ID NO: 30746 - DNA, 120 bp, synthetic construct
  source 1..120: mol_type = other DNA
gaaaaggagggagaagccaaggctatgactgggggacccgaggtcagttcagagaggcctactcttggggctgggtggtcctgctcagctgacagctaacacacatgacaagttccaggg

SEQ ID NO: 30747 - DNA, 120 bp, synthetic construct; identical to SEQ ID NO: 8657
  source 1..120: mol_type = other DNA

SEQ ID NO: 30748 - DNA, 120 bp, synthetic construct
  source 1..120: mol_type = other DNA
accctcactgccttgggctgcccatctccattcctgtactggaccaggaagtggtcaaactgtccctcgggaactgtccaggacaggctgagggagtcaggggtggcatctgtcacggtc

SEQ ID NO: 30749 - DNA, 120 bp, synthetic construct
  source 1..120: mol_type = other DNA
ccgcgggactctgctgtcctctggactctcccagccatctgaaaggaggcatagtgggcagagttctcacctgtcagggcctcgacatggacaggacctacatgcttcccatcactgaaa

SEQ ID NO: 30750 - DNA, 120 bp, synthetic construct
  source 1..120: mol_type = other DNA
aaggagtcaaattctccctcagtcaccatccaggagagatgcagggtgtgtgacgtggcctcctccactgtcaactccccgaggtggggctcaggcgctggaggggtcggggccgtggtc

SEQ ID NO: 30751 - DNA, 120 bp, synthetic construct; identical to SEQ ID NO: 8658
  source 1..120: mol_type = other DNA

SEQ ID NO: 30752 - DNA, 120 bp, synthetic construct
  source 1..120: mol_type = other DNA
gctcagagatcttatggctcagtcagaccaggagagccaggcgggaaggaggcacaggtgttccagctgccgcacactcaccagtaatggcgacggccgagatggggcccacacgcttgc

SEQ ID NO: 30753 - DNA, 120 bp, synthetic construct
  source 1..120: mol_type = other DNA
actggaccacaaaggagtcaaactggccctcagggactgtccaggagaggcccacggagttctgggtcacggtggtcacctgcagctcctcccccagacggggttttgggggacgctttg

SEQ ID NO: 30754 - DNA, 120 bp, synthetic construct
  source 1..120: mol_type = other DNA
gctttgcgtggctgagtcctgccgggctgtgctaggggcttgtgcagggacgtggggagctggatctgagccgagtggctggggccaaataatggtaatggcagccaccacaagtgaccg

SEQ ID NO: 30755 - DNA, 120 bp, synthetic construct; identical to SEQ ID NO: 8659
  source 1..120: mol_type = other DNA

SEQ ID NO: 30756 - DNA, 120 bp, synthetic construct
  source 1..120: mol_type = other DNA
ttgtgtttattttttccaaaacgactccttgactgcctccctctggggctggaaaaacccagaactgcccaaatgctcagtgcttccccaaaatatttccatcacctcccatcctcacca

SEQ ID NO: 30757 - DNA, 120 bp, synthetic construct
  source 1..120: mol_type = other DNA
tccagcctctttccgcctctcacagactgcttccccagcagggtgcagcttcttacagactgggtctctatctcctcttacccaggagcacacgatttggccgtgatttggccggcccct

SEQ ID NO: 30758 - DNA, 120 bp, synthetic construct
  source 1..120: mol_type = other DNA
ttattctgcaccggctggcccgggagaactaaggctcccactgggcctggtgaaggagcgtgggctgcctgtgagaatgttgagggggatgatgccggggagctcaggcagggaagggat

SEQ ID NO: 30759 - DNA, 120 bp, synthetic construct; identical to SEQ ID NO: 8660
  source 1..120: mol_type = other DNA

SEQ ID NO: 30760 - DNA, 120 bp, synthetic construct
  source 1..120: mol_type = other DNA
ctcccctcgccccttctcccagcacccccaggctcccacatccaccctgcaggaagaggcctgtaggggcttccctcatccaacaaaagtggaaattacgagaagagaggcagagtcagc

SEQ ID NO: 30761 - DNA, 120 bp, synthetic construct
  source 1..120: mol_type = other DNA
ctggagtgcagtggcgcaatctcagctccctgcagcctccacctcctgggttcaagtgattcttgtgcctcagactcccgagtagctggaattactagcacccatcaccacacccagcta

SEQ ID NO: 30762 - DNA, 120 bp, synthetic construct
  source 1..120: mol_type = other DNA
catgtggcttttcaaatgagacagagcaggtggacaaagggaagactcagcagagggagtgaagagaagggtgggaaggctgtggcctcaggctcagctgtgtaggggcccatctcaccc

SEQ ID NO: 30763 - DNA, 120 bp, synthetic construct; identical to SEQ ID NO: 8661
  source 1..120: mol_type = other DNA

SEQ ID NO: 30764 - DNA, 120 bp, synthetic construct
  source 1..120: mol_type = other DNA
tgggctttgagggcctcaggggggctgtgaactgagatggggaatagttacacctttacttccagacctctaactgaaatgcagcatttctttccaaaactaatatagaaaacccaccag

SEQ ID NO: 30765 - DNA, 120 bp, synthetic construct
  source 1..120: mol_type = other DNA
aataccttttatatccatcactgcttctaaattttgtagtttagtaaacgcgccaccaagtcctgttatttaatgaactagtaaataagtccaagtattactaaatcgtaactttggatt

SEQ ID NO: 30766 - DNA, 120 bp, synthetic construct
  source 1..120: mol_type = other DNA
ccagcctggccaacatggcgaaaccctgtttctactaaaaatacaaaaaattagctgggtgtggtggcacgtgcccgtaatcccagttactcgggaggctgaggcaggagaattgcttga

SEQ ID NO: 30767 - DNA, 120 bp, synthetic construct; identical to SEQ ID NO: 8662
  source 1..120: mol_type = other DNA

SEQ ID NO: 30768 - DNA, 120 bp, synthetic construct
  source 1..120: mol_type = other DNA
ggactcaggatgtaaagcacttcgcctcaacaaaaaagggcagaagcaggaggtggcagctgtgtccaagtcacagcagggttgtaaagagaaggggtggaaacagctgtgggcagtcgg

SEQ ID NO: 30769 - DNA, 120 bp, synthetic construct
  source 1..120: mol_type = other DNA
gaggagtaaaggggtcagggaacagaaagactggcagggtcaccgagccagggcctgaggggatctagcccctcagtgagggtgcggtggtaccaaggcagggctggaagaagggccatg

SEQ ID NO: 30770 - DNA, 120 bp, synthetic construct
  source 1..120: mol_type = other DNA
ttatattttctctcaggctccaggttgtagactgtgacctctcgctggtctgccgccaccggcaccacctggggctgcccgtccttgtccttgtactggactatgaaggagtcaaactgg

SEQ ID NO: 30771 - DNA, 120 bp, synthetic construct; identical to SEQ ID NO: 8663
  source 1..120: mol_type = other DNA

SEQ ID NO: 30772 - DNA, 120 bp, synthetic construct
  source 1..120: mol_type = other DNA
gttcaagcgatcctcctgccttagcctcccaagtagctgggactacaggcgtgcgccaccatgcctgcctaattttgtgtgtgtgtgtatttttagtggagacggcatttgccatgttgg

SEQ ID NO: 30773 - DNA, 120 bp, synthetic construct
  source 1..120: mol_type = other DNA
gatggttttgatgtaaaagcgcattgatctgaacatctgtctggtcaacagtccttcactaggtccctgctcggtgtctgaggctgcatttgttgggggagaagagtatcaaccatcact

SEQ ID NO: 30774 - DNA, 120 bp, synthetic construct
  source 1..120: mol_type = other DNA
acttgtgtgtcaaactcaacaagtccaaaactgagcctctgagcttcctgacacctgctcccgccacagcctccccacctcagtaagattacaactttttttttttgagacggagtttcg

SEQ ID NO: 30775 - DNA, 120 bp, synthetic construct
  source 1..120: mol_type = other DNA
caccacgtccggctaattttgtattttcagtagagatggggtttctccacgttagtcaggttggtcttgaactcccgacctcaggtgatccgcccgcctcggcctccccaagtgctggga

SEQ ID NO: 30776 - DNA, 120 bp, synthetic construct; identical to SEQ ID NO: 8664
  source 1..120: mol_type = other DNA

SEQ ID NO: 30777 - DNA, 120 bp, synthetic construct
  source 1..120: mol_type = other DNA
catattcatctcttagatcattccctattgcctgccctcctccaactccaccacaaaacatactgcattcctcactgtctgcagacatctggggctgcttctcgcctgccagtctctgca

SEQ ID NO: 30778 - DNA, 120 bp, synthetic construct
  source 1..120: mol_type = other DNA
taggctctgcttttccccaccactcatcactgtcacatccggtgccactgacatatttgtgcaatttgttgcctgtccctctccactagaatgtgagctcctcaggcaggagctctgctt

SEQ ID NO: 30779 - DNA, 120 bp, synthetic construct
  source 1..120: mol_type = other DNA
gaagcactcattagtgagcaaactagaaggtggtcccaagaggcaaaatggcagagaaggtggctggatgggtggggctcccaagaacttgtttctctggcttcctccggagggcaagac

SEQ ID NO: 30780 - DNA, 120 bp, synthetic construct; identical to SEQ ID NO: 8665
  source 1..120: mol_type = other DNA

SEQ ID NO: 30781 - DNA, 120 bp, synthetic construct
  source 1..120: mol_type = other DNA
tcaccatcaagctttattgctggtggtttggattaactggaaaggtacaattataacgattcatgactctggcagtccccatgctgcatgtgggacagtccttttccaatttagaagtgt

SEQ ID NO: 30782 - DNA, 120 bp, synthetic construct
  source 1..120: mol_type = other DNA
ccagctgcttcgtccttttgctgctctgataatgcgcactgatgcccatttctttcctaaagggcctcatctattttatccaggacgtgtaaaatacatgtttcaaaatatccagcatta

SEQ ID NO: 30783 - DNA, 120 bp, synthetic construct
  source 1..120: mol_type = other DNA
atcaccacctttaaccgtgacaacaagctgggcagcgtttactccctcctgaatatgaggaagctgaggttccaggagaggaggtaagtttttcaagatcatacagctggctgggcacgg

SEQ ID NO: 30784 - DNA, 120 bp, synthetic construct
  source 1..120: mol_type = other DNA
gctaacatggtgaaaccctgtctctactaaaaatacaaaaattagccgggtgtggtggtgggcgcctgtaatcccagctacttggggggctgaggcaggaggactgcttgaacctgggag

SEQ ID NO: 30785 - DNA, 120 bp, synthetic construct; identical to SEQ ID NO: 8666
  source 1..120: mol_type = other DNA

SEQ ID NO: 30786 - DNA, 120 bp, synthetic construct
  source 1..120: mol_type = other DNA
tggcaccagcctccaccctacaacctcaggccccaaggacagccactcagggtggctttgccgtctccctcttctcagggctgactgaggcaaagaaaataaattgagggtggaaggttc

SEQ ID NO: 30787 - DNA, 120 bp, synthetic construct
  source 1..120: mol_type = other DNA
ctctacttttaattttttaatctttccccttatagtaaaagttatttttgagaaaggtgtgtctttgtttctgtgagcaaaggaaaaaagagattcccctcactgtgactaaaccgggca

SEQ ID NO: 30788 - DNA, 120 bp, synthetic construct
  source 1..120: mol_type = other DNA
gtcctgtgtggtggtggatgtggccctgtaaccaggcctgagagaaagggtggaagggatgttcttctttgctgtaaagtcactcactggatgagtattaaagaaagccttgtggccggg

SEQ ID NO: 30789 - DNA, 120 bp, synthetic construct
  source 1..120: mol_type = other DNA
caaaaattagccaggtgtggtggtgcatgcctgtaatcccagctactcgggaggctgaggcaggagaatcacttgaacctgggaggcaaaggttgcagtgagccaagattgcaccactgc

SEQ ID NO: 30790 - DNA, 120 bp, synthetic construct; identical to SEQ ID NO: 8667
  source 1..120: mol_type = other DNA

SEQ ID NO: 30791 - DNA, 120 bp, synthetic construct
  source 1..120: mol_type = other DNA
gcaggagaatcacttgaacttgggaggcagaggttgcagtgagctgagatcgcaccactgcactccaggctgggcaacagagtgagactctgtctcaaaaaaaaaaaaaaaaaaaaaaag

SEQ ID NO: 30792 - DNA, 120 bp, synthetic construct
  source 1..120: mol_type = other DNA
gatgataggacaccttcagggtggtatggccttagattcatgtgcattctgaccaagtaactgaaccagccaaaggggacaaagcagacctcagagtaagaatatttataacaattctca

SEQ ID NO: 30793 - DNA, 120 bp, synthetic construct
  source 1..120: mol_type = other DNA
aaacagaggtgcagaaagtttaaaacttgctcagggccatgaaagctggtggtacgccagtccccagtgacatgctctttctaggtcttcccctggcaggcagcctcaaggttccactgg

SEQ ID NO: 30794 - DNA, 120 bp, synthetic construct; identical to SEQ ID NO: 8668
  source 1..120: mol_type = other DNA

SEQ ID NO: 30795 - DNA, 120 bp, synthetic construct
  source 1..120: mol_type = other DNA
cctccgtgcccagttctgtggggctgggggtctcgtccacatcctcctgaggagctgagagaagagatagaggcataaagggctgctggctttgctgctgctgcccacagatgacagcca

SEQ ID NO: 30796 - DNA, 120 bp, synthetic construct
  source 1..120: mol_type = other DNA
gggggtgaggggtctcccttcgtgtctgagaaaggagctgagatgggaagagaggaagcctctgagggttcttccaaaccacgttcactgacagtgctgacctcagacagtgaggagggc

SEQ ID NO: 30797 - DNA, 120 bp, synthetic construct
  source 1..120: mol_type = other DNA
ctcccctttaaccccaaggaatgaattgctaaggcagggctccaggcatgagtgggagaaaaattctggggtgagtgggatccaaggagagacatgtccttccctggctggctctggaat

SEQ ID NO: 30798 - DNA, 120 bp, synthetic construct; identical to SEQ ID NO: 8669
  source 1..120: mol_type = other DNA

SEQ ID NO: 30799 - DNA, 120 bp, synthetic construct
  source 1..120: mol_type = other DNA
gcgatctcggctcactgcaagctccgcctcccgggttcacgccattctcctgcctcatcctcttgagtagctgggactacaggcacctgccaccatgcctggctaattttttgtattttt

SEQ ID NO: 30800 - DNA, 120 bp, synthetic construct
  source 1..120: mol_type = other DNA
tctaagtgttatacatatattaactcatgtaattccaacagctctgtgcagagggactgaaatccagccacctgacagaagggaaagctgaggcacagagaggttaagcaatttgcacaa

SEQ ID NO: 30801 - DNA, 120 bp, synthetic construct
  source 1..120: mol_type = other DNA
ggcactggacagggaaaggctggggacatggaggaacaggctgggatgctgggctgaacacaatccctttgccctgttccaagggggctgggagtcaaggagtcgggagctgagaggagt

SEQ ID NO: 30802 - DNA, 120 bp, synthetic construct; identical to SEQ ID NO: 8670
  source 1..120: mol_type = other DNA

SEQ ID NO: 30803 - DNA, 120 bp, synthetic construct
  source 1..120: mol_type = other DNA
cgggaggaagtgggtggaggctttggcaaaatgagctgagaaggcgaagatggagggaggctggaaggagccccagccaagtcccgctcacaggatggggctagcaggggagggaggcct

SEQ ID NO: 30804 - DNA, 120 bp, synthetic construct
  source 1..120: mol_type = other DNA
tcattctcatcccccgcaacaggcactgcctggggctgcccctgtgcatccttgtactggaccatgaatgagtcgaaggggccctgggccactgtccatgagagacgcaaggagtctggg

SEQ ID NO: 30805 - DNA, 120 bp, synthetic construct
  source 1..120: mol_type = other DNA
gcctgggactggggcttggggtttcgacgggatgtcacacctatggggggtggggggtcactagtccattaattcgagtgctaaacttctgggaagcctgacacagccagggtatgacac

SEQ ID NO: 30806 - DNA, 120 bp, synthetic construct; identical to SEQ ID NO: 8671
  source 1..120: mol_type = other DNA

SEQ ID NO: 30807 - DNA, 120 bp, synthetic construct
  source 1..120: mol_type = other DNA
tgtactggaccatgaaggtgtcaaactggccctcagggacagtccaggagaggtgcagtgaatctggggtagggtctgtcacccacaggtttcccaggtggggtggagtccctggacttg

SEQ ID NO: 30808 - DNA, 120 bp, synthetic construct
  source 1..120: mol_type = other DNA
cacaaaagtgcatttgctgagggagtacagagggactgaaatccagccagcactctgcttgccgagctgtgtgccctggtgaggagtggtgtccactttaaggaatgggtgccttctttc

SEQ ID NO: 30809 - DNA, 120 bp, synthetic construct
  source 1..120: mol_type = other DNA
gaaatcttcccagtacaacctccactgcttccaagcctaactactagctggcttcttctccaagagaggagagcacaatccttgaagcgttttaacgtgggacagcctccctcatctatg

SEQ ID NO: 30810 - DNA, 120 bp, synthetic construct; identical to SEQ ID NO: 8672
  source 1..120: mol_type = other DNA

SEQ ID NO: 30811 - DNA, 120 bp, synthetic construct
  source 1..120: mol_type = other DNA
aattctgtggacgctccgtagcccttgaatcactgttccggaatctgacaagtccaaccgcaccctccttcctggagtccagacagcaccctccctggttctgcccctccctgcaagtca

SEQ ID NO: 30812 - DNA, 120 bp, synthetic construct
  source 1..120: mol_type = other DNA
tctcctgacctataaagtaggcatgcctcccaggtgtgctttatggggtgtgatgatccacttagagaacatcttgatcacaactgactctcaataaatgcacaaaaggtatttatgtaa

SEQ ID NO: 30813 - DNA, 120 bp, synthetic construct
  source 1..120: mol_type = other DNA
caactgactctcaataaatgcacaaaaggtatttatgtaagtgtctcttagatattgatctaagtttatctaaggcgttgttccccacctctgctgctccctgcctcagggaatgggact

SEQ ID NO: 30814 - DNA, 120 bp, synthetic construct
  source 1..120: mol_type = other DNA
tgttgctctgtgcagagtgtggatagcacccaggctggagtacagtggcacaatcatggctctctgcagcctcggtctcctgggctcaagcgatcctcccacctcaagcctctcaagtag

SEQ ID NO: 30815 - DNA, 120 bp, synthetic construct; identical to SEQ ID NO: 8673
  source 1..120: mol_type = other DNA

SEQ ID NO: 30816 - DNA, 120 bp, synthetic construct
  source 1..120: mol_type = other DNA
cctgttctccagccagaggaaactgtaacagtgattctcttactggccatgctctccccaccttactcaccgtgactccctcaggctgcactgagcttctcaaactctttgcctgcccca

SEQ ID NO: 30817 - DNA, 120 bp, synthetic construct
  source 1..120: mol_type = other DNA
ggtgttactgctgtcactcacagatcttggcttcagccaccagcggaccatgcctcttcttgccaacaaacccatacaggacaaatttgtacttgcggccaggatccagggaggtgatga

SEQ ID NO: 30818 - DNA, 120 bp, synthetic construct
  source 1..120: mol_type = other DNA
cggaggtcctgtctgtcaccgtcagctcacccaggcgtggtgggcctgaggacttcccaggcttctcctcatccttgtctggagtttgagaggcaaaagcaaagcatagtggactcaacc

SEQ ID NO: 30819 - DNA, 120 bp, synthetic construct; identical to SEQ ID NO: 8674
  source 1..120: mol_type = other DNA

SEQ ID NO: 30820 - DNA, 120 bp, synthetic construct
  source 1..120: mol_type = other DNA
agtcagccaccctggtcccacagagaggaacaaagaggggatgtgaaagccaggtaccccaggacctgtctttcactggtcctgcaaacctcatccatgtctgaagtcctgatggctgtg

SEQ ID NO: 30821 - DNA, 120 bp, synthetic construct
  source 1..120: mol_type = other DNA
cagaggccttcccatgcccaccctgaaagatttatagggcagggaagggcagaggagcaaccgaagagtgggggcaggggacagggcaaggaaagctgcaggtggagggccagggacctt

SEQ ID NO: 30822 - DNA, 120 bp, synthetic construct
  source 1..120: mol_type = other DNA
ctgcaattccttttctctccttttctcctctatccagccccaaacatcagccctgcccttcactggcccctcaatatccatcctacctctgaagtcccaataaccccagctcctccccca

SEQ ID NO: 30823 - DNA, 120 bp, synthetic construct; identical to SEQ ID NO: 8675
  source 1..120: mol_type = other DNA

SEQ ID NO: 30824 - DNA, 120 bp, synthetic construct
  source 1..120: mol_type = other DNA
gggaggaggctcatcggtagtccccaagaggcccaagggtgaggaccctgggaaggggcagggtgagaaaaagaggagagtccagtatgagaactagaaaggaatccccagtccccaggt

SEQ ID NO: 30825 - DNA, 120 bp, synthetic construct
  source 1..120: mol_type = other DNA
gcagacgggcctgtgcttcaggcaggtaataggtaaaataaagcctgctatccttcaccccacaaggcttccatgacctccagcccccggagacttccatgtccctccccacatacatcc

SEQ ID NO: 30826 - DNA, 120 bp, synthetic construct
  source 1..120: mol_type = other DNA
ggtgtgggggtggacatccaggtcaggtggcatctgggccctatgggggaagaagaggtccaccaccctccccacagcagccacagggtgccctttccccaagcccagacatcgttcctg

SEQ ID NO: 30827 - DNA, 120 bp, synthetic construct; identical to SEQ ID NO: 8676
  source 1..120: mol_type = other DNA

SEQ ID NO: 30828 - DNA, 120 bp, synthetic construct
  source 1..120: mol_type = other DNA
atccacaggatggatgccaggaccctggggtggggacgtcttctagggacaatggactcgtgctttgtcctgggggccccctggagccccggccaggtagggcctgaaggtagaaggggg

SEQ ID NO: 30829 - DNA, 120 bp, synthetic construct
  source 1..120: mol_type = other DNA
aggacttggaggtctgccccgcccgcaccccgtggacctccacgtggtaggtggtgccgggcctgaggtcgggcaggctgacggtgcgcgtggtgcccggcacagtcagctcaccgccgg

SEQ ID NO: 30830 - DNA, 120 bp, synthetic construct
  source 1..120: mol_type = other DNA
ggtggcgggacgcagccacccggtcgacgccttcaggcgagaggccgtagattccctggttggagtcccgtttcctggtgccgggatcagggctggcggtggggcgggggtggcggggcg

SEQ ID NO: 30831 - DNA, 120 bp, synthetic construct; identical to SEQ ID NO: 8677
  source 1..120: mol_type = other DNA

SEQ ID NO: 30832 - DNA, 120 bp, synthetic construct
  source 1..120: mol_type = other DNA
ctgccaggggcaaaaaaggggagaacaggtcagtggcagctccctcccggcactccttcccgcggcagcccctccctcgatccctcccaccagagccagaggcctcttccctgtgcccca

SEQ ID NO: 30833 - DNA, 120 bp, synthetic construct
  source 1..120: mol_type = other DNA
gtagctgaaggagagaaaggggagtcggggaagagaacatgagctacagcgaggtgggtgtccccctgtcacaggaaaagaaaaatatccaggtatctgttaagaaacctcgaggtttag

SEQ ID NO: 30834 - DNA, 120 bp, synthetic construct
  source 1..120: mol_type = other DNA
cggtacctaaatttaaaaaagaacctcccttaactgactggatcaggcagcatctcctattcacttctctccctggggccattcctttcataggctaacctgtaataaccttcctacagg

SEQ ID NO: 30835 - DNA, 120 bp, synthetic construct; identical to SEQ ID NO: 8678
  source 1..120: mol_type = other DNA

SEQ ID NO: 30836 - DNA, 120 bp, synthetic construct
  source 1..120: mol_type = other DNA
acaaatcggtccacctcagcctggggacgcagccagccaagctccagtgttgtcggtgtcacagccaccactcggaggtcctggggcccatcgatcactagccaggttaaagaggaggac

SEQ ID NO: 30837 - DNA, 120 bp, synthetic construct
  source 1..120: mol_type = other DNA
ggacacccctccccacagccccagctctcactggtggtgatggtcttggaggcaggaaggccccagctggtccctcgaagggctcggacagtgacctggtactcctgtccaggggccagt

SEQ ID NO: 30838 - DNA, 120 bp, synthetic construct
  source 1..120: mol_type = other DNA
ctcaatcccccttatctcttctttctccaattctaaacagtgtcagcatggtactgtgtggaacttgaccctgtacaagctggggagcaaacatgctgagagcgctaactccttgtgagc

SEQ ID NO: 30839 - DNA, 120 bp, synthetic construct; identical to SEQ ID NO: 8679
  source 1..120: mol_type = other DNA

SEQ ID NO: 30840 - DNA, 120 bp, synthetic construct
  source 1..120: mol_type = other DNA
catgaggagccttttcctaagcttggtcctgtcagaacaaatgaagtagatcaaggatgccccttcaagttgcactttctccttaaagggtctgcctcaccctgaacctcctcgtagatg

SEQ ID NO: 30841 - DNA, 120 bp, synthetic construct
  source 1..120: mol_type = other DNA
gttgtaggctcctcaaaacaagaaccacctgctcaaagttccacaaatatgtttcctgattgttgattttgtacctggcatcatgctgggcattggagacacaaaaataaaatatatggt

SEQ ID NO: 30842 - DNA, 120 bp, synthetic construct
  source 1..120: mol_type = other DNA
tatgcttagcaaatgcttgtgagaaaacaacactcctacaagtgtacatttaaggaattatgattatgtgtggtgcctccaaagggaatctactggaccctgctccaggcagggtctcct

SEQ ID NO: 30843 - DNA, 120 bp, synthetic construct
  source 1..120: mol_type = other DNA
atgttggctgtgatggggacacctccattcagccaagtaggattggaaatttcaaaaggtactctcctaaaccaagagaactgtggggaaatcaacatagtaaataccgaagtataaaac

SEQ ID NO: 30844 - DNA, 120 bp, synthetic construct; identical to SEQ ID NO: 8680
  source 1..120: mol_type = other DNA

SEQ ID NO: 30845 - DNA, 120 bp, synthetic construct
  source 1..120: mol_type = other DNA
gcaagcctatccccagagttctccttctccctatatatatcctttagacacttcttggttcctcctgagatccatctgggaacagtcccctgaaagtccatcaacctaacccatgtctcc

SEQ ID NO: 30846 - DNA, 120 bp, synthetic construct
  source 1..120: mol_type = other DNA
gctccgcctcccgggttcaagcgattctcctgcctcagcctcccgagtagctgggattacaggcatgcgccaccatgtccggctaattttgtatttttagtagagacggggtttctccat

SEQ ID NO: 30847 - DNA, 120 bp, synthetic construct
  source 1..120: mol_type = other DNA
gagccaccacacctggccctgaagcagtctttctaaacagatgctggcagctggctctgccccttggtaaagcttggctgcttcactgattttttttttttttgagacggaatttcgctc

SEQ ID NO: 30848 - DNA, 120 bp, synthetic construct
  source 1..120: mol_type = other DNA
agcctcccaagtagctgggattacaggcatacaccaccatgctcagctaattttgtatttttagtagagatggggtttcactatgttggtcaggctgttctcaaactcctgacctcagat

SEQ ID NO: 30849 - DNA, 120 bp, synthetic construct; identical to SEQ ID NO: 8681
  source 1..120: mol_type = other DNA

SEQ ID NO: 30850 - DNA, 120 bp, synthetic construct
  source 1..120: mol_type = other DNA
gacaaggaatatctgaacctctttctcattcaggaactcatctccctcagtttccccatgctttctctcacattcatagtggagctagcactttgcaaaatagcaacattccttcactta

SEQ ID NO: 30851 - DNA, 120 bp, synthetic construct
  source 1..120: mol_type = other DNA
catgcctaacatactcccaggtgatgctgatgctgcaggtccagggaacacactttgagaaccactgagtcagagtaacagtgccacatatacagggagaggagaaactttcttcttctg

SEQ ID NO: 30852 - DNA, 120 bp, synthetic construct
  source 1..120: mol_type = other DNA
ggatgacagcagcagccagaggacagacagctattgaatatactctgtacccacagaaatggacaaagggtagctgggcattgtggcaggtgtctgtaatcccagctacttgggaggctg

SEQ ID NO: 30853 - DNA, 120 bp, synthetic construct; identical to SEQ ID NO: 8682
  source 1..120: mol_type = other DNA

SEQ ID NO: 30854 - DNA, 120 bp, synthetic construct
  source 1..120: mol_type = other DNA
caacttggcaccaccatcctggctctgagtgagggagaaagtctagggcttcaactggaaagcggcgcccttgacaacaccaaggatcggtttgtatttatttactcagagcaggagaca

SEQ ID NO: 30855 - DNA, 120 bp, synthetic construct
  source 1..120: mol_type = other DNA
ttcgaagtcccaccctttcaagattagagctatgtaaataatatatacagagaagaagagagtgggagaaacactttaaaatgttagcagtgcttgttttagtgaggagcagccaggaat

SEQ ID NO: 30856 - DNA, 120 bp, synthetic construct
  source 1..120: mol_type = other DNA
gttgagatttctgcttctgctttggctggagagtgaggagaggcagaacatagtagggggctggcctgaggagcataatgacaagacaaagcaaagtggagtgaggatgacagttcctct

SEQ ID NO: 30857 - DNA, 120 bp, synthetic construct; identical to SEQ ID NO: 8683
  source 1..120: mol_type = other DNA

SEQ ID NO: 30858 - DNA, 120 bp, synthetic construct
  source 1..120: mol_type = other DNA
ttgagcccaggagttcaggaccagcctgggcatgcaacatggagaaaccccgtctctactaaaaatacaaacattagcaggctaaggtggtgcacacctgtagtcccagctacttgggag

SEQ ID NO: 30859 - DNA, 120 bp, synthetic construct
  source 1..120: mol_type = other DNA
aaaaaaaaaaaaaagagcaagttggagggagacagagaaaaaactggtttgcatgtactgatgacaaggaggtgggagatgaagttcacagactcaaaattattgcaacagcctagacag

SEQ ID NO: 30860 - DNA, 120 bp, synthetic construct
  source 1..120: mol_type = other DNA
ctgctaatctgtattttctaagttttctgcacggggcctatattacttttataattaaaagttacttaaaaaaccaaatatgaccaaaacagctgcctgcttgtgtgactacaaattgct

SEQ ID NO: 30861 - DNA, 120 bp, synthetic construct; identical to SEQ ID NO: 8684
  source 1..120: mol_type = other DNA

SEQ ID NO: 30862 - DNA, 120 bp, synthetic construct
  source 1..120: mol_type = other DNA
tgataacagctaacagtgatgaccaacaatggactggacagcctcaggaagtactgagctctctgttaccaggtgttccaactgtgtgggaccaatgcttgctggagatgctgcagaggc

SEQ ID NO: 30863 - DNA, 120 bp, synthetic construct
  source 1..120: mol_type = other DNA
tcctgcccactcagtcccctcctggagcctggcatctctctcaccgtggggatgaactgaatttcataggcatccacggggccaggagccggggtccactctgtccgaactgttgtctcc

SEQ ID NO: 30864 - DNA, 120 bp, synthetic construct
  source 1..120: mol_type = other DNA
tcgaagaggcccatcctaactcccactcctctctgctagtggagaatagctgacagagggctgaacggggcttggatcgccttcaccttctctccatcttcaggagcacagaatctccct

SEQ ID NO: 30865 - DNA, 120 bp, synthetic construct; identical to SEQ ID NO: 8685
  source 1..120: mol_type = other DNA

SEQ ID NO: 30866 - DNA, 120 bp, synthetic construct
  source 1..120: mol_type = other DNA
ctgcccggcacagttcccggggcccgcagcctccagggcaggcgctggctggaggctcttcctgcccgcagtcctcaccgccatagcccacgtggcacaggcacactccttgcacacacc

SEQ ID NO: 30867 - DNA, 120 bp, synthetic construct
  source 1..120: mol_type = other DNA
aggtgcggatgctgcagtcctcactcacgtagccttcccaacagatgcacacaccgtcctggcacacgccgtgctggctgcagtcattcgggcactgcctcacaccgcaatcctcgccag

SEQ ID NO: 30868 - DNA, 120 bp, synthetic construct
  source 1..120: mol_type = other DNA
catcctcgcaaaggccgtgcccacggcagtccccgggacagcgacggctcccacagtcctcaccggtgaagcccgggttgcacacgcagcggccatccacgcagcgcccgcgcccgcgac

SEQ ID NO: 30869 - DNA, 120 bp, synthetic construct; identical to SEQ ID NO: 8686
  source 1..120: mol_type = other DNA

SEQ ID NO: 30870 - DNA, 120 bp, synthetic construct
  source 1..120: mol_type = other DNA
cgcggccccggcagtccctcggacatgtccgcgtgctgcagtcctcgcctgtgtacccgggccagcacacgcagcggccgtccacgcagcgcccgccctcgccacagtcccaggggcagc

SEQ ID NO: 30871 - DNA, 120 bp, synthetic construct
  source 1..120: mol_type = other DNA
agccggggttacacacgcagcgcccattctcacagcgccccctctgactgcaaccgcgagggcagctcctcatgccacagtcgtcaccagtgtagcctgggtcacacacgcagcgcccac

SEQ ID NO: 30872 - DNA, 120 bp, synthetic construct
  source 1..120: mol_type = other DNA
ccccgggacaggatggccagccacagctggggccagtgtagccgggaaagcacacgcaacgaccacggacacagcgaccctgatcattgcagtcatctgggcaggaccccgaggctgagg

SEQ ID NO: 30873 - DNA, 120 bp, synthetic construct; identical to SEQ ID NO: 8687
  source 1..120: mol_type = other DNA

SEQ ID NO: 30874 - DNA, 120 bp, synthetic construct
  source 1..120: mol_type = other DNA
ctgcatccacacccctcatggtgaggaaggagtgccttcttctaattcataccaaggacctttatggactagcaatgcccaccccaccccacctctccaccctcttctgtgatcacctgc

SEQ ID NO: 30875 - DNA, 120 bp, synthetic construct
  source 1..120: mol_type = other DNA
aggactgggggctcggtgcctgggggacagccacagccagtggaagggggcaggttaatgcggtgggtgaataccacctgcttctcccctccttccactgtgtgctcgtaaagctgagaa

SEQ ID NO: 30876 - DNA, 120 bp, synthetic construct
  source 1..120: mol_type = other DNA
accaggagaaccaggctggaggttagagcatactgggctggcatcattcaggaggctgcagggagaaagggtaggtatgagagcagcttcaaaaaggagacaaaatgaatccccccttct

SEQ ID NO: 30877 - DNA, 120 bp, synthetic construct; identical to SEQ ID NO: 8688
  source 1..120: mol_type = other DNA

SEQ ID NO: 30878 - DNA, 120 bp, synthetic construct
  source 1..120: mol_type = other DNA
tgcctcagcctcctgagtagctgggattacaggcatgccccaccatgcctggctaattttgtacttttagtagagaccgggtttctccatgtcggtcaggctggtctcagactcctaacc

SEQ ID NO: 30879 - DNA, 120 bp, synthetic construct
  source 1..120: mol_type = other DNA
tttgtttttcccacgagcactacaagctctcactactccaagggcctttgcattgtgtgttccctatgtctgggatgctcttcactctgctcataaaggctggctccatcttcaaatctt

SEQ ID NO: 30880 - DNA, 120 bp, synthetic construct
  source 1..120: mol_type = other DNA
tgggagctccttgagaacaaggacctcatctatcccaggactgctgtatacttgtgtctggcacataaatgttctatctgacacatcaatgttgaatgaattagtggatgagtacctagg

SEQ ID NO: 30881 - DNA, 120 bp, synthetic construct; identical to SEQ ID NO: 8689
  source 1..120: mol_type = other DNA

SEQ ID NO: 30882 - DNA, 120 bp, synthetic construct
  source 1..120: mol_type = other DNA
atgagtcaccgcacgacctctttctaatatagagacaggatcttgctcaaccccctggttgaagctggacttgaactcctgggctcaagccatcctcccacctcagcctcccaggtagct

SEQ ID NO: 30883 - DNA, 120 bp, synthetic construct
  source 1..120: mol_type = other DNA
cctcaggacttacatgatcaaatatcaagacttattttaaaggtgcaaggatagacagatgaaacagaatagggcccagaaacaggcccacacatatgtggtcaactaattaacgacaaa

SEQ ID NO: 30884 - DNA, 120 bp, synthetic construct
  source 1..120: mol_type = other DNA
ctgatataccgaaattaatttgagatgaacccaggacctaaataagaaaagtaaagcaatatctttcatagcaatatcttacagaaaatttctgaccttggagtaagcaagatttctttt

SEQ ID NO: 30885 - DNA, 120 bp, synthetic construct; identical to SEQ ID NO: 8690
  source 1..120: mol_type = other DNA

SEQ ID NO: 30886 - DNA, 120 bp, synthetic construct
  source 1..120: mol_type = other DNA
aatcccagcacttcaggaggcttaagtgtgaggattgcatgagcccaggagttggagaccagcctgggtaagatagtgagactctgtctctacaaaaaacaaaaagaattcactgggcgt

SEQ ID NO: 30887 - DNA, 120 bp, synthetic construct
  source 1..120: mol_type = other DNA
gctgtgatcatgccactgcactccagcctgggcaacagagctgatactctgtttcaaaaaaaagaaaaagaaaaaaacaaaacaaaatttcaggtcatcaaattacatcattaagagaat

SEQ ID NO: 30888 - DNA, 120 bp, synthetic construct
  source 1..120: mol_type = other DNA
gagttcaagaccagcctggccaacatggtgaaaccccatctctactaaaaatacaaaaattagctgggcgtggtagcgggcacctgtagtcccagctactcgggaggctgaggaggagaa

SEQ ID NO: 30889 - DNA, 120 bp, synthetic construct; identical to SEQ ID NO: 8691
  source 1..120: mol_type = other DNA

SEQ ID NO: 30890 - DNA, 120 bp, synthetic construct
  source 1..120: mol_type = other DNA
cgtcttggctcactgcaagctctgcctaccaggttcatgccattctcctgcctcagcctcctgagtagctgggactacaggcgcccaccaccatacttggctcatttttttgtattttta

SEQ ID NO: 30891 - DNA, 120 bp, synthetic construct
  source 1..120: mol_type = other DNA
tttttttttttttttttagtagagacagggtttcaccaagttggccaggctggtctcaaactcctgacctcaagtgatctgccttggcctcccaaagttattaggattacaggcatgggc

SEQ ID NO: 30892 - DNA, 120 bp, synthetic construct
  source 1..120: mol_type = other DNA
tcctgcctcagcctccagagtagctggaactacagatgggcatcaccatgcctggctaatttttaaattttttgtagagatgggatcttgctgtgttgcccaggctggccttgaactcct

SEQ ID NO: 30893 - DNA, 120 bp, synthetic construct; identical to SEQ ID NO: 8692
  source 1..120: mol_type = other DNA

SEQ ID NO: 30894 - DNA, 120 bp, synthetic construct
  source 1..120: mol_type = other DNA
atatctataactaaatatccggtgggaatgactgcatagttcttccaaaagacgtagaccataatgttcatgagatttattcctatattagctaaaactgaaagcaactcaagtgtccat

SEQ ID NO: 30895 - DNA, 120 bp, synthetic construct
  source 1..120: mol_type = other DNA
aatatcacacacagaaagagaatgctcttatactcttatatacccttcctgagctaccaaaaaaagaaaaaagaaaaaagaaaacactctgaataatgccgtttatatgaggttcaaaaa

SEQ ID NO: 30896 - DNA, 120 bp, synthetic construct
  source 1..120: mol_type = other DNA
tctactaaaaatacaaaaattagctgggcatggtggcacacacctgtagtcccagctacctgggaggctaaggcaaaagaattgcttgaatcccagaggcggaggttgcagtgaaccaag

SEQ ID NO: 30897 - DNA, 120 bp, synthetic construct; identical to SEQ ID NO: 8693
  source 1..120: mol_type = other DNA

SEQ ID NO: 30898 - DNA, 120 bp, synthetic construct
  source 1..120: mol_type = other DNA
cgatcatgctgaaaccccgtctctactaaaaataaaaaataaaaaaaaattagctgggcatggtggcaggtgcctgtaatcccagctacttgggaggctgaggcgggagaatcgcttgaa

SEQ ID NO: 30899 - DNA, 120 bp, synthetic construct
  source 1..120: mol_type = other DNA
ctcacaccccctccagccaccacatatttctctcctctacttcatggccacagttgtcaaaatttatttgtatttgatgtttacatttccttatagcctatgcatgcctcaatccactct

SEQ ID NO: 30900 - DNA, 120 bp, synthetic construct
  source 1..120: mol_type = other DNA
actccctccaacccaccaaacagctccctctagggcttcccaatgacttcggtgccacaaaatctaagggacatttgtcttcatcttgcttgacctttgacttctctcaaaatcactaga

SEQ ID NO: 30901 - DNA, 120 bp, synthetic construct
  source 1..120: mol_type = other DNA
agtgattctcctgcctcagcctcccgagtagctgggactacaggcacccgctaccacacctagctaattttttatttttagtagagacgaggtttcaccatcttgaccaggctggtcttg

SEQ ID NO: 30902 - DNA, 120 bp, synthetic construct; identical to SEQ ID NO: 8694
  source 1..120: mol_type = other DNA

SEQ ID NO: 30903 - DNA, 120 bp, synthetic construct
  source 1..120: mol_type = other DNA
taccttcatccagacttataacttcaatttccaaactatacaccaatttgtaaaacaccccagtcatcttcctctcgctccacagcaatatatccacctgcctacttggcatctccactt

SEQ ID NO: 30904 - DNA, 120 bp, synthetic construct
  source 1..120: mol_type = other DNA
agaaacctaatagcccattcaaggctaccatatttccttgtatctacctgtattttctcataaacatctctttaattcatttccttctctcccacttaccttcattctaatccaagcttc

SEQ ID NO: 30905 - DNA, 120 bp, synthetic construct
  source 1..120: mol_type = other DNA
gcagcattgacctcctgttgctcaagcaatcctcccacctcagcctcctgagtagttgggactacaggtgtgtgccatcacgctcagctaatttttaattttttttgcaaagacaggatc

SEQ ID NO: 30906 - DNA, 120 bp, synthetic construct; identical to SEQ ID NO: 8695
  source 1..120: mol_type = other DNA

SEQ ID NO: 30907 - DNA, 120 bp, synthetic construct
  source 1..120: mol_type = other DNA
tactctctgtgcccatccccaaccccagatctttgtatactctgttccatccgtgtggaacactgttcccttctctcttggccttctcatccttcaggtctcagcccgccatttttttca

SEQ ID NO: 30908 - DNA, 120 bp, synthetic construct
  source 1..120: mol_type = other DNA
gtccaaagtaataataaatatactgtgagattattttattactttcttgcccactagactataaagtccatgagggcaggcatggcacctatttttttttcttggctgctgtatccctgc

SEQ ID NO: 30909 - DNA, 120 bp, synthetic construct
  source 1..120: mol_type = other DNA
aggaccacggacagtgtctgggactggaagttggttagacacagccaccagggctgaggcagaatcagaggccaggccagggaagatcctggcaggaccagatggtacaagcactttgga

SEQ ID NO: 30910 - DNA, 120 bp, synthetic construct; identical to SEQ ID NO: 8696
  source 1..120: mol_type = other DNA

SEQ ID NO: 30911 - DNA, 120 bp, synthetic construct
  source 1..120: mol_type = other DNA
gtagtgactagtaggggcatgggggggggggcttctggggtgctaaaggtgtcttgtttcttgatctggatgacggttacccagttgtatgtgtttgtggagtttactgaggcagggatt

SEQ ID NO: 30912 - DNA, 120 bp, synthetic construct
  source 1..120: mol_type = other DNA
acctgagtgtgagggggccagtcaggattcagctagggtgaagagttgaggagagatgttgaaaggtgcccagctcttccagaccagaggctggggaaaggaggagggcagggtgggtgt

SEQ ID NO: 30913 - DNA, 120 bp, synthetic construct
  source 1..120: mol_type = other DNA
cctggatcagagaaaaaggagtaattggggctaccagccatcacattctgctaccagccagcaagagacggaaagggagctgaacagggacagagtgtttccacaccaagaggctcccca

SEQ ID NO: 30914 - DNA, 120 bp, synthetic construct; identical to SEQ ID NO: 8697
  source 1..120: mol_type = other DNA

SEQ ID NO: 30915 - DNA, 120 bp, synthetic construct
  source 1..120: mol_type = other DNA
acctagtcattgggtgatgcctaagaaggctgatttcttgttggctccgagggcagctctgtgagtgaaagaacctggatggtgtgagaggaacaaagcaggaggcccttcccagtggga

SEQ ID NO: 30916 - DNA, 120 bp, synthetic construct
  source 1..120: mol_type = other DNA
agagagggtctttgcaccaggaaggagtgaagagagctcaccagcttttctggaaagctggtgagattggtctagaagagcagagcagcctccattgaccacacacccagaggctccttc

SEQ ID NO: 30917 - DNA, 120 bp, synthetic construct
  source 1..120: mol_type = other DNA
ctccccttcaccattccccctgccactatgtctggggtggttctctgtagtgtgtgtttggagagagatatggcctcaccctcttggcaccctccccacagttggagggctggcagggat

SEQ ID NO: 30918 - DNA, 120 bp, synthetic construct; identical to SEQ ID NO: 8698
  source 1..120: mol_type = other DNA

SEQ ID NO: 30919 - DNA, 120 bp, synthetic construct
  source 1..120: mol_type = other DNA
gggaatggaaaaattaagagaaaggatttccaggccccagctgaaaatggttaggggtgcaatgagagacaggaaggcagtttctggtcctgcacctagtggctaggtctggagtgagca

SEQ ID NO: 30920 - DNA, 120 bp, synthetic construct
  source 1..120: mol_type = other DNA
cgagttgcttcccagtagttcctctcagttccacttccagttgtttctatgccattaaattctttccaggcgagataaggggcccgcccttcccacccggggcgtgtcacgtgtactggt

SEQ ID NO: 30921 - DNA, 120 bp, synthetic construct
  source 1..120: mol_type = other DNA
gccatcccagccctgctgaaccgtgagtcatgagtgcagagctctggccaagaacaagttttaggatcctctctgcaggctctgtgcacgtcccagacccgagtcctgactgtcccattt

SEQ ID NO: 30922 - DNA, 120 bp, synthetic construct; identical to SEQ ID NO: 8699
  source 1..120: mol_type = other DNA

SEQ ID NO: 30923 - DNA, 120 bp, synthetic construct
  source 1..120: mol_type = other DNA
gacacatactgcccaccccaacacacacataccaccctctcctcccagacactccttcacagggagcctggttcccagcgaatgctcctatgtcctctgtcctgaacagaagtccttgct

SEQ ID NO: 30924 - DNA, 120 bp, synthetic construct
  source 1..120: mol_type = other DNA
agcagctgcagtgcctctgcacctgctctgtccccaaccccgggagggcggcgtctcagggcaggacagggaagtctccctcacttgtcccctgcaacaggggctgagccacaaccgact

SEQ ID NO: 30925 - DNA, 120 bp, synthetic construct
  source 1..120: mol_type = other DNA
gccctcccacatgccacccctcctcttctcctgcccccaccccagcccccactccctgtctagcatcactgtctcaccataccctcatctcaacccccagccccggtcttacctcccacg

SEQ ID NO: 30926 - DNA, 120 bp, synthetic construct; identical to SEQ ID NO: 8700
  source 1..120: mol_type = other DNA

SEQ ID NO: 30927 - DNA, 120 bp, synthetic construct
  source 1..120: mol_type = other DNA
cgtctctgggaccccaagtccccaccctgctccagtcccaccatttctatcttctcggcttatcccgtccccgagccactcctgctgtctgttctgttcagtccctctcctgtcactgcc

SEQ ID NO: 30928 - DNA, 120 bp, synthetic construct
  source 1..120: mol_type = other DNA
ttggggcggacaaggaaggaaagcctgaaggttaggaggaaggtttagggttgaagaaagggctagagacaggaggcaaatataagggtgggtcacctgaatagagggtgaagtggtgga

SEQ ID NO: 30929 - DNA, 120 bp, synthetic construct
  source 1..120: mol_type = other DNA
gaggacaggggggacagggagacagacacaccccacataagtctgttgggtgtttccctagcttcatctccccatgtgctgccctgacaaggagctgaaaaagagactttgctacagagg

SEQ ID NO: 30930 - DNA, 120 bp, synthetic construct; identical to SEQ ID NO: 8701
  source 1..120: mol_type = other DNA

SEQ ID NO: 30931 - DNA, 120 bp, synthetic construct
  source 1..120: mol_type = other DNA
ttttttcctggctttgatggggaggatgaagtcagcatcttggacagagccaggctcagcttccttcctctgccttggcctgaagcccccagagccagcagtaggtagcagcttcccaag

SEQ ID NO: 30932 - DNA, 120 bp, synthetic construct
  source 1..120: mol_type = other DNA
cacagggtatgaatttcctctgacaccttcagatttctgttccatggtcatatcctttagtgtgtgtgtgcacgcgcgtgtgcctatgccctatgtcctggctttattatttaggaagaa

SEQ ID NO: 30933 - DNA, 120 bp, synthetic construct
  source 1..120: mol_type = other DNA
ttccagatgtacacaagcttataaggcatttggggaagccactggaagcttagcagatatagtttcaggttctgaaattatctttgtttaccatttgattcaccctttggtttccaggct

SEQ ID NO: 30934 - DNA, 120 bp, synthetic construct; identical to SEQ ID NO: 8702
  source 1..120: mol_type = other DNA

SEQ ID NO: 30935 - DNA, 120 bp, synthetic construct
  source 1..120: mol_type = other DNA
gttcctgtcctgacctcaggaggaaaagggatgaaagatagagaaaaggaaaggaaagatagggaggagagaaggcagacacataagagtaagggcaattgagggcaaggacctgaagga

SEQ ID NO: 30936 - DNA, 120 bp, synthetic construct
  source 1..120: mol_type = other DNA
tgccgggcttccgtttacaaaacagtttcctacacagtgcgggcattaatcccactttgtggctgaggaaacggaggctcatagacattaagggtcttgttcaaggggctaagtcagtag

SEQ ID NO: 30937 - DNA, 120 bp, synthetic construct
  source 1..120: mol_type = other DNA
gaagcacttgtacaaagaagggtggagaatccagatttttgaaacttttctgcatccagttattgtgtagattcacttagaagaaatggcatcagatggggaagggggtggtcaacattc

SEQ ID NO: 30938 - DNA, 120 bp, synthetic construct; identical to SEQ ID NO: 8703
  source 1..120: mol_type = other DNA

SEQ ID NO: 30939 - DNA, 120 bp, synthetic construct
  source 1..120: mol_type = other DNA
cagatgtgctgtatccagaagccatagcagaacgatgaggcaaacatcaggctccccagtgctggcccccacagctgggaagaggatggagaactggtgtgggaagtaaagggagtgggg

SEQ ID NO: 30940 - DNA, 120 bp, synthetic construct
  source 1..120: mol_type = other DNA
cagaatgggaaatagaaagggggcggcatgagaaagggaggagacaagcacagggtcagcagcagcagcagatgagaagaccaagaaaaacaaaggaaaaagacagtgaatttaaaaata

SEQ ID NO: 30941 - DNA, 120 bp, synthetic construct
  source 1..120: mol_type = other DNA
cgagaccccacttctatttttaaattaaaaaaaaaatttaagacagtgaagcagtggatggggtggggaagatacaaaagaagaaaaaaacagtgatgaataatggttcaaaaagaggtt

SEQ ID NO: 30942 - DNA, 120 bp, synthetic construct
  source 1..120: mol_type = other DNA
gggatgagagagaacaaaaggtgggatcctgaggaagaaatgaaggagatggtggcacaaggaaagcagaacagaaagacaaagtgggcatagggcaggaggggccaatgaggtgcagga

SEQ ID NO: 30943 - DNA, 120 bp, synthetic construct; identical to SEQ ID NO: 8704
  source 1..120: mol_type = other DNA

SEQ ID NO: 30944 - DNA, 120 bp, synthetic construct
  source 1..120: mol_type = other DNA
agagaaggacaacagagatggggacagaaaggggcaagggatgaggaaaaggtgtatctattatggaccaggcactgaggacgtcgtctttcatcctgtcatcaaccctgattaggaggt

SEQ ID NO: 30945 - DNA, 120 bp, synthetic construct
  source 1..120: mol_type = other DNA
ctgcaccccctccagagatacggtggataaggctcaaggactctgggatagaaagcatagctgagaagctgggctgccctctggagggaggaaaggtctagttcctgggatccctggttc

SEQ ID NO: 30946 - DNA, 120 bp, synthetic construct
  source 1..120: mol_type = other DNA
tgggcttatggcccaggcagcccctgtccagtcatctgggcattgagcccaggcccagctcacaccctccagctgacccaggacactcctgcagggtcaggcctgaggcactgctgaaca

SEQ ID NO: 30947 - DNA, 120 bp, synthetic construct; identical to SEQ ID NO: 8705
  source 1..120: mol_type = other DNA

SEQ ID NO: 30948 - DNA, 120 bp, synthetic construct
  source 1..120: mol_type = other DNA
aattaaaaacataagaatgtacagctttttctgcctgccccactcttgtctttgtctttcatctggactctcaagtctcagtcccctccagtttagggcttagaggatatcctgccacat

SEQ ID NO: 30949 - DNA, 120 bp, synthetic construct
  source 1..120: mol_type = other DNA
gggagaacctgctcgagagcaggagacccagaggctgctcaccctgaagggcgtggggccccatctttcctgttgactcacattccagggatgcgtatcctctagtctgtcacgccatga

SEQ ID NO: 30950 - DNA, 120 bp, synthetic construct
  source 1..120: mol_type = other DNA
ttctttgatgctggctctggaaaagccactttcccccaaactccccatcacgagccaggaaggcagccaccattccttcaactccctccaagttgtttatttaataataataaaaaagaa

SEQ ID NO: 30951 - DNA, 120 bp, synthetic construct; identical to SEQ ID NO: 8706
  source 1..120: mol_type = other DNA

SEQ ID NO: 30952 - DNA, 120 bp, synthetic construct
  source 1..120: mol_type = other DNA
tcctttaccaattgccccaagcctggggatcagggaaatttgaaacagtcccacctggccacctggtaccccctccccccgttctaagtcagtgtgaatggcagaggtcagggatgattg

SEQ ID NO: 30953 - DNA, 120 bp, synthetic construct
  source 1..120: mol_type = other DNA
gaggtcttgatgtgaatcaccctggtgtccatgacctcacactcgatctgcatcatctcctcatagtcccccggggccccacggcctgacagggtctctgtgagaaggggagagttaagg

SEQ ID NO: 30954 - DNA, 120 bp, synthetic construct; identical to SEQ ID NO: 2896
  source 1..120: mol_type = other DNA

SEQ ID NO: 30955 - DNA, 120 bp, synthetic construct; identical to SEQ ID NO: 8707
  source 1..120: mol_type = other DNA

SEQ ID NO: 30956 - DNA, 120 bp, synthetic construct
  source 1..120: mol_type = other DNA
gggtggaggcaaagatgccaacaagctccccagccctactctacatccccccactgaagacagactgctgggaacctggggtgacagagatggaagggcaggagaaactcacccttcgga

SEQ ID NO: 30957 - DNA, 120 bp, synthetic construct
  source 1..120: mol_type = other DNA
acaggatttgaggggaactaagcccaatgctcagtttctaccagggaagcgggtaggatgagagaaaaagacaggagacccccagtggaggagggaggtataatcccactggtgacagta

SEQ ID NO: 30958 - DNA, 120 bp, synthetic construct
  source 1..120: mol_type = other DNA
cttaactggaggtgacttcttccgtggctgagacttctggaaggagaagtatctaaggacttggagagggtgaagggaaaagggaaagagacaaacagcccctggaagctgatgccacct

SEQ ID NO: 30959 - DNA, 120 bp, synthetic construct; identical to SEQ ID NO: 8708
  source 1..120: mol_type = other DNA

SEQ ID NO: 30960 - DNA, 120 bp, synthetic construct
  source 1..120: mol_type = other DNA
gggggagctggatgccccagcaatgaatcccacacctcagggactcagtgcggttgaagtgccggcaatcagaggagaggaagagctggtctaggtctcttagtagtagctccttggcgc

SEQ ID NO: 30961 - DNA, 120 bp, synthetic construct
  source 1..120: mol_type = other DNA
agaaggcgatgacggcaagagaaagctttgggtccccctcactgaaagcggggagaagaccaactcataccctcaaacgagagggggccctctctctctctcctcacctgaaactgggct

SEQ ID NO: 30962 - DNA, 120 bp, synthetic construct
  source 1..120: mol_type = other DNA
ccttgttcatccgaggagagatgggagctgaaggaggctcactgatgctgtggataaagaaggactgagcacaatgaagaatttcagctgtatcaagtatctaggtaagaataaagactc

SEQ ID NO: 30963 - DNA, 120 bp, synthetic construct; identical to SEQ ID NO: 8709
  source 1..120: mol_type = other DNA

SEQ ID NO: 30964 - DNA, 120 bp, synthetic construct
  source 1..120: mol_type = other DNA
aaaaaatacaaaaaattagccgggcatggtggcgtgcgcctgtagtcccagctacttgggaggttgaggcaggagaatcacttgaacccaggaagcagaggttgcagtgagccgagatcg

SEQ ID NO: 30965 - DNA, 120 bp, synthetic construct
  source 1..120: mol_type = other DNA
ttgtatataagcagaaggaaatggcctgggccaaagcaggcagctaggaggctgtaacgtgggctccacctggaaggttctagtgaagcaaggaaggtctcacctgacaggtccaaagtt

SEQ ID NO: 30966 - DNA, 120 bp, synthetic construct
  source 1..120: mol_type = other DNA
gaggctgtattcctgttggtctcccagggacagactggtcttacttcagccagcagggcctccagccgccgccggagggcagcattctctcggcggagctgctggttgtcagccagtact

SEQ ID NO: 30967 - DNA, 120 bp, synthetic construct; identical to SEQ ID NO: 8710
  source 1..120: mol_type = other DNA

SEQ ID NO: 30968 - DNA, 120 bp, synthetic construct
  source 1..120: mol_type = other DNA
gctggtggaaactctttccttcgtaactctttcttcctgtcagcccacatttgtagggttcaaagtttaaccttgttatactgcttatacagtttacctgattttcccctaggaggcagc

SEQ ID NO: 30969 - DNA, 120 bp, synthetic construct
  source 1..120: mol_type = other DNA
aaaactacctggagttgatattcatatagaaacaggagtccattctgaccctcagaatgatctaatgggtccgtttcctcacttttttctcctaggtatcgactccctcctcatcccaca

SEQ ID NO: 30970 - DNA, 120 bp, synthetic construct
  source 1..120: mol_type = other DNA
gctcttcctctcaggccgtggtagagagggagccggcccttcaggctggactcgaatagcaccctggatgaggacaactggggacactggggcaagtgagcagaggtcagagggctgtgc

SEQ ID NO: 30971 - DNA, 120 bp, synthetic construct
  source 1..120: mol_type = other DNA
ttttgagatgcagtcttgctctgtcgaccaggctggagtgcagtggtgcgatctcggctcactgcaagctccgcctcccgggttcacgccattctcctgcctcagcctccccagcagctg

SEQ ID NO: 30972 - DNA, 120 bp, synthetic construct; identical to SEQ ID NO: 8711
  source 1..120: mol_type = other DNA

SEQ ID NO: 30973 - DNA, 120 bp, synthetic construct
  source 1..120: mol_type = other DNA
aggcgcctgccaccactccacgctaatttttgtatttttagtagagacaaggtttcaccacgttggccaggctggtcttaaacttctgacctcaggtgattcgcccgcctcagcctccca

SEQ ID NO: 30974 - DNA, 120 bp, synthetic construct
  source 1..120: mol_type = other DNA
tggcattgggacagtggttagcactacaggtttgggctgcagtggcggcttccgggtgggcagggctttgcctgaaggaaggtgagagaaaagaacaagaaatgtcaggaccaaaggcct

SEQ ID NO: 30975 - DNA, 120 bp, synthetic construct
  source 1..120: mol_type = other DNA
gaaggggacagggactctgtcttcacttccaggacctcctctcctataaaagcctatgtggggcattccagagatacattagtcaggaagagtgtcgaggagaaggagctgaagaaggga

SEQ ID NO: 30976 - DNA, 120 bp, synthetic construct; identical to SEQ ID NO: 8712
  source 1..120: mol_type = other DNA

SEQ ID NO: 30977 - DNA, 120 bp, synthetic construct
  source 1..120: mol_type = other DNA
gaccaacatggagaaaccccgtctctactaaaaatacaaaattagtcgggcatggtggcgcatccctgtgtcccagatactcaggaggctgaggcaggagaatcgcttgaacctgggagg

SEQ ID NO: 30978 - DNA, 120 bp, synthetic construct
  source 1..120: mol_type = other DNA
aaaagagggttaagatggggaaatgggtcctttctctttgaacctgaaaataaaactcttctggccctagattacaggccatccaggaggggcagtcacagagctgctcacctgctggct

SEQ ID NO: 30979 - DNA, 120 bp, synthetic construct
  source 1..120: mol_type = other DNA
ttcacagaacttgtctattcacatagaataggcctgagcaggggaagtggcaggggggtctccagcattcacatggcccaaattcctatcttgctggatttccaccttatccctgcccaa

SEQ ID NO: 30980 - DNA, 120 bp, synthetic construct
  source 1..120: mol_type = other DNA
aatctaactggccataaatgaggcttcctgattgccccgtcacacaagttttcctcccaggcaccaaacagcaaagcctcagtcacctctgagcctccatggcctccaataaatctgcct

SEQ ID NO: 30981 - DNA, 120 bp, synthetic construct; identical to SEQ ID NO: 8713
  source 1..120: mol_type = other DNA

SEQ ID NO: 30982 - DNA, 120 bp, synthetic construct
  source 1..120: mol_type = other DNA
taatcccagcactttgggaggccgaggcaggtggatcacgaggtcaggagatcgagaccatcctggctaacacggtgaaaccccgtctctactaaaaaaatagaaaaattagccaggcgt

SEQ ID NO: 30983 - DNA, 120 bp, synthetic construct
  source 1..120: mol_type = other DNA
cgagactctgtctcaaaaaaaaaaaaaaaaaaaacttcccttcccggtcctccagtcactcagattccctacacagagataaccactatcagaactatttaaccatggctgggcatggtg

SEQ ID NO: 30984 - DNA, 120 bp, synthetic construct
  source 1..120: mol_type = other DNA
caaaaaaatagccggacatggtggcacgtgcctgtagtcctagctattaggggggctgaggcaggacaatagcttaaacccaggaaacggaggttgcagtgagtggagatcacgccaatg

SEQ ID NO: 30985 - DNA, 120 bp, synthetic construct; identical to SEQ ID NO: 8714
  source 1..120: mol_type = other DNA

SEQ ID NO: 30986 - DNA, 120 bp, synthetic construct
  source 1..120: mol_type = other DNA
ccgagtagctgagactacaggtgcctgccaccatgcctggctaattttttgtatttttagtagagatggcgcttcactgtgttagcccgaatggtcttgatctcctgacctcgtgatctg

SEQ ID NO: 30987 - DNA, 120 bp, synthetic construct
  source 1..120: mol_type = other DNA
tttgtgtatcttttttataacatgtattaatctgctagatataatctgtttgtccctccaaatccactttccatccctccctgctgtgctccctgagatccagggagaatctgaatggac

SEQ ID NO: 30988 - DNA, 120 bp, synthetic construct
  source 1..120: mol_type = other DNA
cccagcactttgggagccaaagtgggtggatcacctgaggtcgggaattcaagaccagcctaacatgaaagaagccctgtctctactaaaaatacaaaattagccaggcgtggtggagca

SEQ ID NO: 30989 - DNA, 120 bp, synthetic construct; identical to SEQ ID NO: 8715
  source 1..120: mol_type = other DNA

SEQ ID NO: 30990 - DNA, 120 bp, synthetic construct
  source 1..120: mol_type = other DNA
tcttacttgatcaactgcataagcttcttccttggttctcttgcctctggccctgcccctctgcaacccattctctactttgccactagaatcatcttcctaatcatattacttccctgc

SEQ ID NO: 30991 - DNA, 120 bp, synthetic construct
  source 1..120: mol_type = other DNA
cactctgaagaaatgcagggtcctcagacacaagtcaacccccacactgtcctcctggctaatttctacgtgtcctttaaaactctcaggaaacccttcttccaggggcacatcccagat

SEQ ID NO: 30992 - DNA, 120 bp, synthetic construct
  source 1..120: mol_type = other DNA
atctcggctcactgcaagctccgcctcccgggttcatgccattctcctgcctcagcctcccaagtagctgggactacaggctaattttttgtatttttagtagacacggggtttcaccat

SEQ ID NO: 30993 - DNA, 120 bp, synthetic construct; identical to SEQ ID NO: 8716
  source 1..120: mol_type = other DNA

SEQ ID NO: 30994 - DNA, 120 bp, synthetic construct
  source 1..120: mol_type = other DNA
ttactaaatacacagctacgagtaaataaacttgggaacactttaaaaatagaacaaataatgttaattgtagaatctagtttagtatatggtgttctagcctttctgtatgtttaaaaa

SEQ ID NO: 30995 - DNA, 120 bp, synthetic construct
  source 1..120: mol_type = other DNA
tctactaaaaatacaaaaaattagctgggcgtggtggtgggtgcctgtaatcccagctacttgggaggctgagacaggagaatcacttgaacctgggaggtggaggttgcagtgagctga

SEQ ID NO: 30996 - DNA, 120 bp, synthetic construct
  source 1..120: mol_type = other DNA
gctcacaagtttttaaaaagtaagttgaatggcatgacagaatactaggaacaagaaaaagagagaaaaataatatccatctcctcagcactgcccttgctgtggttccctgaaatgttt

SEQ ID NO: 30997 - DNA, 120 bp, synthetic construct; identical to SEQ ID NO: 8717
  source 1..120: mol_type = other DNA

SEQ ID NO: 30998 - DNA, 120 bp, synthetic construct
  source 1..120: mol_type = other DNA
gggcagggggcagaaagaagggcaaaaaacaagggagatgttgacagtaagagcgagaacaaaagctttagaagtttagggcttacaagccatcaattatttgacattctggtctgaatg

SEQ ID NO: 30999 - DNA, 120 bp, synthetic construct
  source 1..120: mol_type = other DNA
ggcctcagagtggacaacttgggcaagaacagttccagaattctcagcagtcaataactctcttcttcccagccccacataactctttatattaaaaagacccaagatcaggcgtggtgg

SEQ ID NO: 31000 - DNA, 120 bp, synthetic construct
  source 1..120: mol_type = other DNA
aacataggaagaccccatttttacaaacaataaaaaaaattagccagacatggtggcatgtgtctgtggtcccaactactcaggaggctgaggcaggaggatcacctgagctcaggaggt

SEQ ID NO: 31001 - DNA, 120 bp, synthetic construct
  source 1..120: mol_type = other DNA
ataaccaaaggggatgtggaaaatgaagatattaaggaaacggcaaaggtagtggagaaggccccccacacctcacacacctcatgactcatagcacacaaatcatttaaatcatttctt

SEQ ID NO: 31002 - DNA, 120 bp, synthetic construct; identical to SEQ ID NO: 8718
  source 1..120: mol_type = other DNA

SEQ ID NO: 31003 - DNA, 120 bp, synthetic construct
  source 1..120: mol_type = other DNA
aggggattgaaggagagaggataggcacttatgtagaagcgtgaggatataggaagctacgtagtttctgggaaacagtgggaagatgagggtttctggaaatctgagggaacgacaaag

SEQ ID NO: 31004 - DNA, 120 bp, synthetic construct
  source 1..120: mol_type = other DNA
gccgtcaaactaaataagggaggatacaagagggcaggagtgtgagaaaggatgagaaagtaggggtgactccagatgagttatggcctgtgaatgggtccaggttctgggctcactttc

SEQ ID NO: 31005 - DNA, 120 bp, synthetic construct
  source 1..120: mol_type = other DNA
tgcaagaaatgctgagcgtcggggggtcgttcggtggccccagcctacagatcgcacacaagcccccgccccatccctcattggctccgctcggccagacccaccgcccgcccacttgaa

SEQ ID NO: 31006 - DNA, 120 bp, synthetic construct
  source 1..120: mol_type = other DNA
ctgctccgctctccttcagatggcggattccgtatttgcccagacttcctctttaggcccccgcttctttcccgcgtgcctcagggacagtttgccacagccctctcccctccccggtgc

SEQ ID NO: 31007 - DNA, 120 bp, synthetic construct; identical to SEQ ID NO: 8719
  source 1..120: mol_type = other DNA

SEQ ID NO: 31008 - DNA, 120 bp, synthetic construct
  source 1..120: mol_type = other DNA
gggagatgtagtacccagtattaaggtccaccatctcccccagccactactaagtttagtttagacagcttctatgtgtcctcggagatagataagcccctcaaaaggggcgcactgtga

SEQ ID NO: 31009 - DNA, 120 bp, synthetic construct
  source 1..120: mol_type = other DNA
tttaaggtttaacttttaatcagccaaacatcttgcgcagaccctgagccagccctgcatcctggttcttcccctgaatgaccaccttccccagttcctcctgggctgcccggtttttgg

SEQ ID NO: 31010 - DNA, 120 bp, synthetic construct
  source 1..120: mol_type = other DNA
ggtcacagctctgggctgccaactgaggctgccctagcaacaactgacaggcagccagattggcatgaaggacagttcgttctggagggccaggtgggggtaaagtcaggagcagccgaa

SEQ ID NO: 31011 - DNA, 120 bp, synthetic construct; identical to SEQ ID NO: 8720
  source 1..120: mol_type = other DNA

SEQ ID NO: 31012 - DNA, 120 bp, synthetic construct
  source 1..120: mol_type = other DNA
tgtccaagccatggccacggattacgatcttcttgacaaagctcccatcggggcagtaccagagatcagaagcttgaagggcctctggcatctgactggttgatccatgagacttatgag

SEQ ID NO: 31013 - DNA, 120 bp, synthetic construct
  source 1..120: mol_type = other DNA
gcctaatctgaataactgaatcaaggttctcccgaaggttcttttcccactcttgttgcggctgagaggtgtccttttctccaattgtattgactggtggcgtctccatatggatgctta

SEQ ID NO: 31014 - DNA, 120 bp, synthetic construct
  source 1..120: mol_type = other DNA
tcctttcccattcttctgagacccaggcccctagtcctgaaagtccccagttttgctttcctccaaaaatctgctccagcttccccgttccacccacatataatttagaactataaattc

SEQ ID NO: 31015 - DNA, 120 bp, synthetic construct; identical to SEQ ID NO: 8721
  source 1..120: mol_type = other DNA

SEQ ID NO: 31016 - DNA, 120 bp, synthetic construct
  source 1..120: mol_type = other DNA
cgcaaccatgaagctccaggccttagcaactgaactaggccagagcaaccgaactaggcagaatcgaacagaatttggcgcggtcgggctggccaggctgctcaagagtcaaagtgggcc

SEQ ID NO: 31017 - DNA, 120 bp, synthetic construct
  source 1..120: mol_type = other DNA
gacgttgcagtgagccgagatcacaccattgcactccagcctgggcgacagagcgagactagagactccgtctcaaacaaaaaaaaaaaaaaaaaaaaaaaaaaaaggtgggccgggcgc

SEQ ID NO: 31018 - DNA, 120 bp, synthetic construct
  source 1..120: mol_type = other DNA
gcgggcgcctatatcccagctacccaggaggctgaggcaggagaatggcttacctgggaagcggaggttgcagtgagccgagatcgcgccattgcactccagctttggcaactgagactc

SEQ ID NO: 31019 - DNA, 120 bp, synthetic construct; identical to SEQ ID NO: 8722
  source 1..120: mol_type = other DNA

SEQ ID NO: 31020 - DNA, 120 bp, synthetic construct
  source 1..120: mol_type = other DNA
ggatcacttgaggtcaggggttcgagaccagcctggacaacatggtgaaaccccgtctctactaaaaatacaaaaaattagctgggcgtggtggcgggcacctatagtcccagctacccg

SEQ ID NO: 31021 - DNA, 120 bp, synthetic construct
  source 1..120: mol_type = other DNA
acaaacaaaaagtcaaagtgtagagaagtcctggaatggagactgggggcggatgacaatagagtggagaatggcagaggtcgtggtaaatgatagtggcagcagccttttatctggaga

SEQ ID NO: 31022 - DNA, 120 bp, synthetic construct
  source 1..120: mol_type = other DNA
aggcttctctttacctttcctttcacatccatcattgcctttcaagtcctccttcatcaagaaatcttagtgcttttcaaacataagtgtgcatacatatcacctagggaacttgttaag

SEQ ID NO: 31023 - DNA, 120 bp, synthetic construct
  source 1..120: mol_type = other DNA
gttcataaaccgtatgtttttctttttttttttttttttttagagagatggggtctgctgtgtttaccaggctggtctcaaactcctggcctcaagccatcatcccatctcagcctccca

SEQ ID NO: 31024 - DNA, 120 bp, synthetic construct; identical to SEQ ID NO: 8723
  source 1..120: mol_type = other DNA

SEQ ID NO: 31025 - DNA, 120 bp, synthetic construct
  source 1..120: mol_type = other DNA
agtacctcactttggctccctcttaagtttgctctcaccattgtgcctcagactataaaaaccatgccaggacagccaggaagggagacggtttcatcattagccaaagacttgtgtcaa

SEQ ID NO: 31026 - DNA, 120 bp, synthetic construct
  source 1..120: mol_type = other DNA
aacctctgcctcccaggttcaagcgattatcctgcctcagcctcccaagtagcggggatgacaggcacctgccaccatgcctggctaatttttgtatttttagtgaagatggggtttcac

SEQ ID NO: 31027 - DNA, 120 bp, synthetic construct
  source 1..120: mol_type = other DNA
aggagtttgagaccagcctggccaacatggtgaaaccccgtctctactaaaaatacaaaaattagctggtgtggcgcatgcctgtagtcccagctactcaggagactgaggcaggagaat

SEQ ID NO: 31028 - DNA, 120 bp, synthetic construct
  source 1..120: mol_type = other DNA
ttagcctggcgtggtggcacacgcctatagtcccagctacttgggaggctgagacagaagaatcgcttgaacccaggaggcggaggttgcagtgagccaagatcacaccattgcactcca

SEQ ID NO: 31029 - DNA, 120 bp, synthetic construct; identical to SEQ ID NO: 8724
  source 1..120: mol_type = other DNA

SEQ ID NO: 31030 - DNA, 120 bp, synthetic construct
  source 1..120: mol_type = other DNA
gtcaggagtttgagaccagtcgggccaacatggtgaaaccccgtctttactaaaaatacaaaaattaggctggtgtggaggtgtgtgcctgtagtctcagctacttaggaggctgaggca

SEQ ID NO: 31031 - DNA, 120 bp, synthetic construct
  source 1..120: mol_type = other DNA
atttgagaaattctgtctcaaaataataatttgtaaaaaaagaaataagaaagagtataggctctcccccaaagtgtagatactacatgcttgttgactgactcacactatctccctcaa

SEQ ID NO: 31032 - DNA, 120 bp, synthetic construct
  source 1..120: mol_type = other DNA
agatacataaagaggatgacaagtgaaatttgcttatctgttgggatagatgcttggactggaaagtggggaaacagcaatgtctctctcctctccctttcccctaaagatttgagaatg

SEQ ID NO: 31033 - DNA, 120 bp, synthetic construct; identical to SEQ ID NO: 8725
  source 1..120: mol_type = other DNA

SEQ ID NO: 31034 - DNA, 120 bp, synthetic construct
  source 1..120: mol_type = other DNA
gttcgagaccagcctggtcaacattgtaaaaccccatctctactaataaaatataaaaattagccaggtgtggtagcgggcgcctgtaatcccagctacttgggaggctgaggcaggaga

SEQ ID NO: 31035 - DNA, 120 bp, synthetic construct
  source 1..120: mol_type = other DNA
gagaatgcaagaacttgggaggagggcaataattctgctctctatgattgcagaatgttaactccattttggaacaattctccactcctttaagtgaagaaaattggactgagggaaacc

SEQ ID NO: 31036 - DNA, 120 bp, synthetic construct
  source 1..120: mol_type = other DNA
tccactcctttaagtgaagaaaattggactgagggaaaccatatttgacaagtttctggggatttacctgcaaatatatttacatcttacctggagtcacttccctccttccttttttct

SEQ ID NO: 31037 - DNA, 120 bp, synthetic construct
  source 1..120: mol_type = other DNA
agagaccctgcctctacaaaataaaaattagctaggcagggtggtgcacctgtagtcctagctattcaggaggctaaggcggaaggattacttgagcccaggagttgagactgcagtgag

SEQ ID NO: 31038 - DNA, 120 bp, synthetic construct; identical to SEQ ID NO: 8726
  source 1..120: mol_type = other DNA

SEQ ID NO: 31039 - DNA, 120 bp, synthetic construct
  source 1..120: mol_type = other DNA
gtcagattagccaatgctccagatgcaaaggaaaaagtgataagtggcaggggagttattttcaactggggttgatctgaaaatacctcatggatggcttcagagagttgagacttgaaa

SEQ ID NO: 31040 - DNA, 120 bp, synthetic construct
  source 1..120: mol_type = other DNA
tatcctggctaacatggtgaaaccccgtctctactaaaaatacaaaaattatctgggcgtggtcgcatgtgcctgtagtcccagctacttgggaggttgaggcaggagaatcgcttgaac

SEQ ID NO: 31041 - DNA, 120 bp, synthetic construct
  source 1..120: mol_type = other DNA
aaaagaaatggaagagatttattgcaggtggaagaagcagcacaaggtaggagaagtaaggaaagccacttaacacccaggattattcctctccagtctgtgagtctcagttttcccagg

SEQ ID NO: 31042 - DNA, 120 bp, synthetic construct; identical to SEQ ID NO: 8727
  source 1..120: mol_type = other DNA

SEQ ID NO: 31043 - DNA, 120 bp, synthetic construct
  source 1..120: mol_type = other DNA
ttcaccttactaaacgctggccatgcattatgaccgtaatactcagcattgttctaaatgtcttgtatatattagctatttttctctcacacaactctatgaactacttattcattcagt

SEQ ID NO: 31044 - DNA, 120 bp, synthetic construct
  source 1..120: mol_type = other DNA
tacgcctcctgggttcaagtgattctcctgcctcagcctcctgagtagctgggactacaggtgtgcacccccacgcccggctaacttttgtattttttttagtagggacagggtttcacc

SEQ ID NO: 31045 - DNA, 120 bp, synthetic construct
  source 1..120: mol_type = other DNA
cctttgtaccaagcactgtgctacatgctgggaataaggcagtggaaaaagccttggatctctggtaacttacattgaattgaagatgacagacgataaaaaaatcaataaaatttaata

SEQ ID NO: 31046 - DNA, 120 bp, synthetic construct
  source 1..120: mol_type = other DNA
tgaagatgacagacgataaaaaaatcaataaaatttaatacaatgtcaggcactaacaagtgctatgaacaccatgaagcagggtgaggggtaagggaatgggatagaaagtgctcccag

SEQ ID NO: 31047 - DNA, 120 bp, synthetic construct; identical to SEQ ID NO: 8728
  source 1..120: mol_type = other DNA

SEQ ID NO: 31048 - DNA, 120 bp, synthetic construct
  source 1..120: mol_type = other DNA
cctccttgtggaggtgatgtttgtgcagatataaatgacataaaggagcagtcatgcaagtatctggagggagagtgtccaggaaaagaaaaagagagtgcaaaggccctgaggtagaaa

SEQ ID NO: 31049 - DNA, 120 bp, synthetic construct
  source 1..120: mol_type = other DNA
ttcataggccatgggaaggactttttattttgtcccacatgtgatcaggaggcatcagagggttttgagcaggtaaatgatatcatctggtaattttaaagatcactctggtttcttcat

SEQ ID NO: 31050 - DNA, 120 bp, synthetic construct
  source 1..120: mol_type = other DNA
gcttggattagggtagaggagagggccaagaatagagtccagaggctctctaatatttaaaggtctggaaaaggaataggagctgtcagtgaagactgagaaggagcagtaaataaggaa

SEQ ID NO: 31051 - DNA, 120 bp, synthetic construct; identical to SEQ ID NO: 8729
  source 1..120: mol_type = other DNA

SEQ ID NO: 31052 - DNA, 120 bp, synthetic construct
  source 1..120: mol_type = other DNA
gcagtacacctggttggttgttacatgattacattgcatcctggtggggattgggcttctagtggtgtacctgttacccaaatagtgaacattgtacccaataggtaaattttttttttt

SEQ ID NO: 31053 - DNA, 120 bp, synthetic construct
  source 1..120: mol_type = other DNA
ctgcaattacaggctcacgccaccatgtcaggctaattttcatgtttttagtagagacggggttttgccgtgttggccaggctggtctcgaactcctgacctcaggtgatctgcccgcct

SEQ ID NO: 31054 - DNA, 120 bp, synthetic construct
  source 1..120: mol_type = other DNA
tccagctcactgcaacctctgcctccctggttcaagtgatcctcccacttcagattcccaagtagctgggaccacaggcacataccactatgcccagctaattttttgtgtttttggtag

SEQ ID NO: 31055 - DNA, 120 bp, synthetic construct; identical to SEQ ID NO: 8730
  source 1..120: mol_type = other DNA

SEQ ID NO: 31056 - DNA, 120 bp, synthetic construct
  source 1..120: mol_type = other DNA
caggttcaagtgattctcctgcctcagcctcctgagtagctgggattacaggcacgtgctaccatgcctggctaattttgatatttttagtagagacggggtttcaccacattggccagg

SEQ ID NO: 31057 - DNA, 120 bp, synthetic construct
  source 1..120: mol_type = other DNA
tatttattgtgtcctccagttgcaaggagtttaacagcatgcctggccgctgctcactagacgctaggagcacctcctcagttgtgataactgaaacaactctagacattgccaaatgtt

SEQ ID NO: 31058 - DNA, 120 bp, synthetic construct
  source 1..120: mol_type = other DNA
aaaatgtcaataatccctgaaactgagaaaccctagtttagactctagttgagaacttattcctggaactaagccaggtttggctgtgttttctcgtggcccaataacgagaagcagaca

SEQ ID NO: 31059 - DNA, 120 bp, synthetic construct; identical to SEQ ID NO: 8731
  source 1..120: mol_type = other DNA

SEQ ID NO: 31060 - DNA, 120 bp, synthetic construct
  source 1..120: mol_type = other DNA
ttacaggtgtgagccaccacacccggccagtgttactattttcttagtgtttatacaggtttaggttatatgcctacatgcagtatggcattcaccaaagtctatcagtaactaattttg

SEQ ID NO: 31061 - DNA, 120 bp, synthetic construct
  source 1..120: mol_type = other DNA
tttacagcttggtgcggagagctgccttagattctccaatgaatctattcaaacagctgcctctgttaccttgacttgtctcagatatcgtcgacccgagacgagtcctggcactaggaa

SEQ ID NO: 31062 - DNA, 120 bp, synthetic construct
  source 1..120: mol_type = other DNA
actatttgctcaatgttaaggcaatgctgtggaaatctgtctgtgtaactggggtgctatgcaggcctgtctgtgtgactgtcagggagaattggcctgccacaaactgacccttgacca

SEQ ID NO: 31063 - DNA, 120 bp, synthetic construct; identical to SEQ ID NO: 8732
  source 1..120: mol_type = other DNA

SEQ ID NO: 31064 - DNA, 120 bp, synthetic construct
  source 1..120: mol_type = other DNA
gaggtgggcggatcacctgaggtcaggagttggagaccagcctggctaacatggtgaaatcctgtctctactaaaacattagccaggtgtggtggtgcgtgcctataatcccagctgctt

SEQ ID NO: 31065 - DNA, 120 bp, synthetic construct
  source 1..120: mol_type = other DNA
aaaaaaaaagaaagcaaaaacaagaggtaaaatcttccccagtatagttaaggctccctgaatttccctttccagattgcttttctgccaaagggtaagcaccattctctgaatgttgtg

SEQ ID NO: 31066 - DNA, 120 bp, synthetic construct
  source 1..120: mol_type = other DNA
taatgatgggagtgttgcagtacagaggggtaaactgattaagtgagagagagagagataggggataatttcaggaataacatctctgagcaggtgagagggaacaggatcccggggtac

SEQ ID NO: 31067 - DNA, 120 bp, synthetic construct; identical to SEQ ID NO: 8733
  source 1..120: mol_type = other DNA

SEQ ID NO: 31068 - DNA, 120 bp, synthetic construct
  source 1..120: mol_type = other DNA
cagaggaaggggggccaggagtacagggtgagggctgagaggcgattaccatgttgaaccttggaatctaaactgggtaatgaggaaagtgaagaattgagatcaaacaatgaaaagtaa

SEQ ID NO: 31069 - DNA, 120 bp, synthetic construct
  source 1..120: mol_type = other DNA
ttgaaggtatgacatagggcgagagggaagcagggagaaataaatcactgcaagagaagggcagggtgctagagaatctgcatgaacattgaaaacaaaaataataaaacggggccaggc

SEQ ID NO: 31070 - DNA, 120 bp, synthetic construct
  source 1..120: mol_type = other DNA
aaggccagaggccaggcgcagtggtttatgcctgtaatcccagcactttggaaggccgaggcgggtggatcacgaggtcaagagtttgagaccagcctgaccaatatggtgaaaccccat

SEQ ID NO: 31071 - DNA, 120 bp, synthetic construct; identical to SEQ ID NO: 8734
  source 1..120: mol_type = other DNA

SEQ ID NO: 31072 - DNA, 120 bp, synthetic construct
  source 1..120: mol_type = other DNA
tgcctgtagtcccagctacttgggaggctgaggtgggaggcgggagaatggcatgaacccgggaggcagagcttgcagtgagccgagatcgcaccactgcactccaggctaggcgacagg

SEQ ID NO: 31073 - DNA, 120 bp, synthetic construct
  source 1..120: mol_type = other DNA
caaggttgcagtgagctgagattgtgccactgcactccagtctgggcgacagagccagactccatctcaaaaaaaaaaaataaaataaaaataaaaaaaattagctgggaggatcacttg

SEQ ID NO: 31074 - DNA, 120 bp, synthetic construct
  source 1..120: mol_type = other DNA
tcacgtgtgtaatcccagcactttgggaggccgaggtaggcagataacctaagatcaggagttcaagaccagcctggccaacatggtgaaaccctgtctctagtaaaaatacaaaaatta

SEQ ID NO: 31075 - DNA, 120 bp, synthetic construct; identical to SEQ ID NO: 8735
  source 1..120: mol_type = other DNA

SEQ ID NO: 31076 - DNA, 120 bp, synthetic construct
  source 1..120: mol_type = other DNA
gggtatcacctgcagagggaggtgagtcagataggaagaggatcacattgtaacttttttttttttttgagacggagtctcgccctgttgcccaggctggagtgcagtggcacaatctcg

SEQ ID NO: 31077 - DNA, 120 bp, synthetic construct
  source 1..120: mol_type = other DNA
ggggtttcaccgtgttagccaggatggtcctgatctcctgacctcgtgatccgcccatctcggcctcccaaagtgctaggattacaggagtgagccaccgcgcccggccacacattgtaa

SEQ ID NO: 31078 - DNA, 120 bp, synthetic construct
  source 1..120: mol_type = other DNA
gcctgattcctttcaattcaattgagttcaaagattggtagaggaggttttatctgatgaggatctgaaaaacagagataagccagatttgactcttgccttcaagtagctcacaaggta

SEQ ID NO: 31079 - DNA, 120 bp, synthetic construct; identical to SEQ ID NO: 8736
  source 1..120: mol_type = other DNA

SEQ ID NO: 31080 - DNA, 120 bp, synthetic construct
  source 1..120: mol_type = other DNA
agtagctaagactacaggtgagccatggggctcggctaaatttttttttctttttctttttgagactgagtgcctctctgccacccaggctggagtgcagtggtgcaatctgggctcact

SEQ ID NO: 31081 - DNA, 120 bp, synthetic construct
  source 1..120: mol_type = other DNA
accacgttggccaggctggtcttgaacgcctgacctcaggtgatccacccacctcggcctcccaaagtgctgagattatatgtgtgagccaccgcgctcggcctaggctaattttttttt

SEQ ID NO: 31082 - DNA, 120 bp, synthetic construct
  source 1..120: mol_type = other DNA
agtagctgggactacaggcacctgccaccacacccagctaatttttttgtatttttagtagagacgcggtttcaccatgttagccaggatggtctcgatctggcctaggctagtttttaa

SEQ ID NO: 31083 - DNA, 120 bp, synthetic construct; identical to SEQ ID NO: 8737
  source 1..120: mol_type = other DNA

SEQ ID NO: 31084 - DNA, 120 bp, synthetic construct
  source 1..120: mol_type = other DNA
gaccaagtagagaggcagatgtcaagagggggagaacatcatgagcaagagcctagatgtggtctaaagcctctgaaatttgtgacaagctgcaaacaatttggtttataataggcagag

SEQ ID NO: 31085 - DNA, 120 bp, synthetic construct
  source 1..120: mol_type = other DNA
tggaaggtgttaaaggccagattaaaattttgtaaataattgagtaggcaatagggaaccttgaagggcttttgagcagtggagttatgaaagtgtgtttagggaggctgatctgacaat

SEQ ID NO: 31086 - DNA, 120 bp, synthetic construct
  source 1..120: mol_type = other DNA
caaaagacattgtggtggcagaactgactaggcttgagagcacaccaaaaataaggcaggagggagagggaggaggcggcaaatttctagataaggaagagtgattgggaaaatggtcta

SEQ ID NO: 31087 - DNA, 120 bp, synthetic construct; identical to SEQ ID NO: 8738
  source 1..120: mol_type = other DNA

SEQ ID NO: 31088 - DNA, 120 bp, synthetic construct
  source 1..120: mol_type = other DNA
caaacatgggagggcttagagaggcagaatactgtgaaaatgccattgatttgggatctgggtaattggttgccatttgagagggaggtttcaggagaatagggtgtggatgcatattcc

SEQ ID NO: 31089 - DNA, 120 bp, synthetic construct
  source 1..120: mol_type = other DNA
ctggagtgcaatgacttgatcttggctcactgcaacctccgcctcccaagttcaagcgattctcctgcctcagccttccaagtagctgggactgcaggtgcccgtcaccatgcccggcta

SEQ ID NO: 31090 - DNA, 120 bp, synthetic construct
  source 1..120: mol_type = other DNA
accgtgcccagccgtgaattctgtttttcaagaagtttggtaaggtaggcacattaaatgcgaaacatccaagggcgaacccatgatattcacacctcaccccaccctcctcccacatct

SEQ ID NO: 31091 - DNA, 120 bp, synthetic construct; identical to SEQ ID NO: 8739
  source 1..120: mol_type = other DNA

SEQ ID NO: 31092 - DNA, 120 bp, synthetic construct
  source 1..120: mol_type = other DNA
tctgctctctttgcctttcctataccccctacagtccagcatgtggggctctaatccaagttatctgccaccctccagcccacagtcaggaacagctatgggcagctggcatctcttctt

SEQ ID NO: 31093 - DNA, 120 bp, synthetic construct
  source 1..120: mol_type = other DNA
ctcactaagaaaataaagcctcactgagaatggaccccaaggtcttccttggtggattcccagggagctcccctccgtcccccatattcacgtgtctctctggcgatctgggaatctgtg

SEQ ID NO: 31094 - DNA, 120 bp, synthetic construct
  source 1..120: mol_type = other DNA
cgggcgataaatcaactaagtctctttaatattgtctttcagaagttcacacacactcacacacagatcagaacaaggcggggccgccgaggggagcggggagcggggacttgggaggtc

SEQ ID NO: 31095 - DNA, 120 bp, synthetic construct; identical to SEQ ID NO: 8740
  source 1..120: mol_type = other DNA

SEQ ID NO: 31096 - DNA, 120 bp, synthetic construct
  source 1..120: mol_type = other DNA
gcggagcctgccgacctggaggcggggttttgtcagagctggggcggtgcttatagaggaggcggggttttagggaccaaaccgaggttgctcggttgggggcgctacactttgagggtg

SEQ ID NO: 31097 - DNA, 120 bp, synthetic construct
  source 1..120: mol_type = other DNA
gagacgttccgtggaggcggagtttacgatgtatccaagtctgacggccccagaaacgggtgtgcagggcgcccattgggtccgcggtatgactgcagaaagagcctgggagatcgaggg

SEQ ID NO: 31098 - DNA, 120 bp, synthetic construct
  source 1..120: mol_type = other DNA
ggccagggagatgaaggagaagttccgggcctcgcgtgaagcgatctcggccgacaccatgtctccgcgggccaaggccgtgcgcacctacggaggaggggtgggggaaggaggtcaaag

SEQ ID NO: 31099 - DNA, 120 bp, synthetic construct; identical to SEQ ID NO: 8741
  source 1..120: mol_type = other DNA

SEQ ID NO: 31100 - DNA, 120 bp, synthetic construct
  source 1..120: mol_type = other DNA
tggcagagtggctttaaaagcacaatttttacctatggcttctcaaaataaagcacccattacccttccaggacacccataaattccacctaagcccctctcctcccttccttgcttcat

SEQ ID NO: 31101 - DNA, 120 bp, synthetic construct
  source 1..120: mol_type = other DNA
cccccttagtcccaggcttctcccacatccctcttggttcccagcttccattccccccgtcccccgccaggcggtttcctactttcagacctcctctgaacctctaggctccgatccccc

SEQ ID NO: 31102 - DNA, 120 bp, synthetic construct
  source 1..120: mol_type = other DNA
ttgttcctctatcctaccagcccccagcgtatccccaatttcaagtcctgtatcgcgtccccctctttcccatgtccctgtctgcccggcactcaccgtgcccaccgggtagaccggcac

SEQ ID NO: 31103 - DNA, 120 bp, synthetic construct; identical to SEQ ID NO: 8742
  source 1..120: mol_type = other DNA

SEQ ID NO: 31104 - DNA, 120 bp, synthetic construct
  source 1..120: mol_type = other DNA
gcgcgggagggtggcggtgccagactgatggtagtggtggtggtggtgatggtgtgaggaaggggctgcctgtggcggtggggctgggggttcggctggaggctgaggggcattgtaggg

SEQ ID NO: 31105 - DNA, 120 bp, synthetic construct
  source 1..120: mol_type = other DNA
cagggatggagaaagataatgggagagacacatagagagagacgggtgagaaaccatctctaatttgaggggcaagagaggggctgtatctaggccatctgcccccctccttcttccttc

SEQ ID NO: 31106 - DNA, 120 bp, synthetic construct
  source 1..120: mol_type = other DNA
gcctatccgagctagtcctgtgtgtgcgtatgcgtagacatgcaaccctgtgttaatatgtgctcaattcaacagttgtataaacacatgtgggatgacatgtgttccactctgctgttc

SEQ ID NO: 31107 - DNA, 120 bp, synthetic construct; identical to SEQ ID NO: 8743
  source 1..120: mol_type = other DNA

SEQ ID NO: 31108 - DNA, 120 bp, synthetic construct
  source 1..120: mol_type = other DNA
ggggagtgttgagagctggagagaaggggaatgaaatagaaccacagctgaggaggggtaagggagggggttggggcaagggggacggagagtctggagacagtggagggggtgggaggt

SEQ ID NO: 31109 - DNA, 120 bp, synthetic construct
  source 1..120: mol_type = other DNA
gccggcagcagcgcagagatggagagatgaaggcagcggcggggggggggggcggggggggcgggcggagggagagcggggagggggggagcttaaagggaccgaggcgagggaggggga

SEQ ID NO: 31110 - DNA, 120 bp, synthetic construct
  source 1..120: mol_type = other DNA
ctagaccaggcgaggcgggtgggactaaggaaaggaaggaaggagaactctctggagtctcccccaccaagactcagtgattgtattgtgggaggaagtgaacaggttctcagtggagtt

SEQ ID NO: 31111 - DNA, 120 bp, synthetic construct; identical to SEQ ID NO: 8744
  source 1..120: mol_type = other DNA

SEQ ID NO: 31112 - DNA, 120 bp, synthetic construct
  source 1..120: mol_type = other DNA
tgcatacataccttcttcgtccaggactaaggagctgaagctcttttggagggggtagggggtatgacttaactgctcatttctggcagctctgttggtaatgtgtgcttgttcccccac

SEQ ID NO: 31113 - DNA, 120 bp, synthetic construct
  source 1..120: mol_type = other DNA
cgacctgcagtacagcgttattagtctttttatttgcttattgcatcttgggagcgcgtgggtgggtgaagggagcgaggataggaagtctatggagatttacaccagtttttttttttt

SEQ ID NO: 31114 - DNA, 120 bp, synthetic construct
  source 1..120: mol_type = other DNA
gctgcgtcccttttcgtccatgtcctagcagagactacagagcagtacagaggctctcgctgaaaccagtcccaggctccacagagtcagatcacggcttcacaccagtcgttctggtca

SEQ ID NO: 31115 - DNA, 120 bp, synthetic construct; identical to SEQ ID NO: 8745
  source 1..120: mol_type = other DNA

SEQ ID NO: 31116 - DNA, 120 bp, synthetic construct
  source 1..120: mol_type = other DNA
cgcatccctacgcgccctccgccccttgagggtgggtcgcttatagggaggggagtagagtagggcaggagaaactgggccaggctgcacttagctcaaggggcctcgaggactctctgc

SEQ ID NO: 31117 - DNA, 120 bp, synthetic construct
  source 1..120: mol_type = other DNA
ccctccaggccaccctgccactcacccagcacacggcaaaatgcagaggactacctttccctggtccgccccctggccgccccttggggaatgcaaacttcgtgttctgctgcggagcca

SEQ ID NO: 31118 - DNA, 120 bp, synthetic construct
  source 1..120: mol_type = other DNA
ctctccccactggcctaaatggatcgctccgcctgtttcctccccagcacctagggcgcaatggaatattccattgcccctcctgtcctgggtctgtgttgcggggaacgctcgcgcggt

SEQ ID NO: 31119 - DNA, 120 bp, synthetic construct; identical to SEQ ID NO: 8746
  source 1..120: mol_type = other DNA

SEQ ID NO: 31120 - DNA, 120 bp, synthetic construct
  source 1..120: mol_type = other DNA
ttgtagggagagggctggagtaagttaaaagtaggctattttgtgacacggacctggtgtgggagcgagaggaggtggcttgattgccgggcgtctgttccgagggaggagggtgttgcc

SEQ ID NO: 31121 - DNA, 120 bp, synthetic construct
  source 1..120: mol_type = other DNA
tgcagcccccgcgccccaccgcgcgtcctacaagccggtcatcgtggtgcatgggctcttcgacagctcgtacagcttccgccacctgctggaatacatcaatgaggtctggcaggggac

SEQ ID NO: 31122 - DNA, 120 bp, synthetic construct
  source 1..120: mol_type = other DNA
tgggggacgggatccctggttctagcagggtacaatagacctgtggacgcgggccagggggtggcgtgtgggagcttcttagcctatccccggtggctgcattgcccccttcccacagac

SEQ ID NO: 31123 - DNA, 120 bp, synthetic construct; identical to SEQ ID NO: 8747
  source 1..120: mol_type = other DNA

SEQ ID NO: 31124 - DNA, 120 bp, synthetic construct
  source 1..120: mol_type = other DNA
ttcctgttacccatggttcttggacataagggctaatggggcaggtaaaaacatcctagaactagaggcaggaggcccagcatctaattcgggctcagtcacttatatgatgtgtgacct

SEQ ID NO: 31125 - DNA, 120 bp, synthetic construct
  source 1..120: mol_type = other DNA
gtgctgctggctttgctgtccttaagtgcctgcccaatgtggtgttctgcttacagggggccttgtgtgccgggctctgctttctgtcatggatgatcacaacgtggattctttcatctc

SEQ ID NO: 31126 - DNA, 120 bp, synthetic construct
  source 1..120: mol_type = other DNA
gaggtttatggtcacttagcattgccattcgcttgccagacacggactacttgaagtggctgttccccacctccatgcggtctaacctctatcggatctgctatagcccctggggccagg

SEQ ID NO: 31127 - DNA, 120 bp, synthetic construct; identical to SEQ ID NO: 8748
  source 1..120: mol_type = other DNA

SEQ ID NO: 31128 - DNA, 120 bp, synthetic construct
  source 1..120: mol_type = other DNA
gccaggctggtctcgaactcctgacctcaggtgatccactcgcctcggcctcccaaagtgctgggattacaggtgtgaaccattgcacctggcccagaatgttttaagtgtgtcacctta

SEQ ID NO: 31129 - DNA, 120 bp, synthetic construct
  source 1..120: mol_type = other DNA
gttgtagtgtgaaagcagccatgtaccatatgtgaatgaatgtgcctgtgttccagtaaaacttcatttacaaaaacaagtagcaggctggatttggtcctttggtcacagtttgccaac

SEQ ID NO: 31130 - DNA, 120 bp, synthetic construct
  source 1..120: mol_type = other DNA
catgtacttcaccaggtggttgtaaggattaaataaataaatgaatgcaatgtactttgaatagtacctggctcatatagtagatactagatagaagtacttgctattgccaggtgtggt

SEQ ID NO: 31131 - DNA, 120 bp, synthetic construct; identical to SEQ ID NO: 8749
  source 1..120: mol_type = other DNA

SEQ ID NO: 31132 - DNA, 120 bp, synthetic construct
  source 1..120: mol_type = other DNA
gtgcagtggtgcagtctcggctcactgtaacctccacctcctgggttcaagtgattccagcgccccgagtaactgggattacaggcatgcaccaccacgcctggctaacttttgtatttt

SEQ ID NO: 31133 - DNA, 120 bp, synthetic construct
  source 1..120: mol_type = other DNA
ctacattatcactactattttattactatccaccttgactattgctgcagcttccttattgggcttttcaccaccagtcttgcctcccttttctgcttctttttctaactgctgtttgta

SEQ ID NO: 31134 - DNA, 120 bp, synthetic construct
  source 1..120: mol_type = other DNA
agcttcctggccctgatcaatggggaaagagaccatcccaatgccacaggtgagaattcaggctcctacctgtgttgctttttctgcttctttgactccctatgtctccctctccaacct

SEQ ID NO: 31135 - DNA, 120 bp, synthetic construct
  source 1..120: mol_type = other DNA
ctggtgctgattgggggccctgatgatggtgttattactccctggcagtccaggtaataagggattttgtggcctgaagattggctaaagacatcccccaaccccagttggtctttatct

SEQ ID NO: 31136 - DNA, 120 bp, synthetic construct; identical to SEQ ID NO: 8750
  source 1..120: mol_type = other DNA

SEQ ID NO: 31137 - DNA, 120 bp, synthetic construct
  source 1..120: mol_type = other DNA
gtgtgtgtgtagttttataccattttatcacatttcctaccacctctttacttacctggactattataacagcctccagctttgtcccctccatcctattccttagaaaaaaatccatgg

SEQ ID NO: 31138 - DNA, 120 bp, synthetic construct
  source 1..120: mol_type = other DNA
ctccatggtactatgtgcttgcctgtgttataggtcaccatgtgtgatctgtaatgtcacctgagctacttgaattgctcaacaaatatttattcaacattatgggcgcaggcttgttct

SEQ ID NO: 31139 - DNA, 120 bp, synthetic construct
  source 1..120: mol_type = other DNA
tacatacatacaaatatatatgtcaggtaataaggcaggggaaaggattagaggatgtccggggcctagtttcaatagtggccgaagaagtcctcctggaaaagtcaccattcaattaga

SEQ ID NO: 31140 - DNA, 120 bp, synthetic construct
  source 1..120: mol_type = other DNA
gcacaaggagctggggagaggacaggagaggagctaaaagtggtagcaggggaccaggcatgtcaaaccttagcaggtcaaggtaaggcccttgatatttttttttcttttttttgtgat

SEQ ID NO: 31141 - DNA, 120 bp, synthetic construct; identical to SEQ ID NO: 8751
  source 1..120: mol_type = other DNA

SEQ ID NO: 31142 - DNA, 120 bp, synthetic construct
  source 1..120: mol_type = other DNA
aaaaatacaaaactagctgggtgtggtgatgcatgcatgtaatcccagctacttgggaggctgaggcaggagaatcgcttgaacctgggaggcagaggttgcagtgagctgagattgcgc

SEQ ID NO: 31143 - DNA, 120 bp, synthetic construct
  source 1..120: mol_type = other DNA
atcctcatccctatttcccgacagtcccggtaaccaggcttttgatttttttttttaaattctgagtgagatgggaaggcactggacagttttcagtgaaggcaggacatctcttaaaat

SEQ ID NO: 31144 - DNA, 120 bp, synthetic construct
  source 1..120: mol_type = other DNA
cactgtttcttccttttttttttttttgagacagagttttgttcttgtcgcccaggctagagtgtaatagcacaatctcggctcactgcaacctccgcctcctgggttcaagccattctc

SEQ ID NO: 31145 - DNA, 120 bp, synthetic construct; identical to SEQ ID NO: 8752
  source 1..120: mol_type = other DNA

SEQ ID NO: 31146 - DNA, 120 bp, synthetic construct
  source 1..120: mol_type = other DNA
ccgccaccacgcccggctaatttttttgtatttttagtagagacggggtttcactgtgttagccaggatggtttcgatctcctgacctcgtgatccacccgcctcggcctcccaaagtgc

SEQ ID NO: 31147 - DNA, 120 bp, synthetic construct
  source 1..120: mol_type = other DNA
aagccgaggcgggtggatcacctgaggtcaggagttcgagaacagctggctaacattgagaaaccccatctctactaaaaatacaaaaattagtgggcctggtggcgcacgcctgtagtt

SEQ ID NO: 31148 - DNA, 120 bp, synthetic construct
  source 1..120: mol_type = other DNA
aaaagaaaaaaaggattttaagacctttctattttgaaataatttcatacttaagaaaagtttgcgcctgtaatcctagcactttgggaggccgaggcatgagcccaggggtttgagacc

SEQ ID NO: 31149 - DNA, 120 bp, synthetic construct; identical to SEQ ID NO: 8753
  source 1..120: mol_type = other DNA

SEQ ID NO: 31150 - DNA, 120 bp, synthetic construct
  source 1..120: mol_type = other DNA
tagattcaaattttcctgaatatgcgctcacagattattcaaatttttccaactgtccttacagaaaaaaatatacagtggaagatccaaatcaggatcttgagttgcatgatcttgtta

SEQ ID NO: 31151 - DNA, 120 bp, synthetic construct
  source 1..120: mol_type = other DNA
tgattctcctgtcttagcctcctgagtagctgggattataggcgcccaccaccatgcccaactaattttgtatttttagtagagacggggtttctccatgttggccaggctggtcttgaa

SEQ ID NO: 31152 - DNA, 120 bp, synthetic construct
  source 1..120: mol_type = other DNA
tttttttttttttttgagacaaagtctcactctgtcgccaggctggagtgcagtggcgccatcccggctcactgcaacctttgcgtcccagaatcaagcaattctcctgcctctgcctcc

SEQ ID NO: 31153 - DNA, 120 bp, synthetic construct
  source 1..120: mol_type = other DNA
cctcggcctcccaaagtgctgggattacaggcttgagccaccacgcccagctaattttgtatttttagtagagatggggtttcaccacgttggccaggctggtcttgaactcccgacctc

SEQ ID NO: 31154 - DNA, 120 bp, synthetic construct; identical to SEQ ID NO: 8754
  source 1..120: mol_type = other DNA

SEQ ID NO: 31155 - DNA, 120 bp, synthetic construct
  source 1..120: mol_type = other DNA
cgggttcaagtaattatcctgcctcagcctcttgggtagctgggcttgcaggcatctgccaccatgcccagctaatttttgtatttttagtagagatggggtttcaccattttggtcagg

SEQ ID NO: 31156 - DNA, 120 bp, synthetic construct
  source 1..120: mol_type = other DNA
ccaaatctctttgtagcttctttggtttctatgatgcaaatgagaccgtcctggagatggaggagcaactggtgagccccctgggattacttccccttctagccgctgtcccaccttatt

SEQ ID NO: 31157 - DNA, 120 bp, synthetic construct
  source 1..120: mol_type = other DNA
tgtctctccttgtgtctctcttccatgcttccacgccccttcgaccaccttgaaggtttatctgcgggattcttttgggttgaagactctattggcccggggggccatagtgaggtgtcc

SEQ ID NO: 31158 - DNA, 120 bp, synthetic construct
  source 1..120: mol_type = other DNA
gatatattcaggggtccccaggaactcctcggtccagagaccaagtggtggccttggaaagcagatgtcaggctttggtgtgcctgtgaccacctcattgctcccatattatcccccatt

SEQ ID NO: 31159 - DNA, 120 bp, synthetic construct; identical to SEQ ID NO: 8755
  source 1..120: mol_type = other DNA

SEQ ID NO: 31160 - DNA, 120 bp, synthetic construct
  source 1..120: mol_type = other DNA
tttttagcttctctcctccccatgttcccttttttctctaaagtcccctgacatcagccctcccaactcctaagagggactacccatgagagtggggttctgaggctcccctatggggac

SEQ ID NO: 31161 - DNA, 120 bp, synthetic construct
  source 1..120: mol_type = other DNA
ttctttgaggccccaggccctcttttaactacctttgaataggtgttatccctgtatttatggaaataaagttccatttcctcagtgtgacttggctcatttccaggtggaggggacctg

SEQ ID NO: 31162 - DNA, 120 bp, synthetic construct
  source 1..120: mol_type = other DNA
tctctgcgggttctttcctgctgaagacaattctcttcctctcccagtccccaagactggggggttaagctcagggctccagtggtttgggcctcagcctcatgggtggaatgcgcctgc

SEQ ID NO: 31163 - DNA, 120 bp, synthetic construct; identical to SEQ ID NO: 8756
  source 1..120: mol_type = other DNA

SEQ ID NO: 31164 - DNA, 120 bp, synthetic construct
  source 1..120: mol_type = other DNA
cctgccccctaactctcccctagtctgttttgggttcaagggggtactggtggtgttacagagctcatagcttctgatctggggagtccagaaataggggcctcagagggttggaaagat

SEQ ID NO: 31165 - DNA, 120 bp, synthetic construct
  source 1..120: mol_type = other DNA
tggcccagcccctcctctccttcttagcctgccaggcccacccaccagtctgagctgcttctgctgaggctggtctgcttgaagcctcccaggagaaagaagccaggtgggaatggagag

SEQ ID NO: 31166 - DNA, 120 bp, synthetic construct; identical to SEQ ID NO: 8757
  source 1..120: mol_type = other DNA

SEQ ID NO: 31167 - DNA, 120 bp, synthetic construct
  source 1..120: mol_type = other DNA
ttcccgagtagctgggattacaggcgtccaccactgcgcctggctaattttttgtattttttagtagagatggggtttcaccatcttggccaggctggtctcgaactcctgacctcatga

SEQ ID NO: 31168 - DNA, 120 bp, synthetic construct
  source 1..120: mol_type = other DNA
aggcatggtggctcacacctgtaatcccagcactttgggaggccaaggcaggcggatcacctgaagtcgggagttcgagaccagcctgaccaacatggagaaaccccgtctctactaaaa

SEQ ID NO: 31169 - DNA, 120 bp, synthetic construct
  source 1..120: mol_type = other DNA
ccactgcactccagccagggtgacagcgagactccgtctcaaaaaacaacaacaaaaaaaaaaccaaaaaaaaaaaaccctagctatataccctcacaccctacaaaacaaaacaaaaca

SEQ ID NO: 31170 - DNA, 120 bp, synthetic construct; identical to SEQ ID NO: 8758
  source 1..120: mol_type = other DNA

SEQ ID NO: 31171 - DNA, 120 bp, synthetic construct
  source 1..120: mol_type = other DNA
gtgtgctggggtgtgagcttttatgatgctgaaaggatcatgatatgctaaggacaggatagtgttgggttgtacacacaggtgtaggcaatcctggtggctagtatgtaaaagtgaatg

SEQ ID NO: 31172 - DNA, 120 bp, synthetic construct
  source 1..120: mol_type = other DNA
atccattaaccttttcttgcctgcagcctgtagggtccagcgtcaaagcgaatcatggggtccagggctgagctgtgcactctcttaggcggattctccttcctcctgctactgatacca

SEQ ID NO: 31173 - DNA, 120 bp, synthetic construct
  source 1..120: mol_type = other DNA
actgtaagtttagaatgggggtgagaggctgtcatctggagggagagcggggggcctcagtagcctcttgagggaagtgggactcctggctccccagggcctggcctactcaatctctcc

SEQ ID NO: 31174 - DNA, 120 bp, synthetic construct; identical to SEQ ID NO: 8759
  source 1..120: mol_type = other DNA

SEQ ID NO: 31175 - DNA, 120 bp, synthetic construct
  source 1..120: mol_type = other DNA
cttgcgggaggcgcgccccacggagctggggagctgggtcgtcggtttgagtctgaaccccacttcctctgtcctcagccatctgcgccaagccttgcctgaacggaggcgtctgcgtta

SEQ ID NO: 31176 - DNA, 120 bp, synthetic construct
  source 1..120: mol_type = other DNA
tttttcggtaactagacgtggatgaatgtaggaccagcatcaccctctgctcgcaccattgttttaatacggcaggcagcttcacctgcggctgcccccatgacctagtgctaggcgtgg

SEQ ID NO: 31177 - DNA, 120 bp, synthetic construct
  source 1..120: mol_type = other DNA
cgggtagtggtcacactcttggtctcctttgtccctagttcgggaggcggaaaaagatgagcgcgctctgaagcaggagattcacgagctgcgagggcgcctggagcggctggagcaggt

SEQ ID NO: 31178 - DNA, 120 bp, synthetic construct; identical to SEQ ID NO: 8760
  source 1..120: mol_type = other DNA

SEQ ID NO: 31179 - DNA, 120 bp, synthetic construct
  source 1..120: mol_type = other DNA
ctccaacattcactatcctcatgcctctccactttaccatcgttctcttctgaaatcctgtccccagcccaacagtttcacttattgtttggtgagagtggcagtgtagtccactccagg

SEQ ID NO: 31180 - DNA, 120 bp, synthetic construct
  source 1..120: mol_type = other DNA
gataagaagcctctacagcacccctgccccctaatttatacagaaaccggacccactaatcctctgggattggccgactgtgagctgcagataaggctatcagccaccaaagagcaatga

SEQ ID NO: 31181 - DNA, 120 bp, synthetic construct
  source 1..120: mol_type = other DNA
gttgcctgggcaagaactgcttcttcaattccttaacaaatgcaaccaccaacacccagatctctctctctctttattttcagtttttttgctgttatccagataattaataaaaaccaa

SEQ ID NO: 31182 - DNA, 120 bp, synthetic construct
  source 1..120: mol_type = other DNA
cagggagtggctaatgccaccaggaagaaatgaaaactggctcagagagggggaagcctcaacagaaaaagaaataaattaaaagccctcctatcccctccagccagggttcgttccttt

SEQ ID NO: 31183 - DNA, 120 bp, synthetic construct; identical to SEQ ID NO: 8761
  source 1..120: mol_type = other DNA

SEQ ID NO: 31184 - DNA, 120 bp, synthetic construct
  source 1..120: mol_type = other DNA
aaatggatgagtccattgaatccatggactttggagtgggggggatttgttccaaagaatggatgagtccactggccaatgtggggtagaggggtagagaagaccacataggaagagact

SEQ ID NO: 31185 - DNA, 120 bp, synthetic construct
  source 1..120: mol_type = other DNA
ggcaagagtccatggatggggccaagagggggcaggagtggcgctgtatccacattcacttcagaagttgaagattccaaagaggagaataagtggggagaggggagacaaggaagaggg

SEQ ID NO: 31186 - DNA, 120 bp, synthetic construct
  source 1..120: mol_type = other DNA
accaccccggccatcagtggagatttcccggaaaacagtgagcatggagtgccggactctgtcagccagagctgggacgtcatctggtgtcagcccttccgtgggcactgggggcagcac

SEQ ID NO: 31187 - DNA, 120 bp, synthetic construct; identical to SEQ ID NO: 8762
  source 1..120: mol_type = other DNA

SEQ ID NO: 31188 - DNA, 120 bp, synthetic construct
  source 1..120: mol_type = other DNA
atctggcagggtatggtgggtgcttagtaaagacttattggctgatgtggggttagactagatgactgtgtagacatctcatggctctgacactgaatgatccccctgcctcacagggat

SEQ ID NO: 31189 - DNA, 120 bp, synthetic construct
  source 1..120: mol_type = other DNA
tgggaacctggggaagggttaaagcaggtcagtccacagctctcttcagagactcctacaataagcccctgcccagagatgagggaatggtgggggttggcagctgagtagcagaacgaa

SEQ ID NO: 31190 - DNA, 120 bp, synthetic construct
  source 1..120: mol_type = other DNA
agagggtcaaagaagacaaatacatatggaggagtcagaataggtgtgatgttataatgggacctttgaggcccactggccctgcatatcagtttatttacaactgttctactctgtatc

SEQ ID NO: 31191 - DNA, 120 bp, synthetic construct; identical to SEQ ID NO: 8763
  source 1..120: mol_type = other DNA

SEQ ID NO: 31192 - DNA, 120 bp, synthetic construct
  source 1..120: mol_type = other DNA
accaaaagtatatgtaacctgcttatgagggcagttctacccagggaatgaaggcctgagtgggaggcaagggggcaatgtcccagaggaaggggaattgaggatctctaggagaagata

SEQ ID NO: 31193 - DNA, 120 bp, synthetic construct
  source 1..120: mol_type = other DNA
agggaagtggtgagcccctcgcacctccactcggatcccgtacaggtatttgatgtggagcagcattagacgcaagatcctgtggggtcatggcaaggggtcccagtgggatccattgat

SEQ ID NO: 31194 - DNA, 120 bp, synthetic construct
  source 1..120: mol_type = other DNA
ccccaatccactactcactttgtacccttaggttccctcattgcccaagaccccttgcccctcacttcatgttctcgacgttgcgtcctcgcacggcacacacagggatggcgagcacag

SEQ ID NO: 31195 - DNA, 120 bp, synthetic construct; identical to SEQ ID NO: 8764
  source 1..120: mol_type = other DNA

SEQ ID NO: 31196 - DNA, 120 bp, synthetic construct
  source 1..120: mol_type = other DNA
tcttcccaaaggctccggatatattcagacaagagacacaagacacagacatctacaattcacagatacctgataataaatgacaacaagaataatagctaacacttgtagctggtaagg

SEQ ID NO: 31197 - DNA, 120 bp, synthetic construct
  source 1..120: mol_type = other DNA
caaagactgaataaaaaacaaaatgtgagatatccattactaatcttttatgctgactacattttgaaattataatcttgggccgggcgcagtggctcacgcctgtaatcccagcacttt

SEQ ID NO: 31198 - DNA, 120 bp, synthetic construct
  source 1..120: mol_type = other DNA
aaatacaaaaattagccgggcctgttggcgcatgcctttaatcccagctactcgggaggctgaggcaggagaatcgcttgaatccgggaggcggaggttgcagtgagccaagatcacgcc

SEQ ID NO: 31199 - DNA, 120 bp, synthetic construct; identical to SEQ ID NO: 8765
  source 1..120: mol_type = other DNA

SEQ ID NO: 31200 - DNA, 120 bp, synthetic construct
  source 1..120: mol_type = other DNA
ctaaacagcagtttctaggttaaatctaagccgcctgtgttcctaaccactccattacgctgacactggtatgtattgcatatatatatacgaacacagcacacagcatatatggtgatt

SEQ ID NO: 31201 - DNA, 120 bp, synthetic construct
  source 1..120: mol_type = other DNA
tttataattacacccagtgacagataaaagaatgtaaatgcataactagaaaaatccctctccacccaggcagctcccctattcctaggtaaacttatggacatacctggaatagctaca

SEQ ID NO: 31202 - DNA, 120 bp, synthetic construct
  source 1..120: mol_type = other DNA
tacagtgtgtgaggcctcaccaagtgaaaaaaggagggaatggagtaaaggtgacctaacagcacttgccctgggagaggaaagggctcaagaggaagagaggcaggaacacagaacctg

SEQ ID NO: 31203 - DNA, 120 bp, synthetic construct; identical to SEQ ID NO: 8766
  source 1..120: mol_type = other DNA

SEQ ID NO: 31204 - DNA, 120 bp, synthetic construct
  source 1..120: mol_type = other DNA
agatttttctgaaacacagagcatttccctgtcttgcctaaaggctcttcttgataagttgacttctgcttacatcttcgaccacatcctcacaaaactctttgttccagtcaaactgat

SEQ ID NO: 31205 - DNA, 120 bp, synthetic construct
  source 1..120: mol_type = other DNA
gggctgcctgaacccctccaggcctgtgctttccttacacttttatcttgatcagcgggtctcgaagtatagaaatgcaaattattagacttcaccccagatctactgaatcagaaattc

SEQ ID NO: 31206 - DNA, 120 bp, synthetic construct
  source 1..120: mol_type = other DNA
gtgagccatcgtggctggctagcaatctgtatttcaacaagccctctggtgagtctgatgtgcgcctgaatttaagaaccactgatcttgacaacacactatgtgttgactggcgttttt

SEQ ID NO: 31207 - DNA, 120 bp, synthetic construct; identical to SEQ ID NO: 8767
  source 1..120: mol_type = other DNA

SEQ ID NO: 31208 - DNA, 120 bp, synthetic construct
  source 1..120: mol_type = other DNA
gatgccacagggaaagatgctgctctcatcaaatgtgtgccaacagtgcaaagaatggaggataatgtccataaataaataccaacaatggggttcacagcaggattgaccctgtgacat

SEQ ID NO: 31209 - DNA, 120 bp, synthetic construct
  source 1..120: mol_type = other DNA
gagacccagttaccttcttctcttaacacttgatattaagtgaccctctttggagaacaaaagtccaaggatttagaaatgcaatggagggccaaatttaatgagcatacggctcacaaa

SEQ ID NO: 31210 - DNA, 120 bp, synthetic construct
  source 1..120: mol_type = other DNA
attcagtcagacatcagagtgtggggtattcagccaagccatgggatcccacacatgaagactactgcaaatggtaggaccatggacatgtcagccaaagcaaaataaggtatataacct

SEQ ID NO: 31211 - DNA, 120 bp, synthetic construct; identical to SEQ ID NO: 8768
  source 1..120: mol_type = other DNA

SEQ ID NO: 31212 - DNA, 120 bp, synthetic construct
  source 1..120: mol_type = other DNA
ggcacctaagggtattcctaagaggcaaattctgctggccttctcccctcatgacccttcaagagtcatgtggggtcaaagggcaagaaaaggaattggggaaggtgtagggaattccct

SEQ ID NO: 31213 - DNA, 120 bp, synthetic construct
  source 1..120: mol_type = other DNA
ctcttcccagtcggcccctctcctttccccagcaaccctctcccccagtcggccctcccagacccaatctctccccttcccctcatcctagtcgctttcagcaccctcttccctcctcct

SEQ ID NO: 31214 - DNA, 120 bp, synthetic construct
  source 1..120: mol_type = other DNA
cggtgccaagggggcgacgggatttgggggtgtcctagccccggccgatggaggggaggtgggagtgggaggttgggcccatagcggtaggaatggtggggggctgtccccccagcaccc

SEQ ID NO: 31215 - DNA, 120 bp, synthetic construct; identical to SEQ ID NO: 8769
  source 1..120: mol_type = other DNA

SEQ ID NO: 31216 - DNA, 120 bp, synthetic construct
  source 1..120: mol_type = other DNA
tacttggtctctttttttctcaactccggttatctgctgcttattccccccaactattcttaaggaccccttttcccgtacccattcaattctaaacatttatcaagcatctacctacca

SEQ ID NO: 31217 - DNA, 120 bp, synthetic construct
  source 1..120: mol_type = other DNA
agtccagctcccccctccacctgccttctctggcctttaaagagaagagatctctttggccttatccctgaccctttccttttccatgctcttttacctctgtaccttttctttcctact

SEQ ID NO: 31218 - DNA, 120 bp, synthetic construct
  source 1..120: mol_type = other DNA
caatggaaatttggcttcaggggtgctttctagaaaaataaaaagtgaggaagaatgccgattcctctggaatgcgcgtgcctccttaatttggtagccatgtatctagttttccacccc

SEQ ID NO: 31219 - DNA, 120 bp, synthetic construct
  source 1..120: mol_type = other DNA
ctcaatatcttccttcctaaacctcaagcttcctgaatcctcatctgccccagtccttctttacgcaactgctaacttctcatctttccttactcttgagtcacatgggatcttttatca

SEQ ID NO: 31220 - DNA, 120 bp, synthetic construct; identical to SEQ ID NO: 8770
  source 1..120: mol_type = other DNA

SEQ ID NO: 31221 - DNA, 120 bp, synthetic construct
  source 1..120: mol_type = other DNA
gagctttcctgctctgaaggtttaaaacggagttgaagtcaatcctgttctactctgtgtacaacattaagaaaggggtgggcctttagttcagttttgctctgtaaatcacctaatatg

SEQ ID NO: 31222 - DNA, 120 bp, synthetic construct
  source 1..120: mol_type = other DNA
gctaatcccagttctgctcccttaactaaaagggaggggcagacccaagttctgctctctacgtcaccaaaggaggttggagccattttgaaccctgcgaccctagtgttttccctcttt

SEQ ID NO: 31223 - DNA, 120 bp, synthetic construct
  source 1..120: mol_type = other DNA
gaaggacccggatgaagcgagcctaggactttgaagtgcaagcctcgccaattgtagagcagtcaccatggcgacaagataggggtgaagaggtggaaaaagagaaggttaaaccctcac

SEQ ID NO: 31224 - DNA, 120 bp, synthetic construct
  source 1..120: mol_type = other DNA
aatccggacattctctaaaagaggaagcgaaggaaagaaaggggcttatagtgggcgaggtctataggtagtcccgagcaaattgcttatggctttggttatgactgacaactactcaga

SEQ ID NO: 31225 - DNA, 120 bp, synthetic construct; identical to SEQ ID NO: 8771
  source 1..120: mol_type = other DNA

SEQ ID NO: 31226 - DNA, 120 bp, synthetic construct
  source 1..120: mol_type = other DNA
caaatcgcgagcggggcggggcgggcgcgaccttcgaatgtaatatatgtttggagactgctcgggaagctgtggtcagtgtgtgtggccacctgtactggtgagaatcgaggagggggg

SEQ ID NO: 31227 - DNA, 120 bp, synthetic construct
  source 1..120: mol_type = other DNA
gctggtatgtgtgggtgggagtataacggtcgagatctgtggaaagaaaggtcttaggaaccaggagctgaggcacgtgatgtgctgagaagagaaggtggggcggggagtggcaggaca

SEQ ID NO: 31228 - DNA, 120 bp, synthetic construct
  source 1..120: mol_type = other DNA
atatggatcacattcagatgagatctgggagggggctggtataagggcactgtggagaggcagacttgaaaggttaaagggtcataaagatagggacattattgagcttgaaagtgagta

SEQ ID NO: 31229 - DNA, 120 bp, synthetic construct; identical to SEQ ID NO: 8772
  source 1..120: mol_type = other DNA

SEQ ID NO: 31230 - DNA, 120 bp, synthetic construct
  source 1..120: mol_type = other DNA
acctttttttttttttctcccccatccagttggccatgtcttcatcaggtgcgtactcaggagatgaagagggaaatggggaggtctgaggagctgtaagaccctcttgtatactggaaa

SEQ ID NO: 31231 - DNA, 120 bp, synthetic construct
  source 1..120: mol_type = other DNA
ccaggatcccaggtgagagactggaggtgttgcttagggaagattgaaggcttctgcccttggaaaacggtgtggaagatgggaggagaaaaatccctgttaactttctctctccacttc

SEQ ID NO: 31232 - DNA, 120 bp, synthetic construct
  source 1..120: mol_type = other DNA
tttttctgcctccctagggattccagccatttggtgataccgggggcttccacttctcatttggtgttggtgcttttccctttggctttttcaccaccgtcttcaatgcccatgagcctt

SEQ ID NO: 31233 - DNA, 120 bp, synthetic construct; identical to SEQ ID NO: 8773
  source 1..120: mol_type = other DNA

SEQ ID NO: 31234 - DNA, 120 bp, synthetic construct
  source 1..120: mol_type = other DNA
gaggaggagtgaagtctgtgcatagatgggagagccttctgctcagaggctcactcagtaacgttgtttaattctctgccctggggaaggaggatggattgagagaatgtctttctcctc

SEQ ID NO: 31235 - DNA, 120 bp, synthetic construct
  source 1..120: mol_type = other DNA
ctaatatggattctgactcttaagtgcttccgccccctcactacctcctttaatacaaattcaataaaaaaggtgaaatatattgatgggatctcttcccaagttcgcccccacccccga

SEQ ID NO: 31236 - DNA, 120 bp, synthetic construct
  source 1..120: mol_type = other DNA
acacagacacacaagagcaagatgtgtcaggtgtttaatcatcattgtggggggctctggttgtagaagaaagcttggcaaggtggggttatacaggagagagattatacaggagagagt

SEQ ID NO: 31237 - DNA, 120 bp, synthetic construct; identical to SEQ ID NO: 8774
  source 1..120: mol_type = other DNA

SEQ ID NO: 31238 - DNA, 120 bp, synthetic construct
  source 1..120: mol_type = other DNA
cccagggccagggctagagttcccagccctgatcctcccacagagcctgtacggagacagggaaaattgagagcacagccaccaccactcaccattcctttcttgttgaccatcccccca

SEQ ID NO: 31239 - DNA, 120 bp, synthetic construct
  source 1..120: mol_type = other DNA
cgggttgagagagggttatttagtgggagccccagtggagtctttccctttctttttttttttgagatggagtttcacttttgttgcccaggctggcatgcaatggtgcgatcttggctc

SEQ ID NO: 31240 - DNA, 120 bp, synthetic construct
  source 1..120: mol_type = other DNA
tagtagaaatggggtttctccatgttggtcaggctggtctcgaactccctacctcaggtgatctgcccgcctcagcctcccaaagtgttgggattacaggcgtgagccaccgcgcccagc

SEQ ID NO: 31241 - DNA, 120 bp, synthetic construct; identical to SEQ ID NO: 8775
  source 1..120: mol_type = other DNA

SEQ ID NO: 31242 - DNA, 120 bp, synthetic construct
  source 1..120: mol_type = other DNA
gtgggggaaggggagaggagactatttcaaaacccttgtctttttgtctccatatcttcagataccctctcttcctcctcagctcctagcctgcctttccctcgttagccctctgccctc

SEQ ID NO: 31243 - DNA, 120 bp, synthetic construct
  source 1..120: mol_type = other DNA
ccaccaggagctactgctccaccttctggctccaccaccaattggacctcctccagaggcacaggctctgggagttggaagggttttgaggtggagagttacacttgtgagtgatcccag

SEQ ID NO: 31244 - DNA, 120 bp, synthetic construct
  source 1..120: mol_type = other DNA
caaggcccggtgtcggggaaggcctgggctgaagctacaggagaaggtgggacggggatctcctccccgggctggggtcaccattagctccgactgcagtgtgaagagccctgtctcagg

SEQ ID NO: 31245 - DNA, 120 bp, synthetic construct; identical to SEQ ID NO: 8776
  source 1..120: mol_type = other DNA

SEQ ID NO: 31246 - DNA, 120 bp, synthetic construct
  source 1..120: mol_type = other DNA
gaggcagaatctacaatttctggcttcccaggaatctctgaaggaggaaaaatccagtcagaggctgtaattgtgaaggttctcaaactctgtgtgtggaaatgaggccagtggaagtca

SEQ ID NO: 31247 - DNA, 120 bp, synthetic construct
  source 1..120: mol_type = other DNA
tccattcctgttcattgcctggcaccggaaaatcccctcatcctggatcccgacagccggaaggaagagggagccgttgggaaggacacgagccacactgtcccaggggcctcctccctg

SEQ ID NO: 31248 - DNA, 120 bp, synthetic construct
  source 1..120: mol_type = other DNA
ttgctggtctccctggaagttgggaggctgcaacaggagccccgcttaccagtttccattccagccgctggggtggtttcttgggggcccccttacacttcagcaccagtggctcgccaa

SEQ ID NO: 31249 - DNA, 120 bp, synthetic construct; identical to SEQ ID NO: 8777
  source 1..120: mol_type = other DNA

SEQ ID NO: 31250 - DNA, 120 bp, synthetic construct
  source 1..120: mol_type = other DNA
ccatctttcagtcgtcttgtcacagggaatgctaggaattcatgcctttgggacaagagtccttcaggtactagagaaataattatcaccccacccctgggtactaccagcctctgggta

SEQ ID NO: 31251 - DNA, 120 bp, synthetic construct
  source 1..120: mol_type = other DNA
tgattgcgcaaagttgcatcaatagggttcaggccagactgttgtctgcaagggtgcaattgggcctgcatcatgaaggcaaggctggggaacaggagagaaacctgtttggaacttcgt

SEQ ID NO: 31252 - DNA, 120 bp, synthetic construct
  source 1..120: mol_type = other DNA
tctttatttaaaactgcattttgttttttttctgtgaaactacacaagtttacaagtgaggagagaactgcccccggcccatgcctcccacccccccacccatcacacttccaacctgtc

SEQ ID NO: 31253 - DNA, 120 bp, synthetic construct; identical to SEQ ID NO: 8778
  source 1..120: mol_type = other DNA

SEQ ID NO: 31254 - DNA, 120 bp, synthetic construct
  source 1..120: mol_type = other DNA
cttcaatttcctcaaaattactgagtccagccctgcccaagggttgtgggaagaagggggatgagaggccagcagggcaagcccttcactgcctccacatcaaatgcggcagaaacctgc

SEQ ID NO: 31255 - DNA, 120 bp, synthetic construct
  source 1..120: mol_type = other DNA
cctttctcttaccagaacccctttggctatcacccctaatatgggaaagtaagaaataaaaaaaaaaaaagacaagaaatcaacatatttataaaaaaaaaaacaagctacttccccaaa

SEQ ID NO: 31256 - DNA, 120 bp, synthetic construct
  source 1..120: mol_type = other DNA
ttcaaccccaaagcccagtcaataattccctaaagtagcagaaactccctccgaggtagatatctgagtcagacactctcgtccaccgagcgattctattggtttaagatgagctgcgta

SEQ ID NO: 31257 - DNA, 120 bp, synthetic construct; identical to SEQ ID NO: 8779
  source 1..120: mol_type = other DNA

SEQ ID NO: 31258 - DNA, 120 bp, synthetic construct
  source 1..120: mol_type = other DNA
ttagaggccccattcttcctgccatgtaattagcacccccagcacagagagtctcgttagggaggggatgaccccattggcccttctctgtcttgtgcttctcctgtattggggtttgtc

SEQ ID NO: 31259 - DNA, 120 bp, synthetic construct
  source 1..120: mol_type = other DNA
tcactgaagagggggtcacagcctcttgccagctgccatttgcctgaaaggagagacagagtacagaaaacagagaaagccctgggaaccctgtgtgggcacaacattactagggaaaat

SEQ ID NO: 31260 - DNA, 120 bp, synthetic construct
  source 1..120: mol_type = other DNA
agtgtcggagtgattccacctgcaggcagcagaggaaggtatgacagtgaagagaagcctcagaggaaagaggtcttgtatcctaaagtagaggaaatggagttggggaaagccctattc

SEQ ID NO: 31261 - DNA, 120 bp, synthetic construct; identical to SEQ ID NO: 8780
  source 1..120: mol_type = other DNA

SEQ ID NO: 31262 - DNA, 120 bp, synthetic construct
  source 1..120: mol_type = other DNA
ccctctctgctatgatcctgcctagataggaagtgggaacaaaagcaggaagtgtgcaaaacagtcagccggggtgacagtgggatccacctgcagaggaagggggtgtcggggagctgg

SEQ ID NO: 31263 - DNA, 120 bp, synthetic construct
  source 1..120: mol_type = other DNA
agacctgtggggcagaaaggagggtcaggtagaaacatttgcctctgaagtccttcactgaataagatgtgagtgacagcattttttttttttttgcttcctggtctcactatgctgttg

SEQ ID NO: 31264 - DNA, 120 bp, synthetic construct
  source 1..120: mol_type = other DNA
caacctccataatacctgagacacggtgatgccacacttcttggcaagctcctccttggcctcctcactaggatatgggttactcaggtgggagtagaaatactcatttaggacctcagt

SEQ ID NO: 31265 - DNA, 120 bp, synthetic construct; identical to SEQ ID NO: 8781
  source 1..120: mol_type = other DNA

SEQ ID NO: 31266 - DNA, 120 bp, synthetic construct
  source 1..120: mol_type = other DNA
gttccatctctttgggggccacgggcctggtgcggctctgctccctcagcaggttcatgacatgggtcgtgaactcattacatgcctgtagtgggggccagtgggctggtgaggaggagc

SEQ ID NO: 31267 - DNA, 120 bp, synthetic construct
  source 1..120: mol_type = other DNA
ctgcgatagtccgagtgttcgatggagttgtcaggggacacaccaccaccagaggctgcagcggctgcagctgctgctgctgagccgccccctttctcgggcccagccacaccctctgcc

SEQ ID NO: 31268 - DNA, 120 bp, synthetic construct
  source 1..120: mol_type = other DNA
agtgctcagtcctcctggtgcttcctggagagccaagttcccaggctttggttccttccccagtccccctgactccttactttcctcagggccccaagttgtcacactctagccctataa

SEQ ID NO: 31269 - DNA, 120 bp, synthetic construct; identical to SEQ ID NO: 8782
  source 1..120: mol_type = other DNA

SEQ ID NO: 31270 - DNA, 120 bp, synthetic construct
  source 1..120: mol_type = other DNA
gcgggctttgggagatggtctagaaaggtaggaggaggaatctgggagtggatggagaaaggaaagtgacttggtaggtttcagagggagagagacagaggctggggttgagaagagtca

SEQ ID NO: 31271 - DNA, 120 bp, synthetic construct
  source 1..120: mol_type = other DNA
tgagcagtggagaggagctttaggggctctggagagggtgtggaggtctccacatctggagagaatgagggggctgggtggagagttaggggagaagataacgtagcccaagaacagttt

SEQ ID NO: 31272 - DNA, 120 bp, synthetic construct
  source 1..120: mol_type = other DNA
gggcctgggggtgaagggaggtttgagagggatcacttttctatgggctcccaggaataaggagagaagagagctgttggatcctggagagggccctggagttggggggggctcccagaa

SEQ ID NO: 31273 - DNA, 120 bp, synthetic construct; identical to SEQ ID NO: 8783
  source 1..120: mol_type = other DNA

SEQ ID NO: 31274 - DNA, 120 bp, synthetic construct
  source 1..120: mol_type = other DNA
tggggccgctgctccctccgccccaacccccgcccgtctgcccccggctcccggctcccccgggggttcaccccggcactgaagggagacctgggataccggctgggccccccacaggag

SEQ ID NO: 31275 - DNA, 120 bp, synthetic construct
  source 1..120: mol_type = other DNA
ctgggggaggggagccggagaggaagaggaggggagaagagaggaggaacagggaggagctgggggcggagagagagacacagaaacagaggaactgagacctagtggaggaggggagag

SEQ ID NO: 31276 - DNA, 120 bp, synthetic construct
  source 1..120: mol_type = other DNA
cctgaatcagggatctaagcgatgtggactcaggccgctggaatgcctgggttcaccggcagctcagttcatatttcttgttctaatgactcccctccctgttctacttaattaaaaccg

SEQ ID NO: 31277 - DNA, 120 bp, synthetic construct; identical to SEQ ID NO: 8784
  source 1..120: mol_type = other DNA

SEQ ID NO: 31278 - DNA, 120 bp, synthetic construct
  source 1..120: mol_type = other DNA
gggagaatagtcttaatctctcaggtgcccacccaccttcccttcttactgggaggaagggtagagctgtctctcaggttataacctctcaggtggaggcctgagccctcagaccctact

SEQ ID NO: 31279 - DNA, 120 bp, synthetic construct
  source 1..120: mol_type = other DNA
gggagttaaatccctgttccatctcgcctgttcccagagtttgaggactttcaccctgtccagttcccagggaaggtgatgtgggagatgaatattgagatttgtgccgtgtctttcagt

SEQ ID NO: 31280 - DNA, 120 bp, synthetic construct
  source 1..120: mol_type = other DNA
acctttgctcctccattcgacccccaccctgaactctcagcagcaactccaggagctcttgcccccctggagggaggggaggctctgaccgctgggcttccatccgctggcactggagga

SEQ ID NO: 31281 - DNA, 120 bp, synthetic construct; identical to SEQ ID NO: 8785
  source 1..120: mol_type = other DNA

SEQ ID NO: 31282 - DNA, 120 bp, synthetic construct
  source 1..120: mol_type = other DNA
tgcagggagagcagggaggccgagcggggtcccagggctggggagaggggtgtggagggctcagagacccagagaggttggcagacaggagccgtgggggagtgtggacagggtgacgtg

SEQ ID NO: 31283 - DNA, 120 bp, synthetic construct
  source 1..120: mol_type = other DNA
ctagggtcggggctctccctgggtgggtaggggtacctgtgtggcgggtccctggaggaggaggggatggaggagcagatcgccaaggccgagtggtggagtttggagggggccagcctt

SEQ ID NO: 31284 - DNA, 120 bp, synthetic construct
  source 1..120: mol_type = other DNA
tgttcctgcctcagtttgcccaagcctttcaaggcccctgtgtccctacatttctgccccaggtcctctcacctcccttctttcccagtgtcagcctccccaaccccgtgcccagctcac

SEQ ID NO: 31285 - DNA, 120 bp, synthetic construct; identical to SEQ ID NO: 8786
  source 1..120: mol_type = other DNA

SEQ ID NO: 31286 - DNA, 120 bp, synthetic construct
  source 1..120: mol_type = other DNA
ctcatctccagagcctcagtagtcccctaatccctggctctgctccctccaccccacctcctcttctgctctttctgtcaacacaggaactagctacacaggaagtggtttcactcctca

SEQ ID NO: 31287 - DNA, 120 bp, synthetic construct
  source 1..120: mol_type = other DNA
agtggaggattcagatccagggatgtggagctctcaaatatatacataaaaccctagcaccgggtccaacacatagtaagtattcaatatatatgtattgaataatcatccctgacctct

SEQ ID NO: 31288 - DNA, 120 bp, synthetic construct
  source 1..120: mol_type = other DNA
gaacatggtgaaaccccatctttactaaaatacaaaaaattagctgggcgtggccacatgcgcctgtaatcccagctactcaggaggttgaggcaggagaattgcttgaacccgggaggc

SEQ ID NO: 31289 - DNA, 120 bp, synthetic construct; identical to SEQ ID NO: 8787
  source 1..120: mol_type = other DNA

SEQ ID NO: 31290 - DNA, 120 bp, synthetic construct
  source 1..120: mol_type = other DNA
accctgtttcagaaaaagaaagaaatgaaatgaaattgaaaagggagaggactacctctctggcttggtctttgatcaatgctaatcaggctggttggcatcaaggaaggagcagggcag

SEQ ID NO: 31291 - DNA, 120 bp, synthetic construct
  source 1..120: mol_type = other DNA
gaagagatctggtcctgccgcttattccttgcaatcttgggcagatctctgtgcctcaatttctgagtgaaatagggttttaatagcacctacttcatagggttgatgtattaataatgt

SEQ ID NO: 31292 - DNA, 120 bp, synthetic construct
  source 1..120: mol_type = other DNA
tcaaacctagcaacatattgctgcaaggtggacaaagtttcaagatactctctccatctacttgacttgtggccttaggaatctcctaagtggccataagtaaaagccctaggatgaggg

SEQ ID NO: 31293 - DNA, 120 bp, synthetic construct
  source 1..120: mol_type = other DNA
tgttccaccccagatcattaggcattagattcccgtaagaagcgagaaacttagatcccttgcatgcacagttcacaatagggttcgagttcctatgagaatttaatgcttatgctgatc

SEQ ID NO: 31294 - DNA, 120 bp, synthetic construct; identical to SEQ ID NO: 8788
  source 1..120: mol_type = other DNA

SEQ ID NO: 31295 - DNA, 120 bp, synthetic construct
  source 1..120: mol_type = other DNA
ccaaaaaaaggtaacacttcaaatcagctttattatgggtgacagatttagggttcttaaatagcgatagcagtggctagaagaagcgcttcatccccacagtggagttctttgttgtga

SEQ ID NO: 31296 - DNA, 120 bp, synthetic construct
  source 1..120: mol_type = other DNA
ggacaatggatcataggggcaccctttggaaaccatatataggaaagaacatcttacatcccatatgcctgcaattcttggttccaacttaggggtatttccactccactctgccctcct

SEQ ID NO: 31297 - DNA, 120 bp, synthetic construct
  source 1..120: mol_type = other DNA
ttttaggagagaaactaaactcacaacccttcattttgggggatccatcttaaaaccaggaaggccttccagcctgccttttaatgggtaatcatttttggaattcctccctaccatgta

SEQ ID NO: 31298 - DNA, 120 bp, synthetic construct; identical to SEQ ID NO: 8789
  source 1..120: mol_type = other DNA

SEQ ID NO: 31299 - DNA, 120 bp, synthetic construct
  source 1..120: mol_type = other DNA
gctccggcaatgagaataggccccgcccccccgcgcagccaagtctacggaccaagtccgagcctgcagacaagctccgcccccacgagggcctgctccggctgacagcgtccggcagcg

SEQ ID NO: 31300 - DNA, 120 bp, synthetic construct
  source 1..120: mol_type = other DNA
cagcagcgtcagcagatcccagtggttacgttggtgagcgacgtccgccggcgctagcccagcctggtcccgcagctctcgggctgcccccagccccagcagtagctgggctacttccac

SEQ ID NO: 31301 - DNA, 120 bp, synthetic construct; identical to SEQ ID NO: 2984
  source 1..120: mol_type = other DNA

SEQ ID NO: 31302 - DNA, 120 bp, synthetic construct
  source 1..120: mol_type = other DNA
acgtgggaggttgttaccccagttgggggccagacgcctgggttccggtttcccacgggttctggccttgggggaagggctattcgggccggctggtccctcaaaggcgggaagcgttgc

SEQ ID NO: 31303 - DNA, 120 bp, synthetic construct; identical to SEQ ID NO: 8790
  source 1..120: mol_type = other DNA

SEQ ID NO: 31304 - DNA, 120 bp, synthetic construct
  source 1..120: mol_type = other DNA
caccccatctgctcaacttctctatagcatacatcaccccttcctctacataccccatttatctctggcccccacgtctgcttgggctgcaatcagttcttcaaccaggtcttccaccgc

SEQ ID NO: 31305 - DNA, 120 bp, synthetic construct
  source 1..120: mol_type = other DNA
gactgccaactcgagttccttacactattaaccccactcgcaatccatattcagccatcctccgcagtttccctgtcaggttcccaatcacaccaatttcctccttgtcaaactctaggg

SEQ ID NO: 31306 - DNA, 120 bp, synthetic construct
  source 1..120: mol_type = other DNA
ctgcccggtctggctggttggggttggctccagcctcaaggaggcggcgggcagcggttggccgggagaatcgggcagccaggtgcaggggggtctccccagtgcccacggtgtgagcct

SEQ ID NO: 31307 - DNA, 120 bp, synthetic construct; identical to SEQ ID NO: 8791
  source 1..120: mol_type = other DNA

SEQ ID NO: 31308 - DNA, 120 bp, synthetic construct
  source 1..120: mol_type = other DNA
ttttttctgagacggagtctcgccctgtcacccaggctggagtgcagtggcgcgatctcggctcactgcaagctcctcctcccaggttcacgccattctcctgccttagcctccagagca

SEQ ID NO: 31309 - DNA, 120 bp, synthetic construct
  source 1..120: mol_type = other DNA
tggcctcccaaagtgctgggattacaggcgtgagccaccacgcccggcctagcagtggttttctcaaacgagtctggatcagattcacctgaagggcttgttaaaacagattgcctaaca

SEQ ID NO: 31310 - DNA, 120 bp, synthetic construct
  source 1..120: mol_type = other DNA
gcactcagtctaaaattatttcctctagttctgatattaaaggactctctgattctaatagggtcaaaggactttttttttttttcttggtctgggttgactcacataccaggtccacgg

SEQ ID NO: 31311 - DNA, 120 bp, synthetic construct; identical to SEQ ID NO: 8792
  source 1..120: mol_type = other DNA

SEQ ID NO: 31312 - DNA, 120 bp, synthetic construct
  source 1..120: mol_type = other DNA
gaggttacacggaattatgaccatcagggtctccaaaatttccagcaggcttcccacccctctctccttcccctatctttgacttctgcaatagtatttcttatcttttctgattgtaaa

SEQ ID NO: 31313 - DNA, 120 bp, synthetic construct
  source 1..120: mol_type = other DNA
gacttctgcaatagtatttcttatcttttctgattgtaaatatcgccataggagagactccccttcctgagcctgggtttctcctcattctcacttgagaccaatgctgtcctcgcctag

SEQ ID NO: 31314 - DNA, 120 bp, synthetic construct
  source 1..120: mol_type = other DNA
ccctagggccaggagaatcaccccggccactggggagcacagcacaggccagggaagctggttggcagggggtgctggtgggagagacagagtcacaaagagaggccactcctggtgaga

SEQ ID NO: 31315 - DNA, 120 bp, synthetic construct; identical to SEQ ID NO: 8793
  source 1..120: mol_type = other DNA

SEQ ID NO: 31316 - DNA, 120 bp, synthetic construct
  source 1..120: mol_type = other DNA
aaattagccaggtgtggtggcgggcacctgtagtcccagctacttgggaggctgaggcaggagaatggcgtgaacttgggaggtggagcttgcagtgagccgagatcgcgccactgcact

SEQ ID NO: 31317 - DNA, 120 bp, synthetic construct
  source 1..120: mol_type = other DNA
aattgcttaaacccaggaggcagaggttgcagtgagctgagatggcgtcactgtactccagtgtggctgacagagtaagactgtctcagaaaacaaacacacaaaaaaaggctgagtatc

SEQ ID NO: 31318 - DNA, 120 bp, synthetic construct
  source 1..120: mol_type = other DNA
taagtataatgcaaatattccaaaataaatccgaaatctgaaacacttttgttcccaagcatttcagataagggatactcaaccagcagtacgtgcctcatggggttgtgggggaggatt

SEQ ID NO: 31319 - DNA, 120 bp, synthetic construct
  source 1..120: mol_type = other DNA
gcgatctcggctcactgcaagctccacctcccaggttcacgccattctcctgcctcagcctcctgagtagctgagactacaagcacccgccaccacagccggctaatttttttattttta

SEQ ID NO: 31320 - DNA, 120 bp, synthetic construct; identical to SEQ ID NO: 8794
  source 1..120: mol_type = other DNA

SEQ ID NO: 31321 - DNA, 120 bp, synthetic construct
  source 1..120: mol_type = other DNA
ttcagcctccattgcctgttgctagcatgagagctggcctgggaacagaggtcagagaaagtggcaaggggtcacctaccggtccctgcatgagggtggacagccagcagtggtccaggc

SEQ ID NO: 31322 - DNA, 120 bp, synthetic construct
  source 1..120: mol_type = other DNA
atgaccaccacaaacctgtagaggaggcacctcagagacctctgtattggtccctggctccctttcctccctctgccctcttaaaaaaactggtgtctggcccttccctccacctagctt

SEQ ID NO: 31323 - DNA, 120 bp, synthetic construct
  source 1..120: mol_type = other DNA
aggggtacaccatgtccctgccatcacgatccttccttacccagagtcctaccctcagagtcagggacagcacccgggccagggcaaacagctgctggtctagggctggggggctcagta

SEQ ID NO: 31324 - DNA, 120 bp, synthetic construct; identical to SEQ ID NO: 8795
  source 1..120: mol_type = other DNA

SEQ ID NO: 31325 - DNA, 120 bp, synthetic construct
  source 1..120: mol_type = other DNA
gtaccctcccaagctctcctctgtttctaaaggagagtcccaggcccttttccctctgtgaggtgctgactgctaggggaaatactccatggcagcaaggcttagggaaggaggcttgag

SEQ ID NO: 31326 - DNA, 120 bp, synthetic construct
  source 1..120: mol_type = other DNA
attagggtggaaactccctggagcccaaggctgtggccacactgtaactcagagccatctacgtccttcctcctcctctcacccacccctctccttccctggctccagtggatttcaggc

SEQ ID NO: 31327 - DNA, 120 bp, synthetic construct
  source 1..120: mol_type = other DNA
gcccttccaggggtctgggactcccagagagcagtcccctccatcccagtttcctcccgggccactgcagccagcatcgcaggccccatctccacttctgccctcacaccccttggctcc

SEQ ID NO: 31328 - DNA, 120 bp, synthetic construct; identical to SEQ ID NO: 8796
  source 1..120: mol_type = other DNA

SEQ ID NO: 31329 - DNA, 120 bp, synthetic construct
  source 1..120: mol_type = other DNA
gggttaagacggtgcagagggtcctagattctcatatctaaaaggcgcctcagagagcatcaagttaatcattttgtggatgttgaaaccatgtcctgtggtaatttcacacaatgacat

SEQ ID NO: 31330 - DNA, 120 bp, synthetic construct
  source 1..120: mol_type = other DNA
aaaggcgcctcagagagcatcaagttaatcattttgtggatgttgaaaccatgtcctgtggtaatttcacacaatgacatattacattctgttgaaaatggatgaagcacagctgtgtgc

SEQ ID NO: 31331 - DNA, 120 bp, synthetic construct
  source 1..120: mol_type = other DNA
ctggagtgcaatggtgcaatctcagctcattgcaacctctgcctcccgggttcaagcaattctcctgcctcagccttcccaatagctgggattacagccatgcaccaccacgcccagcta

SEQ ID NO: 31332 - DNA, 120 bp, synthetic construct
  source 1..120: mol_type = other DNA
ctgtgcccggccggctgttatattattatcttactccttagaaataggatcatatgtcttcctcttcctctggagagggaacaggatacaggaggaggacttaagtagatgtaagttatt

SEQ ID NO: 31333 - DNA, 120 bp, synthetic construct; identical to SEQ ID NO: 8797
  source 1..120: mol_type = other DNA

SEQ ID NO: 31334 - DNA, 120 bp, synthetic construct
  source 1..120: mol_type = other DNA
cactgtgagcttggcatggctttttccaataatttccacatcagtgctcacccacagtcccttctgggattccaactgaggtattcttgccttgtcagcatagggggcaacagagaaggc

SEQ ID NO: 31335 - DNA, 120 bp, synthetic construct
  source 1..120: mol_type = other DNA
acaccactggcctgtaattatgggggagattagatgtcacacactgcatcagtcactgcctccatcctagctcattcctggatgttggcccagtgctagatgtgcaggtgaagggatcct

SEQ ID NO: 31336 - DNA, 120 bp, synthetic construct
  source 1..120: mol_type = other DNA
tgtgccccttgtcttggggcctcacctgtgtgtccaggcagacactggcagtagaaggcattggccagagagtggcaggctgcagtgcctgtggggtggcagggctggtccagacactcg

SEQ ID NO: 31337 - DNA, 120 bp, synthetic construct; identical to SEQ ID NO: 8798
  source 1..120: mol_type = other DNA

SEQ ID NO: 31338 - DNA, 120 bp, synthetic construct
  source 1..120: mol_type = other DNA
acttccccagtcccaaacaatctctatgacacactgccaccaaacacagcaccatttttggtaaaaccttcctcccctgctaaatacctaccaggctctctcatactttattaattcata

SEQ ID NO: 31339 - DNA, 120 bp, synthetic construct
  source 1..120: mol_type = other DNA
agcatttattgcatgatttatatacataacctaaaaatccccctaatgacattttatttgggttatctcattcgatttttactttgcacgtaaggaagctgagtctctgaaaggttagtg

SEQ ID NO: 31340 - DNA, 120 bp, synthetic construct
  source 1..120: mol_type = other DNA
gtcattggcaagatctgtaccacgtgctggcttcttgcaagaggaaagagagtgtgcaagagtacagtaccaggaaggcaggcttcaaagagagaaaagggaattcacagagaatccaag

SEQ ID NO: 31341 - DNA, 120 bp, synthetic construct
  source 1..120: mol_type = other DNA
ggctgaggtgggcagatcacgaggtcaggagttcgagaccagcctggccaatatggtgaaactccatctctactataaatacaaaaattagccgggcatggtggcatgtccctgtagtcc

SEQ ID NO: 31342 - DNA, 120 bp, synthetic construct; identical to SEQ ID NO: 8799
  source 1..120: mol_type = other DNA

SEQ ID NO: 31343 - DNA, 120 bp, synthetic construct
  source 1..120: mol_type = other DNA
tcaaggcgggtggatcacttgaggtcaggattttgagaccagcctggccaacatggtgaaaccccatctctactaaaaatacacacatacacaaaattagctaggtgtggtggcaggcac

SEQ ID NO: 31344 - DNA, 120 bp, synthetic construct
  source 1..120: mol_type = other DNA
gtctcaaaaaaaaaaagctgtggttctatatctcaaaataataaaagccatatatgacaaacccacagctaacatcatattgaatggggaaaagttgaaagcctttcctctaagatctgg

SEQ ID NO: 31345 - DNA, 120 bp, synthetic construct
  source 1..120: mol_type = other DNA
attatccatgttcacagatgacataatcctatatttagaaaaacctaaagaaaacactggttataaacaaattcagtaaagctgtaggatacaaaatcaatgtagaaaaagtagtagcat

SEQ ID NO: 31346 - DNA, 120 bp, synthetic construct; identical to SEQ ID NO: 8800
  source 1..120: mol_type = other DNA

SEQ ID NO: 31347 - DNA, 120 bp, synthetic construct
  source 1..120: mol_type = other DNA
aaaagaacaaagctagaggtaccacactacctaacttaaaaatatactataaagctatagtaaccaaaacagcatggtgctggcataaaaaacagacacatagaccaatggaatgtaata

SEQ ID NO: 31348 - DNA, 120 bp, synthetic construct
  source 1..120: mol_type = other DNA
acgatctggctcactgcaacctccacctcctgggttcaagcgattctcctgcctcagcctcctgagtagctgggattacaggtgcgcaccaccatgcctggctaatttttgtatttttag

SEQ ID NO: 31349 - DNA, 120 bp, synthetic construct
  source 1..120: mol_type = other DNA
caacttactttcaacaaaggcaccaagtacacacactggggaaaggacactctcttcaataaattgtgctgggaaaactggatatccatatgcagaagaaactaaacctaggccgggcgg

SEQ ID NO: 31350 - DNA, 120 bp, synthetic construct
  source 1..120: mol_type = other DNA
aaattagccgggcgtagtggtgtgcacctgtagttccagctactcaggaggctgaggcaggagaatcagttgaacttgggaggtggaggttgcagtgagctgagatcataccactgcact

SEQ ID NO: 31351 - DNA, 120 bp, synthetic construct; identical to SEQ ID NO: 8801
  source 1..120: mol_type = other DNA

SEQ ID NO: 31352 - DNA, 120 bp, synthetic construct
  source 1..120: mol_type = other DNA
caaatttgcgccactgcactccagcccaggcgacggtgcaagactccttctcaaaaaaaaaaaaaaaaaaaaatcatttgggaaatgcttcaagacattggtctgggcaaaagttttttg

SEQ ID NO: 31353 - DNA, 120 bp, synthetic construct
  source 1..120: mol_type = other DNA
agaagaaaatatttgcaaactgtctgacaagggattaataatcagaacgtataaggaactcaacagcaaacaccaccactaccaccaccgacaaataatgtggtttaaaaaatgagcaaa

SEQ ID NO: 31354 - DNA, 120 bp, synthetic construct
  source 1..120: mol_type = other DNA
ctgttattgaaaacacaagggccaagtgtggtggcccatgcctgtaatcccagcactttcagaggttgaggcgggaagatcatttgaggtcaggagttcgagaccatcctggccaacatg

SEQ ID NO: 31355 - DNA, 120 bp, synthetic construct; identical to SEQ ID NO: 8802
  source 1..120: mol_type = other DNA

SEQ ID NO: 31356 - DNA, 120 bp, synthetic construct
  source 1..120: mol_type = other DNA
tccaaaggaaatcagtatcttgaagagatatctgcatccccatatttattgcagcactgttcacaatagctaacatatggaattaactgaagtgccatcaacaaatgaatggaaaaaaga

SEQ ID NO: 31357 - DNA, 120 bp, synthetic construct
  source 1..120: mol_type = other DNA
gaaagacaaatattgcatgtctctcaccttcacctttgtgccactgccttagttagtcctgacctttcttgcattccaggtagatacttgcatcagcctcctattgcatgtgtaatattg

SEQ ID NO: 31358 - DNA, 120 bp, synthetic construct
  source 1..120: mol_type = other DNA
tacaaaattatggtcatatagaaggaataagttctagtgttagatagcagagaaggatggtgatagttaacaatttgtatttcaaaataactaggagagaagatttgaaatgttctcaac

SEQ ID NO: 31359 - DNA, 120 bp, synthetic construct
  source 1..120: mol_type = other DNA
tatcactttggcaggctgagcgggtggatcactttaggtcaggagttctgagaccagcctgcccaacatggtgaaaccccatctctactaaaaatacaaaaattagccaggcgtggtggc

SEQ ID NO: 31360 - DNA, 120 bp, synthetic construct; identical to SEQ ID NO: 8803
  source 1..120: mol_type = other DNA

SEQ ID NO: 31361 - DNA, 120 bp, synthetic construct
  source 1..120: mol_type = other DNA
agttagggacatcttcctgaagaagatgcctcctgaacaccagcctgtggaagaggggttgggaaggccattccaggtagtgtcaatagcagggataaaggctgagaggcaagaatcagt

SEQ ID NO: 31362 - DNA, 120 bp, synthetic construct
  source 1..120: mol_type = other DNA
ttattcagaatgaggcgggcagcctccgaaggttcagcaggggagagacaggtcaactggacattttcagtagagtaccctggccacggggtaaaggctgaacctatagaaggacaagtg

SEQ ID NO: 31363 - DNA, 120 bp, synthetic construct
  source 1..120: mol_type = other DNA
caaagggtgaaggtgaaagcacagacttgagaaaacttcaggagataaagtggcatgactttgtggttagttgggtgtgtggggttaaaaaaaataaaaggaggtgaaatggatacattg

SEQ ID NO: 31364 - DNA, 120 bp, synthetic construct; identical to SEQ ID NO: 8804
  source 1..120: mol_type = other DNA

SEQ ID NO: 31365 - DNA, 120 bp, synthetic construct
  source 1..120: mol_type = other DNA
aggtggatcaccaggttaggagtgtgagaccagcctggcaaacatggggaaaccccgtctctactaaaaatacaaaaaattggtcgggcgttgtggcaggcacctgtaatcccagctact

SEQ ID NO: 31366 - DNA, 120 bp, synthetic construct
  source 1..120: mol_type = other DNA
aaacaaacaaacaaacagaaacggtaaatggggatgtggccgggcgtggtggctcacacctgtaattccagcactttgggaggctgagacgggtggatcactgaggttaggagttcgaga

SEQ ID NO: 31367 - DNA, 120 bp, synthetic construct
  source 1..120: mol_type = other DNA
gaacctaggaggtgaaggttgcagtgagccgagatcgtgccactgcactccaccctgggtgacagactgggactccatctcaaaaataaataaataaataaataaataaataaataaata

SEQ ID NO: 31368 - DNA, 120 bp, synthetic construct; identical to SEQ ID NO: 8805
  source 1..120: mol_type = other DNA

SEQ ID NO: 31369 - DNA, 120 bp, synthetic construct
  source 1..120: mol_type = other DNA
ccctgagttctgcattcctttaatgttctctccctgtgattcccatcagctatcccttaactccatcataatctctttcccgagctcttctcatatcaaaccttattttagtgttctttt

SEQ ID NO: 31370 - DNA, 120 bp, synthetic construct
  source 1..120: mol_type = other DNA
cacgttgagtcatgtccctcatggttgggttaaactggaatcctgtggaatgggctggttggtgttgcttgaattgcgttaaatgaggtaacaggaattgtgttaggcttctctgattgc

SEQ ID NO: 31371 - DNA, 120 bp, synthetic construct
  source 1..120: mol_type = other DNA
tgtggaagcccacaggaacggggcaggtgagaacacccatattttcttcatttgctctccagtcagtgccggcgttggttaccttggctcagtgcagccttctggcaggaggacagtgga

SEQ ID NO: 31372 - DNA, 120 bp, synthetic construct; identical to SEQ ID NO: 8806
  source 1..120: mol_type = other DNA

SEQ ID NO: 31373 - DNA, 120 bp, synthetic construct
  source 1..120: mol_type = other DNA
ctgagggctgtcctggcaggttgccctattcctacaggggctgaacaagacagagacagggcatgataggaagaagttcgggcaacaaggggaaggtagtgtgtgatattgtcgggaggc

SEQ ID NO: 31374 - DNA, 120 bp, synthetic construct
  source 1..120: mol_type = other DNA
aggggtctttgggccctgctcacctgtctgcacagctggggcggagctttccctcacagcgcgggccctggaagcccatggcacagaggcaggagaaggtgccaggcctgttcacacagg

SEQ ID NO: 31375 - DNA, 120 bp, synthetic construct
  source 1..120: mol_type = other DNA
aaaacgacagctcactgccatccaattaatttttatttatatgatattttattgtttttagatagggtcttgctctgttacccaggcagtggtgccatcagagctcactgcagtcttaac

SEQ ID NO: 31376 - DNA, 120 bp, synthetic construct; identical to SEQ ID NO: 8807
  source 1..120: mol_type = other DNA

SEQ ID NO: 31377 - DNA, 120 bp, synthetic construct
  source 1..120: mol_type = other DNA
aggtgggtcctgaaggaaacaggtgggggctgagaaagggtgtcctccttccctccctccgctctccttctctttcctcttccttcccttcctcatccccaaccctattattctttccca

SEQ ID NO: 31378 - DNA, 120 bp, synthetic construct
  source 1..120: mol_type = other DNA
gggcccgtggtcgcctgccttacccttgacatagggggtgaccagcacagggtgtatatggtttagggagggtctcacctgtgtagcctgtagggcaggtgcagttgtagccagagggct

SEQ ID NO: 31379 - DNA, 120 bp, synthetic construct
  source 1..120: mol_type = other DNA
aggggagggtttttctcttctcctactgcttatgttcccctccctgctgcctggacccctatgacttcctcttcttttggccctgagattctggcctctttcttcagtgactttgctctc

SEQ ID NO: 31380 - DNA, 120 bp, synthetic construct; identical to SEQ ID NO: 8808
  source 1..120: mol_type = other DNA

SEQ ID NO: 31381 - DNA, 120 bp, synthetic construct
  source 1..120: mol_type = other DNA
caagtagctgggattacaggtgcgccaccatgcccagctaatttttgcatttttagtagctacagggtttcaccatgttggccaggctgatgttgaactgctgatctcaggtgatccgcc

SEQ ID NO: 31382 - DNA, 120 bp, synthetic construct
  source 1..120: mol_type = other DNA
taatgaatgattaattcgccctgggatttagtgctcttctttctgctctgaccccctggtcctctgtttccaccagtttttgtggactctcttctccttggataacacttaccagttgag

SEQ ID NO: 31383 - DNA, 120 bp, synthetic construct
  source 1..120: mol_type = other DNA
agggggcagatggggagggtctggaagatgttacctctggcagtgcccgtggtggcaggtgcagttgtcctcaggtggggcacagccagggcttccatcaggacagaggcagttggcctt

SEQ ID NO: 31384 - DNA, 120 bp, synthetic construct; identical to SEQ ID NO: 8809
  source 1..120: mol_type = other DNA

SEQ ID NO: 31385 - DNA, 120 bp, synthetic construct
  source 1..120: mol_type = other DNA
gctgtacccttaactctgactttcttacagttccttaaatggggtgggcttttcttccatctgtgtctttgcacatgcagttatctccagctaaaacacactatctggcactctatttag

SEQ ID NO: 31386 - DNA, 120 bp, synthetic construct
  source 1..120: mol_type = other DNA
tgagatggaatcttgctctgtcacccaggctggagtgcagtggagtgatctcagctcactgcaaccactgcttcccaggttcaagcgattctcttgcctcagcctccccaatagctggga

SEQ ID NO: 31387 - DNA, 120 bp, synthetic construct
  source 1..120: mol_type = other DNA
cgcctcccgggttcacgccattctcctgcctcagcctctggagtagctgggactataggcgcccgccaccacgcccagttatttttttgtatttttagttgagatggggtttcaccgtgt

SEQ ID NO: 31388 - DNA, 120 bp, synthetic construct; identical to SEQ ID NO: 8810
  source 1..120: mol_type = other DNA

SEQ ID NO: 31389 - DNA, 120 bp, synthetic construct
  source 1..120: mol_type = other DNA
agtcacatgaagatggcaactgtcttactcagatttgcctccgtatctggcatagtaggcagttggtaagtgcttgctaaataagcaagtgaatgccttttctttgagccccgtcctctg

SEQ ID NO: 31390 - DNA, 120 bp, synthetic construct
  source 1..120: mol_type = other DNA
cattctcattctattctcacatcccaaccatcaaacacccaccaatgaactctgccccaacccaaatggaataaaatattctgccagttctttccagtgcctcccctgtgaacctgtgaa

SEQ ID NO: 31391 - DNA, 120 bp, synthetic construct
  source 1..120: mol_type = other DNA
ggcacagcaggaaggtcagggacctgcacggatgtctgcctcctgctcccgctgtcccccacagtgtgtgccccagtttacctgggagacacttgcagtggaaggctccaggctggtcct

SEQ ID NO: 31392 - DNA, 120 bp, synthetic construct; identical to SEQ ID NO: 8811
  source 1..120: mol_type = other DNA

SEQ ID NO: 31393 - DNA, 120 bp, synthetic construct
  source 1..120: mol_type = other DNA
aaatgacataacgcctgaaaagtactcagccaaatggctagcctggagtaagtggtgaataagtgtagttattataatagcaggggacagaggagtgtccggtgaggctggagaagaaag

SEQ ID NO: 31394 - DNA, 120 bp, synthetic construct
  source 1..120: mol_type = other DNA
aggacagagatgagaatgggcaagtaagcaagggaagatttggggatgtaagagtagagattttggggagcaaagacagatttggaggactccttggcttggctagagagagcttcaagt

SEQ ID NO: 31395 - DNA, 120 bp, synthetic construct
  source 1..120: mol_type = other DNA
atggcaatccgcgtggttcaggcagggagctgaggcacactcgttggtctccacctcacagagctgcccttctaagcctggggacatggggaccatgagggctgtggctcagccaggtct

SEQ ID NO: 31396 - DNA, 120 bp, synthetic construct; identical to SEQ ID NO: 8812
  source 1..120: mol_type = other DNA

SEQ ID NO: 31397 - DNA, 120 bp, synthetic construct
  source 1..120: mol_type = other DNA
agatcccaaagtggaggaatttgaagtgcatctgggaagcttgttgctcctatatttgtcccgttgctttgggttcatcctggtctccactgtttcatcctgaattgaggtgggatcaac

SEQ ID NO: 31398 - DNA, 120 bp, synthetic construct
  source 1..120: mol_type = other DNA
gggttaccgaaccgttttctcttatttctctatgattgtctgttgggtgacctgagccagtatctttgggtgccgctcagtttagaaagtcaatatggggtagtggttataattgttgaa

SEQ ID NO: 31399 - DNA, 120 bp, synthetic construct
  source 1..120: mol_type = other DNA
tattgtaataagtagatgagacaatgcctgtaagatgctcagacagtacctggcataaagttggcgattatttttctgatttcattcaactccttgatgttggctctgttgctgtctccc

SEQ ID NO: 31400 - DNA, 120 bp, synthetic construct; identical to SEQ ID NO: 8813
  source 1..120: mol_type = other DNA

SEQ ID NO: 31401 - DNA, 120 bp, synthetic construct
  source 1..120: mol_type = other DNA
cttgggtgtccctgagttttcgtctgggggtagagagagaagcatctgtggtaacttacgccaattggcctgaagctgtccttactctggagggggcattcctagtgggttcaggactag

SEQ ID NO: 31402 - DNA, 120 bp, synthetic construct
  source 1..120: mol_type = other DNA
ttgtgatcagcctcacaacgggagcctgtgtagccaggtggacagaggcagttgaaggagccaggagtgttgaggcaggaaccgccatgttcacagggacttgggccttgctgggctggg

SEQ ID NO: 31403 - DNA, 120 bp, synthetic construct
  source 1..120: mol_type = other DNA
gtctttaagatggaaaggaaataagggaccaaactcatggggactgaggggctgaacattggagagagggtcatgtaggcaagagatgccaaatctgggcaaattcaaggaaaaagatgt

SEQ ID NO: 31404 - DNA, 120 bp, synthetic construct; identical to SEQ ID NO: 8814
  source 1..120: mol_type = other DNA

SEQ ID NO: 31405 - DNA, 120 bp, synthetic construct
  source 1..120: mol_type = other DNA
tctacccccatacctgtgcgtccaggtgggcagaggcaggagaaagagcccacccggtcaatgcaggtggatcccggggcacaggtggcagcaatacagtcatccaggttctcctcacag

SEQ ID NO: 31406 - DNA, 120 bp, synthetic construct
  source 1..120: mol_type = other DNA
cagtcccagcctgcagggggttggggaggggacgagggctaaggctgggagccctatgagtaggggaggccaggggccaactctctgggccatgggtgtcatggatgtggcttaaacaac

SEQ ID NO: 31407 - DNA, 120 bp, synthetic construct
  source 1..120: mol_type = other DNA
atgaaacctgacagggtcatggatcagctgtgggaggaggctccaacggagacatcctgccctgcccagagagaggggcggccggagagcccctgtgaggacacacctgggggacagagg

SEQ ID NO: 31408 - DNA, 120 bp, synthetic construct; identical to SEQ ID NO: 8815
  source 1..120: mol_type = other DNA

SEQ ID NO: 31409 - DNA, 120 bp, synthetic construct
  source 1..120: mol_type = other DNA
ttctagcattgtacgaattctagcccatctgaggttacccagtgctcactctggattatctctgggtctcattttcatatttccttccctttattaccatactttctttgctctgttcca

SEQ ID NO: 31410 - DNA, 120 bp, synthetic construct
  source 1..120: mol_type = other DNA
gatcttgggggaggtgaaaagcaccccacgtctgcaggcaggagactcaggtggcaccatgctgtgccacaactggttgtatacccttgggtgagccactttgcctttctgatcctcatt

SEQ ID NO: 31411 - DNA, 120 bp, synthetic construct
  source 1..120: mol_type = other DNA
tcggccccttctgtcctctcagcaaccttatgaagtgtgaccattactctccctgtttgtcagctgacaactgaacaccagaaagctaaaatatcttatatgaggtcatgtagctgatca

SEQ ID NO: 31412 - DNA, 120 bp, synthetic construct; identical to SEQ ID NO: 8816
  source 1..120: mol_type = other DNA

SEQ ID NO: 31413 - DNA, 120 bp, synthetic construct
  source 1..120: mol_type = other DNA
caaagggggctcatggcacccttaatttggaaatattttaacattttagcaatcagtacaaccatgctggtgaatgttggttgtgggtaagtggattgccaagaattggcatgttgattc

SEQ ID NO: 31414 - DNA, 120 bp, synthetic construct
  source 1..120: mol_type = other DNA
tgtccatccaggcatgcaggagcactgtgggcggcccgaggcctggatgtggcagcggccccttttggaacagaaggagggaggacaagggtcttcaagcttggcctggcatctctcacc

SEQ ID NO: 31415 - DNA, 120 bp, synthetic construct
  source 1..120: mol_type = other DNA
gttctggcaggggtcaggaaactggcacgtctcacccaggaagccaggggcacacctgggcaggggaggagaggaaaactcacatcactggtccctcttcctattcttgcccactccctc

SEQ ID NO: 31416 - DNA, 120 bp, synthetic construct; identical to SEQ ID NO: 8817
  source 1..120: mol_type = other DNA

SEQ ID NO: 31417 - DNA, 120 bp, synthetic construct
  source 1..120: mol_type = other DNA
ctctaaaccacctcttcttcacatctgtccccactctccacatggtacccagccccagccccagtgccctccgtcccagttactaatccctacccccctttcctgtttattctctggcct

SEQ ID NO: 31418 - DNA, 120 bp, synthetic construct
  source 1..120: mol_type = other DNA
tgaatggctgagacttcgaagagatttcctcccggaaaggccgagcattgagccatccggggggtggggacagctggactaagaaagggcttagtaggcctgacctttcatgtccccatc

SEQ ID NO: 31419 - DNA, 120 bp, synthetic construct
  source 1..120: mol_type = other DNA
caccctctcacccatcccccagcagtcaccacccctggcaccaggcccgaagcagctccatgggcagagccgtctttccctggaggccgtctctatttgggcagtgagaatctcctccat

SEQ ID NO: 31420 - DNA, 120 bp, synthetic construct; identical to SEQ ID NO: 8818
  source 1..120: mol_type = other DNA

SEQ ID NO: 31421 - DNA, 120 bp, synthetic construct
  source 1..120: mol_type = other DNA
ggggggcggaggaagagtggaggaacactaggggggatgaaggaggggccttctgtccctgacaacccctggggaagtagggggaagtaggacggtgtgcctggagggcaggtgatagga

SEQ ID NO: 31422 - DNA, 120 bp, synthetic construct
  source 1..120: mol_type = other DNA
cctggaaacaggtattgggtggttacagagttctgtattcctcctcccaggagaggatgcttaatttgccaggttattacagatgcttctcagagaacctgcaacttgtcataatttgaa

SEQ ID NO: 31423 - DNA, 120 bp, synthetic construct
  source 1..120: mol_type = other DNA
gcaaatgggcaagatgctggccggttttggggaaatcttggtcttcctgttgtaggggaatgttaagactgtcattatcagtgataaatgaacatagtctaccctaaattttgcagtctg

SEQ ID NO: 31424 - DNA, 120 bp, synthetic construct
  source 1..120: mol_type = other DNA
atgcagggaatgccagtcagaatgcaaaattggagtcaataaaatcacaaaagagaattctttgcctcagaatgctcatcctaccttcttgagtcaacccaggacaactttggggtcaac

SEQ ID NO: 31425 - DNA, 120 bp, synthetic construct; identical to SEQ ID NO: 8819
  source 1..120: mol_type = other DNA

SEQ ID NO: 31426 - DNA, 120 bp, synthetic construct
  source 1..120: mol_type = other DNA
gtatttttttctgaaccatttgagagtaagttgcatacaagataccctttacccttaaatccatcagtgcaaattttctaagaacaaaacattcttttacataatatagtacaattatcc

SEQ ID NO: 31427 - DNA, 120 bp, synthetic construct
  source 1..120: mol_type = other DNA
tccttcatgacaattttttcctttggtctaggatctcatttggcatcctgcattgcatttagctgtcgagtctttttagtttcctttaatatgagtacagtaccttaaatgtactttgcc

SEQ ID NO: 31428 - DNA, 120 bp, synthetic construct
  source 1..120: mol_type = other DNA
ctcctgagtagctgggattacaggcgcccaccaccacgcctggctgactttttgtattttagtagagacagggtttcaccatggtgcccaggctggtctcaaactcctgagcttaggcaa

SEQ ID NO: 31429 - DNA, 120 bp, synthetic construct; identical to SEQ ID NO: 8820
  source 1..120: mol_type = other DNA

SEQ ID NO: 31430 - DNA, 120 bp, synthetic construct
  source 1..120: mol_type = other DNA
ctgggctcacggcaacctccttcctcggcctcccaaagctctgggattacaggtgtgtaccaccacacctggccttcaatttttaaacatataataaactgagctgtggtaaatattctt

SEQ ID NO: 31431 - DNA, 120 bp, synthetic construct
  source 1..120: mol_type = other DNA
actcctgcctcagcctcctgagtagctgggattacaggcacatgcctggctgatttttgtatttttagtagagacggggtttcatcatgttatccaggctggtctcgaactcctgacctc

SEQ ID NO: 31432 - DNA, 120 bp, synthetic construct
  source 1..120: mol_type = other DNA
taggctaaattctagaagtgaaacccctgagtgaaagggtgaagacatagacttgttttaaagctcttggtctctatgtgttgccaagccattctccagaaagcagtgaggcctttctac

SEQ ID NO: 31433 - DNA, 120 bp, synthetic construct; identical to SEQ ID NO: 8821
  source 1..120: mol_type = other DNA

SEQ ID NO: 31434 - DNA, 120 bp, synthetic construct
  source 1..120: mol_type = other DNA
aaaatgggaagagacaacaggtttctcatggaaccgcgaagaccttggtggaaagaactgaactcaccatttctgcaatgttgacaatctaacaccatttgtggaaagggaggctggggc

SEQ ID NO: 31435 - DNA, 120 bp, synthetic construct
  source 1..120: mol_type = other DNA
ctgcccacttcttgctttatcctgcttaaggtaaggcagtgtgcacctgctcaggcattatgagctatgcttgggtcccagatacttttcctggcctctaagaccttacagcccaaagca

SEQ ID NO: 31436 - DNA, 120 bp, synthetic construct
  source 1..120: mol_type = other DNA
tcactacagtgaactgcagcatgccagggatacagatagttccctctgggaaatgaccctttttcctacagtatttcatcaaatagagattcattttattaaagggattttctttcattg

SEQ ID NO: 31437 - DNA, 120 bp, synthetic construct; identical to SEQ ID NO: 8822
  source 1..120: mol_type = other DNA

SEQ ID NO: 31438 - DNA, 120 bp, synthetic construct
  source 1..120: mol_type = other DNA
cccaggaggttgaggctgcaacgagccataatcatgccactgcaatccagccagggtgacaaggtgagaccagagtgagaaaaaaaaaaaaaaaaaagaaataagcaagagtaatccact

SEQ ID NO: 31439 - DNA, 120 bp, synthetic construct
  source 1..120: mol_type = other DNA
tgtccatggttattccctgggcctcttctagttttctgtctccctaggtgatctcatccagtctcctggctccctaccagattcagataccatctatgaagaccacctttgtgctgatga

SEQ ID NO: 31440 - DNA, 120 bp, synthetic construct
  source 1..120: mol_type = other DNA
gacctgatcttctcccttaaccttctcttccttcctgatagaattgagttttgcagttctattctttccattgtttaggcccaaatccttgaagatattgctgactcctctctttttctc

SEQ ID NO: 31441 - DNA, 120 bp, synthetic construct
  source 1..120: mol_type = other DNA
atcatgaggtcaggagatcgagaccatcctggctaacaaggtgaaaccccgtctctactaaaaatacaaaaaattagccgggcgcggtggcgggcgcctgtggtcccagctactcgggag

SEQ ID NO: 31442 - DNA, 120 bp, synthetic construct; identical to SEQ ID NO: 8823
  source 1..120: mol_type = other DNA

SEQ ID NO: 31443 - DNA, 120 bp, synthetic construct
  source 1..120: mol_type = other DNA
tgagtcagttgaaatacaagttagaccacctcactcctctgctcaaaagtctccaatcgcttctccactcactcagagtaaagctaactttcctacagggcctgcaaggctctgcacaag

SEQ ID NO: 31444 - DNA, 120 bp, synthetic construct
  source 1..120: mol_type = other DNA
ccgggttcaagcgattctcctgcctcagcctcctgagtagctgggactacaggtgcgtgccaccacgccgggctatttttttgtatttttagtagagatagggtttcaccgtgttagcca

SEQ ID NO: 31445 - DNA, 120 bp, synthetic construct
  source 1..120: mol_type = other DNA
caaggcccttccctctctaacctcatctttgattacttctcaccatccagccccattagcttcctgctgttcttgaaacaggcacattcacaccttagagccttgttcttctcactgcct

SEQ ID NO: 31446 - DNA, 120 bp, synthetic construct
  source 1..120: mol_type = other DNA
cccatttcaaaactggaagccttctctcatgttccccacccccattggcttttctccttattatttctcaccatctaactaacatatatttaatttatatttcttatttactgactgcca

SEQ ID NO: 31447 - DNA, 120 bp, synthetic construct; identical to SEQ ID NO: 8824
  source 1..120: mol_type = other DNA

SEQ ID NO: 31448 - DNA, 120 bp, synthetic construct
  source 1..120: mol_type = other DNA
tgggaaacaagtttctgcttcgattacatcagaaactacagatccagacattctcttatgcctttgctgacattcagtgcagcattcagtaagtactgatgcatgtcatttgcttattta

SEQ ID NO: 31449 - DNA, 120 bp, synthetic construct
  source 1..120: mol_type = other DNA
gaacaaaatagacagataccaagtaaatatgaaatataatatcagatagcgataaggagtatgagatgatataaggcagggtgaggggagagagaacttgggggctactttagattggga

SEQ ID NO: 31450 - DNA, 120 bp, synthetic construct
  source 1..120: mol_type = other DNA
caaaaatgcaaaaatcagccaggcatagtggcacacgcctgtagtctcagctactccagaggctgaggcaggagaaccacttgaacctgggaggtggaggttgcattgagctgaaattaa

SEQ ID NO: 31451 - DNA, 120 bp, synthetic construct
  source 1..120: mol_type = other DNA
gtttgagaccagcctgaccaatatggtgaaaccccatctctactaaaaatacaaaaattagccgggcatagtggtgcacgcctgtagtcccagctactcgggagattgagacaggagaat

SEQ ID NO: 31452 - DNA, 120 bp, synthetic construct; identical to SEQ ID NO: 8825
  source 1..120: mol_type = other DNA

SEQ ID NO: 31453 - DNA, 120 bp, synthetic construct
  source 1..120: mol_type = other DNA
gatttggaatatattttaaaactagagtgggtatagtttgactgaataaggggtacacaggttgggtctccaggaagtggactttgagatttaacccggagctgggatggcccttcagag

SEQ ID NO: 31454 - DNA, 120 bp, synthetic construct
  source 1..120: mol_type = other DNA
agggctgagaggtgagggctgtccttgagcagaagacttgggtaacactgtcaactaactaagcctaacggacatctataaaacactctgctaaacaatagcaggatataccatttttct

SEQ ID NO: 31455 - DNA, 120 bp, synthetic construct
  source 1..120: mol_type = other DNA
agaaatcaacaacaacaggaaatttgagaaaattacaagtgtgtgaaaattaaacagcatgcttctaaacaaccaatgggtggaagaagaaatcacaaggaaaaccagaaaatatttcaa

SEQ ID NO: 31456 - DNA, 120 bp, synthetic construct; identical to SEQ ID NO: 8826
  source 1..120: mol_type = other DNA

SEQ ID NO: 31457 - DNA, 120 bp, synthetic construct
  source 1..120: mol_type = other DNA
caagtgatcctcctgcctcagcttcctggatagctgggactacaggtgcatacaaccacgcttggttaattgttaaattttttttttttttttttttttggtgtggagacagggtctcac

SEQ ID NO: 31458 - DNA, 120 bp, synthetic construct
  source 1..120: mol_type = other DNA
atcctagcactttgagaggccgaggcaggtggatcacttggggccaagagtttgagaccagcctggccaacatggtgaaaccctgtctctaaaaaatgcaaaaattagccgggcatggtg

SEQ ID NO: 31459 - DNA, 120 bp, synthetic construct
  source 1..120: mol_type = other DNA
aagactctgtctcaaaaaaaaaaaaaaaaaaaaaaaaaaaagaaagtggaaattgccttcattaaggaaaaaaacaaacataaaaataacagcaaccataagaaagtgaaaagataaaca

SEQ ID NO: 31460 - DNA, 120 bp, synthetic construct; identical to SEQ ID NO: 8827
  source 1..120: mol_type = other DNA

SEQ ID NO: 31461 - DNA, 120 bp, synthetic construct
  source 1..120: mol_type = other DNA
catttttttcagtctatttttctccgttgtccagattgagtaatttctcttctacctttaagttcgctgaatctttcctctgtcctctccaatctgctgttaagccaatctattgagtct

SEQ ID NO: 31462 - DNA, 120 bp, synthetic construct
  source 1..120: mol_type = other DNA
atcttggctcactgcaacctctgcctcccaggttcaagtgatactcctgcctcagcctcccaagtagctggaattacaggcacctgccaccatgcctggctaactttttgtatttttagt

SEQ ID NO: 31463 - DNA, 120 bp, synthetic construct
  source 1..120: mol_type = other DNA
gctgggattacaggtgtgagccacctcacccggcctgattcttctttatatcttccatttctttgccaaaatttctggttttcatttgtttcaagagagtttgtaattgcttgttaaatg

SEQ ID NO: 31464 - DNA, 120 bp, synthetic construct; identical to SEQ ID NO: 8828
  source 1..120: mol_type = other DNA

SEQ ID NO: 31465 - DNA, 120 bp, synthetic construct
  source 1..120: mol_type = other DNA
gctgtaaagcttttttttttttttgagacagagtctcactcggttgcccaggctggagtgcagcagtgcaatcttggctcactgcaaccttcacctcccaggttcaagtgattctcctgc

SEQ ID NO: 31466 - DNA, 120 bp, synthetic construct
  source 1..120: mol_type = other DNA
aagtgatctgcctacctcggcctcccagaatgctgggattacagatgtgagccaatgtgcctggcctgtgaagcttttttatttttatttttattttttttgagatggagtgttgctctg

SEQ ID NO: 31467 - DNA, 120 bp, synthetic construct
  source 1..120: mol_type = other DNA
gcatccctagtagctgggattacaggcatgcaccaccatgcccagctaatatttgtatgtttagtggagacggggtttcgccatgttggtcaggctggtctcgaactcctgaccttgagt

SEQ ID NO: 31468 - DNA, 120 bp, synthetic construct; identical to SEQ ID NO: 8829
  source 1..120: mol_type = other DNA

SEQ ID NO: 31469 - DNA, 120 bp, synthetic construct
  source 1..120: mol_type = other DNA
ttcctcacctggcctctgtgaacacttgagggagccgtgctccttgttattgctaggtgtggatgggggttcaggcttcccactaggtctctgctgacacaccctggctgagagagtaag

SEQ ID NO: 31470 - DNA, 120 bp, synthetic construct
  source 1..120: mol_type = other DNA
cagctgggtgggagttgatggctaaactccccactcatcctttattggcagatatgggggtgagagtgttgttttttttttttttttttttttttttttttgcctgaaatagagtagtca

SEQ ID NO: 31471 - DNA, 120 bp, synthetic construct
  source 1..120: mol_type = other DNA
tcttgtatatatgaggcaaaagccaaacccagggaactcaccactatattgttttttcgggtcttgagattcctagccagtctgccttctctgcatctttcaggatcttcttatgtttgt

SEQ ID NO: 31472 - DNA, 120 bp, synthetic construct; identical to SEQ ID NO: 8830
  source 1..120: mol_type = other DNA

SEQ ID NO: 31473 - DNA, 120 bp, synthetic construct
  source 1..120: mol_type = other DNA
tgaggcaggagaatcacttgaacccaggaggcggaggttgcggtgagctgagattgcgctgttgcactccagcatgggcaacaagagcaaaactctgtctcaaaaaaaaaaaaaaaaaga

SEQ ID NO: 31474 - DNA, 120 bp, synthetic construct
  source 1..120: mol_type = other DNA
aaatatggtgtgtccctttgggaggctgaggcaggtgcatcacttgaggtcaggagtttgagaccaggctggccaacatggtgaaaccccgtctctactaaaaatacaaaaaatttagct

SEQ ID NO: 31475 - DNA, 120 bp, synthetic construct
  source 1..120: mol_type = other DNA
gtgacagaacaagactctatctcaaaaaaaaaaaaaaaaaaaaaaggtgtgtccatacaatggaatactattcagcaataaaaatgaatgaaatatggatacatgctgcaaaatgaatga

SEQ ID NO: 31476 - DNA, 120 bp, synthetic construct; identical to SEQ ID NO: 8831
  source 1..120: mol_type = other DNA

SEQ ID NO: 31477 - DNA, 120 bp, synthetic construct
  source 1..120: mol_type = other DNA
caagcaattctcttgcctcagcctcccgagtagctgagattacagggggccaccactacacctggctaatttttgtatttttagtagagacggggtttcaccgtgttggccaggctggtc

SEQ ID NO: 31478 - DNA, 120 bp, synthetic construct
  source 1..120: mol_type = other DNA
ataaatctgtgagaggagaggaggtagagacattttgtgttgtagaatttcttaaggaattttgctgtcaagagctgcagagaaagtatgtctagcgagacagcatatgaggtcatgaga

SEQ ID NO: 31479 - DNA, 120 bp, synthetic construct
  source 1..120: mol_type = other DNA
taatcctagcactttgggaggctgaggcaggtggatcacctgaggtcaggagttcaagaccatcctggccaacgtggtgaaaccccgtctctaataaaaaatacaaaaattagccggaca

SEQ ID NO: 31480 - DNA, 120 bp, synthetic construct; identical to SEQ ID NO: 8832
  source 1..120: mol_type = other DNA

SEQ ID NO: 31481 - DNA, 120 bp, synthetic construct
  source 1..120: mol_type = other DNA
tttcagtatcctaaaagataagaactcttaaataatataaccattttgctagtattatttctgaaaagtttacataatttcttaatattatcaaatatgcaatgtttagttttcccaaat

SEQ ID NO: 31482 - DNA, 120 bp, synthetic construct
  source 1..120: mol_type = other DNA
atacagtttgaatcaatatcaaaacaatatccgtgcattgtattcagttgatatgtgtcttaagtctctctttctcttctttgaagtggaattcacattttagaacagttttagatttct

SEQ ID NO: 31483 - DNA, 120 bp, synthetic construct
  source 1..120: mol_type = other DNA
agagaaactgagaggatagtacagagtattcccatgtgccctccctggattcagtgtcccttattaataacatcttacgtgagtgtgggtatatgtgttataattaatgaatcaatattg

SEQ ID NO: 31484 - DNA, 120 bp, synthetic construct
  source 1..120: mol_type = other DNA
ctctactaaaaatacaaaaattagccaggcgtggtggagcacacctgtaattccagctacttgggaggctgaggcaggagaatcacttgaacctgggaagtggaggctgcagtaagctga

SEQ ID NO: 31485 - DNA, 120 bp, synthetic construct; identical to SEQ ID NO: 8833
  source 1..120: mol_type = other DNA

SEQ ID NO: 31486 - DNA, 120 bp, synthetic construct
  source 1..120: mol_type = other DNA
atttttttgtattttgagtagagacggggtttccccatgttggacaggctggtctcgaactcctggcctcaagtgatctgcccgcctcggcctcccaaagtgctggattgcaagcgtgag

SEQ ID NO: 31487 - DNA, 120 bp, synthetic construct
  source 1..120: mol_type = other DNA
gtgtactagtcaggtgttatgcaggctgcccctcttttggaatttgtttggtgattttctcatggttagacttggagcttaagtctctttaaatctttttttacccccttgacatttatt

SEQ ID NO: 31488 - DNA, 120 bp, synthetic construct
  source 1..120: mol_type = other DNA
gatttaaagactttatatgattcatgatctattttctggcaaggctacgtcataggtggtattgtgctgtgtttctatcaggaggcatagaattctagttggtagccatgatgagcattg

SEQ ID NO: 31489 - DNA, 120 bp, synthetic construct
  source 1..120: mol_type = other DNA
cagattatgtcccatctactattttgacatgacttatttaggaaaggcagattgatgccattctttcccctttatttagcagctttcagaataatgagtttgttctctagcatctgccaa

SEQ ID NO: 31490 - DNA, 120 bp, synthetic construct; identical to SEQ ID NO: 8834
  source 1..120: mol_type = other DNA

SEQ ID NO: 31491 - DNA, 120 bp, synthetic construct
  source 1..120: mol_type = other DNA
attttttattttctaagataggaggaataacatatttgcttgctgatgggagtgagccactgcagagggaaaggcggtgtgcaggagatggggtattgctggaggaatggccctgagtag

SEQ ID NO: 31492 - DNA, 120 bp, synthetic construct
  source 1..120: mol_type = other DNA
ggtggatcacctgagtcaggagtttgagaccagcctgggcaacatggtgaaatctcgtctctactaaaaatacaaaattagccgggtgtggtggtgcatgcctgtaatcctagctaattg

SEQ ID NO: 31493 - DNA, 120 bp, synthetic construct
  source 1..120: mol_type = other DNA
aaaaaaagaaagtgaggaggatggaggctgtgtaatgaaatacaagaaagtgtgaaatagttgccttgaaattctgtgagtgagtggccaggaaaatgccgtatacttctttttcttttc

SEQ ID NO: 31494 - DNA, 120 bp, synthetic construct; identical to SEQ ID NO: 8835
  source 1..120: mol_type = other DNA

SEQ ID NO: 31495 - DNA, 120 bp, synthetic construct
  source 1..120: mol_type = other DNA
tgaaaatattgtttgatctttggaggtggacactagagggagtgatctgcaaggacaggaagggggatacttaaaactgagattatggagaggtttcaggtacaggtacaggtaatgaca

SEQ ID NO: 31496 - DNA, 120 bp, synthetic construct
  source 1..120: mol_type = other DNA
tagagaagccacaaagaatggtagcaggagtgggatgaagagaaagacagtgacccagggactgaaaattttagtgaattgtgaagagtgaggagtgactggaaggctgttaaatgctgg

SEQ ID NO: 31497 - DNA, 120 bp, synthetic construct
  source 1..120: mol_type = other DNA
gttaaccaagcttgactatctaccctgtgcttagcaaaaccctccctgccctcacagaatgtatatgtattcattacaaaattgtccttataaagtcaggacatcttcaggacacttcca

SEQ ID NO: 31498 - DNA, 120 bp, synthetic construct
  source 1..120: mol_type = other DNA
cctccctgccctcacagaatgtatatgtattcattacaaaattgtccttataaagtcaggacatcttcaggacacttccagttaatcagacacccccgtcaatccttctagttaactgac

SEQ ID NO: 31499 - DNA, 120 bp, synthetic construct
  source 1..120: mol_type = other DNA
agtggtgcgatcttggctcactgcaacctctgcctcccaggttcaagcgattctcctgccctagcctcccaagtagctgggactataggtgcacaccaccacacctgactaatttttgta

SEQ ID NO: 31500 - DNA, 120 bp, synthetic construct; identical to SEQ ID NO: 8836
  source 1..120: mol_type = other DNA

SEQ ID NO: 31501 - DNA, 120 bp, synthetic construct
  source 1..120: mol_type = other DNA
ggatggtcttgcctctggctttcaaactttttcttttcatcatgtcaaatgtagaggaattttgtccatcaaactcatatctagaatcccaaaatagagaagagatataggatcagcgct

SEQ ID NO: 31502 - DNA, 120 bp, synthetic construct
  source 1..120: mol_type = other DNA
gggaacacagcctggaactgttcacttggtcccatttcttcttttactgaggcccagaggggagacgcgacctgcccaaggtgacacaggcttgggacccatgcccagtgtcctgcttgc

SEQ ID NO: 31503 - DNA, 120 bp, synthetic construct
  source 1..120: mol_type = other DNA
actttggggacaaaagattttctttctttctttctttctttccttccttccttccttccttccttccttctttctttccttccttccttccttcattccttctttccttccttccttcct

SEQ ID NO: 31504 - DNA, 120 bp, synthetic construct; identical to SEQ ID NO: 8837
  source 1..120: mol_type = other DNA

SEQ ID NO: 31505 - DNA, 120 bp, synthetic construct
  source 1..120: mol_type = other DNA
ctggggcggcattactggttatccctttcctggggaggttgacaattaaccctggaaacagtctttaaaatttttactggacacatataattatggattgacaatcttccattttaaatt

SEQ ID NO: 31506 - DNA, 120 bp, synthetic construct
  source 1..120: mol_type = other DNA
tgctggggtctagtatggggaaagaatctattaaaatatatttaaaaaggtaaatccaaaaatttataattacaagagtgaatgacaagatgattgtcaataaaattaaataagcaaaac

SEQ ID NO: 31507 - DNA, 120 bp, synthetic construct
  source 1..120: mol_type = other DNA
gtgtgcgtgtatatttttttttcgttgttgtttctctgcctctctcgccaaactatatggagccctggctaaggatagaggactgtcagatgtgttttcaggggaatcgctgttttcttc

SEQ ID NO: 31508 - DNA, 120 bp, synthetic construct
  source 1..120: mol_type = other DNA
gggggtgggcagcgggtacttggctaggggttcaggacctgtctcagggctgctgtccaggggggtggaggaaggggtagtgaaggggtcagagcactcaagatgcgcagtgtaggcagg

SEQ ID NO: 31509 - DNA, 120 bp, synthetic construct; identical to SEQ ID NO: 8838
  source 1..120: mol_type = other DNA

SEQ ID NO: 31510 - DNA, 120 bp, synthetic construct
  source 1..120: mol_type = other DNA
ccctccaaggctcccagtctaggtgggagagacatacagaacaaatagcatcgtgggggtggtgggaggtggtgtgaacatgtctcctgcaagctctgggaagaagctgtggccacacaa

SEQ ID NO: 31511 - DNA, 120 bp, synthetic construct
  source 1..120: mol_type = other DNA
gttttcttcacattcttcacatcagccacctcctccactccccaccaggatgtcaactgaaacatgtctcagtccaaattctttattccctgcttctgcagctattccctccctccccgc

SEQ ID NO: 31512 - DNA, 120 bp, synthetic construct
  source 1..120: mol_type = other DNA
tttggcagggcctgcatgaatggattaatgtcattataaaaggacttgatggaaagagttcatcccttttgcccttccactccctgccacgtgaggacacagtgttcctcccctccagag

SEQ ID NO: 31513 - DNA, 120 bp, synthetic construct; identical to SEQ ID NO: 8839
  source 1..120: mol_type = other DNA

SEQ ID NO: 31514 - DNA, 120 bp, synthetic construct
  source 1..120: mol_type = other DNA
cgcctcgttttgctattcttcaacttcgcatgtttggattgctacagcttgaggtctttagtgtctggtttccttcgctcccttccacggttctaagattgttttctgcatcctccgtac

SEQ ID NO: 31515 - DNA, 120 bp, synthetic construct
  source 1..120: mol_type = other DNA
ccacgagttactcccccccgcccacggagcaccttctgtccgggcgcctcccaggccgctgctgcttcttggttctgcttccttttctgagacccgctgctttagagaagatttctggag

SEQ ID NO: 31516 - DNA, 120 bp, synthetic construct
  source 1..120: mol_type = other DNA
aatcacattaaaagggcataagattgaagattttataatagttctaatatgttctctgccttctttcctgtctctccagatccctggaggacccctagggctggtgcccctaatctggtg

SEQ ID NO: 31517 - DNA, 120 bp, synthetic construct; identical to SEQ ID NO: 8840
  source 1..120: mol_type = other DNA

SEQ ID NO: 31518 - DNA, 120 bp, synthetic construct
  source 1..120: mol_type = other DNA
tcagggttggacagggcagggcctcttctgcctccagcaccccaggcctctctcctctgattctatcagggacggaggccaaggttggagacccctaggccttttcacctaacttggttt

SEQ ID NO: 31519 - DNA, 120 bp, synthetic construct
  source 1..120: mol_type = other DNA
taaattcgtccccaccactgactgggtcacctacctgggcagtacacatgctgctctcggcaactgtttcttctcctgacacttatgattttatatacaaattgttggaagttatgtcgt

SEQ ID NO: 31520 - DNA, 120 bp, synthetic construct
  source 1..120: mol_type = other DNA
tgagctatataatgactagggctctctttattttggggacagagtgagaacttcttcacttataaggtggctttgtcttgattggtgaaaatagagaattatttcattgttgtataaaag

SEQ ID NO: 31521 - DNA, 120 bp, synthetic construct
  source 1..120: mol_type = other DNA
tactaaaaatacaaaaattagctgggtgtgatggtgggtgcctgtaatcccagctacttgggaggctgaggcaggagaatcgcttgaacccaggaggcagaggttgcagtgagctgagat

SEQ ID NO: 31522 - DNA, 120 bp, synthetic construct; identical to SEQ ID NO: 8841
  source 1..120: mol_type = other DNA

SEQ ID NO: 31523 - DNA, 120 bp, synthetic construct
  source 1..120: mol_type = other DNA
tctttgccattgggcacaacgttagactttgacagtaaattgcactggaaggaatactgcaagacatagcagagaaaacagcttcattctagttctggtacttttttttgagatggagtc

SEQ ID NO: 31524 - DNA, 120 bp, synthetic construct
  source 1..120: mol_type = other DNA
accaccacacctggctaattttgtatttttagtagagacagggtttcaccatgttggccaggctggtctcgaactcctgacctcaggtgatctgcctgccttggcctcccaaagtgctag

SEQ ID NO: 31525 - DNA, 120 bp, synthetic construct
  source 1..120: mol_type = other DNA
gccaggttgatacttgggcactgagcagagtgactagtgtctgtgttttgacatgtgtgtataactcctgttggaatgggaaatgttaatttagttcccccacacaacctgttgggctgc

SEQ ID NO: 31526 - DNA, 120 bp, synthetic construct
  source 1..120: mol_type = other DNA
tctgctcttctggaagcagctgagaaagggaagccataaacctgacaagctggtaaaaagctaatttcttaccagctagcctctggcctttctctctctgtgcaaatgagttgagtgaac

SEQ ID NO: 31527 - DNA, 120 bp, synthetic construct; identical to SEQ ID NO: 8842
  source 1..120: mol_type = other DNA

SEQ ID NO: 31528 - DNA, 120 bp, synthetic construct
  source 1..120: mol_type = other DNA
ctttgtaaccatgtaggggtactctctctcttgatctctgccatctggagggtggaaattcttgggttcaagtcaggtggctggtctgagaggactgggagtctgagacacattagcata

SEQ ID NO: 31529 - DNA, 120 bp, synthetic construct
  source 1..120: mol_type = other DNA
ttgctatcttaaacccatttccaagagggaatacttggggatgcctcctctaggaatacttcttgctgcttatatggcaaaaacctggaaaattaccatctgcaatttaaaaaaggtgtt

SEQ ID NO: 31530 - DNA, 120 bp, synthetic construct
  source 1..120: mol_type = other DNA
agcagttaaaatcattcgcaagcttgaaaatgactgctctagattctttctgggaagagcactggcaaccaccctatgctgtagcacagtagctaaatctctgccctttcactatggtgg

SEQ ID NO: 31531 - DNA, 120 bp, synthetic construct; identical to SEQ ID NO: 8843
  source 1..120: mol_type = other DNA

SEQ ID NO: 31532 - DNA, 120 bp, synthetic construct
  source 1..120: mol_type = other DNA
aaactgatttagaatatatgtgtacagatattgttttaaagcctctgctctctctctgtaaaaacttcttaagcaactgaattctgtctgcttaaattttaatctttgtatgtaaaagct

SEQ ID NO: 31533 - DNA, 120 bp, synthetic construct
  source 1..120: mol_type = other DNA
ctagaaggtatggaatgagggctaagactcccatggagcattaagtgattacagaataggctgattgttatagggttgcccaccagcctcaggggaatgtccttgcagtgaagtgcaccg

SEQ ID NO: 31534 - DNA, 120 bp, synthetic construct
  source 1..120: mol_type = other DNA
taggccatagaaactgcatgctttcctggccctgttccttaaagggctccaccctaaagccagtaattcaattaagaaactaacatctttaaaaaaatttcaatgggcaagtgtgtctgt

SEQ ID NO: 31535 - DNA, 120 bp, synthetic construct; identical to SEQ ID NO: 8844
  source 1..120: mol_type = other DNA

SEQ ID NO: 31536 - DNA, 120 bp, synthetic construct
  source 1..120: mol_type = other DNA
tatgaattttctatttcatttcacttaagaattgtgcctttagaaatgcagatttggagtggcatagctgacaattatttagggcagggaacaggtaatcaggagaaggtccaaaatgag

SEQ ID NO: 31537 - DNA, 120 bp, synthetic construct
  source 1..120: mol_type = other DNA
aatatatgaaaaagctgtaattaatggcttttagaaaaataagcacttaaatattttatcagagaaatatatatatatacatatatattttttaatacagagtctcgctctgttgtcaag

SEQ ID NO: 31538 - DNA, 120 bp, synthetic construct
  source 1..120: mol_type = other DNA
atttttgtatttttagtagggccagggtttcaccttgttggccaggatggtcttgatctcttgacctcgtgatctgcccacctcggccttccaaagtgctgggattataggtgtaagcca

SEQ ID NO: 31539 - DNA, 120 bp, synthetic construct; identical to SEQ ID NO: 8845
  source 1..120: mol_type = other DNA

SEQ ID NO: 31540 - DNA, 120 bp, synthetic construct
  source 1..120: mol_type = other DNA
atgcttcaaggcacagaatagtttgaatcataaaaggcttcctacctccaggaaaagggaagagcagtgtagttaatatttagatttactttgcattgcatttaatggaaaataaagggg

SEQ ID NO: 31541 - DNA, 120 bp, synthetic construct
  source 1..120: mol_type = other DNA
gtcttctagaactaggggaagaattaaggccaaccagcatcaagaaaaataagcaccttgtttactgggtttagtatctgagtcgttttgatgctttagttggaatagaaaccaaattga

SEQ ID NO: 31542 - DNA, 120 bp, synthetic construct
  source 1..120: mol_type = other DNA
agtcgttttgatgctttagttggaatagaaaccaaattgaaaagtgcaatcgatggcgaggaagtaaagagtatggacatgattcctctgaaaagcttggttataaagaaaaggtgcagg

SEQ ID NO: 31543 - DNA, 120 bp, synthetic construct
  source 1..120: mol_type = other DNA
aatacaaaaaattagctgggcatggtggcacgtgcctataattctagctactcagtaggctgaggcaggagaattgcttgattctgagaggcggaggttgcggtgagcttagatcgcacc

SEQ ID NO: 31544 - DNA, 120 bp, synthetic construct; identical to SEQ ID NO: 8846
  source 1..120: mol_type = other DNA

SEQ ID NO: 31545 - DNA, 120 bp, synthetic construct
  source 1..120: mol_type = other DNA
aatcaccaggtgatttggatacatgctcaagtttgaaaatcacttggctagagcacaggtgaagggaaaaactttgtatggaagcaggaatgctacttccactgagatatgagagaagga

SEQ ID NO: 31546 - DNA, 120 bp, synthetic construct
  source 1..120: mol_type = other DNA
gggatggccctaattgcggcaggccataagacatgtagtgtcttctagaactagggaaagaattaaggccaacagcatcaagaaaaataagaactttgtttactgggtttagtacctgag

SEQ ID NO: 31547 - DNA, 120 bp, synthetic construct
  source 1..120: mol_type = other DNA
agagcacaggtgaagggagaaaatttgtatggaaaatctgtatggaagcaggaatgccacttccactgagatatgagataagaatgtaaggtatgatcctctgctgagaatgaggactag

SEQ ID NO: 31548 - DNA, 120 bp, synthetic construct; identical to SEQ ID NO: 8847
  source 1..120: mol_type = other DNA

SEQ ID NO: 31549 - DNA, 120 bp, synthetic construct
  source 1..120: mol_type = other DNA
aaagatattgggttttggttggagagtgagatgctgatgtgtaaggtttcagaagggacctcttagtctcattaaaatgcaaagaaagtatccagtaacaaaggcagagttcaaaacaag

SEQ ID NO: 31550 - DNA, 120 bp, synthetic construct
  source 1..120: mol_type = other DNA
taacaagtaaacaactcctgaaaacttaaaatatgagagctcagaataagtatttaataaaggtttgggaaggtaaaggagaagaaatatcccagcaagtataacaaaaacataaaaaca

SEQ ID NO: 31551 - DNA, 120 bp, synthetic construct
  source 1..120: mol_type = other DNA
ggtgtaatcatgtcctctgtaaatgttgacagttttatgtcttcctttccaatcttttggtttctttttcttatctcattatgttggtaatgaccaaaatacaatgttgaataaaagtga

SEQ ID NO: 31552 - DNA, 120 bp, synthetic construct; identical to SEQ ID NO: 8848
  source 1..120: mol_type = other DNA

SEQ ID NO: 31553 - DNA, 120 bp, synthetic construct
  source 1..120: mol_type = other DNA
gatcttgaactcctgacctccggtgatcagcccacctcagcctcccaaagtgctgggattgcaggtgtgagccactgcacctggccttattcctggtttattaattgtttttttctttaa

SEQ ID NO: 31554 - DNA, 120 bp, synthetic construct
  source 1..120: mol_type = other DNA
ttttgtgacatgtgaaaattatatgaaattcaaatttaagtctccataagtaaagctttattggaacatagccatgttcttcattcatttatgtattgtctatgactgcttttgtgctat

SEQ ID NO: 31555 - DNA, 120 bp, synthetic construct
  source 1..120: mol_type = other DNA
gaaagttaggttcatggatgtgcagaccaagaataagggaaagatctcagccctaactccttcttatacagattttcaataggtccatctttttcaggtttaccctcttaccctagactt

SEQ ID NO: 31556 - DNA, 120 bp, synthetic construct; identical to SEQ ID NO: 8849
  source 1..120: mol_type = other DNA

SEQ ID NO: 31557 - DNA, 120 bp, synthetic construct
  source 1..120: mol_type = other DNA
aagagggggaagagctactggggaggaggaagatgggggaggaagaggatgatggggtggggtggttcagggagtgaataggccgggttgggtgagatgaggctgggtgtatgtgcttga

SEQ ID NO: 31558 - DNA, 120 bp, synthetic construct
  source 1..120: mol_type = other DNA
cagtgggttgagaggagtggggagaagatttagggcgagagaggtgccatcgtgctggggaaggcgggactaggagaggtaaaagaatggggagagaaatgggagggagagaaggaagct

SEQ ID NO: 31559 - DNA, 120 bp, synthetic construct
  source 1..120: mol_type = other DNA
aggggcgcgagggggaacagcgaggggagaaggggtcccgcctcctggccgcgccgccctaggtgtcgccgcctggcggttacgaggaggccgcctcctgcttgccggcctggcggtcct

SEQ ID NO: 31560 - DNA, 120 bp, synthetic construct
  source 1..120: mol_type = other DNA
caaagcggtaggtttccttcctccgcctgcctcttaaataacgtggtatctcgcagtttggctgaaacctgaattaaatgcaatgcttttttgacttttactttctcccagaacaacagt

SEQ ID NO: 31561 - DNA, 120 bp, synthetic construct; identical to SEQ ID NO: 8850
  source 1..120: mol_type = other DNA

SEQ ID NO: 31562 - DNA, 120 bp, synthetic construct
  source 1..120: mol_type = other DNA
cctggatatttcagttgaagatgctgtattcacttgcctcttttgttcctctctgtgagtgctgtggaccatagctgtttctaatcagccatcttggcctggcaatctacagtagtaaat

SEQ ID NO: 31563 - DNA, 120 bp, synthetic construct
  source 1..120: mol_type = other DNA
aggaagcttttgataggaaatgtgttaaacctatagaccgatttgaagagaattgacatctttgttgtcttccagttaaatgacactgcatgtctctccgtttgtttagatctattttta

SEQ ID NO: 31564 - DNA, 120 bp, synthetic construct
  source 1..120: mol_type = other DNA
gcttcctactttttattgctagcatagaggaatacaattgattactattctgtaacattgctaaaaatgtgtttgaagtttcctcggagtattatctctggatataagcttctgggctga

SEQ ID NO: 31565 - DNA, 120 bp, synthetic construct
  source 1..120: mol_type = other DNA
tcctcggagtattatctctggatataagcttctgggctgataggtcttattttttagcagttgaaaaatgttgtgctactttcttcctgttttgggttttttggtgagaaatccactgta

SEQ ID NO: 31566 - DNA, 120 bp, synthetic construct; identical to SEQ ID NO: 8851
  source 1..120: mol_type = other DNA

SEQ ID NO: 31567 - DNA, 120 bp, synthetic construct
  source 1..120: mol_type = other DNA
gtgagctgtgatcatgccaccgcactccagcctgtgtaacagagtgagagcctgtctcaattttttttttttttagcaccctatgccgtctccttctgtaattccagtcacaggaatgtt

SEQ ID NO: 31568 - DNA, 120 bp, synthetic construct; identical to SEQ ID NO: 8852
  source 1..120: mol_type = other DNA

SEQ ID NO: 31569 - DNA, 120 bp, synthetic construct
  source 1..120: mol_type = other DNA
ctttatccatgttcctgcaaaggacacaaactcatccttttttatggctgcatagtattccatgatatatacgtgccacattttctaaatccagtctatcattgatggacatttgggttg

SEQ ID NO: 31570 - DNA, 120 bp, synthetic construct
  source 1..120: mol_type = other DNA
gtatttccagttctagatccttgaggaatcgccacactgtcttccacagtggttgaactaatttacactcccaccaacagtgtaaaagcattcctatttttccacaacctctccagcacc

SEQ ID NO: 31571 - DNA, 120 bp, synthetic construct
  source 1..120: mol_type = other DNA
ttggctgcataaatgtcttcttttgagaagtgtctgttcatatcctttgcccactttttgatgggttttttcttgtaaatttaagttctttgtagattctggatattagccctttgtcac

SEQ ID NO: 31572 - DNA, 120 bp, synthetic construct; identical to SEQ ID NO: 8853
  source 1..120: mol_type = other DNA

SEQ ID NO: 31573 - DNA, 120 bp, synthetic construct
  source 1..120: mol_type = other DNA
gcttgtgtgtgtcaggtttgtcaaagatcagatggttgtagctgtgtggtgttatttctgacgcctccgttctgttccattggtctatatatctgttttggtaccagtactatgctgttt

SEQ ID NO: 31574 - DNA, 120 bp, synthetic construct
  source 1..120: mol_type = other DNA
aagtagtttttttccaattctgtgaagaaagtcagtggtagcttcatgggaatagcattgaatttataaattactttgggctgtgtagccattttcatgatattgattcttcctatccat

SEQ ID NO: 31575 - DNA, 120 bp, synthetic construct
  source 1..120: mol_type = other DNA
ctcttagtagcaattgtgaatgggagttcactcatgatttggctctctgtctattattggtgtacaggaatgcttgtgatttttgcacattgattttgtatcctgagactttgctgaagt

SEQ ID NO: 31576 - DNA, 120 bp, synthetic construct
  source 1..120: mol_type = other DNA
ctttctcttgcctgattgccctggccagaacttccaatactatgttgaataggagtggtgagagagggcatctttgtcttgtgccggttttcaaagggaatgcttccagtttttgcccat

SEQ ID NO: 31577 - DNA, 120 bp, synthetic construct; identical to SEQ ID NO: 8854
  source 1..120: mol_type = other DNA

SEQ ID NO: 31578 - DNA, 120 bp, synthetic construct
  source 1..120: mol_type = other DNA
tgtctctgccaggttttggtatcaggatgatgctggcctcataaaatgagttagggaggagtccctatttttctattgtttggaatagtttcagaaggtatggtaccagttcctctttgt

SEQ ID NO: 31579 - DNA, 120 bp, synthetic construct
  source 1..120: mol_type = other DNA
ttcctggcttagacttgggagggtgtatgtgtccaggaatttatccatttcttctagattttctagtttatttgcatagaggtgtttatagtattctctgatggtagtttgtatttgtat

SEQ ID NO: 31580 - DNA, 120 bp, synthetic construct
  source 1..120: mol_type = other DNA
ctggattcattgatatttttgaagggttttttgtgtctctatctccttcagttctgctctgatcttagttatttcatgtcttctgctagcttttgaatttatttgctgttgcttctctag

SEQ ID NO: 31581 - DNA, 120 bp, synthetic construct; identical to SEQ ID NO: 8855
  source 1..120: mol_type = other DNA

SEQ ID NO: 31582 - DNA, 120 bp, synthetic construct
  source 1..120: mol_type = other DNA
tttagaataagtgcaatgaggtgctgagaagaatgtatagtctgttgatttgaggtggggagttctgtagatgtctgttaggtctgcttggtccagagctgagttcaagtcctgaatatc

SEQ ID NO: 31583 - DNA, 120 bp, synthetic construct
  source 1..120: mol_type = other DNA
ttgggtgcatatatatttaggatagttagctcttcttgctgcattgttccctttaccattatgtaatgcccttctttgtctcttttgatttttattgatttaaagtctgttttatcagag

SEQ ID NO: 31584 - DNA, 120 bp, synthetic construct
  source 1..120: mol_type = other DNA
actgatgggtcttgactctttatccaatttgccagtctgtgtcttttaattggggcatttagcccatttacattaaggttaatattgttatgtgtgaatttgatcctgtcattatgatgc

SEQ ID NO: 31585 - DNA, 120 bp, synthetic construct; identical to SEQ ID NO: 8856
  source 1..120: mol_type = other DNA

SEQ ID NO: 31586 - DNA, 120 bp, synthetic construct
  source 1..120: mol_type = other DNA
ctttctctctggctgcccttaacattttctctttcatttcaaccttggtgaatccgatgattatgtgtcttggggttgctcgtcttgaggattatctttgtggtgttctctgtatttcct

SEQ ID NO: 31587 - DNA, 120 bp, synthetic construct
  source 1..120: mol_type = other DNA
gatttggtcttttcacatagtcccatgtttctttttttttttttgagatggagtctcgctctgtcactgaggttggagtgcagtggtgtgatctcggctcactgcaagctccaccttctg

SEQ ID NO: 31588 - DNA, 120 bp, synthetic construct
  source 1..120: mol_type = other DNA
tggtctcgatctcctgacctcgtgatccacccacctcagcctcccaaagtgctgggattacaggtgtgacccaccgcgccccggcaagtcccatatttcttggaggctttgttcgttcct

SEQ ID NO: 31589 - DNA, 120 bp, synthetic construct; identical to SEQ ID NO: 8857
  source 1..120: mol_type = other DNA

SEQ ID NO: 31590 - DNA, 120 bp, synthetic construct
  source 1..120: mol_type = other DNA
tggaggaggagaggcattctggtttttggaattttcaaccttttcatgctacttttttcccatctttgtggatttatctacctttggtctttgatgttggtgaccttcggatggggtctt

SEQ ID NO: 31591 - DNA, 120 bp, synthetic construct
  source 1..120: mol_type = other DNA
ggctgcaaagcagcaaagattgctgcctgttctttcttctagaagcttcgacccagtggggcacctgtcagatgccagccagagctctcctgtatcaggtgtctgtcggtccaagctaga

SEQ ID NO: 31592 - DNA, 120 bp, synthetic construct
  source 1..120: mol_type = other DNA
gggacgtttaagtctgctataagcccccgactggggttgctgccttttttacagagatgccctgtccagagaggagcaatctggcagtctggccacagcagccttgctgagctgcagtga

SEQ ID NO: 31593 - DNA, 120 bp, synthetic construct; identical to SEQ ID NO: 8858
  source 1..120: mol_type = other DNA

SEQ ID NO: 31594 - DNA, 120 bp, synthetic construct
  source 1..120: mol_type = other DNA
cttgaaacccagggccctggtggggtagtcactggagggaatctcctggtttgtgggtttcgaagactgtgggacaagtgcagtatctgtgctggagttcctcaggctcagaccctcatg

SEQ ID NO: 31595 - DNA, 120 bp, synthetic construct
  source 1..120: mol_type = other DNA
agatgaaccgtgtgcctcagttggaaatgcagaaatcacccaccttctgcctcgatctcgctgggagctgcagactggtgctgttcctattcggccatcttgaatcttgcctgttcattt

SEQ ID NO: 31596 - DNA, 120 bp, synthetic construct; identical to SEQ ID NO: 8859
  source 1..120: mol_type = other DNA

SEQ ID NO: 31597 - DNA, 120 bp, synthetic construct
  source 1..120: mol_type = other DNA
tttaattatactttaagttctaggatatatatgcacaatgtgcaggttagttacatgtctatacatgtgccatgttggtgtgctgcacccattaactcgtcatttaacattaggtatatc

SEQ ID NO: 31598 - DNA, 120 bp, synthetic construct
  source 1..120: mol_type = other DNA
tgtttggttttttgtccttgcgatagtttgctgagaatgatggtttccagcttcatccatgtccctacaaaggacatgaactcatcattttttatggctgcatagtattccatggtgtat

SEQ ID NO: 31599 - DNA, 120 bp, synthetic construct; identical to SEQ ID NO: 8860
  source 1..120: mol_type = other DNA

SEQ ID NO: 31600 - DNA, 120 bp, synthetic construct
  source 1..120: mol_type = other DNA
atttgcatttctccgatggccagtgatcatgagcattttttcatgtgtcttttggctgtgtaaatgtcttcttttgagaagtgtctgttcatatccttcgcccacttgttgatggggttg

SEQ ID NO: 31601 - DNA, 120 bp, synthetic construct
  source 1..120: mol_type = other DNA
tagtttcttttgctgtgcagaagctctttagtttaattagatcccatttgtcaattttggcatttgttgccattgcttttggtgttttagacatgaagtccttgcccatgcctatgtcct

SEQ ID NO: 31602 - DNA, 120 bp, synthetic construct
  source 1..120: mol_type = other DNA
aatggccatactgcccaaggtaatttatagattcaatgccatccccatcaagctaccaatgactttcttcacagaattggaaaaaactactttaaagttcatatggaaccaaaaaagagc

SEQ ID NO: 31603 - DNA, 120 bp, synthetic construct
  source 1..120: mol_type = other DNA
agatatagaccctcagaaataatgccacatatctacaactatctgatctttgacaaacctgacaaaaacaagaaatggggaaaggattccctatttagtaaatggtgctgggaaaactgg

SEQ ID NO: 31604 - DNA, 120 bp, synthetic construct; identical to SEQ ID NO: 8861
  source 1..120: mol_type = other DNA

SEQ ID NO: 31605 - DNA, 120 bp, synthetic construct
  source 1..120: mol_type = other DNA
tagtaggcagtcaacttgtttaggttcagaacacatgtcttgacccatgtttatgggccatgatgcaaatgttaatttagtgttcaaagtctttatggtgctattctggcttgtcctact

SEQ ID NO: 31606 - DNA, 120 bp, synthetic construct
  source 1..120: mol_type = other DNA
tctgatcagtttttaaaatttttttaaaattatttatttatttttgagacagagtcttgctctgttgcccagactggagtgcagtggcacgatcttggctcactgcaacctctgcctcct

SEQ ID NO: 31607 - DNA, 120 bp, synthetic construct
  source 1..120: mol_type = other DNA
tggtcttgatctcctgacctcgtgatccacctgccttggcctcccaaagtgctgggattacaggcatgagccaccacgcccggcctatttatttatttatttattttgagactgagtgca

SEQ ID NO: 31608 - DNA, 120 bp, synthetic construct; identical to SEQ ID NO: 8862
  source 1..120: mol_type = other DNA

SEQ ID NO: 31609 - DNA, 120 bp, synthetic construct
  source 1..120: mol_type = other DNA
tttgattcagaaattacttttttggaaatttaacttcaggaaaaatttagataaatgtgtaaagagacatacatttactgtagtgttggtttaaatgaaaagataaagtccacctacagg

SEQ ID NO: 31610 - DNA, 120 bp, synthetic construct
  source 1..120: mol_type = other DNA
aaaatgaagtatctatctgtatgtatactcaggcattgaagaaagttaatgatttaacttaaatgttaatagcagagtcattttaagggatgaggatggttatagtaattttcacttccc

SEQ ID NO: 31611 - DNA, 120 bp, synthetic construct
  source 1..120: mol_type = other DNA
accagtacagttttaatcttaataagtcttctattgccagtcatttgattcttgtatcttatgctgtcctgcctgagagtagtcctaccaaaaccagttttatctgaggtttttcttttc

SEQ ID NO: 31612 - DNA, 120 bp, synthetic construct; identical to SEQ ID NO: 8863
  source 1..120: mol_type = other DNA

SEQ ID NO: 31613 - DNA, 120 bp, synthetic construct
  source 1..120: mol_type = other DNA
gacccttcatgctgtcctacctctgggcattggctcatattcactccttggaatagacttgatttcaccttttaaaatccacttttatttgcttcatctaacttatgacttcttcaaagc

SEQ ID NO: 31614 - DNA, 120 bp, synthetic construct
  source 1..120: mol_type = other DNA
ttcctcttaagactgagattctttcagtaatttttgaatgattttcatgaaccagctaagcttaactctggagaaacaaagacgaaaaacatctggtttctcacctccaggtgcacagaa

SEQ ID NO: 31615 - DNA, 120 bp, synthetic construct
  source 1..120: mol_type = other DNA
tcccttagtaggtgtttaggaagactttacaaatgagatgacatttgacctgaatcgcaaataagtaggagcttgtcggatggataaaaggtagaatgtgagtccttttaacacctagtc

SEQ ID NO: 31616 - DNA, 120 bp, synthetic construct; identical to SEQ ID NO: 8864
  source 1..120: mol_type = other DNA

SEQ ID NO: 31617 - DNA, 120 bp, synthetic construct
  source 1..120: mol_type = other DNA
ttctcctgcctcagcctgtcatgtagctgggactacaggtgcttgccaccatgcctggctaatttttttttttttttttgtatttttagtagagatggggtttcactgtgttagtcagga

SEQ ID NO: 31618 - DNA, 120 bp, synthetic construct
  source 1..120: mol_type = other DNA
gacacatttcagtgattggcaaagcacctcattaaacttggctgctataatttttcttcttttttcatctcattttctattctctcattttatttttgcctttgtttaatctactctttg

SEQ ID NO: 31619 - DNA, 120 bp, synthetic construct; identical to SEQ ID NO: 8865
  source 1..120: mol_type = other DNA

SEQ ID NO: 31620 - DNA, 120 bp, synthetic construct
  source 1..120: mol_type = other DNA
atcttggctcactgcaacctctgcctcctgggttcaaacaattcttctgcctcagcctcccaagtagctgggattacaggcgtgcaccaccacacccgtctaatttttgtattttagtag

SEQ ID NO: 31621 - DNA, 120 bp, synthetic construct
  source 1..120: mol_type = other DNA
ttttttttttgagacagagtctcgctctgtcatccaggctggaatgcagtggtgcgatctcagctcactgcaagctcaacctcccgggttcacgccattctcctgcctcagcctcctgag

SEQ ID NO: 31622 - DNA, 120 bp, synthetic construct
  source 1..120: mol_type = other DNA
ctcggcctcccaaagtgctgggattacaggcgtgagccaccgcgcccagcccaaagtcaatgttttgaccaagagcaaggctaccacttgttattattaattaattaattaattaattaa

SEQ ID NO: 31623 - DNA, 120 bp, synthetic construct; identical to SEQ ID NO: 8866
  source 1..120: mol_type = other DNA

SEQ ID NO: 31624 - DNA, 120 bp, synthetic construct
  source 1..120: mol_type = other DNA
cacagacaaaattccttattgtcatgatcactacgtataagtttgagttctttcttactttttttttttgagacagagtttcgctcttgtcgcccgggctggagtgcaatggcgtgactt

SEQ ID NO: 31625 - DNA, 120 bp, synthetic construct
  source 1..120: mol_type = other DNA
agacggggttttaccatattggccagactggtctgaactccttatctcaggtgatccaccttatctcaggcgccccccgcgatgcggggagtgagagccagcccctcttcccttgggcct

SEQ ID NO: 31626 - DNA, 120 bp, synthetic construct
  source 1..120: mol_type = other DNA
agtttgataatttttatttttaaaatgtggcatttcttgtccaacaggaaaatatcacaatcctaaatatatatgcacctaacactggcgctcccaaatttataaaacaattactactag

SEQ ID NO: 31627 - DNA, 120 bp, synthetic construct; identical to SEQ ID NO: 8867
  source 1..120: mol_type = other DNA

SEQ ID NO: 31628 - DNA, 120 bp, synthetic construct
  source 1..120: mol_type = other DNA
agctccaaaaggaacctttaaaaccacgcaaatacatggaaattaaataacctgctcctgaatgatcattgggtcaacaatgaaatcaagatgaaaattaaaaaattattcaagctgaat

SEQ ID NO: 31629 - DNA, 120 bp, synthetic construct
  source 1..120: mol_type = other DNA
aggtcacacctcaaggaactagagaaacaagaaccaagcccaaagccagcagaagaaaggaaataacccagatcagagcagagctaaatgaaattgaaacaaaaaaatacagaagtgaaa

SEQ ID NO: 31630 - DNA, 120 bp, synthetic construct
  source 1..120: mol_type = other DNA
accacagaaatacaaaagatcatttgaggctactatgaacacctttatgtgcataaactagaaaacctggaggagatcgatacattcctgggaagagaaaaccctcctaccttaaatcag

SEQ ID NO: 31631 - DNA, 120 bp, synthetic construct; identical to SEQ ID NO: 8868
  source 1..120: mol_type = other DNA

SEQ ID NO: 31632 - DNA, 120 bp, synthetic construct
  source 1..120: mol_type = other DNA
accatgatcaagtgggtttcatagcagggatgcagggatggtctaacatatgcacgtcaataaatgtaatacaccacataaacaattaaaaacaaaaatcacatgatcatctcaatagac

SEQ ID NO: 31633 - DNA, 120 bp, synthetic construct
  source 1..120: mol_type = other DNA
ataatactgaatggggaaaagttgaaagcattccctctgagaattggaacaagacaaggatgcccactttcaccacttcaacatagtactggaagtcctagccagagcaatcagacaaga

SEQ ID NO: 31634 - DNA, 120 bp, synthetic construct; identical to SEQ ID NO: 8869
  source 1..120: mol_type = other DNA

SEQ ID NO: 31635 - DNA, 120 bp, synthetic construct
  source 1..120: mol_type = other DNA
caaacaaatggaaacacaccccatgctcgtggatgggtagaatcaatattgtgaaaatgaccatactgccaaaagcaatctacaaattcaatgcaattcccatataaataccagcatcat

SEQ ID NO: 31636 - DNA, 120 bp, synthetic construct
  source 1..120: mol_type = other DNA
aactatactgtaaggccatagtcaccaaaacaggatagtactggtataaaaatagggacaaagaccaatggaacagaatagagaacccagaaataaacccaaatacttacagccagctga

SEQ ID NO: 31637 - DNA, 120 bp, synthetic construct
  source 1..120: mol_type = other DNA
atacaaaaatcaactcaagaaggactaaggacttaaatctaagacctgaaactataaaaattctagaaggtaacattggaaaaacccttgtagacattggcttaggcaaggatttcatga

SEQ ID NO: 31638 - DNA, 120 bp, synthetic construct; identical to SEQ ID NO: 8870
  source 1..120: mol_type = other DNA

SEQ ID NO: 31639 - DNA, 120 bp, synthetic construct
  source 1..120: mol_type = other DNA
ctctgaatcagggtttttctaaagaaatctttcagaatcagcaaaagtggggatgacccaggcatcttgatttgcaaagtcacaaaactaagttgtcaattatcactgtagatgagcaac

SEQ ID NO: 31640 - DNA, 120 bp, synthetic construct
  source 1..120: mol_type = other DNA
aaattacattatctgaaataacatacagctactaaactgctttgtattctattaagaaatagctcctaaagatgtagtcttgtttcatagttgtaagcccaattcttctctgtatagaaa

SEQ ID NO: 31641 - DNA, 120 bp, synthetic construct
  source 1..120: mol_type = other DNA
gttctgaggtggcaatagcacatgggaagatgaactttccctgtttgtttacccgtttttctttggctgtatctgatgacagtataagatgttcttaataaagttttatgttctttttga

SEQ ID NO: 31642 - DNA, 120 bp, synthetic construct; identical to SEQ ID NO: 8871
  source 1..120: mol_type = other DNA

SEQ ID NO: 31643 - DNA, 120 bp, synthetic construct
  source 1..120: mol_type = other DNA
catttgcagcaatctggatgggattggacactattctaagtgaagtaactcaggaatggaaaaccaaacatcatatgttctcactcataagtgggaactaaactatgaggatgcaaagcc

SEQ ID NO: 31644 - DNA, 120 bp, synthetic construct
  source 1..120: mol_type = other DNA
tactgcttgggtgatgggtgcatcaaagtctcacaaatcaccgctaaagaacttactagtgtaaccaaataccacctgtccccctaaaacctatggaaataataaataaataaataaaaa

SEQ ID NO: 31645 - DNA, 120 bp, synthetic construct
  source 1..120: mol_type = other DNA
gtattatatgttttcttatgtttttggcctcctatttgtttattgagaccgcatctggctctgttacccaggctggtgtgcagtggtgtggtctctcttgcaacctccacctcccaggct

SEQ ID NO: 31646 - DNA, 120 bp, synthetic construct; identical to SEQ ID NO: 8872
  source 1..120: mol_type = other DNA

SEQ ID NO: 31647 - DNA, 120 bp, synthetic construct
  source 1..120: mol_type = other DNA
caaataaaaattgtatacaattatcatgtataacatgatgtcttgaaatacgtatacatcacagaatgctaaatcatgctaattaacatatatcagctcatatacttatcctttttttat

SEQ ID NO: 31648 - DNA, 120 bp, synthetic construct
  source 1..120: mol_type = other DNA
ttttgtatcctttgacaaacaactccccaattcccccattttctgtcccccatttccctgctcccagtacctggtaaccaccattctactctctgcttcttcgttcaactttttaagatt

SEQ ID NO: 31649 - DNA, 120 bp, synthetic construct
  source 1..120: mol_type = other DNA
ctgaatagtattccactacatacatacatatatatatatatatatatatatatatatatatatatatatatatatatatcacattttctttatccatttgatgcaggacagacatgcccc

SEQ ID NO: 31650 - DNA, 120 bp, synthetic construct; identical to SEQ ID NO: 8873
  source 1..120: mol_type = other DNA

SEQ ID NO: 31651 - DNA, 120 bp, synthetic construct
  source 1..120: mol_type = other DNA
aatgagtagtgggggcaactagggattgcttttgttaccatctgctagtttctgctgtttttttcacttatcctgtcagtactaggaaataagtcctgccagtctcctacctcattcccc

SEQ ID NO: 31652 - DNA, 120 bp, synthetic construct
  source 1..120: mol_type = other DNA
gtccctgcccaaatcttatgtcaaattttaatccccaatgtcggaggaggggcctggtgggaggtgattggatcaagggggtggagttcccctttgccattcttatgatactgagttctc

SEQ ID NO: 31653 - DNA, 120 bp, synthetic construct
  source 1..120: mol_type = other DNA
aggcctccccagaacatgtacagcctgcagaactgtgagccaattaaacctcttttctttataaattacccagtttcaggcatttctttatagcaatgtgagaacggactaacacagaaa

SEQ ID NO: 31654 - DNA, 120 bp, synthetic construct; identical to SEQ ID NO: 8874
  source 1..120: mol_type = other DNA

SEQ ID NO: 31655 - DNA, 120 bp, synthetic construct
  source 1..120: mol_type = other DNA
aggaaaagcaaagttcaaagaaagaatgcttaagaatttttcaaaattgatgaaagacattactgtaaagttttaagatgcaccctcctaaagcaggaataatgaaaatggactggacac

SEQ ID NO: 31656 - DNA, 120 bp, synthetic construct
  source 1..120: mol_type = other DNA
aaaggccaaaaggcaatggataacatcttcaattagctgagaaaatacattgagttccttattcagcaaaactgttattttacaatgaaggcgaagttaatttttctggcaaaagtccaa

SEQ ID NO: 31657 - DNA, 120 bp, synthetic construct
  source 1..120: mol_type = other DNA
tcgagaccagcctggccaacatggtgaaaccctgtttctattaaaaatagaaaaattagctgggtatggtggcacatatctgtagtcccagatactcgggaggctgaggtgggagaatcg

SEQ ID NO: 31658 - DNA, 120 bp, synthetic construct; identical to SEQ ID NO: 8875
  source 1..120: mol_type = other DNA

SEQ ID NO: 31659 - DNA, 120 bp, synthetic construct
  source 1..120: mol_type = other DNA
aagcacttggtaaggtgtcataaacaaaactgagtaaatcagtaatcatcataaatacaaatggtttaaacttgccccttaaaagatctatactctaagacagggaaaaaggatccagtt

SEQ ID NO: 31660 - DNA, 120 bp, synthetic construct
  source 1..120: mol_type = other DNA
tttgaaataaagaatactggaagttcctgggaaagatggctgaataggaacagctctggtctgcagctcccagtgagaccaatgcagaaggcgggtgatttctgcatttccaactgaggt

SEQ ID NO: 31661 - DNA, 120 bp, synthetic construct
  source 1..120: mol_type = other DNA
agccaaggggagccatgagggactgtgctatccggaccagggactgtgctatctggaccagatactatgcttttcccatggtttttgcaacccacagaccaggagattcccttgtgtgcc

SEQ ID NO: 31662 - DNA, 120 bp, synthetic construct; identical to SEQ ID NO: 8876
  source 1..120: mol_type = other DNA

SEQ ID NO: 31663 - DNA, 120 bp, synthetic construct
  source 1..120: mol_type = other DNA
ggactttgcagaattcactgcagtgcagcaaagcagctgtggccagactgcctctctagattcctcctcaatgggcagggcatctttgaaagaaaggcagccccagtcaggggcttatat

SEQ ID NO: 31664 - DNA, 120 bp, synthetic construct
  source 1..120: mol_type = other DNA
cagtgcttgagctctgctaagggacagactgcctcctcaagtgggtccctgacccccatgcctcctaactggaagacacctcccatcagtggttgacagacacctcatacaggagagctc

SEQ ID NO: 31665 - DNA, 120 bp, synthetic construct
  source 1..120: mol_type = other DNA
ctccagtaaactccagcaggcctgcagaagagggtcctgactgttagaaggaaaaccaaaaaacagaaagcaataacatcagctgggcatggtggtttattcccagaactttgggaagct

SEQ ID NO: 31666 - DNA, 120 bp, synthetic construct; identical to SEQ ID NO: 8877
  source 1..120: mol_type = other DNA

SEQ ID NO: 31667 - DNA, 120 bp, synthetic construct
  source 1..120: mol_type = other DNA
aaaaccagtgcaaaaatgccgaaaattccaaaaaccagaatgcctcttctccttcaaatgattgcaatgcctctccagcaagagcacaaaactggacagagaatgagtttgacgaactga

SEQ ID NO: 31668 - DNA, 120 bp, synthetic construct
  source 1..120: mol_type = other DNA
taactagtttagagaagaacataaatgacctaatggaggtgaaaaaacacagcacaagaacttcgtgaagtgtacacaagtatcaatagccaaattgatcaagtggaagaaaggatatca

SEQ ID NO: 31669 - DNA, 120 bp, synthetic construct
  source 1..120: mol_type = other DNA
tgatcggtgtacctgaaagtgacaggaagaatggaaccaagttggaaaacaagcttcaggatgttatccaggaaaacttccccagcttagcaagacaggccagcattcaaattcaggaaa

SEQ ID NO: 31670 - DNA, 120 bp, synthetic construct; identical to SEQ ID NO: 8878
  source 1..120: mol_type = other DNA

SEQ ID NO: 31671 - DNA, 120 bp, synthetic construct
  source 1..120: mol_type = other DNA
cactaaatatggaaaggaaaaaccagtaccagccactgcaaaaacacaccaaaatataaagaccaacgacactatgaagaaactgcaccaactaatatgcaaaataaccaactagcacca

SEQ ID NO: 31672 - DNA, 120 bp, synthetic construct
  source 1..120: mol_type = other DNA
gtattcaggagacccatctcatgtgcaaagatacacataggttcaaaataaagggatggaggaatatttaacaagcaaatggaaagaaaaaaaaaagcaggggttgcaatcttagtctct

SEQ ID NO: 31673 - DNA, 120 bp, synthetic construct
  source 1..120: mol_type = other DNA
gagcacccagattcataaagcaagttcctagagacctataaagagacttagactcccacacaataataataattcctggacacatacactctcccaagactaaacctggaagaagttgaa

SEQ ID NO: 31674 - DNA, 120 bp, synthetic construct
  source 1..120: mol_type = other DNA
agctggtaccattccttctgaaactattccaaacaataaaaaaagagggactcctccctaactcattttatgaggccagcgtcatcctgataccaaaacctaacagagacacaacaaaaa

SEQ ID NO: 31675 - DNA, 120 bp, synthetic construct; identical to SEQ ID NO: 8879
  source 1..120: mol_type = other DNA

SEQ ID NO: 31676 - DNA, 120 bp, synthetic construct
  source 1..120: mol_type = other DNA
tggaagcattccatttgaaaactagcacgagacaaagatgccctctctcaccactcctgttcaacatagtgttggaaaatctggccggggcaatcaagcaagagaaagcaataaagagta

SEQ ID NO: 31677 - DNA, 120 bp, synthetic construct
  source 1..120: mol_type = other DNA
tctcaggatacaaaattaatgtgcaaaaatcacaagcattctatataccaataatagacaaagagagccaaatcatgagtgagctcacaattgctacaaagagaataaaacacctagaaa

SEQ ID NO: 31678 - DNA, 120 bp, synthetic construct
  source 1..120: mol_type = other DNA
atattgtgaaaatggccatatggcccaaagtaatttatagattcaatgctattcccatcaggctaccattgactttcttcacagaattagaaaaaacgacttcaaatttcatatggaacc

SEQ ID NO: 31679 - DNA, 120 bp, synthetic construct; identical to SEQ ID NO: 8880
  source 1..120: mol_type = other DNA

SEQ ID NO: 31680 - DNA, 120 bp, synthetic construct
  source 1..120: mol_type = other DNA
cgtaaaaactctagaaaaaaacctaggcaataccattcaggacataggcatgggcaaaaaagatttcatgactaaaacaccaaaagcaatggcaacaaaagccaaaattgacaaatggga

SEQ ID NO: 31681 - DNA, 120 bp, synthetic construct
  source 1..120: mol_type = other DNA
gaacctacagggaacttaacaaatttacaagaaaacaaaacaacctcatcaaaaagtgggcaaaggatatgaacagacacttctcaaaagaagacatttatgtggccaagaaacatatga

SEQ ID NO: 31682 - DNA, 120 bp, synthetic construct
  source 1..120: mol_type = other DNA
ctgtggagaaataggaacacttttacactgttgatgggagtgtaaattagttcaaccattgtggaagacagtgtggtgattcctcaaggatctagaaccagaaataccatttgacccagc

SEQ ID NO: 31683 - DNA, 120 bp, synthetic construct; identical to SEQ ID NO: 8881
  source 1..120: mol_type = other DNA

SEQ ID NO: 31684 - DNA, 120 bp, synthetic construct
  source 1..120: mol_type = other DNA
gaggggcaagaggagggagagcattaggacaaatacctaatgcaggtggggcttaaaacctagatgacaaattgatgggtgcagcaaaccaccatggcacgtgaatacttatgtaacaaa

SEQ ID NO: 31685 - DNA, 120 bp, synthetic construct
  source 1..120: mol_type = other DNA
acagaacaaatactaaaaatgcataaatgtaaattgtatgaagcaaaattgtatctctttacacagtatactaagaaatccaagaaatggccagaaaattattagtaatgatatgagagt

SEQ ID NO: 31686 - DNA, 120 bp, synthetic construct
  source 1..120: mol_type = other DNA
gtaaatataacaagaactaatatgaagaagtctgtaaacttttcagaaagcaccaattgtaaagtcttgtgaaagcaccaatatgaagacctaaaccaatgaagactcatacaacatttc

SEQ ID NO: 31687 - DNA, 120 bp, synthetic construct; identical to SEQ ID NO: 8882
  source 1..120: mol_type = other DNA

SEQ ID NO: 31688 - DNA, 120 bp, synthetic construct
  source 1..120: mol_type = other DNA
aaagtcttaggatactgaacatctgtgatttatacctgaaaagaataaatcgcaataaatcattggatttcttgatccacccagaactcgtttttgacccttggagggcaatgtggcccc

SEQ ID NO: 31689 - DNA, 120 bp, synthetic construct
  source 1..120: mol_type = other DNA
ggattaaatatttaattgaagagaaatagaaaataaaaattataaaagagaaaaaaattaagtgactataaatatgtgtaccatagtagtcaaggagaccatttatttatttatttattt

SEQ ID NO: 31690 - DNA, 120 bp, synthetic construct
  source 1..120: mol_type = other DNA
tagtgagcatagtagccaacaggtagattttcaaccctcatcctcctctcttcttcccctctcttcttgtctccagtatctattgttcccatctttatgttcatgtgtacccaatgttta

SEQ ID NO: 31691 - DNA, 120 bp, synthetic construct; identical to SEQ ID NO: 8883
  source 1..120: mol_type = other DNA

SEQ ID NO: 31692 - DNA, 120 bp, synthetic construct
  source 1..120: mol_type = other DNA
gctgaactaacttacattctcattaatcatgtatatgcattccaaagagaccctttagaaagcccagaagtttccgaggataaggcagacatatttgactagatgaaatatatttttgta

SEQ ID NO: 31693 - DNA, 120 bp, synthetic construct
  source 1..120: mol_type = other DNA
agtttacattcttgtggggcagaaagtcaataaacaaaaataaatatatgatgtcaggtgataaatgctagtaataaagatacatcagggcaaagagatagagaatggggggtactgttt

SEQ ID NO: 31694 - DNA, 120 bp, synthetic construct
  source 1..120: mol_type = other DNA
gaggaggccagtgtggctgcatcaatggaagggagatggagagtgggtgatgaggctagaggagaagccagaagctagatactgtaaggccttcaaggccaggataagaactttcatgaa

SEQ ID NO: 31695 - DNA, 120 bp, synthetic construct; identical to SEQ ID NO: 8884
  source 1..120: mol_type = other DNA

SEQ ID NO: 31696 - DNA, 120 bp, synthetic construct
  source 1..120: mol_type = other DNA
ttacgctgatgggggttggtctttggagagttttgagtagagaagtgacttcatctgatttatattttgaaagcacgattccgttgggagtggggagtgggattgggaagctcagtttgg

SEQ ID NO: 31697 - DNA, 120 bp, synthetic construct
  source 1..120: mol_type = other DNA
gaaagaatgagtagattgggaaaacattttcaacacaaatggcagataaaaacttaatatgcaaaaacacataaaactgagtaagacaaagggcaaaccaccagtttgaaaagcaattaa

SEQ ID NO: 31698 - DNA, 120 bp, synthetic construct
  source 1..120: mol_type = other DNA
aaagaaacagttagataccacttttctcaatagacaaagattaaaaatagctaccgcttccagcaccagtgcaagtatggggaagataggactctcatatcttcctgtaggaatatgaat

SEQ ID NO: 31699 - DNA, 120 bp, synthetic construct; identical to SEQ ID NO: 8885
  source 1..120: mol_type = other DNA

SEQ ID NO: 31700 - DNA, 120 bp, synthetic construct
  source 1..120: mol_type = other DNA
aaattcctacatatactcatatttgcatatatttttatataaacatggattaagatgtggagagattcatagaaacttaacactgtgagtttttaatttttgaagagagaaacttaataa

SEQ ID NO: 31701 - DNA, 120 bp, synthetic construct
  source 1..120: mol_type = other DNA
gtcttggcaagtgctcaagcttctggatgatgatagataagagtgtctttattcctgaaacactaagattacaggcttgtatttcttcaaaaccacaattggaacttctcaagtagagtg

SEQ ID NO: 31702 - DNA, 120 bp, synthetic construct
  source 1..120: mol_type = other DNA
tggatcctgttttttccttctatatcttgtcccctttctcggttccctgtattcacttccttgatatgtcagttataacctagggtgagagatatttaggggaaaatgggaaattgcatt

SEQ ID NO: 31703 - DNA, 120 bp, synthetic construct
  source 1..120: mol_type = other DNA
acctctgcctcccgggttcaagcaattctcctgcctcagcctcctgagtagctgggactacaggtgtgcaccaccacgcctggctaatttttgtatttttagtagagacgggtttcccca

SEQ ID NO: 31704 - DNA, 120 bp, synthetic construct; identical to SEQ ID NO: 8886
  source 1..120: mol_type = other DNA

SEQ ID NO: 31705 - DNA, 120 bp, synthetic construct
  source 1..120: mol_type = other DNA
taattgaattgacttctattccattcttgtgaacaggacatttgacatttgtattagtttatttgcaaaacaaaatttactattgatttcttaaggtaagtttcacattcctacttttat

SEQ ID NO: 31706 - DNA, 120 bp, synthetic construct
  source 1..120: mol_type = other DNA
agcttgtcctttctcccttgtttgtttggggtcctttaagatttccacatgtgtatctttacaggagggttaacaattgctttaaatttgtcagtttttcagtggcctttagaaaatggt

SEQ ID NO: 31707 - DNA, 120 bp, synthetic construct
  source 1..120: mol_type = other DNA
ctatagatctatctcttctgaattcttgcttcagtgggacatacacacagatatggagtcagctgagctgggttgctgaagcctatctactgttttttagtaattgccttgacaaggtcc

SEQ ID NO: 31708 - DNA, 120 bp, synthetic construct
  source 1..120: mol_type = other DNA
atcacctgaggtcaggagtttgagaccagcctggacaacatggtgaaaccccatctctactaaaaatacactaattagctgggcttggtggtgcactcctgtaatcccagctacttagga

SEQ ID NO: 31709 - DNA, 120 bp, synthetic construct; identical to SEQ ID NO: 8887
  source 1..120: mol_type = other DNA

SEQ ID NO: 31710 - DNA, 120 bp, synthetic construct
  source 1..120: mol_type = other DNA
ctcactctctctctctctggcaactcagttttgctaaacctgtgcagctcatcaaagacctgaggattctgtgacttctaaaattaacataggcttccatacctgcggcagggctgtgag

SEQ ID NO: 31711 - DNA, 120 bp, synthetic construct
  source 1..120: mol_type = other DNA
ctgaaacatttatgaaacattttatactttgggcagagactaatgtctggtttctctccttttttcatcaaacgcctccaaagaatagcatatcagtatgaaaagcttccttggaagaca

SEQ ID NO: 31712 - DNA, 120 bp, synthetic construct
  source 1..120: mol_type = other DNA
attccaattactcagctgtttcctgagtctcctctatggcattctcactgaatgagccttaaactcttgcttaaactctttggacctccacttctccttattactaagataaaatttgtt

SEQ ID NO: 31713 - DNA, 120 bp, synthetic construct; identical to SEQ ID NO: 8888
  source 1..120: mol_type = other DNA

SEQ ID NO: 31714 - DNA, 120 bp, synthetic construct
  source 1..120: mol_type = other DNA
tgcttaccttccttctcctagcttcctttctttggaaagtgctctttagaagttcattagtcagctccaaatagcaactacagtgttctttcagtccttattttccttgaagtctcagtc

SEQ ID NO: 31715 - DNA, 120 bp, synthetic construct
  source 1..120: mol_type = other DNA
tccttggacttctgctttcgttggtcctgtacttcctcctttgaagaactcactcttattgcttcaattgttacctgtactcatctaattccagatatctcttgaatgacaaatgttatt

SEQ ID NO: 31716 - DNA, 120 bp, synthetic construct
  source 1..120: mol_type = other DNA
agttttgaaaccattgtttttttcacttttccttactcctatgcagtcagtcatcatgaagtaatgattcttctttgatttttttcctatttattctctttccattacttactccaagta

SEQ ID NO: 31717 - DNA, 120 bp, synthetic construct; identical to SEQ ID NO: 8889
  source 1..120: mol_type = other DNA

SEQ ID NO: 31718 - DNA, 120 bp, synthetic construct
  source 1..120: mol_type = other DNA
actcagcatatcaacaccttatccatctgctgtgacatattgtataccactactcccttccccatgaagttaccacctctactttctcatcccatgatggattatgttgtccatctaaac

SEQ ID NO: 31719 - DNA, 120 bp, synthetic construct
  source 1..120: mol_type = other DNA
gagctttgacttgtgtttttctgtacaccccttattgctagaccagtgccttgcaaacattaggcttgccatgaggagttactggttgattggttggaaaggctatcatagacatacttg

SEQ ID NO: 31720 - DNA, 120 bp, synthetic construct
  source 1..120: mol_type = other DNA
tgtggctgagagattaaaaagggtgaaacttctgaagagcagaaactgtgatatgaagatgaaagggattttataattgtaatctgtttaggcaatggctgggatatggtttgtatctgg

SEQ ID NO: 31721 - DNA, 120 bp, synthetic construct
  source 1..120: mol_type = other DNA
ccttcctgtatttgccttcgcccttttcgagccttttgatttttcaccattgatttctgattctctctttcctttaactttgtcctttcctttgtcaccttttgtgtttttgtcaccttt

SEQ ID NO: 31722 - DNA, 120 bp, synthetic construct; identical to SEQ ID NO: 8890
  source 1..120: mol_type = other DNA

SEQ ID NO: 31723 - DNA, 120 bp, synthetic construct
  source 1..120: mol_type = other DNA
gtcctttcagtacaactgactccctcttctttacctgggcttcctgtccctttgagacaccagactgactcttctttacttgggattcctgtcttcttggcacacccatctcactcttct

SEQ ID NO: 31724 - DNA, 120 bp, synthetic construct
  source 1..120: mol_type = other DNA
ctgacacacttttctttatttgggctccctgtccttgtggtatactcatctcactgatttttagttgggtttcctgtctttttggtattccagcgtcactgtctaccttgacctccattc

SEQ ID NO: 31725 - DNA, 120 bp, synthetic construct
  source 1..120: mol_type = other DNA
tttcttctcggctattctgagaccttgcagtgcctccacattttagaatctggattttggaacaagatttttttgcaagttcttcatccatgtaacctgttaatataactgagcatacaa

SEQ ID NO: 31726 - DNA, 120 bp, synthetic construct; identical to SEQ ID NO: 8891
  source 1..120: mol_type = other DNA

SEQ ID NO: 31727 - DNA, 120 bp, synthetic construct
  source 1..120: mol_type = other DNA
agacagaaaaaggaaactcaaaaatgctttccatattgaataaaagcatatcttattatgcaaaagtaataacagtactagctgataattattaagtgcttaccacataccaagtactca

SEQ ID NO: 31728 - DNA, 120 bp, synthetic construct
  source 1..120: mol_type = other DNA
aggttatgtaatcagtaggtggtggagctgggatttgaatctgagtagtcagactccagtgttcagttttgatcattactgtagactacttcttgcaatatctgcaaactctgcaaaaat

SEQ ID NO: 31729 - DNA, 120 bp, synthetic construct
  source 1..120: mol_type = other DNA
agtaatatggttccctgaattaagtaaaagaaatatctgagccaccaaggaattgtgtgggttcttgccgtggagcagagggatgtcttgctttgagaaaatctaatatttaatatttac

SEQ ID NO: 31730 - DNA, 120 bp, synthetic construct
  source 1..120: mol_type = other DNA
gagttggagaccagcctggccaacatggtgaaacctgatctctactaaaaatacaaaaattagccaggcatggtggcacacacctgtaaccccagctactcatgaggctgaggcaggaga

SEQ ID NO: 31731 - DNA, 120 bp, synthetic construct; identical to SEQ ID NO: 8892
  source 1..120: mol_type = other DNA

SEQ ID NO: 31732 - DNA, 120 bp, synthetic construct
  source 1..120: mol_type = other DNA
ttactaaatattgtagacaaatgttaaagtaacatagcctttggagacagactggttcaaatcctgcctccgcacctgcctagctgggtgacctttggcaaactttactttctgtctgta

SEQ ID NO: 31733 - DNA, 120 bp, synthetic construct
  source 1..120: mol_type = other DNA
agtgcatgggacataagtagtcaataaatattggccattactacttcccaatgagatagtacaggaaaaaactctctaattcaatcaagacaaggcattcttagtttccaacaaataatt

SEQ ID NO: 31734 - DNA, 120 bp, synthetic construct
  source 1..120: mol_type = other DNA
tttgcctcccgagttcaagggattctcctgcctcagcctcccaagtagctgggattacaggcatgtgccaccacacccggctaattttgtatttttagtagagatggggtttctccatgt

SEQ ID NO: 31735 - DNA, 120 bp, synthetic construct
  source 1..120: mol_type = other DNA
gccaccacacccagccaattacaggaaaatttcttgcttaaaagtgaattattggacttttcgttttttacatttagggtttgatgtttgaaaaattggcatacacataacttcagaatt

SEQ ID NO: 31736 - DNA, 120 bp, synthetic construct; identical to SEQ ID NO: 8893
  source 1..120: mol_type = other DNA

SEQ ID NO: 31737 - DNA, 120 bp, synthetic construct
  source 1..120: mol_type = other DNA
tggtggtgtggaatggtaagatcatgctccgctgaagtttctaaccttaagaatttcatggaatgtactcctcacataagctgattttccttaagctatgaatatttttagttttactat

SEQ ID NO: 31738 - DNA, 120 bp, synthetic construct
  source 1..120: mol_type = other DNA
gcacccagtgtttattctagctacacctttcctaatttcacagaattaaaaaactttttattctttctcccactacactgaaaaatacctctagttacttctaatagaatcttcataccc

SEQ ID NO: 31739 - DNA, 120 bp, synthetic construct
  source 1..120: mol_type = other DNA
taatctagctatcccataaagtgaggttcacttttatttcaactttgcattgcagaagtaagccacaaatcattattccaccacattctaagttcttttcttccttctcccagatttcaa

SEQ ID NO: 31740 - DNA, 120 bp, synthetic construct
  source 1..120: mol_type = other DNA
ttggaagccctggctgcaagtacatttattgcaggcagtagcccatactacaaaattttaatacaatcaaaagatttaatcaagactttggggatcatcataatatattcaagctgaata

SEQ ID NO: 31741 - DNA, 120 bp, synthetic construct; identical to SEQ ID NO: 8894
  source 1..120: mol_type = other DNA

SEQ ID NO: 31742 - DNA, 120 bp, synthetic construct
  source 1..120: mol_type = other DNA
tgaatgaggaggtgagaaataagagactcagtttgctgggatgatgatgtttgttggtttaatctatcttaaacctttctttgaacattgacttaaaccttaacctcctttttctaaaaa

SEQ ID NO: 31743 - DNA, 120 bp, synthetic construct
  source 1..120: mol_type = other DNA
atctctattttttaaaaaaaatagaaaaacaatcaattgggaaaaatgtgtttgaaagagtatatcaataagaatatgtcttttacaaaaaattttttaaaagattaaacagatttttct

SEQ ID NO: 31744 - DNA, 120 bp, synthetic construct
  source 1..120: mol_type = other DNA
caacatcaatcatcagagcccaccttttttttttgtaagagaaactcacaagatcacagtcctatcactttttctatgtgaggagagcatttgagggatgttggcgcattataatttttc

SEQ ID NO: 31745 - DNA, 120 bp, synthetic construct
  source 1..120: mol_type = other DNA
tcaggagttcgagaccagcctgaccaacatagtgaaaccctgtctctattaaaaatacaaaattagctgggcatggtggcacatgcctgtaatcccagctacttgggaggctgaggcagg

SEQ ID NO: 31746 - DNA, 120 bp, synthetic construct; identical to SEQ ID NO: 8895
  source 1..120: mol_type = other DNA

SEQ ID NO: 31747 - DNA, 120 bp, synthetic construct
  source 1..120: mol_type = other DNA
gtttccttgcttgaagagctgagtcatatattaagtaatcccaatagagataaatctgaatccagaaaacagttaaaaaagtcaaacattgatttaaatgcggtcttctatttttaaaag

SEQ ID NO: 31748 - DNA, 120 bp, synthetic construct
  source 1..120: mol_type = other DNA
caatgtgttagtatgggaagagtgggaagagtgtgtattttggagataggacatcctgggtttaaatcctgacaccaatgtttaccaactctttaaccttgggtaaatacctgagttagt

SEQ ID NO: 31749 - DNA, 120 bp, synthetic construct
  source 1..120: mol_type = other DNA
gcctagcacagtgcacaaatacatagtcaatgctcaatacctactgtctttcaaaggtagttatttagaaggcaatagaaaggagatggtattttgtttttaactagtttttttccccca

SEQ ID NO: 31750 - DNA, 120 bp, synthetic construct; identical to SEQ ID NO: 8896
  source 1..120: mol_type = other DNA

SEQ ID NO: 31751 - DNA, 120 bp, synthetic construct
  source 1..120: mol_type = other DNA
gggcgggggggaaccttggaagtttctggaagataggaacattcaaattggccttagaagcacaggcctctattttgggagtagaaacagacaggtcacaaaagaattaaaagcaatgta

SEQ ID NO: 31752 - DNA, 120 bp, synthetic construct
  source 1..120: mol_type = other DNA
aggattttctaactcaagagaaacccaccttccaatagtatccttcctaggtgaacttagaaacaggacttggagggagcacaaaactctgtttcatcctcaggagtgttgctggccaat

SEQ ID NO: 31753 - DNA, 120 bp, synthetic construct
  source 1..120: mol_type = other DNA
aaaatcacttctactgaaattcaaactattgtatttcctgcctttctttgttctttgataagtctttcatatgtcttctgcaaaacagttttttgctcactgttctggtccgtttgaaaa

SEQ ID NO: 31754 - DNA, 120 bp, synthetic construct
  source 1..120: mol_type = other DNA
tttagtaaaaattattagttgccagattatagcacagaggaaataggctctgttgtgatagattagctgggaatatatgctaccaataatctttggtagtaaataactagaatcaaacac

SEQ ID NO: 31755 - DNA, 120 bp, synthetic construct; identical to SEQ ID NO: 8897
  source 1..120: mol_type = other DNA

SEQ ID NO: 31756 - DNA, 120 bp, synthetic construct
  source 1..120: mol_type = other DNA
tctctttgcccagtgtagtttacaaagaccttgtgataagctactttaaatcacctttacttatcattgatcattatcaattttgtctagaatgtcaagattacaatttataaaatatag

SEQ ID NO: 31757 - DNA, 120 bp, synthetic construct
  source 1..120: mol_type = other DNA
gcatgaacatggctcactgcagcttccacttccggggttcaagcgatcctccagtttcagcctcctgagtagctgggactacaggtgcgtgctaccacacccagctaatttttgtatttt

SEQ ID NO: 31758 - DNA, 120 bp, synthetic construct
  source 1..120: mol_type = other DNA
ctggtacgaaatatttaagatacagttgttaccaagtactgaaatataggtatatctcttgtgttgatgttacttgataaacctaacatagaaagcacaaaataggctggcgccgtggct

SEQ ID NO: 31759 - DNA, 120 bp, synthetic construct; identical to SEQ ID NO: 8898
  source 1..120: mol_type = other DNA

SEQ ID NO: 31760 - DNA, 120 bp, synthetic construct
  source 1..120: mol_type = other DNA
tttaaaaatgggagttggcaaaatacagcccatggaataaatctagtttttccatataaatctagttttccaaataaaaatagcatctaggacatgctatttttgcatgtcctgtgaggt

SEQ ID NO: 31761 - DNA, 120 bp, synthetic construct
  source 1..120: mol_type = other DNA
tattttattgggacatacccatgctcattcttttatatattgtctatgactgtttttgtgctacaacagcagggttgagtagttgtgacagagactttaaggcttataaaatttaaaata

SEQ ID NO: 31762 - DNA, 120 bp, synthetic construct
  source 1..120: mol_type = other DNA
acaaaaaataaaaaaaagttagccaagcatggtggcacacatctgtagtcccagctactcaggaggctgaggcaggagaattgcttgagcccaggagtggaggttgtagtgaactatgat

SEQ ID NO: 31763 - DNA, 120 bp, synthetic construct; identical to SEQ ID NO: 8899
  source 1..120: mol_type = other DNA

SEQ ID NO: 31764 - DNA, 120 bp, synthetic construct
  source 1..120: mol_type = other DNA
gacaacagatcccttagtgtgttataagaacctgacagtttttaccacctttatgtggtccaacttattgttgtctctctaattgagctctctgctttcacccttgcctcccagtcagtt

SEQ ID NO: 31765 - DNA, 120 bp, synthetic construct
  source 1..120: mol_type = other DNA
gtttaacaaaagtcaaaatcacaacagtggctttcaaagatggccctggaagatctgtccctccaaatctctcttatagcttctttttatgtcacttttcattctgttccagctatatgg

SEQ ID NO: 31766 - DNA, 120 bp, synthetic construct
  source 1..120: mol_type = other DNA
aaatattcccccctcagatattgcctggctaattctctcacctatttcatgttccatctagtagttatagcaattgctgagaatgaggcattaaactttccaactgtagttgtgggtttt

SEQ ID NO: 31767 - DNA, 120 bp, synthetic construct; identical to SEQ ID NO: 8900
  source 1..120: mol_type = other DNA

SEQ ID NO: 31768 - DNA, 120 bp, synthetic construct
  source 1..120: mol_type = other DNA
cctacacaaaataaatttctgtgatttgcctgattgttatgagaggcaagtcccaattctttcaaggaggggaagtcagaaaaggcttaatctctgcagcactagtggtccaagtttaga

SEQ ID NO: 31769 - DNA, 120 bp, synthetic construct
  source 1..120: mol_type = other DNA
tgcattttgcagtctgtcccttcttctactcccatttgctacatcttctagtttttattatttctaccttttatcttttggagtttcatcttgtgaccctgtggcttcagactgtgatac

SEQ ID NO: 31770 - DNA, 120 bp, synthetic construct
  source 1..120: mol_type = other DNA
ttttcccagcattatttcctctggcttctcttttgcaacttaactctctaaccagaagaacaaattgattttggtcctttctatgtggtttcttgtttctgtgggcctttgacttattta

SEQ ID NO: 31771 - DNA, 120 bp, synthetic construct
  source 1..120: mol_type = other DNA
aaagacccaaactaaaccaaaatagaaaccaaaaacaacaaaagtgtcagtgcaaataaaggaatcgagatgctacaaaagaccagaggaaactgagaaaaacagtaggagcttactggt

SEQ ID NO: 31772 - DNA, 120 bp, synthetic construct; identical to SEQ ID NO: 8901
  source 1..120: mol_type = other DNA

SEQ ID NO: 31773 - DNA, 120 bp, synthetic construct
  source 1..120: mol_type = other DNA
ctaatttatgttctctcttcatcgtcttttttgtcttttcatgttttctcttcctttcaaatctctaccattataccagctctcactgtattttttttacagtacagaaagtttatttgt

SEQ ID NO: 31774 - DNA, 120 bp, synthetic construct
  source 1..120: mol_type = other DNA
atttcagtctctaatctcaaaatatctgttctcttcttcaccattcattgtattctccttctagatttccattactaagtttacttactctttgccttactgtggcagggcaggtctcgc

SEQ ID NO: 31775 - DNA, 120 bp, synthetic construct
  source 1..120: mol_type = other DNA
tgggccttgaagcatgacaagattacgaaggaattcttaacaggacccgtttaggattaaaacaagtttattggggggtctgaagaaactccccaggccttcacaaacaagtttattggg

SEQ ID NO: 31776 - DNA, 120 bp, synthetic construct; identical to SEQ ID NO: 8902
  source 1..120: mol_type = other DNA

SEQ ID NO: 31777 - DNA, 120 bp, synthetic construct
  source 1..120: mol_type = other DNA
acctcagcctcccaagtagctgggattacaggtgtgtgccaccacacccagctaatttttgtatttttagtagagatggggttttgccatgttggccaggctggtctcgaactcctgacc

SEQ ID NO: 31778 - DNA, 120 bp, synthetic construct
  source 1..120: mol_type = other DNA
tggaactgagaaacatttttcttttcttttttaagttgcagtgcttgcaagcaagtcctgtcttcagaagaactggctcacttaataagagacatagcaggagtttaaggggcataatct

SEQ ID NO: 31779 - DNA, 120 bp, synthetic construct
  source 1..120: mol_type = other DNA
tgaactctttttttgtttaaaggaccttcacccattcctgcatgtaagttaggacaattttagaacactaagataaaatgcaaaaacagcaatcatggaatttttgaaactaactgtacg

SEQ ID NO: 31780 - DNA, 120 bp, synthetic construct; identical to SEQ ID NO: 8903
  source 1..120: mol_type = other DNA

SEQ ID NO: 31781 - DNA, 120 bp, synthetic construct
  source 1..120: mol_type = other DNA
cttttcagctgcaagcagccaaacctgggtttggttacttacatttatgtgtatcaatattgtaaaaatcagcactaaaattgtttccattaggaagccagcaatgtaaagcatatgaac

SEQ ID NO: 31782 - DNA, 120 bp, synthetic construct
  source 1..120: mol_type = other DNA
tccttcttttttcacctcctgccatcctcagtttatctcatgatacaaggtttttctgactgtcatgtttaatgtcaagtgctcaggcaaaatagatgatttggctaggctaacaaagta

SEQ ID NO: 31783 - DNA, 120 bp, synthetic construct
  source 1..120: mol_type = other DNA
tttgtttcaaaataatcaaaattattctgttatttttaaatacttttcatttcattaatttttgcctaataaaagtaggacatttttattattgtgtcctactcttgagatttttccttt

SEQ ID NO: 31784 - DNA, 120 bp, synthetic construct; identical to SEQ ID NO: 8904
  source 1..120: mol_type = other DNA

SEQ ID NO: 31785 - DNA, 120 bp, synthetic construct
  source 1..120: mol_type = other DNA
aattagttgaggcttgctctagttgaaggaattggtggtcaaggtaatcttttccatctgtgcttgcttggtggaatgttcagtgtacattactagataaagctttctaaaattatgtca

SEQ ID NO: 31786 - DNA, 120 bp, synthetic construct
  source 1..120: mol_type = other DNA
aaggctatgctataagctcacaactttcacttatattttatctgatatttgcacaattatatcaagttttgttttgttgttaattgcctggttttttttttttttgagacagaatttcgc

SEQ ID NO: 31787 - DNA, 120 bp, synthetic construct
  source 1..120: mol_type = other DNA
accatgcctggctaattttgtatttttagtagagacagggtttcaccatgttggccaggtgggtctcgaactcctgacctcaagtgatctacccgctttggcctcccaaagcgctggaat

SEQ ID NO: 31788 - DNA, 120 bp, synthetic construct; identical to SEQ ID NO: 8905
  source 1..120: mol_type = other DNA

SEQ ID NO: 31789 - DNA, 120 bp, synthetic construct
  source 1..120: mol_type = other DNA
ctaaaacggtgaaaccccgtctctactaaaaatacaaaaaattagccgggcgtagtggcgggcgcctgtagtcccagctacttgggaggctgaggcaggagaatggcgtgaacccgggag

SEQ ID NO: 31790 - DNA, 120 bp, synthetic construct
  source 1..120: mol_type = other DNA
ttttcttgctttcttgtggactaatatagttttctttcttctttttattttccctatgggttcagaagatgtatgtcacatttctattatattaatagttgtcttttatttttgccataa

SEQ ID NO: 31791 - DNA, 120 bp, synthetic construct
  source 1..120: mol_type = other DNA
cattagccttgtctctaaggtttttttccctaatgctttaggtctactcattttaaagcacactaatatatttctccttcactctctccttctccttcttttcttcctgctttttttttt

SEQ ID NO: 31792 - DNA, 120 bp, synthetic construct; identical to SEQ ID NO: 8906
  source 1..120: mol_type = other DNA

SEQ ID NO: 31793 - DNA, 120 bp, synthetic construct
  source 1..120: mol_type = other DNA
gttttgttgatttgttttcttacatatgtttcttggttctaacttctttttgagtttttactcaaaagtaaactccctgaagtatgtccctttgataattctttcactggggacctgtgt

SEQ ID NO: 31794 - DNA, 120 bp, synthetic construct
  source 1..120: mol_type = other DNA
agtatgtccctttgataattctttcactggggacctgtgtttaatgagtttctatgttcttgaatatacaaaatgacttcatttcagtctcactcataaatgataattttgctgattgta

SEQ ID NO: 31795 - DNA, 120 bp, synthetic construct
  source 1..120: mol_type = other DNA
aaatattttggtacactcatacaatgtgtaataatgtgtagtaatcacatcagggttaactgaatatcaccttaagcatttatcatttctttgtgttacaaacattgcaattatattctt

SEQ ID NO: 31796 - DNA, 120 bp, synthetic construct
  source 1..120: mol_type = other DNA
tttctctctcctgactaccctccccaggctctggtaaccatcattctactctctatctccatgagttcaatgttttaatttttagttcccacaaatgagtatggacatgtgaagtctgtg

SEQ ID NO: 31797 - DNA, 120 bp, synthetic construct; identical to SEQ ID NO: 8907
  source 1..120: mol_type = other DNA

SEQ ID NO: 31798 - DNA, 120 bp, synthetic construct
  source 1..120: mol_type = other DNA
tattacatttaaaattattacctgacatttattcttttaattctctcttatcaaattccattacacctgacctcattctatttacagctcttctttttcatattttcaatatcttctgtg

SEQ ID NO: 31799 - DNA, 120 bp, synthetic construct
  source 1..120: mol_type = other DNA
catatagttacattagaatttatatattatctaatcattgtttcaattctaataactttcttattttcaaggtttcagcttggttcttttttaaatctgcctgttctttcttcaaactat

SEQ ID NO: 31800 - DNA, 120 bp, synthetic construct
  source 1..120: mol_type = other DNA
ttttcatgctgtactagctgtcatatgccgtatcagctgccttaccgtttaaaattttattatctccttcacctcctccatttaggcatttcttccctcctatcttatcaaggttactta

SEQ ID NO: 31801 - DNA, 120 bp, synthetic construct; identical to SEQ ID NO: 8908
  source 1..120: mol_type = other DNA

SEQ ID NO: 31802 - DNA, 120 bp, synthetic construct
  source 1..120: mol_type = other DNA
ccttttgatatagagtatatgcttggatggggggcagaatgtttagtgggatttttcttgttactcccaaattgacaagtaggatcacaaagctgaggaaaaagaggttataacttccca

SEQ ID NO: 31803 - DNA, 120 bp, synthetic construct
  source 1..120: mol_type = other DNA
gccttgacatgatggccaaattagctctcctatctcaagtgtcaccctttttccaagacaacataagcaaacaactgtaaagggcaggagatttaagagtctttagagttgtgagtagtt

SEQ ID NO: 31804 - DNA, 120 bp, synthetic construct
  source 1..120: mol_type = other DNA
ttacagtgattgggggtatctgtgagaaaggatgtgtggcaacccatctcctggttgaatagtggatttgttgatttgttttgtgcctatctgaatgaaggaaaataaaattggagagag

SEQ ID NO: 31805 - DNA, 120 bp, synthetic construct
  source 1..120: mol_type = other DNA
ctggcttgagccttcttgctagtatgtcactcaagtgggtggcctacttggtaagggcatctctgcagtacgagcaatgaagtgtattgctcgagagggagttgaggggctctggaattg

SEQ ID NO: 31806 - DNA, 120 bp, synthetic construct; identical to SEQ ID NO: 8909
  source 1..120: mol_type = other DNA

SEQ ID NO: 31807 - DNA, 120 bp, synthetic construct
  source 1..120: mol_type = other DNA
cgggccattaggagaggagagggttttaaaggggatggcttaagcattttaaataatttagcataactagaaaattatgggttctaagacatcattaaatgataggaaggagacacatgg

SEQ ID NO: 31808 - DNA, 120 bp, synthetic construct
  source 1..120: mol_type = other DNA
ctcttctccactacctaaatcaataaatagtttcattcgtcaagtttcttagaccccaaatctaggagtaacccttggtgtcttctttttcccttaaaatcacattcagtcgaacagcag

SEQ ID NO: 31809 - DNA, 120 bp, synthetic construct
  source 1..120: mol_type = other DNA
tacttgccctcttgagccctcactctcactccagttaatcctccacaataatagagtgatcttttaaaattataaagtagaccctatcatttccctgttcaagcccttcagttacttctc

SEQ ID NO: 31810 - DNA, 120 bp, synthetic construct; identical to SEQ ID NO: 8910
  source 1..120: mol_type = other DNA

SEQ ID NO: 31811 - DNA, 120 bp, synthetic construct
  source 1..120: mol_type = other DNA
taatgcctggcctacaataggccaatatatatttgttgaatacatatatttttaaaatgcattaatatctttgaagactttttcttttttttcctttagtgtttgacttgttcaatgctg

SEQ ID NO: 31812 - DNA, 120 bp, synthetic construct
  source 1..120: mol_type = other DNA
ttcataacttttagtagtttcttattccttgggggctatctttcatggatattctatgatataaataccctgggttgtggatcccttcttggtggctattgtcctaacttcctgggtaca

SEQ ID NO: 31813 - DNA, 120 bp, synthetic construct
  source 1..120: mol_type = other DNA
ctttgttttcatgcctggggcagatgggtgaagatattttggcttctccgcgtggggaggcagcgtgttttctgctcctggctttactccaagtggtggaattccagttttctacatgtt

SEQ ID NO: 31814 - DNA, 120 bp, synthetic construct; identical to SEQ ID NO: 8911
  source 1..120: mol_type = other DNA

SEQ ID NO: 31815 - DNA, 120 bp, synthetic construct
  source 1..120: mol_type = other DNA
ggtgttggatttttacattatttccctgcccatcctctttgatgactcctctgaaaaggacactatgcattcaatttgggttctgccttgtaatttctagctgtgagaccaataatccct

SEQ ID NO: 31816 - DNA, 120 bp, synthetic construct
  source 1..120: mol_type = other DNA
ctgtgcagtgagaatacttagctgatcagcctctttgctcaggcttcagaaaggtatgtggatagggattttggagagacactcacttataattctttgttgacagttccatttctcttc

SEQ ID NO: 31817 - DNA, 120 bp, synthetic construct
  source 1..120: mol_type = other DNA
atctgttagaataacatagatgtctttcatgtttaaaaattggaaaattttacctactatctggattaagtgagatgctttgacaactctagatgtgaattcttgcatgaagaggttggc

SEQ ID NO: 31818 - DNA, 120 bp, synthetic construct; identical to SEQ ID NO: 8912
  source 1..120: mol_type = other DNA

SEQ ID NO: 31819 - DNA, 120 bp, synthetic construct
  source 1..120: mol_type = other DNA
tttcacgaattctatattaaatatcatcatggtcaacgcttgatctggtttaaaaattgagtcactgttggtatgtgttaccttggaagttgggtttagaactaaaataatggggctggg

SEQ ID NO: 31820 - DNA, 120 bp, synthetic construct
  source 1..120: mol_type = other DNA
gcctggccaaatgaggaaaccctgtctctactaaaaatacaataattagctgggcatggtggcttgcacctgtattgctagccacttgggaggctcaggcaggagaattgcttggactcg

SEQ ID NO: 31821 - DNA, 120 bp, synthetic construct
  source 1..120: mol_type = other DNA
ttatgaatcaaaaagtttgtcttgcagtcctaatctggaggactttgggtaatgtagaagcaaatgaatatgagaaatatgagtctcaatcttttggatacttagaagtggaaacatcta

SEQ ID NO: 31822 - DNA, 120 bp, synthetic construct
  source 1..120: mol_type = other DNA
aaagaaatccatttaatttttctcaaatggagaaaacatagcattatctaacatattttgttggagtctgtgaggggaggacttgtgtgggcaaagaaggaagcattccaaaccacccta

SEQ ID NO: 31823 - DNA, 120 bp, synthetic construct; identical to SEQ ID NO: 8913
  source 1..120: mol_type = other DNA

SEQ ID NO: 31824 - DNA, 120 bp, synthetic construct
  source 1..120: mol_type = other DNA
ttagtgtttaaaaagattctctgtaatatagaccatgtagggtaataaggaagcaagggaataatgggaaccacaaatcactttgacagaagtgaagtgaaggggaccaaagagaaccaa

SEQ ID NO: 31825 - DNA, 120 bp, synthetic construct
  source 1..120: mol_type = other DNA
ggggagaatcttggtagtcacacagctctggatgacaatggctaattctctgttaaaagctccaattctttatgactgcattcttgggtaagtatttgggtcagtttcttatctcttaca

SEQ ID NO: 31826 - DNA, 120 bp, synthetic construct
  source 1..120: mol_type = other DNA
gtacatatgtgtttgaaatcatgtaaatgtaagcttccttctcagggagaagctagattagcagagggcagaggaaactgggagctttgagtcaggtagctgcacacagagttagaaatg

SEQ ID NO: 31827 - DNA, 120 bp, synthetic construct; identical to SEQ ID NO: 8914
  source 1..120: mol_type = other DNA

SEQ ID NO: 31828 - DNA, 120 bp, synthetic construct
  source 1..120: mol_type = other DNA
tctgatctttaacaaagctgagaaaaacaagcaatggggaaagggcttcctattcaataaacgatactgggataactggccagccatatgcagaagattgaagctggactccttccttac

SEQ ID NO: 31829 - DNA, 120 bp, synthetic construct
  source 1..120: mol_type = other DNA
catgatgaagacaacaaaagcaactgtaacaaaagcaaaaattgacagatgggatctaattgagctaaagagcttctgcccagcaaaagaaactgtcaacagagtaaataggcaacctac

SEQ ID NO: 31830 - DNA, 120 bp, synthetic construct
  source 1..120: mol_type = other DNA
gggaataggcacttttcaaaagaagacgtacatgcagctcacaaacatatgaagaaaagctcaacatcactgattgttagagaaatgcaagtcaaaaccacaatgagataccatctcaca

SEQ ID NO: 31831 - DNA, 120 bp, synthetic construct; identical to SEQ ID NO: 8915
  source 1..120: mol_type = other DNA

SEQ ID NO: 31832 - DNA, 120 bp, synthetic construct
  source 1..120: mol_type = other DNA
tacatatacaccatgtaataccatgcagccataaaaaggaacaagatcatgtcctttgcaggaacatggatggagctggagggcgttatccttagcaaactaatgcaggaagagagaacc

SEQ ID NO: 31833 - DNA, 120 bp, synthetic construct
  source 1..120: mol_type = other DNA
gcttattgaagggtggagggtgagaggacgtagacagtcaggaaaaataactaaggggttctaggcttaatacctgggtgatgaaataatctgtacaacaaacctgcatgacacaagttt

SEQ ID NO: 31834 - DNA, 120 bp, synthetic construct
  source 1..120: mol_type = other DNA
agccaaccaaagacataatgaaatattatttggccataaaaagaactgaagtactgctgcatattaccatgtggatgaacctggtgaaccttatgctaaatggaagaagccaggcacaaa

SEQ ID NO: 31835 - DNA, 120 bp, synthetic construct
  source 1..120: mol_type = other DNA
atagtgggaagtgattgctaaacagagtttttctggggggtgatgagaatgttctaaaattcattgtggtgatggttgcacaacccagtgaatatactaaaaagcattaaattccacact

SEQ ID NO: 31836 - DNA, 120 bp, synthetic construct; identical to SEQ ID NO: 8916
  source 1..120: mol_type = other DNA

SEQ ID NO: 31837 - DNA, 120 bp, synthetic construct
  source 1..120: mol_type = other DNA
tcaagtttcttagaccccaaatctaggagtaacccttggtgtcttctttttcccttaaaatcacattcagtcgaacagcaggccctgttggctttgcccccaaaataaataaaatctgaa

SEQ ID NO: 31838 - DNA, 120 bp, synthetic construct
  source 1..120: mol_type = other DNA
ctccacaataatagagtgatcttttaaaattataaagtgggccctatcatttccctgttcaagcccttcagttgcctctcatgacacctagaatgaaatctgcaattttttattaaggac

SEQ ID NO: 31839 - DNA, 120 bp, synthetic construct; identical to SEQ ID NO: 8910
  source 1..120: mol_type = other DNA

SEQ ID NO: 31840 - DNA, 120 bp, synthetic construct; identical to SEQ ID NO: 8917
  source 1..120: mol_type = other DNA

SEQ ID NO: 31841 - DNA, 120 bp, synthetic construct
  source 1..120: mol_type = other DNA
catagatttcataacttttagtagtttcttattccttgggggctatctttcatggatattctatgatataaataccctgggttgtggctctcttcttggtggctattgtcctaacttcct

SEQ ID NO: 31842 - DNA, 120 bp, synthetic construct
  source 1..120: mol_type = other DNA
tgggtggctctgttttcatgcctggggcagatgggtgaagatattttggcttctgtgcatggggaggcagtatattttctgctactggctttactcagaggggcctaatttcagttttcc

SEQ ID NO: 31843 - DNA, 120 bp, synthetic construct
  source 1..120: mol_type = other DNA
atctctattttttcatcccctcactgttcccaccaagagcttaactttagcttcttcttgcaatgtgttcctatattcaatttctgctccttggaaatcttacccaccttttttatgctt

SEQ ID NO: 31844 - DNA, 120 bp, synthetic construct; identical to SEQ ID NO: 8918
  source 1..120: mol_type = other DNA

SEQ ID NO: 31845 - DNA, 120 bp, synthetic construct
  source 1..120: mol_type = other DNA
ggggtaatggcctctagatccatccgtgttccagcaaaggacatgatctcattctttttttggctgcgtagtattccatggtgtatatgtatcacattttctttattcagtctaccattg

SEQ ID NO: 31846 - DNA, 120 bp, synthetic construct
  source 1..120: mol_type = other DNA
ggattggccagccaacacttagctatccaaaaagcaggtggtataatccctagttacttttgcgtgctttttttcatcccctctactaggatgatatataggatccaagaccctatatat

SEQ ID NO: 31847 - DNA, 120 bp, synthetic construct
  source 1..120: mol_type = other DNA
tttggattttggcttgtaatttctagctgtgagaccagtaatcccttctcctgacctcaggtgggcattggtccctgtgcccaattatagggcctattcccaaacatgggcatatggatt

SEQ ID NO: 31848 - DNA, 120 bp, synthetic construct; identical to SEQ ID NO: 8919
  source 1..120: mol_type = other DNA

SEQ ID NO: 31849 - DNA, 120 bp, synthetic construct
  source 1..120: mol_type = other DNA
tggaaaattttacctactatctggattaagtgagatgctttggcaactctgaatctgaattcttgcatgaagaggttggctggagcaggcagcagctaccctcttcagactatatgtgtc

SEQ ID NO: 31850 - DNA, 120 bp, synthetic construct
  source 1..120: mol_type = other DNA
gtgatttaatttcaggctgaggaatcccagcgatgttaggtttgcttaaatcatttgtaactgagatatgagaaccaaatttgcattttggaaaggtaggacatagtgtgaaaggcggtt

SEQ ID NO: 31851 - DNA, 120 bp, synthetic construct
  source 1..120: mol_type = other DNA
ttggaagctgagtttagaactaaaataatgggaaatactacagttacgaatcaaaaaggttgacttgcagtcctaatcttgaagactttgggtaatgtagaagcaaatgaatatgagaaa

SEQ ID NO: 31852 - DNA, 120 bp, synthetic construct; identical to SEQ ID NO: 8920
  source 1..120: mol_type = other DNA

SEQ ID NO: 31853 - DNA, 120 bp, synthetic construct
  source 1..120: mol_type = other DNA
agctttgggcatagtgttgggaaaagaccactggatccttgcactataatgtttgaaagaacactgaaggtttctctccatttagacatcattttggatttcatctctctctctctttct

SEQ ID NO: 31854 - DNA, 120 bp, synthetic construct
  source 1..120: mol_type = other DNA
cccacttttaattagtattttaaaaaaattatagggcaagcagggtaataaggaagcaagagaagaatgggaaactcaaatcactttgacagaagtgaaatgaaggggaccatagagaac

SEQ ID NO: 31855 - DNA, 120 bp, synthetic construct
  source 1..120: mol_type = other DNA
ttctttgaaagaaacaaggttccctctagggaggtatatttgtgtaggggagaaacttggacacctttctgggtctaaattatgattctatgactatgtattcttgagtaagtatttggc

SEQ ID NO: 31856 - DNA, 120 bp, synthetic construct
  source 1..120: mol_type = other DNA
agttctagaggagatacaaagtaaatatatgtttgaaattatgtaaatataacttctttctcagggagaagctggatgagcagaaggcagaggaaactggaagctttgagtcaggtagct

SEQ ID NO: 31857 - DNA, 120 bp, synthetic construct; identical to SEQ ID NO: 8921
  source 1..120: mol_type = other DNA

SEQ ID NO: 31858 - DNA, 120 bp, synthetic construct
  source 1..120: mol_type = other DNA
actttcaaaaaatcattaataacttcatggaattttgatgataggaaagtaagtggttaaagtagtatgcaccccaagcctggaaatcttagctgtaccagggaaaggagagattccaga

SEQ ID NO: 31859 - DNA, 120 bp, synthetic construct
  source 1..120: mol_type = other DNA
tcctttttctttccccattgctcaaattgtctttcagtttgttaagtcccttgtaatatatcattttgacctgctgataaactttctcccctgccctttattttttaataaaatagtaag

SEQ ID NO: 31860 - DNA, 120 bp, synthetic construct
  source 1..120: mol_type = other DNA
gtctctaaaaggtgatacaaatttttcttagatgttttggaatttaaatgtggaaaaaagagaccagatatggcaggaggttcaaatgaaaaagggttacagaaacttcttatctactcc

SEQ ID NO: 31861 - DNA, 120 bp, synthetic construct
  source 1..120: mol_type = other DNA
ctctgacttatctcttccctttttgcagtgactggtaactgcttgaaatcctgcaggggattgtaaattgatagtcttaaaactttccagtacatcatgaataatgcagagaggttttga

SEQ ID NO: 31862 - DNA, 120 bp, synthetic construct; identical to SEQ ID NO: 8922
  source 1..120: mol_type = other DNA

SEQ ID NO: 31863 - DNA, 120 bp, synthetic construct
  source 1..120: mol_type = other DNA
ggataatggaaaaacaaaaggctgagaaaatagaacttcaagttccatgttgcaactcaagttccaatagacatcagtggactttgataagtgcaccacagagaaacaaataaataactg

SEQ ID NO: 31864 - DNA, 120 bp, synthetic construct
  source 1..120: mol_type = other DNA
tttttctcaggtctttattttttatgcgagtcagtgaatgttctagaaacttattaataatttatttatgcctttctgcccatggatgccatggaagaagcatcattaaagtctctcttc

SEQ ID NO: 31865 - DNA, 120 bp, synthetic construct
  source 1..120: mol_type = other DNA
gagggacactcccggacagtgtggtcatgagagatccaaacccaagcactccaggggctttggatttttcacatatgccactgtggaggaggtggatgcagccgtgaatgcaaggccaca

SEQ ID NO: 31866 - DNA, 120 bp, synthetic construct; identical to SEQ ID NO: 8923
  source 1..120: mol_type = other DNA

SEQ ID NO: 31867 - DNA, 120 bp, synthetic construct
  source 1..120: mol_type = other DNA
gttctggaaacttaggtggtggtcatggaggtggtttcggtgggaatgacaactttgatcatggaggaaacttcagtggttgtggtggctttggtggcagctgtggtggtggtggatatg

SEQ ID NO: 31868 - DNA, 120 bp, synthetic construct
  source 1..120: mol_type = other DNA
gaggaaactttggaggcagaagctgtggcctctatggtggtggaggccaatactttgccaaaccatgaaaccaaagtggctattgtggttccagtagcagcagtagctatggcagtggca

SEQ ID NO: 31869 - DNA, 120 bp, synthetic construct
  source 1..120: mol_type = other DNA
ggtacaaagaagacatgttttagacaaatactcatgtgtatgggcaaaaaactcgaggactgtatttgtgactaattgtataacaggttattttagtttctgttctgtggaaagtgtaaa

SEQ ID NO: 31870 - DNA, 120 bp, synthetic construct; identical to SEQ ID NO: 8924
  source 1..120: mol_type = other DNA

SEQ ID NO: 31871 - DNA, 120 bp, synthetic construct
  source 1..120: mol_type = other DNA
tactactttcctgaaaggaaatatcagaaatggcaatggaagaaacatccttcttaggtcaggggcatagagcgctgtgctggggaatatacctgccatcatgccttgtggggattctgc

SEQ ID NO: 31872 - DNA, 120 bp, synthetic construct
  source 1..120: mol_type = other DNA
atcctgcaggggattggtaatttctttaaactgtgctgcctttacctttcttctccctatttctgccatcctgtgaaagctttcatttattcatacaaatatccttcccttcccttgttg

SEQ ID NO: 31873 - DNA, 120 bp, synthetic construct
  source 1..120: mol_type = other DNA
ataggagtggagcagcagctaaatagaggaataagcaaaagaaatgaagaaatgtgagtttctacacacacaagacagaaatgagcagagaggaaaagtatgccaggccctataggaagc

SEQ ID NO: 31874 - DNA, 120 bp, synthetic construct
  source 1..120: mol_type = other DNA
tcatttctgaagtttcatctggtggtaaaaaacggaaggaacacaaaatggagaaatcaacatgtgtagaaccaagtgaattcagttctcccttgataggcttaaagagggtaactgcag

SEQ ID NO: 31875 - DNA, 120 bp, synthetic construct; identical to SEQ ID NO: 8925
  source 1..120: mol_type = other DNA

SEQ ID NO: 31876 - DNA, 120 bp, synthetic construct
  source 1..120: mol_type = other DNA
actgcaacctctgcctcccaggttcaagcgattacaggtacctgccacgaagtctggctcatttttgtaggtttttttttttgagacggagtcttgctctgtcacccaggctggagtgcg

SEQ ID NO: 31877 - DNA, 120 bp, synthetic construct
  source 1..120: mol_type = other DNA
ttttttttttgtatttttagtagagacagggtttcactgtgttagccaggatggtctccatctcctgacttcgtgatctgcccaccttggcctcccaaagtgctggattacaggcgtgag

SEQ ID NO: 31878 - DNA, 120 bp, synthetic construct
  source 1..120: mol_type = other DNA
ctgggattataggcgtgagccactgcgcccggcctcatttttttttgtgtgtgtttttgagacagagtctcgctctgtcgcccaggctgaagggcagtgacacgatctcggctcactgca

SEQ ID NO: 31879 - DNA, 120 bp, synthetic construct
  source 1..120: mol_type = other DNA
ctctgtcacccaggctggagtgcagtggtgagatctcggctcactgcaatctccacctcccaagttcaagtgattctcctgcctcagcctcccaagtagctgggactacaggcatgcgct

SEQ ID NO: 31880 - DNA, 120 bp, synthetic construct; identical to SEQ ID NO: 8926
  source 1..120: mol_type = other DNA

SEQ ID NO: 31881 - DNA, 120 bp, synthetic construct
  source 1..120: mol_type = other DNA
atttcttatgtcatatatggcatagtggtgaagtctgggcttttagtgtacccattacccaaatagtgaatattccacccaataatttttattgacttgaaaagctttcttcctactctt

SEQ ID NO: 31882 - DNA, 120 bp, synthetic construct
  source 1..120: mol_type = other DNA
agcaatatatttttcatttatacactatcatatttttaaattgtttacacataagggagagggagtcaagcaggggagaaaagggaaagggaattcatgtatccatgtagattctctggc

SEQ ID NO: 31883 - DNA, 120 bp, synthetic construct
  source 1..120: mol_type = other DNA
gctataagtcttggcaatctgtgagtactgagaaaagcagtcttgattcaggggaatagtcaataacaaatggctcttattcattcacaaaaaggatagttagaaccagaattcagggca

SEQ ID NO: 31884 - DNA, 120 bp, synthetic construct; identical to SEQ ID NO: 8927
  source 1..120: mol_type = other DNA

SEQ ID NO: 31885 - DNA, 120 bp, synthetic construct
  source 1..120: mol_type = other DNA
tagctcgtcacaatatgaactttcactttattctcttccatatgtgatgcttctgccagttcctgtaaattacagcccaattactgttatatcctgttccatgaggtgctctgtcctatc

SEQ ID NO: 31886 - DNA, 120 bp, synthetic construct
  source 1..120: mol_type = other DNA
taggacatgaggaaagagaaaggcctttggagagaaaactgtagaactcaggttagactagaccctgcatagtatttcctgttaaattttgttgtcttttctcccttttgtatttattct

SEQ ID NO: 31887 - DNA, 120 bp, synthetic construct
  source 1..120: mol_type = other DNA
cctccattatctttgagtaggccctttagaaactacaaagcacttcagaactggaaagctgcccttattattctctctctgctactttagaaaattcttgtatattgttatagaagacat

SEQ ID NO: 31888 - DNA, 120 bp, synthetic construct
  source 1..120: mol_type = other DNA
gcagtgagacacatctagggcatttgagacagggaacaggccctctagacactgtagaagatcaaggaacctggagggagaaggatagataaggtacttaccattggatccaggatattg

SEQ ID NO: 31889 - DNA, 120 bp, synthetic construct; identical to SEQ ID NO: 8928
  source 1..120: mol_type = other DNA

SEQ ID NO: 31890 - DNA, 120 bp, synthetic construct
  source 1..120: mol_type = other DNA
aacacctctattagtgatattttccaaaggcaagcagtgaaaatgattttctcaggaattactaaatctcagtattcaggattaaatatttttcactgcactgctgctgtactctagcct

SEQ ID NO: 31891 - DNA, 120 bp, synthetic construct
  source 1..120: mol_type = other DNA
ggtgttggagatgagatccttaattgtattcctttccatattcccccagtgtttttcctcagatcactctgtttcactctcagctatctttatgttcttgttcatttcttatattctttt

SEQ ID NO: 31892 - DNA, 120 bp, synthetic construct
  source 1..120: mol_type = other DNA
tctaaaatataattggttgcccagagagatggttagtgttaatccaaactgcaccattttgtaagcctccagcaatttgaagaccttggtaaaagtgaaacattccacgggggttcgggc

SEQ ID NO: 31893 - DNA, 120 bp, synthetic construct; identical to SEQ ID NO: 8929
  source 1..120: mol_type = other DNA

SEQ ID NO: 31894 - DNA, 120 bp, synthetic construct
  source 1..120: mol_type = other DNA
cctaacagttacgatatggggaaatgaaagtctaagaaatatgattttcagcttctttaacccagatacttaaacagttggagccagtctccttcagacatagtaagaagccagtagaga

SEQ ID NO: 31895 - DNA, 120 bp, synthetic construct
  source 1..120: mol_type = other DNA
gttatttggagagtgtatttttcactaattttatcctagaagtgaggctttgagaggtagagcaggggagaggaagtgatatcagttatgagatcattagggagacttaatccaactata

SEQ ID NO: 31896 - DNA, 120 bp, synthetic construct
  source 1..120: mol_type = other DNA
ttgccaacctaagggatactagggaaaggcaaaactttgttattaggtattaacattactgatggtagggaaaggtgaaacacttcctgtcagtaagagtagaagatatttctttctcaa

SEQ ID NO: 31897 - DNA, 120 bp, synthetic construct
  source 1..120: mol_type = other DNA
tctagtttcttcttctcacagcttccagcttattggagagtgatagagcagtgactgctgctttgattagctttagagtctgtgagcaaagagtcaacaaaaccttctgtttttttttgt

SEQ ID NO: 31898 - DNA, 120 bp, synthetic construct; identical to SEQ ID NO: 8930
  source 1..120: mol_type = other DNA

SEQ ID NO: 31899 - DNA, 120 bp, synthetic construct
  source 1..120: mol_type = other DNA
caggtgtgagcccatgcctggccaaaaccttcagtttttaatgagaatttggccttcagttgattttctagctctgatcgcctggtgacctgataaatatcgaaagcctgttatgttttt

SEQ ID NO: 31900 - DNA, 120 bp, synthetic construct
  source 1..120: mol_type = other DNA
aacctctgcctcctgggttcaagcgattctcctgccttagcctcctgagtagctgggactgcaggcgcacgacaccacacccagctaatttttgtatttttttaagtagagatggggttt

SEQ ID NO: 31901 - DNA, 120 bp, synthetic construct
  source 1..120: mol_type = other DNA
cacccagccgaaagcctgttatgttatttagcaacactgcttacataagaatgatccttgatgttagactgcatctgaactgggagaattgtaaatatgtattaagaagccataactttg

SEQ ID NO: 31902 - DNA, 120 bp, synthetic construct
  source 1..120: mol_type = other DNA
taggagattttagttcctggtggatctgtggggtttctaagctaggtcagctcccaactcaactgacagaaggccaaacagaataggtcctaggtggctatgtggacacctgcatagatc

SEQ ID NO: 31903 - DNA, 120 bp, synthetic construct; identical to SEQ ID NO: 8931
  source 1..120: mol_type = other DNA

SEQ ID NO: 31904 - DNA, 120 bp, synthetic construct
  source 1..120: mol_type = other DNA
aaacacctggaagatggctttccagatctggatacccttggctatgagcagtaaaccagttacacatttagatattatgctaacttaatagttgctttgcctgtatctacaaatatgtat

SEQ ID NO: 31905 - DNA, 120 bp, synthetic construct
  source 1..120: mol_type = other DNA
tttccggtttcaatttgtgactttttgtacctttatttttattctctttctcaacatactcatttcccttctttattctcttatgtgccaattcacttactctttctgcttccaattttc

SEQ ID NO: 31906 - DNA, 120 bp, synthetic construct
  source 1..120: mol_type = other DNA
ctaccctttaatctcaatattagaacttcattttattcattgttaataacctgttataacacccaaaaatgatagtggaaagaatgaagagttagtaaaacttcagtcttaattttatta

SEQ ID NO: 31907 - DNA, 120 bp, synthetic construct; identical to SEQ ID NO: 8932
  source 1..120: mol_type = other DNA

SEQ ID NO: 31908 - DNA, 120 bp, synthetic construct
  source 1..120: mol_type = other DNA
agagtgaaaccccatctctactaaaaatacaaaaaaattagccgggcgtggtggtgggtgcctgtagtcccagctactcggtaggctaagacaggagaacggcttgaacccacgaggtgg

SEQ ID NO: 31909 - DNA, 120 bp, synthetic construct
  source 1..120: mol_type = other DNA
aatctaataatggaaaaattatttgcatggaaagcacagcaggaagtttaggtgctgggttctaagtctttattaagtattggctctacagagctagattatatgctgaagtggaaacag

SEQ ID NO: 31910 - DNA, 120 bp, synthetic construct
  source 1..120: mol_type = other DNA
tgagtccaatctggagtactgggtgagattatgaggtggcagaaggacttgatccttgagtccttgggcatgaataattgaaataaaaatagattgatgttctaagtaaagtactaaaag

SEQ ID NO: 31911 - DNA, 120 bp, synthetic construct; identical to SEQ ID NO: 8933
  source 1..120: mol_type = other DNA

SEQ ID NO: 31912 - DNA, 120 bp, synthetic construct
  source 1..120: mol_type = other DNA
aaatgctaggttgaagaaaaataagggttgaagaaaatgtgaactccaaacccttgaaatcccaacatggaaaccaggtagcgatccctaagatactgcaggaaagtaaaatgctcactg

SEQ ID NO: 31913 - DNA, 120 bp, synthetic construct
  source 1..120: mol_type = other DNA
cagtatgcttcaccactgtgaaggaaatttccatttcccaacactcgctctagggagtatcataaatagaaacaacgggaagatcaagagttgcttgtatggcgagcctcaggcaggctc

SEQ ID NO: 31914 - DNA, 120 bp, synthetic construct
  source 1..120: mol_type = other DNA
cctgctttcagtgatggttgaaaatcttcagagggttgggaaagactcactccatattaatctgttatgcctctatttttcttcttacattttcttgccccttgcccctagtttccttag

SEQ ID NO: 31915 - DNA, 120 bp, synthetic construct
  source 1..120: mol_type = other DNA
tatttttaaatgttagcctgtgagatttcttaacacttcgtgcatggcctctttggaaactatgtaataggaatgccaggggagttgagaaagacagtgttaaaaaagcaagtcacccct

SEQ ID NO: 31916 - DNA, 120 bp, synthetic construct; identical to SEQ ID NO: 8934
  source 1..120: mol_type = other DNA

SEQ ID NO: 31917 - DNA, 120 bp, synthetic construct
  source 1..120: mol_type = other DNA
ccagaggagaacaactactgtgggactgcagatgatcttagcctggaagctgcataaccctcctaccagatcaaatcattcagcatccatcttaaatgagaaatttaagtaactaaaaat

SEQ ID NO: 31918 - DNA, 120 bp, synthetic construct
  source 1..120: mol_type = other DNA
ttcaggatattgtgtctgattgcttgggcatcagaaggtgtcagaagatttgaatacaattaagaagtatgagtgagaaatcctgcaggggtagaaatggtaacagttaggatgtggaga

SEQ ID NO: 31919 - DNA, 120 bp, synthetic construct
  source 1..120: mol_type = other DNA
ctgtttgcatttaaattcttcctgggaaaacatcacaaatgtagacaccaggagcaaaatttccacttcagtggaggaacaaattaagtttataaatgcttctttcttcatcttggagga

SEQ ID NO: 31920 - DNA, 120 bp, synthetic construct; identical to SEQ ID NO: 8935
  source 1..120: mol_type = other DNA

SEQ ID NO: 31921 - DNA, 120 bp, synthetic construct
  source 1..120: mol_type = other DNA
gtcttcttctttatgaccacacacacacatacacatacacacacacacaccccaccacacctctctacacctcataggctataagtgattctctcaccttggcctcccaaagtgctggga

SEQ ID NO: 31922 - DNA, 120 bp, synthetic construct
  source 1..120: mol_type = other DNA
aggagtagacacaggatgtgatataccatgagctttaattatcaaatcactttttttctccttccttcagagttagtcctgtctcaggggctcaagctctgaacatcctcaaaaatgaag

SEQ ID NO: 31923 - DNA, 120 bp, synthetic construct
  source 1..120: mol_type = other DNA
tggggaatctgcagggctggaaaagctggttaaatttggaccaagtgcattcatctttttatttcctctctcagggcagagaattaaaatcctgtagagcaatggttcttaaacgttggt

SEQ ID NO: 31924 - DNA, 120 bp, synthetic construct
  source 1..120: mol_type = other DNA
tgcatatctaaaactccagggtgacgttgatgcaggcccttggacccactttaagcatcaaggccataaagggctggcaaaatctcagatcatataaaagtcattgtttccatttaccat

SEQ ID NO: 31925 - DNA, 120 bp, synthetic construct; identical to SEQ ID NO: 8936
  source 1..120: mol_type = other DNA

SEQ ID NO: 31926 - DNA, 120 bp, synthetic construct
  source 1..120: mol_type = other DNA
ttactgggttttctcacaggggaatctttcttcctttcacttgaccattttttgttcttcactcttttccctttgctgttgaatctcaagatttcggaaaagttaaaggcaatagtactt

SEQ ID NO: 31927 - DNA, 120 bp, synthetic construct
  source 1..120: mol_type = other DNA
agtttagtaaagcaaagcacatgagaattaaagggcagaaaaagaacttactcatggctcctgcagttctggctaaaatacaaacaaaaaaggtgagtttgaagagagcatgactcaagg

SEQ ID NO: 31928 - DNA, 120 bp, synthetic construct
  source 1..120: mol_type = other DNA
cattttccttttttccttaggagactgttaaaatcatactccctgcagttatttttcttattcttcattttcattatcttcctgctgtcaaatccttctaaagttatagataattttccc

SEQ ID NO: 31929 - DNA, 120 bp, synthetic construct; identical to SEQ ID NO: 8937
  source 1..120: mol_type = other DNA

SEQ ID NO: 31930 - DNA, 120 bp, synthetic construct
  source 1..120: mol_type = other DNA
tcttcagttgtttgtaaacattttatactacctataataaaaattgaaaagtgtaacattatttagatttagactttcagaaggcatggagatagacaatcccattccctcctccccctc

SEQ ID NO: 31931 - DNA, 120 bp, synthetic construct
  source 1..120: mol_type = other DNA
agtcactaaatgttttgaacattaatttcctcatctctaaaacagaagttgtgtcctctgtcttacctatattgtgaagttgcagtgaaaaatcaggagtaataacagaagggaaagatg

SEQ ID NO: 31932 - DNA, 120 bp, synthetic construct
  source 1..120: mol_type = other DNA
atttctgactgtcctttggaaagttctgagtcctgacagcagagtattataatgtgcacttaattctgtttttatttttgatttattaatttctgttattttaatctttaaaacaaccct

SEQ ID NO: 31933 - DNA, 120 bp, synthetic construct
  source 1..120: mol_type = other DNA
attgaataatttgtttccttctttgtgtataattatttttcgcttatttgttactttgctgttttggggagggaaatagtagctttccccagaaatgacaggatctaccctcagcatttg

SEQ ID NO: 31934 - DNA, 120 bp, synthetic construct; identical to SEQ ID NO: 8938
  source 1..120: mol_type = other DNA

SEQ ID NO: 31935 - DNA, 120 bp, synthetic construct
  source 1..120: mol_type = other DNA
ttaggatacatgtgagctgagcaggaaagagaatcatgataaattactgatttctgccacaggcaaaggcatgagcagaaatgtaacacaggtcatatatattccattcctgacctaaag

SEQ ID NO: 31936 - DNA, 120 bp, synthetic construct
  source 1..120: mol_type = other DNA
tgggttgaagtcattcttgtgcctcagcctcctgagtagctgggattacaggcatgtgccaccacgcccagctaatttttgtatttttagtagagatggggtttcgccatgttggccagg

SEQ ID NO: 31937 - DNA, 120 bp, synthetic construct
  source 1..120: mol_type = other DNA
ggcgtttcccagctgaagacaaataagcagggcagtggaaggtatttacttgttgccttacagagtaaagaagaagataaaaaaaacttacgatgtacatatcctgccaaaatactgaat

SEQ ID NO: 31938 - DNA, 120 bp, synthetic construct; identical to SEQ ID NO: 8939
  source 1..120: mol_type = other DNA

SEQ ID NO: 31939 - DNA, 120 bp, synthetic construct
  source 1..120: mol_type = other DNA
catctatacttcaacaacagtgcactttgaaatcagtatcatatggttgtggcctgagttgggatagggcaagtgaatcccttccttttcgttactttaaggataggtattggttggatc

SEQ ID NO: 31940 - DNA, 120 bp, synthetic construct
  source 1..120: mol_type = other DNA
acaactttgctagtaggaaatgtgaccctaatatgcaaccacaaatgtaatagtcagtatgaaaacttttgtaggaaaagcacatagatcagaaaaaaaaccctgtccagtcaggattat

SEQ ID NO: 31941 - DNA, 120 bp, synthetic construct
  source 1..120: mol_type = other DNA
ttctttttttttttttttgacaatcaattgaaatcagttccagaaggtttatttaaactttacctctttggttttcctcccttctccattcattttttccagcttccctcacttctctgt

SEQ ID NO: 31942 - DNA, 120 bp, synthetic construct; identical to SEQ ID NO: 8940
  source 1..120: mol_type = other DNA

SEQ ID NO: 31943 - DNA, 120 bp, synthetic construct; identical to SEQ ID NO: 3146
  source 1..120: mol_type = other DNA

SEQ ID NO: 31944 - DNA, 120 bp, synthetic construct
  source 1..120: mol_type = other DNA
gaaatagtgtatagttcagatacgaagtgagcaataactttttcctaagcctacagtcagagtgtacagcataatttcctcccttgaaggtaggctgtgattagagagggacatagtcaa

SEQ ID NO: 31945 - DNA, 120 bp, synthetic construct
  source 1..120: mol_type = other DNA
aaagatgtagaagagagaagaaatgacttctgaagaaataagggggtgagaggatgtggtcaaaggcaagaataaaataatttgcttaagcaaggtgggaggtctcattgtcttagagag

SEQ ID NO: 31946 - DNA, 120 bp, synthetic construct; identical to SEQ ID NO: 8941
  source 1..120: mol_type = other DNA

SEQ ID NO: 31947 - DNA, 120 bp, synthetic construct
  source 1..120: mol_type = other DNA
gtgatcccatgtcttttcccccttagacactatgcaggagtgaaagtttcaggggaatattcagctttactatatttccaatattctgatttcattcaccacctttctcctgtcttttcc

SEQ ID NO: 31948 - DNA, 120 bp, synthetic construct
  source 1..120: mol_type = other DNA
aaccgagattgagaaagggaagggctgtgcctgagtatgcaaaaaattaaaggcagttttagcttccagtttgcttgactttaagttcagcacgttttccttcatattctttacaatttt

SEQ ID NO: 31949 - DNA, 120 bp, synthetic construct
  source 1..120: mol_type = other DNA
ctaaattctagggcaagacttgtagaaggtttaatgatattaactttgatagtaatttgtacaagctaccatagaatgaaccctcactatattcagtggagaaagtctgggcattagtct

SEQ ID NO: 31950 - DNA, 120 bp, synthetic construct
  source 1..120: mol_type = other DNA
taagttttagggtacatgtgcacaatgtgcaggttagttacatatgtatacatgtgccatgctggtgtgctgcatccattaactcgtcatttagcattaggtatatttcctaatgctatc

SEQ ID NO: 31951 - DNA, 120 bp, synthetic construct; identical to SEQ ID NO: 8942
  source 1..120: mol_type = other DNA

SEQ ID NO: 31952 - DNA, 120 bp, synthetic construct
  source 1..120: mol_type = other DNA
tcaattcccttgtaaattgtgctagatacccacatctctaagtgcacgccaattgcttaaaagcatcagcgttaatccccctttgaaaagaagatcagaaaaaaaatccctcacactacc

SEQ ID NO: 31953 - DNA, 120 bp, synthetic construct
  source 1..120: mol_type = other DNA
ggtgtggccgaggcccagaatgacatgtaggactgatgatgagcagagaaggtgattcccttttccttttcttctcagcctttgtaaagactgaaactgttaaggaaacttggaagacct

SEQ ID NO: 31954 - DNA, 120 bp, synthetic construct
  source 1..120: mol_type = other DNA
tcactataacctctcactactgggctcaagtgatcctcccaactcagcctcccatgtagctaggactacaggcatgccaccatgccctactaattcttttaattgttctgtagagacaga

SEQ ID NO: 31955 - DNA, 120 bp, synthetic construct
  source 1..120: mol_type = other DNA
tttttttttctttttcctctacttgcttttaggaggtggaggaccttagtcttgattaaactttccttagtttccctatgtgctcccttcttattatctgtttgctctcatttctctttc

SEQ ID NO: 31956 - DNA, 120 bp, synthetic construct; identical to SEQ ID NO: 8943
  source 1..120: mol_type = other DNA

SEQ ID NO: 31957 - DNA, 120 bp, synthetic construct
  source 1..120: mol_type = other DNA
atgtttaggacagagcctggagcataatgctcaacacatattattatatcatcatttcagattgcagtccttatctgtttatacatgtatgggtaatggaccatagtctcctctatcttg

SEQ ID NO: 31958 - DNA, 120 bp, synthetic construct
  source 1..120: mol_type = other DNA
tcaagagggcctcatccattctgtaggagcacacgtcatcttgagcttcagggatgaatagcttcctgtggccctatgcatctttcagctaaatactctacataactaattactcatcat

SEQ ID NO: 31959 - DNA, 120 bp, synthetic construct
  source 1..120: mol_type = other DNA
cactgcaagctccgcttcccgggttcacgccattctcctgcctcagcctcccgagtagctgggactacaggtgcccgccacagcgctcggctaatttttttgtatttttagtagagacgg

SEQ ID NO: 31960 - DNA, 120 bp, synthetic construct
  source 1..120: mol_type = other DNA
ttaatttactcaccatccaaagacaattcctcatcttaaggatgcttattatcataatgctttttataattcctaatcggacgttccttccacctctccttactccctaaaacacaccat

SEQ ID NO: 31961 - DNA, 120 bp, synthetic construct; identical to SEQ ID NO: 8944
  source 1..120: mol_type = other DNA

SEQ ID NO: 31962 - DNA, 120 bp, synthetic construct
  source 1..120: mol_type = other DNA
attagctgggtattgtggtgcacgcctgtaatcccagctgcttgggtggctgaggcacaagaatcgcttgaacccgggaggtggagttgcagcgagccgaggttgcaccctgcactccag

SEQ ID NO: 31963 - DNA, 120 bp, synthetic construct
  source 1..120: mol_type = other DNA
taacatggtgatcgtagttaataatgtgttatatttgacatttgctaagagagtagattttaagtgttcttaccacaaaaagtatgtgaggaaatggatatgttaacagcttgatttagt

SEQ ID NO: 31964 - DNA, 120 bp, synthetic construct
  source 1..120: mol_type = other DNA
ttttttttttttttgagacagggtctcactctgtcacccaggctggagtgcagtggcgtaatcacaattcactgtagccttgacctcttgggctcaagtgatcctcccacctcagccttc

SEQ ID NO: 31965 - DNA, 120 bp, synthetic construct; identical to SEQ ID NO: 8945
  source 1..120: mol_type = other DNA

SEQ ID NO: 31966 - DNA, 120 bp, synthetic construct
  source 1..120: mol_type = other DNA
cttccctgatgaaaacaatggcttattgtggtgctcagaattgttctccatattttattctaaaagactttttgtaatctggactctccctacctttcaaactcctccacgatctttcac

SEQ ID NO: 31967 - DNA, 120 bp, synthetic construct
  source 1..120: mol_type = other DNA
ttcagagtcagttcagatatctcctcagggaaatttcttctaatctcctagctaaaggcccttacttcttggtcttgctctatcatattatcttaatttgttttctccgtagaatttact

SEQ ID NO: 31968 - DNA, 120 bp, synthetic construct
  source 1..120: mol_type = other DNA
gttgtcttaggtatagcagctgcagtgctctaaatgatttcccctttggagggtttttatggcaagcctgcctcacatgggtcctctgcagattttgctgaagaaactgaatatttgagt

SEQ ID NO: 31969 - DNA, 120 bp, synthetic construct; identical to SEQ ID NO: 8946
  source 1..120: mol_type = other DNA

SEQ ID NO: 31970 - DNA, 120 bp, synthetic construct
  source 1..120: mol_type = other DNA
caaacattttatttccaaagaatactttggattggaagagtaaacacatttaatgatgtcctgggggtagttggacaacctcaggacttggagtccaaaggccagtgtttagaacctcag

SEQ ID NO: 31971 - DNA, 120 bp, synthetic construct
  source 1..120: mol_type = other DNA
cctctccttgtcccctactcccattccctgatctcttcacaagcctctctcttcttccctcctattcctaagttaatgaatttattactgttttgctgaaactatgattgccagctaaaa

SEQ ID NO: 31972 - DNA, 120 bp, synthetic construct
  source 1..120: mol_type = other DNA
gcagggttagggaatgttccttagttctgtgacacactaaagagacttagaatttggaaatatgaaatttccctccttgctctcctaaaagtaaatataaacaaaaaattcatgtggttg

SEQ ID NO: 31973 - DNA, 120 bp, synthetic construct; identical to SEQ ID NO: 8947
  source 1..120: mol_type = other DNA

SEQ ID NO: 31974 - DNA, 120 bp, synthetic construct
  source 1..120: mol_type = other DNA
cttcatgtcatcataataaaccactagaaacttgcatttacttttgactgattattgaagtgtctggttatggagaacaaagaaattggagaaatgtgaagcttaagcttctgctgtgct

SEQ ID NO: 31975 - DNA, 120 bp, synthetic construct
  source 1..120: mol_type = other DNA
aaaacacatcaaaagaagaatgagttctgtttgtcccagggagaacttagatgccatagacactatattgcagaaaggttgtggaaaagaggatagaaatgagtcacaacttatttcctg

SEQ ID NO: 31976 - DNA, 120 bp, synthetic construct
  source 1..120: mol_type = other DNA
aaaaatatttttggagattgctagtttctcaatctgaggacatttttctgtccctataagtcttctttcattggtgattctgctgctctgttctttccttctctacctttcctccacctc

SEQ ID NO: 31977 - DNA, 120 bp, synthetic construct; identical to SEQ ID NO: 8948
  source 1..120: mol_type = other DNA

SEQ ID NO: 31978 - DNA, 120 bp, synthetic construct
  source 1..120: mol_type = other DNA
aaatatatcaagaaggaacccatattcttggtaatgaatgagaagttttaccacccatgtgataccttattgggggactgaggcttaaacacctgatcaccagcagaaatcaaggccata

SEQ ID NO: 31979 - DNA, 120 bp, synthetic construct
  source 1..120: mol_type = other DNA
gatgatgattttggtatatctgagtgggcctaatataatcacaaagatttttaagagtgggagagggagataaaagagagtaagagaaagaggtactacagtggaggaagggcagaatgg

SEQ ID NO: 31980 - DNA, 120 bp, synthetic construct
  source 1..120: mol_type = other DNA
aacctccagaaagaatgcagtcttgctgacaacctgattgttgtccagggagacatatatgacagatttataacctatggaactgatagataataaatttgtgttgttttaagccattaa

SEQ ID NO: 31981 - DNA, 120 bp, synthetic construct; identical to SEQ ID NO: 8949
  source 1..120: mol_type = other DNA

SEQ ID NO: 31982 - DNA, 120 bp, synthetic construct
  source 1..120: mol_type = other DNA
tattagggaaaaccactgagattttaagatccggggctaacttaatcagtgcagataagaaatataaaagagaagtcacaagatctgaaagatggaaggaaaatctttacatacatagta

SEQ ID NO: 31983 - DNA, 120 bp, synthetic construct
  source 1..120: mol_type = other DNA
cttgaatgtttatgagtgtgagattaacttcatttatcctgctcagagtaaatggaagcattcaggattttccattgtgggtgtgagattcacttcatttatcctgctcaggataacctc

SEQ ID NO: 31984 - DNA, 120 bp, synthetic construct
  source 1..120: mol_type = other DNA
atatttacttaggaacaaacatcaaactagtgatagattcttatcaacaataataaataataaacaacaagcaaatggaataaatcttcaaagtacagagggaaaataatgttcaattct

SEQ ID NO: 31985 - DNA, 120 bp, synthetic construct
  source 1..120: mol_type = other DNA
catacatgtagagtttaaagaaccagtaaaggattgtatttgggcaagaaatagaagagaaaagacacaggatgtagcaaataatgttaagcaaaaacaatgctgaaatattgttgtaag

SEQ ID NO: 31986 - DNA, 120 bp, synthetic construct; identical to SEQ ID NO: 8950
  source 1..120: mol_type = other DNA

SEQ ID NO: 31987 - DNA, 120 bp, synthetic construct
  source 1..120: mol_type = other DNA
ttgaaaacacaatataaattggaaacatttagataaacatataacaattcacaatataaaatgaactaaattcatctattaggaaacagaaaattttacattgttaatatgaacaaagtc

SEQ ID NO: 31988 - DNA, 120 bp, synthetic construct
  source 1..120: mol_type = other DNA
gagtgtagaattgaagtaaaaaaatagtcatgaggatatgagtggatatgaggatatgagtttcagcagcatttagaagttacttagatacttatattagaaaataagagcgcccacttt

SEQ ID NO: 31989 - DNA, 120 bp, synthetic construct
  source 1..120: mol_type = other DNA
gtctggaaattgattaagagtttcatacagcaagctagaaaaaggaacaaaaataaagcaaaagtaaagagaaggaattttacccatagatatacatagcccaagctatgacaagaaaat

SEQ ID NO: 31990 - DNA, 120 bp, synthetic construct; identical to SEQ ID NO: 8951
  source 1..120: mol_type = other DNA

SEQ ID NO: 31991 - DNA, 120 bp, synthetic construct
  source 1..120: mol_type = other DNA
ttgaatagtaggcaaccatgttaatgcatgggaataattgattttaccaattaatctacaggctcaatgaaatttcaatgaaatcctaatatgactcatagattttgagaaattatgaaa

SEQ ID NO: 31992 - DNA, 120 bp, synthetic construct
  source 1..120: mol_type = other DNA
ggttcagtaaaagacaaaagatcactggaacagaaaataaaatccacggaaaaacgaaatatataagatgaagatggcattacaaatcagcagagaaagaatgcaccagtcaataaatct

SEQ ID NO: 31993 - DNA, 120 bp, synthetic construct
  source 1..120: mol_type = other DNA
ccagatgaaaggaaaattagatctcacctgtattattactaaaatcactcaccaaaaccaaaaaacaattaacaaagccccatttggattaaagttctatatgtagaaagggaaatttca

SEQ ID NO: 31994 - DNA, 120 bp, synthetic construct; identical to SEQ ID NO: 8952
  source 1..120: mol_type = other DNA

SEQ ID NO: 31995 - DNA, 120 bp, synthetic construct
  source 1..120: mol_type = other DNA
gatactcaatttcaggagtgagcagggaatgcagattttaaaaattgtatacgtattcaagtggcaataatagaaaaatatgacaaaatctgggattgttactaatgcagagaaattgga

SEQ ID NO: 31996 - DNA, 120 bp, synthetic construct
  source 1..120: mol_type = other DNA
acttcagggtatgtaccccggataaactcttttccatctacttaaggactgtctttgcagcattatttgtgatagcagaaattggaaatattgagaatgcatcggtagtagaaataatag

SEQ ID NO: 31997 - DNA, 120 bp, synthetic construct
  source 1..120: mol_type = other DNA
tagtaaaattaaacattaaaaaaagatactatattttgttcagtgataggtagagactataaatatatgtaaatagacttaaatatttaaaatatattaataagcctttgggaagaaggg

SEQ ID NO: 31998 - DNA, 120 bp, synthetic construct; identical to SEQ ID NO: 8953
  source 1..120: mol_type = other DNA

SEQ ID NO: 31999 - DNA, 120 bp, synthetic construct
  source 1..120: mol_type = other DNA
ctgacagccactcccaccagctactgcatatgctttccatctctaaaaatgggtttaatttttagtaggcagatgccattcctactgccctaattcctccctcccttttttccctctcta

SEQ ID NO: 32000 - DNA, 120 bp, synthetic construct
  source 1..120: mol_type = other DNA
gccagatcattctaaaccagcactagaaaactttatctattgcttagtattcatatgacttgacatatgacaggatttctctttcctccaaagcatttacaatctagggaaatgttacta

SEQ ID NO: 32001 - DNA, 120 bp, synthetic construct
  source 1..120: mol_type = other DNA
gaaagaaaaatcaatttggatattctatttctgtagttttggtatcactacagaggattacccaatcaacaccctcaaatatccagttaggcaagaaactggagacaaaatctcctcatg

SEQ ID NO: 32002 - DNA, 120 bp, synthetic construct
  source 1..120: mol_type = other DNA
aaactatacatgcaaacattgaaacagaagaatgtatagttataaggtaagttgaggtcaaataaaagaaggaatggcaagatatttactcagctgactgagaattcaagttcagtgaca

SEQ ID NO: 32003 - DNA, 120 bp, synthetic construct; identical to SEQ ID NO: 8954
  source 1..120: mol_type = other DNA

SEQ ID NO: 32004 - DNA, 120 bp, synthetic construct
  source 1..120: mol_type = other DNA
atgtgaagacaatagtatttttttttcagcttcttttctgaaaatgagtgctctccttccatacttggcagtcattgtgatgggaattaagtacaaaacacattctctgttttataataa

SEQ ID NO: 32005 - DNA, 120 bp, synthetic construct
  source 1..120: mol_type = other DNA
tggccaacatggtgaaaccctgtctctagtgaaaatacaaaaattctctgggcctggtggtacacgcctgtaatcccagctactcaggaggctgaggcaggagaattgcctgtgcccggg

SEQ ID NO: 32006 - DNA, 120 bp, synthetic construct
  source 1..120: mol_type = other DNA
caaaaatggaaaataccactgaaatgccgaacattttaatatgctgcacttgaaatttgttataaaaactttcatgcgctgcacttaacatttgctagaaaaatactaagaataaattta

SEQ ID NO: 32007 - DNA, 120 bp, synthetic construct; identical to SEQ ID NO: 8955
  source 1..120: mol_type = other DNA

SEQ ID NO: 32008 - DNA, 120 bp, synthetic construct
  source 1..120: mol_type = other DNA
aagactagcagggcgtgggaacctagaaacttaggatgactgagatttataggttatgttagggggactggaaagtcagagaaatagtcatttgggtttatgaattttaaagtatgactt

SEQ ID NO: 32009 - DNA, 120 bp, synthetic construct
  source 1..120: mol_type = other DNA
aaaaattaagatattactaaattacataagaataaactctctgactgcctaaaatttggaattagacaattctaaattcctatccaggttgtcacttccaagtcctgtggccttgggcaa

SEQ ID NO: 32010 - DNA, 120 bp, synthetic construct
  source 1..120: mol_type = other DNA
gactataagaaggcaagaggagtatcaaggaaacaaggtaggaggcaagagatattggtgtttgggcaaggattgtcatggtggtggaaggtggtttgatttggagtataatttgaaagc

SEQ ID NO: 32011 - DNA, 120 bp, synthetic construct; identical to SEQ ID NO: 8956
  source 1..120: mol_type = other DNA

SEQ ID NO: 32012 - DNA, 120 bp, synthetic construct
  source 1..120: mol_type = other DNA
taggctactggaggccttggacagccagggagggatttttgggtagctcacctttgtgtggttgacagggttgtttgtagatattcaatattaataaaatgaaaaaatgctcaccagaat

SEQ ID NO: 32013 - DNA, 120 bp, synthetic construct
  source 1..120: mol_type = other DNA
tacccttaaattcctaacactgaggtagcttcttgcactggttaaatctggtattctggtggactgttactggagaggttttttcccaagaaatatgagatgtaaatgacaacagtagac

SEQ ID NO: 32014 - DNA, 120 bp, synthetic construct
  source 1..120: mol_type = other DNA
gtatatgtgcacaacgtgcagttttgttacatatgtatacatgtgccatgttggtatgctgcacccattaactcgtcatttacattaggtatatctcctaatgctatccctccccgctcc

SEQ ID NO: 32015 - DNA, 120 bp, synthetic construct; identical to SEQ ID NO: 8957
  source 1..120: mol_type = other DNA

SEQ ID NO: 32016 - DNA, 120 bp, synthetic construct
  source 1..120: mol_type = other DNA
attattatactttaagttttagggtacatgtgcacaatgtgcaggttagttacatatgtatacatgtgccatgctggtgcgctgcacccactaactcgtcatctagcattaggtatatct

SEQ ID NO: 32017 - DNA, 120 bp, synthetic construct
  source 1..120: mol_type = other DNA
ggatggctgggtcaaatagtatttctagttctagatccctgaggaatagccacactgacttccacaatggttgaactagtttacagccccaccaacagtgtaaaagtgttcctgtttctc

SEQ ID NO: 32018 - DNA, 120 bp, synthetic construct
  source 1..120: mol_type = other DNA
attttttcatgtgtcttttggctgcataaatgtcttctttttagaagtctctgttcatatccttcacccacttgttgatggggttgtttgtttttttcttgtgaatttgtttgagttctt

SEQ ID NO: 32019 - DNA, 120 bp, synthetic construct
  source 1..120: mol_type = other DNA
taattagatcccatttgtccattttggcttttgttgccattgcttttggtgttttagacatgaagtccttgcccatgcctatgtcctgaatggtattgcctaggttttcttctagggttt

SEQ ID NO: 32020 - DNA, 120 bp, synthetic construct; identical to SEQ ID NO: 8958
  source 1..120: mol_type = other DNA

SEQ ID NO: 32021 - DNA, 120 bp, synthetic construct
  source 1..120: mol_type = other DNA
acataacgtatttgtcataaaactgcaagtttgtaccctttggccaacttctgcccatttcttccaccccctaacttctggtaatcacctttctgctgagttcaactttttaaggttcca

SEQ ID NO: 32022 - DNA, 120 bp, synthetic construct
  source 1..120: mol_type = other DNA
tgtataatatttcattgtgtgtgtgtgtgtgtgtatgtgtgtgtgtctgtgtatcacattttctttatccattcatccactgatggacacctagtttattcctctatcccgggtattgta

SEQ ID NO: 32023 - DNA, 120 bp, synthetic construct
  source 1..120: mol_type = other DNA
attggaggaaccacaatactgttttccataatggctgtattactttacattcctaacaacagtgtacaagggttcccttttctccatatccttgccaacacttgttatcccttgacattt

SEQ ID NO: 32024 - DNA, 120 bp, synthetic construct; identical to SEQ ID NO: 8959
  source 1..120: mol_type = other DNA

SEQ ID NO: 32025 - DNA, 120 bp, synthetic construct
  source 1..120: mol_type = other DNA
tctcattgttcagttcccacctatgagtgagaacatgcagtgtttggttttctgtccttgcaatagtttgctgagaatgatggtttccagcttcatccatgtccctacaaaggacatgaa

SEQ ID NO: 32026 - DNA, 120 bp, synthetic construct
  source 1..120: mol_type = other DNA
cacaataaacacacgtgtgcatgtgtctttatagtagcatgatttataatcctttgggtatatacccaataatgagatggctgggtcaaatggtatttctagttctagatccttgaggaa

SEQ ID NO: 32027 - DNA, 120 bp, synthetic construct
  source 1..120: mol_type = other DNA
tctaactggtgtgagatggtatctcactgtggttttgatttgcatttctctgatggccagtgatgatgagtattttttcatatgtctgttggctgcgtaaatgtcttcttttaagaattg

SEQ ID NO: 32028 - DNA, 120 bp, synthetic construct; identical to SEQ ID NO: 8960
  source 1..120: mol_type = other DNA

SEQ ID NO: 32029 - DNA, 120 bp, synthetic construct
  source 1..120: mol_type = other DNA
gggccgggcgcggtggctcaagcctgtaatcccagcactttgggaggccgaggtgggcggatcacgaggtcaggagatcaagaccatcctggctaacacggtgaaaccctgtctctacta

SEQ ID NO: 32030 - DNA, 120 bp, synthetic construct
  source 1..120: mol_type = other DNA
gaacccgggaggcagagcctgcagtgagccgagatcgcgccactgcactccagcctgggcaacagagccagactccgtctcaaaaaaaaaaaaaaaaagaagaggaacgacctaagcaca

SEQ ID NO: 32031 - DNA, 120 bp, synthetic construct
  source 1..120: mol_type = other DNA
ttgcgccacatgcgccccctcagccttggactttccatcctccataactgtaagaaataataatacatttcttttctttataaattacccagtttcagatattctgttataagcaacaga

SEQ ID NO: 32032 - DNA, 120 bp, synthetic construct
  source 1..120: mol_type = other DNA
tttgacgagataccacttatttttgcttttgttactgtgtttttggtgtcatctaaaacaacttgcaaagaccaatgtcatggaacttttcactgttttattataggagttttatagtgg

SEQ ID NO: 32033 - DNA, 120 bp, synthetic construct; identical to SEQ ID NO: 8961
  source 1..120: mol_type = other DNA

SEQ ID NO: 32034 - DNA, 120 bp, synthetic construct
  source 1..120: mol_type = other DNA
tgtctcttgttataatttttgactaaaagtctattttgcctgatgtaagtatagccacccctaccgtcttttgttttccatttgcatggagcatcttcttttcatccctttactttcatt

SEQ ID NO: 32035 - DNA, 120 bp, synthetic construct
  source 1..120: mol_type = other DNA
tcaagtaattattgatagttaaggacttaatatagttattttcttggttgttttttggctgttttgtatatcctttcttcctttcttcctgtctttctttgtgatttgctgattttctgt

SEQ ID NO: 32036 - DNA, 120 bp, synthetic construct
  source 1..120: mol_type = other DNA
attattaaaatagattacatacaaaaactctacatattattctccctactttttacattctcagtgtcaaaatttacatttaaaaaaattgtatattcattaacaaattatatactttta

SEQ ID NO: 32037 - DNA, 120 bp, synthetic construct; identical to SEQ ID NO: 8962
  source 1..120: mol_type = other DNA

SEQ ID NO: 32038 - DNA, 120 bp, synthetic construct
  source 1..120: mol_type = other DNA
tagaagtgctaatatccttttgatgtacctttaaatgtgatatgcttctttcaagattctctctttaactttgattattgacaatttgacataatgtcttggagaagtcttctttgggtt

SEQ ID NO: 32039 - DNA, 120 bp, synthetic construct
  source 1..120: mol_type = other DNA
ctctgagactccaataatgcaaaaagttagctcccttgatggtgtcccataaatcttgtacatatttcttcatttcttttctttgtggtttttttttttttttgtactctgactagataa

SEQ ID NO: 32040 - DNA, 120 bp, synthetic construct
  source 1..120: mol_type = other DNA
tatggctctgttttgtttttttttctctttgttgaacttctacttttgttcttgtgttgttttcctgatgtcattatattgtttgtgttgtcttgtagctcactgagctttcttataaca

SEQ ID NO: 32041 - DNA, 120 bp, synthetic construct; identical to SEQ ID NO: 8963
  source 1..120: mol_type = other DNA

SEQ ID NO: 32042 - DNA, 120 bp, synthetic construct
  source 1..120: mol_type = other DNA
cacatccaactgattttttttttttttagagacggagtctcactatgttgcccaggccagtctcgaactcctagtctcaagaagtcctcctgcctcggcctcccaaagtgctgggatttc

SEQ ID NO: 32043 - DNA, 120 bp, synthetic construct
  source 1..120: mol_type = other DNA
gaattctcaagtttgtgtccttttttccaatcccacaaagtcaaactgactgtgagatgtttccttttgttgtccatggtggctcatttggggactcagcctagatgggagagtgaaatg

SEQ ID NO: 32044 - DNA, 120 bp, synthetic construct
  source 1..120: mol_type = other DNA
gcctctcctaaccattcaactatgctgatcatctcaatgttctgggtggagtgagaaataagtgggcttatcggacagcatcctgaatggctgggggatgtgggcactcattaagttctg

SEQ ID NO: 32045 - DNA, 120 bp, synthetic construct; identical to SEQ ID NO: 8964
  source 1..120: mol_type = other DNA

SEQ ID NO: 32046 - DNA, 120 bp, synthetic construct
  source 1..120: mol_type = other DNA
gaggaattgcatagctttggggaaaatggtgcctcatagcgtgatggtgaacatttgtgaacatttctcagaatattctgtaactactttgatttcttcttcttttttaaattttggtca

SEQ ID NO: 32047 - DNA, 120 bp, synthetic construct
  source 1..120: mol_type = other DNA
tcggttatcatatgaagtgtctagagaattgaagaaaaattataagattcttaatttctcataaacagactcctatattaatttcttagcaatacaataatttaccactttgtgttgaat

SEQ ID NO: 32048 - DNA, 120 bp, synthetic construct
  source 1..120: mol_type = other DNA
tagatagaaatctgtttacctcttcctcttttagatctctgagaagaaaaatcttttaggaaagaaaaaaacatattaactttaccaacagttcatgaaaaaataagtttatcgggccgg

SEQ ID NO: 32049 - DNA, 120 bp, synthetic construct
  source 1..120: mol_type = other DNA
acaaaaaaattggccgggcatggtggcaggtgcctgtggtcactgctcagaaggctgagagaggagaatggcgtgaacccgggaggcggagcttgcagtgagccgagattgcgccactgc

SEQ ID NO: 32050 - DNA, 120 bp, synthetic construct; identical to SEQ ID NO: 8965
  source 1..120: mol_type = other DNA

SEQ ID NO: 32051 - DNA, 120 bp, synthetic construct
  source 1..120: mol_type = other DNA
cacatccacaatctcataaccttatagttctggtgtagctggtgggcctggtgtggacaactttagtggcttccagcaagaatgagaggtagctctagtggttcttgttgagttctggag

SEQ ID NO: 32052 - DNA, 120 bp, synthetic construct
  source 1..120: mol_type = other DNA
gaacattgagtgttggggcgtgagggttagggatagccatggtacattgaaattagtggtactggtgtgtcccttcaaaaaagtagacagcgcattgccgtcttctcataactctcacgt

SEQ ID NO: 32053 - DNA, 120 bp, synthetic construct
  source 1..120: mol_type = other DNA
aagtagacagcgcattgccgtcttctcataactctcacgtttcaaaacctgaatttgatatccagctccctcctcagctaggtgaacttgagtaagtctcaatcttttgagcataaattt

SEQ ID NO: 32054 - DNA, 120 bp, synthetic construct
  source 1..120: mol_type = other DNA
attgtttcggagcggttccttaacctttctaatatcttggaagtagacagaagatggaaatgaattcttttgatggtcttaagaaggagaactatttaccttttctgagaaaaatgcaca

SEQ ID NO: 32055 - DNA, 120 bp, synthetic construct; identical to SEQ ID NO: 8966
  source 1..120: mol_type = other DNA

SEQ ID NO: 32056 - DNA, 120 bp, synthetic construct
  source 1..120: mol_type = other DNA
taagtgactgtgtcaatcaccaattttataatattagccaggctaaatgatagtcagaaggagtttcagagtttcttttacctcttgatacttcagcagctagtctcctggtttttgcct

SEQ ID NO: 32057 - DNA, 120 bp, synthetic construct
  source 1..120: mol_type = other DNA
aactgtgttcactctcgttattctaggatacattatattttttggtccggccacttcactaaggccatcttcatgaatggatttaggctttttactgaaccatctgttccagtgcctgaa

SEQ ID NO: 32058 - DNA, 120 bp, synthetic construct
  source 1..120: mol_type = other DNA
tgctcagaaatctctggtagatttctcccactcacttagaagcagttcagttcatgcaatggtgcactatgcaaggttctggaaacacaactgtaaacaagacagatttctttcctgact

SEQ ID NO: 32059 - DNA, 120 bp, synthetic construct; identical to SEQ ID NO: 8967
  source 1..120: mol_type = other DNA

SEQ ID NO: 32060 - DNA, 120 bp, synthetic construct
  source 1..120: mol_type = other DNA
aaaatccaggaaagagagaccttatggcatagaaataggtcttagcttttatgagctccatctctatttcatcgacaagtactactctgtatttgtctcttcttatcatctccccaaatt

SEQ ID NO: 32061 - DNA, 120 bp, synthetic construct
  source 1..120: mol_type = other DNA
taattttcttttaaaatattcttattacttttgctaaactctgtgatttttttttttttttgagatggagtcttgcactgtcacccaggctggagtgcaatggcgtgatctcggctcact

SEQ ID NO: 32062 - DNA, 120 bp, synthetic construct
  source 1..120: mol_type = other DNA
accattttggtcaggctggtcttgaactcctgaccttgtgatccgcccgccttggcctcccaaagtgctgggattacaggcgtgagccaccgctcccggcctgtgactttttctttgaca

SEQ ID NO: 32063 - DNA, 120 bp, synthetic construct; identical to SEQ ID NO: 8968
  source 1..120: mol_type = other DNA

SEQ ID NO: 32064 - DNA, 120 bp, synthetic construct
  source 1..120: mol_type = other DNA
tgatcacctcttactatccaccagatagactttttttctttcccctttctgctacttcaactcctttattcttttatttgccgcatattactgtcctcacattcccgcccctgcccattt

SEQ ID NO: 32065 - DNA, 120 bp, synthetic construct
  source 1..120: mol_type = other DNA
cagatttcctcctcagttgaaccctttactccccaggcaggaagaatgttaaagggaatcagtggtctacgaagctatccactggggtatggggaaaatattagaacttctattttctgt

SEQ ID NO: 32066 - DNA, 120 bp, synthetic construct
  source 1..120: mol_type = other DNA
tactcaaaacatttttatgagtgagtgatcaaaaaactttcagcaccttgactgaagggtgctgactgaaggtggttttattaatgaaagccacagcaaaggacagaaatttcttgtcac

SEQ ID NO: 32067 - DNA, 120 bp, synthetic construct; identical to SEQ ID NO: 8969
  source 1..120: mol_type = other DNA

SEQ ID NO: 32068 - DNA, 120 bp, synthetic construct
  source 1..120: mol_type = other DNA
cattaagactacttcaaacgaacaataggtgaatccatctcaagatataataacacacctccaaccagggcagattaggcatttgtctactgagtcttctaggtgtttggtcctgtgaga

SEQ ID NO: 32069 - DNA, 120 bp, synthetic construct
  source 1..120: mol_type = other DNA
tcggggaggaaaggataactagatggtgtactcagtactactgtatattccttttcttcctttagtgtctgaaatgccctgtctatagggcagttagaagatggtccaccctattaatag

SEQ ID NO: 32070 - DNA, 120 bp, synthetic construct
  source 1..120: mol_type = other DNA
ctttgttcagtttaaactctagaaaccaaaggagaaaccagcactatcagcctagagcttagttaactgtgggttgtttcccccaggcttccagaggaatcaataagagtgaaagaaaaa

SEQ ID NO: 32071 - DNA, 120 bp, synthetic construct; identical to SEQ ID NO: 8970
  source 1..120: mol_type = other DNA

SEQ ID NO: 32072 - DNA, 120 bp, synthetic construct
  source 1..120: mol_type = other DNA
agaatctgtgtcataacagagacttagaacattagtgaggcaggagaaaaggcagaggatcaaaaggctaggaagatttaataatgctttggaggaccttgaacttgtataggatactgg

SEQ ID NO: 32073 - DNA, 120 bp, synthetic construct
  source 1..120: mol_type = other DNA
caggagaaaaggcagaggatcaaaaggctaggaagatttaataatgctttggaggaccttgaacttgtataggatactggaagggaactcactctttctgggctttagaattatttctag

SEQ ID NO: 32074 - DNA, 120 bp, synthetic construct
  source 1..120: mol_type = other DNA
tttcggctcactgcaacctccacttcctgggtttaagcaattctcctgcctcagcctcccaagtagctgggattacaggcatgcgccaccacacccagctaattttgtatttttagtaga

SEQ ID NO: 32075 - DNA, 120 bp, synthetic construct
  source 1..120: mol_type = other DNA
ttgtaactcttgaggcagagaaccttccacagaataagcattttataaatgtttgataattaaaaatgagaaaaatgactatatttaaaaagaggcagactggataaagaaaatgtggta

SEQ ID NO: 32076 - DNA, 120 bp, synthetic construct; identical to SEQ ID NO: 8971
  source 1..120: mol_type = other DNA

SEQ ID NO: 32077 - DNA, 120 bp, synthetic construct
  source 1..120: mol_type = other DNA
taaaaaaagaagagccttgaaacaaatgaaggtgaacaaaggaagtcaagttgttggagttagatagcaagaagaaatccagtccagaggtctatggtgctaggaagagtgagccagtaa

SEQ ID NO: 32078 - DNA, 120 bp, synthetic construct
  source 1..120: mol_type = other DNA
atagtgggtaccttataagcacaaacttgtttaatccctaataaactgtacgatgaaattctttgagatggagagagacactagaagttacccagccaacaaatggcagagtttctgact

SEQ ID NO: 32079 - DNA, 120 bp, synthetic construct
  source 1..120: mol_type = other DNA
agtcttctatgcatcctgtggtggtgatttctaagttaagaagtcagtcacttgaagaggaaggtgatgacttctagttttaggatgctccacctgccaaaaataatctcaaaattgttg

SEQ ID NO: 32080 - DNA, 120 bp, synthetic construct
  source 1..120: mol_type = other DNA
aaagaagaaaaagaggaaggggcagtaagcttaatcaatggaatattatctgaaaattttccaaatcttgagagggatatgaacatccggattgaagacgatcaaagcatcccaagcaag

SEQ ID NO: 32081 - DNA, 120 bp, synthetic construct; identical to SEQ ID NO: 8972
  source 1..120: mol_type = other DNA

SEQ ID NO: 32082 - DNA, 120 bp, synthetic construct
  source 1..120: mol_type = other DNA
tcatgatttcttttctctttacatgcttcattattttttgctgaaatctagacattttgaatattataatgttgcaatttagaaaccagatttcctccctctacagagtttgctgttgtt

SEQ ID NO: 32083 - DNA, 120 bp, synthetic construct
  source 1..120: mol_type = other DNA
tgaatgtaacgtttgatgtttctgcccggttagcttagtcattagctaatgattgaacagagacaatgcctagaaccaaagcaaacactatgctagtctgtgccaaggaactctgtgtgt

SEQ ID NO: 32084 - DNA, 120 bp, synthetic construct
  source 1..120: mol_type = other DNA
ggtcaccttcttcctacaggatttaaagcaaaccaagggggatcttggcaagctttcagatgacccttatagatatatagaggttttccagactttcacccatatatttaaactctcctg

SEQ ID NO: 32085 - DNA, 120 bp, synthetic construct; identical to SEQ ID NO: 8973
  source 1..120: mol_type = other DNA

SEQ ID NO: 32086 - DNA, 120 bp, synthetic construct
  source 1..120: mol_type = other DNA
ggagagactaagagaggccttggtaaagcatacctgtctatctcctgattcagtagagggacagctaaccctaaaggataaatttattactcaggcagctcctgacctcaggaggaagtt

SEQ ID NO: 32087 - DNA, 120 bp, synthetic construct
  source 1..120: mol_type = other DNA
agaagctttaatggccaccaggcaagcccacaaaccccagaattcccagggtacacctgttaactactaaagatatggccagaacagttatctcattctaaaagtttatccactcccata

SEQ ID NO: 32088 - DNA, 120 bp, synthetic construct
  source 1..120: mol_type = other DNA
aatctttggcactaattttttttccttgtataatacacgtatttattatagtatgtatagtatgtatgtatgtagttacagtgtgtataacttgggtatacatacccaagtatatataat

SEQ ID NO: 32089 - DNA, 120 bp, synthetic construct; identical to SEQ ID NO: 8974
  source 1..120: mol_type = other DNA

SEQ ID NO: 32090 - DNA, 120 bp, synthetic construct
  source 1..120: mol_type = other DNA
tcatgcccaaatgttgcatttcccaagaccaccctggcctgccatgcccccatcctgtgcctgtaaaaatcctgagaccctagcaggcagggacagaagcggctggacgtcaaaaggaac

SEQ ID NO: 32091 - DNA, 120 bp, synthetic construct
  source 1..120: mol_type = other DNA
tggagtttggccagggcagttggaggggaacccagctgctgagcagcctgactccaggggaaaaccaccttcccactccatctcccttctggctcccccatctgctgagagccacttcca

SEQ ID NO: 32092 - DNA, 120 bp, synthetic construct
  source 1..120: mol_type = other DNA
ttgagctagttaacactagctgcctatacatggcaaaactaaaagagcacacagtaacacatgcccactggggcttcaggaactgtaaacatacacccctagatgctgccgtgaggccag

SEQ ID NO: 32093 - DNA, 120 bp, synthetic construct; identical to SEQ ID NO: 8975
  source 1..120: mol_type = other DNA

SEQ ID NO: 32094 - DNA, 120 bp, synthetic construct
  source 1..120: mol_type = other DNA
tacagcaaagaccgtaagataggaatgtgtctggtgttttcaaggaatatgaagtggccagtgtcactggtatgaactgatccaggaaaacaacagtaggaaaataagttagaaagataa

SEQ ID NO: 32095 - DNA, 120 bp, synthetic construct
  source 1..120: mol_type = other DNA
tctacaaaataataaaaaaattagccaggcatggtggcatgcacctgtagtccagttactcagaagactgaggcaggggaagaccctttgatcccaggaggttgaggctgcagtgagcta

SEQ ID NO: 32096 - DNA, 120 bp, synthetic construct
  source 1..120: mol_type = other DNA
agatgggtcattatgtaggcaaatgacacgtttttacctatgtctgcataaagacataaaacaattttgctgctgtgttaagaaaagacagtagtgggaggaaaagaagaagcaaggaga

SEQ ID NO: 32097 - DNA, 120 bp, synthetic construct; identical to SEQ ID NO: 8976
  source 1..120: mol_type = other DNA

SEQ ID NO: 32098 - DNA, 120 bp, synthetic construct
  source 1..120: mol_type = other DNA
tttattgattaacagagggcttctaaagggcagttatttagataagaacttcttagatgagagtgcaacttcgctgagcgtagtagattctaatcttaggccctttgccatagacatttt

SEQ ID NO: 32099 - DNA, 120 bp, synthetic construct
  source 1..120: mol_type = other DNA
tctgtcccctctctgggttactgggtccaaccagttggcaagttttagctctgattttgtttcttaacttctagaataacagaaatatagggtatcttagtatttcaatgacaaactctg

SEQ ID NO: 32100 - DNA, 120 bp, synthetic construct
  source 1..120: mol_type = other DNA
atttttggaattaataagtttaccaaggttattaaatacaagaataatatccaagaaccaacacatttttataagacagaaatgaagagaacatacaatttgaaaagaaaatacaattca

SEQ ID NO: 32101 - DNA, 120 bp, synthetic construct; identical to SEQ ID NO: 8977
  source 1..120: mol_type = other DNA

SEQ ID NO: 32102 - DNA, 120 bp, synthetic construct
  source 1..120: mol_type = other DNA
taacaccaatgtttatctattccctgggccaatctactaaattatcatgatatggataataatcctccatggcaatgtcaaagatggtatttaaatagacatttgatagatagatagata

SEQ ID NO: 32103 - DNA, 120 bp, synthetic construct
  source 1..120: mol_type = other DNA
aaatagccaggcacagaaagacaaatactgtgatctcacttatacatggaatctaaaaagtcagactcataggagtggagagcagaatggtgattacaggctggggaagtggggcgaata

SEQ ID NO: 32104 - DNA, 120 bp, synthetic construct
  source 1..120: mol_type = other DNA
cagtctgttaaccaaaaaaaattgataagcatgtgaagtgatgattatgttaatcagtttaattcaatcattcactatatagcttaatttaataattccactatatataatatatagatt

SEQ ID NO: 32105 - DNA, 120 bp, synthetic construct; identical to SEQ ID NO: 8978
  source 1..120: mol_type = other DNA

SEQ ID NO: 32106 - DNA, 120 bp, synthetic construct
  source 1..120: mol_type = other DNA
aaagacttcctacagccatggattggaaaacttaatattactaaggtgacaatattatccaatgtgatagggagattcaatgtaattccttaccaaaatcttaatggcattattttttgg

SEQ ID NO: 32107 - DNA, 120 bp, synthetic construct
  source 1..120: mol_type = other DNA
ttaatacaaagttacagtaatcaagagcacatgcagcactggtataaagaaaaatacagagacaaatggagaagcattgagaggccagaagtgaactctcaattcatttaccacgggtgc

SEQ ID NO: 32108 - DNA, 120 bp, synthetic construct
  source 1..120: mol_type = other DNA
ttgaaccaaagacctaaatttaagtgataaaactgtaaaactcttaaaagagaacaagggaaaaatcttcatgactttggattaggtaatggcttctttaaaatgacaccaaaagcacag

SEQ ID NO: 32109 - DNA, 120 bp, synthetic construct; identical to SEQ ID NO: 8979
  source 1..120: mol_type = other DNA

SEQ ID NO: 32110 - DNA, 120 bp, synthetic construct
  source 1..120: mol_type = other DNA
aatatcctctagcaatgtaagaatagaagaaaattttctgagtctactaaatagtgccagggaagaatcaaaagctaacatcaataacagtagtgttgtattgctcactttacccctaaa

SEQ ID NO: 32111 - DNA, 120 bp, synthetic construct
  source 1..120: mol_type = other DNA
cagtattgtcattcacacataatgtgcttaagtacttagataatcgaatggaatctataaaaccaccaaacttctagaataattaatcagggattttagcaaggtctcagtgtacaaaat

SEQ ID NO: 32112 - DNA, 120 bp, synthetic construct
  source 1..120: mol_type = other DNA
gcaagatacctacactgaaaactgcaaaacccttcagataaaaatttaaaaatacctacataaaggaagagacctaacaaaagtgttgtatctagactatttgaagaatttcttcaactt

SEQ ID NO: 32113 - DNA, 120 bp, synthetic construct; identical to SEQ ID NO: 8980
  source 1..120: mol_type = other DNA

SEQ ID NO: 32114 - DNA, 120 bp, synthetic construct
  source 1..120: mol_type = other DNA
aagtataaaagaaatgaaatatgtgtccacaatagacttgaaagagaatgttcatagcaattttattaataatagcccaaacctagaaacatccaggtatccatcagcagaaaaatgagt

SEQ ID NO: 32115 - DNA, 120 bp, synthetic construct
  source 1..120: mol_type = other DNA
aatagtgtattattaccatatgaagttaatgaaaaggcaaaactaaactttgatgatgggaatcagactactggttgcctgtgaaaaattaatgttctttgtttggattaaggtatgaat

SEQ ID NO: 32116 - DNA, 120 bp, synthetic construct
  source 1..120: mol_type = other DNA
aaaaaagagagattacaaaattttgagtttgagagtagaaattcaagcctaatcttcttgagccttttaagactactgggttgaaagggagacagaccctagcttactttataacactga

SEQ ID NO: 32117 - DNA, 120 bp, synthetic construct
  source 1..120: mol_type = other DNA
tttcaatctcatgtctttggaaaatcctgcttcgcaaatatggaagagaaagctataccctcccctctaggaatcagaggttgtcctaacgtcctctttcacatcattctcttctataaa

SEQ ID NO: 32118 - DNA, 120 bp, synthetic construct; identical to SEQ ID NO: 8981
  source 1..120: mol_type = other DNA

SEQ ID NO: 32119 - DNA, 120 bp, synthetic construct
  source 1..120: mol_type = other DNA
tgcttcagcctcctgagtagctgggactacaggcatgtgccaccaaactcagctaattttttgatgtgtgtagaaatggggcctcactatgttgcccaggctggtctcaaattcctgtcc

SEQ ID NO: 32120 - DNA, 120 bp, synthetic construct
  source 1..120: mol_type = other DNA
ctatctagaaacagaataaaggtgagggggtaggtaggcaggattaaacaaacaaaaaacactgtcctctgtgaatgatcgattcaaccaaattaaagaccatgtatcaaaaccctgcac

SEQ ID NO: 32121 - DNA, 120 bp, synthetic construct
  source 1..120: mol_type = other DNA
gcagaaattatggtatgttacttcctatattaggtcatgaaaacattaaagtcttccttcttctcccccacttccctcccctcttctctctctctcatcatctgttctgggggaagtcag

SEQ ID NO: 32122 - DNA, 120 bp, synthetic construct
  source 1..120: mol_type = other DNA
gtaatgagccttcttgtaaagagacccccaaccccagtcaaggattcagatggctgcagccccagccaatggcttcactgcaacctatgagagactgagccagagctacccagctaagct

SEQ ID NO: 32123 - DNA, 120 bp, synthetic construct; identical to SEQ ID NO: 8982
  source 1..120: mol_type = other DNA

SEQ ID NO: 32124 - DNA, 120 bp, synthetic construct
  source 1..120: mol_type = other DNA
ttatcctaacttatggtttcattgctaattcatagacacttgtcccattatagagatctagtgatttccatgtgagatttttgccctcacacatgccaattccccttgttctacctgttt

SEQ ID NO: 32125 - DNA, 120 bp, synthetic construct
  source 1..120: mol_type = other DNA
cttagttcagatgccttggccctgtgcatagtgtgctctatctcatgaatctgaagtaaagagaatcaaaaggatgaagagctttaaatcttttgacaacatttaagagagaacaggaaa

SEQ ID NO: 32126 - DNA, 120 bp, synthetic construct; identical to SEQ ID NO: 8983
  source 1..120: mol_type = other DNA

SEQ ID NO: 32127 - DNA, 120 bp, synthetic construct
  source 1..120: mol_type = other DNA
cagggtcacaggacaatagtggagggaaggtcagcagataaacaagtgaacaaaggtctctgcttttcctaggcagaggaccctgcggccttccgcagtgtttgtgtccctgggtacttg

SEQ ID NO: 32128 - DNA, 120 bp, synthetic construct
  source 1..120: mol_type = other DNA
agagcacagggttgggggtaaggtcacagatcaacaggatcccaaggcagaatttttcttagtacagaacaaaatgaaaagtctcccatgtctacttctttctacacagacgcggcaacc

SEQ ID NO: 32129 - DNA, 120 bp, synthetic construct
  source 1..120: mol_type = other DNA
ggcagaggggctcctcacttcccagtaggggcgaccgggcagaggcgcccctcacctcccggatggcgcggctggccgggcggggggctgaccccccacctccctcccggacggggcagc

SEQ ID NO: 32130 - DNA, 120 bp, synthetic construct; identical to SEQ ID NO: 8984
  source 1..120: mol_type = other DNA

SEQ ID NO: 32131 - DNA, 120 bp, synthetic construct
  source 1..120: mol_type = other DNA
gacggggcggctggccgggcagaggggctcctcacttcccagtaggggcggccgggcagaggcgcccctcacctcccggacggggtggctggccgggagggggctgacccccccacctcc

SEQ ID NO: 32132 - DNA, 120 bp, synthetic construct
  source 1..120: mol_type = other DNA
ccagacggggcggcggggcagaggcgctccccacatctcagacgatgggcggccgggcagagacgctcctcacttcctagatgggatggtggccgggaagaggcgctcctcacttcctag

SEQ ID NO: 32133 - DNA, 120 bp, synthetic construct
  source 1..120: mol_type = other DNA
ggtagcggccgggcagaggctgcaatctcggcactttggggggccaaggcaggcggctgggaggtggaggttgtagccagccgagatcacgccactgcactccagcctgggcaccattga

SEQ ID NO: 32134 - DNA, 120 bp, synthetic construct
  source 1..120: mol_type = other DNA
caaaaaaatacgaaaacccgtcaggcgtggcggcgcgcgcctgcaatggcaggcactgggcaggctgaggcaggagaatcaggcagggaggttgcagtgagccgagatggcagcagcaca

SEQ ID NO: 32135 - DNA, 120 bp, synthetic construct; identical to SEQ ID NO: 8985
  source 1..120: mol_type = other DNA

SEQ ID NO: 32136 - DNA, 120 bp, synthetic construct
  source 1..120: mol_type = other DNA
cgctatctcatttatttctcacaatagtcctgtgctgaatgccataattatttgcattattatgagagttaggtgtgcctgaaagaagcaaggtaacgtcaccaagatcagagctactaa

SEQ ID NO: 32137 - DNA, 120 bp, synthetic construct
  source 1..120: mol_type = other DNA
aaaatgaagaggcttaaatgaaagtggacacaccatgactggaaatactataggacttaattttaagaacaagcaataacgtaacaggcgtttgaagaataggcaggaccccatcctgaa

SEQ ID NO: 32138 - DNA, 120 bp, synthetic construct
  source 1..120: mol_type = other DNA
aagatcttgcccaaccctagccttctaggacttacacatcgtgtatctcctaggacggaccacagttttacctaaccttccagttttctccctcttgtttttctccattctgccttccca

SEQ ID NO: 32139 - DNA, 120 bp, synthetic construct
  source 1..120: mol_type = other DNA
ctcatcccaacctcatccgatctgagggtagaagatacacttcttcaacggagaatgttccccgaactgggatgcccccacacaccaaggacaaggggaatccaaaaccatcttcagtgt

SEQ ID NO: 32140 - DNA, 120 bp, synthetic construct; identical to SEQ ID NO: 8986
  source 1..120: mol_type = other DNA

SEQ ID NO: 32141 - DNA, 120 bp, synthetic construct
  source 1..120: mol_type = other DNA
atctattctcttactggaatcaccttctgtgggattttccatccttattctagccttcagagtgctggcacatctgtgaccttctgcttagatcatcatgaaaattgtcctgattctttt

SEQ ID NO: 32142 - DNA, 120 bp, synthetic construct
  source 1..120: mol_type = other DNA
ttctaggtacattcaccaggaaagctgtccttggatggtgagtaggtcagtttcactaggtgtgatttcactttctgtcaaagaggaagaggcagaaagtgaagtgagagaactggaaaa

SEQ ID NO: 32143 - DNA, 120 bp, synthetic construct
  source 1..120: mol_type = other DNA
gagtgtgtgttgaagtatataattttaaagctacatttacagggaaatctcttcttactatttttgttatcaaatatggaggaggggaggcgtttgaagggaagtattgcagtagagtga

SEQ ID NO: 32144 - DNA, 120 bp, synthetic construct; identical to SEQ ID NO: 8987
  source 1..120: mol_type = other DNA

SEQ ID NO: 32145 - DNA, 120 bp, synthetic construct
  source 1..120: mol_type = other DNA
gaaacatctgtaccaagagtcattgctaacattaacattctttttcttcctgacctgttctgcccactgttgagggtttcccttgtccttgctgcatgtaagacttctccagctgtttat

SEQ ID NO: 32146 - DNA, 120 bp, synthetic construct
  source 1..120: mol_type = other DNA
tgctgtggcaccatctctgctcactgtaacctgcacctcccaggttcaagcgattctcctgcctcagcctcctgagtagctgggactataggcatgtaccaccacgcccagctaattttt

SEQ ID NO: 32147 - DNA, 120 bp, synthetic construct
  source 1..120: mol_type = other DNA
tttctcctaatgctatccctccccgctcctcccaccccacgacagaccctggtgtgtgatgttccccgccctgtgtccaggtgttctcattgttcaattcccacgcagccataaaaaagg

SEQ ID NO: 32148 - DNA, 120 bp, synthetic construct; identical to SEQ ID NO: 8988
  source 1..120: mol_type = other DNA

SEQ ID NO: 32149 - DNA, 120 bp, synthetic construct
  source 1..120: mol_type = other DNA
tttcacgtcacacactaagtggcaaagacagtattcgaagccaggaagaatcaagccagagcctagtcctaatttcactgaccctaaagggaggcttacatatttcatcaagaaataatc

SEQ ID NO: 32150 - DNA, 120 bp, synthetic construct
  source 1..120: mol_type = other DNA
aggaacaaatggggtggaactgtggtatagaacacgaaatgtaacaggttcagccttagacattttacttttttatacacttaggacattcagcatgaggttcaagaggagtttttacta

SEQ ID NO: 32151 - DNA, 120 bp, synthetic construct
  source 1..120: mol_type = other DNA
gcaggtggacatggtagaaaacgtgaaggtggatggttgattggactcagagctttagacctgtcagggataacagtgtccatcttattttcatttgtagctttgagtaaatcaataagt

SEQ ID NO: 32152 - DNA, 120 bp, synthetic construct; identical to SEQ ID NO: 8989
  source 1..120: mol_type = other DNA

SEQ ID NO: 32153 - DNA, 120 bp, synthetic construct
  source 1..120: mol_type = other DNA
gtcctcatggaagttaaattgtactgacaaaggaggaaaatgtcagggagttaacaattcagtctctgtggcttcctcctgtcctctccctgaaactgagatccagccaatctgcacatt

SEQ ID NO: 32154 - DNA, 120 bp, synthetic construct
  source 1..120: mol_type = other DNA
tgactggggcatcatcctcaatgccaccaacccctctccttcctgtggcttttctaactggaactggaactcagaaagtacattaatcaccaatttgggaagctataggaaagtatgttt

SEQ ID NO: 32155 - DNA, 120 bp, synthetic construct
  source 1..120: mol_type = other DNA
ttcttgagactttctccctggaaagtgaatatatgtattcatagggccttcacaagcacagactaacaagcaaagagctacattcactgggaaggaagactcaaaagtaagtgaaaaata

SEQ ID NO: 32156 - DNA, 120 bp, synthetic construct; identical to SEQ ID NO: 8990
  source 1..120: mol_type = other DNA

SEQ ID NO: 32157 - DNA, 120 bp, synthetic construct
  source 1..120: mol_type = other DNA
aactgttcttaaaaataatgtctgttaattttttttttaaaaaggaaagaagcactgatacatgctatgacatggaagaactctaaaaatattaggctaagggaaagaagccacatacac

SEQ ID NO: 32158 - DNA, 120 bp, synthetic construct
  source 1..120: mol_type = other DNA
taatgggtatgaagtttcgtttagggcgatgaaaatattctggaactagaaagtgatgatgatggtcacacagcaatgtcacatatacaataccacagaactgtacactttaaaatggtt

SEQ ID NO: 32159 - DNA, 120 bp, synthetic construct
  source 1..120: mol_type = other DNA
atgagtttaaaaatagaaaaaaaaatgatggcccagaagagcaagttcagagtgctgttcatgagtgatccgcatgggaccgcgatgcctctgacgtctgccatcctggagagcagcaga

SEQ ID NO: 32160 - DNA, 120 bp, synthetic construct; identical to SEQ ID NO: 8991
  source 1..120: mol_type = other DNA

SEQ ID NO: 32161 - DNA, 120 bp, synthetic construct
  source 1..120: mol_type = other DNA
tgatcagatttttctcccccttatgcagctgtattttctttcacttttttttaactgtatatatatattttttattttctcagttccacctatgtggacaattaattgtcaccatcttaa

SEQ ID NO: 32162 - DNA, 120 bp, synthetic construct
  source 1..120: mol_type = other DNA
cccatctctactaaaaatacaaaaataggctgggcatggtggcacatgcctgtaatcccagctactcatgagactgaggcaagagaattgcttgaacccgggaggcagaggttgcagtca

SEQ ID NO: 32163 - DNA, 120 bp, synthetic construct; identical to SEQ ID NO: 3201
  source 1..120: mol_type = other DNA

SEQ ID NO: 32164 - DNA, 120 bp, synthetic construct; identical to SEQ ID NO: 8992
  source 1..120: mol_type = other DNA

SEQ ID NO: 32165 - DNA, 120 bp, synthetic construct
  source 1..120: mol_type = other DNA
ttgttcaggggccaccttcaaggggatggggcttggaagagaggggatggcccagaactcatttcttttgcaatccattgcctaaaactcactgtcaggtgacacagagatgactctttc

SEQ ID NO: 32166 - DNA, 120 bp, synthetic construct
  source 1..120: mol_type = other DNA
tgtgggatatctggctgcctgaatgtccatggatcacacgcttgttctgttcagaagaaatcagtctcaggtgagctgtgtttgaagccaatgtcacattcactgtaaagaaagagaatc

SEQ ID NO: 32167 - DNA, 120 bp, synthetic construct
  source 1..120: mol_type = other DNA
ctaacacatgagaagtcaccagcaacacagaaatcaccaacaagtaggtcaccacatttttaaagatcataggaaattgttcacgccaacaaatctcagtgaacctcagctctcagcctt

SEQ ID NO: 32168 - DNA, 120 bp, synthetic construct; identical to SEQ ID NO: 8993
  source 1..120: mol_type = other DNA

SEQ ID NO: 32169 - DNA, 120 bp, synthetic construct
  source 1..120: mol_type = other DNA
aagcaatccccaaacaagcagtgttttccacaaaaacgtcatcctggactctaaaatggaaacccaagaatcccttgaaactgtgaaactgggacaatattaagattgtacttttcatct

SEQ ID NO: 32170 - DNA, 120 bp, synthetic construct
  source 1..120: mol_type = other DNA
cagaaatgtacacatgcacagacaagttttcccttctctcttccaactatatcacacaatcactggaatgacttgaggaggaaaggataaaattactcaagccgcaaccatgaagatggt

SEQ ID NO: 32171 - DNA, 120 bp, synthetic construct
  source 1..120: mol_type = other DNA
cacatcagaagaagagaatttaaagagagagagtgaaaacagggtcaattacgagaatttagtgtgtatccaatgataaaaataattgcagggcgctagttgagggtgtcagagagaaac

SEQ ID NO: 32172 - DNA, 120 bp, synthetic construct; identical to SEQ ID NO: 8994
  source 1..120: mol_type = other DNA

SEQ ID NO: 32173 - DNA, 120 bp, synthetic construct
  source 1..120: mol_type = other DNA
aagatgatggtatcgtctttccttccatgtccctccatggcacgtggggctgtgggaaccacccatctgaagagcacatcggctgcatttctccatcttcttgcccctccacagtgatca

SEQ ID NO: 32174 - DNA, 120 bp, synthetic construct
  source 1..120: mol_type = other DNA
ggagaaaagcttaagggggattgcactccacttagggatgaggctggctggagcattttcttattttgtttgtttgcttatttttattctttgtattcctaaatcattctgggatgatta

SEQ ID NO: 32175 - DNA, 120 bp, synthetic construct
  source 1..120: mol_type = other DNA
ggacaggattaacatacggagtaggaggatattctcaaaaatcgaaaccttataaatatctacgtccaatggcagaaaatacgaggctcatgaaacttctcaacatgcgctcccatggct

SEQ ID NO: 32176 - DNA, 120 bp, synthetic construct; identical to SEQ ID NO: 8995
  source 1..120: mol_type = other DNA

SEQ ID NO: 32177 - DNA, 120 bp, synthetic construct
  source 1..120: mol_type = other DNA
gaagatactggaaaagatacaagttatatgcccaaataattaaatttcatccatttgagtttgtggattttaagtaactatgacagtttcacacactggaggatttgatataaatttgat

SEQ ID NO: 32178 - DNA, 120 bp, synthetic construct
  source 1..120: mol_type = other DNA
tcagatccaaactggcctcctggtagacatcatctttttcaaaaaggcagcggtactgcccgtcgtccgaaggtctggcactgagtatctgcagggtcagtctgccctcgtcaatggcgt

SEQ ID NO: 32179 - DNA, 120 bp, synthetic construct
  source 1..120: mol_type = other DNA
tctgtgcattcgccttgggggacaggtaacaggttagctgtatatcttctcccactctgacgaggatgggctgggaaggtccattcacttttaaagaagctgttaaatagagtggacaaa

SEQ ID NO: 32180 - DNA, 120 bp, synthetic construct; identical to SEQ ID NO: 8996
  source 1..120: mol_type = other DNA

SEQ ID NO: 32181 - DNA, 120 bp, synthetic construct
  source 1..120: mol_type = other DNA
gtcaggagttcaagaccagcctggccaacatggtgaaaccccgtctctacagaaatacaaaaattagtcgggcatgatggtgggtgcctgtaatcccagctactcaggaggctgaggtgg

SEQ ID NO: 32182 - DNA, 120 bp, synthetic construct
  source 1..120: mol_type = other DNA
gtgaacagtttataaatttggccccagatgcctctgtacctgactccttatgtaacaaactgcaatttaacttagtacgtcaactactgaaagcctaacttaggttgcagtttgttacat

SEQ ID NO: 32183 - DNA, 120 bp, synthetic construct
  source 1..120: mol_type = other DNA
ttttatgaataagcctaacttaggagctaaggctaacttaggagtacacttttgtaataaatagctgagtagcagctgctgcacttctgttagttgcaggcagccaactgttgaaaccct

SEQ ID NO: 32184 - DNA, 120 bp, synthetic construct
  source 1..120: mol_type = other DNA
tttctgtccataaatgctgtctgaccaaattgctgctttgaattctctgaaaccgttctgattctgagggatggcttgtttatgagtcatccttttctcagttagactctgctaaattta

SEQ ID NO: 32185 - DNA, 120 bp, synthetic construct; identical to SEQ ID NO: 8997
  source 1..120: mol_type = other DNA

SEQ ID NO: 32186 - DNA, 120 bp, synthetic construct
  source 1..120: mol_type = other DNA
tctaggtggactttatagtaccttgtaagtctggtccagccgctatattttatttccccaatgctccacataggtggagttatagacacacaccagttgaatgtcctcaaataattttga

SEQ ID NO: 32187 - DNA, 120 bp, synthetic construct
  source 1..120: mol_type = other DNA
ttctctgagggctttcctgggcccaagctatattacattttccattctcatcaggccctgcccgtgccattttttctctattctaaattaagtgtcgtccttttctgttaaatgataaga

SEQ ID NO: 32188 - DNA, 120 bp, synthetic construct
  source 1..120: mol_type = other DNA
ccagctacctttgtagagaggaaagtccctgtcaacacaatttgaattttcagattattaccttccattccaggtaacagttgactcccagttatttccagcattttgtttgctttgtcc

SEQ ID NO: 32189 - DNA, 120 bp, synthetic construct; identical to SEQ ID NO: 8998
  source 1..120: mol_type = other DNA

SEQ ID NO: 32190 - DNA, 120 bp, synthetic construct
  source 1..120: mol_type = other DNA
aatccaagtaaaactaaagtttaaagtgctaaaaaaatcatgcagccctgtttgttaataattgatgttctactagaatacaagctccttgggagccactatgcctaacccacttttttt

SEQ ID NO: 32191 - DNA, 120 bp, synthetic construct
  source 1..120: mol_type = other DNA
atccattagctgttcttcctgatgctctccctcccccatcccccaacaggtgtccagtgtgtgttgttccctgccatgcatccatgtgttctcaccaatcagctcccccttataagtgtg

SEQ ID NO: 32192 - DNA, 120 bp, synthetic construct
  source 1..120: mol_type = other DNA
tctgaatatccactgaaaaattaattcccttctggagcgtgaagtacactgaattatacactgattccttgaaacctgataatctcatcatcataccacataatcctctttcaatcagca

SEQ ID NO: 32193 - DNA, 120 bp, synthetic construct; identical to SEQ ID NO: 8999
  source 1..120: mol_type = other DNA

SEQ ID NO: 32194 - DNA, 120 bp, synthetic construct
  source 1..120: mol_type = other DNA
tatttttaaaaactattatttttataaatgaaaaacattatttgtaagactacaagcagtgatttcagtcttaggacttccatagagagctgggtgtcccatcattagagctcacctgca

SEQ ID NO: 32195 - DNA, 120 bp, synthetic construct
  source 1..120: mol_type = other DNA
gggtcgtattgtgtgtgctgggtctccagtgggtctcagagaactcagaggagtgactcttctcctaaaaccttcttgagagacagacttgtgtcaacctgccccaaacactggctttac

SEQ ID NO: 32196 - DNA, 120 bp, synthetic construct
  source 1..120: mol_type = other DNA
atagtagactctggtagagattgggttgtgtttgttaccctgattttcctcaaaaactcttttgtgggctgaaaggtgtgcttaagctcacctaaagcacacacatggatacacattcct

SEQ ID NO: 32197 - DNA, 120 bp, synthetic construct; identical to SEQ ID NO: 9000
  source 1..120: mol_type = other DNA

SEQ ID NO: 32198 - DNA, 120 bp, synthetic construct
  source 1..120: mol_type = other DNA
tgaaaccccgtctctactaaaaaaaaaaaaaaaaaattagctgggtgtggtggcgcatgcctgtagtcccagttactcaggaggctgaagcaggagaatagcttgaatccaggagatgga

SEQ ID NO: 32199 - DNA, 120 bp, synthetic construct
  source 1..120: mol_type = other DNA
gcccggcgtggtggctcacgcctgtaatcccagcactttgggaggctgaggtggggggatcacgagatcaggagatcgagaccatcctggctaacacggtgaaatctcgtctctactaaa

SEQ ID NO: 32200 - DNA, 120 bp, synthetic construct
  source 1..120: mol_type = other DNA
aacctgggaggcggagcttgcagtgagccaagatcgcgccactgcactccagcctgggcgacagagcaagactccgtctcaaaaaaaaaaaaaaaaaaaaaaaaaaaaaaaaaaaaattg

SEQ ID NO: 32201 - DNA, 120 bp, synthetic construct
  source 1..120: mol_type = other DNA
tgaggagcaggtgcaggaccccatagcagagttgagcagggaggtgctgggtgcaacccaggttgtcataatgatgctgcccttgttcacacttgaaatgttttcaaagggcctccaggc

SEQ ID NO: 32202 - DNA, 120 bp, synthetic construct; identical to SEQ ID NO: 9001
  source 1..120: mol_type = other DNA

SEQ ID NO: 32203 - DNA, 120 bp, synthetic construct
  source 1..120: mol_type = other DNA
cagcacctcgtacttacccagctcagtctggagtttctctggaaaaagaacaagaataacatattaaggaatttggtgtaagggaaaggagagaaactattttttaaaaaagaaagcaat

SEQ ID NO: 32204 - DNA, 120 bp, synthetic construct
  source 1..120: mol_type = other DNA
gctgtcacttctatctccccatgattctgttggtttcttctgatatttacagcataaatacttagctatcagcatgaaaataacatatgttccttttatagatacacagaaagtacaaaa

SEQ ID NO: 32205 - DNA, 120 bp, synthetic construct
  source 1..120: mol_type = other DNA
tccatttatatgaataactgtatacttatatccaaatgtggagggtatcctgaaagttttagtgcagttataagttatttaaggccagtaacttttatgtgattggaaatgtcaatttat

SEQ ID NO: 32206 - DNA, 120 bp, synthetic construct; identical to SEQ ID NO: 9002
  source 1..120: mol_type = other DNA

SEQ ID NO: 32207 - DNA, 120 bp, synthetic construct
  source 1..120: mol_type = other DNA
agaactcaaaaataacgcaggcgccataacagctattcaagtaaaatgtagtgcgtatatttccagtcataaatgttttatggctttcaatacatattgctatatgatagataatgtctc

SEQ ID NO: 32208 - DNA, 120 bp, synthetic construct
  source 1..120: mol_type = other DNA
tgaggacggggttgtggaccaagcaggacacagactctgcagaggcgttcctgaccaccagggtggcttccgcatagaacaggccatctttatcttggatgcgatgctcagacacggcca

SEQ ID NO: 32209 - DNA, 120 bp, synthetic construct
  source 1..120: mol_type = other DNA
accccagacctgcagagggaagccacagctctgacacccagagcccacagaggcagaaatcacagaggctgagatcccagtgacgttgctcacagggaggtggccggagttcaggagtct

SEQ ID NO: 32210 - DNA, 120 bp, synthetic construct; identical to SEQ ID NO: 9003
  source 1..120: mol_type = other DNA

SEQ ID NO: 32211 - DNA, 120 bp, synthetic construct
  source 1..120: mol_type = other DNA
cttttgctggtggctgtgatcttcggaagcaagtggataaacgggagcatgtgaaatgcgaatctccacgaggcgttatttgtagctaaatattctattcaatgggtaagatggttttga

SEQ ID NO: 32212 - DNA, 120 bp, synthetic construct
  source 1..120: mol_type = other DNA
gggactatattttccataaatgggaattctgtcttaatcacttgctggtaaaagagagatccactcccttcccttggacccttagaaaatgtgtgacttatttgtaaatgttcctgatat

SEQ ID NO: 32213 - DNA, 120 bp, synthetic construct
  source 1..120: mol_type = other DNA
gaaacagcctcccagggaagtaaagaaggaagcagtatcagctggagacgttaacatctccagagaactattttccccatttgccttagtaattggatttacttgattttctctttagag

SEQ ID NO: 32214 - DNA, 120 bp, synthetic construct; identical to SEQ ID NO: 9004
  source 1..120: mol_type = other DNA

SEQ ID NO: 32215 - DNA, 120 bp, synthetic construct
  source 1..120: mol_type = other DNA
gggctcattcatgcagcaattggtttgctcttgcgcaccagccttaggtagcacaaatgtgtgtctcagcaaaattgctaaagactgcatgtcatggattccaaataatcctcaagaaca

SEQ ID NO: 32216 - DNA, 120 bp, synthetic construct
  source 1..120: mol_type = other DNA
atcagggtagaggactaagcattaggaattaccttgatgattcaaaaggatttcctcaactgtcacaaagcttaccacaaattaatatatctctgcctcttgagaccctgtgtctttccc

SEQ ID NO: 32217 - DNA, 120 bp, synthetic construct
  source 1..120: mol_type = other DNA
cattgtcggagggctggatgttgtgtatcttcagtgccacatttccctttgcaatgccattctctatccactctacccagcctctgtactcctccatctgcatctcagtcacctccactc

SEQ ID NO: 32218 - DNA, 120 bp, synthetic construct
  source 1..120: mol_type = other DNA
ccaggataggatgagcagggccaatgactctaaagtcttctataaaataagtgaaaaagaggaacgaggaaatgccaatcagaaaatcatatgcatgctttggggtgtccagcctgtcaa

SEQ ID NO: 32219 - DNA, 120 bp, synthetic construct; identical to SEQ ID NO: 9005
  source 1..120: mol_type = other DNA

SEQ ID NO: 32220 - DNA, 120 bp, synthetic construct
  source 1..120: mol_type = other DNA
ttaaattggaaaccttattcttgttattaacattttattttcctgaagtttagataataaatccatttattagctttttttagcctttcaggattcctcttctcttagatataaaaactg

SEQ ID NO: 32221 - DNA, 120 bp, synthetic construct
  source 1..120: mol_type = other DNA
cagttttcacaaggacattttgtgctggattaaggacactggtttgtctagagatttttgggtcttccaaacaaattctaagacatgtctgatctcttccttgttatctgcaaattgaag

SEQ ID NO: 32222 - DNA, 120 bp, synthetic construct
  source 1..120: mol_type = other DNA
ctaggaagaacctcaccctacttagctgctgctgggtatcaaatagatgctgctcaaaaggtggctaaagagcctaagtggagatctgcttgtattcttcattgatgaagtctaaatatg

SEQ ID NO: 32223 - DNA, 120 bp, synthetic construct
  source 1..120: mol_type = other DNA
gagatctgcttgtattcttcattgatgaagtctaaatatgaagctagaactgaagacattccatcagattgactgttacagggtagggagctgcagcacaagcacagagaagccagcagc

SEQ ID NO: 32224 - DNA, 120 bp, synthetic construct; identical to SEQ ID NO: 9006
  source 1..120: mol_type = other DNA

SEQ ID NO: 32225 - DNA, 120 bp, synthetic construct
  source 1..120: mol_type = other DNA
aaagtactagagtgaattaataatttaacgtggtgcaaccactgattcaagtgcttttaatgtctcatttaatcctaaagcctgtgctggcctctgagatgtagttactgctgttattct

SEQ ID NO: 32226 - DNA, 120 bp, synthetic construct
  source 1..120: mol_type = other DNA
ttggatacaggtggcttggccccagacttacactcttagatgttgttctcgacctttggacccagactagctcactgggacattagactatacagtaaagggagaagggaatcctacctg

SEQ ID NO: 32227 - DNA, 120 bp, synthetic construct
  source 1..120: mol_type = other DNA
tgtgacacacccggcacactccatggcttccattggttatgcagtcttagcagagaatccacatcaacccctgcacagtcagtgaaatgggcttggctccatttctctgcaattactgat

SEQ ID NO: 32228 - DNA, 120 bp, synthetic construct; identical to SEQ ID NO: 9007
  source 1..120: mol_type = other DNA

SEQ ID NO: 32229 - DNA, 120 bp, synthetic construct
  source 1..120: mol_type = other DNA
ttaatatgtaacctcctgacatcgaaaaggatatggatttgtttctgaatcataaagttttactgattgttttgtgcatgaaatattttagtctatatattgtcatctgtgtccaatgat

SEQ ID NO: 32230 - DNA, 120 bp, synthetic construct
  source 1..120: mol_type = other DNA
tcaacttcgttggtgtgtcttcctacatcagtcctgacatttgccttccaatagaactttatgaaattattcctgcctcagcaaccctaatttcatgagacaatattttaagcaattttt

SEQ ID NO: 32231 - DNA, 120 bp, synthetic construct
  source 1..120: mol_type = other DNA
gcttgcaaaacttatagagcaagattcaaatattttttcctgtcctcctcccaactcctcctgcaaagcctttctttaccactgttttctacacatggaggaaagggcaggaaggctctg

SEQ ID NO: 32232 - DNA, 120 bp, synthetic construct; identical to SEQ ID NO: 9008
  source 1..120: mol_type = other DNA

SEQ ID NO: 32233 - DNA, 120 bp, synthetic construct
  source 1..120: mol_type = other DNA
attgaaagaaaacttgcttcacacaaagtagagaaaccagctcaggagcaatgtcaagtcaattacagtttccccctttccaagaaactactgctagtaagattttatgggacaggggta

SEQ ID NO: 32234 - DNA, 120 bp, synthetic construct
  source 1..120: mol_type = other DNA
aacttatatgagcccattcacaatacctagatcgaaaagggcagtatgatatttatgtgaaaatggggttgggtgttagaagacagtgcagaccatgagcaccttgccacctgaaactta

SEQ ID NO: 32235 - DNA, 120 bp, synthetic construct
  source 1..120: mol_type = other DNA
accaagtaagagtaaagaaagccccacaacatccataccaagcatgatttctcagccttgtgaactaaaatgaactcacacttgctacagaccacttcagaggcttgcgttcctgtaggt

SEQ ID NO: 32236 - DNA, 120 bp, synthetic construct; identical to SEQ ID NO: 9009
  source 1..120: mol_type = other DNA

SEQ ID NO: 32237 - DNA, 120 bp, synthetic construct
  source 1..120: mol_type = other DNA
ctgccacagggtttgctgtcaggatgctgaaaagctttggcacattttttgaaaatagataactagacttaaattgccatctttaagtaaaaaccttttaaaatgataagcttttgaccc

SEQ ID NO: 32238 - DNA, 120 bp, synthetic construct
  source 1..120: mol_type = other DNA
tcaaaaacccatgtttaatttaatttaattttctggataaagtttaagtgttaaattgtaataataagtggtagcttatgtttaggcattagatgatgaacaattctgaatttcaaggcc

SEQ ID NO: 32239 - DNA, 120 bp, synthetic construct; identical to SEQ ID NO: 9010
  source 1..120: mol_type = other DNA

SEQ ID NO: 32240 - DNA, 120 bp, synthetic construct
  source 1..120: mol_type = other DNA
gtttcttttgctgtgcagaagctctttagtttaattagatcccatttgtcaattttgtcttttgttgccattgcttttggtgttttggacatgaagtccttgcccacgcctatgtcctga

SEQ ID NO: 32241 - DNA, 120 bp, synthetic construct
  source 1..120: mol_type = other DNA
aaatgtggcacatatacaccatggaatactatgcagccataaaaaatgatgagttcatatcctttgtagggacatggatgaaattggaaaccatcattctcagtaaactatcgcaagaac

SEQ ID NO: 32242 - DNA, 120 bp, synthetic construct
  source 1..120: mol_type = other DNA
gatagcattgggagatatacctaatgctagatgacacattagtgggtgcagcgcaccagcatggcacatgtatacatatgtaactaacctgcacaatgtgcacatgtaccctaaaactta

SEQ ID NO: 32243 - DNA, 120 bp, synthetic construct; identical to SEQ ID NO: 9011
  source 1..120: mol_type = other DNA

SEQ ID NO: 32244 - DNA, 120 bp, synthetic construct
  source 1..120: mol_type = other DNA
aacactgtgagggtcaaatgggctacaatcgcactttgaagactgcgcagtgggatataaatgtaagtgggaggcagtgtaacaggtggcagcatttccctaaaggacattgattctgtc

SEQ ID NO: 32245 - DNA, 120 bp, synthetic construct
  source 1..120: mol_type = other DNA
gggtcttctcacttagccccagatgtatcttcatccacatagcaggtggtcagaaacaggtcagagccctggggtgtgctgatcaaagacagaactgtgggagagccagagagtgtggag

SEQ ID NO: 32246 - DNA, 120 bp, synthetic construct
  source 1..120: mol_type = other DNA
gtgaaaatgagattgcattctgaaaatcagaatagcacattcacctcctaacagctataatcctctcaacagtgaaactccggggacaagtggactttggctgggttcagttgtgaattc

SEQ ID NO: 32247 - DNA, 120 bp, synthetic construct; identical to SEQ ID NO: 9012
  source 1..120: mol_type = other DNA

SEQ ID NO: 32248 - DNA, 120 bp, synthetic construct
  source 1..120: mol_type = other DNA
agctctgggccaaggtcccttgtgggctactttattgctctttttactcaggtactttatctccctttgctgagtaataaaaggtttaattactctcagatgtttaccaaagaaatgtaa

SEQ ID NO: 32249 - DNA, 120 bp, synthetic construct
  source 1..120: mol_type = other DNA
ttcctttacgttccccttaagtctgtgttccttgagctagagggggtctcagatatagtctcaggatttcaagagttctccagaacaatttttaatttaattgcagattttcatgtcaat

SEQ ID NO: 32250 - DNA, 120 bp, synthetic construct
  source 1..120: mol_type = other DNA
attcttaatgtaagggtttccccctccatccttcagtctagacaaagaccctcccctcactgtagaggatgagagatttggagagaagagaaacataattaaacatggacgaggatagga

SEQ ID NO: 32251 - DNA, 120 bp, synthetic construct; identical to SEQ ID NO: 9013
  source 1..120: mol_type = other DNA

SEQ ID NO: 32252 - DNA, 120 bp, synthetic construct
  source 1..120: mol_type = other DNA
gcctcccacctcagaacttagaaatcacacggcaggtgaaggagaggctgctattaaattaattgtgtgaaagcccctgaatttatctggaaattaccagatgaactcctctgtcagaag

SEQ ID NO: 32253 - DNA, 120 bp, synthetic construct
  source 1..120: mol_type = other DNA
atggtaccaaatgctgcaattatttgaattttttatggtcagtcacatcagcgccaactcaccgcgtaaagaagctccgtttacactcgcgtgtgtgtgttctcacaaatcatctgcata

SEQ ID NO: 32254 - DNA, 120 bp, synthetic construct
  source 1..120: mol_type = other DNA
tctgcattctgactagagtccacctccaggagaagcgggaaaacaaggcataagctgctagaactgaggagagggaaaaacaagcatccggcgagggcaggaggaacaggagaggggagt

SEQ ID NO: 32255 - DNA, 120 bp, synthetic construct; identical to SEQ ID NO: 9014
  source 1..120: mol_type = other DNA

SEQ ID NO: 32256 - DNA, 120 bp, synthetic construct
  source 1..120: mol_type = other DNA
ttaggtgtcattactgggaatggaaggtcttggaaagaaggtggatagaaaaatagaggagattagaaatgaagataagaaatcaaggtcaatccaagaaatgtcaggaaagtgttgcta

SEQ ID NO: 32257 - DNA, 120 bp, synthetic construct
  source 1..120: mol_type = other DNA
agtgagacttatacaggtatcgtttcctcagggaaaggaaagaaaaatcagcagctctcatctcctggaggcacagtggcttgtcctccacagtcccctcggtttgctgactgactggag

SEQ ID NO: 32258 - DNA, 120 bp, synthetic construct
  source 1..120: mol_type = other DNA
gtggccacggttcaatctgcacctctggccatttttcttgattggcaaaaagaaggaaagaagaaaggaagaaagggaggaagggagggaggggggaggaaggagggagggaaagaaaag

SEQ ID NO: 32259 - DNA, 120 bp, synthetic construct; identical to SEQ ID NO: 9015
  source 1..120: mol_type = other DNA

SEQ ID NO: 32260 - DNA, 120 bp, synthetic construct
  source 1..120: mol_type = other DNA
attagctgggcgtggtggtgcacgcctgtaatcccagctactccagaggctaaggtaggagaatcacttgaacctgggaggcggaggttgcagtgagctgaaattgcgccattgcactcc

SEQ ID NO: 32261 - DNA, 120 bp, synthetic construct
  source 1..120: mol_type = other DNA
catctattattttttgaaaatgatgaaattacctaaaattgattctactgcaggtgggagcctataagactaaagttcccaggaagagatgtaagcttcggtgaaacccacctcagttga

SEQ ID NO: 32262 - DNA, 120 bp, synthetic construct
  source 1..120: mol_type = other DNA
catgtctcacactggaaataggggacccttccaaatattgggagaaagaaggcaaagaaaatcataccgatatactaagcctcctgcatttgcacccatccagcctgccattcatcctgg

SEQ ID NO: 32263 - DNA, 120 bp, synthetic construct; identical to SEQ ID NO: 9016
  source 1..120: mol_type = other DNA

SEQ ID NO: 32264 - DNA, 120 bp, synthetic construct
  source 1..120: mol_type = other DNA
ttaactgccaatatctttctttctaaaattgtgtttttgtatttcgtggtaaactcagttcaaagccgcggatgggggcaggaataggaaaactgctgctgctgctgaatatgcttctct

SEQ ID NO: 32265 - DNA, 120 bp, synthetic construct
  source 1..120: mol_type = other DNA
agagaggactgcttcattgtcttaaattcgttgtaatcacgtcgcaataccaggcactcattcttaaggtagcaaagcagaaaatattataagttcagttattaatgtcatttgcacttt

SEQ ID NO: 32266 - DNA, 120 bp, synthetic construct
  source 1..120: mol_type = other DNA
gtaggtttagcatttcttgattacaagctaaataaggggtggattactcatgagttttccgggaaggtggtgggcaattcctggactaagggcttctctcctttttagaccatatagggt

SEQ ID NO: 32267 - DNA, 120 bp, synthetic construct
  source 1..120: mol_type = other DNA
tgtggccatgttggttttggtgggttttggcccgtttcttaactgcaacctgttttatcagcaaggtcttcatgacctgtatcctgtgcagacctcctatctcatcctgtgactgaaagt

SEQ ID NO: 32268 - DNA, 120 bp, synthetic construct; identical to SEQ ID NO: 9017
  source 1..120: mol_type = other DNA

SEQ ID NO: 32269 - DNA, 120 bp, synthetic construct
  source 1..120: mol_type = other DNA
aaattagtttaagcctagcagatttcacataatttcagactccttttggcaaacagtaaacattacagcctggaaagcttgattgcttatatataaaaccctaagagagctattgaaaat

SEQ ID NO: 32270 - DNA, 120 bp, synthetic construct
  source 1..120: mol_type = other DNA
taaaatacttagacataaactgaaccgaaagatgtgtgatgtgaaactataaaatactgatgagagaaactgataaaattctaaatgtgtaaagagatataatatattttgatttgggaa

SEQ ID NO: 32271 - DNA, 120 bp, synthetic construct
  source 1..120: mol_type = other DNA
caaaacttatttgaaaaaggacagaagaaatatgcaaagcttggtttcaagtcatgcttcaaagctatgggcaacatgtcaaggctagtaatgtaagttagagaaacttcaacaaagaat

SEQ ID NO: 32272 - DNA, 120 bp, synthetic construct; identical to SEQ ID NO: 9018
  source 1..120: mol_type = other DNA

SEQ ID NO: 32273 - DNA, 120 bp, synthetic construct
  source 1..120: mol_type = other DNA
ttcagttaaagatgtggactgtagcctgatctgtgaagagtggaagaagaatggggaggaatggaaataacaggtgcagcccaatatttttaagagtttccttcagattagaagtaaaaa

SEQ ID NO: 32274 - DNA, 120 bp, synthetic construct
  source 1..120: mol_type = other DNA
ggaaatttttttggtaaactggataaagatacttacaacatattaaaccatgaaaaggattagtacccagaacatagaaaggcctcctacaaatcaattagtaaaggactatatttttct

SEQ ID NO: 32275 - DNA, 120 bp, synthetic construct
  source 1..120: mol_type = other DNA
aaactcttcattataagtcagagaaatgtaaataaacgccacactgaaaaaacaataaaaatatcaaaacctagcaaggatgtgggtcaatgtttctaccaacagacttctgaaggaaat

SEQ ID NO: 32276 - DNA, 120 bp, synthetic construct; identical to SEQ ID NO: 9019
  source 1..120: mol_type = other DNA

SEQ ID NO: 32277 - DNA, 120 bp, synthetic construct
  source 1..120: mol_type = other DNA
agtggcatgatctcggctcactgcaagctctgccttccgggttcacaccattctcctgcctcagccttcccagtagctgggactacaggcgcccgccaccacgcccggctaattttttgt

SEQ ID NO: 32278 - DNA, 120 bp, synthetic construct
  source 1..120: mol_type = other DNA
ggtcagaaatagcttttttagggctggtaaaatggccttcatctagattttctcatgcttgtttgtgaattggctcccctctcgatgagctggtgcactatcattatgagttttgtgcaa

SEQ ID NO: 32279 - DNA, 120 bp, synthetic construct
  source 1..120: mol_type = other DNA
ctgggttttgcatgctgaaaacatggcttcattgggcattggtaaatcaaacggagaggaggcagtgcggcaagtacaaagaccatagttacaatactctaaaccaaaaatatctgagac

SEQ ID NO: 32280 - DNA, 120 bp, synthetic construct; identical to SEQ ID NO: 9020
  source 1..120: mol_type = other DNA

SEQ ID NO: 32281 - DNA, 120 bp, synthetic construct
  source 1..120: mol_type = other DNA
tatttaaaggggaaaagtgggctgacagggaaagagagaaggtatggcaatccacatgttgcaaggaaaaaggggcaggtaggggaagagtcagttatgtattcatcttgctctcagtaa

SEQ ID NO: 32282 - DNA, 120 bp, synthetic construct
  source 1..120: mol_type = other DNA
gctttcaccttaattctttccttttgacatggtgaattggggtgccaaatttttagtttcctttcacaatttatacaaaacacaactcaacagacatcctcatatcccagtgtatgtggc

SEQ ID NO: 32283 - DNA, 120 bp, synthetic construct
  source 1..120: mol_type = other DNA
aacttcacatccatcattatccagccccaaatcatccaacatctagataattccttagagtaagggaacaagataatggccacaaccaagtaggaaagaatcacgtatacagacgatttt

SEQ ID NO: 32284 - DNA, 120 bp, synthetic construct; identical to SEQ ID NO: 9021
  source 1..120: mol_type = other DNA

SEQ ID NO: 32285 - DNA, 120 bp, synthetic construct
  source 1..120: mol_type = other DNA
atcctgagttctaactaactaatcctagactagatttgggtgatttgagatattaatgaccttagcctcatagcctcattgcctgacacaagcaaaactaaataacctctagagaaatat

SEQ ID NO: 32286 - DNA, 120 bp, synthetic construct
  source 1..120: mol_type = other DNA
atgactttgacttctctgtgggatactgctagattaactcaacactcccagtacaccagctagaaaagttaaaaatttaaaacacaaaattcgtactttaaaggaaaaggagagctgtgg

SEQ ID NO: 32287 - DNA, 120 bp, synthetic construct
  source 1..120: mol_type = other DNA
gaagaggtgtcatgggctcaggagggaatctgctggagaaagggaaaccaagcaagggacacagggacagactaagaaattagatatttgaggttctcaaattctcaaattcatggcgtg

SEQ ID NO: 32288 - DNA, 120 bp, synthetic construct; identical to SEQ ID NO: 9022
  source 1..120: mol_type = other DNA

SEQ ID NO: 32289 - DNA, 120 bp, synthetic construct
  source 1..120: mol_type = other DNA
tggtaacaatgataaattctggaccaccttcattttccaatttatttcattgtgttgtgataagaacaccttacatgaaatataccctctttacaagtttttaactacaacacagtattg

SEQ ID NO: 32290 - DNA, 120 bp, synthetic construct
  source 1..120: mol_type = other DNA
caccaacctattctctgtttctatgagattggctacctagacacctcatataagtgggattgaagcagcctcgtttgtctggggtgacctgaggtttgttgtctcgtggccatagagatc

SEQ ID NO: 32291 - DNA, 120 bp, synthetic construct
  source 1..120: mol_type = other DNA
tatttgtgtggttttgagtgactttcataatcctgagttctaatttgattgcactgtggtctgagaaactgttatgatttccattcttttgcatttgctgaggagtgttttacttccaat

SEQ ID NO: 32292 - DNA, 120 bp, synthetic construct
  source 1..120: mol_type = other DNA
gtcctgaatatccttgttaattttctgtcttgttgatctgtctaatattgacagtggagtgttgaagtctcccactattattatgtgggagtctaagtctctttgtagatctctaagaac

SEQ ID NO: 32293 - DNA, 120 bp, synthetic construct; identical to SEQ ID NO: 9023
  source 1..120: mol_type = other DNA

SEQ ID NO: 32294 - DNA, 120 bp, synthetic construct
  source 1..120: mol_type = other DNA
ccttcagttatgctctgatcttagttatttcttgccttctgctagcttttgaatttgtttgcccttctctagttcttttaattgtgatgttaggatgttgattttagatcttttctgctt

SEQ ID NO: 32295 - DNA, 120 bp, synthetic construct
  source 1..120: mol_type = other DNA
ggccaagtcaatgctagctttcaaggcttttaagtacagataacggtcttgcttgagggcaatgttgcaggctacaaattaaagccctttgtgatccagcaaggtgaaaaccccaggacc

SEQ ID NO: 32296 - DNA, 120 bp, synthetic construct
  source 1..120: mol_type = other DNA
agtgaaaccctgtctctactaaaaatacaaaaagttagccgggtgtggtggtgggcacctgtagtcccagctactcaggaggctgaggcaggagaatggtgtgaatctgggaggtggagc

SEQ ID NO: 32297 - DNA, 120 bp, synthetic construct; identical to SEQ ID NO: 9024
  source 1..120: mol_type = other DNA

SEQ ID NO: 32298 - DNA, 120 bp, synthetic construct
  source 1..120: mol_type = other DNA
aaggaattatagcagcttttaaggtttactatctgaagagggcctttgcccatgttattatggtaactcaggaagacactgagaagacagtgatgcaattctggaaggataacaacagct

SEQ ID NO: 32299 - DNA, 120 bp, synthetic construct
  source 1..120: mol_type = other DNA
aggagattgcaaaaatctacaaggctttggttgagatggcaaacaactttaaactgagtacggatgaggatggcattaggagctcctagaggtagttccttggaattgactaatgaggag

SEQ ID NO: 32300 - DNA, 120 bp, synthetic construct
  source 1..120: mol_type = other DNA
tgcagacctcaacaagctccttaaaaatttgaaaacatgaaccccagcacaacaaggttttcattaataaagaggaatgttcacggtgaatcatctgcttataagcaaatctatgatgaa

SEQ ID NO: 32301 - DNA, 120 bp, synthetic construct; identical to SEQ ID NO: 9025
  source 1..120: mol_type = other DNA

SEQ ID NO: 32302 - DNA, 120 bp, synthetic construct
  source 1..120: mol_type = other DNA
aaacagtcaaaaagttaaaaaattaagtatataaagtttaaaaagttagagtaagctaaggttaattattgtagaaaaacatttttcataaatttaatgttgtcttagttacagtattta

SEQ ID NO: 32303 - DNA, 120 bp, synthetic construct
  source 1..120: mol_type = other DNA
agatctaccatttaaaaatctttcatatggtattttcaccacaccttttgtatgtttagatacataaacagttagcattgtgttacaattaccaatagtattcaatacagtcacatgctg

SEQ ID NO: 32304 - DNA, 120 bp, synthetic construct
  source 1..120: mol_type = other DNA
tgacacatttctcagagcttgtccctttagctaagtgatgcctgacttcagttttgccccatttctagagcatagtcctccatgactttcaatgaaaaacccgatagctttcatctcctc

SEQ ID NO: 32305 - DNA, 120 bp, synthetic construct; identical to SEQ ID NO: 9026
  source 1..120: mol_type = other DNA

SEQ ID NO: 32306 - DNA, 120 bp, synthetic construct
  source 1..120: mol_type = other DNA
cttctgaaacttacgtctgttttgttttagggcccttatcaatggtaggtctttgtttcctcaacaccactggacagtgaaagattttgcactgcctttcagaagttgacactttagttt

SEQ ID NO: 32307 - DNA, 120 bp, synthetic construct
  source 1..120: mol_type = other DNA
ctttcttacagcagaaaactgtaggaaaattgtagcagaaaacttttctacagcagaaaacggtagcagaaaaatggcactaaaacgcagcgtacacttgcaaacagcaaatgctaccaa

SEQ ID NO: 32308 - DNA, 120 bp, synthetic construct
  source 1..120: mol_type = other DNA
attttatcctatttttgtagttgttgccagtgggacaatttgtcctactgtgaccctaatgcatcttatactgtggtggaaaaaagaataagattttaaattgtgctttctgaaaaactg

SEQ ID NO: 32309 - DNA, 120 bp, synthetic construct
  source 1..120: mol_type = other DNA
tcaagaccatcctggccaacatggtgaaacccctgtctctactaaaaatacaaatttagctgggcatggtggcacgcagctgtagtcccagctactcgggaggctgaggcaggaaaatca

SEQ ID NO: 32310 - DNA, 120 bp, synthetic construct; identical to SEQ ID NO: 9027
  source 1..120: mol_type = other DNA

SEQ ID NO: 32311 - DNA, 120 bp, synthetic construct
  source 1..120: mol_type = other DNA
atcctacccaattacataggatactccacttccagttaccccttaagcattccccatgccaacagcctccaatcaggtcccttttaaccactataaagtttcctacttctttgcctgtct

SEQ ID NO: 32312 - DNA, 120 bp, synthetic construct
  source 1..120: mol_type = other DNA
ataaattaaaatccaagaggctaacatttaattaatgacatttaagatcttctatatcggataatgctatacattatattaggtttaatatttctattaagtatagatttagtaaattac

SEQ ID NO: 32313 - DNA, 120 bp, synthetic construct
  source 1..120: mol_type = other DNA
tattgtctgttggtactaaatcaatttccccctgttttgtgcttttttccacatcacttggggttgaagcctggacaccacttcttccagagtccctttcttaggaaggcactcacttgc

SEQ ID NO: 32314 - DNA, 120 bp, synthetic construct; identical to SEQ ID NO: 9028
  source 1..120: mol_type = other DNA

SEQ ID NO: 32315 - DNA, 120 bp, synthetic construct
  source 1..120: mol_type = other DNA
ttgtaaattgaaaatattgtgagttgaaagtgtagagtataagttgttcaccttcatgatcatgtggctgaggctgcctggcattgtgaaagagtatcttactgagtatcgctggtctgg

SEQ ID NO: 32316 - DNA, 120 bp, synthetic construct
  source 1..120: mol_type = other DNA
caaaccatcttaagtcaggtgtgtctgtagtttaaaaaaaattacaaataaagaatatccaatgttgttgggagtgcagagaagatttacaaggtaaacattgatttgtttaaagtttga

SEQ ID NO: 32317 - DNA, 120 bp, synthetic construct
  source 1..120: mol_type = other DNA
atagtacagagaggtcccttgtacccttcacccagtttcccccaatggttacatcatacataactatagcacaatatcgaaacaaggaaatcgacactgatacaatgtatttgcagtttt

SEQ ID NO: 32318 - DNA, 120 bp, synthetic construct
  source 1..120: mol_type = other DNA
tcctcatgccactcgccctccttaagagtcacaccattcccccaccccccaccatccctacactgtgccaaccactaatttgattttcatctgtataattttatcatttagaaaatgtta

SEQ ID NO: 32319 - DNA, 120 bp, synthetic construct; identical to SEQ ID NO: 9029
  source 1..120: mol_type = other DNA

SEQ ID NO: 32320 - DNA, 120 bp, synthetic construct
  source 1..120: mol_type = other DNA
tggagggcaatgtactttacttaaaatctactgacttaaatatgtaactctcaccccaaaactgccagatgatgtgaaattccatgtcctctacttggctccattgacactcagatggag

SEQ ID NO: 32321 - DNA, 120 bp, synthetic construct
  source 1..120: mol_type = other DNA
gcgatccccaacatttttggcaccagggactggttttgtggaagaaaattttgccatggatgggggttggggactagcggtggcagggagtgggatggcacaacctagatccctcgcatg

SEQ ID NO: 32322 - DNA, 120 bp, synthetic construct
  source 1..120: mol_type = other DNA
gatgcgaacaagatttaagttcctgtggcttatttctggtcacaaacacatcaccaaactcctaaataaagactcagaacacttctaatattaaacattaaaataaatgggaactatata

SEQ ID NO: 32323 - DNA, 120 bp, synthetic construct; identical to SEQ ID NO: 9030
  source 1..120: mol_type = other DNA

SEQ ID NO: 32324 - DNA, 120 bp, synthetic construct
  source 1..120: mol_type = other DNA
caaggtcatggatgactggagcctatcccggcagctcaaggacaagagaggaaccaaccttgtataggatgccatcccatccattgtgggatgcagacacacacacacatacacacaaag

SEQ ID NO: 32325 - DNA, 120 bp, synthetic construct
  source 1..120: mol_type = other DNA
aaagaaaacccatgcggacgtggggagaacacacaaactcctcatggacagtggccctggccaggaacctatttattttctcaccaacattgtaacaaaacgttgaacaaaacaatgctg

SEQ ID NO: 32326 - DNA, 120 bp, synthetic construct
  source 1..120: mol_type = other DNA
gctgcaggctgggtatagaaactcaggctccccactaggcctccacttacagaatcctgactgggagggagagggtctcatcagcgctcccacatggcctctactgacaccaggaaggga

SEQ ID NO: 32327 - DNA, 120 bp, synthetic construct
  source 1..120: mol_type = other DNA
aggctcttcacatgggcttcactaacaccacagtgtggaggtggctgattactgataggcaggggcaaaagtcctaggtccccagttggcttcctctgacataagcctgatgggtctagg

SEQ ID NO: 32328 - DNA, 120 bp, synthetic construct; identical to SEQ ID NO: 9031
  source 1..120: mol_type = other DNA

SEQ ID NO: 32329 - DNA, 120 bp, synthetic construct
  source 1..120: mol_type = other DNA
cctgcttctcctctccatcattcaagggctttttatgtctgtctgtagctgtacttagcaggaggaataggaagaattgtacctacttcatcttgtcttagaaccagaaatctctcacca

SEQ ID NO: 32330 - DNA, 120 bp, synthetic construct
  source 1..120: mol_type = other DNA
ccttagagttaagttaatttggtaacaaaaataaaacaagactaaaactattaattatgttaaagccataaaaatatgcaaattttttcccaaaatatgggaaatgtgcgtgtgtgtgtg

SEQ ID NO: 32331 - DNA, 120 bp, synthetic construct
  source 1..120: mol_type = other DNA
ctcatattcaagtttttaccataggccacacctggctctcagattcacttagaaggatattagacaggagtcaaagtatgccaaagtgctgaatcaggtctttttcttcagtgggagaag

SEQ ID NO: 32332 - DNA, 120 bp, synthetic construct; identical to SEQ ID NO: 9032
  source 1..120: mol_type = other DNA

SEQ ID NO: 32333 - DNA, 120 bp, synthetic construct
  source 1..120: mol_type = other DNA
ttgtgccataagcaatgttgtctaaaaatccagctgacattcttcctccatcaggtttccagaaaacagctagaaaattagcctaagattaaatacatcatggagaagtagaaagggtgt

SEQ ID NO: 32334 - DNA, 120 bp, synthetic construct
  source 1..120: mol_type = other DNA
aaaaaaggcatggtaatacttataaaaagactttaaatatttttataagttttaaatattttataagtaattttataaataaaattacaaaccatttaagtgacctaattaaatcaaaca

SEQ ID NO: 32335 - DNA, 120 bp, synthetic construct
  source 1..120: mol_type = other DNA
gttgaccacaagagggaaacctagtcccagttatactataaattagaaaatcaagggaaaaatatgtgtcctgagaacttttgaaatagtcacatataaacatagtatacaagaaaaaac

SEQ ID NO: 32336 - DNA, 120 bp, synthetic construct; identical to SEQ ID NO: 9033
  source 1..120: mol_type = other DNA

SEQ ID NO: 32337 - DNA, 120 bp, synthetic construct
  source 1..120: mol_type = other DNA
caaagttcctaagtaatctcagaaacctaaaatagtttattctctatcctcactattggtttttaaaaaacattttgcagcatggaccactgctcgtgtacagatgctctccaacttaac

SEQ ID NO: 32338 - DNA, 120 bp, synthetic construct
  source 1..120: mol_type = other DNA
agaccatctgtattagcttaagtcttggaatggtttattttttagatgccatttagccacttatattctcttctattttattgtgagaactaattcccctcttacattctgtgcttgacc

SEQ ID NO: 32339 - DNA, 120 bp, synthetic construct
  source 1..120: mol_type = other DNA
aaaaatcattttctaccatctttcttatcaggaggctctagtgattccttctccacacttctaacttctcatcttcacactccttgtcttcctaacttcactacagtaagtgttttacat

SEQ ID NO: 32340 - DNA, 120 bp, synthetic construct; identical to SEQ ID NO: 9034
  source 1..120: mol_type = other DNA

SEQ ID NO: 32341 - DNA, 120 bp, synthetic construct
  source 1..120: mol_type = other DNA
aagggtcttatagaaatcctgccactttcacctgaaagaataatcttcagttatgtggcacatggccaagagtaaaagtctttagtcacttggaagcagacagacactgtaatgctaaat

SEQ ID NO: 32342 - DNA, 120 bp, synthetic construct
  source 1..120: mol_type = other DNA
taatctaacaaaaaacatgttatatgcacactcttctccattaccttgtaagaaaactggactaggaaacacagctgaaatggccagttctgcctccatttcctaaaccgtgttataatt

SEQ ID NO: 32343 - DNA, 120 bp, synthetic construct
  source 1..120: mol_type = other DNA
gtctttcctcagtatcagctaagaggccattaacacagatatctgtttatggacatgcgacactgttgttcacctcttttgcagaattcataaagaaatgatggggaaaacacatcaaag

SEQ ID NO: 32344 - DNA, 120 bp, synthetic construct
  source 1..120: mol_type = other DNA
tgcagggacatggatgaagctggaaaccatcattctcagcaaaataacacaggaacagaaaaccaaacactgaattttctcactcataagtgggagttgaacaatgagaacacatggaca

SEQ ID NO: 32345 - DNA, 120 bp, synthetic construct; identical to SEQ ID NO: 9035
  source 1..120: mol_type = other DNA

SEQ ID NO: 32346 - DNA, 120 bp, synthetic construct
  source 1..120: mol_type = other DNA
tacttgcctggaatttagtgaaattgttttctagggggaccaagagtttcctctacttgatatgaagttgggtggttgaagatgataggattggcttctgcttccatcagaatcctaaag

SEQ ID NO: 32347 - DNA, 120 bp, synthetic construct
  source 1..120: mol_type = other DNA
acacaaagaatgttttagtgtcccctacacaccagacacgggccatgaaggaatctgaagagcctaccaaaccttgcacaagagaaaagctttacttggaacatcatccaggctcagaga

SEQ ID NO: 32348 - DNA, 120 bp, synthetic construct
  source 1..120: mol_type = other DNA
atggcctcaaagtgccagtagaacgtaagaaggaaggagaaccacactcattcctgccttcaacaatttacacagggatagaaagagatttatattaaatcaagttgggactttcaatta

SEQ ID NO: 32349 - DNA, 120 bp, synthetic construct; identical to SEQ ID NO: 9036
  source 1..120: mol_type = other DNA

SEQ ID NO: 32350 - DNA, 120 bp, synthetic construct
  source 1..120: mol_type = other DNA
aattgatactttcctaattctcctccttcaacacacagacacacacacacacaacacgtatgcatacaaacacatctgaattctataaaatcattctgaccttgatgagattccatagtt

SEQ ID NO: 32351 - DNA, 120 bp, synthetic construct
  source 1..120: mol_type = other DNA
acatgcgttttttcagaagatgagaacaaagatgagaagatgagagcaacagaatgtcctatatcctaattctctgtgctgacttcggagtggccaatatgatagagatggaaggaactc

SEQ ID NO: 32352 - DNA, 120 bp, synthetic construct
  source 1..120: mol_type = other DNA
ggtcaagctaatcttttccttcagagtctctcaattataagacttagcttgtgccatttagaacagacaagaacacagagaattatagaacaatctgactacaggttctcaagttaaagc

SEQ ID NO: 32353 - DNA, 120 bp, synthetic construct; identical to SEQ ID NO: 9037
  source 1..120: mol_type = other DNA

SEQ ID NO: 32354 - DNA, 120 bp, synthetic construct
  source 1..120: mol_type = other DNA
atcaacagttcacagtttttattctgatagggatctattccagcagaccagcttctgtgacctctcaggatgagaaaaagtaacacaagaaaagcttcttatgtagtgaattgagaagga

SEQ ID NO: 32355 - DNA, 120 bp, synthetic construct
  source 1..120: mol_type = other DNA
aagaaggggctggaggttctcagaattcaaaccacacaaacaaatgaagtattgaggtcccagacttgatctgggcccagtgtgaaagccctaacttatttctccagaagaatatgtcct

SEQ ID NO: 32356 - DNA, 120 bp, synthetic construct
  source 1..120: mol_type = other DNA
tcctgtctgtatctttgggaatagatgtaagaatattacatctctcaggcttgctctgccccaggtttctgaacatggaatacatttctccagtgaaactcagtattatgagatttggga

SEQ ID NO: 32357 - DNA, 120 bp, synthetic construct; identical to SEQ ID NO: 9038
  source 1..120: mol_type = other DNA

SEQ ID NO: 32358 - DNA, 120 bp, synthetic construct
  source 1..120: mol_type = other DNA
attagagtttgaaagaaaacggagaaccatgagcactgtccaaataggaacttctctcctatcacagagaaagggaactgaaagtcatttctcaagtgtcccaaatttagtaatctcaca

SEQ ID NO: 32359 - DNA, 120 bp, synthetic construct
  source 1..120: mol_type = other DNA
accatttaagaacaaggcattatggcagccagcaaagggcagacatagaaaattatacatggttttgcctctaaaagaggagatgacaagcttaaatcataggatcagactcttagcaca

SEQ ID NO: 32360 - DNA, 120 bp, synthetic construct
  source 1..120: mol_type = other DNA
agacatagaaaattatacatggttttgcctctaaaagaggagatgacaagcttaaatcataggatcagactcttagcacagactgataccataggctctcatctggcccattctcctgac

SEQ ID NO: 32361 - DNA, 120 bp, synthetic construct
  source 1..120: mol_type = other DNA
taatcagtaatgtatggaatatttgtgttcataacttgtgagaacggctgcatggcaggacaagaccccagcacaacagtatggaaaatccaccctaagcagacatgtcatgactgatgt

SEQ ID NO: 32362 - DNA, 120 bp, synthetic construct; identical to SEQ ID NO: 9039
  source 1..120: mol_type = other DNA

SEQ ID NO: 32363 - DNA, 120 bp, synthetic construct
  source 1..120: mol_type = other DNA
accatccgatgggctccctcactgccaggtcactcttcatggaagtatttgtattccagtcctttctgtggaaagaaattaacattctccttttcataacactgtatcttcagaaacaag

SEQ ID NO: 32364 - DNA, 120 bp, synthetic construct
  source 1..120: mol_type = other DNA
tatgacaaaagaaaaactttcataatcttatgacatgagggaaggaatattaaagccgttctgtgggttattatctctaacgttcccaatagaataggctttgccagctgggtgtggtgg

SEQ ID NO: 32365 - DNA, 120 bp, synthetic construct
  source 1..120: mol_type = other DNA
catggtgaaaccccgtctctactaaaaatacaaaaattatccgggcatggtggtgggcgcctgtaatcccagctactcaggaggctgaggcaggagaatcgcttgaacccgggaggcgga

SEQ ID NO: 32366 - DNA, 120 bp, synthetic construct; identical to SEQ ID NO: 9040
  source 1..120: mol_type = other DNA

SEQ ID NO: 32367 - DNA, 120 bp, synthetic construct
  source 1..120: mol_type = other DNA
ctgagttgatcatcttgaagtctaggactccaagaagcatgaaagagcttctttagtgaagctatgtcctcagtactgccaaaattcagacaatctccatggcctgacaatttaccttct

SEQ ID NO: 32368 - DNA, 120 bp, synthetic construct
  source 1..120: mol_type = other DNA
taggtgtttccattgattctattctcactaatgtgcttcaggtatatccctgtctagaagtcagattggggttaaagagtctgtccgtgattgactaacagtcttaaatacttgatttgt

SEQ ID NO: 32369 - DNA, 120 bp, synthetic construct
  source 1..120: mol_type = other DNA
tttttctgattggccaaagagtaattgatttgcattttaatggtcagactctattacaccccacattctcttttcttttattcttgtctgttctgcctcactcccgagctctactgactc

SEQ ID NO: 32370 - DNA, 120 bp, synthetic construct; identical to SEQ ID NO: 9041
  source 1..120: mol_type = other DNA

SEQ ID NO: 32371 - DNA, 120 bp, synthetic construct
  source 1..120: mol_type = other DNA
tgggggtgggggtgggggtgggggaggaagaatattttctggcaagcattaacaagttatatttctgggctttaattattctttctggaaaattagtaaaattaaaaactaaaaaccaca

SEQ ID NO: 32372 - DNA, 120 bp, synthetic construct
  source 1..120: mol_type = other DNA
tttggagtgtaaatcctgtcggtatatattgagcacatatattgtgttgaagattactagaaggaaaagtcatcaaaaagcaacaatttaccccaggaaaaggggagggaaggcatgctg

SEQ ID NO: 32373 - DNA, 120 bp, synthetic construct
  source 1..120: mol_type = other DNA
aaatggggaatctgatattattctctctcatctccagagcaacattggtgctgttgtaaagatgtactgtagaaaagtattcttcacccagcgtgacccccacagaaggtgtcaggtaga

SEQ ID NO: 32374 - DNA, 120 bp, synthetic construct; identical to SEQ ID NO: 9042
  source 1..120: mol_type = other DNA

SEQ ID NO: 32375 - DNA, 120 bp, synthetic construct
  source 1..120: mol_type = other DNA
gcaacatggtgaaaccccgtctctactaaaaatacaaaaaattagctgggtatggtggcacacgcctgtagtcccagctactcgggaggctgaggcaggaggattgcttgaactcgggag

SEQ ID NO: 32376 - DNA, 120 bp, synthetic construct
  source 1..120: mol_type = other DNA
aaggaaaaaaaaaatctcccactcatcgatacactccacagaggcagcatactctcccagtgtagctttctcttttcatgttcattattcccttggtgttggttattctcaatgtcaatc

SEQ ID NO: 32377 - DNA, 120 bp, synthetic construct
  source 1..120: mol_type = other DNA
gatgctgggaagcagggggactatgacgctacaaggtctcagtcttaatttttggagtacttcagtccccaggtatattttccatagatttggcccttaaataaagagaagcttctgact

SEQ ID NO: 32378 - DNA, 120 bp, synthetic construct
  source 1..120: mol_type = other DNA
aaacccctgacaggatcaaaaccacagcagggctacataataggaaaactatacataaataggtagaataatctgctcaggatcactaggtaagttgctgaataagaattcaagatgttt

SEQ ID NO: 32379 - DNA, 120 bp, synthetic construct; identical to SEQ ID NO: 9043
  source 1..120: mol_type = other DNA

SEQ ID NO: 32380 - DNA, 120 bp, synthetic construct
  source 1..120: mol_type = other DNA
ccagaccttgtcttgtcactcatccctactcgccatcattctttcattcctcttggcccaatctctctccactacttcctgcctacatgtatgtaggttattcatttccctctcttgatt

SEQ ID NO: 32381 - DNA, 120 bp, synthetic construct
  source 1..120: mol_type = other DNA
tgaccaatcaggcgagtttatgtttgactttgatggtgatgagattttccatgtggatatggcaaagaaggagacggtctggcggcttgaagaatttggacgatttgccagctttgaggc

SEQ ID NO: 32382 - DNA, 120 bp, synthetic construct
  source 1..120: mol_type = other DNA
aatccatagtttgaaagtagttgcttcagctctttgtgttagattattgtaactgattttccctccaagggtctaaccttgccattaacaagccccaaattctcatgccagaggtctgag

SEQ ID NO: 32383 - DNA, 120 bp, synthetic construct; identical to SEQ ID NO: 9044
  source 1..120: mol_type = other DNA

SEQ ID NO: 32384 - DNA, 120 bp, synthetic construct
  source 1..120: mol_type = other DNA
acaaacagccctgtggaactgagagagcccaacgtcctcatctgtttcatagacaagttcaccccaccagtggtcaatgtcacgtggcttcgaaatggaaaacctgtcaccacaggagtg

SEQ ID NO: 32385 - DNA, 120 bp, synthetic construct
  source 1..120: mol_type = other DNA
cctcttctcaagcactggggtatggaccaacactcaatctcctttatttcaaggtttcctcctatgatgcttgtgtgaaactcggtgttctaactgtttcataatatctgctacaattaa

SEQ ID NO: 32386 - DNA, 120 bp, synthetic construct
  source 1..120: mol_type = other DNA
tacatttgattctgagtgttacttcttcccacactcattaccatgtactctgccttatttccccccagagtttgatgctccaagccctctcccagagactacagagaacgtggtgtgtgc

SEQ ID NO: 32387 - DNA, 120 bp, synthetic construct; identical to SEQ ID NO: 9045
  source 1..120: mol_type = other DNA

SEQ ID NO: 32388 - DNA, 120 bp, synthetic construct
  source 1..120: mol_type = other DNA
ttgatcacggctccagtcttagaaatcatctccagtacctaaaaccattgtttcacattagaatactgagtctagggatctagaaaatacattagaatatggagtctagggatctagaaa

SEQ ID NO: 32389 - DNA, 120 bp, synthetic construct
  source 1..120: mol_type = other DNA
ggtcaattcattgcatgaaatgggaatctcttagaggccaatgcctgcttttgcttctttagtctcaaatgtagtatgagaaactctaaaaaaaggtaaagcatggttgcttattatgtt

SEQ ID NO: 32390 - DNA, 120 bp, synthetic construct
  source 1..120: mol_type = other DNA
aactgatcttcaactccttggtaactatgtgtgtcttgctataggtgatggtgtttcttagagagaagatcactgaagaaacttctgctttaatggctttacaaagctggcaatattaca

SEQ ID NO: 32391 - DNA, 120 bp, synthetic construct; identical to SEQ ID NO: 9046
  source 1..120: mol_type = other DNA

SEQ ID NO: 32392 - DNA, 120 bp, synthetic construct
  source 1..120: mol_type = other DNA
tggggagtcggtcctggggaatatatgtgatcctttcccggtaaaatatctgaatgttgaatttatcttataaattctagaattcatcagacatatcccggttcatttgggcttggtctc

SEQ ID NO: 32393 - DNA, 120 bp, synthetic construct
  source 1..120: mol_type = other DNA
agtgaatctgaaaccccaaggtatggatctcagaatgcatgggatggaggggagcagatggggttagagtggggagaaggaagacagaagaatccataaacattgcaggatttacatatc

SEQ ID NO: 32394 - DNA, 120 bp, synthetic construct
  source 1..120: mol_type = other DNA
cagatgcctattgtattaccgagagagtagtctgactgattcttgaaaccaccttatatttgaagatgtgtctttgagtggaaaagctgagtgaaatttggggttggggagaaagatatg

SEQ ID NO: 32395 - DNA, 120 bp, synthetic construct; identical to SEQ ID NO: 9047
  source 1..120: mol_type = other DNA

SEQ ID NO: 32396 - DNA, 120 bp, synthetic construct
  source 1..120: mol_type = other DNA
gcaaaaaattatacattctgttgtttttctcaaaatttctatagagtgatgataaaaatctaagagaagctaaacaaaacaaggataaaccaaagcatcatgaccttctaagccttacta

SEQ ID NO: 32397 - DNA, 120 bp, synthetic construct
  source 1..120: mol_type = other DNA
aaccccatctctactaaaaatacaaaaattagccaggcgtggtgataggcgcctgtaatcccagctactctggaggttgaggcaggagaatctcttgaatccgggaggcagaggttgcag

SEQ ID NO: 32398 - DNA, 120 bp, synthetic construct
  source 1..120: mol_type = other DNA
actactgatggtagaataggtatgaatgtctttcttacatgactacaaactttattataaaataaatagcttaacacagagaatacactaaaacttagacaagcatggattaagaaagca

SEQ ID NO: 32399 - DNA, 120 bp, synthetic construct
  source 1..120: mol_type = other DNA
agaccatcctggctaacatggtgaaaccccgtctctattaaaaaaaaaaaaacaaaaaattagccgggtgtggtggcgggtgcctgtagtcccagctactcgagaagttgaggcaggaaa

SEQ ID NO: 32400 - DNA, 120 bp, synthetic construct; identical to SEQ ID NO: 9048
  source 1..120: mol_type = other DNA

SEQ ID NO: 32401 - DNA, 120 bp, synthetic construct
  source 1..120: mol_type = other DNA
atcatatatccaccattacaggattaaacaaaatagcttcactgatctaaaaatgacccaggctccatctactcatccttccttcctccctctgagccattggcattctctgagctattt

SEQ ID NO: 32402 - DNA, 120 bp, synthetic construct
  source 1..120: mol_type = other DNA
tcatacagcatagagctttttcagatgagattcttttgcttagccatatgcatacaggtttcctgcgtatattgtcatagcttgatagcttatttttctttaatgttaaataatactcca

SEQ ID NO: 32403 - DNA, 120 bp, synthetic construct
  source 1..120: mol_type = other DNA
agacacaagttttccactttggataaatacatagaagggcaattgctggatcatatggtaagagtatgtttagctttgtaagaaacaactagaatatcttccaaaatggctgtatcattt

SEQ ID NO: 32404 - DNA, 120 bp, synthetic construct
  source 1..120: mol_type = other DNA
attatagattcaggggaaattgcaaagacagtatagagacattctgcatacgccttcacccagtttctccaaatgtttatattttaagtaattatagcacagtagcaaaaccaagaaaat

SEQ ID NO: 32405 - DNA, 120 bp, synthetic construct; identical to SEQ ID NO: 9049
  source 1..120: mol_type = other DNA

SEQ ID NO: 32406 - DNA, 120 bp, synthetic construct
  source 1..120: mol_type = other DNA
ttttttattgctaagtagtattccatggtctaaatgcagcacagtttgcttaactatttgcctattgaaggacattttggctgtttctagtttggggtcactataaataaggctgttttg

SEQ ID NO: 32407 - DNA, 120 bp, synthetic construct
  source 1..120: mol_type = other DNA
ccaaacttagccaagtatgatggcttatacctgtaatcccagcactttgggaggccaaggaagaaggataaattgaggccaggaatttgaggccagccccagcgtctacacttttttttt

SEQ ID NO: 32408 - DNA, 120 bp, synthetic construct
  source 1..120: mol_type = other DNA
agactacaggtgcacaccaccacgcccaattaatttttgtatttttagtagagacagggtttcaccatgttggccaggatggtcttgacctcatgacctcgtgatccgcttgccttggcc

SEQ ID NO: 32409 - DNA, 120 bp, synthetic construct; identical to SEQ ID NO: 9050
  source 1..120: mol_type = other DNA

SEQ ID NO: 32410 - DNA, 120 bp, synthetic construct
  source 1..120: mol_type = other DNA
gaagaaaggaagttaaaaagaagggagggagggaggaaggaagaaaggaaagatggaagaaaggaaggaagggagggaggagaaagagaaagaaaaagaaggaaggaagaagggaaggag

SEQ ID NO: 32411 - DNA, 120 bp, synthetic construct
  source 1..120: mol_type = other DNA
ggaaaggaaagaaggaaggaaaggaaagaaagaaaaagaaaaaggaaggaaggaaagaaggaaggaaggaagaaagaaaaagaaagaaagaaggaaggaaagaaagaaagaaagagaaag

SEQ ID NO: 32412 - DNA, 120 bp, synthetic construct
  source 1..120: mol_type = other DNA
gctggagtgcaatggcgtgatttcggctcactgaaacctctgcctcctgggttcaggtgattctcctgcctcagcctccctagtagctgggattacaggtgcacaccatcacgcctggat

SEQ ID NO: 32413 - DNA, 120 bp, synthetic construct; identical to SEQ ID NO: 9051
  source 1..120: mol_type = other DNA

SEQ ID NO: 32414 - DNA, 120 bp, synthetic construct
  source 1..120: mol_type = other DNA
atttttccacattaattttgaatgccaagacttcgctgaagttgttaattagcttaaagagcttttgggctgagactatggggttttcttgatataggatcatgccatctgcaaataggc

SEQ ID NO: 32415 - DNA, 120 bp, synthetic construct
  source 1..120: mol_type = other DNA
gcgctggttttcaaggggaatgcttctagctttttcccatttagtatggtattagctgtggggttgtcacagaaggctcttattattttaagttatgttcacttactactcagtttatta

SEQ ID NO: 32416 - DNA, 120 bp, synthetic construct
  source 1..120: mol_type = other DNA
atatgttgaactaaccttgcatcaccaagataaagcatacttgatcattgtagattagctttttaatgtactgctggattcagtttgccagtattttgtggaggatttttgcataaatct

SEQ ID NO: 32417 - DNA, 120 bp, synthetic construct; identical to SEQ ID NO: 9052
  source 1..120: mol_type = other DNA

SEQ ID NO: 32418 - DNA, 120 bp, synthetic construct
  source 1..120: mol_type = other DNA
aggtgtttttaatattctctgatggttatttgtgtttctgtggggtcagtggtaatatccccattgtaatttctgagtgtgattatttgaatcttctctcttttcttctttattagtcta

SEQ ID NO: 32419 - DNA, 120 bp, synthetic construct
  source 1..120: mol_type = other DNA
tatttcttgtcttctgctagccttgatattggtttgtacctggttgaccagttcttttagttgtgatgttaggttgttaaattgaggtctttctttttcatgtgggcatttgatgcataa

SEQ ID NO: 32420 - DNA, 120 bp, synthetic construct
  source 1..120: mol_type = other DNA
cattcaggagcaggcggttcaacttccatgtaattgtagggttttgaatgaatttcttagtcttaatttctaatttgattgcactgttgtctgaaagattgttttttatgatttcagttc

SEQ ID NO: 32421 - DNA, 120 bp, synthetic construct; identical to SEQ ID NO: 9053
  source 1..120: mol_type = other DNA

SEQ ID NO: 32422 - DNA, 120 bp, synthetic construct
  source 1..120: mol_type = other DNA
cccacaattctcacatgccacgggaggcacctggtgggaggtaattgaatcatgagtgcgggtctttcccatgctattctcatcatagtgaataagtctcatgagatctgatagttttat

SEQ ID NO: 32423 - DNA, 120 bp, synthetic construct
  source 1..120: mol_type = other DNA
tttctttcttttgtaaattgcccagtctcaggtacatctttgtcagcagcataacagactaatagaggagagtggagcactgctgaaaagatatctgaaaatgtggaagtgactttggaa

SEQ ID NO: 32424 - DNA, 120 bp, synthetic construct
  source 1..120: mol_type = other DNA
tgtggacaataatgtccaggctaaggtagtctcagatggaaatgaggaacttgttgggaactggagcaaaggtgactcattatgctttagcaaagagactggtggcattttgtccctgtc

SEQ ID NO: 32425 - DNA, 120 bp, synthetic construct; identical to SEQ ID NO: 9054
  source 1..120: mol_type = other DNA

SEQ ID NO: 32426 - DNA, 120 bp, synthetic construct
  source 1..120: mol_type = other DNA
gctcactgcaagctctgcctgccaggttcatgccattctcctgcctcagccttccaagtagctgggactacaggcatccgccaccacacctggctaattttttgtatttttagtagagac

SEQ ID NO: 32427 - DNA, 120 bp, synthetic construct
  source 1..120: mol_type = other DNA
cttgatggcagccctgcccatcacaggcctggaggcctaggaggaaagaatggtttcttgggctgggcccagtgtccccgtgctgtatgcggtctttggacttggtgccctgtgtctcag

SEQ ID NO: 32428 - DNA, 120 bp, synthetic construct
  source 1..120: mol_type = other DNA
gagttgaggtttgggaacctccacctagatttcagaggatgtatggaaatgcctggatgtccaggcagaagtttgctgcctgggcagggcactcatgtggaacctctgctagggcagtgc

SEQ ID NO: 32429 - DNA, 120 bp, synthetic construct; identical to SEQ ID NO: 9055
  source 1..120: mol_type = other DNA

SEQ ID NO: 32430 - DNA, 120 bp, synthetic construct
  source 1..120: mol_type = other DNA
tggccagtttcttccatttggaatgggtacatttattcaatgcctgtaccctcattgtgtctaagaagtaactagcttgcttttgattttacaggctcataggcagaagggacttgcctt

SEQ ID NO: 32431 - DNA, 120 bp, synthetic construct
  source 1..120: mol_type = other DNA
ggtggaatgatatggtttggccctgtccccacccaaatctcaccttgaattgtaggtcccgtaatacccacatgttgtgggagggacctggtgggaggtaatttaatcatggggtaggtc

SEQ ID NO: 32432 - DNA, 120 bp, synthetic construct
  source 1..120: mol_type = other DNA
ccttccaccatgattgtgaggcctccccagccatgtggaactgcgagtccattaaacctccttcttttgtaaattgcccaatctcaagtatgcctttattagcagcatgataatggacta

SEQ ID NO: 32433 - DNA, 120 bp, synthetic construct; identical to SEQ ID NO: 9056
  source 1..120: mol_type = other DNA

SEQ ID NO: 32434 - DNA, 120 bp, synthetic construct
  source 1..120: mol_type = other DNA
tatccttaacaaaatactaacaaaccaaatcaagcagcacatcaaaagctaatgtaccacgatcaagtagattttacccctgagatgcaaggttagttcaacatatacaaatcaacaaat

SEQ ID NO: 32435 - DNA, 120 bp, synthetic construct
  source 1..120: mol_type = other DNA
gtaatcccagcactttgggaggctgaggtgggcagatcacaaggtcaggagattgagaccatcctggccaacatggtgaaaccttgtctctactaaaaatgaaaacttagctgggcatgg

SEQ ID NO: 32436 - DNA, 120 bp, synthetic construct
  source 1..120: mol_type = other DNA
aaagactccatcttaaaaaaaaaaaaaaacctcagtaaactaggcattggaggaacatacttcaaaataataagagccatcaatgacaaacccacagccaacaacatagtgaatgggcaa

SEQ ID NO: 32437 - DNA, 120 bp, synthetic construct; identical to SEQ ID NO: 9057
  source 1..120: mol_type = other DNA

SEQ ID NO: 32438 - DNA, 120 bp, synthetic construct
  source 1..120: mol_type = other DNA
ccctcaccattcttattcaagatagtattggaagtcctgaccagaacatcaggccagagaaagaaataaagggcattcaaagaggaagagtggaagtcaaactatccctgtttgcagatg

SEQ ID NO: 32439 - DNA, 120 bp, synthetic construct
  source 1..120: mol_type = other DNA
cattcctatacacaaagaacactcaagctgagacccatatcaagaacataatcccactcacaatttccacacacacacatattacctaagaatacagctaactatggagatgaaagatct

SEQ ID NO: 32440 - DNA, 120 bp, synthetic construct
  source 1..120: mol_type = other DNA
agtaatttatagattcaatgctattcccattaaactaccattgacagtcttcacagaactagaacaaactactttaaaattcatatggaagcaaaacagagcctaaatagctaaggcaat

SEQ ID NO: 32441 - DNA, 120 bp, synthetic construct; identical to SEQ ID NO: 9058
  source 1..120: mol_type = other DNA

SEQ ID NO: 32442 - DNA, 120 bp, synthetic construct
  source 1..120: mol_type = other DNA
ctagaatataccattctgaacataggacttggcaaagatttcatggcaaagacaccaaaagcaatcacaacaaaaacaaaaattgacaaatgggacctaatttaacttaagagcttctgt

SEQ ID NO: 32443 - DNA, 120 bp, synthetic construct
  source 1..120: mol_type = other DNA
aaataagctgtaagtctgtctttcctcatggtccagaacacacagccctcctgtgcaaataactcacagtcttcccgtgcccaactatcatcagacatctataagctagctcactgcaac

SEQ ID NO: 32444 - DNA, 120 bp, synthetic construct
  source 1..120: mol_type = other DNA
ctccttgcaacatattttcctactttctctaataaatctgcttttttttctacctacaactgtcttggtaaattcttttaccctggcgccactggcccagatagttattgctcacctgca

SEQ ID NO: 32445 - DNA, 120 bp, synthetic construct; identical to SEQ ID NO: 9059
  source 1..120: mol_type = other DNA

SEQ ID NO: 32446 - DNA, 120 bp, synthetic construct
  source 1..120: mol_type = other DNA
agcagtggggtgcaaagaactaaaaagaaaattaccatttgattcagcaatcccattactgtgtatatacctaaaggaatataaaccattctaccataaagacacatgcacacatatgtt

SEQ ID NO: 32447 - DNA, 120 bp, synthetic construct
  source 1..120: mol_type = other DNA
aatgagattgtgtccagaattggttccttccggtgggttcttggtctcgctgacttcaaaaatgaagccatgaacccttgtggtgagtgttacagttcttaaagatggtgtgtccggagt

SEQ ID NO: 32448 - DNA, 120 bp, synthetic construct
  source 1..120: mol_type = other DNA
gtgcatctggagttgttcattcctcccagtgggtttgtggtctcgctgacatcaggagtgaagctgcagactttcacagtgagtgttacagctcttaaaggtggtgcgtcctgagttgtt

SEQ ID NO: 32449 - DNA, 120 bp, synthetic construct; identical to SEQ ID NO: 9060
  source 1..120: mol_type = other DNA

SEQ ID NO: 32450 - DNA, 120 bp, synthetic construct
  source 1..120: mol_type = other DNA
cagagtgctgattggtgtgttttcacagagtgctgattggtgcttttacaatcctttagctagacagaaaagttctccaagtccctgcccaacccagaagcccagccagcgtcacctctc

SEQ ID NO: 32451 - DNA, 120 bp, synthetic construct
  source 1..120: mol_type = other DNA
agtacacatggatacaaagaagagaacagtagatatggggacctacttgagggtgaaggataggaggagggaaaggatcaggaaaaatacctgtgagatactatgcttattaccttggtg

SEQ ID NO: 32452 - DNA, 120 bp, synthetic construct
  source 1..120: mol_type = other DNA
ttttttctcagtgaaatgcttatgcaaacaaatatcatacacttttatttcagagatttcgggatcataaagggagtgtaccaaggacagtttgtgactagcctcctcacattatccctc

SEQ ID NO: 32453 - DNA, 120 bp, synthetic construct; identical to SEQ ID NO: 9061
  source 1..120: mol_type = other DNA

SEQ ID NO: 32454 - DNA, 120 bp, synthetic construct
  source 1..120: mol_type = other DNA
cgccttgctcacctcgcctgtgcatggagaagctctcaaaaaccccgtagttgtgtctgcagtaggtgtccaacagaccccgcaagcagcccaagaggttcttctggctgtttgcattcc

SEQ ID NO: 32455 - DNA, 120 bp, synthetic construct
  source 1..120: mol_type = other DNA
tgcagaaatagcactcgtgtttaatctgctccaagaaatgtgccgcagggacatgaagaaccggtttcttgggcggcatcctaggaaaagagtgatggctatgcccacaatcagcagggc

SEQ ID NO: 32456 - DNA, 120 bp, synthetic construct
  source 1..120: mol_type = other DNA
tacccatttccgagctgagctggacgcctctttgcaaggctctggatcaggatcaccttcctcatcactgtctcctgcgcttcctcctcctgggagcctccatccaaaagacacttctgc

SEQ ID NO: 32457 - DNA, 120 bp, synthetic construct; identical to SEQ ID NO: 9062
  source 1..120: mol_type = other DNA

SEQ ID NO: 32458 - DNA, 120 bp, synthetic construct
  source 1..120: mol_type = other DNA
ccgtgtgtgtctctggacaaaaagggaggcacatttcaggtaagcataatatcatgtacaaaagcttgaaagaattgatgaacttcttcaagaaaccagaaaaaagttcactaaagcaca

SEQ ID NO: 32459 - DNA, 120 bp, synthetic construct
  source 1..120: mol_type = other DNA
ttcgatttatactaaatgtaatgggaaacagttgaagagtccatgaccccaacacaggtccacaaacttttttttttggactttctaaatccagaaaactcacgaattcacttgctgttg

SEQ ID NO: 32460 - DNA, 120 bp, synthetic construct
  source 1..120: mol_type = other DNA
tgaagaggtaaggactcaaaagtgtcacagagctcttactggtgacatgtgcatctgtagtttcaatatatataaacatacaaacatacgtatgcatgtgtaaatacacacagatttcaa

SEQ ID NO: 32461 - DNA, 120 bp, synthetic construct; identical to SEQ ID NO: 9063
  source 1..120: mol_type = other DNA

SEQ ID NO: 32462 - DNA, 120 bp, synthetic construct
  source 1..120: mol_type = other DNA
tccctgtgtccatgtgttctcattgtttagctcccatttatatgtgagaacatgcggtgtttggtttcctgtttctgtgttaatttgctgaggataatggcttccagcttcatccatgtc

SEQ ID NO: 32463 - DNA, 120 bp, synthetic construct
  source 1..120: mol_type = other DNA
gaaatctgaagcattttactgaaaaatatttgggatagtcgtcaccatttatgacttataattaccagttgttgaaagttaatagagatagtaattatcaagaacacatcaaaattttga

SEQ ID NO: 32464 - DNA, 120 bp, synthetic construct
  source 1..120: mol_type = other DNA
caatgaaacaagcaaaactaagccatgaagagctgaactaagagataaatgtgttttaaaagtgtgagtctagaatttttagaagaaacacaatgtaaaccagtgttctcagccttggca

SEQ ID NO: 32465 - DNA, 120 bp, synthetic construct; identical to SEQ ID NO: 9064
  source 1..120: mol_type = other DNA

SEQ ID NO: 32466 - DNA, 120 bp, synthetic construct
  source 1..120: mol_type = other DNA
aaaacttaggatttttaggaatctagtcccagtgcagagctatttttctagcaaaattaattcattcagaaccaaggtttactgatttatttgccttcccagtcgccaagtcatattctt

SEQ ID NO: 32467 - DNA, 120 bp, synthetic construct
  source 1..120: mol_type = other DNA
aaggaggcatcaaattaccaaccttggacagaggcagaactctcatttctgtagttaagccttctcagaaggggagtgctatggtttggctgcgtaagcatttcaatcttgtcttgaatt

SEQ ID NO: 32468 - DNA, 120 bp, synthetic construct
  source 1..120: mol_type = other DNA
ctgttctcatgacagtgaataagtcttatgagatctgatggttttataaagggaaaaaccctttcgcttgctgtcattcttctcttgcctgccatcatgtgagacatgcctttcaccttc

SEQ ID NO: 32469 - DNA, 120 bp, synthetic construct
  source 1..120: mol_type = other DNA
agggagaaactaagaagatggcattctctcatagatagtttccaaaaaacgagcaagtccccagattttgcgtagagactttcacaagctcccttcacccttcagaaatgatagcagaga

SEQ ID NO: 32470 - DNA, 120 bp, synthetic construct; identical to SEQ ID NO: 9065
  source 1..120: mol_type = other DNA

SEQ ID NO: 32471 - DNA, 120 bp, synthetic construct
  source 1..120: mol_type = other DNA
ttcggatttaactgggtatcctgtactttatttggcaaccttagcccaacttgctaataatgctcagaaggagtgaatttaatacttctttgttttctttaacacatgcctatgacagcg

SEQ ID NO: 32472 - DNA, 120 bp, synthetic construct
  source 1..120: mol_type = other DNA
tctctctcccaccctgagacacaccctgtacataagaaattctatcaataattcagactcagtctagtcactattcactagtggttgtaagctcaggctctagaatcaggaaatctgaat

SEQ ID NO: 32473 - DNA, 120 bp, synthetic construct
  source 1..120: mol_type = other DNA
atatattcctcacaggattattgttgagggtaaaactaagcagtggctcttcttagtgctgataatataataatcactctaatatattaccattttatttttacaatccctataaaggaa

SEQ ID NO: 32474 - DNA, 120 bp, synthetic construct
  source 1..120: mol_type = other DNA
ctggtttatatataataattcacatgcctaaacctcacacaaaaggagattgctgatatcgaagagagggacttcatatatactcagatttaaattgcaatcggatttctagcactaact

SEQ ID NO: 32475 - DNA, 120 bp, synthetic construct; identical to SEQ ID NO: 9066
  source 1..120: mol_type = other DNA

SEQ ID NO: 32476 - DNA, 120 bp, synthetic construct
  source 1..120: mol_type = other DNA
ttctttgttcattttctttagatccagctggctccctgatcccagagcatagtctttccctgaggctcgctactcaaaagagtcaaacttcatccagccctcacttcttccacccgctct

SEQ ID NO: 32477 - DNA, 120 bp, synthetic construct
  source 1..120: mol_type = other DNA
accacaactggccactccctcgcctcgaaaaaatcatttttctttgattcccatgcatcacattccttgggttttttttctccagcatctctggggaatcttctcagtcccttatgctgt

SEQ ID NO: 32478 - DNA, 120 bp, synthetic construct
  source 1..120: mol_type = other DNA
cctcaccctgaactcctctcttatattcagttgacttcctgattgcttcatgtgagttcaaaaatcatctcaattttaataaacacaattgtcatttctaatcaaccacttcaaatcatt

SEQ ID NO: 32479 - DNA, 120 bp, synthetic construct; identical to SEQ ID NO: 9067
  source 1..120: mol_type = other DNA

SEQ ID NO: 32480 - DNA, 120 bp, synthetic construct
  source 1..120: mol_type = other DNA
caaaagagagaaattttaaagctgggggagacatcacacgttggtaggatccacagtgccccacaagccacaaaaaccagcaagtttttattagggattttcaaaaggggagggagtgtg

SEQ ID NO: 32481 - DNA, 120 bp, synthetic construct
  source 1..120: mol_type = other DNA
aagtttcaggcaccattgtcatcaataacatcttatcaggagacatggttttgagatcaaccgatctgatcaaaatttattaggtgggaatttcctcttcctaataagcctgggagtgct

SEQ ID NO: 32482 - DNA, 120 bp, synthetic construct
  source 1..120: mol_type = other DNA
tgctgagaaaaagaattcagcaatatttctcccatttgcttttgaaagaagagaaatatggctctgttctgcctggctcaccggcagtcagagtttaaggttatctctcttattccctga

SEQ ID NO: 32483 - DNA, 120 bp, synthetic construct; identical to SEQ ID NO: 9068
  source 1..120: mol_type = other DNA

SEQ ID NO: 32484 - DNA, 120 bp, synthetic construct
  source 1..120: mol_type = other DNA
ctgacttcccgcaacataatattaatggactctccttgtaacctcccaggagcttccaatatgtttaaataaaacttaattccttactatggccaccaaggccgaatatgatgcagctcc

SEQ ID NO: 32485 - DNA, 120 bp, synthetic construct
  source 1..120: mol_type = other DNA
ttccccttttctgtctgtctggaacacttgtcccttagatcttcacatggctgtcttattgttcttgtctcagctaaatgtgagctctcctcagggagggctcccaaactacctgtgaat

SEQ ID NO: 32486 - DNA, 120 bp, synthetic construct
  source 1..120: mol_type = other DNA
tctcctctggtattgagttccatgagagtagggatcttttttatcctattcaagtagaaatctctgagcctagaacagagaccagaacaaaacttttgctcagaaacatacctgtggtct

SEQ ID NO: 32487 - DNA, 120 bp, synthetic construct; identical to SEQ ID NO: 9069
  source 1..120: mol_type = other DNA

SEQ ID NO: 32488 - DNA, 120 bp, synthetic construct
  source 1..120: mol_type = other DNA
gcctggccaacatggtgaaaccccgtctctactaaaaatacaaaaattacctgggaggtggaggttgcagtgagctgagactgcaccattgcactccagcctgggcaacagagcgagact

SEQ ID NO: 32489 - DNA, 120 bp, synthetic construct
  source 1..120: mol_type = other DNA
gctgcacccattaactcttcatttacattaggtatatctcctaatgctatccctccccccttcctccaccccacaacaggccccggtgtgtaaagttccccttcctgtgtccatgtgttc

SEQ ID NO: 32490 - DNA, 120 bp, synthetic construct
  source 1..120: mol_type = other DNA
tatccttttttatggctgcatagtattccatggtgtatatgtgccacattttcttaatccagcctatcattgttggacatttgggttggttccaagtctttgctattgtgaatagtgcca

SEQ ID NO: 32491 - DNA, 120 bp, synthetic construct
  source 1..120: mol_type = other DNA
gccacactgatttccacaatggttgaactagtttacagccccaccaacagtgtaaaagtgttcctatttctccacatcctctccagcacctgttgtttcctgactttttaatgatctcca

SEQ ID NO: 32492 - DNA, 120 bp, synthetic construct; identical to SEQ ID NO: 9070
  source 1..120: mol_type = other DNA

SEQ ID NO: 32493 - DNA, 120 bp, synthetic construct
  source 1..120: mol_type = other DNA
gtgttttagacatgaagtccttgcccatgcctatgtcctgaatggtattgcctaggttttcttctagggtttttatggttttaggtctaacatttaagtctttactccatcttgaattaa

SEQ ID NO: 32494 - DNA, 120 bp, synthetic construct; identical to SEQ ID NO: 9071
  source 1..120: mol_type = other DNA

SEQ ID NO: 32495 - DNA, 120 bp, synthetic construct
  source 1..120: mol_type = other DNA
ctgtgaagaaagtcattggtagcttgatgaggatggcattgaatctataaattaccttgggcagtatggccattttcatgatattgattcttcctacccatgagcatggaatattcttcc

SEQ ID NO: 32496 - DNA, 120 bp, synthetic construct
  source 1..120: mol_type = other DNA
atgggagttcactcatgatttggctctctgtctgttattggtgtataagaatgcttgtgatttttgcacattgattttgtatcctgagactttgctgaagttgcttatcagcttaaggag

SEQ ID NO: 32497 - DNA, 120 bp, synthetic construct
  source 1..120: mol_type = other DNA
cctggctagaacttccaacactatgttgaataggagtggtgagagagggcatctttgtcttgtgcccgttttcaaagggaaagctttcagtttttgcccattcagtatgatattggctgt

SEQ ID NO: 32498 - DNA, 120 bp, synthetic construct; identical to SEQ ID NO: 9072
  source 1..120: mol_type = other DNA

SEQ ID NO: 32499 - DNA, 120 bp, synthetic construct
  source 1..120: mol_type = other DNA
tggtatcaggatgatgctggcctcataaaatgagttagggaggattccctctttttctattgattggaatagtttcagaaggaatggtaccagttcctccttgtacctctgatagaattc

SEQ ID NO: 32500 - DNA, 120 bp, synthetic construct
  source 1..120: mol_type = other DNA
gagtgtatgtgtcgaggaatttatccatttcttctagattttcaagtttatttgcgtagaggtgtttatagtattctctgatggtagtttgtatttctgtgggatcggtggtgatacccc

SEQ ID NO: 32501 - DNA, 120 bp, synthetic construct
  source 1..120: mol_type = other DNA
tttgaagggttttttgtgtctctatttccttcagttctgctccgatcttagttatttcttgccttctgctagcttttgaatgtgatcgctcttgcttctctagttattttaattttgatg

SEQ ID NO: 32502 - DNA, 120 bp, synthetic construct; identical to SEQ ID NO: 9073
  source 1..120: mol_type = other DNA

SEQ ID NO: 32503 - DNA, 120 bp, synthetic construct
  source 1..120: mol_type = other DNA
taaaaatactaaaaaattagcctggcatggtggcaggcccctgtagtcccagctactcgggaggctgaggcaggaaaatcacgtgagcccaggaggcagaggttgtagtgagccgaggcc

SEQ ID NO: 32504 - DNA, 120 bp, synthetic construct
  source 1..120: mol_type = other DNA
ataaaataaaattcaaatttcttaccatggacatcagagcctaatataatgaggctcctgacttcctctctgcttcctacctcatcctctgcctctgcatttccttgaatgctatagttc

SEQ ID NO: 32505 - DNA, 120 bp, synthetic construct
  source 1..120: mol_type = other DNA
ctccctggaactttcgtcccttagatcttcacatggctctctacttattttgttgtctcagctgaatgtcactttctcaggcagagctttctaaacacatgagctaaagttgggtgaatc

SEQ ID NO: 32506 - DNA, 120 bp, synthetic construct
  source 1..120: mol_type = other DNA
atattgggttaatgtctgtctcctctattgttgtgtaacttccatgagagtcgggaccctctctatcttaatcaaatacaatgatttgaacttggaatggagccgagtacacagtagctg

SEQ ID NO: 32507 - DNA, 120 bp, synthetic construct; identical to SEQ ID NO: 9074
  source 1..120: mol_type = other DNA

SEQ ID NO: 32508 - DNA, 120 bp, synthetic construct
  source 1..120: mol_type = other DNA
cttgagtccagcagtttaagaccagcctgggtaacatagcaaagtctcatctctagcaaaattacaaaaatcagctgggcatggtttcctgcctgtagtctccactactctggaggctga

SEQ ID NO: 32509 - DNA, 120 bp, synthetic construct
  source 1..120: mol_type = other DNA
aatggatctcatagtgctctgggtctgtgcaagctttaggaatttctggaaatgatgacaacatagctggggaaaaataaaaactggaggaagaggtaagcagacatggctaattaagga

SEQ ID NO: 32510 - DNA, 120 bp, synthetic construct
  source 1..120: mol_type = other DNA
aagaccccagtaagacaatgagttcccaggacttgctcattgactttcagccctatgggatgtgaacaatgtccacattgtctctataaccccacacagtatatagtttgaacattatta

SEQ ID NO: 32511 - DNA, 120 bp, synthetic construct
  source 1..120: mol_type = other DNA
gttatgtctagttagagcatgtaggacatgtaggagaaatttctatagaaaggttagaagagattcgtaataaacactaagctgggccaggttttccgaggatgccttaagttctttagg

SEQ ID NO: 32512 - DNA, 120 bp, synthetic construct; identical to SEQ ID NO: 9075
  source 1..120: mol_type = other DNA

SEQ ID NO: 32513 - DNA, 120 bp, synthetic construct
  source 1..120: mol_type = other DNA
ttcagtaaaaacgtcattttgtctgacgtaagtcaacataataaagggaagtgccgtatggggaaattattttagcatccttatttccaaatcctctaaacaccctgaggacatgtgatg

SEQ ID NO: 32514 - DNA, 120 bp, synthetic construct
  source 1..120: mol_type = other DNA
gcaagtagtcaagctcctttcgtggaggagataatttgggatccaataatacagatgcacaatctctgaccaaaaagtcacaaagtcttaagggacatggcctgggcacaatgttaacaa

SEQ ID NO: 32515 - DNA, 120 bp, synthetic construct
  source 1..120: mol_type = other DNA
tgcgggagcctccagggagcttcacacaccatgctggagaacaggaaaggaccaggggccagaggaggaggcaagtcttactcaggaagaactatgaacccctccacccacattccaaat

SEQ ID NO: 32516 - DNA, 120 bp, synthetic construct
  source 1..120: mol_type = other DNA
cctcttctgaaacagaatttccttctttaaaggattgtttttaaattagtacttgaaagatttgatccagttgcatgtaaaacactttaattgggtccgattgtgagccagctctgtgct

SEQ ID NO: 32517 - DNA, 120 bp, synthetic construct; identical to SEQ ID NO: 9076
  source 1..120: mol_type = other DNA

SEQ ID NO: 32518 - DNA, 120 bp, synthetic construct
  source 1..120: mol_type = other DNA
aaggagcagcagccccgggtatctgataatatgacagaatgacagctattgactagagagcttaatccgtacctgtttacaggtagggatgtctttaataagttaaaggaaattgaaagt

SEQ ID NO: 32519 - DNA, 120 bp, synthetic construct
  source 1..120: mol_type = other DNA
tgcaatggagggtctgaaggtgcctttgtatggcatttaccctaacaatgtgataaggtcaactgtgcaatccaagtattcatgggtctgagagatcgatcgaagactgtgaaagttagc

SEQ ID NO: 32520 - DNA, 120 bp, synthetic construct
  source 1..120: mol_type = other DNA
ctcactgcaacatctgcctcctcggttcaaagattctcctgcctcaacctcccaagtaactctgactacaggcacttgccaccatgcttggttaattttttgtatttttagtggagatgg

SEQ ID NO: 32521 - DNA, 120 bp, synthetic construct; identical to SEQ ID NO: 9077
  source 1..120: mol_type = other DNA

SEQ ID NO: 32522 - DNA, 120 bp, synthetic construct
  source 1..120: mol_type = other DNA
atttagataattactatgctttttattaatataaatataacatctaagattcagaatggacttcagaatacaactatgcttataaagttctgcattaattcacatgctaccacataggca

SEQ ID NO: 32523 - DNA, 120 bp, synthetic construct
  source 1..120: mol_type = other DNA
ggttcatgccattctcctgcctcagcctcctgggtagctgggactacaggcgcccgccacaactcccggctaatttttttgtatttttagtagaaacagggtttcaccgtgttcgccagg

SEQ ID NO: 32524 - DNA, 120 bp, synthetic construct
  source 1..120: mol_type = other DNA
ctggactaaagtctgtaacctgtctttatggagaactacttttgaggccgtacacttctttcagtaacaatattgtctaagtaatggtatggcaaagttgtttctaccttttctggagct

SEQ ID NO: 32525 - DNA, 120 bp, synthetic construct; identical to SEQ ID NO: 9078
  source 1..120: mol_type = other DNA

SEQ ID NO: 32526 - DNA, 120 bp, synthetic construct
  source 1..120: mol_type = other DNA
ggcaaaccttgctgtaatggacccattggttcaatttgtgcattaactccaaacatgcagcagtcaccaccttccggacttttttggaataacaaacactggtgaattctgggggcttac

SEQ ID NO: 32527 - DNA, 120 bp, synthetic construct
  source 1..120: mol_type = other DNA
ggtaaggcagagggtggaggagaaatatcaatgaccctcatcagaaatcctgacgtcctagccctcttctatctgttttttccagttattgatgttgggttagcttttcctcgtaggaat

SEQ ID NO: 32528 - DNA, 120 bp, synthetic construct
  source 1..120: mol_type = other DNA
tctcatattccatgctgtaagtaagtctcgatcccataaattgattgccatatttgcaacataaggctgaaaagtacatggctgtccatccggaccaagacaaggtaaaatgtcagcact

SEQ ID NO: 32529 - DNA, 120 bp, synthetic construct; identical to SEQ ID NO: 9079
  source 1..120: mol_type = other DNA

SEQ ID NO: 32530 - DNA, 120 bp, synthetic construct
  source 1..120: mol_type = other DNA
ggggcttttgcctaaaattagtcctatgtatcctgttggtaaatatccccaaatgccagtgggaaccttggtaggtttgtctcctccaactaatgtagttctttctctggtggggatatc

SEQ ID NO: 32531 - DNA, 120 bp, synthetic construct
  source 1..120: mol_type = other DNA
ctcctccaactaatgtagttctttctctggtggggatatctaatcctgcacttcctggtgttcctgaggtgaggaacaccaggaatcaatgtttttcctgagacccatccctgaagtggg

SEQ ID NO: 32532 - DNA, 120 bp, synthetic construct
  source 1..120: mol_type = other DNA
tgatttcctttgttacagtgaggacaaagtcctggtgtttttttctgctgggtggggcactgcatcgtaatgtcctttctgtcctgagatctggcggaattcctttttaaaatgtccagt

SEQ ID NO: 32533 - DNA, 120 bp, synthetic construct
  source 1..120: mol_type = other DNA
aacaaatacaaaaaattagctgggcgtagtggcaggtgcctgtagccccagctacttgggaggctgaggcaggagaatggcgtgaacctgggaggaggagcttgcagtgagccgaggttg

SEQ ID NO: 32534 - DNA, 120 bp, synthetic construct; identical to SEQ ID NO: 9080
  source 1..120: mol_type = other DNA

SEQ ID NO: 32535 - DNA, 120 bp, synthetic construct
  source 1..120: mol_type = other DNA
gaaattgtgcataaggttcttgtgacccttgcatgatatgtaaaaaggattgcactgggactccctcttctggaattgtggcccagtcacatttagcagcctgtgcacactgctggcatt

SEQ ID NO: 32536 - DNA, 120 bp, synthetic construct
  source 1..120: mol_type = other DNA
ccaatttaaattccatgtcaggtatgcactaggagacaaacaagtgtgagccaaattctttacattgaagggtagaaggcgcacagcaccaaatacagatactagcaatcctaaagtgaa

SEQ ID NO: 32537 - DNA, 120 bp, synthetic construct
  source 1..120: mol_type = other DNA
ggaaaagtgcaaggtcctaagggctctccagctatggcagcaaggtgtaaaattctctgtattggggtctctatttctgctaccgaaggaggcagtacagatgtttctgctattggagga

SEQ ID NO: 32538 - DNA, 120 bp, synthetic construct; identical to SEQ ID NO: 9081
  source 1..120: mol_type = other DNA

SEQ ID NO: 32539 - DNA, 120 bp, synthetic construct
  source 1..120: mol_type = other DNA
tatgcataataacctcctgcagcattgtagttaatgtctgagatctaacctgagcaccagattatttcaacaaaactttaagcaactgcacataatgtttttcttcgatagacaaattct

SEQ ID NO: 32540 - DNA, 120 bp, synthetic construct
  source 1..120: mol_type = other DNA
atctcgggatccccattcatcttgtcaaattcagttcctctgctccaccagatcttctttgttcacattctcatgtccctgtgtttagaaaccactatggtgtcgccctgtcgctgtttg

SEQ ID NO: 32541 - DNA, 120 bp, synthetic construct
  source 1..120: mol_type = other DNA
cctgagccttgagcttcctttgtatttactgagaagagatagcaagaagggggtcgttgtcggtctgctgcttgctccagagcagccttccaagactgcattccttgaacaatagattct

SEQ ID NO: 32542 - DNA, 120 bp, synthetic construct; identical to SEQ ID NO: 9082
  source 1..120: mol_type = other DNA

SEQ ID NO: 32543 - DNA, 120 bp, synthetic construct
  source 1..120: mol_type = other DNA
tctgaggcgggcagatcatgaggtcagaagatcgagaccatcctggctaacacagtgaaaaccagtctctattaaaaaaatacaaaaaaattagccaggcgcagtgtcaggcacctgtag

SEQ ID NO: 32544 - DNA, 120 bp, synthetic construct
  source 1..120: mol_type = other DNA
aaaaacaaaacaaaacaaaacaaaaagatgtaagtctagacttttcagaaagagcacagtgtgaaccagtgctctcaacctcagcactattgacattttggaccaggtaattctttgttg

SEQ ID NO: 32545 - DNA, 120 bp, synthetic construct
  source 1..120: mol_type = other DNA
ttccccaagggtgatgggagggaagggaggggtggtgaactatccctgggtaagaaccatgggtgtgaaccatttgaaaaaatctgtgttgaacaagccactattagttatggagcagct

SEQ ID NO: 32546 - DNA, 120 bp, synthetic construct; identical to SEQ ID NO: 9083
  source 1..120: mol_type = other DNA

SEQ ID NO: 32547 - DNA, 120 bp, synthetic construct
  source 1..120: mol_type = other DNA
atcaaatttccagccttggccagaggtagaactcttggttttgtagtcaattcccctcagaaagggagaaaccaagaaaatgacattctcatacagacagtttgcaaaaatgagcaggtc

SEQ ID NO: 32548 - DNA, 120 bp, synthetic construct
  source 1..120: mol_type = other DNA
attcttaaattatctaagcactttctttacagagagaaagttaaaaaataaacatgtgtgaagtcgctgtcactgtggtttgcatgactagcactgtaatccatgctcatgtgtcccagt

SEQ ID NO: 32549 - DNA, 120 bp, synthetic construct
  source 1..120: mol_type = other DNA
aaattcagatttaactaggaacctgtattttatttggcaacctcaggccaacttgctagtcaaacctcagaacaaggagtgatttaatacttccttgtgttcttcaacacatgcccagga

SEQ ID NO: 32550 - DNA, 120 bp, synthetic construct
  source 1..120: mol_type = other DNA
tctctgctcccacttcaagaaacaacctgatacatatgaatatcaggaattctgtcaataattcagacacaatctggtcactactcactaataatgggcagactctcaatctctagaatc

SEQ ID NO: 32551 - DNA, 120 bp, synthetic construct; identical to SEQ ID NO: 9084
  source 1..120: mol_type = other DNA

SEQ ID NO: 32552 - DNA, 120 bp, synthetic construct
  source 1..120: mol_type = other DNA
gaaaacatagggcagaaatactagcttatgtctaataatgcagtatacctaaacaaacctcacacaaaaggcatctgctgacataggagaaagggactttctacatgctcagatttaaac

SEQ ID NO: 32553 - DNA, 120 bp, synthetic construct
  source 1..120: mol_type = other DNA
tgtttttaaacaccacagataaaataggatcattattgaaattgtatactgaaaatcaaaggcctggtacgcagtcactgcaaaatgttatacggcatgtactgatggagaccagattca

SEQ ID NO: 32554 - DNA, 120 bp, synthetic construct
  source 1..120: mol_type = other DNA
cacacagggaccctctcgtatttccttgccaatgatgactgagcatctctggttcacagatcctcctgcttctcttcagcctttttagccttctcctttagattcagctggctccctgaa

SEQ ID NO: 32555 - DNA, 120 bp, synthetic construct
  source 1..120: mol_type = other DNA
tgcaaataccaactccagcaaacccagcacttgcttctctctcacattctcacttcacccactttgtgatactcattggcttctcccttcttcttgaaaaaaatctattttccttgactt

SEQ ID NO: 32556 - DNA, 120 bp, synthetic construct; identical to SEQ ID NO: 9085
  source 1..120: mol_type = other DNA

SEQ ID NO: 32557 - DNA, 120 bp, synthetic construct
  source 1..120: mol_type = other DNA
gcttatttgtcaagacaaaatccttagaaataagcttgattgttctatcccctttacagtaatccattaacaggctaagcaaattacatgccgagtgtgtccccaagtttagtggcacct

SEQ ID NO: 32558 - DNA, 120 bp, synthetic construct
  source 1..120: mol_type = other DNA
ccctaacaatgtgataaggtcaactgtgcaatcgaagtattcaggggtctgagagattgatcaaggactcaaagtcagctgttgacagaaaaacactgctgtaaaataattaatatttta

SEQ ID NO: 32559 - DNA, 120 bp, synthetic construct
  source 1..120: mol_type = other DNA
tgcttcttttgatttatcataagggaagatataagaagactgtgctaactaatacgttacagaatgttcaggaaagagaaccctagggaaaaactatgaattacatcagctgatgtaatc

SEQ ID NO: 32560 - DNA, 120 bp, synthetic construct
  source 1..120: mol_type = other DNA
aatggacttcaaagtacaactatacatataaagctctgcattaattcacactgtaccacagttgagataggcactccttccttatgtgccttagtgtttccaggagcaggattctcacca

SEQ ID NO: 32561 - DNA, 120 bp, synthetic construct; identical to SEQ ID NO: 9086
  source 1..120: mol_type = other DNA

SEQ ID NO: 32562 - DNA, 120 bp, synthetic construct
  source 1..120: mol_type = other DNA
gtaatccaggaaatccagctaaggttcatgttagtatttcaggataaaagggtggtgatgctggcagtggcgagctgtccagagtggccggctgcagagggaagttgcaagcggtggcgg

SEQ ID NO: 32563 - DNA, 120 bp, synthetic construct
  source 1..120: mol_type = other DNA
ctccaggcccagagccttcactcctgcgttgctgctctcaccctgcagttgtggggagggcatggagctggggccacccttcagtgacccggggtgggacatgggagtggcctcactttg

SEQ ID NO: 32564 - DNA, 120 bp, synthetic construct
  source 1..120: mol_type = other DNA
cctgatgctcctgacagccaggcccgggctgggatctgttccccaaggtgcctcccccgccccatccaggcgagaaggagccccgggcaccctgagtgctagcagaataacttgcagaga

SEQ ID NO: 32565 - DNA, 120 bp, synthetic construct; identical to SEQ ID NO: 9087
  source 1..120: mol_type = other DNA

SEQ ID NO: 32566 - DNA, 120 bp, synthetic construct
  source 1..120: mol_type = other DNA
gccttttgccacctcagtcacagggaagccaagggaagatgggcatgtaatatttgaagtaagtttcttatagggagcatgtcgaagagtcattgcttttcactctggcatttgtctttt

SEQ ID NO: 32567 - DNA, 120 bp, synthetic construct
  source 1..120: mol_type = other DNA
ctttggttttttcttctctggtttcttttcctattttccaatgtgttccttaagcaatttttagaattccatttttgaatcaatctttttttggtgtatctcattgtatagttttcgtga

SEQ ID NO: 32568 - DNA, 120 bp, synthetic construct
  source 1..120: mol_type = other DNA
cctcctttatatccctttccacttctgcatgtgtaatatatatgttttattttctctacttgcatcaaaaccacatctatcaatgttgtaatttttgcctcaaccatcaagttaatttac

SEQ ID NO: 32569 - DNA, 120 bp, synthetic construct
  source 1..120: mol_type = other DNA
tccattatcatttctattccagttaaagcacttcctttagcccttgttttaacataagtctcctagcatgaaattctcttgattttccttcctttaagtatgtcatggccaggcgcagtg

SEQ ID NO: 32570 - DNA, 120 bp, synthetic construct; identical to SEQ ID NO: 9088
  source 1..120: mol_type = other DNA

SEQ ID NO: 32571 - DNA, 120 bp, synthetic construct
  source 1..120: mol_type = other DNA
ctggatatacattctaggttaacattcctttcagccattaaaatatcttgtgccacttctgtctggtctgcatgatttctaatgagcaatacactgtcatttaatttattttctcctgtg

SEQ ID NO: 32572 - DNA, 120 bp, synthetic construct
  source 1..120: mol_type = other DNA
cacagattcttgaatttttacatttaagcctttgtccaaatttggaaagtagtcagtcttccttcaagcactctttgggcatcacccatttgtcatttctaagactccagtaacacaaat

SEQ ID NO: 32573 - DNA, 120 bp, synthetic construct
  source 1..120: mol_type = other DNA
tgaataaattattcaaaatgtacaatgtactgaagctgacaaataacataaaataggaagagttccacatctcatagagaaagtaagtccattctataaagctttcccaagacaaaaccc

SEQ ID NO: 32574 - DNA, 120 bp, synthetic construct
  source 1..120: mol_type = other DNA
ttgaaaaaaggaaaagcacttgcagttacgtttgatgagatctgtgtaaactttacatcaagacctgaagggaactctacaacaaataggaattaagagaccaataactcttatgaggta

SEQ ID NO: 32575 - DNA, 120 bp, synthetic construct; identical to SEQ ID NO: 9089
  source 1..120: mol_type = other DNA

SEQ ID NO: 32576 - DNA, 120 bp, synthetic construct
  source 1..120: mol_type = other DNA
ttaaaactgtctccttcatatctggagtactagaggagttaggcaatgataatggcaagaaaaatatatcaaagagataataattgcatccaggtaaaatggtcattatttactgttgac

SEQ ID NO: 32577 - DNA, 120 bp, synthetic construct
  source 1..120: mol_type = other DNA
tttggatgcttgtcccctccagatctcatgttaaaatgtaacctccattgttggaggtaaggccgggtgagaggtattttggtcgaggggcaaatcagaactgtgagtcaattaaacctt

SEQ ID NO: 32578 - DNA, 120 bp, synthetic construct
  source 1..120: mol_type = other DNA
gcactttcaaaacttgttcccatcattttattatcaccacaaaatgtttctggaatataccgcataggattctttctgtattgtagaattttccaaacattctatggggacattctgcat

SEQ ID NO: 32579 - DNA, 120 bp, synthetic construct; identical to SEQ ID NO: 9090
  source 1..120: mol_type = other DNA

SEQ ID NO: 32580 - DNA, 120 bp, synthetic construct
  source 1..120: mol_type = other DNA
aggccctagcctaaaacagccatggcagggaccttctccactgatgaaattgtgcactcctccaagaccttcctgtagaataatcttttgctcgttataataataaaaaacacacctctg

SEQ ID NO: 32581 - DNA, 120 bp, synthetic construct
  source 1..120: mol_type = other DNA
ggtggagattttaaatactgagacatgcaacatgtgtagtaacatgtgcaaccacagagcatgtgcacccaaagagtcctcctgaaatatgtttgcaagtgacaccccctcaggcccctt

SEQ ID NO: 32582 - DNA, 120 bp, synthetic construct
  source 1..120: mol_type = other DNA
tctcctctttcagagcgtactgtctctttaaataaacactgctactactatttttccagctggaacagcccagaactgttttccactcctccctaggaatgtactttattttccttcaat

SEQ ID NO: 32583 - DNA, 120 bp, synthetic construct
  source 1..120: mol_type = other DNA
tacttcttagtaacagaattaaacagaaatatccaggctcattgggttggtctctttctgatcatgtgcaagcagttctgttgctgtgttctcatcctctggaggaaaaagctaaagcag

SEQ ID NO: 32584 - DNA, 120 bp, synthetic construct; identical to SEQ ID NO: 9091
  source 1..120: mol_type = other DNA

SEQ ID NO: 32585 - DNA, 120 bp, synthetic construct
  source 1..120: mol_type = other DNA
gtctgacttattatttaaaccatcatatatttgtacatgtgtattcggatggaaaaactgagtaacgagagcaggggcaggatacagcattaagatgaaaagaaaatattagaaacacag

SEQ ID NO: 32586 - DNA, 120 bp, synthetic construct
  source 1..120: mol_type = other DNA
tattgagttagatttggattgcatctggactgtataatttacaagctatgttttcactggtatcttgcctacattacccttggattcctcataaaaatactgatagtagttttcactgca

SEQ ID NO: 32587 - DNA, 120 bp, synthetic construct
  source 1..120: mol_type = other DNA
aagataaaaaagcacaccccaagccagcatgactttgtaagacttactaataaataacaaatttctgtacctatggtttacagaatccaagcagaatttctagaatattacagatagaat

SEQ ID NO: 32588 - DNA, 120 bp, synthetic construct; identical to SEQ ID NO: 9092
  source 1..120: mol_type = other DNA

SEQ ID NO: 32589 - DNA, 120 bp, synthetic construct
  source 1..120: mol_type = other DNA
gataaatacataatgccatataaccaccgttaaagtgaaatggtggataaagtgaacccaagagtcccttagacagtttttgtttaaataaacatacaaatggacactttgggtcttaaa

SEQ ID NO: 32590 - DNA, 120 bp, synthetic construct
  source 1..120: mol_type = other DNA
tgttcctcattcatcatgattgttcccttacccctccctagttcttgttttcccatacctagctacatttcttccctgatatgtaaactcctaattttagtcagtcacagagatggattt

SEQ ID NO: 32591 - DNA, 120 bp, synthetic construct
  source 1..120: mol_type = other DNA
actgaagcccttgtgtgcaagacctagactgaacctggtgttttagtaacaaaagtatcctatgaagtagtttcactgacctaaaattgtcctagactccaccttcttatccattcctct

SEQ ID NO: 32592 - DNA, 120 bp, synthetic construct; identical to SEQ ID NO: 9093
  source 1..120: mol_type = other DNA

SEQ ID NO: 32593 - DNA, 120 bp, synthetic construct
  source 1..120: mol_type = other DNA
ctgagatcacgccactgcactccagcctgggccacagagcgatcctctgtctcaaaaaaaaaaaaaaaaaaaagagagagagagagagaagaaacagtatgcgtttaggttttctccatg

SEQ ID NO: 32594 - DNA, 120 bp, synthetic construct
  source 1..120: mol_type = other DNA
cactcacttactggaggattccatggttgctttgaatttttggcagttatgaataaagcgctataaacattcgtgtacacttgtttgtgtggacagacgttttccactgatttgggtaaa

SEQ ID NO: 32595 - DNA, 120 bp, synthetic construct
  source 1..120: mol_type = other DNA
tttcacactgacttctgaatagaattaaattcaaaagaaatccctaaatttctatgcctaagtaacaaaataaccagagactactccctttgcaaacccccaccttttctgcctggcata

SEQ ID NO: 32596 - DNA, 120 bp, synthetic construct; identical to SEQ ID NO: 9094
  source 1..120: mol_type = other DNA

SEQ ID NO: 32597 - DNA, 120 bp, synthetic construct
  source 1..120: mol_type = other DNA
gcaaaactaaatccatatcctcccatgtaacaagaccatttctaaagcagttttaagtgtagaaaaatatttcagagaaagtttagggagttcccacatacttccttccctaaaacagct

SEQ ID NO: 32598 - DNA, 120 bp, synthetic construct
  source 1..120: mol_type = other DNA
tgttaactgaggttcatagttacattagggttcactctattacacagttctatgggttcggataaatacataatgtcatgtgtctaccattaaagtgaaaccaacccaatagtcccatag

SEQ ID NO: 32599 - DNA, 120 bp, synthetic construct
  source 1..120: mol_type = other DNA
gagctggaactcagcagatcgtcacttccagaccatgagatgccagtccccatcattgattatgattgtttccttattgtctggagttcttattttcccatacatagtaacattccttct

SEQ ID NO: 32600 - DNA, 120 bp, synthetic construct; identical to SEQ ID NO: 9095
  source 1..120: mol_type = other DNA

SEQ ID NO: 32601 - DNA, 120 bp, synthetic construct
  source 1..120: mol_type = other DNA
tacagtatagagctttttcagactggatccttccacttagcaatatgtccataggtttcctccatgtgatttcatagcttgatatcttatttctctttactgttggaaaatactccacgg

SEQ ID NO: 32602 - DNA, 120 bp, synthetic construct
  source 1..120: mol_type = other DNA
gttttccattcatttgggtaaatactcagaggtgccattgctggactgtattaaaagtatggttagctttgtaagaaacacccagagtgtcttgcaaagtggctgtactgttttgcattc

SEQ ID NO: 32603 - DNA, 120 bp, synthetic construct
  source 1..120: mol_type = other DNA
tcacccaggctggagtgcagtggcgcgatctcagctcactgcaagctccgcctcctgggttcatgccattctcctgcctcagcctcccgagtagctgggactacaggcacccgccaccac

SEQ ID NO: 32604 - DNA, 120 bp, synthetic construct; identical to SEQ ID NO: 9096
  source 1..120: mol_type = other DNA

SEQ ID NO: 32605 - DNA, 120 bp, synthetic construct
  source 1..120: mol_type = other DNA
ctcagtctagctaaaggattgtaaatgcaccaatcaacactctgtaaaaatgcaccaatcagcactctgtgtctaactgattgtaagtgcacaaatcagcactctgtaaaaatgcaccaa

SEQ ID NO: 32606 - DNA, 120 bp, synthetic construct
  source 1..120: mol_type = other DNA
gaagtgggcggggccaaatcatggaataaaagctggccacccgggccagcagcggcaacctgtgggtccccttccacgctgtggagctttgttcttttactcttcacaataaatcttgct

SEQ ID NO: 32607 - DNA, 120 bp, synthetic construct
  source 1..120: mol_type = other DNA
acattttggcaaccacgaagggactatcacctatcacctatcgccaagcagtgagcaccatcaggaccctttcacttgctattctatcctatttttccttagaattcgggggctaaatac

SEQ ID NO: 32608 - DNA, 120 bp, synthetic construct; identical to SEQ ID NO: 9097
  source 1..120: mol_type = other DNA

SEQ ID NO: 32609 - DNA, 120 bp, synthetic construct
  source 1..120: mol_type = other DNA
acagggtttcactgtagtcaagatggtctcgatctcctgacctcatgatctgcccaccttggcctcccaaagtgctgggatacagttcttaaagatggtgtgtctggagtttcttccttc

SEQ ID NO: 32610 - DNA, 120 bp, synthetic construct
  source 1..120: mol_type = other DNA
gctggcttcaggagtgaagctgcagaccttcgctgtgagtgttacagttcctaaaggcagcgcatccggagttgttcattctcccggtgggttcatggtctcgctgacttcaggagtgaa

SEQ ID NO: 32611 - DNA, 120 bp, synthetic construct
  source 1..120: mol_type = other DNA
cccaagcgggttgccgctgatggctcaggcagtctgcttttattcccttatctgacccctccacacactgctcattgggccattttacagagagctgattggtccgttttgacagagtgc

SEQ ID NO: 32612 - DNA, 120 bp, synthetic construct; identical to SEQ ID NO: 9098
  source 1..120: mol_type = other DNA

SEQ ID NO: 32613 - DNA, 120 bp, synthetic construct
  source 1..120: mol_type = other DNA
agcctcggccagccccagagaggggccctcatatcgcagcagcaggctgaagggcttctcaagcatggccagagcaaacgccaaggccgaggaggcgccgcgagtgagcaagggctgctg

SEQ ID NO: 32614 - DNA, 120 bp, synthetic construct
  source 1..120: mol_type = other DNA
agctctggagtcttgacaacaagttggttgaccctgtggccatgagtggaactctcaaagtcatgtcacccaagtgagactcgcccatctatcctatctatcctgacccttgcctcttgg

SEQ ID NO: 32615 - DNA, 120 bp, synthetic construct
  source 1..120: mol_type = other DNA
tataaacctcaggactctgttcccttctttaggcactcaggctcaccaatcagaaagaaataatttttgcccaaagccccgtctgctgggcgggactttctggaattttaggatccctcc

SEQ ID NO: 32616 - DNA, 120 bp, synthetic construct; identical to SEQ ID NO: 9099
  source 1..120: mol_type = other DNA

SEQ ID NO: 32617 - DNA, 120 bp, synthetic construct
  source 1..120: mol_type = other DNA
gtcctccttgtggtctaggaggaaaactagtgtttctgctgctgcgttggtgagtgcaactattccgatcagcagggtccagggaccattgtgggttcttgtgcaagaggtgtttctgct

SEQ ID NO: 32618 - DNA, 120 bp, synthetic construct
  source 1..120: mol_type = other DNA
actcaggcatcaacaggctcactcttgaaatgcatcctaagccattgggaccagtttgacccacaaaccctgaaaaagtggtggctcatttttttctacactatggcttggctccaatat

SEQ ID NO: 32619 - DNA, 120 bp, synthetic construct
  source 1..120: mol_type = other DNA
ttcttttcattgaaggagaatccacaactatgcaaagcttgcaatttacatcccacaagaggacctctcagcttaccccaatatcctagcctccctatagctccctttcctattaatgat

SEQ ID NO: 32620 - DNA, 120 bp, synthetic construct; identical to SEQ ID NO: 9100
  source 1..120: mol_type = other DNA

SEQ ID NO: 32621 - DNA, 120 bp, synthetic construct
  source 1..120: mol_type = other DNA
tgatagaatgacagctgaagaaagggacaaattccttgctggtcagcaagcagtccccagtatggatccccactgcaacctcaactcagatcattgggactggagtcgcaaacatctgtt

SEQ ID NO: 32622 - DNA, 120 bp, synthetic construct
  source 1..120: mol_type = other DNA
ggccttaagaaaatatactcccctgtctcccaactcactcgagggtcaattgatcctaaaagataagtttattacccaattagccacaggaatcaggagaaagctccagaagtgagccct

SEQ ID NO: 32623 - DNA, 120 bp, synthetic construct
  source 1..120: mol_type = other DNA
catggccctcagacaaacaaaccttggtggttcagagaggacagaaaatggagcaggccaatcacccagtaaggcttgttatcagtgtggtttacaaggacactttaaaaaagattgtct

SEQ ID NO: 32624 - DNA, 120 bp, synthetic construct; identical to SEQ ID NO: 9101
  source 1..120: mol_type = other DNA

SEQ ID NO: 32625 - DNA, 120 bp, synthetic construct
  source 1..120: mol_type = other DNA
taagtatccttatctaatcctacatgcccatgctgcaatatggaaagaaagagagttcctaacctctgggggaacccccattaaatatcacaaggaaaccgtggagttattgcacgcagt

SEQ ID NO: 32626 - DNA, 120 bp, synthetic construct
  source 1..120: mol_type = other DNA
gaaagagacagaaagtgtgagagagagaaagaggaagtgacagaaacaaagagggagtcagaaagaaaagagagaagagagaaaggggggaaagacagaaagagagagacagaggaagag

SEQ ID NO: 32627 - DNA, 120 bp, synthetic construct
  source 1..120: mol_type = other DNA
gtaaatttaaaacctatgattgataattgaaggtcttctccataaccctaaaacactacaataccatcttgttgtcagtgtaaacaagggcatagcccgaaagcactgaggccactgaca

SEQ ID NO: 32628 - DNA, 120 bp, synthetic construct
  source 1..120: mol_type = other DNA
ctggctaacacagtgaaaacccgtctctactaaaaatacaaaaaaattagctgggcgtggtggtgggtgcctgtagtcccagctacttgggaggctgaggcaggagaatggtgtgaacct

SEQ ID NO: 32629 - DNA, 120 bp, synthetic construct; identical to SEQ ID NO: 9102
  source 1..120: mol_type = other DNA

SEQ ID NO: 32630 - DNA, 120 bp, synthetic construct
  source 1..120: mol_type = other DNA
aatcaggaaggagccatctataccaattctaagttaatatggactcaatgaggtcttattaatagcaaagaataattgaaatcccaaacttacaaagttttccacaaaagtaaagtttgc

SEQ ID NO: 32631 - DNA, 120 bp, synthetic construct
  source 1..120: mol_type = other DNA
tatagggttaggaatggctagtgctacagaaaccggaatagcaggtttatctacttcattatcctactaccacacactctcaaaggatttctcagacagcttgtgagaaatagcaaaatc

SEQ ID NO: 32632 - DNA, 120 bp, synthetic construct
  source 1..120: mol_type = other DNA
ttgcttttatactaaccagtccaagatagtgcgagatgccacctggcatttacaggaaaaggcttctgaaatcagacaatgcctttcaaattcttataccaatctctggagttgggtgat

SEQ ID NO: 32633 - DNA, 120 bp, synthetic construct; identical to SEQ ID NO: 9103
  source 1..120: mol_type = other DNA

SEQ ID NO: 32634 - DNA, 120 bp, synthetic construct
  source 1..120: mol_type = other DNA
cttctgggtcgagtgaggacttagagaacttttctgtctggctaaaggattgtaaattcaccaatcagcactctgtgtctagctcaaggattgtaaacacaccaatcagcactctgtaaa

SEQ ID NO: 32635 - DNA, 120 bp, synthetic construct
  source 1..120: mol_type = other DNA
ccgagccagcagtggcaacccacttgggtccccttctgcgctgtggaagctttgttctttcgctcttcacaataaatcttgctgctgctcactctttgggtccgcactacctttatgggc

SEQ ID NO: 32636 - DNA, 120 bp, synthetic construct
  source 1..120: mol_type = other DNA
gacacactttcacccagtttttccaaatgtttatatcttaagtagctctagcacactagcaaaaccaggaaactgactttggtataatatgtgtccatagttctatgccttgtcttatca

SEQ ID NO: 32637 - DNA, 120 bp, synthetic construct
  source 1..120: mol_type = other DNA
ttagagtcacaacccactccctacacatcatcaccctgacaactgacaaccactaatctcttctccaccaatctctataatagcgtcattctgaaaatgttacataaatagaatcacaca

SEQ ID NO: 32638 - DNA, 120 bp, synthetic construct; identical to SEQ ID NO: 9104
  source 1..120: mol_type = other DNA

SEQ ID NO: 32639 - DNA, 120 bp, synthetic construct
  source 1..120: mol_type = other DNA
tatttctctgatataaatgtcccagaatgtaattcctggctcatgtggcaaatatatgtctagttcttcaagacacagccaaactattttctaggactgtgccattttacattctcacca

SEQ ID NO: 32640 - DNA, 120 bp, synthetic construct
  source 1..120: mol_type = other DNA
atttcccggatggctagtgatttattgtgcttatttgccatgtatatatatcttctgtgataaaatgtctcttcataccttttgccaattttgtaattaaatgttatagtcttcaatcta

SEQ ID NO: 32641 - DNA, 120 bp, synthetic construct
  source 1..120: mol_type = other DNA
tggataccttacagaacaaaagtttttacattttgataaagctccatttattgattttgtttgtttttgtttttgttttttacacatagtgcttttggtgtcatatctaagaactcagaa

SEQ ID NO: 32642 - DNA, 120 bp, synthetic construct; identical to SEQ ID NO: 9105
  source 1..120: mol_type = other DNA

SEQ ID NO: 32643 - DNA, 120 bp, synthetic construct
  source 1..120: mol_type = other DNA
atactgctccactagtctctgtctatccctgcactaatgtcaatcaatattgattactgcagctataagaattctgaaatttggttacagttacttctccatgttttttttctatgaaat

SEQ ID NO: 32644 - DNA, 120 bp, synthetic construct
  source 1..120: mol_type = other DNA
tatttaggtttttagttgattaacacagtaaatctctccatgtctttaaattttttatttcttcaggatttcagcatatggattgttctgttggtacacttatgaggatttttgagtgaa

SEQ ID NO: 32645 - DNA, 120 bp, synthetic construct
  source 1..120: mol_type = other DNA
tcgctctgtcgcctaggctggagtgcagtggcacgatctcggctcactgcaagctccgcctcccgggttcacaccattctcctgcctcagcctcctgagtagctgggactacaggtgccc

SEQ ID NO: 32646 - DNA, 120 bp, synthetic construct
  source 1..120: mol_type = other DNA
tgacctcgttatctgcctgccttggcctcccaaagtgctgggattacaggtgtgagccaccaagcccagcctcatgttgtatttttaatatttgttttgatttctttgttactgtatatt

SEQ ID NO: 32647 - DNA, 120 bp, synthetic construct; identical to SEQ ID NO: 9106
  source 1..120: mol_type = other DNA

SEQ ID NO: 32648 - DNA, 120 bp, synthetic construct
  source 1..120: mol_type = other DNA
gtggatcacctgaggtcaggagttcgagaccagcctggccagcatggtgaaacctcgtctctactaaaaatacaaaaattagcagggcatggtggcgggtgcctgtaatcccagctactc

SEQ ID NO: 32649 - DNA, 120 bp, synthetic construct
  source 1..120: mol_type = other DNA
atgatggatgacattgattgatttcaaacattaaaccagacttgcacccttgaataaacgctacttggaataatttacatattttttcagtttgactgatttttatttgctaacattttg

SEQ ID NO: 32650 - DNA, 120 bp, synthetic construct
  source 1..120: mol_type = other DNA
gttctgttctcttctgttttctggaggaaattttgcagacttgcgttaattctaccgaaatgtttggtagatttctcccatgaaactattctggcctagagatttctccttcagcagtct

SEQ ID NO: 32651 - DNA, 120 bp, synthetic construct; identical to SEQ ID NO: 9107
  source 1..120: mol_type = other DNA

SEQ ID NO: 32652 - DNA, 120 bp, synthetic construct
  source 1..120: mol_type = other DNA
tgcaatggcacaatcttggctcaccacaacctttgcctctcaggttaaagtgattctcttgccttagcctcccaagtagctgggattacagaaatgtgccaccacatccagctaattttg

SEQ ID NO: 32653 - DNA, 120 bp, synthetic construct
  source 1..120: mol_type = other DNA
tctgcccttatattcattttttttcttcttcttgctttaggttattttagactacttttccagattcttgaggtgggaactgagattattggtttctgaccttttctcttttttagtgta

SEQ ID NO: 32654 - DNA, 120 bp, synthetic construct
  source 1..120: mol_type = other DNA
tttttgatccacgggtaatttaaaagtatgttattaagtttctatatgtttggagttgtaccaattttcttcatgttattgatttctgcttcaactccattgcttccacagaactcagtc

SEQ ID NO: 32655 - DNA, 120 bp, synthetic construct; identical to SEQ ID NO: 9108
  source 1..120: mol_type = other DNA

SEQ ID NO: 32656 - DNA, 120 bp, synthetic construct
  source 1..120: mol_type = other DNA
taacacttttatcattatgtagtgtttctgtttgtctctcagaatattcattgctcggtgtattttatgttatctgatattatagccatttctgctttctttgacaaatgtttgcatggt

SEQ ID NO: 32657 - DNA, 120 bp, synthetic construct
  source 1..120: mol_type = other DNA
tttacatgtaatgcaattattaatatgtgagctcttatgactgccatctactttttgttttcttttttgtttcctttggtttttgcttctctgttttcttttcttgtttttcgatgtgtt

SEQ ID NO: 32658 - DNA, 120 bp, synthetic construct
  source 1..120: mol_type = other DNA
ccaatttgactcaggtgtagaaactttaccttctttatatccctttctattccttcatttataatgtatatcttttattttctctacctgcatcaaaaaccacatctgacaatgttgtaa

SEQ ID NO: 32659 - DNA, 120 bp, synthetic construct; identical to SEQ ID NO: 9109
  source 1..120: mol_type = other DNA

SEQ ID NO: 32660 - DNA, 120 bp, synthetic construct
  source 1..120: mol_type = other DNA
gggaaaactctatctctaccaaaaatacaaaaaattagccaggcatggtggtgcaggtctgtaatcccagctactcaggaggctgaggtgtgaagatcacattagcctgggaggcagagg

SEQ ID NO: 32661 - DNA, 120 bp, synthetic construct
  source 1..120: mol_type = other DNA
ccaccaccaccacaacaacagaatgttatgatagaaccttcattttatgccaatatttttacaggatatacattctagattaacataacattattttcagccattaaaataccttgtgcc

SEQ ID NO: 32662 - DNA, 120 bp, synthetic construct
  source 1..120: mol_type = other DNA
cgggtttatcttcatttgggtttgcccagattcttgaatttttacgtttaagtctttgtccaaatttggaaaataatcaatcttccttcaaactctctttgggcttcacccatttgtcat

SEQ ID NO: 32663 - DNA, 120 bp, synthetic construct; identical to SEQ ID NO: 9110
  source 1..120: mol_type = other DNA

SEQ ID NO: 32664 - DNA, 120 bp, synthetic construct
  source 1..120: mol_type = other DNA
aatcaacactacctttatgctaatttcaaacatatttgaaaaaaggaaaaacacttgcagttacgtttgatgagatgtgtgtaaactttaagatctgaaaagaactctacaacaaatagg

SEQ ID NO: 32665 - DNA, 120 bp, synthetic construct
  source 1..120: mol_type = other DNA
acactcatcaactcgtcatttacattaggtatgtatcctaattttatccctcccccaagtctcccatatcccaacaggccctgatgtgtgatattcccccgccctgtgtccaagtgttct

SEQ ID NO: 32666 - DNA, 120 bp, synthetic construct
  source 1..120: mol_type = other DNA
aactactccaatcaatagaaaaagagggaatcctccctaactcattttatgaggccagcatcatcctgattccaaagcctggtagagatacaacaaaaaaagaaaattttagaccaatat

SEQ ID NO: 32667 - DNA, 120 bp, synthetic construct; identical to SEQ ID NO: 9111
  source 1..120: mol_type = other DNA

SEQ ID NO: 32668 - DNA, 120 bp, synthetic construct
  source 1..120: mol_type = other DNA
aaactggcacaagacagggatgccctctctcaccactcctattcaacatagtgttggaggttttggccagggcaatcaggcaggagaaggaaataaagggtattcaattaggaaaagagg

SEQ ID NO: 32669 - DNA, 120 bp, synthetic construct
  source 1..120: mol_type = other DNA
atgtgcaaaaatcacaagcattcctatacaccaataacagacaaacagagagtcaaatcatgagtgaactcccattcacaattgctacaaagagaataaaatacctaggaatccaactta

SEQ ID NO: 32670 - DNA, 120 bp, synthetic construct
  source 1..120: mol_type = other DNA
aaatggccatactgcctaaggtaatttatagattcaatgccatcgccctcaagctaccaatgacgttcttcacagaattggaaaaaactactttaaagtttgtatggaactaaaaaagag

SEQ ID NO: 32671 - DNA, 120 bp, synthetic construct; identical to SEQ ID NO: 9112
  source 1..120: mol_type = other DNA

SEQ ID NO: 32672 - DNA, 120 bp, synthetic construct
  source 1..120: mol_type = other DNA
aaaaccctagaagaaaacataggcaataccattcaggacataggcatgtgcaaggacttcatgactaaaacaccaaaagcaatggcaacgaaagccaaaatagacaaatggtatctaatt

SEQ ID NO: 32673 - DNA, 120 bp, synthetic construct
  source 1..120: mol_type = other DNA
aatgaactcaagcaaatttacaagaaaaaaacaaacaaccccatcaaaaaatgggcaaaggatatgaacagacactcctcaaaagaagacatctatgcagccaaaagacacatgaaaaat

SEQ ID NO: 32674 - DNA, 120 bp, synthetic construct
  source 1..120: mol_type = other DNA
aataggaacacttttacactgttggtaggagtgtaaattagttcaaccattgtggaaggcagtgtggcgattcctcaaggatctagaactagaaataccatttgacccagcgatccaatt

SEQ ID NO: 32675 - DNA, 120 bp, synthetic construct
  source 1..120: mol_type = other DNA
gatagactggattaagaaaatgtgacatatatacaccatggagtactatgcagccataaaaaaggatgagtttatgtcctttgtagggacatggatgaagctggaaaccatcattctgag

SEQ ID NO: 32676 - DNA, 120 bp, synthetic construct; identical to SEQ ID NO: 9113
  source 1..120: mol_type = other DNA

SEQ ID NO: 32677 - DNA, 120 bp, synthetic construct
  source 1..120: mol_type = other DNA
tatctggagtagtagaggagttaggcaatgaaaatggcaagaaaaatatacaaaagggataatagttgcatccaggtaagatggtcattatttactctgggcaaaatcaggtacttagaa

SEQ ID NO: 32678 - DNA, 120 bp, synthetic construct
  source 1..120: mol_type = other DNA
aaaataattattatgtaaaagagaaaaatatataaaaataatagacaagctcatagatttaataagtaaatttaaataatgttgctggatacaacatcagtatacattaaaccaattatg

SEQ ID NO: 32679 - DNA, 120 bp, synthetic construct
  source 1..120: mol_type = other DNA
aacaggttgttgggtcagggggcagatccttcatcattggcttggtgccatcctagctgaaatgagtgagttctgactcagttcacaggagatctggttgtttaaaggagtgcaactctt

SEQ ID NO: 32680 - DNA, 120 bp, synthetic construct
  source 1..120: mol_type = other DNA
tacagcgtgcaaaaccctgagccaatgaaacctcttttctttatgaattgcccagcctcaggtgtttctttttagcaatgtcagaatgaacacaattatgctctaccataaacaaataga

SEQ ID NO: 32681 - DNA, 120 bp, synthetic construct; identical to SEQ ID NO: 9114
  source 1..120: mol_type = other DNA

SEQ ID NO: 32682 - DNA, 120 bp, synthetic construct
  source 1..120: mol_type = other DNA
caattttgtccatcttactaatttgtaatttgataagactgttcctagaatatactccgtatgattttattcttgtgaaaataattgggactagttttatagtcatagtagttctatttc

SEQ ID NO: 32683 - DNA, 120 bp, synthetic construct
  source 1..120: mol_type = other DNA
tgatttccttcctgatctttgtttgctcaaagctacagagatgtttgttgtcttctatctacctccctacttcccacaccaccagtatgaagtcagaaaaagttctggaaggagaatgag

SEQ ID NO: 32684 - DNA, 120 bp, synthetic construct
  source 1..120: mol_type = other DNA
tttctcaggcaggcttaatcttccacccatgttaagattcagtagatggaccaaagaataagagtggacacttgtccctgctcacctaagtggaatttggaatttttatattttttatct

SEQ ID NO: 32685 - DNA, 120 bp, synthetic construct; identical to SEQ ID NO: 9115
  source 1..120: mol_type = other DNA

SEQ ID NO: 32686 - DNA, 120 bp, synthetic construct; identical to SEQ ID NO: 3334
  source 1..120: mol_type = other DNA

SEQ ID NO: 32687 - DNA, 120 bp, synthetic construct
  source 1..120: mol_type = other DNA
tttagaatgggatttttgttgttttcatcaagcatgtaacaattgtagtttgagatttaatagatactaccacactgccatccactcacaatgctaataatatgagagaatatattccca

SEQ ID NO: 32688 - DNA, 120 bp, synthetic construct
  source 1..120: mol_type = other DNA
taagttgtggaaagccacaaaaggcctctgaggagaaaagcctcctaattgccatcatgttcccatgctcagagcaagacccgctctcttatctgtaaacactgtattcaaggagaaaga

SEQ ID NO: 32689 - DNA, 120 bp, synthetic construct; identical to SEQ ID NO: 9116
  source 1..120: mol_type = other DNA

SEQ ID NO: 32690 - DNA, 120 bp, synthetic construct
  source 1..120: mol_type = other DNA
tgaggctggtccccaacaggggagaaatagtttattacactgctgtttgaatttggatttttcagttcattggtgagtttgagcaaatatttatatttactgactattggaatattctct

SEQ ID NO: 32691 - DNA, 120 bp, synthetic construct
  source 1..120: mol_type = other DNA
ttttttcagagcttcatatacttcttttaattttgttattttcttcatgcaaaaaatcagtaattttcttcaaatattttttcatttgagtcttctggatgttgttttccttagaaagtc

SEQ ID NO: 32692 - DNA, 120 bp, synthetic construct
  source 1..120: mol_type = other DNA
tatcacaatccagttttataacatttctgtcatgtccaaaatttctctatttataattaattcccaccaataccccaagccctaggcacccaatgatctgctttttgtgtctataaattt

SEQ ID NO: 32693 - DNA, 120 bp, synthetic construct; identical to SEQ ID NO: 9117
  source 1..120: mol_type = other DNA

SEQ ID NO: 32694 - DNA, 120 bp, synthetic construct
  source 1..120: mol_type = other DNA
ctgccctcatgttcatgttcaggggagcctgtcagataagtctatttttgttcccttttactgttgaatgatattgctttgcatggatgtagtttatccatttactagttgcaggacatt

SEQ ID NO: 32695 - DNA, 120 bp, synthetic construct
  source 1..120: mol_type = other DNA
tttatgtctcttacatagattccaaggagtgaaattggggggtcatatggcgaacatatgttaaactttttaagaaactgccaaatttccaggtatttgtaaaatcatacactcccacca

SEQ ID NO: 32696 - DNA, 120 bp, synthetic construct
  source 1..120: mol_type = other DNA
ccaggatccattcagtgaaaaaaatgagtttggaatacagcttaccaaaaactgaaactaaatatcaactctttctgtttctaattctagactttgttttactagcatatttaatgaaaa

SEQ ID NO: 32697 - DNA, 120 bp, synthetic construct
  source 1..120: mol_type = other DNA
gtcaagagattgagaccatcctggccagcatggtgaaaccccgtctctactataaatacaaaacttagctgggcgtggtggcatgtgcctgtagtcccagctacttgggaggctgaggca

SEQ ID NO: 32698 - DNA, 120 bp, synthetic construct; identical to SEQ ID NO: 9118
  source 1..120: mol_type = other DNA

SEQ ID NO: 32699 - DNA, 120 bp, synthetic construct
  source 1..120: mol_type = other DNA
tattccatatatagatattccatgtatatattccatatatatagatattccatgtatatatatattccatatatagatattccatgtatatatatattccatatatagatattccacata

SEQ ID NO: 32700 - DNA, 120 bp, synthetic construct
  source 1..120: mol_type = other DNA
ctgaattgaggatgcctatcagcaatctataggccttaatgtggaatttaactacaaatactaacaacccaatggtaccacagtctatcatttccctaccctgaaatcaatctctcctac

SEQ ID NO: 32701 - DNA, 120 bp, synthetic construct
  source 1..120: mol_type = other DNA
tcattccaatgtgtgagaaagtgggtactgggaacactctggaaacagtttagttgctccttataaaggcacacaggagaaaggagtatccttttcctacctctgggagttgctgtgaaa

SEQ ID NO: 32702 - DNA, 120 bp, synthetic construct; identical to SEQ ID NO: 9119
  source 1..120: mol_type = other DNA

SEQ ID NO: 32703 - DNA, 120 bp, synthetic construct
  source 1..120: mol_type = other DNA
gaaaccccatctctactaaaaatacaaaaattagccaggcttggtggcaggcgcctgtaatcccagctactcgggaggctgaggcaggagaatcgcttgaacccgggaggtggaggttgc

SEQ ID NO: 32704 - DNA, 120 bp, synthetic construct
  source 1..120: mol_type = other DNA
ataattccacaccacaagtctcatataaaatgagacaaatcatttcctcaacttagggaagaaagcctattttattgcaactctggaatcaaacagatcagacataattatcagcttatt

SEQ ID NO: 32705 - DNA, 120 bp, synthetic construct
  source 1..120: mol_type = other DNA
tgaaagtaaaataattgtctctgacagtagagaaattatgttcaaatgattattactttgaaataggcttctgcattgattatgtaccgtttagatttgacatatttgatactgactctc

SEQ ID NO: 32706 - DNA, 120 bp, synthetic construct; identical to SEQ ID NO: 9120
  source 1..120: mol_type = other DNA

SEQ ID NO: 32707 - DNA, 120 bp, synthetic construct
  source 1..120: mol_type = other DNA
tttaatatgtgcattacctcacatacttatgaaatacatataaaaaccattatgctattaggaaataatcttccctttttcttttctttttattttttgtctttggagccaggtggacag

SEQ ID NO: 32708 - DNA, 120 bp, synthetic construct
  source 1..120: mol_type = other DNA
atgaggcactgccatcaatgctgggacttcaggccaagggcaggagctgaggaagccacaaggatggacattttctgcagagttgctgaaccggtagcaaccagggcctgagaaagtcct

SEQ ID NO: 32709 - DNA, 120 bp, synthetic construct
  source 1..120: mol_type = other DNA
aaagtgttgttttcagacctggttccactaacagcttcttttcctctctttcaaggactcagatgagagcactgcaggaagaagaaaaacaagttcctaagtctccctgaaccaatactc

SEQ ID NO: 32710 - DNA, 120 bp, synthetic construct; identical to SEQ ID NO: 9121
  source 1..120: mol_type = other DNA

SEQ ID NO: 32711 - DNA, 120 bp, synthetic construct
  source 1..120: mol_type = other DNA
gagatttctctaacaccacaacccacaccaaccagggcagagaggagcagaaacagaccatgtgacccatgaagcatgacatgtctgtcacaggatccagtgtaattgcattagccttag

SEQ ID NO: 32712 - DNA, 120 bp, synthetic construct
  source 1..120: mol_type = other DNA
atttctggattagcagggcattggaggtcatttgtggaaagaaaggctttatccagggccactcatatactgagaactaacctcagcaaagccctatttcctcctctggaaaagtctatg

SEQ ID NO: 32713 - DNA, 120 bp, synthetic construct
  source 1..120: mol_type = other DNA
gcagattcagactgtgctcctgggagaggaaaccaggtttagtgatttttatcccaaattgaacctttttaattgagaccctgcaatattcatagctttgaaaatggggaagaaggctgc

SEQ ID NO: 32714 - DNA, 120 bp, synthetic construct; identical to SEQ ID NO: 9122
  source 1..120: mol_type = other DNA

SEQ ID NO: 32715 - DNA, 120 bp, synthetic construct
  source 1..120: mol_type = other DNA
acatcatggggaggttcaaaacagggacagcctctccttcctgccaggaatgactgcttccccagaggatacaggtgtttctagaaactatacagggctacccccagtgacctgtgctaa

SEQ ID NO: 32716 - DNA, 120 bp, synthetic construct
  source 1..120: mol_type = other DNA
tcttggtggttgagaaatttatgaagtcagaaagctgctcactccattccactgtgagagggctcgtcacgcttgggtgctccacttggcaggtgtaaacctctccacttcgaggaactg

SEQ ID NO: 32717 - DNA, 120 bp, synthetic construct
  source 1..120: mol_type = other DNA
agaaaccattcacagagcagaccaggaggttgtggtgctgcagggtctgggtccttgcaggatacacagtcaccttaggctcaactaggagaaaggaaatgtagagggaatgactcagga

SEQ ID NO: 32718 - DNA, 120 bp, synthetic construct
  source 1..120: mol_type = other DNA
cagctggccatgaggcctcacagtgtcatcagcctggaatttagtctttatagtgggggctcatcagatttgagagatgtgaaaaattgtgtttgtttcttcatcacttgaaattgggat

SEQ ID NO: 32719 - DNA, 120 bp, synthetic construct; identical to SEQ ID NO: 9123
  source 1..120: mol_type = other DNA

SEQ ID NO: 32720 - DNA, 120 bp, synthetic construct
  source 1..120: mol_type = other DNA
ttccactgtgagagggctcatcacacttgggtgttccacttgccacctatttatcatccttgtacagtttgagagaaaaatatgatttaaagtaatgtggatagataaagggaccgagta

SEQ ID NO: 32721 - DNA, 120 bp, synthetic construct
  source 1..120: mol_type = other DNA
tgtgcccctgggaaggtaggacagacagaaatggttctccaatctttaagttcccagcaaagcatgagtcataaagcagagagaaggattaaggaaagttattttagttttgaaaattct

SEQ ID NO: 32722 - DNA, 120 bp, synthetic construct
  source 1..120: mol_type = other DNA
tgggactcattacttggggtgcttatgcctaggaaaatccctaacactagcagactctcaataaatacattttttttaagaaggaaggagaaacctggagacaaaaataccacaaaatga

SEQ ID NO: 32723 - DNA, 120 bp, synthetic construct; identical to SEQ ID NO: 9124
  source 1..120: mol_type = other DNA

SEQ ID NO: 32724 - DNA, 120 bp, synthetic construct
  source 1..120: mol_type = other DNA
tcaacttttggtgaatgtcataataaaggtcaacaaaggggaaagtgagataagttgtgtcacaactattatatataaaagaataataggtaagtagtagaaaactattagcattataat

SEQ ID NO: 32725 - DNA, 120 bp, synthetic construct
  source 1..120: mol_type = other DNA
agaagcttcagaagtgcctcagaggtctcctcaattcccctagaaattaatctaatgcttttgcaaacaaacaccacacacttttatttcagagactgcgtgaagggtgggtgccaggga

SEQ ID NO: 32726 - DNA, 120 bp, synthetic construct
  source 1..120: mol_type = other DNA
acgagacaaccaaggtctcctctctctccagccccctgcacccacctcccatgtcacctccccacagaggcctccaaggataagaagaagccccctcctgcttcccctcccacaaaggcc

SEQ ID NO: 32727 - DNA, 120 bp, synthetic construct; identical to SEQ ID NO: 9125
  source 1..120: mol_type = other DNA

SEQ ID NO: 32728 - DNA, 120 bp, synthetic construct
  source 1..120: mol_type = other DNA
tactcccccacgtcgctgtcgaagcgcaagtcctcctcttggttatagatgtctctgtgcaggaaccgcacccgctccgtcccgttgaagaaatgacactcatacttatcctgctgcaag

SEQ ID NO: 32729 - DNA, 120 bp, synthetic construct
  source 1..120: mol_type = other DNA
tcccaaccataaccccgaccacgcgcagcccagaggctcatcctccgtcttcctgaggcgaacggggtgtctgggggaccaggcaggaaaaccccttctgatcccaaggcttttgggacc

SEQ ID NO: 32730 - DNA, 120 bp, synthetic construct
  source 1..120: mol_type = other DNA
cctcctcctgggagcctgcaccccaaagacaatctctgctccttctctcatcccacaggctttacccgttccctaactcccaccgcgttcatcctgtgaacactcctttagtgatgacct

SEQ ID NO: 32731 - DNA, 120 bp, synthetic construct; identical to SEQ ID NO: 9126
  source 1..120: mol_type = other DNA

SEQ ID NO: 32732 - DNA, 120 bp, synthetic construct
  source 1..120: mol_type = other DNA
tcttcaagaaactagaacaaagttcactaaagcagagaggctgaggggaaggagggtaaaagattagactggagacatcacaagaagccaggtattgaaaagcgttgtgggtggtgttag

SEQ ID NO: 32733 - DNA, 120 bp, synthetic construct
  source 1..120: mol_type = other DNA
tattcagttaaaagaaatttgttcataaaacttatttggcaaatttcacctgataagagtaaggggtcaaaagtgtctcagagctcttattggtgacatgagcttctgtagtttcaatac

SEQ ID NO: 32734 - DNA, 120 bp, synthetic construct
  source 1..120: mol_type = other DNA
aatcctctggttaaaagtgaaatgaataaataaaagcattttacattatgaatcataccaaatgtagaatcactacagaaatctcaggcatgttagtgaaaaataattgcagagcatcac

SEQ ID NO: 32735 - DNA, 120 bp, synthetic construct; identical to SEQ ID NO: 9127
  source 1..120: mol_type = other DNA

SEQ ID NO: 32736 - DNA, 120 bp, synthetic construct
  source 1..120: mol_type = other DNA
ggttctctagcagtgtccctggcttctactcattaaatatcagaagaaacccctgtggtgacaaccaaaaattgctcaaacattgccacaagttccccaagggtgatgggagggaaagga

SEQ ID NO: 32737 - DNA, 120 bp, synthetic construct
  source 1..120: mol_type = other DNA
tatggagcagctgagaattgtattgaaaaatatctgtgaatatcttggtcctacataaaacgaatgctttatagaattctggtcccaatacagtgctatctttccagaaaatgaacttgt

SEQ ID NO: 32738 - DNA, 120 bp, synthetic construct
  source 1..120: mol_type = other DNA
tcttaatttctctgccacttgtccactaattatctgtagtagtgaatcacaaccacagctattttattcccatttaatgccccaactaactcacgtctttcagtctcccactcccaacaa

SEQ ID NO: 32739 - DNA, 120 bp, synthetic construct; identical to SEQ ID NO: 9128
  source 1..120: mol_type = other DNA

SEQ ID NO: 32740 - DNA, 120 bp, synthetic construct
  source 1..120: mol_type = other DNA
agatttgacaaataaaaccagaggatgcccaggtaaatctggatttccaataaattgtggtcgtgtgtctgaaattcagatttaactaggaacctgtttgttatctgacaaccctagcca

SEQ ID NO: 32741 - DNA, 120 bp, synthetic construct
  source 1..120: mol_type = other DNA
cttttatacattggaactagaagcccttgcatctctgcccccactctaagaaacaacctggtacatatgaatattagaaattttgtcaataattcagacacaatcaagtcactactcact

SEQ ID NO: 32742 - DNA, 120 bp, synthetic construct
  source 1..120: mol_type = other DNA
aataatcctcacaggatttttgtaagtgtgaaatttaataaagagtcttcttagcagtgatcacataataaacactcaaatgtattcccattttaattttttgatccctataactggagc

SEQ ID NO: 32743 - DNA, 120 bp, synthetic construct; identical to SEQ ID NO: 9129
  source 1..120: mol_type = other DNA

SEQ ID NO: 32744 - DNA, 120 bp, synthetic construct
  source 1..120: mol_type = other DNA
atacagcaggatcattattgaaattgcatactgaaattcataggcctggtacacagtcactgcaaaatgttacatggcatatactgatggagaccagattcattttattcatcactccat

SEQ ID NO: 32745 - DNA, 120 bp, synthetic construct
  source 1..120: mol_type = other DNA
atttccttgataataatgaccgagcatctctggttcacaggtcctcctgcttctcttcagcctctttagccttttccttttgatccagctggctccctgaacccagagcacagtccttcc

SEQ ID NO: 32746 - DNA, 120 bp, synthetic construct
  source 1..120: mol_type = other DNA
aatcccagccgttgcttctctgtcacattctcacttcaccctcctcttagtggtactcaccacaattggcctctcccttctccttgaaaaaaaaaaatctatttttcttgacttacacat

SEQ ID NO: 32747 - DNA, 120 bp, synthetic construct; identical to SEQ ID NO: 9130
  source 1..120: mol_type = other DNA

SEQ ID NO: 32748 - DNA, 120 bp, synthetic construct
  source 1..120: mol_type = other DNA
ctccctggttcacgccattctcgtgcttcagcctcccaagtagctgggactacaggcacccaccaccatgcccagctaattttttgtatttttagtagagacggggtttcaccgtgttag

SEQ ID NO: 32749 - DNA, 120 bp, synthetic construct
  source 1..120: mol_type = other DNA
tgcgcctggcccaccatgagtcttttaaatgccattgaccttctgattgctccacacaaatgtcaataaatcatctcaaacttaaacaaaacttttatttccaaccacccacttcaaatc

SEQ ID NO: 32750 - DNA, 120 bp, synthetic construct
  source 1..120: mol_type = other DNA
ggtaagcaaaatccactttatctttttcactgtctttatcactagtgaactcaagcctattttccctgaggattccctgctgtgctcctaaatagtcttcctaaccacttgtcaacccca

SEQ ID NO: 32751 - DNA, 120 bp, synthetic construct
  source 1..120: mol_type = other DNA
caagagatcaagaccatcctggccaacatggtgaaaccctgtctttactaaaaataccaaaattagctgggcgtggtggtgcactcctgtaatcccagctacttgggaggctgaggcagg

SEQ ID NO: 32752 - DNA, 120 bp, synthetic construct; identical to SEQ ID NO: 9131
  source 1..120: mol_type = other DNA

SEQ ID NO: 32753 - DNA, 120 bp, synthetic construct
  source 1..120: mol_type = other DNA
acttgggagactgaggcaagagaatcacttgaacccgggaggcagaggttgcagtgagctgagaccatgccattgcactccagcctgggcaacaagaatgaaactccctctcaaaaataa

SEQ ID NO: 32754 - DNA, 120 bp, synthetic construct
  source 1..120: mol_type = other DNA
catttccttgcttgctcacttcagtccctctagccttctttctgtccctgcacataatttcccacaccagggcttcccccccaattcggtctccctggaactttcgtcccttagatcttc

SEQ ID NO: 32755 - DNA, 120 bp, synthetic construct
  source 1..120: mol_type = other DNA
tcttcagtgcactatgactctctgaaattttcttctttgttaaatgcttattgggttagtgtctgtctcctccactcttgtgtaaccttgagagtcgggaccctctctatcttactcaaa

SEQ ID NO: 32756 - DNA, 120 bp, synthetic construct; identical to SEQ ID NO: 9132
  source 1..120: mol_type = other DNA

SEQ ID NO: 32757 - DNA, 120 bp, synthetic construct
  source 1..120: mol_type = other DNA
gccaaggcaggaggattgtttgagtccaggagtttaagaccaccctgggcaacatggcagaaatctcatctccaacaaaattagttgggcttgtagtctccgctgctctggaggctgagg

SEQ ID NO: 32758 - DNA, 120 bp, synthetic construct
  source 1..120: mol_type = other DNA
atggatctcatagtgctaaggatctgtgcaagctttagggatttctggatatgatgacaacatagctggggaaaaatagagagaaactggaggaagaggtaagcagacatggctaattaa

SEQ ID NO: 32759 - DNA, 120 bp, synthetic construct
  source 1..120: mol_type = other DNA
gacaagaccccagtaagacaatgagttcccaggacttgatcattaactttcagccctatgagatgtgaacaatgtccacattctctctgtaaccccacacagagtatatagttttaacct

SEQ ID NO: 32760 - DNA, 120 bp, synthetic construct
  source 1..120: mol_type = other DNA
ttcctgtcatgtctagttagagcatgtaggagatataggagcaaatagtatagaaaggttaaaaaagatttgtaataaactctaacctgggccaggtttttagaggatgccttaagtcct

SEQ ID NO: 32761 - DNA, 120 bp, synthetic construct; identical to SEQ ID NO: 9133
  source 1..120: mol_type = other DNA

SEQ ID NO: 32762 - DNA, 120 bp, synthetic construct
  source 1..120: mol_type = other DNA
aactcgttttgtctgacataggtcaacataataaagggaagtgctgtatggggaatttattttagcatccttatttctaaatcctctaaagaccctgaggacatgtgatgaaaaggtttc

SEQ ID NO: 32763 - DNA, 120 bp, synthetic construct
  source 1..120: mol_type = other DNA
ttttgtggaggaaataatttgggatcccatgataaagatgggcaatctctgaagaaaatgtcacaatttcttaaggcacctggcctgggcacaatgttaacaaaactccctattttcccc

SEQ ID NO: 32764 - DNA, 120 bp, synthetic construct
  source 1..120: mol_type = other DNA
agcttcagacacaccatgctggagaacaggacaggaccaggggccagaggagcaggcaagtctcactcagggagaactatgatccccctccacccacattccaaattatggggaggaagt

SEQ ID NO: 32765 - DNA, 120 bp, synthetic construct; identical to SEQ ID NO: 9134
  source 1..120: mol_type = other DNA

SEQ ID NO: 32766 - DNA, 120 bp, synthetic construct
  source 1..120: mol_type = other DNA
gagacctttaatctggtccttattgcaccgtatcttaatgttgtagatttgggaaaattatttcatgtctcacagttgaaatgaaggcactgcaatctttcaggtctttcaatactggac

SEQ ID NO: 32767 - DNA, 120 bp, synthetic construct
  source 1..120: mol_type = other DNA
taataagttaaaggaaattgaaagtttgttaataatttaatctgagtaaaaatatctttttcaagtgtgtctcctgatgctgtccccaagttcagtggcacctccagaacacacacaggc

SEQ ID NO: 32768 - DNA, 120 bp, synthetic construct; identical to SEQ ID NO: 9135
  source 1..120: mol_type = other DNA

SEQ ID NO: 32769 - DNA, 120 bp, synthetic construct
  source 1..120: mol_type = other DNA
cggctaattctttgtatttttagtggagatggggtttcaccgtgttagccaggatggtctcgatctcctaacctcgtgttctgcctgccttggcctccccaactgctggggctacaggca

SEQ ID NO: 32770 - DNA, 120 bp, synthetic construct
  source 1..120: mol_type = other DNA
gtactgcagccatctcggctcactgcaacctccctgcctgattctcctgcctcagcctgccgagtgcctgggattgcaggcgcgcaccgccacacctgactggttttcgcattttttggt

SEQ ID NO: 32771 - DNA, 120 bp, synthetic construct
  source 1..120: mol_type = other DNA
aatgttgcccaggctggagtgcagtggtgtgatctcagctcgctacaacctccacctcccagccgcctgccttggcctcccaaagtgccgagattgcagcctctgcccggccgccacccc

SEQ ID NO: 32772 - DNA, 120 bp, synthetic construct; identical to SEQ ID NO: 9136
  source 1..120: mol_type = other DNA

SEQ ID NO: 32773 - DNA, 120 bp, synthetic construct
  source 1..120: mol_type = other DNA
tgaggagcccctccgccctgcagccgccccgtctgggaagtgaggagcgtctccgcccggcagccgccccgtctgggaggtggggggcgcctctgcccggctaccccgtcttggaagtga

SEQ ID NO: 32774 - DNA, 120 bp, synthetic construct
  source 1..120: mol_type = other DNA
aagaggatcagattgttattgtgtctgtgtagaaagaagtagacataggagactccattttgttctgtactaggaaaaattcttctgccttgggatgctgttaatctataaccttactcc

SEQ ID NO: 32775 - DNA, 120 bp, synthetic construct
  source 1..120: mol_type = other DNA
ccactccctaatctcaagtacccagggacacaaacactgccaaaggcggcagggccctctgcctcgaaaagccagagacctttgttcacatgtttatctgctgaccttccctccactatt

SEQ ID NO: 32776 - DNA, 120 bp, synthetic construct; identical to SEQ ID NO: 9137
  source 1..120: mol_type = other DNA

SEQ ID NO: 32777 - DNA, 120 bp, synthetic construct
  source 1..120: mol_type = other DNA
ttaatataaatgtaacatctaagattcagaatggacttcaaagtacaactatacttagaacgctctgcattaattcacacgctaccacataggcaatccttcctcatgggccttagtgtt

SEQ ID NO: 32778 - DNA, 120 bp, synthetic construct
  source 1..120: mol_type = other DNA
aataaacacccttttcatgcttacaggtagagagaataaaacgatggagatgaaacaacttttgcaaagatacaaagctagtaaatggcatactatagattgaaccaaattacatgcccc

SEQ ID NO: 32779 - DNA, 120 bp, synthetic construct
  source 1..120: mol_type = other DNA
ttagtgaatggcagcagtatacaatttgaagaagatactgtgtagcaattctagttccttcaaaagaatcccctcattatcatccttaccctcccctggaaatgacagcatttgcattta

SEQ ID NO: 32780 - DNA, 120 bp, synthetic construct; identical to SEQ ID NO: 9138
  source 1..120: mol_type = other DNA

SEQ ID NO: 32781 - DNA, 120 bp, synthetic construct
  source 1..120: mol_type = other DNA
tcacatttaatttggtcaacagaaaataataatttacttagaaactaatttagtcccagctactcaggaggtgggtggattgcttgaacctggaaggtccacgctgcagtgacgcaagat

SEQ ID NO: 32782 - DNA, 120 bp, synthetic construct
  source 1..120: mol_type = other DNA
aagaaaagaaggaacaaactgtgtaaaaaagaaactaattgagatgatggtaatctaggaaatccagctaaggttcagcttagtatttgaggttaaaagggtggtgatgccggcagtggc

SEQ ID NO: 32783 - DNA, 120 bp, synthetic construct
  source 1..120: mol_type = other DNA
gaggcagccaactgcgctgcccaaacccttcagcagccggagggaccgcccccaggccaggagcctccacgactcctgctttactgctatcaccctgtagctgtggggagggcatggagc

SEQ ID NO: 32784 - DNA, 120 bp, synthetic construct; identical to SEQ ID NO: 9139
  source 1..120: mol_type = other DNA

SEQ ID NO: 32785 - DNA, 120 bp, synthetic construct
  source 1..120: mol_type = other DNA
ggtgggacaggggctacctgcagactccaaggattgagtgggagtcctgccctctacgcagcaggatccaggcctctctgcactccatgctttcaaggacgtgaagaaccccctgcccct

SEQ ID NO: 32786 - DNA, 120 bp, synthetic construct
  source 1..120: mol_type = other DNA
gccgggtgtatgcatgctcagggcaacattgacacaccagcctcctgccacctcagccacggggaagccgagggaagatgggctgagggcaactggtgctggcctacaggccccttgcca

SEQ ID NO: 32787 - DNA, 120 bp, synthetic construct
  source 1..120: mol_type = other DNA
ctgccaatcctgcggacaggagtgggaacttgtgccttttctgggcctgccccatggccatccattcctcccctctgaggcctgtaaaagccctgggctcaggcggacttgagaagagga

SEQ ID NO: 32788 - DNA, 120 bp, synthetic construct; identical to SEQ ID NO: 9140
  source 1..120: mol_type = other DNA

SEQ ID NO: 32789 - DNA, 120 bp, synthetic construct
  source 1..120: mol_type = other DNA
aaaaagctgttacacgaacagggtgtagatgagcaacagagaatgtagtcaaatgcagacaaagacggaatgaaaaagcaaaaataaatccatatcattccatgtaacaagaccattttt

SEQ ID NO: 32790 - DNA, 120 bp, synthetic construct
  source 1..120: mol_type = other DNA
tggtacacttgttactactgatgaagcagtactgatacttgttgttaactgagatccatagtgaaattagggataattcttatacagttctatgggttctgataaatacataatgtcata

SEQ ID NO: 32791 - DNA, 120 bp, synthetic construct
  source 1..120: mol_type = other DNA
gttcctttccaaaaaaagattcccccatgcctctcaaaaagtatcaaagagctggaactcaccagatcatctcatccagacaatgagactccaagttcctcattcatcgtgattgttccc

SEQ ID NO: 32792 - DNA, 120 bp, synthetic construct; identical to SEQ ID NO: 9141
  source 1..120: mol_type = other DNA

SEQ ID NO: 32793 - DNA, 120 bp, synthetic construct
  source 1..120: mol_type = other DNA
atttactgtcactgtatttatgccttttccagaatgttatacagttgtaatcatatggtatatagtttttcagactggcttttttcacataacaatatgcatataggttttctcctgtct

SEQ ID NO: 32794 - DNA, 120 bp, synthetic construct
  source 1..120: mol_type = other DNA
caattataaataaagctgctataaacattcgtgtacacttgtgtggacagaagttttccacgtatttgggcaaatacttaggattgcaattgctgaatcttatggtagagtatgtttcgc

SEQ ID NO: 32795 - DNA, 120 bp, synthetic construct
  source 1..120: mol_type = other DNA
actttctatgcctaattagcaaaagttccagagactactccctttgtaacaccccccctttactgcgtgacaaatgggaaactgaaagtgcctctgattggttgttttcaactaatcaga

SEQ ID NO: 32796 - DNA, 120 bp, synthetic construct; identical to SEQ ID NO: 9142
  source 1..120: mol_type = other DNA

SEQ ID NO: 32797 - DNA, 120 bp, synthetic construct
  source 1..120: mol_type = other DNA
agtccatatcctcccatgtaacgagaccatttttaaggcagtttcaagtgtataaaaaacttccagagaaagtttagggagttcctacatacctccttccctaaaatggccctctgttca

SEQ ID NO: 32798 - DNA, 120 bp, synthetic construct
  source 1..120: mol_type = other DNA
ctcaaaggatttctcaggcagtttgcaagaaataacgaaatctatccttactctacagtcccaaatagactctttggcagcagtgactcttcaaaaccgccaaggcctagacctcctcac

SEQ ID NO: 32799 - DNA, 120 bp, synthetic construct
  source 1..120: mol_type = other DNA
atgactttcaaactcttttttttttttttttttagacggagtctcactctttcgcccaggccagactgcagtggtgctatctctgctcactgcaacctctgccttccaggttgacgccat

SEQ ID NO: 32800 - DNA, 120 bp, synthetic construct; identical to SEQ ID NO: 9143
  source 1..120: mol_type = other DNA

SEQ ID NO: 32801 - DNA, 120 bp, synthetic construct
  source 1..120: mol_type = other DNA
ttacaaagggaaccccaaatgagctcagctaacaacttctaccaaggacccctgaactgagccactgaccctttcactggcctaaagagttcccctctggaggacactacaactgcatgg

SEQ ID NO: 32802 - DNA, 120 bp, synthetic construct
  source 1..120: mol_type = other DNA
gtcaggtggggacttggagaacttttctgtttagctaaaggattataagtgcatcaatcagcactctgtgtctagctaaaggactgtaaatgcaccaatcagtactctgtaaaaatgcac

SEQ ID NO: 32803 - DNA, 120 bp, synthetic construct
  source 1..120: mol_type = other DNA
ggaaataaaagctggtcacccgagccagcagtggcaaccaggtcaggtccccttccacgctgtggaagctttgttctttcactcttcacaataaatcttgctgctgctcacgctttgggt

SEQ ID NO: 32804 - DNA, 120 bp, synthetic construct
  source 1..120: mol_type = other DNA
gctgtaacgctcactgtgaaggtctgcggcttcactcctgaagtcagcgagactacgaatccaccagaaggaagaaactccggacacatatgaacatctgaaggaacaaactcccgacac

SEQ ID NO: 32805 - DNA, 120 bp, synthetic construct; identical to SEQ ID NO: 9144
  source 1..120: mol_type = other DNA

SEQ ID NO: 32806 - DNA, 120 bp, synthetic construct
  source 1..120: mol_type = other DNA
tgataaaatgtctcttcatatcttttgcccattttgtaattaaaaatttttttttttttttgagatagagtttcgctctgtcgcccagactggagtgcagtggcacaatctcagctcact

SEQ ID NO: 32807 - DNA, 120 bp, synthetic construct
  source 1..120: mol_type = other DNA
acccggctaatttttttttttggatttttagtagagactgggtttcaccacgttagccaggatggtctccaactcctgaccttgtgatccacccacctcggcctcccaaagtgctgggat

SEQ ID NO: 32808 - DNA, 120 bp, synthetic construct
  source 1..120: mol_type = other DNA
acatgtggttttaaatattttctccatatctctaacttactttttatttcttaacaggatactttacagaacaaaagttttaaattctgaagaaaccttatttattgatttttttgtttt

SEQ ID NO: 32809 - DNA, 120 bp, synthetic construct; identical to SEQ ID NO: 9145
  source 1..120: mol_type = other DNA

SEQ ID NO: 32810 - DNA, 120 bp, synthetic construct
  source 1..120: mol_type = other DNA
ctgctccactaatctatgtctatccctgcactaatgtcaatcagtattgattactatagctataaaaattctgaaatttggtaagagttacttcatctctttttccctgtgaaatttgtt

SEQ ID NO: 32811 - DNA, 120 bp, synthetic construct
  source 1..120: mol_type = other DNA
agaattgacatctttactatatttaattctctagttgatgaacacagtaaatctcttcatttcttcagatttttttatttatcagcatttcagcatatggattgtgtacatgttctgttg

SEQ ID NO: 32812 - DNA, 120 bp, synthetic construct
  source 1..120: mol_type = other DNA
tgaccttgtgaatttccttagtagctgaagcagaagaggaaaagcattcagacttccactattaagtacaatttagccgcaacgtttttgtagaagttatttatccagttgaggaggtca

SEQ ID NO: 32813 - DNA, 120 bp, synthetic construct; identical to SEQ ID NO: 9146
  source 1..120: mol_type = other DNA

SEQ ID NO: 32814 - DNA, 120 bp, synthetic construct
  source 1..120: mol_type = other DNA
tgtcttcccttctcttctgctttctggaggaaattttgcagacttgtgttaattctactgaaatgtttggtagatttctcctgtgaaactattctaacctagagatttctcctataagtt

SEQ ID NO: 32815 - DNA, 120 bp, synthetic construct
  source 1..120: mol_type = other DNA
gtattcctttggtgtactattgatgtcgaagaatctgtagtgatataatgtttccaccccaatattggtgttttttctcctttttccttttattttgtcctagaaatttgtcagttctat

SEQ ID NO: 32816 - DNA, 120 bp, synthetic construct
  source 1..120: mol_type = other DNA
ggctcactgcaacctccacctcccaggttcaagtgattctcctgcctcagcctcacaagtagctgggattacaggaatgcgccaccatgctcggctaattttgtatttttagtagagatg

SEQ ID NO: 32817 - DNA, 120 bp, synthetic construct; identical to SEQ ID NO: 9147
  source 1..120: mol_type = other DNA

SEQ ID NO: 32818 - DNA, 120 bp, synthetic construct
  source 1..120: mol_type = other DNA
ctttttattttccttaagacatctttttttttgagatggagtcttgcactgtcgcccaggctggagtgcagtggcatgatctcagctcactgcaagctctgcctcccgggttcacgccat

SEQ ID NO: 32819 - DNA, 120 bp, synthetic construct
  source 1..120: mol_type = other DNA
gctcctgacctcgtgatccacctgcctcggcctcccaaagtgttggaattacaggcgtgagccaccgtgtgacggctctggctggagtgcagtggcgcgatgttggacaagctctgcctc

SEQ ID NO: 32820 - DNA, 120 bp, synthetic construct
  source 1..120: mol_type = other DNA
atggtctcgatctcttgacctcgtgatccacccacctcggcctcccaaagttctgggattacaggcgtgagccacctcgccgggccttttttttttttttttttttttctgagacagagt

SEQ ID NO: 32821 - DNA, 120 bp, synthetic construct; identical to SEQ ID NO: 9148
  source 1..120: mol_type = other DNA

SEQ ID NO: 32822 - DNA, 120 bp, synthetic construct
  source 1..120: mol_type = other DNA
actgatttctggttcagctccgttgcttccagggagcacagtctgtatgatttcaattctttacatttgttgaagttccttttatggtccagggtatgagcgatgttggtaaatattcca

SEQ ID NO: 32823 - DNA, 120 bp, synthetic construct
  source 1..120: mol_type = other DNA
tcattaacttttcagagttggtttgtggagtcccaaagtttaactgtgtatttgtctatttctccttccagttctgaccgttttttgctctacttataagtaacttagttgtgtggtgta

SEQ ID NO: 32824 - DNA, 120 bp, synthetic construct
  source 1..120: mol_type = other DNA
ccatttctgctttctttgacaacagttagtatggtttatttttttccattcttctgtttcagccttccactcttgaaatatttgcagtaagtttctcataggtagcatatcgacgggtaa

SEQ ID NO: 32825 - DNA, 120 bp, synthetic construct; identical to SEQ ID NO: 9149
  source 1..120: mol_type = other DNA

SEQ ID NO: 32826 - DNA, 120 bp, synthetic construct
  source 1..120: mol_type = other DNA
ccagatctgacaatgttgtaatttttgcctcaaccatcaaactaatttataaacgtgaagaagagaagtctgttgtatagaaagaaaagtctgttgtcaaagaaagcagaaatggctata

SEQ ID NO: 32827 - DNA, 120 bp, synthetic construct
  source 1..120: mol_type = other DNA
cacaactgagttacttataagtagagcaaaaaacggtcagaactggaaggagaaatagacaaatacacagttaaactttgggactccacaaaccaactctgaaaagttaataaaacaact

SEQ ID NO: 32828 - DNA, 120 bp, synthetic construct
  source 1..120: mol_type = other DNA
atttcttccctcatcatttctattccagttcaagcacttcctttacccttgttttaggataagtctgctagcatcaaattctcttgattttccttcctctaagaatgtcatggccgggca

SEQ ID NO: 32829 - DNA, 120 bp, synthetic construct; identical to SEQ ID NO: 9150
  source 1..120: mol_type = other DNA

SEQ ID NO: 32830 - DNA, 120 bp, synthetic construct
  source 1..120: mol_type = other DNA
ttaacattactttcagccattaaaatatctggtggcacttctctctggtctgcatgatttctaatgaggaatacactgtcatttaatttattttctcctgtacatgagatgtcatttctc

SEQ ID NO: 32831 - DNA, 120 bp, synthetic construct
  source 1..120: mol_type = other DNA
actttaaagtctttatccaaatttggaaaatagtcaatcttccttcaaagactctttgggcatcacccatttgtcatctttctctaagactctagtgacacaaatttcatatcttttgtt

SEQ ID NO: 32832 - DNA, 120 bp, synthetic construct
  source 1..120: mol_type = other DNA
taaattactcaaaatgtgcaaagtactgaagctaacaaataacgtaaagtatgaagagttccacatctcatagagaaagccgattgtataaagctttcccaagacaaaaccccaggttca

SEQ ID NO: 32833 - DNA, 120 bp, synthetic construct
  source 1..120: mol_type = other DNA
ggaaaacacttgcagttaggtttgatgagatctgtgtaaattttacttcaagatctgaaaagaactctacaacaaataggaatttatggaccaataattcttaagagccaagttcttaag

SEQ ID NO: 32834 - DNA, 120 bp, synthetic construct; identical to SEQ ID NO: 9151
  source 1..120: mol_type = other DNA

SEQ ID NO: 32835 - DNA, 120 bp, synthetic construct
  source 1..120: mol_type = other DNA
gtctccttcatatctggagtactagaggagttaggcaaagaaaacggcaagaaaaataaataaaagataattgcatccaggtgaaacggtcattatttactctcaacataatcagctact

SEQ ID NO: 32836 - DNA, 120 bp, synthetic construct
  source 1..120: mol_type = other DNA
aagcaagtacgttattgatatagtttggatgtttgtcccctccaaatctcttgttgaaacatagtctccagtgttggaggtgagaggtattttggtgggcggcacatccttcatcactgg

SEQ ID NO: 32837 - DNA, 120 bp, synthetic construct
  source 1..120: mol_type = other DNA
tctgatgttcacatgtgttcagagtttcttccttctggtgggttcgtggtctcagtggctcaggagtgaagctgcagaccttcgcggtgagaccttcgcggtgagtgttacagctcttaa

SEQ ID NO: 32838 - DNA, 120 bp, synthetic construct; identical to SEQ ID NO: 9152
  source 1..120: mol_type = other DNA

SEQ ID NO: 32839 - DNA, 120 bp, synthetic construct
  source 1..120: mol_type = other DNA
agatacaaaggttctccatgtccacatcagattagttagatacagagtgtcgattggtgctctcacaaaccttgagctaaacacagggtgctgattggtgtatttacaatccctgagcta

SEQ ID NO: 32840 - DNA, 120 bp, synthetic construct
  source 1..120: mol_type = other DNA
ctcagcccttgggtggtcgatgggactgggcgccctggagcagggggtggtgctcgtccgggaggctccggccgaacaggagcccatggagtgggtgggaggctcaggcacggcgggctg

SEQ ID NO: 32841 - DNA, 120 bp, synthetic construct
  source 1..120: mol_type = other DNA
gctaagtcccccattgcccggggccagcagggctggccggctgctccgagtgcggggcccgccaagcccacgcccaacctggaactccagctggcccgcaagcgcctcgcagccccagtt

SEQ ID NO: 32842 - DNA, 120 bp, synthetic construct; identical to SEQ ID NO: 9153
  source 1..120: mol_type = other DNA

SEQ ID NO: 32843 - DNA, 120 bp, synthetic construct
  source 1..120: mol_type = other DNA
accagaagcaattgccagcaccacacctcctgtacagcctgcaaaaccctgagccagttaaacctctttgctttatgaattacccagcctcaggtatttctgtttagcaatgtaagaatg

SEQ ID NO: 32844 - DNA, 120 bp, synthetic construct
  source 1..120: mol_type = other DNA
cttgctctgtctcccaggctggggtgcaatggtgtgatctccgctccccacagccaccgtctcccgctcacaagcgattctcctgcctcagcctcttgagtagctgggattacaggcatg

SEQ ID NO: 32845 - DNA, 120 bp, synthetic construct
  source 1..120: mol_type = other DNA
gactacaggcttgagccaccatgcagagccttgtttttttgtttgttttttttgttttttttttagatggagtctcactctgtcgcccagactggagtgcggtggtgcgatcttggctca

SEQ ID NO: 32846 - DNA, 120 bp, synthetic construct; identical to SEQ ID NO: 9154
  source 1..120: mol_type = other DNA

SEQ ID NO: 32847 - DNA, 120 bp, synthetic construct
  source 1..120: mol_type = other DNA
acaatccagttttgtaacatttctatagtgtccaaaatttctctgtttatagttaattcccaccgataccccaagtcctaggcacccaatgatctgctgtttgtttctgtaatttacctc

SEQ ID NO: 32848 - DNA, 120 bp, synthetic construct
  source 1..120: mol_type = other DNA
aagttcaccagttttgtagtatgtatcatcaattttgtttcttttcattcctttttattcatgttgtcttctttcatttgtgtgaatttataaggtacaagtgtagttttgttacctgca

SEQ ID NO: 32849 - DNA, 120 bp, synthetic construct
  source 1..120: mol_type = other DNA
aactaccctcatgttcatggtatctcccctgccatataagtctatttttgtccccttttattgttgaatgatattgccttgcatggatgtagtaccattttgtttatctgtttactagtt

SEQ ID NO: 32850 - DNA, 120 bp, synthetic construct; identical to SEQ ID NO: 9155
  source 1..120: mol_type = other DNA

SEQ ID NO: 32851 - DNA, 120 bp, synthetic construct
  source 1..120: mol_type = other DNA
agttcaaaaccagcctgcccaacacagtgaaaccttgtctctgctaaaaacgtaaaaattagccgggcatggtggcatgcacctgtagtcgcagctactcggtagggtgaggcaggagaa

SEQ ID NO: 32852 - DNA, 120 bp, synthetic construct
  source 1..120: mol_type = other DNA
tcttgttgattttatattttctctttatgtttcaattttaatttatccaggatctatttagtgaaagaaaggagtttggaatacaacttaccaaaaactgaaactaaatctcaactcttt

SEQ ID NO: 32853 - DNA, 120 bp, synthetic construct
  source 1..120: mol_type = other DNA
attctgcttttttccaaaaatttccctagaaaatatatttacctcataaaataacatgtcagcatacttgagttctaaaaacaatcctttttacttgcttttttgttttattgtaattga

SEQ ID NO: 32854 - DNA, 120 bp, synthetic construct; identical to SEQ ID NO: 9156
  source 1..120: mol_type = other DNA

SEQ ID NO: 32855 - DNA, 120 bp, synthetic construct
  source 1..120: mol_type = other DNA
cattccattgtttgagaaagtggggtactgggaacactctagaaactgtttagttgattcttataaagacacacggaaaaagtcatatccttttcctgcctttgggagttgtgaaagaat

SEQ ID NO: 32856 - DNA, 120 bp, synthetic construct
  source 1..120: mol_type = other DNA
gttgagcaaccctggagatgcccagccttggatgtatcagctatgtgagataacgggttaaagaaaagaaaagcccactagatgagatttcctgcaattcgcagcagaaggcatcttcat

SEQ ID NO: 32857 - DNA, 120 bp, synthetic construct
  source 1..120: mol_type = other DNA
cctcaacttagggaacaaagcgtaattgttgcaactctaggatcaaacagaacagacataattgtcagcttaatatattcctataggatttatattcttataggatttatacatacattt

SEQ ID NO: 32858 - DNA, 120 bp, synthetic construct; identical to SEQ ID NO: 9157
  source 1..120: mol_type = other DNA

SEQ ID NO: 32859 - DNA, 120 bp, synthetic construct
  source 1..120: mol_type = other DNA
tgctggctggtttctcatctcaatgtttgacaagtttgtttcagttgttatagtctgttctcagtttttatgcactgcctttttgaacgttaggtttacttttttaattgacaagtaaaa

SEQ ID NO: 32860 - DNA, 120 bp, synthetic construct
  source 1..120: mol_type = other DNA
aaaccattattctattgggaaataatcttccctttctcttattttttgtccttgcagccaaatggaccagataatttttaactccatgtttgagaaacattgaataatgcaatgtgtttg

SEQ ID NO: 32861 - DNA, 120 bp, synthetic construct
  source 1..120: mol_type = other DNA
aggaagccacaagggagggcattttctgcagagttgctgaacgagtaacaacctggtcctgagagagctcttgtggaagaataagagccaagtgggaaagcttttcatcctgcaaagctg

SEQ ID NO: 32862 - DNA, 120 bp, synthetic construct; identical to SEQ ID NO: 9158
  source 1..120: mol_type = other DNA

SEQ ID NO: 32863 - DNA, 120 bp, synthetic construct
  source 1..120: mol_type = other DNA
cctattatttctgtctcatgccttatcacctctgccatcattctagggaaactgaatctctttctgaaagaggattaaaaggtattacctgttggctgaagtccagagtgtcctgggaaa

SEQ ID NO: 32864 - DNA, 120 bp, synthetic construct
  source 1..120: mol_type = other DNA
tgagatttctctaacaccacaacccacaccaaccacgacagagaagagcagaaacagaccatgtgacccatgaagtgtgaagtgtctgtcacaggatccagtgtaattgcattagcctta

SEQ ID NO: 32865 - DNA, 120 bp, synthetic construct
  source 1..120: mol_type = other DNA
tttctggattatcaggacattggaggtcatttggggaaagactttatccagggccactgatatactgagaactaaccctagcaaagccaaatttcctcctccagaaaagcctatggaaag

SEQ ID NO: 32866 - DNA, 120 bp, synthetic construct; identical to SEQ ID NO: 9159
  source 1..120: mol_type = other DNA

SEQ ID NO: 32867 - DNA, 120 bp, synthetic construct
  source 1..120: mol_type = other DNA
caagttcaaaatctgatcaacagaaagcctgagtctcagtgaggttaagtagtttgtctagagtgacagagctaataaaaggcagagctgagattggactcccctcatgtcaggaaggtc

SEQ ID NO: 32868 - DNA, 120 bp, synthetic construct
  source 1..120: mol_type = other DNA
ctatcatggggaggttcaaaagagggacagcctctcctgcctggcaggtgtgactgcttctccaggaggtacaggtgtttctagaagcgattacagggctacccccagtgacctatgctg

SEQ ID NO: 32869 - DNA, 120 bp, synthetic construct
  source 1..120: mol_type = other DNA
actccattccactgtgagagggctcgtcacgcttggatgctccacttggcaggtgtaaacctctccactccgaggaactgtttccagcatcaccagggtctggaaggtccaatctccatt

SEQ ID NO: 32870 - DNA, 120 bp, synthetic construct; identical to SEQ ID NO: 9160
  source 1..120: mol_type = other DNA

SEQ ID NO: 32871 - DNA, 120 bp, synthetic construct
  source 1..120: mol_type = other DNA
aaaattttatttgtttcttcatagcttgaaattgtcacgcattgttgaagtgtttacaaatctctgaaagtacagtgtgtattaattaaaactgatacctgagccaggttgcctggttca

SEQ ID NO: 32872 - DNA, 120 bp, synthetic construct
  source 1..120: mol_type = other DNA
ggattaatttacgtaaaatatgtaaaataatgactgaagatagccttcaatttatgaggtcagaaagcttcccaccccattccactgtgagagggctcatcacacttgggtgctccactt

SEQ ID NO: 32873 - DNA, 120 bp, synthetic construct
  source 1..120: mol_type = other DNA
catgctgtcacacgttagaacaccagagaaatggttctgcccctgggaaggtaggacagacagaaatgattctccaaatctttatgttcctagaaaagcctgagtcctaaagcagagatt

SEQ ID NO: 32874 - DNA, 120 bp, synthetic construct; identical to SEQ ID NO: 9161
  source 1..120: mol_type = other DNA

SEQ ID NO: 32875 - DNA, 120 bp, synthetic construct
  source 1..120: mol_type = other DNA
tacaggcataagccactgcacccagcctattctccaaatctttaagctcctagaaaggcatgagtcctaaagcagtgagaaggattaaggaaggccattttaatattgaaagttcttata

SEQ ID NO: 32876 - DNA, 120 bp, synthetic construct
  source 1..120: mol_type = other DNA
cattagtaggggtgcttatgcctaggaaaatccctgacactagcataccctcaatagtacaattttttgtgagaaggaaggagaaacctggagacaacaataccacaaaatggtagattt

SEQ ID NO: 32877 - DNA, 120 bp, synthetic construct
  source 1..120: mol_type = other DNA
ccaacatggtgaaaacacgtctctactaaaaatacaaaaattagccgaccgtgggggtgcgcgcctgtaatcccagctactcaggaggcagaggcagaagaatcgcttgaatccaggagg

SEQ ID NO: 32878 - DNA, 120 bp, synthetic construct; identical to SEQ ID NO: 9162
  source 1..120: mol_type = other DNA

SEQ ID NO: 32879 - DNA, 120 bp, synthetic construct
  source 1..120: mol_type = other DNA
aattacaaatcaaaaatataaattaaaaattaaccagaaacatacattttcaacttttggtgaatgtcataataaaggtcaacaaaagggaaagtgaggtaagttgtgtcacaactatca

SEQ ID NO: 32880 - DNA, 120 bp, synthetic construct
  source 1..120: mol_type = other DNA
atacacactaagaaaaaaaatggcaagaaatttagacctaaagaagcttcagaggtgcctcagaggtctcctcaattcgcctagaagttaatctaatgcttttgcaaacaaacaccacgc

SEQ ID NO: 32881 - DNA, 120 bp, synthetic construct
  source 1..120: mol_type = other DNA
cacacacaccttacatttcccttcgctgcatctctaaggacacgagacaaccaaggtctcctctctctccagccccctgcacccacctcccatgtcacctccccacagaggcctccaagg

SEQ ID NO: 32882 - DNA, 120 bp, synthetic construct; identical to SEQ ID NO: 9163
  source 1..120: mol_type = other DNA

SEQ ID NO: 32883 - DNA, 120 bp, synthetic construct
  source 1..120: mol_type = other DNA
gtaactgcctggaactcctccacgttgctgtcgaagcgcaggttctcctcccgtttatggatgtatctgttcaggtactgcacccgcttcatcccattgaagatatgacactcacactta

SEQ ID NO: 32884 - DNA, 120 bp, synthetic construct
  source 1..120: mol_type = other DNA
gaatcttgatcagccccacctgcaaccctgaccatgcacagcccaggggctgatcctccgtcttcctgaggcgtacaggggtttgggggaccagggaggaaaactaccaatgattacaag

SEQ ID NO: 32885 - DNA, 120 bp, synthetic construct
  source 1..120: mol_type = other DNA
acactctctgctccttctctcatcccacacgctttaccggttccttcaacagcacccaccgcgttcatcctgtgaacacttccttagtgataaccttgtgccaggcctgcgctgcctcta

SEQ ID NO: 32886 - DNA, 120 bp, synthetic construct; identical to SEQ ID NO: 9164
  source 1..120: mol_type = other DNA

SEQ ID NO: 32887 - DNA, 120 bp, synthetic construct
  source 1..120: mol_type = other DNA
cttgaattgatgaacttcttcaggaaaccagaagaaagttcactaaagcagagagactgaagggaaagagggtaaaatattagcctggagacatcataagaagccaggtgtttaaaagcc

SEQ ID NO: 32888 - DNA, 120 bp, synthetic construct
  source 1..120: mol_type = other DNA
atccacaaagctcagaaattcagttaaaaaaacttgtttctacaactcatttggcaaatgtcatctgataagggtaagtggtcaaaggtgtctcagagctcttattggtgacatgtgctt

SEQ ID NO: 32889 - DNA, 120 bp, synthetic construct
  source 1..120: mol_type = other DNA
caaaaataacgtaaaaataatcctgtggttaaaagtgaaatgaataagtagaagcattttacattgtgaatggtatcaaaagtagaatcactacagaaatctgaggcatgttagtgaaaa

SEQ ID NO: 32890 - DNA, 120 bp, synthetic construct; identical to SEQ ID NO: 9165
  source 1..120: mol_type = other DNA

SEQ ID NO: 32891 - DNA, 120 bp, synthetic construct
  source 1..120: mol_type = other DNA
gcaccagggagtgattgccctcagcaaaccttctggcggccggcacagaagcgagtttgcccacattctgtattcatgataaacagttcgctgtttgatcatatagcctctgtggaatgc

SEQ ID NO: 32892 - DNA, 120 bp, synthetic construct
  source 1..120: mol_type = other DNA
cagttttacagactatgaacagaagacagagacaaaacaacatcatttccagaactacaaatgagatgttaacgtagtgttttagataggtccaaggattgaggctctccaggccttgct

SEQ ID NO: 32893 - DNA, 120 bp, synthetic construct
  source 1..120: mol_type = other DNA
atattctaaccatttggttacacaaatatgagggtgattaagatgacaaagcaattgctgctgcaactgtaaactttgtacttgttcctctaaccatacaacagtggatttcaacattgc

SEQ ID NO: 32894 - DNA, 120 bp, synthetic construct; identical to SEQ ID NO: 9166
  source 1..120: mol_type = other DNA

SEQ ID NO: 32895 - DNA, 120 bp, synthetic construct
  source 1..120: mol_type = other DNA
ctggcaagatttacaggcaaaaacacaagctgtaaattgagtggtgatattccttacaaatgtaacattaaaactgtgtcacttactattgctattattggatgatatcccaacccagat

SEQ ID NO: 32896 - DNA, 120 bp, synthetic construct
  source 1..120: mol_type = other DNA
ggcagcagaataggattggatcccggtgtggtataaagaagaagcattataagcttgccaccaatgccagtgaaatttgtgccatgatttctgattattatcttttccatctagttgatc

SEQ ID NO: 32897 - DNA, 120 bp, synthetic construct
  source 1..120: mol_type = other DNA
agcacgattagggcaattggcctgggaatggtcggttagcacaccagttacattaatagaactaagacttaagaagtacatgagttttctgtagtgactcaaccatgtttgagcttgaat

SEQ ID NO: 32898 - DNA, 120 bp, synthetic construct; identical to SEQ ID NO: 9167
  source 1..120: mol_type = other DNA

SEQ ID NO: 32899 - DNA, 120 bp, synthetic construct
  source 1..120: mol_type = other DNA
gttgtccgcagtttatgaggtttgatattgccatgactctgattgtccttctctccatcttttcactcaggctcagctggctcatggcccgtactggagggaccgggcccatggttggcc

SEQ ID NO: 32900 - DNA, 120 bp, synthetic construct
  source 1..120: mol_type = other DNA
ggatctttccattttcctttttctggggatttccataacactttcggaaaacctctcctctttttctctaacagtgaccaatgtctttccgctggagtcttaacattcgtaccaggagtc

SEQ ID NO: 32901 - DNA, 120 bp, synthetic construct
  source 1..120: mol_type = other DNA
caacatgtgttgtaatgtttgatgtgcctgctctataatatcttgtcctctaggattataaggaattcctgttttatgggttatggcccaaagttgcaggaaattttgaaaagcatgact

SEQ ID NO: 32902 - DNA, 120 bp, synthetic construct; identical to SEQ ID NO: 3391
  source 1..120: mol_type = other DNA

SEQ ID NO: 32903 - DNA, 120 bp, synthetic construct
  source 1..120: mol_type = other DNA
tgtacaagtaagggcagaggtgttttgatgcagtaatgcatgagaggtttgagcttgctgaaatacagaatcaatcaatttatctgctctatcattacctagagatagggctccaggaag

SEQ ID NO: 32904 - DNA, 120 bp, synthetic construct
  source 1..120: mol_type = other DNA
ttctacgtgactggctacatttacaacataagctcaatcacagacaatgttgataggatctgaagctgtgagctgtaaaacctgaatgactgcaataaactctgagccttgagtggaaat

SEQ ID NO: 32905 - DNA, 120 bp, synthetic construct
  source 1..120: mol_type = other DNA
agaatgaaagaatagactctataaaactgcaagattttgtctgacggatagagaaaacaaaggcttttgtggctgtagctgggaggtatgccgttgctgaagcatctgttctacaagctg

SEQ ID NO: 32906 - DNA, 120 bp, synthetic construct; identical to SEQ ID NO: 9169
  source 1..120: mol_type = other DNA

SEQ ID NO: 32907 - DNA, 120 bp, synthetic construct
  source 1..120: mol_type = other DNA
gtaagatttgatctgtaggagcggccaaaagaatgtcatccataaaatgaatgatgtaagcagtaggaaacatatttcgaggctcctttcacgcctgtcctacaaaatgctgacatagcg

SEQ ID NO: 32908 - DNA, 120 bp, synthetic construct
  source 1..120: mol_type = other DNA
gagaaggcaaattaaggcttatccttctcatgtaatggtatcgtgaagaatcaatccttaagatttattgctacaagagatcagtctctaggaatgaccactggaattggcacaccttgc

SEQ ID NO: 32909 - DNA, 120 bp, synthetic construct
  source 1..120: mol_type = other DNA
aataaaaaacattggtgaattccaggggctaactgactcctctatatgtcctgtgtccgattgttcttatactagctgctgaagttgcatcagcttctcctgaggtgggggccattgatc

SEQ ID NO: 32910 - DNA, 120 bp, synthetic construct
  source 1..120: mol_type = other DNA
tcctgacgtcctatcccttttctatctgtttttccagttattgatatcgggttaggttttccttgtaggaatttccctaaacctgtcccactctgatatcccatgtccgtcaacatttta

SEQ ID NO: 32911 - DNA, 120 bp, synthetic construct; identical to SEQ ID NO: 9170
  source 1..120: mol_type = other DNA

SEQ ID NO: 32912 - DNA, 120 bp, synthetic construct
  source 1..120: mol_type = other DNA
gctgtgggctgggatagatagatttccattgtagttgtgctcccaaaccctgtatttcctcgtttctcctttcatggacaaggatgtaatttgcagggaataagcaacaattgagcaata

SEQ ID NO: 32913 - DNA, 120 bp, synthetic construct
  source 1..120: mol_type = other DNA
tgcctaaaattagtcctatgtatcctgttggtaaaggtccccaaatgccagtgggaactttggtaggtttgtctcctccaaataacgttctttctctggtggggagatctaatcctgcac

SEQ ID NO: 32914 - DNA, 120 bp, synthetic construct
  source 1..120: mol_type = other DNA
ttctagtttcccgacaagtgggtgctgttttgatgaaattttgagtggcactgattagcccagtgacttccttggttacagcgaggacaaagtgctggtgttttttctgttgggtggagc

SEQ ID NO: 32915 - DNA, 120 bp, synthetic construct; identical to SEQ ID NO: 9171
  source 1..120: mol_type = other DNA

SEQ ID NO: 32916 - DNA, 120 bp, synthetic construct
  source 1..120: mol_type = other DNA
gcataaggttcctgtgacccttgcatgatatgtaaaaaggattgtaatgggactcccttttccggaattgtgaaattgtggcccagtcacatttagcagcctgtgcacactgctggcatt

SEQ ID NO: 32917 - DNA, 120 bp, synthetic construct
  source 1..120: mol_type = other DNA
ccaatttaaattccatgtcaggtatgcactaggagacaaacaagtgtgagacaaattctttacatcgaagggtagaaggtacacagcaccaaatacagatactagcaaccctaaagtgaa

SEQ ID NO: 32918 - DNA, 120 bp, synthetic construct
  source 1..120: mol_type = other DNA
ggaaaagtgcaaggtcctaagggctctccagctatggcagcagggtgtaaaattctctgtattggagtctctatttttgctactgaaggaggcggtacagatgtttctgctattggagga

SEQ ID NO: 32919 - DNA, 120 bp, synthetic construct; identical to SEQ ID NO: 9172
  source 1..120: mol_type = other DNA

SEQ ID NO: 32920 - DNA, 120 bp, synthetic construct
  source 1..120: mol_type = other DNA
ctcctgcagcatcttagttaatgtctgagatctaacctgagcaccagattatttcaacaaaactttaagcaactgcacataatgtttttcttcaatagacaaattctgcctcacgttacc

SEQ ID NO: 32921 - DNA, 120 bp, synthetic construct
  source 1..120: mol_type = other DNA
cattcatcttgtcaatttcaattcctctgctccagcagaccttctttgttcacattctcatgtccctgtgtttagaaaccactatggcgtcgccctgtcgctgtttgaacatcactatgc

SEQ ID NO: 32922 - DNA, 120 bp, synthetic construct
  source 1..120: mol_type = other DNA
cttccttcgtatttactgaaaagagatagcaagaagggagtggttgtcggtctgctgcttgctccagagcagccttgcaagactgcattcctcgaacaataggctctagatgtcccagca

SEQ ID NO: 32923 - DNA, 120 bp, synthetic construct; identical to SEQ ID NO: 9173
  source 1..120: mol_type = other DNA

SEQ ID NO: 32924 - DNA, 120 bp, synthetic construct
  source 1..120: mol_type = other DNA
gatcacaaggtcagaagatcgagaccatcctggctaacacggtgaaacctcatctctactaaaaaaatacaaaaaattagccaggcgcggtgtcaggcacctgtagtcccagctacttgg

SEQ ID NO: 32925 - DNA, 120 bp, synthetic construct
  source 1..120: mol_type = other DNA
aacaaaacaaaaagaggtaagtctacacttttcagaaagagcacagtgtgaaccagtgctctcagcctcagcactactgacattttggaccaggtaattctttgttggtgatggaggctg

SEQ ID NO: 32926 - DNA, 120 bp, synthetic construct
  source 1..120: mol_type = other DNA
atgggagggaagggaggggtggtgaactatccctgggtaagaaccatgggtgtgaaccatctgaaaaaatctgtgttgaacaagccactattagttatggagcagctgagaattactttg

SEQ ID NO: 32927 - DNA, 120 bp, synthetic construct; identical to SEQ ID NO: 9174
  source 1..120: mol_type = other DNA

SEQ ID NO: 32928 - DNA, 120 bp, synthetic construct
  source 1..120: mol_type = other DNA
ccctcagaaagggagaaaccaaaaaaatgacactctcattcagacagtttacaaaaaatgagcaggtccccagactttgagtacgaccttcgtaaagcttcctttcccctttagaaatga

SEQ ID NO: 32929 - DNA, 120 bp, synthetic construct
  source 1..120: mol_type = other DNA
cactgtaatccatgctcatgtgtcccagttagggttgaaaggtttggcaaacaaaccagaggatgcccacttaaatttggatttccagtaaattacggtgtgtatctgaaattcagattt

SEQ ID NO: 32930 - DNA, 120 bp, synthetic construct
  source 1..120: mol_type = other DNA
acttttaaaatgataaatgcaaaatgaatgaaagtatagttccactatacattggaactagcagcccttgcatctctgctcccacttcaagaaacaacctggtacatatgaatatcagga

SEQ ID NO: 32931 - DNA, 120 bp, synthetic construct; identical to SEQ ID NO: 9175
  source 1..120: mol_type = other DNA

SEQ ID NO: 32932 - DNA, 120 bp, synthetic construct
  source 1..120: mol_type = other DNA
tttattagtttcataaagaattgtcattctgaaaacatagggcagaaacactagcttatgtctaacaatgcagtatacctaaacaaacctcagacaaaaggcacctgctgacataggaga

SEQ ID NO: 32933 - DNA, 120 bp, synthetic construct
  source 1..120: mol_type = other DNA
caccacagatacaataggatcattattgaaattgcatactgaaaatgataggcctggtacacagtcactgcaaaatgttatatggcatgtactgatggagaccagattcattttattcat

SEQ ID NO: 32934 - DNA, 120 bp, synthetic construct
  source 1..120: mol_type = other DNA
cctctaatatttccttgataataatgaccgagcatctctggttcacaggtcctcctgcttctcttcagcctctttagccttttcctttagattcagctggcttcctgaacctagagcaca

SEQ ID NO: 32935 - DNA, 120 bp, synthetic construct; identical to SEQ ID NO: 9176
  source 1..120: mol_type = other DNA

SEQ ID NO: 32936 - DNA, 120 bp, synthetic construct
  source 1..120: mol_type = other DNA
ctggaatttaacagagtacatgtattgatgctgtcaacataaacacctccagccctgaactcaccgtgagtctcttaaattcccttggccttctgattgttccacataaatgtcaataaa

SEQ ID NO: 32937 - DNA, 120 bp, synthetic construct
  source 1..120: mol_type = other DNA
tcccctttacagtaatccattaacaagctgagcaaaatacatgccgagtctgtccacttcatctttttcactgtctttatcactaatacacaccaggaagccacgaactgttttccctga

SEQ ID NO: 32938 - DNA, 120 bp, synthetic construct
  source 1..120: mol_type = other DNA
ccatgcagtagcttcccatatctgtttaaataaaattaaaatttcttactatgtgcatcagggcctaatatgatgaggctcctgacttcctctctgcatcctacctcatcttctgcctct

SEQ ID NO: 32939 - DNA, 120 bp, synthetic construct; identical to SEQ ID NO: 9177
  source 1..120: mol_type = other DNA

SEQ ID NO: 32940 - DNA, 120 bp, synthetic construct
  source 1..120: mol_type = other DNA
aaagtgtagaaactttacctcctttatatccctttccacttctgcatgtgtaatatatattttttattttctctacttgcatcaaaaccacatctgtcaatgttgtaatttttgcctcaa

SEQ ID NO: 32941 - DNA, 120 bp, synthetic construct
  source 1..120: mol_type = other DNA
gattgtccaagatttcttccattatcatttctattccagttcaagcacttcctttagcccttgttttaacataaatctgctagcatgaaagtctcttgattttccttcctctaagtatgt

SEQ ID NO: 32942 - DNA, 120 bp, synthetic construct
  source 1..120: mol_type = other DNA
gccaaaaatacaaaaaattagccaggcgttggggtgtgtgtctgtaattccagctactcaggaggctgaggtgtgatgatcacataagcctgggaggcagaggctgcagtgagccgtggt

SEQ ID NO: 32943 - DNA, 120 bp, synthetic construct; identical to SEQ ID NO: 9178
  source 1..120: mol_type = other DNA

SEQ ID NO: 32944 - DNA, 120 bp, synthetic construct
  source 1..120: mol_type = other DNA
gaaaatagtcaatcttccttcaaacactctttgggcatcacccatttgtcatctccttctaagactccagtgacacaaatttcataccttttattatagtcttacagatttatcagcatg

SEQ ID NO: 32945 - DNA, 120 bp, synthetic construct
  source 1..120: mol_type = other DNA
tgcatgtaatgaataaattattcaaaatgtacaatgtactgaagctgacaaataacataagacagaaagagttccacatctcatagagaaagtaagtccattctatgaagctttcccaag

SEQ ID NO: 32946 - DNA, 120 bp, synthetic construct
  source 1..120: mol_type = other DNA
ttgatgagacctgtgtaaactttacttcaagacctgaagggaactctacaacaaataggaattaagagaccaataactcttataaggtaagttcttaagaaaacattagccaagtgaatt

SEQ ID NO: 32947 - DNA, 120 bp, synthetic construct; identical to SEQ ID NO: 9179
  source 1..120: mol_type = other DNA

SEQ ID NO: 32948 - DNA, 120 bp, synthetic construct
  source 1..120: mol_type = other DNA
tagaggagttaggcaataataatggcaagaaaaatatatcaaagagataataattgcatccaggtaaaatggtcattatttactcttgacataatcaggtacttagaaaataaaaacaat

SEQ ID NO: 32949 - DNA, 120 bp, synthetic construct
  source 1..120: mol_type = other DNA
ttaaaatgtaacctccattgttggaggtgaggcctggtgagaggtattttggtcggggggcagatccttcatcaatggcttggtgccatcctagctgtaatgagtgagttctcactcagt

SEQ ID NO: 32950 - DNA, 120 bp, synthetic construct
  source 1..120: mol_type = other DNA
ggccctcaccagaagcaattgccagcaccacacctcctgtagagcctgcagaaccctgagccagtgaaacctcctttctttatgaattacccagcctcaggtatttctttctggaaatgt

SEQ ID NO: 32951 - DNA, 120 bp, synthetic construct; identical to SEQ ID NO: 9180
  source 1..120: mol_type = other DNA

SEQ ID NO: 32952 - DNA, 120 bp, synthetic construct
  source 1..120: mol_type = other DNA
ggccgttttctcaatcctactaatttgtaatttcataagattgtgttcagagaatatactctgtatgattttattcttgtgaaagtaattgagactagttttatagtcacagtatttgtt

SEQ ID NO: 32953 - DNA, 120 bp, synthetic construct
  source 1..120: mol_type = other DNA
tatcttgatttccttcctgatctttgcacgaagctacagagatatttgttgtcttccatctacctccctagttcccacagcaccagcatgaagtcagaaaaagttctggaaggagaatca

SEQ ID NO: 32954 - DNA, 120 bp, synthetic construct
  source 1..120: mol_type = other DNA
ctttctcagccaggctcaatcttcttcccatgttaagattcagtagatgaccaaagaataagagtggacacttgaccctgctcgcctatgtggaatttgttcatctctggaatttggaat

SEQ ID NO: 32955 - DNA, 120 bp, synthetic construct; identical to SEQ ID NO: 9181
  source 1..120: mol_type = other DNA

SEQ ID NO: 32956 - DNA, 120 bp, synthetic construct
  source 1..120: mol_type = other DNA
aaaattcaccgagactgtaacaacctagagtggaaatactgtattattcaaactactcaaagggttacaccaatatatgctcacagtgccccacacagcaccaaatgtcatcctgcagtg

SEQ ID NO: 32957 - DNA, 120 bp, synthetic construct
  source 1..120: mol_type = other DNA
tgaatttggaaatgtttttgttattccaaaccgtggctcaacaaacgaccaattttatgtctcgttgggctcatgtaggattgttctttaagacggatgtttacaacgggatttttgttg

SEQ ID NO: 32958 - DNA, 120 bp, synthetic construct
  source 1..120: mol_type = other DNA
gttaaaacaaactattgtacttgccaattttggagtaggagaaatagtttattacattgctgttcgaatttggctttttctcttcattggtgagtttgagcaaatatatatatatttatc

SEQ ID NO: 32959 - DNA, 120 bp, synthetic construct; identical to SEQ ID NO: 9182
  source 1..120: mol_type = other DNA

SEQ ID NO: 32960 - DNA, 120 bp, synthetic construct
  source 1..120: mol_type = other DNA
aatagatttgtgcaattatcacaacaatttagttttagaacatttctgtcatgtcccaaatttctctatttatagttaagtcccactgagaccccaaaccctaggcacccaatgatctgc

SEQ ID NO: 32961 - DNA, 120 bp, synthetic construct
  source 1..120: mol_type = other DNA
tagtatgtatcatcattttgttttcttttcatttctttttgtcttttttcatttgtgcaaatgcaaaaggtacaagtgtagttttggtacatgcatagattgcatagtggtgacgttagt

SEQ ID NO: 32962 - DNA, 120 bp, synthetic construct
  source 1..120: mol_type = other DNA
tttgccttgggaaaactaccctcatgtttatggtatctcccctgccagataagtctatttttgtccccttttattgttgaatgatattgccttgcctggatgtagttgaattttgtttat

SEQ ID NO: 32963 - DNA, 120 bp, synthetic construct; identical to SEQ ID NO: 9183
  source 1..120: mol_type = other DNA

SEQ ID NO: 32964 - DNA, 120 bp, synthetic construct
  source 1..120: mol_type = other DNA
ttagtgaaagaaatgaatttggaattcaacttaccaaaaactgaaactaaatctcagctctttctgtttctatttctagactctgttttgctagcatatataattttaaaaaatcagtaa

SEQ ID NO: 32965 - DNA, 120 bp, synthetic construct
  source 1..120: mol_type = other DNA
tgtcagcatacttaactgagttgtacaaacaatcaatcctgtttgcttgcttttttttattgtaattgagttaatggctgacatttaataactctatgtgtgtgtatgtatacacaccta

SEQ ID NO: 32966 - DNA, 120 bp, synthetic construct
  source 1..120: mol_type = other DNA
catgtggaagttaactcaaatacttacaacctgatagtaccacaatctatcatttccctacccggaaatcaatctctgctactccatccaccatttctttattttttaaaatacatgatt

SEQ ID NO: 32967 - DNA, 120 bp, synthetic construct; identical to SEQ ID NO: 9184
  source 1..120: mol_type = other DNA

SEQ ID NO: 32968 - DNA, 120 bp, synthetic construct
  source 1..120: mol_type = other DNA
tatcggctatgtgagataacgggttaaagaaaaataaagccactagatgggatttcctgctattagcagcagaacgcatcttcattgaaatattcattccacacattttggttctacctt

SEQ ID NO: 32969 - DNA, 120 bp, synthetic construct
  source 1..120: mol_type = other DNA
atttctataggatttatactcttacaggatttatatgcacttgtactgctacgtatgtacaagtaacatataactaaaaataagatatgcataaaaacaacttttaatttgattgaaaat

SEQ ID NO: 32970 - DNA, 120 bp, synthetic construct
  source 1..120: mol_type = other DNA
aacggagaactctccatcttctaaatgtgtctttctctgaaatctgtacaagtcctttgataacactgtattattgaagtctctggagtgaaacactatacactaatttacagttataaa

SEQ ID NO: 32971 - DNA, 120 bp, synthetic construct; identical to SEQ ID NO: 9185
  source 1..120: mol_type = other DNA

SEQ ID NO: 32972 - DNA, 120 bp, synthetic construct
  source 1..120: mol_type = other DNA
atttaactccatctttgagaaacatttaataatgtaatgtgtttgtcatacagggtgaatacagatgcacgggaggccatacggtttaggcaaaggggagcacaaaagttgaagatgagg

SEQ ID NO: 32973 - DNA, 120 bp, synthetic construct
  source 1..120: mol_type = other DNA
gaagaataactgccaagcaggaaagcttttcatcctgcaaagccggggcagaaagttcttccttgaatgtggtcatctgcatttcagctcaggaatcctgcaaaagacagaggagagtgt

SEQ ID NO: 32974 - DNA, 120 bp, synthetic construct
  source 1..120: mol_type = other DNA
gcacaccttttctaagtggagaggaggaattttggtgtaaattgcctgatcagaaatttggatccaaagtctttcctattatttctgtctcatgccttatcacctctaccatcattctgg

SEQ ID NO: 32975 - DNA, 120 bp, synthetic construct; identical to SEQ ID NO: 9186
  source 1..120: mol_type = other DNA

SEQ ID NO: 32976 - DNA, 120 bp, synthetic construct
  source 1..120: mol_type = other DNA
aattggtccattttacaaacatccagctagccacagagaacctattggtgtgtttttacaaagcactgattggtgcatttagaaacctcttgtaggccgggcgcggtggctcacgcctgt

SEQ ID NO: 32977 - DNA, 120 bp, synthetic construct
  source 1..120: mol_type = other DNA
tggcgggcgcctgtagtcccagctacttgggaggctgaggcaggagaatggcgtgaacccgggaggcggagcttgcagtgagccgagatcccgccactgcactccagcctgggcgacaga

SEQ ID NO: 32978 - DNA, 120 bp, synthetic construct
  source 1..120: mol_type = other DNA
aactgtgtctgtttctaaaagaggattaaaaggtattacctgttggctgaagtccagagtgtcctgggaaaaagaggaaaagatatacacttaaaagttattgaagcaaatctgtcctcc

SEQ ID NO: 32979 - DNA, 120 bp, synthetic construct; identical to SEQ ID NO: 9187
  source 1..120: mol_type = other DNA

SEQ ID NO: 32980 - DNA, 120 bp, synthetic construct
  source 1..120: mol_type = other DNA
tagcaggacattagagccgtttggggaaagaaaggctttattcagggccactcatatactgagaactaacctcagcaaagccatagttcctcctccagaaaagcctatggagagagccag

SEQ ID NO: 32981 - DNA, 120 bp, synthetic construct
  source 1..120: mol_type = other DNA
accgtgctcctgagagaggaagccaggtttagtgatgtttattccaaattgaacctttttacttgagactctaagatttagagctttgaaaatggggcagaaagctgcctcacaagaact

SEQ ID NO: 32982 - DNA, 120 bp, synthetic construct
  source 1..120: mol_type = other DNA
caaatattacagccttgatgtaaggcacaagttcaacatctgatccacagaaagcctgagactcaatgaggataagtagtttgtctagagtgacaaagctaataaaaagcagggctgaga

SEQ ID NO: 32983 - DNA, 120 bp, synthetic construct; identical to SEQ ID NO: 9188
  source 1..120: mol_type = other DNA

SEQ ID NO: 32984 - DNA, 120 bp, synthetic construct
  source 1..120: mol_type = other DNA
gaaatttaggaagtcagaaagctgctcactccattccactgtgagagggcttgtcacgcttgggtgctccacttggcaggtgtaaacctctccacttcgaggaactgtttccagcatcac

SEQ ID NO: 32985 - DNA, 120 bp, synthetic construct
  source 1..120: mol_type = other DNA
agagcagaccaggaggttgtggtgctgcaggggctgggtctttgaaggatatacagtcaccttaggttggactaggagaaaaacaacgtagagggaatgagtcaggaagacagagtaagt

SEQ ID NO: 32986 - DNA, 120 bp, synthetic construct
  source 1..120: mol_type = other DNA
gaccttacagtgtcatcagcctggaatttaatcttgacagtgaggacccattagatttgagaggtgttgtgaaaaattgtgtttgtttcttcatagttttaaatcggcatgcattgtcaa

SEQ ID NO: 32987 - DNA, 120 bp, synthetic construct
  source 1..120: mol_type = other DNA
gtctgccttttactggttgatcctggaagagttttttgattcttctgtgtctcaactttgtcacctacaatgaaggataattatactaatttacctcttggggttatatgaggattaatg

SEQ ID NO: 32988 - DNA, 120 bp, synthetic construct; identical to SEQ ID NO: 9189
  source 1..120: mol_type = other DNA

SEQ ID NO: 32989 - DNA, 120 bp, synthetic construct
  source 1..120: mol_type = other DNA
ttcctagaaaagcatgagtcctgaagcagagagaaggattagggaacgtcatttaagttttgaaagttcttatatttacatttagctgatcaatgcatctcccgtgcaacacaagcataa

SEQ ID NO: 32990 - DNA, 120 bp, synthetic construct
  source 1..120: mol_type = other DNA
cttggggtgcttatgcccaggaaaatccccgacactagcatactctcaataaatacaactatttttttagaagtaaggagaaacctggagacaacaatgccacaaaatggcagatttcag

SEQ ID NO: 32991 - DNA, 120 bp, synthetic construct
  source 1..120: mol_type = other DNA
ctggatcaaatatcaataaagtgttaataatcttatagtacaaagaacgcagaaagtcactgagaaaaatactaagccctcaagatattagaccgtagatcattgtccattacctaccaa

SEQ ID NO: 32992 - DNA, 120 bp, synthetic construct; identical to SEQ ID NO: 9190
  source 1..120: mol_type = other DNA

SEQ ID NO: 32993 - DNA, 120 bp, synthetic construct
  source 1..120: mol_type = other DNA
agaggtgcctcagaggtctactcagttcctctagaaattaatctattgcttttacaaacaaacagcacacacttttaattcagagattacacgaagggtgtatgccagggagagtctgga

SEQ ID NO: 32994 - DNA, 120 bp, synthetic construct
  source 1..120: mol_type = other DNA
ttacatttcccttccctgcatctctaaggaccgagataatcaaggtctcctctctctccagcccccagcacccacctcccttgtcacctccccacagaggtctccaaggataagaaacag

SEQ ID NO: 32995 - DNA, 120 bp, synthetic construct
  source 1..120: mol_type = other DNA
atggcgctctctctctctcttcctctctctgtctctctctgtctctctctcacacacacacacacacacacacacacacacacacacacactcagattcccagctcacggggactcaggc

SEQ ID NO: 32996 - DNA, 120 bp, synthetic construct; identical to SEQ ID NO: 9191
  source 1..120: mol_type = other DNA

SEQ ID NO: 32997 - DNA, 120 bp, synthetic construct
  source 1..120: mol_type = other DNA
cggggctccctgagcggggtgcgggcgctggaaccttaaccggccccacccgcaacgcccaccacctgcagcccaggagctcatcctccgtcttcctgaggcgaacgggggcctggggga

SEQ ID NO: 32998 - DNA, 120 bp, synthetic construct
  source 1..120: mol_type = other DNA
cgcctcctcctgggagccccaaagacactctctgctcctctcatcccacacgctttaccggtaccttcaacagcacccaccgcgttcaccctgtgaacacttccttagtgatgaccttgt

SEQ ID NO: 32999 - DNA, 120 bp, synthetic construct
  source 1..120: mol_type = other DNA
gaaagcgatggccaaaaaccaaacacacaagagcttagacagcaatgagaaatatcagaagtgtggcgttctagagcagagaataatagaagattcccagttaaatttggatttccaata

SEQ ID NO: 33000 - DNA, 120 bp, synthetic construct
  source 1..120: mol_type = other DNA
aacctcagaagaaggagtgatttaatacttccttgtgttcttgaacacatgcccagatagacatatacaacgtttaaaatgataaatgcaaaatgaatgaaagtttctcctatacatcag

SEQ ID NO: 33001 - DNA, 120 bp, synthetic construct; identical to SEQ ID NO: 9192
  source 1..120: mol_type = other DNA

SEQ ID NO: 33002 - DNA, 120 bp, synthetic construct
  source 1..120: mol_type = other DNA
tcttagcactgatcacataataaacactcgaatacattcccattttaacttttctgatcctataactgcagctcatattattttttgtattccttaattctaaagcaattagtatcttca

SEQ ID NO: 33003 - DNA, 120 bp, synthetic construct
  source 1..120: mol_type = other DNA
aaaagcatctgctgacatagaagaaacggactttctatatgctcagatttaaactgcaatctgatttccagcactaaatttgtaatactgggtgttacttataacctctcaattttagat

SEQ ID NO: 33004 - DNA, 120 bp, synthetic construct
  source 1..120: mol_type = other DNA
ggcgactggattcattttatttatcactccattctcatgacctagagtaataactggtatatgctatgtcactaataaatattggctgtgtgaaatactggctgtgttaaatattggctg

SEQ ID NO: 33005 - DNA, 120 bp, synthetic construct; identical to SEQ ID NO: 9193
  source 1..120: mol_type = other DNA

SEQ ID NO: 33006 - DNA, 120 bp, synthetic construct
  source 1..120: mol_type = other DNA
ctcccttctccttgaaaataatctattttcctggacttacacacatgatgttctcttggtttttctccagcatccttgggctctttctcagccccctttgctggcctgtgccctgttctt

SEQ ID NO: 33007 - DNA, 120 bp, synthetic construct
  source 1..120: mol_type = other DNA
aaatgccattgaccttcggatttctccacataaatgtcaatcaatcatctcatatttaaacaaaacttttatttcaaaccacccacttcaaatcatttcctcccatagtttttcctatct

SEQ ID NO: 33008 - DNA, 120 bp, synthetic construct
  source 1..120: mol_type = other DNA
gtccactttatctttttcaccatctttatcactaatgcactccatgaagccacaaacctgttttccctgaagaattccctgctgtgctcctaaatagtcttcctaaccactagtgaaccc

SEQ ID NO: 33009 - DNA, 120 bp, synthetic construct
  source 1..120: mol_type = other DNA
gtcaggagatcgagaccatcctggctaacacggtgaaaccctatccctactaaaaatacaaaaaattagccaggtgtggtggcatgcgcctgtggccccagctaatcgggaggctgaggc

SEQ ID NO: 33010 - DNA, 120 bp, synthetic construct; identical to SEQ ID NO: 9194
  source 1..120: mol_type = other DNA

SEQ ID NO: 33011 - DNA, 120 bp, synthetic construct
  source 1..120: mol_type = other DNA
tggaactttcatcccttagatcttcacgactgtctacttattttgttgtctcagctgaatgtcactttctcaggtggagctccctaacatatgaactaaagtaggtgaatccatgtctct

SEQ ID NO: 33012 - DNA, 120 bp, synthetic construct
  source 1..120: mol_type = other DNA
tagtgtctgtctcctctactcttgtgtaacttccatgagagtagggacgctctctaacttaatcaaatagaatgatttgaacctagaatggagcccagtaaagagtagctgctgagaaaa

SEQ ID NO: 33013 - DNA, 120 bp, synthetic construct
  source 1..120: mol_type = other DNA
ctccagcactctttcattttaatgtcacactagaccccttctcctcccagtgataaatacaggcaaacttcttttttctcctccttctagttggaagaagaattcacagataaagaaaca

SEQ ID NO: 33014 - DNA, 120 bp, synthetic construct
  source 1..120: mol_type = other DNA
cagttcaagaccagcctgggcaacatggcaaaatctcatgtctaccaaaattacaaaaattagctgggcgtggttgcctgcctgtattcccagctactctggagcctgaggagggaggat

SEQ ID NO: 33015 - DNA, 120 bp, synthetic construct; identical to SEQ ID NO: 9195
  source 1..120: mol_type = other DNA

SEQ ID NO: 33016 - DNA, 120 bp, synthetic construct
  source 1..120: mol_type = other DNA
taagacaatgagttcccaagacttgcccattgactttcagccctatgagacgtgaacaatgttcacatcatctcggtaaccccacacagagtatatagtttgaacattattaaatttctg

SEQ ID NO: 33017 - DNA, 120 bp, synthetic construct
  source 1..120: mol_type = other DNA
agagcacataggagatgcaagagaaacaagtacagaaaggttaaaaaagattcataatgaacacgaacctgggctagtttttcagaggatgccttaagttctttaggcaccaaagaatac

SEQ ID NO: 33018 - DNA, 120 bp, synthetic construct
  source 1..120: mol_type = other DNA
aaaggaagagcactaagtataacttctgtcagagaacctacatacactacagggatacaggccttataaacattggagttcagcaagaaaagaaaggagataatggggaggccactgggt

SEQ ID NO: 33019 - DNA, 120 bp, synthetic construct
  source 1..120: mol_type = other DNA
tccttttgtctgacataagtcaacataataaagggaagtgctgtatggggaatttattttagaatccttatttctaaatcctctaaagaccctgaggacatgtgatgcaaaggttttatt

SEQ ID NO: 33020 - DNA, 120 bp, synthetic construct; identical to SEQ ID NO: 9196
  source 1..120: mol_type = other DNA

SEQ ID NO: 33021 - DNA, 120 bp, synthetic construct
  source 1..120: mol_type = other DNA
cttcagacacaccatgctggagaacaggacaggaccaggggccagagaagcaggcaagtctcactcagggagaactatgaacccctccacccacattccaagttatagggaggaagttac

SEQ ID NO: 33022 - DNA, 120 bp, synthetic construct
  source 1..120: mol_type = other DNA
tttccttctttaaaggattgttttaatttagcacttggaaggtttgaaccagttgcatgtaaaacaccttaattggggagctattgtagccagctctgtgctggtcagtgatgtgttcac

SEQ ID NO: 33023 - DNA, 120 bp, synthetic construct
  source 1..120: mol_type = other DNA
ctttaatctggtccttattgcaccatatcttaatgttgtagatttgggaaaattacgtcatgtctcacagttgaaatgaaggcaccatgatctttcaggtctttcaacactagaaaatgt

SEQ ID NO: 33024 - DNA, 120 bp, synthetic construct; identical to SEQ ID NO: 9197
  source 1..120: mol_type = other DNA

SEQ ID NO: 33025 - DNA, 120 bp, synthetic construct
  source 1..120: mol_type = other DNA
aggactcaaagtcagctgttgacagaacaactctgttttaccataattaatattttatgtcgagtgttcaatccctcattcttggctcccattatgatttcctcctttgtttaaggctat

SEQ ID NO: 33026 - DNA, 120 bp, synthetic construct
  source 1..120: mol_type = other DNA
atcacttgaggtcaggagtaccagaccagcctggccgacacggtgaaatcccatctctactaaaaaaatacaaaaatcagctgggcttggtggtgcatgcctgtaatcccagctactcgt

SEQ ID NO: 33027 - DNA, 120 bp, synthetic construct
  source 1..120: mol_type = other DNA
ggctttgctaactagtacgttacagaatgttcaggaaacagaaccctagggaaaatctatgaattacatcagttgatgtaatcatctaattttaaacatataattctacatttagataat

SEQ ID NO: 33028 - DNA, 120 bp, synthetic construct; identical to SEQ ID NO: 9198
  source 1..120: mol_type = other DNA

SEQ ID NO: 33029 - DNA, 120 bp, synthetic construct
  source 1..120: mol_type = other DNA
tttccatacatcatatttttattcaattctcacattagctgagtgagggaaatacccttttcatccttacaagtggagagaataaaatgatggagtttaaacaacttttgcaaggatgca

SEQ ID NO: 33030 - DNA, 120 bp, synthetic construct
  source 1..120: mol_type = other DNA
taaagggccatagcctcaaacaaatgaggaaatcataattggagccaggaatgagggattgaacactcttcacataaaatattaattattttaaagcagagttgttctgtcaactctatt

SEQ ID NO: 33031 - DNA, 120 bp, synthetic construct
  source 1..120: mol_type = other DNA
taattcatggctgtgcaaatcagtaagactacttcttttaatgaatggcaacattttatagactttgggggtagatactgtgtagcaattctggttccttcaaaagattcccctcatcac

SEQ ID NO: 33032 - DNA, 120 bp, synthetic construct
  source 1..120: mol_type = other DNA
tgttacataaggacacccatagctcctgcacaaatctccttcttattaaagataacaacagcctcaacattcctaactccattctattactctcaatcatcatttccaatttctcagcac

SEQ ID NO: 33033 - DNA, 120 bp, synthetic construct; identical to SEQ ID NO: 9199
  source 1..120: mol_type = other DNA

SEQ ID NO: 33034 - DNA, 120 bp, synthetic construct
  source 1..120: mol_type = other DNA
ggaaaggaagctaaggttcaccttagtattacaggataaaagtggaggcaaaaataagtaattctacatcaagaatgtactaaaatacagttaaagagaaactttcaaaacttgtttata

SEQ ID NO: 33035 - DNA, 120 bp, synthetic construct
  source 1..120: mol_type = other DNA
atttgtgctgtgataaaatacggtagactgggtaatttataaagaacacatggaggctgaaaagtccaagattaaggcaccagcaggttcaatgtctggcaaagggcatggtctccactt

SEQ ID NO: 33036 - DNA, 120 bp, synthetic construct
  source 1..120: mol_type = other DNA
tcatgagtgaggagccctacctgaattttaaaggagacacacttatactacaacagatgtgcttctttaaattacatatctcacactttccttcaatattcaatataaggatagttcagg

SEQ ID NO: 33037 - DNA, 120 bp, synthetic construct; identical to SEQ ID NO: 9200
  source 1..120: mol_type = other DNA

SEQ ID NO: 33038 - DNA, 120 bp, synthetic construct
  source 1..120: mol_type = other DNA
ttcacagaatggggctcacttgcagtaagcctgaaagcttgcaacacattttggaaaaataggctcttttggctatcagcaagccctggttatcatagaatgtctgccacttgtccaagc

SEQ ID NO: 33039 - DNA, 120 bp, synthetic construct
  source 1..120: mol_type = other DNA
aaacaggaccagtttcttcttagcatggaagatacgtttcctgaacagaaaactgtgccatttaaaggccttattagtattcatcacacttgacaggaccctttccagtaagatttcagc

SEQ ID NO: 33040 - DNA, 120 bp, synthetic construct
  source 1..120: mol_type = other DNA
acttccaaatgtcattctttgactcaacttagctgttttataacagaatccttgccattgcatagttatagagagaacaactagaattcccataggcctttgtactaatattgtaagtac

SEQ ID NO: 33041 - DNA, 120 bp, synthetic construct
  source 1..120: mol_type = other DNA
tatttttttattgataattcttgggtgtttctcacagaggaggatttggcagggtcatgggacaatagtggagggaaggtcagcagataaacaagtgaacaaaggtctctggttttccta

SEQ ID NO: 33042 - DNA, 120 bp, synthetic construct; identical to SEQ ID NO: 9201
  source 1..120: mol_type = other DNA

SEQ ID NO: 33043 - DNA, 120 bp, synthetic construct
  source 1..120: mol_type = other DNA
agctgttgggcacacctcccagacggggtggtgtccgggcagaggggctcctcacctcccagcaggggcggccgggcagaggcgcccctcacctcccggacggggcggctggccgggcag

SEQ ID NO: 33044 - DNA, 120 bp, synthetic construct
  source 1..120: mol_type = other DNA
gtaggggcggccgggcagaggtgcccctcacctcccggacggggcggctggccgggcgggggggctgacccccccccacctccctcccggacggggcggctggccgggcggggggctgac

SEQ ID NO: 33045 - DNA, 120 bp, synthetic construct
  source 1..120: mol_type = other DNA
gggctgaccccccctacctccctcccggacggggaggctggccgggcggggggctgacccccccacctccctcccggacggggcggctggccgggcgggaggctgacccccccacctccc

SEQ ID NO: 33046 - DNA, 120 bp, synthetic construct; identical to SEQ ID NO: 9202
  source 1..120: mol_type = other DNA

SEQ ID NO: 33047 - DNA, 120 bp, synthetic construct
  source 1..120: mol_type = other DNA
ctgacccccccacctccctcccggacggggcggctggccgggcagaggggctcctcacttcccagtaggggcggccaggcagaggtgcccctcacctcccggacggggcggctggccggg

SEQ ID NO: 33048 - DNA, 120 bp, synthetic construct; identical to SEQ ID NO: 9203
  source 1..120: mol_type = other DNA

SEQ ID NO: 33049 - DNA, 120 bp, synthetic construct
  source 1..120: mol_type = other DNA
ccgggcggagaggctcctcacttctcagacggggcagctgccgggcggaggggctcctcacttctcagactgggtggttgccaggcagagggtctcctcacttctcagacggggcggccg

SEQ ID NO: 33050 - DNA, 120 bp, synthetic construct
  source 1..120: mol_type = other DNA
gagacgctcctcacttcccagacggggtggcggccgggcagaggctgcaatctcggcactttgggaggccaaggcaggcggctgggaggtgtaggttgtagtgagccgagatcacaccac

SEQ ID NO: 33051 - DNA, 120 bp, synthetic construct
  source 1..120: mol_type = other DNA
caacacagcgaaaccccgtctccaccaaaaccagtcaggcgtggcggcgcgtgcctgcaatcgcaggcatttggcagactgaggcaggagaatcaggcagggcggttgcagtgagccgag

SEQ ID NO: 33052 - DNA, 120 bp, synthetic construct; identical to SEQ ID NO: 9204
  source 1..120: mol_type = other DNA

SEQ ID NO: 33053 - DNA, 120 bp, synthetic construct
  source 1..120: mol_type = other DNA
acaacattttacctaaataaaatcaacttatatatgtgcaaaaaaattaatgattccttttgtcatgacatctcttcctaccctgtgtgcctgtcaaacaaagcaactctcagtatcata

SEQ ID NO: 33054 - DNA, 120 bp, synthetic construct
  source 1..120: mol_type = other DNA
attatgtatccatctagagatgctaaagatgatctgggtgcaaacaataccctgtcagtatccacagttcagaattttggatttgactttaaggaggtgtctagtcaattgttagaataa

SEQ ID NO: 33055 - DNA, 120 bp, synthetic construct
  source 1..120: mol_type = other DNA
ttttccagaagtgaggaatctttattgctattacaagttctaaagctatgaaaaacaaaaaagcataagaagaatcagttctaaaagcaactgcttctgccatcgaggcaaaatacatag

SEQ ID NO: 33056 - DNA, 120 bp, synthetic construct
  source 1..120: mol_type = other DNA
ctgtctcctgggttcaagctattctcctgcctcagcctcccaagtagctgggactacaggtgcacaccaccatgcccggctaattttttgtatttttagtggagatggggtttcaccatg

SEQ ID NO: 33057 - DNA, 120 bp, synthetic construct; identical to SEQ ID NO: 9205
  source 1..120: mol_type = other DNA

SEQ ID NO: 33058 - DNA, 120 bp, synthetic construct
  source 1..120: mol_type = other DNA
tcctgtttatccatttattgttattatttttccttaataactttacaccatcagaaaccaatttgtgttcccatatgggcaattgattggagtgtttatctagatagactctagacctaa

SEQ ID NO: 33059 - DNA, 120 bp, synthetic construct
  source 1..120: mol_type = other DNA
gtcatttgcccattttttaatcaggttatttgtttgtttggttggttgttttgctcttgagttgtatgagttccttatacatttttgaaattagccccttatcaaatatatggtttgcaa

SEQ ID NO: 33060 - DNA, 120 bp, synthetic construct
  source 1..120: mol_type = other DNA
tgcataattcctgttatatgaggtaactaaaacactcaagctcatagaagcagcgaatacaatagtatagttaacaagagttgggggctgggggaaatggagagttgtcattaaaagggt

SEQ ID NO: 33061 - DNA, 120 bp, synthetic construct; identical to SEQ ID NO: 9206
  source 1..120: mol_type = other DNA

SEQ ID NO: 33062 - DNA, 120 bp, synthetic construct
  source 1..120: mol_type = other DNA
atggaaccacacaaaaagcctgaatagctaagacaatcttgagcaaaaagagcaaaactggagacattacaccacttgacttcaaactatattacaaagctatagtacttaaaacagcat

SEQ ID NO: 33063 - DNA, 120 bp, synthetic construct
  source 1..120: mol_type = other DNA
aaatacaaaaattagctgggcatggtggcaggtgcctgtaactccagctactcaggaggataaggtagagaactgcttgaacccggaaagcagaggttgcagtcagccaaaatcatgcca

SEQ ID NO: 33064 - DNA, 120 bp, synthetic construct
  source 1..120: mol_type = other DNA
acagagcccagaaatgaatctacttatttatgaccaagttattttcaataaagttaccaagaacacacaatgggaaaaggaaaatctcttcaattaacagtgctgagaaaactggatatt

SEQ ID NO: 33065 - DNA, 120 bp, synthetic construct; identical to SEQ ID NO: 9207
  source 1..120: mol_type = other DNA

SEQ ID NO: 33066 - DNA, 120 bp, synthetic construct
  source 1..120: mol_type = other DNA
aataaaaaataagatttaaaaataagcaaagaacatgaataaacatttctcaaaagaagacattgaagtggccaacaggcatatgaaaaaatgcttaacattggctgggtgtggtggctc

SEQ ID NO: 33067 - DNA, 120 bp, synthetic construct
  source 1..120: mol_type = other DNA
ggcatggtggcacacgcatgtagtcccagctacttgggaggctgaggcaggagaattacctgggcccaggaagcagaggttgcagtgagccaagattgcaccattgtactccagcctggg

SEQ ID NO: 33068 - DNA, 120 bp, synthetic construct
  source 1..120: mol_type = other DNA
ttgaaagggtaaaagataagtgttggtgaggatgtggagaaaagggaacacttggccgggtgtggtggctcacacctgtaatcctagcactttgggaggctgaggtgggcagattgcctg

SEQ ID NO: 33069 - DNA, 120 bp, synthetic construct
  source 1..120: mol_type = other DNA
ttgggagtctgaggcaggagaatagcttgaacctgggaggcagaagttgcagtgagccgagatcgtaccattgcactccagcctgggtgacagagtgagatgccatctgaaaaaaaaaaa

SEQ ID NO: 33070 - DNA, 120 bp, synthetic construct; identical to SEQ ID NO: 9208
  source 1..120: mol_type = other DNA

SEQ ID NO: 33071 - DNA, 120 bp, synthetic construct
  source 1..120: mol_type = other DNA
ccagcactttgggaggccgaggcgggcggatcacgaggtcaggaggtcaagaccatcctggctaacacggtgaaatcccgtctctactaaaaatacaaaaaattagccgggcatggtggc

SEQ ID NO: 33072 - DNA, 120 bp, synthetic construct
  source 1..120: mol_type = other DNA
gactccatctcaaaaaaaaaaacaaaaaataaacgctgttctgccatgtgtaacaacatgaatgaacctagaggacagtatgctaagtgaaataagctagacgtttctaagtgaaataag

SEQ ID NO: 33073 - DNA, 120 bp, synthetic construct
  source 1..120: mol_type = other DNA
aagagtataaagtagcagacagacaggaggaataaatgaaaagtttttaaggtgatagatatattaattagcttgagtcaactactccacattgtgtatatatatcataacattactttg

SEQ ID NO: 33074 - DNA, 120 bp, synthetic construct; identical to SEQ ID NO: 9209
  source 1..120: mol_type = other DNA

SEQ ID NO: 33075 - DNA, 120 bp, synthetic construct
  source 1..120: mol_type = other DNA
ctcactgcctcccacccaaatgcagacagttcatctgtattgtgaccagagaagcgggtgtaaaaagtagggctaccctgacatttattcaccaatatccatgaatacataaatatgtat

SEQ ID NO: 33076 - DNA, 120 bp, synthetic construct
  source 1..120: mol_type = other DNA
atatttttgtagatattagggcagataaaagatggtagatacagaaaagggaaatgggaaggaaacatttctgtaagtgcaagtgttggggagaaggagtaggagctggggggaagctga

SEQ ID NO: 33077 - DNA, 120 bp, synthetic construct; identical to SEQ ID NO: 3435
  source 1..120: mol_type = other DNA

SEQ ID NO: 33078 - DNA, 120 bp, synthetic construct
  source 1..120: mol_type = other DNA
taattgtatgaagtatcaggatccagttttgacaagactgtttgtggatataccagaagagcaggagagagctccagaagacccaaacatccggcgtccagaagatcttttgtaactggt

SEQ ID NO: 33079 - DNA, 120 bp, synthetic construct; identical to SEQ ID NO: 9210
  source 1..120: mol_type = other DNA

SEQ ID NO: 33080 - DNA, 120 bp, synthetic construct
  source 1..120: mol_type = other DNA
atattcaatcacaaaaggtgtgttcagtgcttcctttgtgcagaagattcttctaatgctggggatacaaagattcacatgaattagatcctacttttaagtagatcctacacagacaaa

SEQ ID NO: 33081 - DNA, 120 bp, synthetic construct
  source 1..120: mol_type = other DNA
atggagaccatcctagctaacatggtgaaacctatctctactaaaaatagagtggtggggcatgcctgtagtcccagctactcgggaggctgaggcaggagaatgtcgtgaacccgggag

SEQ ID NO: 33082 - DNA, 120 bp, synthetic construct
  source 1..120: mol_type = other DNA
aaaacaatcaaacacaatttggtgtcattaatttttaagagaaaaattttaaaacaaaatagttaagtataaacttatatttacaacaagaaggaagcatttgtatggatgtgagttcca

SEQ ID NO: 33083 - DNA, 120 bp, synthetic construct; identical to SEQ ID NO: 9211
  source 1..120: mol_type = other DNA

SEQ ID NO: 33084 - DNA, 120 bp, synthetic construct
  source 1..120: mol_type = other DNA
caggaatggatgatgggaataccatgctccttttagatttccagatgtgcattagaactggtatttgatgaataagggaagaacagaaggtcttttagaaggaaaatattttctttcctt

SEQ ID NO: 33085 - DNA, 120 bp, synthetic construct
  source 1..120: mol_type = other DNA
aaatagttgttgctgtttttcctgtaaccaatagggataaagactgaaaccacatcacttatctccagcagatacagctgaccagaaggtcttatataaagtcttggagaaaagttgcag

SEQ ID NO: 33086 - DNA, 120 bp, synthetic construct
  source 1..120: mol_type = other DNA
gtgcagtgaggattggaggagctgggcatttagactgatagagacataatgcctggttttccattcctgtgcctggatagtattaaaagcacaaataaaaagctatcctgctgctatctg

SEQ ID NO: 33087 - DNA, 120 bp, synthetic construct; identical to SEQ ID NO: 9212
  source 1..120: mol_type = other DNA

SEQ ID NO: 33088 - DNA, 120 bp, synthetic construct
  source 1..120: mol_type = other DNA
ttcgagaccagcctgaccaatatggtgaaaccccgtctctactaaaaatacaaaaattagctgggtgtggtggcgggcacctgtagtcccagctactcaggaggctgaggcagcagaatc

SEQ ID NO: 33089 - DNA, 120 bp, synthetic construct
  source 1..120: mol_type = other DNA
tttgtttattactgggatatgattaggaaaccaaatgtgttacatttttaacattgtatagtgacatagaacacacatatagtaagacacgtaaagattaaatgtacaacttaatcaatc

SEQ ID NO: 33090 - DNA, 120 bp, synthetic construct
  source 1..120: mol_type = other DNA
cctcctgtccacattactctcccttcccaccaagacaactcaccatcagactttcatagcaatcccttcattgcttctcaatacaccttcaaaatctaatatttattcctaaacatgctt

SEQ ID NO: 33091 - DNA, 120 bp, synthetic construct; identical to SEQ ID NO: 9213
  source 1..120: mol_type = other DNA

SEQ ID NO: 33092 - DNA, 120 bp, synthetic construct
  source 1..120: mol_type = other DNA
aaaaaatgttcatcagtggtcacaaatataatgtatctaaaatagggacagtaagaaattactgggcataactagaaggtgccatgggatgtgcctggaaagcttctcatgacgacctac

SEQ ID NO: 33093 - DNA, 120 bp, synthetic construct
  source 1..120: mol_type = other DNA
acagcagaatgcaccgtcaggtactttggaagtcacagaagggaaaagggcaggaaaatcggaaatatcggcacacatgttaatgaatgtttgttgtagttaaattgaagttgaaggaga

SEQ ID NO: 33094 - DNA, 120 bp, synthetic construct
  source 1..120: mol_type = other DNA
gttcttgtcaaactttttggtcactaaactgttcctttctatatgttaaggcaggtttcacctcctttctgactttagaataagttggtagagggcttcacagagtgaaaaatacccatc

SEQ ID NO: 33095 - DNA, 120 bp, synthetic construct
  source 1..120: mol_type = other DNA
taccatttcaaagagtgtggtaggagctaaggttccaggatgaggatctcatgaagatcaatatctatcaggaaaaaaagacacatatacaacatacactccatacaccagaaactttgt

SEQ ID NO: 33096 - DNA, 120 bp, synthetic construct; identical to SEQ ID NO: 9214
  source 1..120: mol_type = other DNA

SEQ ID NO: 33097 - DNA, 120 bp, synthetic construct
  source 1..120: mol_type = other DNA
tgaactgagatcacgccactgccctccagcctgggcaacagagtgaggctatctctgaaaaaaaaaaaaaaaaaaaaaaaaaaaaaaagaaagagagagagaaaaacagaaaaaaagaga

SEQ ID NO: 33098 - DNA, 120 bp, synthetic construct
  source 1..120: mol_type = other DNA
aaaatttgaaaatacagttcatttgcagaagtaagacttgaagcagagaagaggaggaaatgatgccgaggaatagcagtgggaaaggaaccatcatgaacagcatgagtgagagcagta

SEQ ID NO: 33099 - DNA, 120 bp, synthetic construct
  source 1..120: mol_type = other DNA
tttatgagaggccttagaagctgagcagtctcttcttagaaaggtgatgaactgaaatgtgcaaatgtaaaacaccaaaatcatctattggtaaggcaagtgtcatataggtagaggagg

SEQ ID NO: 33100 - DNA, 120 bp, synthetic construct; identical to SEQ ID NO: 9215
  source 1..120: mol_type = other DNA

SEQ ID NO: 33101 - DNA, 120 bp, synthetic construct
  source 1..120: mol_type = other DNA
tagtctggtttcgagaccctgtgaaaaggtggagtaggggcaaattattagctatgtgatgtgagaaagatataatatctgaaatttgtagaaagaaacaggtgatagctgtgtggattg

SEQ ID NO: 33102 - DNA, 120 bp, synthetic construct
  source 1..120: mol_type = other DNA
gaaaattgctgtaatgctggatctcatcactagtagaaaactaaaatctgtggtagggacaaaattgaaaggaaaggagaaagagattgattaagggtcatctccccacctgctggttat

SEQ ID NO: 33103 - DNA, 120 bp, synthetic construct
  source 1..120: mol_type = other DNA
cttttggaggtgatggtagaaacatgggaattatatcctgacttgaaaaagataacgtttattcctttggggtaacattaaaaagttaatgctgctgcaattgtgcaaatcattcttcaa

SEQ ID NO: 33104 - DNA, 120 bp, synthetic construct; identical to SEQ ID NO: 9216
  source 1..120: mol_type = other DNA

SEQ ID NO: 33105 - DNA, 120 bp, synthetic construct
  source 1..120: mol_type = other DNA
ctgggtgtggtggcacatgcctgtagtcccagctacttgggaggctaaggcaggagaattgcttgaacccgggaggcagatgttgcagtgggctgagatctcgccactgcactccagcct

SEQ ID NO: 33106 - DNA, 120 bp, synthetic construct
  source 1..120: mol_type = other DNA
taaaaagggcaagttttggttaattaagacagtaggaggcgtagagaaaatataatgaaacgatatgtaagggaaacgaaggatgaaagatgcaggcagggagaggagtactgtctgatg

SEQ ID NO: 33107 - DNA, 120 bp, synthetic construct
  source 1..120: mol_type = other DNA
cccagtgtagttacaagtctaggaagtaatagttagaatgaagagtttgtatttactgagcactaatattctcataatcatgctaggaaatatcacttgataaagatagaaagatgagtc

SEQ ID NO: 33108 - DNA, 120 bp, synthetic construct; identical to SEQ ID NO: 9217
  source 1..120: mol_type = other DNA

SEQ ID NO: 33109 - DNA, 120 bp, synthetic construct
  source 1..120: mol_type = other DNA
accccatgtggagagacaagataccatattttgtagttgtgaagcagagtaaagactgagactcttagtacttagtattggtgggggagaagaggttacctgatatttttcatgcctctg

SEQ ID NO: 33110 - DNA, 120 bp, synthetic construct
  source 1..120: mol_type = other DNA
tgtggtgaacgagatggaaatgatgaagaagcccatgatcccacctgctgattgtcataggacaatttgagggaaagtcacattatcatgtgctgattattttgctctagcaaagtagta

SEQ ID NO: 33111 - DNA, 120 bp, synthetic construct
  source 1..120: mol_type = other DNA
aattttaagagaccactaagaattcgtgattttaaagagtgattttaagaaattgtagtgatttaagagataattatgaggattaaaatcccgttctgcctaaattcaaagcccaggaat

SEQ ID NO: 33112 - DNA, 120 bp, synthetic construct; identical to SEQ ID NO: 9218
  source 1..120: mol_type = other DNA

SEQ ID NO: 33113 - DNA, 120 bp, synthetic construct
  source 1..120: mol_type = other DNA
catttttatttcactgtcattagtcatttcagtcactgaaaatacagttcacactgtaaaccaaaaataaaatttaagcccttcaaccaactaaatgggctcttctgcttggccaaggac

SEQ ID NO: 33114 - DNA, 120 bp, synthetic construct
  source 1..120: mol_type = other DNA
caaagaccttgagactgacaaaacagactctttgtagcaataagacaccaacgcaacagatagcatgccctgaaagaaatcaaagtattttatcacaaaatataatttgacatattttga

SEQ ID NO: 33115 - DNA, 120 bp, synthetic construct
  source 1..120: mol_type = other DNA
ctttctttctttcttttttgagacagagtctcactctgtcgcccaggctggagtgcagtggcgcaatctcggctcactgcaacctctgccacctcctgggctctaaatgattctcctgcc

SEQ ID NO: 33116 - DNA, 120 bp, synthetic construct; identical to SEQ ID NO: 9219
  source 1..120: mol_type = other DNA

SEQ ID NO: 33117 - DNA, 120 bp, synthetic construct
  source 1..120: mol_type = other DNA
ccaaccagaaaatctttgaatccatctgtgacctggaagcccctacttcaagttgtctcctttctggaccaaaccaatgtacatcttatatgtattgattgatgtcttatgtctccctaa

SEQ ID NO: 33118 - DNA, 120 bp, synthetic construct
  source 1..120: mol_type = other DNA
acagagtttgactctttttgtcgacaacttaatgcgggggttagggacaccaatgcccaacacagtcaaaaatcttcatataacttttgactccctaaaaactaccaatagcctactgtt

SEQ ID NO: 33119 - DNA, 120 bp, synthetic construct
  source 1..120: mol_type = other DNA
taaagaaaagaaaatacatttacagtactgtactgtgtttatcgatactgtaagtttacatgacctggtttacaagacaaaccatgtgtctaaaatcatgaagaaccgcagctgcagacc

SEQ ID NO: 33120 - DNA, 120 bp, synthetic construct; identical to SEQ ID NO: 9220
  source 1..120: mol_type = other DNA

SEQ ID NO: 33121 - DNA, 120 bp, synthetic construct
  source 1..120: mol_type = other DNA
tgcagttgtgactcaatactgtatctttatgtttgtttacatgtctctccactgtgaagggcattatgtatggtctataagtgcataacttttcataagttttaattttttataacagat

SEQ ID NO: 33122 - DNA, 120 bp, synthetic construct
  source 1..120: mol_type = other DNA
tgtgggtttttgcaaactgtcatatatctcaaaaaaatttcaaatatatttattttaaaaaatcaaaccataagaggacccatgcaattcaaatctgtgttgttcaaaagtaaactgtaa

SEQ ID NO: 33123 - DNA, 120 bp, synthetic construct
  source 1..120: mol_type = other DNA
acagtcctttgtggattctttttcaagtactccttagaggcaagataaaaacattatttgttgaaaccattttgggggtaattatgcttagtgaaattcaattagccaatacattaatag

SEQ ID NO: 33124 - DNA, 120 bp, synthetic construct; identical to SEQ ID NO: 9221
  source 1..120: mol_type = other DNA

SEQ ID NO: 33125 - DNA, 120 bp, synthetic construct
  source 1..120: mol_type = other DNA
gggtgaaaaagttgaaactccttgtcttttgtatgaaccagtagttggaaaagtgtgtcacacctcatgcaggaagttatagacctaagtagggtttattgaagcgtcctataaatctcc

SEQ ID NO: 33126 - DNA, 120 bp, synthetic construct
  source 1..120: mol_type = other DNA
tggtccaaaaggaaacctccatatacatgcaatgtaagtagggattggtcaatactttctcggtgaattctcaagtacaagagaatattttaactgcaacactgcctcattggtgtcaat

SEQ ID NO: 33127 - DNA, 120 bp, synthetic construct
  source 1..120: mol_type = other DNA
acactacttttcttataatactagtaacacctgcccaataaggaaagattggaagtctacaaaattaatagagacaaattaatctgtcatttcttcattgtgagataatcactatgggat

SEQ ID NO: 33128 - DNA, 120 bp, synthetic construct; identical to SEQ ID NO: 9222
  source 1..120: mol_type = other DNA

SEQ ID NO: 33129 - DNA, 120 bp, synthetic construct
  source 1..120: mol_type = other DNA
ttgctgagactatgtcccagacaagtgcagttgagaagtgagaggacccttcttctgcccaactcccagttgtggaatggagaatctgccttgggtgtggtatgctaagactactggggc

SEQ ID NO: 33130 - DNA, 120 bp, synthetic construct
  source 1..120: mol_type = other DNA
tcactcagagagaagcttgccacagttacacccagctccagagccctgacttagagagtttgcctgggaggaaaggcaatatattaggaatatattttaggaacatagaatatattttat

SEQ ID NO: 33131 - DNA, 120 bp, synthetic construct
  source 1..120: mol_type = other DNA
gtttaaacctaagggcactctcaattatagtagaggttgtggtgaaaagcagttgggagatttgtgcatctaatgcaggtacagcttagactgtaggctgcttagtttacagaagagaac

SEQ ID NO: 33132 - DNA, 120 bp, synthetic construct; identical to SEQ ID NO: 9223
  source 1..120: mol_type = other DNA

SEQ ID NO: 33133 - DNA, 120 bp, synthetic construct
  source 1..120: mol_type = other DNA
ataagaataacaagcacaatgtgggggtagtacccagagtttctataatatagttcctaaaatgttcatttttcaacaaaaatcatgagctacgcaaagaaacaaaaaagtgtgaccaat

SEQ ID NO: 33134 - DNA, 120 bp, synthetic construct
  source 1..120: mol_type = other DNA
gagaaacagagacaaaaagatatgtatgatgattgactcgctcaattatggatgccaagaagtgccacaatatgccatctgcaagtaggagacccaggaaagcaggtggtgtaattcggt

SEQ ID NO: 33135 - DNA, 120 bp, synthetic construct
  source 1..120: mol_type = other DNA
ggtgtccaggggtagaagtagatgtcccagctcaaagagaaagagaattcacccttcctccacctttttgttctatttgggtcctcaatggactgaatgatgcccacccatattagtgag

SEQ ID NO: 33136 - DNA, 120 bp, synthetic construct; identical to SEQ ID NO: 9224
  source 1..120: mol_type = other DNA

SEQ ID NO: 33137 - DNA, 120 bp, synthetic construct
  source 1..120: mol_type = other DNA
gaataacactgaagctatatacttacaatattcctaacacccggatttgtatatgtgttttcttccccaagaaagctataaacagcgaaaattttgctgtaagtttccctgtgtctttct

SEQ ID NO: 33138 - DNA, 120 bp, synthetic construct
  source 1..120: mol_type = other DNA
tatctaacttcccaattccagttccttgtgaacatactttataaagtcctggtaagatcctgtctcttttgctatgcctctacaaggtcataaagtaaataaaaactaggttgcaattcc

SEQ ID NO: 33139 - DNA, 120 bp, synthetic construct
  source 1..120: mol_type = other DNA
aaaccagcagtggctacccgttcgagaccccttccacactgtggaagctttgtactttcactctgctcaataaagcctacagctttttctctctattggtccgtgtctctatcactcgcg

SEQ ID NO: 33140 - DNA, 120 bp, synthetic construct; identical to SEQ ID NO: 9225
  source 1..120: mol_type = other DNA

SEQ ID NO: 33141 - DNA, 120 bp, synthetic construct
  source 1..120: mol_type = other DNA
taactcgtcatttaacattaggtatatctccaaatgctatccctcccccctcaccccaccccacaacagtcccctgtgtgtgatgttccccttcctgtgtccatgtgttctcattgttca

SEQ ID NO: 33142 - DNA, 120 bp, synthetic construct
  source 1..120: mol_type = other DNA
ctgttttcatacagtggaagtggtgaataagctccctcagcttcttttacaagagtactaattccattaatgaggactctaccctcataacctaatcacctcccaaagaccccacctctt

SEQ ID NO: 33143 - DNA, 120 bp, synthetic construct
  source 1..120: mol_type = other DNA
gtacaataattgaaataaaaattcactagagaggcttaaccataggtttgtcctagcagaagaaagaaatgtagaataaagtttaaactatatttcaaaaaaagattttggtaggtctat

SEQ ID NO: 33144 - DNA, 120 bp, synthetic construct; identical to SEQ ID NO: 9226
  source 1..120: mol_type = other DNA

SEQ ID NO: 33145 - DNA, 120 bp, synthetic construct
  source 1..120: mol_type = other DNA
aactctacactgaccctacattctctagtgttttcatattacacttacctccaacacatttatttgttcctggtctcgctcttcttcagtcctaagttacaactaacaaatgaattatat

SEQ ID NO: 33146 - DNA, 120 bp, synthetic construct
  source 1..120: mol_type = other DNA
ctgtctttactaaacatacaaaaaattagccaggcatggtggcgggcgcctgtagtcccagctactcgggaggctgaggcaggataatggcatgaacctgggaggtggagcttgcagtga

SEQ ID NO: 33147 - DNA, 120 bp, synthetic construct
  source 1..120: mol_type = other DNA
ctttttcaggtacaaatttctagagattaattcaaacacaaggaattgcatctggaaatttagaagctggaattctctaatgatagagactgcctcttaattcttgtgtggccaagacta

SEQ ID NO: 33148 - DNA, 120 bp, synthetic construct
  source 1..120: mol_type = other DNA
ttatcacgtaatataaatggttgcaaaaggagggtaccagggctttggaattaggcagaacttagtttaaattttactctgctgtatcctggatgtctgactttgggcagttttaatggt

SEQ ID NO: 33149 - DNA, 120 bp, synthetic construct; identical to SEQ ID NO: 9227
  source 1..120: mol_type = other DNA

SEQ ID NO: 33150 - DNA, 120 bp, synthetic construct
  source 1..120: mol_type = other DNA
ccaggagttcaagaccagcctggccaacatagtgaaaccttgtctctactaaaattacaaaaattagccgggcatgatggtgtgagcctgtaatcccagctactcaggtgggtgagacac

SEQ ID NO: 33151 - DNA, 120 bp, synthetic construct
  source 1..120: mol_type = other DNA
ctatgcaaatggaaagatatactatattcataaataaaatatccaaaatataaacacaatttttctctgagttaatctatagaaccaatgcagttctactcaaaatcccaacataatatt

SEQ ID NO: 33152 - DNA, 120 bp, synthetic construct
  source 1..120: mol_type = other DNA
aacaggttggtaagattttgcccggctagtcctcaatctatcatcagacttaagtataaataggagagttgtattgatgcatggataaacctatagacaaacgaacaaaaacagtgggcc

SEQ ID NO: 33153 - DNA, 120 bp, synthetic construct; identical to SEQ ID NO: 9228
  source 1..120: mol_type = other DNA

SEQ ID NO: 33154 - DNA, 120 bp, synthetic construct
  source 1..120: mol_type = other DNA
cattatggaaaactgtatggaggtttctcaaaaaactaaaaatagagctatcataccatctagcaatcccattactgaatatttagccaaaggaaaagtaatttttaaatttttaaaata

SEQ ID NO: 33155 - DNA, 120 bp, synthetic construct
  source 1..120: mol_type = other DNA
tttttaataaatatactttaatacatattttaaaaaacttaatcaaaatacactttaaaaacatgacacaaattggaagaagttatttttaatacatataatataggaaaattaagttgt

SEQ ID NO: 33156 - DNA, 120 bp, synthetic construct
  source 1..120: mol_type = other DNA
tcagtgccactccagggatgacagctagtttgtgaaaaggaagcatagcaggtcaatacataatgtgaaaagatttccacccttattagtaatcagataaacacatttcaaatcactagg

SEQ ID NO: 33157 - DNA, 120 bp, synthetic construct
  source 1..120: mol_type = other DNA
gttatggtaaagttgtaaacacaaatatagtgcatagaacttctagtcttagacactggttctaaagaaacattaggtatgtggacaaggaagcatgcacagggatgttaacagaggtgt

SEQ ID NO: 33158 - DNA, 120 bp, synthetic construct; identical to SEQ ID NO: 9229
  source 1..120: mol_type = other DNA

SEQ ID NO: 33159 - DNA, 120 bp, synthetic construct
  source 1..120: mol_type = other DNA
gataactagcagataaactcatccattgcaagggtggtcttgatgcagggccagcaagcctcaaaactggggcttcacccgagagtgttcttggcttcactcgggaaagattccaaggat

SEQ ID NO: 33160 - DNA, 120 bp, synthetic construct
  source 1..120: mol_type = other DNA
actcacttttaattatatgcaaattaagaggtggactatgcagaaatttctagaaatacggtagaaatttctgcataatccaccccttaatttatagatggtaactccaattaccacttc

SEQ ID NO: 33161 - DNA, 120 bp, synthetic construct
  source 1..120: mol_type = other DNA
ccatccctgttttagttaattctcaatttgatctgatgtccgagcctcacctactacttcagtcttatgacccccagactccccagttgataagaagatgcatgagtaaaggaggaaatt

SEQ ID NO: 33162 - DNA, 120 bp, synthetic construct; identical to SEQ ID NO: 9230
  source 1..120: mol_type = other DNA

SEQ ID NO: 33163 - DNA, 120 bp, synthetic construct
  source 1..120: mol_type = other DNA
atttgccaccctggctcaaaatatcagccatcacatttagtaaattctaacatacaaagcaaattagcactgatttatcagatttaccattgggtggggtgaggaggaggaggatgctgg

SEQ ID NO: 33164 - DNA, 120 bp, synthetic construct
  source 1..120: mol_type = other DNA
tcattcacagtcagctggattccaatctctgctcaagtgtgagcaatgtagatccagccccctggttaatgtattcatcactgttcaagcccagtctctttcagatgttgagacagtggc

SEQ ID NO: 33165 - DNA, 120 bp, synthetic construct
  source 1..120: mol_type = other DNA
gggtttcccaactacttttttttcttcaggggaaacctccacaatgtagtttctaatatgttgaattcatactccagaaagtgtcctgtagaataatgtcttactgaaaacggccatcac

SEQ ID NO: 33166 - DNA, 120 bp, synthetic construct; identical to SEQ ID NO: 9231
  source 1..120: mol_type = other DNA

SEQ ID NO: 33167 - DNA, 120 bp, synthetic construct
  source 1..120: mol_type = other DNA
gtcaagaaggcatacccaaggttggtggcagggggagcttcattagcattaggaataatagaaaatatcaaagaataagttttgtaagaaatacatagactcaacagaaagtaaaaaatg

SEQ ID NO: 33168 - DNA, 120 bp, synthetic construct
  source 1..120: mol_type = other DNA
gaaagtctaggataagtatactgtcctgtattgttgattttttaaagagtagtagagtgtattatatagcatattatataaagacatgggcctgagttaggcagtctttttgtttgttga

SEQ ID NO: 33169 - DNA, 120 bp, synthetic construct
  source 1..120: mol_type = other DNA
caaaggagaccttgtacccattaaacagtcactccccattcccacttcctcctcagcaaccacaatctgattttagacaggccttgttttgcatctatggtagtgcaatttctacatcaa

SEQ ID NO: 33170 - DNA, 120 bp, synthetic construct; identical to SEQ ID NO: 9232
  source 1..120: mol_type = other DNA

SEQ ID NO: 33171 - DNA, 120 bp, synthetic construct
  source 1..120: mol_type = other DNA
ttattgctctcttaaaatgttttctgtttcttcatattattttacatataacagggactaaaaaatggtcatgagttcaaagaaatcagatgaaatttggtaggaatttggggctaatgt

SEQ ID NO: 33172 - DNA, 120 bp, synthetic construct
  source 1..120: mol_type = other DNA
tgagaggaaacttcatgtattttgtttgagggatagatgccagccacctatgtggcagaggtcagagtggaagagaggtgcggttaactattccccatataatctttcaattaatctctt

SEQ ID NO: 33173 - DNA, 120 bp, synthetic construct
  source 1..120: mol_type = other DNA
atgctggtgcgctgcacccactaactcgtaaaaaatgtttaaataaatactatttcaagtgtgtggtgatgtttttatagccattaaagataagattttatgaaactgtttagtgatgta

SEQ ID NO: 33174 - DNA, 120 bp, synthetic construct; identical to SEQ ID NO: 9233
  source 1..120: mol_type = other DNA

SEQ ID NO: 33175 - DNA, 120 bp, synthetic construct
  source 1..120: mol_type = other DNA
accacaaagtttctcttctcaattgcgctctcaggtctacttttcaatccttttacataactttactcatctctacctctcccttccctccaaagagttcttttttatccgctgtcctca

SEQ ID NO: 33176 - DNA, 120 bp, synthetic construct
  source 1..120: mol_type = other DNA
ttaaacttgaaacgtatgaaccctgtggtactcagttgagcagagatagaagagcactacgcaggttcacactcttttccctgaagaaggaaaaactcagaaaaaaactccagtctgtag

SEQ ID NO: 33177 - DNA, 120 bp, synthetic construct
  source 1..120: mol_type = other DNA
actcttcggtgccatgtagcctggtctaagctcagggacatttctatggtttttgacaaagctgcaaaattttattagccataacatgtttgaacctgtaagatttctaagtaagtctga

SEQ ID NO: 33178 - DNA, 120 bp, synthetic construct; identical to SEQ ID NO: 9234
  source 1..120: mol_type = other DNA

SEQ ID NO: 33179 - DNA, 120 bp, synthetic construct
  source 1..120: mol_type = other DNA
cactgcaagctctgcctcctgggttcacgtcattctcctgcctcaacctcccaagtagctgggactacaggcgcccaccaccatgcctggctaattttttgtatttttagtagagatggg

SEQ ID NO: 33180 - DNA, 120 bp, synthetic construct
  source 1..120: mol_type = other DNA
cattttatagaagagactgagcatccacagattttgatatcagctggggtcctggaaccaatctcctgggggtgcagagccacagtcaagtatgagaaacaaagagaagaggaagggccc

SEQ ID NO: 33181 - DNA, 120 bp, synthetic construct
  source 1..120: mol_type = other DNA
agaaacacctctagatgaagacagttggatgtgtaagtggccagatccatgtgcaattacttctttagaagaattaagttgtggattgacaaatggtcccttgcctgtgataggagttgt

SEQ ID NO: 33182 - DNA, 120 bp, synthetic construct; identical to SEQ ID NO: 9235
  source 1..120: mol_type = other DNA

SEQ ID NO: 33183 - DNA, 120 bp, synthetic construct
  source 1..120: mol_type = other DNA
ttattatcatcatcatgactgggaggtaacatggcaatttgtcgacattttcttaccagcctggctgataaacatccagtatatctgaagagaaagtttcagagtcaaaagcaaaaagag

SEQ ID NO: 33184 - DNA, 120 bp, synthetic construct
  source 1..120: mol_type = other DNA
ggaaacaaccaagtccattccttcactttaattctgatttttttcccacaatgtacacatcccaggatttgtggctgactttaaaactacaaacatcaggttcataccagtaagccaaac

SEQ ID NO: 33185 - DNA, 120 bp, synthetic construct
  source 1..120: mol_type = other DNA
accttttcacaagtgcaaacacattaagatgctgctatttacagttactctttccctgtagacctgtgggcatgagccatccttggtttaagtcacttgatagtgactcaaagcacaaag

SEQ ID NO: 33186 - DNA, 120 bp, synthetic construct
  source 1..120: mol_type = other DNA
gctcactgcaacctccacctcccaggttcaagcaattcttctgcttcagcctcccaagtagctaggattacaggcatgtgccactacactcagctcattttgtacttttagtagagatgg

SEQ ID NO: 33187 - DNA, 120 bp, synthetic construct; identical to SEQ ID NO: 9236
  source 1..120: mol_type = other DNA

SEQ ID NO: 33188 - DNA, 120 bp, synthetic construct
  source 1..120: mol_type = other DNA
attaaatattttcctcttcagcaaatcagaacccggtgggaagcagcatcatctgtctctggcagactaagccatgaagactgtaagaaaaaatatttagtgatggaggaaggaaaaaag

SEQ ID NO: 33189 - DNA, 120 bp, synthetic construct
  source 1..120: mol_type = other DNA
ttctttgagaccacaagagatgagtaagtggagaagaacatggtgttcacagagagagaaatatagtagatagaattaatacagtttcaaattatgtactttcctgctgttgggtggagt

SEQ ID NO: 33190 - DNA, 120 bp, synthetic construct
  source 1..120: mol_type = other DNA
tttctatgaaatattaagaaatgagtataaaatctccaatgataattttggatttttctatttctcctttcttttatgtcaactctgtctcctgtattttgaagctctgtttttaggtgc

SEQ ID NO: 33191 - DNA, 120 bp, synthetic construct
  source 1..120: mol_type = other DNA
atttctcgctccaatttctgctttgtctagtattgacataatcattctgactttcttttgatttcttttgcatggtatatatttcccttctttttacttttaatgaaggtatgtctttat

SEQ ID NO: 33192 - DNA, 120 bp, synthetic construct; identical to SEQ ID NO: 9237
  source 1..120: mol_type = other DNA

SEQ ID NO: 33193 - DNA, 120 bp, synthetic construct
  source 1..120: mol_type = other DNA
attccataaacacacaatacattgctactatttttattttagagagtctgttaccttataaagcaatgattcgtaaatgggggcaattttcccctcaagtgacatttgacaatgtctgga

SEQ ID NO: 33194 - DNA, 120 bp, synthetic construct
  source 1..120: mol_type = other DNA
ctctggctcaaaatattaatagttctcaggttgagaaacctcattttagagcattttttaaacttttgagttcaagggtacatgttcaggtctgttagataaacatgtaaatatgtgtca

SEQ ID NO: 33195 - DNA, 120 bp, synthetic construct
  source 1..120: mol_type = other DNA
ggttcccctctatgtgtccatgtatgtgttattataatttcgctcccactcataagtgagaacatgcggtatttggttttctgttcctgtattagtctgctaaggatagtggtctctagt

SEQ ID NO: 33196 - DNA, 120 bp, synthetic construct; identical to SEQ ID NO: 9238
  source 1..120: mol_type = other DNA

SEQ ID NO: 33197 - DNA, 120 bp, synthetic construct
  source 1..120: mol_type = other DNA
ccaaattttctttatccagtctatcattgatgggtatttaggttgattccatgtctttgctattgtgaatagtgctacaatgagcatacgtgtacacgtatctttataatagaacaattt

SEQ ID NO: 33198 - DNA, 120 bp, synthetic construct
  source 1..120: mol_type = other DNA
ccaacagtgtataaacgttcctttttctccacaacctcatcagcatctgttagtttttgactttttaataatagccattctgactggtgtgggatggtcattgtggtcttgatttgcatt

SEQ ID NO: 33199 - DNA, 120 bp, synthetic construct
  source 1..120: mol_type = other DNA
ttcttgtacatttgtttaagtttcttatagatgctggatatcagacctttgttggatgcatagtttacaaaacttttctcccattctgtatgttgtctgtccactctgctgatagtttct

SEQ ID NO: 33200 - DNA, 120 bp, synthetic construct
  source 1..120: mol_type = other DNA
ttttatagttttgcattttacatttaagtctttaatccatcttaagttaatttttgtatatggtgtaaggaagagttccagtttcaaccttctgcatatggctagccagttctcccagca

SEQ ID NO: 33201 - DNA, 120 bp, synthetic construct; identical to SEQ ID NO: 9239
  source 1..120: mol_type = other DNA

SEQ ID NO: 33202 - DNA, 120 bp, synthetic construct
  source 1..120: mol_type = other DNA
gtcatttgtttaatgatgaatgctaaggaaaggtatctgtatagccgggtggggtggtgtgcccctgtagtcccagctacttggaagacggaggtggggcctgggagtttgaggccagcc

SEQ ID NO: 33203 - DNA, 120 bp, synthetic construct
  source 1..120: mol_type = other DNA
gctggacatgaggaatatcagtctccagacagtcagctctgtaaactgattcagatgattaagaatttcagtccaagtcaacaagtatttattgattacataccatagtctctgcaaagt

SEQ ID NO: 33204 - DNA, 120 bp, synthetic construct
  source 1..120: mol_type = other DNA
tcctcatattattattattattattattattattattattattttgagacgaagtctcactctgtcacccaggctggagtgcagtggcacgatttcggctcactgcaagctctgtctccc

SEQ ID NO: 33205 - DNA, 120 bp, synthetic construct
  source 1..120: mol_type = other DNA
ttttgtatttttagtagagatggggtttcactgtgttagcgaggatggtcttgatctcctgacctcgtgatccgcctgcttctgcctcccaaagtgctgggattacagtcgtgagccacc

SEQ ID NO: 33206 - DNA, 120 bp, synthetic construct; identical to SEQ ID NO: 9240
  source 1..120: mol_type = other DNA

SEQ ID NO: 33207 - DNA, 120 bp, synthetic construct
  source 1..120: mol_type = other DNA
cttgagaaagcttcactgtgtttttagtgcagattagtaaagataagatcttgactggtaggtgagtgggtggaatttatttcaaatatgggggctctccaatccttgcacaccaaattc

SEQ ID NO: 33208 - DNA, 120 bp, synthetic construct; identical to SEQ ID NO: 3469
  source 1..120: mol_type = other DNA

SEQ ID NO: 33209 - DNA, 120 bp, synthetic construct
  source 1..120: mol_type = other DNA
agagatgtgagggagcccacctgagaaaagctgaacctgcccagtacataaaaaccactcaggtgggttgagcacaatttcctgtcttacagaatcatgaggagacactaaacaattatt

SEQ ID NO: 33210 - DNA, 120 bp, synthetic construct; identical to SEQ ID NO: 9241
  source 1..120: mol_type = other DNA

SEQ ID NO: 33211 - DNA, 120 bp, synthetic construct
  source 1..120: mol_type = other DNA
accatattaactatcatctaataattttccttctgttttatagaaaataaccttaaggctcaggagttttgagtagcttgcccaaggtgatgcagctgataaaatgaaaagcagcatgga

SEQ ID NO: 33212 - DNA, 120 bp, synthetic construct
  source 1..120: mol_type = other DNA
aactactgcaagacagaagtcttggccttcagagtaaaacttcaccagtgcataaagtcagactaaagcaatttgaaaatatacagtcttagagaatgttataactgtttattagaacta

SEQ ID NO: 33213 - DNA, 120 bp, synthetic construct
  source 1..120: mol_type = other DNA
gaatcaatggcatgtcaataagtgctttctgagaaaattgttggacaaagtactattttgaactccaaattttattcccactattaatttatgaagagggccttttctctttctactaga

SEQ ID NO: 33214 - DNA, 120 bp, synthetic construct
  source 1..120: mol_type = other DNA
aaattatgacctgaagacataagcaactggaacaacgttcactgtgttatggccggatgaagcaggaagaggaaagagacaaaactaggttaaagatagaaatggcatctattgggccag

SEQ ID NO: 33215 - DNA, 120 bp, synthetic construct; identical to SEQ ID NO: 9242
  source 1..120: mol_type = other DNA

SEQ ID NO: 33216 - DNA, 120 bp, synthetic construct
  source 1..120: mol_type = other DNA
tggactttcccttcaccccacaggatgtgaggtctgaaacggcaccctcaacttcccatccaagatacaattctaatcctacatttaacaccctaacttcttaactggagttgagttatt

SEQ ID NO: 33217 - DNA, 120 bp, synthetic construct
  source 1..120: mol_type = other DNA
agataaaaacatgttatttgctacacagccagaagggtattgagtggcaaagggagcacatctcaaaggggacctcaaaaaccctcttcatccacaatggcaggagctagaaagaataaa

SEQ ID NO: 33218 - DNA, 120 bp, synthetic construct
  source 1..120: mol_type = other DNA
acatctgtgctgcttaccagctgcgtgaccctgggaaaagtccttcaactctctgggctttaatgtcctcctcggaaaatgagaacgatattaaaatatgacaagtatatgtaaagagtc

SEQ ID NO: 33219 - DNA, 120 bp, synthetic construct; identical to SEQ ID NO: 9243
  source 1..120: mol_type = other DNA

SEQ ID NO: 33220 - DNA, 120 bp, synthetic construct
  source 1..120: mol_type = other DNA
aactctcagcacaggctgacacactgtccagagtggaatttctgtttcctcagagaaacctcagctctgctcttaaggcttttcaacagcttagattaagctcacccagttttcctagga

SEQ ID NO: 33221 - DNA, 120 bp, synthetic construct
  source 1..120: mol_type = other DNA
aaattgaccattaatcagttgtaaggtttgtgcttgttttaggtgattttggggaggatttaagaaagagggattttgcttttaattggattctgacagaaagtggagggttggggtggc

SEQ ID NO: 33222 - DNA, 120 bp, synthetic construct
  source 1..120: mol_type = other DNA
tttttgtggtttggacaatatttatgttttgtctgggttcagacatgatgactgagcattcaggtgttctgtctcaatccactgtgctcacagagtacctgtctgattctgatgttctat

SEQ ID NO: 33223 - DNA, 120 bp, synthetic construct; identical to SEQ ID NO: 9244
  source 1..120: mol_type = other DNA

SEQ ID NO: 33224 - DNA, 120 bp, synthetic construct
  source 1..120: mol_type = other DNA
ctctagtcccttgcaaatatttggaattttaatggggtaggataacaagttttaaaagatctgatagtttaagaaaagaaaaccatttttctaaggcagtgcaattcttattctaccctc

SEQ ID NO: 33225 - DNA, 120 bp, synthetic construct
  source 1..120: mol_type = other DNA
acagaacataaggattactcaatgcaaagaaaaactgtataaagtctcatatagttactatagacagccccatctgacattataacccctttttattgccctggccaaaaccacctggag

SEQ ID NO: 33226 - DNA, 120 bp, synthetic construct
  source 1..120: mol_type = other DNA
agaattccatacgcactgtggaagctaaaagaaaaacagctaacccacatacagaagccagagaaagggcaggggatggggactgccagggagggaaatcaactcagggaaaaattcctg

SEQ ID NO: 33227 - DNA, 120 bp, synthetic construct
  source 1..120: mol_type = other DNA
tactttgggaggctgagacgggcagatcatgaggtcaggagttcaagaccagcgtggccaacatagtgaaaccccgtctctactaaaaatacaaaaattagctgggcgtggtggcaggtg

SEQ ID NO: 33228 - DNA, 120 bp, synthetic construct; identical to SEQ ID NO: 9245
  source 1..120: mol_type = other DNA

SEQ ID NO: 33229 - DNA, 120 bp, synthetic construct
  source 1..120: mol_type = other DNA
tacaaactcttcaactagtaactgagatgtcaccataggggatttttctaattggccaaaacctgacttggcagggtttggtttgggtgtcttcagatttccttgtcttgaggtcctcac

SEQ ID NO: 33230 - DNA, 120 bp, synthetic construct
  source 1..120: mol_type = other DNA
gaagacattgtgggtgagtgcatgagtgagggatgttctctggagctgaaaaacagtaaattgaaggaaaagagataaagcgatttgcagagaaactgtagagatttcctaagggccctt

SEQ ID NO: 33231 - DNA, 120 bp, synthetic construct
  source 1..120: mol_type = other DNA
gctgttgtgttcactaaggacgctattctgtttatattatattcagtgactacggcctggaggtctctatgtcgttccatcatgattgcctcaaaaattagtgaggtttccatcagtgga

SEQ ID NO: 33232 - DNA, 120 bp, synthetic construct
  source 1..120: mol_type = other DNA
aatttccctgaacaacttttgaagcttttcggatgtctccggtggtagatcttggggtcattccatcaattatgtactctatagatatttaaaatgttgcccgtttctttctctcagact

SEQ ID NO: 33233 - DNA, 120 bp, synthetic construct; identical to SEQ ID NO: 9246
  source 1..120: mol_type = other DNA

SEQ ID NO: 33234 - DNA, 120 bp, synthetic construct
  source 1..120: mol_type = other DNA
attatcaacccaaattacctgttcttcacctcatctaataaagtcctataaaaagaaaagtgggccagacaaggtggctcatgcctgtaatcccagcactttgggaggccgaggcaggag

SEQ ID NO: 33235 - DNA, 120 bp, synthetic construct
  source 1..120: mol_type = other DNA
tcagaaggctgccgtgggaggaccacttgagtccatgaggcggaagctgcagtgagccatggtggcaccactacactccagccagggcaacagagagaggcgctgtctcaaaaagaaaga

SEQ ID NO: 33236 - DNA, 120 bp, synthetic construct
  source 1..120: mol_type = other DNA
aaggaagcacagattaattatttggtctcttactctcctctgcctttgtcgtccatctctttccacctctcttcatgcatccctttctccctcttccctttcaggatccatctctgactc

SEQ ID NO: 33237 - DNA, 120 bp, synthetic construct; identical to SEQ ID NO: 9247
  source 1..120: mol_type = other DNA

SEQ ID NO: 33238 - DNA, 120 bp, synthetic construct
  source 1..120: mol_type = other DNA
aaattagaaaaataatggaatattagagcctaagaaaatgttttaacttttaattcagcctagattatattgtctttataccaattcagtcataaaatataattttccatatttttgtgg

SEQ ID NO: 33239 - DNA, 120 bp, synthetic construct
  source 1..120: mol_type = other DNA
aatctatgtggtcctcgaatatagcaactgtcattcaatacacatgtttgagcacacagtgagctaagttttaaggattcaaagatgaaaagtcatgctgtcttccctgcagagggtgct

SEQ ID NO: 33240 - DNA, 120 bp, synthetic construct
  source 1..120: mol_type = other DNA
gtgacgtcctctagcaaaatttggcacccaagacaagtaccagaagaaaagaaagactgcatgtattccacatatattcatgtttgaacaaggagtcaagatttatggcaaggataagga

SEQ ID NO: 33241 - DNA, 120 bp, synthetic construct; identical to SEQ ID NO: 9248
  source 1..120: mol_type = other DNA

SEQ ID NO: 33242 - DNA, 120 bp, synthetic construct
  source 1..120: mol_type = other DNA
atgaaaggataatgtagtttgtcttgcttggcagatacttttgaaggatgttggactgtaaggctgtcgatatcctcctcagagaacttactacagtacattgtatctgttcccttacct

SEQ ID NO: 33243 - DNA, 120 bp, synthetic construct
  source 1..120: mol_type = other DNA
tgacacttgtggatgctcagaaagtggggaaggaaggaaagatacgatggtaaaaggcttacacatgtcttgacaaaaaagtccagtttggctcatttggctggagtcgtactgcatggc

SEQ ID NO: 33244 - DNA, 120 bp, synthetic construct
  source 1..120: mol_type = other DNA
aaaaggtggggggaatgacagaaatccaaaaactagtagagcttccacttttcatttcagaagaaatcagttgctctcctctaaggaccattactattaacaaaacagagaccttagaag

SEQ ID NO: 33245 - DNA, 120 bp, synthetic construct
  source 1..120: mol_type = other DNA
gcagaaattattttaaattaataagatcctgcatgcttttcctttaaaaaaaaaaaaaagaaagatctctgtgtagagtgtcctattctgagccagtcctgagaggaaaggaagtataat

SEQ ID NO: 33246 - DNA, 120 bp, synthetic construct; identical to SEQ ID NO: 9249
  source 1..120: mol_type = other DNA

SEQ ID NO: 33247 - DNA, 120 bp, synthetic construct
  source 1..120: mol_type = other DNA
aagcccataatatttgaaagtcagtttcttccatcattttgtgtattaaggttctttcttcccctgttctccgccttcctgcttgtcatcttcactcatcagctgaccacgttgcctctt

SEQ ID NO: 33248 - DNA, 120 bp, synthetic construct
  source 1..120: mol_type = other DNA
tcagcaaatttggaggttttgacccgcagggtgcactgagaaacatggctgtggcaaaacacaacttgaacatcatgattaaacgctacaactctaccgctgctaccaatggtatgcgtc

SEQ ID NO: 33249 - DNA, 120 bp, synthetic construct
  source 1..120: mol_type = other DNA
cttatggcaattgctgaaattttatcatctcccatctctaaaatcacatattcccatgtaatacaagggtctttccattatgcattcagcaaatccttctaggagaggtctcatcaacct

SEQ ID NO: 33250 - DNA, 120 bp, synthetic construct
  source 1..120: mol_type = other DNA
gtaaataagacctctttgactatcaggtggtgaaatgctggtaggagggctcttccaggatgtaatgcagaacttcagggcagagctattcacacttcacaccagtgctgtttcctcacc

SEQ ID NO: 33251 - DNA, 120 bp, synthetic construct; identical to SEQ ID NO: 9250
  source 1..120: mol_type = other DNA

SEQ ID NO: 33252 - DNA, 120 bp, synthetic construct
  source 1..120: mol_type = other DNA
actggggtaaggatgagtttcatcattttttgattctttcttgtctgtcaagttcagaacttcctgccttttactcctatatccaaaaacttgttttccacacttcatgggtttcttttc

SEQ ID NO: 33253 - DNA, 120 bp, synthetic construct
  source 1..120: mol_type = other DNA
actcttctccctaagcctggggccttgagtctttgcagagccaaccctctaccccatcccatcccacacacatgcacatgagcacactctgcattctgacctcaacaacttcacttccac

SEQ ID NO: 33254 - DNA, 120 bp, synthetic construct
  source 1..120: mol_type = other DNA
ttcagttggtgcttccagacaccaagggccattgtgaatcccatcctggaagggaaggtaagattgagactggttacagttgaagcggcagtatgaaaggaaggaaagtgggagggcgtt

SEQ ID NO: 33255 - DNA, 120 bp, synthetic construct; identical to SEQ ID NO: 9251
  source 1..120: mol_type = other DNA

SEQ ID NO: 33256 - DNA, 120 bp, synthetic construct
  source 1..120: mol_type = other DNA
caaagacatgcctggggtaagccacccggctacctaattcctcagtaacctccatctaaaatctccaaggaagcaataaattccttttatgagatctatgtcaaatttttccatctttca

SEQ ID NO: 33257 - DNA, 120 bp, synthetic construct
  source 1..120: mol_type = other DNA
ttttcatgtccagtaacacagaagccaccaagtacagtatagcctgataatatgttgatttcttagctgacattaatatttcttgcttccttgtgttcccacccttggcactgccaccca

SEQ ID NO: 33258 - DNA, 120 bp, synthetic construct
  source 1..120: mol_type = other DNA
tgcccttggcccagaattgttatagcaaaaattttagaaccaaaaaataagtctgtactaatttcaatgtggcttttaaaagtatgacagagaaataagttaggataaaggaaatttgaa

SEQ ID NO: 33259 - DNA, 120 bp, synthetic construct
  source 1..120: mol_type = other DNA
gaaatggaagtcagaaaaacattagaataagacaataatgtgggtgtctgaaaaggaacaaatacttattcctcacatagggttagtgacaatgggaaaagggacgggagtagaagccac

SEQ ID NO: 33260 - DNA, 120 bp, synthetic construct; identical to SEQ ID NO: 9252
  source 1..120: mol_type = other DNA

SEQ ID NO: 33261 - DNA, 120 bp, synthetic construct
  source 1..120: mol_type = other DNA
gaggaaatgggtcagcagcgacctcatggctctaaacagctatgaaatccatgaggatatttctaaccatgctacctgcatcagtgagtttaaattttaattggagaaaaaatacaaaac

SEQ ID NO: 33262 - DNA, 120 bp, synthetic construct
  source 1..120: mol_type = other DNA
tggccttacttttctcatccacaatgtaggagtaataatactttccttgcagagttattgataaaatttgaataattttgatatttagtcaatgccttacacatagtacatgaacacata

SEQ ID NO: 33263 - DNA, 120 bp, synthetic construct
  source 1..120: mol_type = other DNA
gggtgaatttcttttcatatgataattgaaggatatttttctttttccagaatgagagaggctgagattggattggtaagagaactcttagcactagaagttgtaatatttgactttggt

SEQ ID NO: 33264 - DNA, 120 bp, synthetic construct; identical to SEQ ID NO: 9253
  source 1..120: mol_type = other DNA

SEQ ID NO: 33265 - DNA, 120 bp, synthetic construct
  source 1..120: mol_type = other DNA
tgtaagttcataaattatagcaaatgtaccactcagatgggagatgttgctaatgggggaggctatgcatgtgtgggagcagagtgtatctggcagcagtccccagcctttttggcagca

SEQ ID NO: 33266 - DNA, 120 bp, synthetic construct
  source 1..120: mol_type = other DNA
aaggaacatgcaacctagatctcttgcatgcacagttaaaaatagggttcgcactcctatgagaatctaatgccaccactgatctgacggaaggcggggctcagttggtaatgctggctc

SEQ ID NO: 33267 - DNA, 120 bp, synthetic construct
  source 1..120: mol_type = other DNA
gctttaaaataaggtctatttttaaaaaggaaaagagaaggtaaccaattatgatcctaaatgtgtaaaataaaaattttagtatgaaaaacagtcacattaaaatgcacaacgtgctaa

SEQ ID NO: 33268 - DNA, 120 bp, synthetic construct; identical to SEQ ID NO: 9254
  source 1..120: mol_type = other DNA

SEQ ID NO: 33269 - DNA, 120 bp, synthetic construct
  source 1..120: mol_type = other DNA
cctactatcaatagggttacagatctacctgcctgatttaaaatcatgcaattcttaaacaattatttgagctatttgaattatttcagattacacacataaagtgtgacttcattaata

SEQ ID NO: 33270 - DNA, 120 bp, synthetic construct
  source 1..120: mol_type = other DNA
cctgggcaacaaagcaagaccttgtctctacaacacaaaaataaattaatgcatggcggcactcctgtagtcccagctactctagaggctgaggcaagaggagtgcttgagcccaggagt

SEQ ID NO: 33271 - DNA, 120 bp, synthetic construct
  source 1..120: mol_type = other DNA
gaaatatgtcaggtttgtacctaccacatttaaactagggacttgaagaattaaacattttattacaaatgaagcacttcatgcacagactggcacatagtaagtagtcgataggtgtta

SEQ ID NO: 33272 - DNA, 120 bp, synthetic construct; identical to SEQ ID NO: 9255
  source 1..120: mol_type = other DNA

SEQ ID NO: 33273 - DNA, 120 bp, synthetic construct
  source 1..120: mol_type = other DNA
aaaataagccagtgtgcacgtatgattaattgggtgggtttacaaaattgcccatgaattgagtattgttaaagctggccttttaaaacatggtactcagccaggcgcggtgcctcatgc

SEQ ID NO: 33274 - DNA, 120 bp, synthetic construct
  source 1..120: mol_type = other DNA
gcgtggtggtgggcacctgtaatgccagctacttgggaggctgaggcaggataattgcttgaacccaggaggcagaggttgcagtgaactgagatcatgctgttgcactccagcctgggc

SEQ ID NO: 33275 - DNA, 120 bp, synthetic construct
  source 1..120: mol_type = other DNA
cccataaacataggcagagaagcattctgtttgaagttatgttagtttttaggctcttctcatttttatcacagttaggaaaccctgagtatccaaatccttcctaagtctatgggaacc

SEQ ID NO: 33276 - DNA, 120 bp, synthetic construct; identical to SEQ ID NO: 9256
  source 1..120: mol_type = other DNA

SEQ ID NO: 33277 - DNA, 120 bp, synthetic construct
  source 1..120: mol_type = other DNA
aaaagaatgaggtaaaacgagaaagtgtcacgcaggaaccaggtataatttgggggcgtttagagatggcttgaagaaatgtatcttgagataaaataagatggtatacagtaggtaaag

SEQ ID NO: 33278 - DNA, 120 bp, synthetic construct
  source 1..120: mol_type = other DNA
acaagtttaaaatctttctaattagaattttatgaggccaacatcaccctgataccaaagcctggcagagacacaacaaaaaaaagagcattttaggccaatatgcctgatgaacatcaa

SEQ ID NO: 33279 - DNA, 120 bp, synthetic construct
  source 1..120: mol_type = other DNA
aataaatgtaatccaccacataaacagaaccaatgacaaaaaccacatgattatctcaatagatgcagaaaaggacttcgaaaaaattcaacagcccttcatgctaaaaactctcaataa

SEQ ID NO: 33280 - DNA, 120 bp, synthetic construct; identical to SEQ ID NO: 9257
  source 1..120: mol_type = other DNA

SEQ ID NO: 33281 - DNA, 120 bp, synthetic construct
  source 1..120: mol_type = other DNA
agcattcctatacagcaataatagacaaaaagagaaccaaatcatgagtgaactcccattctcaattactacaaagagaataaaatacctaggaatccaacttacaagggatgtgaagga

SEQ ID NO: 33282 - DNA, 120 bp, synthetic construct
  source 1..120: mol_type = other DNA
caaggtaatttatggattcaatgctatccccatcaagctaccagtgactttcttcacagaattggaaaaaactactttaaatttcacatggaactaaaaaagagcccacatagccaagac

SEQ ID NO: 33283 - DNA, 120 bp, synthetic construct
  source 1..120: mol_type = other DNA
tacagtaaccaaaacagcatggtactggtaccaaaacagatatatagactgatggaacagaacagagtcctcagaaataacaccagacatctacgaacatctgatttttgacaaacctga

SEQ ID NO: 33284 - DNA, 120 bp, synthetic construct
  source 1..120: mol_type = other DNA
aagatgcattaaagacttaaacataaaacctaaaaccataaaaaccccagaagaaaacctaggcaataccattcaggacataggcatgggcaaagacttcatgactaaaacaccaaaagc

SEQ ID NO: 33285 - DNA, 120 bp, synthetic construct; identical to SEQ ID NO: 9258
  source 1..120: mol_type = other DNA

SEQ ID NO: 33286 - DNA, 120 bp, synthetic construct
  source 1..120: mol_type = other DNA
aacagtgatcattaaaaagtcaggaaacaacagatgctggagaggatgtggagaaataggaatgcttttacactgttggtgggagtgtaaattagttcaaccattgtggaaaacaatgtg

SEQ ID NO: 33287 - DNA, 120 bp, synthetic construct
  source 1..120: mol_type = other DNA
tattgcggcactattcacaatagcaaagacttggatccaacccagatgtccatcaataatagactggataaagaaaatgtggcacatatacaccatggaatactatgcagccatataaaa

SEQ ID NO: 33288 - DNA, 120 bp, synthetic construct
  source 1..120: mol_type = other DNA
aatgagaacacatggacacagggaggtgaacattacacacaggggcctgtcggggagtcgggggttgggggagggatagcattaggagaaatacctaatgtaaattacgagttgatgggt

SEQ ID NO: 33289 - DNA, 120 bp, synthetic construct; identical to SEQ ID NO: 9259
  source 1..120: mol_type = other DNA

SEQ ID NO: 33290 - DNA, 120 bp, synthetic construct
  source 1..120: mol_type = other DNA
tctccctgctcggcctcccaaagtgttgggattacaggcctgagccaccacacccggccaaaaaagaattcttaatctgtaaaagtaataatagaatggtacaaaaaattggaaaattta

SEQ ID NO: 33291 - DNA, 120 bp, synthetic construct
  source 1..120: mol_type = other DNA
aggtcaggagatcaagaccatcctggctaacacggtgaaaccctgtctctactaaaagtacaaaaaattagccgggcatggtggcgggcgcctgtagtcccagctgctcgggaggctgag

SEQ ID NO: 33292 - DNA, 120 bp, synthetic construct
  source 1..120: mol_type = other DNA
caatgaaatgtaatatgtggtagaaaagctaaaacagagaatagaccaaggaagtccaacctcaggttacagagctagagagaccaacagagaagatgaagggagaaaattatcaaaaca

SEQ ID NO: 33293 - DNA, 120 bp, synthetic construct; identical to SEQ ID NO: 9260
  source 1..120: mol_type = other DNA

SEQ ID NO: 33294 - DNA, 120 bp, synthetic construct
  source 1..120: mol_type = other DNA
tttgggaggccgaggcttgcggatcatgagctcaggagatcgagaccatggtgaaaccccgtctctactaaaaatacaaaaaaaattagctgggcacggtggcgggtgcctgtagtccca

SEQ ID NO: 33295 - DNA, 120 bp, synthetic construct
  source 1..120: mol_type = other DNA
aaaaaaaatgtagaccttttcaaaatcacaatcaggcacagagaaagaataaaaatactgttggatatgaaaggacataaattttacctaccacacagttttattagaaattgactaagg

SEQ ID NO: 33296 - DNA, 120 bp, synthetic construct
  source 1..120: mol_type = other DNA
cactgaaaagggatcctactatagcagttccttggcaagcaaagaatgtctgatacatgagtgatatttagaaaatgatgaacaattttttcaacttttagaattaagctacgagcaaag

SEQ ID NO: 33297 - DNA, 120 bp, synthetic construct; identical to SEQ ID NO: 3491
  source 1..120: mol_type = other DNA

SEQ ID NO: 33298 - DNA, 120 bp, synthetic construct; identical to SEQ ID NO: 9261
  source 1..120: mol_type = other DNA

SEQ ID NO: 33299 - DNA, 120 bp, synthetic construct
  source 1..120: mol_type = other DNA
agcaatgagagaataaatccttcagtcccaaagggaggcaggtagaacagaacagcatccacaacagaaacagtgttctagttcctgagaatacatatatattcatgtggaagaaaacaa

SEQ ID NO: 33300 - DNA, 120 bp, synthetic construct
  source 1..120: mol_type = other DNA
attctcccacctcagccacctgagtagctgggactacaggtgtgtgccaccacacccagctaatttttgtatttctagtagagatggggcttcactatgttggccaggctggtctcaaac

SEQ ID NO: 33301 - DNA, 120 bp, synthetic construct
  source 1..120: mol_type = other DNA
tagaactaccacatgatctggcaattccactcctgggtacatctgcaaagaaaatgcaatcagtatatcaaagagatatctgcactcccatgttcatcgcagcactactcacaatgggca

SEQ ID NO: 33302 - DNA, 120 bp, synthetic construct; identical to SEQ ID NO: 9262
  source 1..120: mol_type = other DNA

SEQ ID NO: 33303 - DNA, 120 bp, synthetic construct
  source 1..120: mol_type = other DNA
tggttgagcctcgttcaagaccaactggacagcatgctgaaactctgtctttacaaaaatacagaaattagccaggcatggtggggcatgccagtagtcccagctactccagagattgag

SEQ ID NO: 33304 - DNA, 120 bp, synthetic construct
  source 1..120: mol_type = other DNA
aggaggaataagtactggagatcgactgtacagcatggtgactacggttaataataatgcactgtcatttctcagcatccatgagagattggttccaggatcctctctgtataccaaaat

SEQ ID NO: 33305 - DNA, 120 bp, synthetic construct
  source 1..120: mol_type = other DNA
ctatgtaaatagttattatactgtattgttttggaattggaatttttttattgttatattgttatttttcatttttttctatgtattttcaatccacagttgaatgaatcagaggatgtg

SEQ ID NO: 33306 - DNA, 120 bp, synthetic construct; identical to SEQ ID NO: 9263
  source 1..120: mol_type = other DNA

SEQ ID NO: 33307 - DNA, 120 bp, synthetic construct
  source 1..120: mol_type = other DNA
aaaggaaattgctaagagagattttaaatattcataccacaaaaaaagtgaagtgatggatatgttaattagcctggtttaatcacatgtatcaaaaagtcatgtagtaccctgtaaatg

SEQ ID NO: 33308 - DNA, 120 bp, synthetic construct
  source 1..120: mol_type = other DNA
taactcaattgattcaccctattaacttaagaactctgttccttaagttaaacatttcatgataatcaggaagggcaaggttatgttgcaacaagatcttaacccacagtaaaaagtaga

SEQ ID NO: 33309 - DNA, 120 bp, synthetic construct
  source 1..120: mol_type = other DNA
gtcagtcaaatgaccccaacttaacagcagaaaagacggaaatatacaggagctttggaatactggcaagcaccactgtctccaaaagatatactgttattatctaaggtaaggacaaat

SEQ ID NO: 33310 - DNA, 120 bp, synthetic construct; identical to SEQ ID NO: 9264
  source 1..120: mol_type = other DNA

SEQ ID NO: 33311 - DNA, 120 bp, synthetic construct
  source 1..120: mol_type = other DNA
aatatcacaaggcaagtggaggcagggcgagatcacaggaccacgggactgaggcgaaattaaaattgctaatgaagtttcaggcaccattgtcattgataacatcttatcaggagacag

SEQ ID NO: 33312 - DNA, 120 bp, synthetic construct
  source 1..120: mol_type = other DNA
gacggctacacctcgggggtccagttcagaggcctacccctagctgcgcattctctttctcagggatgttccatgctgagaaaaagaattcaatgatatttctcccatttgcttttgaaa

SEQ ID NO: 33313 - DNA, 120 bp, synthetic construct
  source 1..120: mol_type = other DNA
tgtttaaacacacatgctctacaatttgtgcagttattgcaattatcacatggtcctgaggcgacatacatcctcctcagctgacaggattaagagattaaagtaaagacaggcatagga

SEQ ID NO: 33314 - DNA, 120 bp, synthetic construct; identical to SEQ ID NO: 9265
  source 1..120: mol_type = other DNA

SEQ ID NO: 33315 - DNA, 120 bp, synthetic construct
  source 1..120: mol_type = other DNA
aaagagaagaagattttgaccctctcattaataaagaatctccagcatgtgctcagtgtgacgatgttgaactgtaagaattatagggcttatgcttcaactagaaaaatcagatctcga

SEQ ID NO: 33316 - DNA, 120 bp, synthetic construct
  source 1..120: mol_type = other DNA
tcgggtgggatgagaaactgagaaaagaaagagacacagagacaaagtatagagaaagaaaagtgggcccaggggaccggcgctcagcatactgaggactcacgccggccccagtctctg

SEQ ID NO: 33317 - DNA, 120 bp, synthetic construct
  source 1..120: mol_type = other DNA
tcataaatgaggtaaagaaaaaggcgctgtgcttttttgtgcacatacataaacatctcaatgcattaaagagcagtattgccaccagcatgtctcatttccagccctaaggcagttttc

SEQ ID NO: 33318 - DNA, 120 bp, synthetic construct; identical to SEQ ID NO: 9266
  source 1..120: mol_type = other DNA

SEQ ID NO: 33319 - DNA, 120 bp, synthetic construct
  source 1..120: mol_type = other DNA
gcacatcctgctttgttaaaccttgagttgacacagcatatgtttctgcaagcacagggttggggatagggatacagattaacagcatctcaaggcagaagaatttttcttactacagaa

SEQ ID NO: 33320 - DNA, 120 bp, synthetic construct
  source 1..120: mol_type = other DNA
ctttccccatttccccaaaagtggcactcccttttgatccctatggtcaatgacaatgcccaccctgaggaagaggacaaaatcagcacaaaacttttgactccattcagcattctgctt

SEQ ID NO: 33321 - DNA, 120 bp, synthetic construct
  source 1..120: mol_type = other DNA
aaggagacctagttctccactctgacctcatccataagaaggaagagcctgccaaagactcctcacgcccagtgtgtgggtgagggagaaaggaagatgggatgtctgctttcagggtca

SEQ ID NO: 33322 - DNA, 120 bp, synthetic construct; identical to SEQ ID NO: 9267
  source 1..120: mol_type = other DNA

SEQ ID NO: 33323 - DNA, 120 bp, synthetic construct
  source 1..120: mol_type = other DNA
catctgcacactggaagtcatttccaggaccacaaggatctggaaaatccagtcctccttcctaataagagcgatggacacaatgctggctgtcagcatcccgtgcacaggacaatgtgt

SEQ ID NO: 33324 - DNA, 120 bp, synthetic construct
  source 1..120: mol_type = other DNA
aacacacacacacacacagagagagatgaggtaagatatgaagtgataaggaagacaaatacagaaaaatagatgcaaaaagaaacatgaagatagaaaaaatgcagataaatagtgaca

SEQ ID NO: 33325 - DNA, 120 bp, synthetic construct
  source 1..120: mol_type = other DNA
tgagacagatgcccagatagagacataacagaaagagaggtgaagatctcgttgaatatctggaactagtaacttgtgaaatcaacttgactctaggcttcctttgtaccatgaacaaaa

SEQ ID NO: 33326 - DNA, 120 bp, synthetic construct; identical to SEQ ID NO: 9268
  source 1..120: mol_type = other DNA

SEQ ID NO: 33327 - DNA, 120 bp, synthetic construct
  source 1..120: mol_type = other DNA
tcttttcaaggtacaatcctccttctggccacaggtttgctgggtcacctcaagggatgttccttcattctgcagtgatttcctgcctcttctcaattaagaaagttcagaatacagata

SEQ ID NO: 33328 - DNA, 120 bp, synthetic construct
  source 1..120: mol_type = other DNA
caggtaatgtttttcatgtgcttctcttgagcagtctgaggaaagaatagaaacagaaaccccttgggacctgagtagacgcagctggccatgcacaggcagaggctctgggtcagtgca

SEQ ID NO: 33329 - DNA, 120 bp, synthetic construct
  source 1..120: mol_type = other DNA
ttctgggcaggcataagcaggcatcacagaagagtgataaccaatcctagttaaaatagtctcaggagtcagtgcagaagccctggagaagagagaagagcattgatcagcacagggtat

SEQ ID NO: 33330 - DNA, 120 bp, synthetic construct; identical to SEQ ID NO: 9269
  source 1..120: mol_type = other DNA

SEQ ID NO: 33331 - DNA, 120 bp, synthetic construct
  source 1..120: mol_type = other DNA
tttcacaagaagatgccaccaaagttaaggcttggttctggggaacaatgtctggagattcctagaaactggcaaacttctcccctaagtcttgatcctcatagcagcaaataggccatg

SEQ ID NO: 33332 - DNA, 120 bp, synthetic construct
  source 1..120: mol_type = other DNA
aaaggaagttatgcagagaaaggtctcattacacaaacagccactctctcaccccaaaggaaaatgacacacatgacttagagttacattctcttcccacccatgttcttccaggccttc

SEQ ID NO: 33333 - DNA, 120 bp, synthetic construct
  source 1..120: mol_type = other DNA
atggtaaggatgccctggaataagctctatcagtcagctctgtgacagcgctacctttcaaccagtaaaatcagattccaatgcctcctcccatcttgtcctgtctcctcgcacttcttc

SEQ ID NO: 33334 - DNA, 120 bp, synthetic construct; identical to SEQ ID NO: 9270
  source 1..120: mol_type = other DNA

SEQ ID NO: 33335 - DNA, 120 bp, synthetic construct
  source 1..120: mol_type = other DNA
ccaataggtccttggatacagtgaataggtgagagagtggggaagcaaatctctgctcttcaagaactcatccataaccttagaccctaagatcccagtcaccagccctaagaatcagtc

SEQ ID NO: 33336 - DNA, 120 bp, synthetic construct
  source 1..120: mol_type = other DNA
tagtctcctgtgattcccagctcagtagtgacatcagggataagagatgggaaggaatgggtcagaaggagctctttgtcttgtgggcccatagtaacagaaactcaatatccccttacg

SEQ ID NO: 33337 - DNA, 120 bp, synthetic construct
  source 1..120: mol_type = other DNA
aataaggggggtggacacaacgccggctgtctcctcctgatcattccgaaaccaccggactttgatctggcctggatagaaatctgtcaccgagcagaccagcaggttgtggtggttgag

SEQ ID NO: 33338 - DNA, 120 bp, synthetic construct; identical to SEQ ID NO: 9271
  source 1..120: mol_type = other DNA

SEQ ID NO: 33339 - DNA, 120 bp, synthetic construct
  source 1..120: mol_type = other DNA
aaaagtaggcaggccttcaaaacaaataacccttgatcaaacatcatgtttgtccacaactcaattcctttatcttctcagattgctgctcatagtaaaaaaaatgacacatctttcccc

SEQ ID NO: 33340 - DNA, 120 bp, synthetic construct
  source 1..120: mol_type = other DNA
acatcatgtttgtccacaactcaattcctttatcttctcagattgctgctcatagtaaaaaaaatgacacatctttccccgcctcttttacacatctcatcctttccttttaggccactt

SEQ ID NO: 33341 - DNA, 120 bp, synthetic construct
  source 1..120: mol_type = other DNA
gtgagtttaattactagctgtctaccctactccatttccttgctattgacaattactttcttgttctgaaatcagacattatcgtgtatgttctccacagaaaatattctgagatccgtg

SEQ ID NO: 33342 - DNA, 120 bp, synthetic construct
  source 1..120: mol_type = other DNA
tcatggtttctgcttggacttgaacttttctttaggttctccttcctggaggccaactgaaatcagagtcagctatgtggccttataagatttgttcatcttcaacagactgggagtaaa

SEQ ID NO: 33343 - DNA, 120 bp, synthetic construct; identical to SEQ ID NO: 9272
  source 1..120: mol_type = other DNA

SEQ ID NO: 33344 - DNA, 120 bp, synthetic construct
  source 1..120: mol_type = other DNA
catcccttagactctacatatgtgtagtgaggaacataagaatgttgtgtactttgggaggcttaagatcttggtgagtaattgtgggctgattacttaaagtgtttatcatgtaccaat

SEQ ID NO: 33345 - DNA, 120 bp, synthetic construct
  source 1..120: mol_type = other DNA
tgataaggcaactgtctagaaataagtgcttcctgaatgggtaaaattgactttcagaatgtttattcctgaagtggatagtgatgggggggaggggataacctaggccaaaagcaacct

SEQ ID NO: 33346 - DNA, 120 bp, synthetic construct
  source 1..120: mol_type = other DNA
ttcaagcattgtttttatttttagcaaacacattttcctcagactttgtattcacaaattctattaagatccaagtcagtaagagtttacttgaaagcattaagcaaaatgttagaaaat

SEQ ID NO: 33347 - DNA, 120 bp, synthetic construct; identical to SEQ ID NO: 9273
  source 1..120: mol_type = other DNA

SEQ ID NO: 33348 - DNA, 120 bp, synthetic construct
  source 1..120: mol_type = other DNA
gctgggtggggcagtgctagcgaggccggcgggcaggggaagagggtgggcactgggggcagagagaactgcttagcgaaggtaaggtacgaggaggcaaacacataaggcacgaggcga

SEQ ID NO: 33349 - DNA, 120 bp, synthetic construct
  source 1..120: mol_type = other DNA
tgcccccaccaccccgccgccgcctcctttcccctggggtggaatgaactgggctcagatttcagagacctcgcccccatcgcccctcccggcacagaaactcggggtctcggccaaggg

SEQ ID NO: 33350 - DNA, 120 bp, synthetic construct
  source 1..120: mol_type = other DNA
tctggctgttccagtactcggcatcaggccgcccctgcggcgtcaccgcgcggtacacccccacgtcgctgtcgaagcgcgcgtactcctctcggttatagatgtatctggtcacaagac

SEQ ID NO: 33351 - DNA, 120 bp, synthetic construct; identical to SEQ ID NO: 9274
  source 1..120: mol_type = other DNA

SEQ ID NO: 33352 - DNA, 120 bp, synthetic construct
  source 1..120: mol_type = other DNA
gagggatcagggcgttctcgcatgaaatcccatttttcatgaagctcctggatacctcagagataaagttatccacataaatctgagagttcaacggaatgacgagataggtccaggaat

SEQ ID NO: 33353 - DNA, 120 bp, synthetic construct
  source 1..120: mol_type = other DNA
ggacctacacctctgagtcctagatagagacatttattcatggaaagagcacaagcttttgaatttgataaactagattccaattaaactgtggcagtcaccagtttgggcaggttatgt

SEQ ID NO: 33354 - DNA, 120 bp, synthetic construct
  source 1..120: mol_type = other DNA
tttcacaatatgtgttatttcccttctttacatcctccttcctactaaattcagtccaccattaactcgggtctctgaatcccactcaagtcaccatttgcccataaatcagtgaaaccc

SEQ ID NO: 33355 - DNA, 120 bp, synthetic construct; identical to SEQ ID NO: 9275
  source 1..120: mol_type = other DNA

SEQ ID NO: 33356 - DNA, 120 bp, synthetic construct
  source 1..120: mol_type = other DNA
tcatcactaaaagataaatgggaatgcaacatagctttctttcccaagagagaggaaatgttgatgaaagattgtgtccaagatcatagagatcaccatcccccataccccagcccaagg

SEQ ID NO: 33357 - DNA, 120 bp, synthetic construct
  source 1..120: mol_type = other DNA
gaaggtctccggggatccgcaaagccttcttccaagacataactgagacgaagggaaaagcagtggtagtcaacacagctcggacctgatggatctgatgtacctggcagaaagaataaa

SEQ ID NO: 33358 - DNA, 120 bp, synthetic construct
  source 1..120: mol_type = other DNA
aatccagtgcctggcactgtgacgtcttcaaattgtactggatgaacatctgaggtgaaaatttcctctcgattatagaagagctgaagaacgaatgcctcggggattttgagaggcaaa

SEQ ID NO: 33359 - DNA, 120 bp, synthetic construct; identical to SEQ ID NO: 9276
  source 1..120: mol_type = other DNA

SEQ ID NO: 33360 - DNA, 120 bp, synthetic construct
  source 1..120: mol_type = other DNA
atttgtcttgtttaatattacaaaagtctcctcaactgttatgtgtaactatcaggttaatatgtggaacaagaaaacaagccaaaaaaaaaaaattgatacccacccctgctggtaaat

SEQ ID NO: 33361 - DNA, 120 bp, synthetic construct
  source 1..120: mol_type = other DNA
tgaaatgatgcatctgatatcagcaaaggcacaatacacagaattttacagtattcggatgcagtcatgtttcgttttgaagagagagcacaaaacctgtggagaagcatttcctgggtc

SEQ ID NO: 33362 - DNA, 120 bp, synthetic construct
  source 1..120: mol_type = other DNA
aacagttcctcatggacatatctacatcaatgtgtttttataaataaacataacttatcaggctcctcttgacagtgactaggggcaatactaatggttataaagcaattagaacaacgc

SEQ ID NO: 33363 - DNA, 120 bp, synthetic construct; identical to SEQ ID NO: 9277
  source 1..120: mol_type = other DNA

SEQ ID NO: 33364 - DNA, 120 bp, synthetic construct
  source 1..120: mol_type = other DNA
aaaggaggaaccaaatgcacacctggaatggagttggggcaaggaagaataggcagagagacctgaaggtgccctcaatgtccttcctcagcccctacatcagtgcgcctcaaaatagag

SEQ ID NO: 33365 - DNA, 120 bp, synthetic construct
  source 1..120: mol_type = other DNA
ttcagctagcaacaagtgtcactttagagcctttttctgattggctaaaacctcactggaaaggttttgctttgggcttctgccagttgtgtctgcctggcccagccttctctacagttg

SEQ ID NO: 33366 - DNA, 120 bp, synthetic construct
  source 1..120: mol_type = other DNA
cctctgtggaggcagagcaattaaagcatttactccatatgggtaaatgggctaaaaagtcactgccattagtagggagggtcaggattacattagggagactgtctttaggggacatcc

SEQ ID NO: 33367 - DNA, 120 bp, synthetic construct; identical to SEQ ID NO: 9278
  source 1..120: mol_type = other DNA

SEQ ID NO: 33368 - DNA, 120 bp, synthetic construct
  source 1..120: mol_type = other DNA
ctaggtaaccagctatatataagaatttttcatggcacatataaactaggtcctttctcttggcacaaagttatctctttaaaatctcagtctagagaatctgaagaaagagccaaatca

SEQ ID NO: 33369 - DNA, 120 bp, synthetic construct
  source 1..120: mol_type = other DNA
agaattggaggatgatggagcgtgaaggagtaggagtatgggaaaagctttagcaggaaggtagaaaatcaggtgatacaaagcatttggaacatttgagggcaaatgaggaacgtgggt

SEQ ID NO: 33370 - DNA, 120 bp, synthetic construct
  source 1..120: mol_type = other DNA
gtacaatgaagctttgtttcctgatctatcttttcaggttcctttttcctgtcagtctcctcatccacgcattgcctcagttggaccactggtgattaaacctcccagagctagcctaca

SEQ ID NO: 33371 - DNA, 120 bp, synthetic construct
  source 1..120: mol_type = other DNA
tcttcccccagcctctagattagtagtcaccatgctccttcattcccagaaaaaatttaaatatttctctgtgagatctttataatgtctcctttttctgtaagttcttaccagtaaaga

SEQ ID NO: 33372 - DNA, 120 bp, synthetic construct; identical to SEQ ID NO: 9279
  source 1..120: mol_type = other DNA

SEQ ID NO: 33373 - DNA, 120 bp, synthetic construct
  source 1..120: mol_type = other DNA
gtacaaccattatggaaaacagtatggaagttcctcaaaaagttaaaaatagaactatcatatgatgtagtaatcccatttgcaggatgtagacaaagtatttaaaattagcatgttgaa

SEQ ID NO: 33374 - DNA, 120 bp, synthetic construct
  source 1..120: mol_type = other DNA
tcctattcaggctttaaaaagaaggaaatcctgttgtaagtcaaaaagtgactgaggtaggtctcaatcaattaaaggtttattttgccaaggttgaggaatacacctgggaaaaacaca

SEQ ID NO: 33375 - DNA, 120 bp, synthetic construct
  source 1..120: mol_type = other DNA
gatacaagtggttacattcctgagtctttgattagcttaagtaaatctacattttacctgtgaaaagagagtagaagaaaaagttaattataaattatcttatgctcagtaaatctacat

SEQ ID NO: 33376 - DNA, 120 bp, synthetic construct; identical to SEQ ID NO: 9280
  source 1..120: mol_type = other DNA

SEQ ID NO: 33377 - DNA, 120 bp, synthetic construct
  source 1..120: mol_type = other DNA
tgtgtaggacatgcaggtttgttacatgggtaaacgtgtggcatggcggtttgctgcagctatcaacccatcacctaggtattaagcccagcatgcatgagctatttatcctgatgctgt

SEQ ID NO: 33378 - DNA, 120 bp, synthetic construct
  source 1..120: mol_type = other DNA
cattattttgctgaggacaatggcttccagctccatccatgtccctgcaaaagacataatctcattcctttttatggctgcatagtattccatggtgtgtatgaaccatattttctttat

SEQ ID NO: 33379 - DNA, 120 bp, synthetic construct
  source 1..120: mol_type = other DNA
tatacccaatgatatggtttggctgtgtccccacccaaatctcaacttgaattgtatctcccagaattcccacatgttgtgggagggacccagggggaggtaattcgatcatgggagcca

SEQ ID NO: 33380 - DNA, 120 bp, synthetic construct; identical to SEQ ID NO: 9281
  source 1..120: mol_type = other DNA

SEQ ID NO: 33381 - DNA, 120 bp, synthetic construct
  source 1..120: mol_type = other DNA
aaaatgtgggaaagtttggaacctcctagaaatttgttgaatagctttgacaaaaatgctgatagtgatatgaacaataaggtccaggccaaggtggtctcagatggagataagaaactt

SEQ ID NO: 33382 - DNA, 120 bp, synthetic construct
  source 1..120: mol_type = other DNA
gcagaagaaatttctaagcagcaaaacattcaagaggtgacttgggtactgttaaaagcattccgttttaaaagggaaacagagcataacagttcagaaaaactgcagtctggtgatgca

SEQ ID NO: 33383 - DNA, 120 bp, synthetic construct
  source 1..120: mol_type = other DNA
gagaccttcacagcagcccctcccatcacggaaccagaggcccaggaggaaaaagtggttttgtggaccaggcccagcgtccccttgctgtgtgcagcctagggacttggtgccctgtgt

SEQ ID NO: 33384 - DNA, 120 bp, synthetic construct; identical to SEQ ID NO: 9282
  source 1..120: mol_type = other DNA

SEQ ID NO: 33385 - DNA, 120 bp, synthetic construct
  source 1..120: mol_type = other DNA
cagcttgcactgtgggcctggaaaagccacagacactcaaagccagcccttgaaagcagtcaggagagaggctgtaccctgcacagccacagaggcagagctgcccaagaccatgggaac

SEQ ID NO: 33386 - DNA, 120 bp, synthetic construct
  source 1..120: mol_type = other DNA
aagaccaaggtgggcggaccacgaggtcaggagattgagaccatcctggctaacacagtgaaaccctgtctctactaaaaatacaaaaaagttagccaggcatggtggcaggcacctgca

SEQ ID NO: 33387 - DNA, 120 bp, synthetic construct
  source 1..120: mol_type = other DNA
aaaaaataaataaataaaaataaaaataaataaaataataaaataaaaaaatttgactgccctgctggatttcagacttgtgtgtgccttgtaacccctttgttctggccaatttctcct

SEQ ID NO: 33388 - DNA, 120 bp, synthetic construct; identical to SEQ ID NO: 9283
  source 1..120: mol_type = other DNA

SEQ ID NO: 33389 - DNA, 120 bp, synthetic construct
  source 1..120: mol_type = other DNA
tgctattcttatgatagtggataagtcgcacgagatctgatgggtttatcaggggtttctgcttttgcttcttcctcattttctcctgccactgccatgtaagaagtgcctttcgcctcc

SEQ ID NO: 33390 - DNA, 120 bp, synthetic construct
  source 1..120: mol_type = other DNA
atagaatagttgggtcaaatggtatttctggttctaggtctgtgaagaattgccacactgtcttccacaatggttgaactaatttacattcccgccaacagtataaaagtgtttcttttt

SEQ ID NO: 33391 - DNA, 120 bp, synthetic construct
  source 1..120: mol_type = other DNA
aggcttttttcatatgtttgggtgctacataaatgtcttcttttggaagtgtctgttaatgtcctttgcccactttttaatgttctttttttcttgcaaatttgtttaagttccttgtag

SEQ ID NO: 33392 - DNA, 120 bp, synthetic construct; identical to SEQ ID NO: 9284
  source 1..120: mol_type = other DNA

SEQ ID NO: 33393 - DNA, 120 bp, synthetic construct
  source 1..120: mol_type = other DNA
ttaaatagggaatcctttccccattgcttgtttttatcaggttttttgaagatcagttggttgtagatgtgtggtcttatttctgagttctgtgttctgttccactggtctgttttcgta

SEQ ID NO: 33394 - DNA, 120 bp, synthetic construct
  source 1..120: mol_type = other DNA
tccgtgtgaatttttaaatagttttcttctaattctgtgaagaatgtcagtggtagtttgacgggaatagcattgaatccacaaattactttgggcagtatggccattttcatgatattg

SEQ ID NO: 33395 - DNA, 120 bp, synthetic construct
  source 1..120: mol_type = other DNA
cctaggcatttactctttgtagcaattgtgaatgggagttcattcatgatttggctctctgcttgtctgttgttggcgtataggaatgcttgtgatttctgcacattgattttgcatcct

SEQ ID NO: 33396 - DNA, 120 bp, synthetic construct; identical to SEQ ID NO: 9285
  source 1..120: mol_type = other DNA

SEQ ID NO: 33397 - DNA, 120 bp, synthetic construct
  source 1..120: mol_type = other DNA
aattttattgaaggtctttcctgtgtctattgagacaatcatgtggtttttgtctttagttctgtttatttaatgaattatgtttattgatttgcatatgttgaaacagcctggcatcct

SEQ ID NO: 33398 - DNA, 120 bp, synthetic construct
  source 1..120: mol_type = other DNA
ttttctttttttgttgtatctgtgtcaggttttgttatcaggatgatgctggcctcataaaataagttagggaggagttcctccttttcaattatttggaatagcttcagaagaaatggt

SEQ ID NO: 33399 - DNA, 120 bp, synthetic construct
  source 1..120: mol_type = other DNA
gagggattcaacttcctggttcaatcttgggaaggtgtatgtgtctaggaatttcttttagatttttttagtttatgtgcataaaggtgtttatagtattctctgatggttgtttgtact

SEQ ID NO: 33400 - DNA, 120 bp, synthetic construct; identical to SEQ ID NO: 9286
  source 1..120: mol_type = other DNA

SEQ ID NO: 33401 - DNA, 120 bp, synthetic construct
  source 1..120: mol_type = other DNA
attctgatacattgtctctttcttctcattggtttcaaagaacttcctgatttctgcattaatttcattatttacccaggagtcatacaggagtaggttgttcaatttccatgtagttgt

SEQ ID NO: 33402 - DNA, 120 bp, synthetic construct
  source 1..120: mol_type = other DNA
gtgatcaattttagaataagtgccatgtggcaccaagaagaatgtatattccgtttttttgggcggagagttctgtagatatctctcaggtccacttgatccagtgctgagttcaagtcc

SEQ ID NO: 33403 - DNA, 120 bp, synthetic construct
  source 1..120: mol_type = other DNA
attaactcgtcatttagcattaggtatatctcctaatgctatccctcccctctctcccccaccccacaacagtccccggtgtgtgatgttccccttcctgtgtccatgtgttctcattgt

SEQ ID NO: 33404 - DNA, 120 bp, synthetic construct; identical to SEQ ID NO: 9287
  source 1..120: mol_type = other DNA

SEQ ID NO: 33405 - DNA, 120 bp, synthetic construct
  source 1..120: mol_type = other DNA
gtgtcttcgcacatgagatgggtctcttgcatacaacacactgatgagtcttgactctttatccagcttgtcattctgtgtcttttaattggggcatttagcctatttatatttaaggtt

SEQ ID NO: 33406 - DNA, 120 bp, synthetic construct
  source 1..120: mol_type = other DNA
ggctggtaatggtttttcctttccacatccagtgcttccttcaggagctcttgcaaggtagatctggtggtgacaaattccctcagcatttgcttgactgaaaaggattgtatttctcct

SEQ ID NO: 33407 - DNA, 120 bp, synthetic construct
  source 1..120: mol_type = other DNA
gctgttactcttacggtcttccctttgcaggtgacctggcctttcactctggctacccttaacattttttccttcatttcgaccttggagaatctgatgattatgtgtcttggggttgat

SEQ ID NO: 33408 - DNA, 120 bp, synthetic construct; identical to SEQ ID NO: 9288
  source 1..120: mol_type = other DNA

SEQ ID NO: 33409 - DNA, 120 bp, synthetic construct
  source 1..120: mol_type = other DNA
tctctaaactggttattctggttaactggttaacagctcctgtaatgtcttatcatggctcttagcttctttgcattgggttggaacatactccttttgctcagtgaagtttattattac

SEQ ID NO: 33410 - DNA, 120 bp, synthetic construct
  source 1..120: mol_type = other DNA
ttcagcatttgttgttgactttttcgcatcttcatgggtttatctaccttcaatctttgaaaatgctaacctttggttgggggttttgtggggtcttttgctgttgttgttgttattgtc

SEQ ID NO: 33411 - DNA, 120 bp, synthetic construct
  source 1..120: mol_type = other DNA
gtcaccagtggaggctgcagaacagcaaaggtggctgcctgctccttcctctggcagctccatcccagggcactgacctgatgctggtcagaactgtcctgtatgaactgtccagcaacc

SEQ ID NO: 33412 - DNA, 120 bp, synthetic construct; identical to SEQ ID NO: 9289
  source 1..120: mol_type = other DNA

SEQ ID NO: 33413 - DNA, 120 bp, synthetic construct
  source 1..120: mol_type = other DNA
cacagctgctgtgctgcactgtggggagttcctgcctgtccaaaccattcagtctccccagcagtgggacgggaaaatggccaactggagccacagcaacggcagccacccctcccccta

SEQ ID NO: 33414 - DNA, 120 bp, synthetic construct
  source 1..120: mol_type = other DNA
gaacatctcctgatcaggagtacagatcagcttgtacagatgcatgaaaaaagcatggtttccctggtggggtagcataatcattcaccatctcccttggcttggggtgggagttcccct

SEQ ID NO: 33415 - DNA, 120 bp, synthetic construct
  source 1..120: mol_type = other DNA
agtgttcattcgctgtttccattctcctcagtgggagccacagaccagagctacttctaatcaacattcttggcctctcccttgtttttttattgttgggttttagaatttctttacaaa

SEQ ID NO: 33416 - DNA, 120 bp, synthetic construct; identical to SEQ ID NO: 9290
  source 1..120: mol_type = other DNA

SEQ ID NO: 33417 - DNA, 120 bp, synthetic construct
  source 1..120: mol_type = other DNA
ttctgtaatgtgccatttggggcaaaaacaataacattgtagaacctttccaagagattaactttctattttcaaagaccaacaattccacccaggtaaattactgcaaaggcatcctga

SEQ ID NO: 33418 - DNA, 120 bp, synthetic construct
  source 1..120: mol_type = other DNA
ataaatccaagttaatctctctgaatgttagttccttcaactgcaaaatgagaatatctattccatggagtaatgctggggattaaatgaaatggcaaatataaagcatcaaaaatagtg

SEQ ID NO: 33419 - DNA, 120 bp, synthetic construct
  source 1..120: mol_type = other DNA
tgagattttagtgcacctgtcacccaagtagcataaattgtactcaatatgtagttttttatccttcacccccatcccatcctcccctcttctgagtctccaatgtccattttaccactc

SEQ ID NO: 33420 - DNA, 120 bp, synthetic construct; identical to SEQ ID NO: 9291
  source 1..120: mol_type = other DNA

SEQ ID NO: 33421 - DNA, 120 bp, synthetic construct
  source 1..120: mol_type = other DNA
ttaatggcctttgcacccttgttgaaaatcgtttgacagtatatgtcagggtaatttcctggttttgatattgtgctttagttatataagatgtgacaattggggaaaactggatgaagg

SEQ ID NO: 33422 - DNA, 120 bp, synthetic construct
  source 1..120: mol_type = other DNA
tcaataaggtacctaataaaaattatccgaagtgaaatacaaagagaaaagaagagtgggggataaaagcaaaacagagcatccacgagctgtagtaccatatcaaatggtactatattt

SEQ ID NO: 33423 - DNA, 120 bp, synthetic construct
  source 1..120: mol_type = other DNA
gtgatcctcccacctcatcctctcgagtagctgggactacaggtctgtaccaccacactcagttaatttttgtattttttgtaaagatggtgtctccccatgttacccagactggtctca

SEQ ID NO: 33424 - DNA, 120 bp, synthetic construct; identical to SEQ ID NO: 9292
  source 1..120: mol_type = other DNA

SEQ ID NO: 33425 - DNA, 120 bp, synthetic construct; identical to SEQ ID NO: 3524
  source 1..120: mol_type = other DNA

SEQ ID NO: 33426 - DNA, 120 bp, synthetic construct
  source 1..120: mol_type = other DNA
tacagatcagtagcaagggacagaagaagcctcagctccattgtgagtcagtcccctaaagctcaagaaagttgtctgggatatacaaagtactgactacaccaattattatatcatgat

SEQ ID NO: 33427 - DNA, 120 bp, synthetic construct
  source 1..120: mol_type = other DNA
acaaccaagtgtgcatttcttcctgataggcatttaacacactaagtgaccatatgacttaaattgtccatatgatgctgagagttataagattcatagactcttaagtttgggcatacc

SEQ ID NO: 33428 - DNA, 120 bp, synthetic construct
  source 1..120: mol_type = other DNA
aaccacaatccatcatgcaattaaagcagtacatttgaaaccagacttcagcaggtttaaaaactaggtggttgttctggtttggtgatagatactacaatcccagaagggtttatgctc

SEQ ID NO: 33429 - DNA, 120 bp, synthetic construct; identical to SEQ ID NO: 9293
  source 1..120: mol_type = other DNA

SEQ ID NO: 33430 - DNA, 120 bp, synthetic construct
  source 1..120: mol_type = other DNA
tgtccagtttattcctgccaaaatttcactctctgggacagctctgtctgggaaagaagttaaatttgaaggtgtcaggtaagatagaaagaagacaattcaacaaaccacatgactcaa

SEQ ID NO: 33431 - DNA, 120 bp, synthetic construct
  source 1..120: mol_type = other DNA
atgagcctcaaagatgggattaggacccttataaaaggactcaaggttgaagggaatgctcccttgcccctccaccttccaccatgtgattcactttccgccatgtgaagacactgcaag

SEQ ID NO: 33432 - DNA, 120 bp, synthetic construct
  source 1..120: mol_type = other DNA
aacagtcaaagacaacatcctagagggcaatgtcttccagccagcaccattcaattattcttttggactgactacatctaggtaatgggtatatatcattatcccattgctacgtcttgt

SEQ ID NO: 33433 - DNA, 120 bp, synthetic construct
  source 1..120: mol_type = other DNA
atgtaggtgagaatagcaaatccatatccaaagtgtatactaattccagaaagaataaatcacttcccctccaaggtggaagattttgatacagtcaacctgacaccaactcgctggctg

SEQ ID NO: 33434 - DNA, 120 bp, synthetic construct; identical to SEQ ID NO: 9294
  source 1..120: mol_type = other DNA

SEQ ID NO: 33435 - DNA, 120 bp, synthetic construct
  source 1..120: mol_type = other DNA
gttgtctctgtcactcaaacagaaaaacaaactatactaaattcagaggatgaggggaatcaggagcggcttgtgatggagggagatgaatattagttacagccataatgacaacgtagt

SEQ ID NO: 33436 - DNA, 120 bp, synthetic construct
  source 1..120: mol_type = other DNA
aatgagaggcaccatattagagtatggcagcttggatccctgaatcaccagcttgagaagagctactcacaaatcatcagtatcttcctactgttacattagtgagttataaaattctac

SEQ ID NO: 33437 - DNA, 120 bp, synthetic construct
  source 1..120: mol_type = other DNA
taatggtttctcctgagctagacttacttgaaatggtcctcattttttgttttagtattaccagagatgtaagacagaatctcacgaaaatattcaagctggtggatgaggccaaattag

SEQ ID NO: 33438 - DNA, 120 bp, synthetic construct; identical to SEQ ID NO: 9295
  source 1..120: mol_type = other DNA

SEQ ID NO: 33439 - DNA, 120 bp, synthetic construct
  source 1..120: mol_type = other DNA
agctttagtggaaagtgtgtacatgaaactagcaaccaaacactcaaagcaagaagaataataactaagtgaccacaaaggaaatttttttaatcacatgcctggctcttgcaggtggag

SEQ ID NO: 33440 - DNA, 120 bp, synthetic construct
  source 1..120: mol_type = other DNA
agtactttccttgccagccaatgagaagaagtgaagcagcatcatttgtctctggctgactgagccagtaagtctgttacagaaaaaaaaaaaatcacttaaaagagcaataaacataga

SEQ ID NO: 33441 - DNA, 120 bp, synthetic construct
  source 1..120: mol_type = other DNA
tttccaaacaaaatacatagactttgtgatgctttaatctaaatatcaataagatagttttgttaacaaaatgtttctaatttttttcaagaataataaatataaaaatagctattgata

SEQ ID NO: 33442 - DNA, 120 bp, synthetic construct; identical to SEQ ID NO: 9296
  source 1..120: mol_type = other DNA

SEQ ID NO: 33443 - DNA, 120 bp, synthetic construct
  source 1..120: mol_type = other DNA
atatacggtaataaaacttaagtaaatggggtcccctctctttctcaaaatgtcttactgtactatacacccctattttcaaactgtgattaaccacagataactgaaactatggaaagt

SEQ ID NO: 33444 - DNA, 120 bp, synthetic construct
  source 1..120: mol_type = other DNA
aaacatatttcgaagaagcttccagtgttatagtttatattcttcatttctttgaggcacagaagaacccatttcactcttttggagtcaatccaggtttgtggggtaaaggactgtagc

SEQ ID NO: 33445 - DNA, 120 bp, synthetic construct
  source 1..120: mol_type = other DNA
ggcaagtttttgcaatatacttgaacaacatggcacctatgtggaatggaagagaaagcagcgtagtggtgaggaaattctggtgggtgaagacattctcaggtgaaatttttagaagaa

SEQ ID NO: 33446 - DNA, 120 bp, synthetic construct
  source 1..120: mol_type = other DNA
caataatggtttggagtgttttaaatggtgcactgggaagtttactcttgcttgttaaagaatgccacattagaactgctttcaagaacagaacaagttatcctgaatttatgttggata

SEQ ID NO: 33447 - DNA, 120 bp, synthetic construct; identical to SEQ ID NO: 9297
  source 1..120: mol_type = other DNA

SEQ ID NO: 33448 - DNA, 120 bp, synthetic construct
  source 1..120: mol_type = other DNA
tatcaatttttaagcattgcgctatattaaaagaaagtgcttatagtgcagtacgtgaaccttaaatgagcaaaatatattgtattagttttctagccactgtcacagaaaattagtaca

SEQ ID NO: 33449 - DNA, 120 bp, synthetic construct
  source 1..120: mol_type = other DNA
taattctcatctgagtttggggtcctcttccaagctcactgcctgttggcagaattcatttccacatatgactgaggtccatagcaactataaatataggtgcatctaataaaatatcct

SEQ ID NO: 33450 - DNA, 120 bp, synthetic construct
  source 1..120: mol_type = other DNA
atataaaagatctaaacaacacaattagtaagcttaacctaatagactcaaatatattataaagttattgtctatgttctcatctatgtgccaggtggtagattcaccagtgcctattca

SEQ ID NO: 33451 - DNA, 120 bp, synthetic construct
  source 1..120: mol_type = other DNA
cacctgaagtcaggagtttgagaccagcctggccaacatggtgaaaccctgtctctactaaaaaaatacaaaattaccagggtatggtggtatgcaccttagtcccagctactcaggaga

SEQ ID NO: 33452 - DNA, 120 bp, synthetic construct; identical to SEQ ID NO: 9298
  source 1..120: mol_type = other DNA

SEQ ID NO: 33453 - DNA, 120 bp, synthetic construct
  source 1..120: mol_type = other DNA
catgtctttgaggatattttattagatgcacctatatttatagttgctatgttttccttttcttttctttctttttttagacaaagtctggctctatcgcccaggctggagtgcagtggt

SEQ ID NO: 33454 - DNA, 120 bp, synthetic construct
  source 1..120: mol_type = other DNA
agagacaggttttagccatgttgcctagactggtcttgaaatcataagctcaagcggtccacctgcctcagcctcccaaagtgctgggattacaggtgtgagcccctgtgcccagccttt

SEQ ID NO: 33455 - DNA, 120 bp, synthetic construct
  source 1..120: mol_type = other DNA
gcataatatgtcctttctatgttttacacttaatctctgaaatgacttttatgctttaggtatgtgtcttgtaaacagtataacctgaatttatgtttttgcattcaatttgtcagtctc

SEQ ID NO: 33456 - DNA, 120 bp, synthetic construct; identical to SEQ ID NO: 9299
  source 1..120: mol_type = other DNA

SEQ ID NO: 33457 - DNA, 120 bp, synthetic construct
  source 1..120: mol_type = other DNA
tgcatatggcctgtctctggactcaactcaacatcccatgtcctcgctcagactatataactctagacccagcctgttaatatggactgcttgtattttttcagagaaacctctaaaaga

SEQ ID NO: 33458 - DNA, 120 bp, synthetic construct
  source 1..120: mol_type = other DNA
gctctaaactatatcccctggataatctaacctgtaaatagtttgaacagttatcttttacagccagaataacaatactagttaataccagaggactaatctatgggtagctcgtttcaa

SEQ ID NO: 33459 - DNA, 120 bp, synthetic construct
  source 1..120: mol_type = other DNA
ggcatcttaatagtatccaggatcctcacatgtgaagaaaagtgaactaggtaacaaatgagaagacttacatacgcttagttcttgcaggaggaaaggaactatctgggtatggaaaag

SEQ ID NO: 33460 - DNA, 120 bp, synthetic construct
  source 1..120: mol_type = other DNA
tatgatgaggcagagtcacttgtctctggcagtccaagctactaagaagcacaaataaaatatatagtagcagggggagatgggaagggtgagagaatgtaggataaattaccattcaaa

SEQ ID NO: 33461 - DNA, 120 bp, synthetic construct; identical to SEQ ID NO: 9300
  source 1..120: mol_type = other DNA

SEQ ID NO: 33462 - DNA, 120 bp, synthetic construct
  source 1..120: mol_type = other DNA
aaaaaaaatatataagtacaaaatactattcttattgcaagttttctttaagtttacttttttattttttttttttgagcagaatagttgtccaggtgcagtggctgacttatttattta

SEQ ID NO: 33463 - DNA, 120 bp, synthetic construct
  source 1..120: mol_type = other DNA
tcatcatttacattaagtatatctcctaatgctatccctccctcctcccccctccccacaacaggcccccatgtgtgtgatgttccccttcctgtgtccaagtgttctcattgttctttt

SEQ ID NO: 33464 - DNA, 120 bp, synthetic construct
  source 1..120: mol_type = other DNA
gtgtactcatatatccaaaaaggaaactttccattttgtagttgggaagtagagccaagatgtaggagtaggaggggagttgagaaccaacaattcagtaaaaatgctttcagtcaattc

SEQ ID NO: 33465 - DNA, 120 bp, synthetic construct
  source 1..120: mol_type = other DNA
aagcgattctccttcctcagcctcccgagtagctaggattacaggcacctgccaccatgcttggctaatttttgtatttttagtagagacggggtttcaccatgtggccaggctggtctc

SEQ ID NO: 33466 - DNA, 120 bp, synthetic construct; identical to SEQ ID NO: 9301
  source 1..120: mol_type = other DNA

SEQ ID NO: 33467 - DNA, 120 bp, synthetic construct
  source 1..120: mol_type = other DNA
tataattctaagatggtctgacaagtctattgtgattgactttaaaaatacagatgttaaatgaaatctgtatgtggaactattggtctcaatgatatatgcaactctggaagttgggta

SEQ ID NO: 33468 - DNA, 120 bp, synthetic construct
  source 1..120: mol_type = other DNA
ttgcctaggctggtttcatactcctgagctcaagcaatcctcccaccttggcctctcaaattgctcaagcatcttctctgaacccagttgaataaaactggaaattaataagaagagaaa

SEQ ID NO: 33469 - DNA, 120 bp, synthetic construct
  source 1..120: mol_type = other DNA
aacataccaaaacccatgggatacagcaaaagcagtaataaggaggaagtttatagctataagtgcctacatcagaaaaggagaaactttaaattagcaatctaatgatgcatcttaaaa

SEQ ID NO: 33470 - DNA, 120 bp, synthetic construct; identical to SEQ ID NO: 9302
  source 1..120: mol_type = other DNA

SEQ ID NO: 33471 - DNA, 120 bp, synthetic construct
  source 1..120: mol_type = other DNA
tcaaaacctaaaaagatcaataacaacaagatcaaagtcacaataaacagtctaccagtaaataaattccaggacctgatgacttcactgctgaatgctaccaaacattcaaagaagaac

SEQ ID NO: 33472 - DNA, 120 bp, synthetic construct
  source 1..120: mol_type = other DNA
aaccagacaaagacacataaaaaaaacctgtaggccaatatctctgatgaatattgatgcaaaaatcctcaacaaaatattagtaaactgaattaaacaatacatcagaaagatcactca

SEQ ID NO: 33473 - DNA, 120 bp, synthetic construct
  source 1..120: mol_type = other DNA
aaaaaagcatttgataaaatttaacatcatttcatgttaaaaattctcaaaaactggggatataaagaacatacttcaacataataaaagccatatatgacagacccacagctagtatca

SEQ ID NO: 33474 - DNA, 120 bp, synthetic construct; identical to SEQ ID NO: 9303
  source 1..120: mol_type = other DNA

SEQ ID NO: 33475 - DNA, 120 bp, synthetic construct
  source 1..120: mol_type = other DNA
acaaaatgaaatacctaggaattaacttgaccaatgaagtgaaaaatctctataataaaagaaattgaggaataagaaatctctataataaaagaattttttataataaattctgtattc

SEQ ID NO: 33476 - DNA, 120 bp, synthetic construct
  source 1..120: mol_type = other DNA
aaaatgtccatactacccaaagcaatctacagattcaacacaatcactatcaaacaaccaatgacatttctcacagaaatggaaaaaaatcttaaaattatatggaaccacaagactcag

SEQ ID NO: 33477 - DNA, 120 bp, synthetic construct
  source 1..120: mol_type = other DNA
atagaccagtggaatggactagagaacccagaagcaaatccacaagcctacagtgcactcatttttgacaaaagtgccaaaaacatacactggggaaaagacagtctctgcaataagtga

SEQ ID NO: 33478 - DNA, 120 bp, synthetic construct; identical to SEQ ID NO: 9304
  source 1..120: mol_type = other DNA

SEQ ID NO: 33479 - DNA, 120 bp, synthetic construct
  source 1..120: mol_type = other DNA
attcaaacaactctataggaaaaaactaataatccaatcaaaagttgggcaaaagatttgaatagatgtttctcaaaataagacatacaaatgacaaacaggcatatgaaaaggtgctca

SEQ ID NO: 33480 - DNA, 120 bp, synthetic construct
  source 1..120: mol_type = other DNA
aaagaacacttggacactattggtgggaacgtaaattagtacaactactatggagaacaatttggaggttcttcaaaaaactaaaaattgagctctcatatgatccagcaatcccactgc

SEQ ID NO: 33481 - DNA, 120 bp, synthetic construct
  source 1..120: mol_type = other DNA
gagatccagtcatttgcaacaacaggcatggcagttccataagtgaaataagctaggcacagaaagacaaatatcgcatgttcttagttatttgtaggatctaacaattaaaatgattgg

SEQ ID NO: 33482 - DNA, 120 bp, synthetic construct; identical to SEQ ID NO: 9305
  source 1..120: mol_type = other DNA

SEQ ID NO: 33483 - DNA, 120 bp, synthetic construct
  source 1..120: mol_type = other DNA
aattagagcccacacatcccatatacatacttcccatattaaagcccaaacatctcatataaacactttattatttgaaattcttggccatggaatatcgtatactttcatttaatttct

SEQ ID NO: 33484 - DNA, 120 bp, synthetic construct
  source 1..120: mol_type = other DNA
aatccacactcatgatcttcctctgtatgttaaataaatcagagccatcgtgagagcatgtcatcatggggaacacaagtgcctgagttagattgatcaaaaagataaaatttgttatca

SEQ ID NO: 33485 - DNA, 120 bp, synthetic construct
  source 1..120: mol_type = other DNA
tgtcatcttcattattttatatatctctgctttcagattcacatagtacaaaatggtccctgccaagatgttctcaattcatctctcctttgccctagggcttcttttcctagaccagtc

SEQ ID NO: 33486 - DNA, 120 bp, synthetic construct; identical to SEQ ID NO: 9306
  source 1..120: mol_type = other DNA

SEQ ID NO: 33487 - DNA, 120 bp, synthetic construct
  source 1..120: mol_type = other DNA
ttctgattttgaaattagcctgccactgtttgcatggaaatttactactggtaagcccttgtttctctatccccttactcagctttcttcatttgtatcttcatagcaagaatcaccacc

SEQ ID NO: 33488 - DNA, 120 bp, synthetic construct
  source 1..120: mol_type = other DNA
accttgctgactattttatctggaatagtacatagcacttagtaggagctaaataattatttgacaaatgaatggatacattaattgatgaattttatgtccaaatctaggctgcttttg

SEQ ID NO: 33489 - DNA, 120 bp, synthetic construct
  source 1..120: mol_type = other DNA
gctctaaacacttggatcctttcgcaatcagggatcttcaatttctccacttggtgttttgctcaacaaatgaaagtgcctttgaatattcacatttggtcctccaaaaccacatcagct

SEQ ID NO: 33490 - DNA, 120 bp, synthetic construct
  source 1..120: mol_type = other DNA
ttaaactgaaatgacataatgtttctgtgtcaaatattgtagagaaagttgaccatctttgcatacgctatttgccatttgagttcttctgtgaattgccggttcacctactttccaaca

SEQ ID NO: 33491 - DNA, 120 bp, synthetic construct; identical to SEQ ID NO: 9307
  source 1..120: mol_type = other DNA

SEQ ID NO: 33492 - DNA, 120 bp, synthetic construct
  source 1..120: mol_type = other DNA
tttgtttttttaatcctgcttggtattctccgagatttgtaatcggtgattcgttgtctgtcattaattttggcaagttctcacctggcttctacaacatcagactcttgcggcttcctc

SEQ ID NO: 33493 - DNA, 120 bp, synthetic construct
  source 1..120: mol_type = other DNA
ttacaggaacagctttcccaacaccctagaggaaggatttctgacaagtcccagagggtggattacagcaaactaccgctggagcagcagttcaacaactacctctctgccattcagtga

SEQ ID NO: 33494 - DNA, 120 bp, synthetic construct
  source 1..120: mol_type = other DNA
attgaattgaaagatgcaaagtattgttcctgggtgtgtctgtgagggtgttgccaaaggagattaacatttgagtcagtggactgggagaggcaagacccaccctcaatctgggtgggc

SEQ ID NO: 33495 - DNA, 120 bp, synthetic construct
  source 1..120: mol_type = other DNA
ccacagactgaaggctgcactgtcagcttccctacttttgaggttttgggactcggactggcttccttgctcctcagattgcagacggtctactgtgggacttcaccttgtgatcatgtg

SEQ ID NO: 33496 - DNA, 120 bp, synthetic construct; identical to SEQ ID NO: 9308
  source 1..120: mol_type = other DNA

SEQ ID NO: 33497 - DNA, 120 bp, synthetic construct
  source 1..120: mol_type = other DNA
tttgcttccagaatatccttttttggatattaacagacggtgtgtcgtagcaaaattaggtagtcaaagcaagtaagaggaagatatcagatacctgaaacattatcttctaccaaagaa

SEQ ID NO: 33498 - DNA, 120 bp, synthetic construct
  source 1..120: mol_type = other DNA
taaattttacagtattgttgagatattcaaaacatctgaggatatgattaaaaagtagactacatatatgagggaaaagaaattgcaaatagaatcttcataaaaattaaaagatgccca

SEQ ID NO: 33499 - DNA, 120 bp, synthetic construct
  source 1..120: mol_type = other DNA
tgggatatgaaataaagaaaaaagtagagcaggaaagaatagggttagcagtagcttcatctacaaggagaaaactcaagagatcttgaatataactgacagaataatagagtactgtgt

SEQ ID NO: 33500 - DNA, 120 bp, synthetic construct
  source 1..120: mol_type = other DNA
aaccccatctctactgaaaatacaaaaaaaaaaattagccgggcatggtggcgggcgcctgtagtcccagctactcaggaggctgaggcaggagaatggcgtgaacccgggaggcggagc

SEQ ID NO: 33501 - DNA, 120 bp, synthetic construct; identical to SEQ ID NO: 9309
  source 1..120: mol_type = other DNA

SEQ ID NO: 33502 - DNA, 120 bp, synthetic construct
  source 1..120: mol_type = other DNA
acatctctattgtttaatcttcaaactatatactgatatcccaataaatttaaaatagtaattgtaaagtaaatatcattcttactgaaatatcaagaatgctgcagatggtggcggaat

SEQ ID NO: 33503 - DNA, 120 bp, synthetic construct
  source 1..120: mol_type = other DNA
cagttctcaaacaaaagcagactttaactcctgctccagccatgcttctttgcttctcaaacatccaaaactgcatctcagattgcatcatattctgagcacatggaaggaagagtacgg

SEQ ID NO: 33504 - DNA, 120 bp, synthetic construct
  source 1..120: mol_type = other DNA
cccacctactggtgaacatgacccagttaacatccctacagctgtccatgtcctcctaaaacaagaaccttgaacttcttccagtagtatagaatccgtgtcctttagcacagttctaca

SEQ ID NO: 33505 - DNA, 120 bp, synthetic construct; identical to SEQ ID NO: 9310
  source 1..120: mol_type = other DNA

SEQ ID NO: 33506 - DNA, 120 bp, synthetic construct
  source 1..120: mol_type = other DNA
cagtctggttctcgtccttttatgtgtaaactgtttatttccttcttggaagccaatagatcatttttattaccattttattttctgattgtgtagtaaaaattttcatccctccagcta

SEQ ID NO: 33507 - DNA, 120 bp, synthetic construct
  source 1..120: mol_type = other DNA
tatcctatattttttctatttttccggcacacctattatacagcagttggagatggctgtatagatagaactttctcaacatattttcacaattttatgtgttccaaggtagttaaaaca

SEQ ID NO: 33508 - DNA, 120 bp, synthetic construct
  source 1..120: mol_type = other DNA
tgataactgcttagttatttctcacctgccttaaagagtgtttcttcattatgctcaagaatgagagcaatttaaaatgaaatcattttaacctgtctcctcagagacaagttctgttgg

SEQ ID NO: 33509 - DNA, 120 bp, synthetic construct; identical to SEQ ID NO: 9311
  source 1..120: mol_type = other DNA

SEQ ID NO: 33510 - DNA, 120 bp, synthetic construct
  source 1..120: mol_type = other DNA
taaacaattgagtcagtaaggcttccacactttgccattgaactgagtgggatgtgggaaatgctttcaaagttccgggactttacaggtatgtcccaatttttactttctgccttcaca

SEQ ID NO: 33511 - DNA, 120 bp, synthetic construct
  source 1..120: mol_type = other DNA
tggatctccctggtaaaattcctgactggcctgccatcatgacttcaagctagttgagatgttagccttccataattatttgccctgaggtctatgctgttttctacaaaatgccaagac

SEQ ID NO: 33512 - DNA, 120 bp, synthetic construct; identical to SEQ ID NO: 3546
  source 1..120: mol_type = other DNA

SEQ ID NO: 33513 - DNA, 120 bp, synthetic construct; identical to SEQ ID NO: 9312
  source 1..120: mol_type = other DNA

SEQ ID NO: 33514 - DNA, 120 bp, synthetic construct
  source 1..120: mol_type = other DNA
ccagctttcttgcccagtgtatattttttcatccttatatttttaacctgtgtcttcatacttaaaatgcatttcttatggacagtgtatggtcaaaagtcttgcttatttatccagttt

SEQ ID NO: 33515 - DNA, 120 bp, synthetic construct
  source 1..120: mol_type = other DNA
aagtctacccccttgctgctttttgtttttggtccatctgttctttttctcttattcctctttacttgcctttcttagtatatttttctccctcctaatggtaactgagtagaaagatgt

SEQ ID NO: 33516 - DNA, 120 bp, synthetic construct
  source 1..120: mol_type = other DNA
gagtggaaaatcctaaataagaataccacagaggagagcccaaaattctgcatttgaaagaaatttgcatgcagaataggggcccctctttgagttttcatgttttttggggatttttct

SEQ ID NO: 33517 - DNA, 120 bp, synthetic construct; identical to SEQ ID NO: 9313
  source 1..120: mol_type = other DNA

SEQ ID NO: 33518 - DNA, 120 bp, synthetic construct
  source 1..120: mol_type = other DNA
aggatcttagacttttgacattcccatagcaatgagcacacttaacacacagatcttgatctagctttttaaccagactcttctaaaagaacccagagctatgacagattctagagcttg

SEQ ID NO: 33519 - DNA, 120 bp, synthetic construct
  source 1..120: mol_type = other DNA
gaggtcaggagatcgacaacatcctggctaacacggtgaaaccccgcctctactaaaaaatacaaaaaaaaaaattgccgggcgtggtagcgggcgcctgtagtcccagctacttgggag

SEQ ID NO: 33520 - DNA, 120 bp, synthetic construct
  source 1..120: mol_type = other DNA
aaaaaaaaaaaagaatgatggatatgtgtcaggtgtcagagataagaatatgttcaaagaatggtagatacatgctctttacacagataggcaaaaaataaccagaagaaagaatgcata

SEQ ID NO: 33521 - DNA, 120 bp, synthetic construct; identical to SEQ ID NO: 9314
  source 1..120: mol_type = other DNA

SEQ ID NO: 33522 - DNA, 120 bp, synthetic construct
  source 1..120: mol_type = other DNA
ataattaaatcaacctaactgacacttataagacattagactagaatatgcaatggcaaaatacatattatttcaggtgtacatgaaatatccatcaagatgaacaacatactggatcat

SEQ ID NO: 33523 - DNA, 120 bp, synthetic construct
  source 1..120: mol_type = other DNA
cctcaactaaattagaaagcagcaccaaactgataacctggaaatcccctaaatatacagaaattaatcaacatactaccaaataagccataggtctaagaggaaattacaaagaaaatt

SEQ ID NO: 33524 - DNA, 120 bp, synthetic construct
  source 1..120: mol_type = other DNA
gtttaaaatcaatggtgtgagcttctaccttaagaaggtagaaaaaggaaagcaaactaaatctaaagaagatagaaggtagaaagaaggaattaaaaagcaaagatgtggaaccaaccc

SEQ ID NO: 33525 - DNA, 120 bp, synthetic construct; identical to SEQ ID NO: 9315
  source 1..120: mol_type = other DNA

SEQ ID NO: 33526 - DNA, 120 bp, synthetic construct
  source 1..120: mol_type = other DNA
aggtgcagcaaaccaccatagcgcatgtatacctatgtaacaaacctgcatgttgagcacatgtatcccagaacttaaagtaaaataaataaaaaaaagaaatgattaaatgtggcaaag

SEQ ID NO: 33527 - DNA, 120 bp, synthetic construct
  source 1..120: mol_type = other DNA
gcactttgggaggatgaagagggacgatcatttgaagcaattctcctgcttcagccttcccaagtagctgggattataggcatgcgccaccatgcccggctaattttgtatttttagtag

SEQ ID NO: 33528 - DNA, 120 bp, synthetic construct
  source 1..120: mol_type = other DNA
tgaaattttaattggcaagaaggcagatggtgagaattgttgatccaataataacatgaagtccatgaaagcctgtggctacaaagaatgttgagccatagattccatcagagataataa

SEQ ID NO: 33529 - DNA, 120 bp, synthetic construct
  source 1..120: mol_type = other DNA
agcggcctcgaaatattctgagacttgtagaagaatgaaatagactcctaagaggatcgtggtaagtactgcttgaattatttgtttttggttaccttctattaggctgtgatgggctca

SEQ ID NO: 33530 - DNA, 120 bp, synthetic construct; identical to SEQ ID NO: 9316
  source 1..120: mol_type = other DNA

SEQ ID NO: 33531 - DNA, 120 bp, synthetic construct
  source 1..120: mol_type = other DNA
ggagagccgagagagctcctgttagtggtcaagggctaggtacagctatatggtaggcaagtgtttggtgggtcattatgtattatcatgcaaataaagacttactaatagtgtgaagac

SEQ ID NO: 33532 - DNA, 120 bp, synthetic construct
  source 1..120: mol_type = other DNA
cactaataattgataatattagcactgcactgcgactgtggtcggcgattatcccacttccagggccaatcaggctaacaaattatttcaaacctattacaactccctacaatgcttcaa

SEQ ID NO: 33533 - DNA, 120 bp, synthetic construct
  source 1..120: mol_type = other DNA
atgcaactgcactatcattattaaacacccctctaaccatcagactaaccaagctgattaccaagttatcacctgaagcaaatggaacgtttctgcatctggcttgttttacagcctatc

SEQ ID NO: 33534 - DNA, 120 bp, synthetic construct; identical to SEQ ID NO: 9317
  source 1..120: mol_type = other DNA

SEQ ID NO: 33535 - DNA, 120 bp, synthetic construct
  source 1..120: mol_type = other DNA
ctagtttatctttctccttccattggactagctcctcctaatcaacctttgtctatcccatccatccaatatgttaggaaaaggagagccatccacatcattccttaatggctgccttgg

SEQ ID NO: 33536 - DNA, 120 bp, synthetic construct
  source 1..120: mol_type = other DNA
aactagactccttagctggtgcagtcctccagaacagacagagactagatcttataatggttgaaagagagggcatctgcctctaactgggtgaggaaagttgtttctatctcaaccagt

SEQ ID NO: 33537 - DNA, 120 bp, synthetic construct
  source 1..120: mol_type = other DNA
tcctgggccctctcctaatgatatgcctaggactaactttcttaccctgcctaattaatcttttccaaagatttttaaccaacaggatcatggccatttcacagacaactacccaaaaac

SEQ ID NO: 33538 - DNA, 120 bp, synthetic construct; identical to SEQ ID NO: 9318
  source 1..120: mol_type = other DNA

SEQ ID NO: 33539 - DNA, 120 bp, synthetic construct
  source 1..120: mol_type = other DNA
ccaagataacctcccctccaaccagagacattccaaccccacaataaacttcttctccacacagaaacattcaagcctttcgccccaaacccttaaatactcttagtctgtaagagagag

SEQ ID NO: 33540 - DNA, 120 bp, synthetic construct
  source 1..120: mol_type = other DNA
tatgcatttatgttttatatacactttatacatatagcagcctgaaggtaattttttttttttcaggttgttttttttttttgttttttttttgtttttttttttttaattatactctaa

SEQ ID NO: 33541 - DNA, 120 bp, synthetic construct
  source 1..120: mol_type = other DNA
cccccctcccccgaccccaccacagtccccagagtgtgatattccccttcctgtgtccatgtgatctcattgttcaattcccacctatgagtgagaatacgcggtgtttggttttttgtt

SEQ ID NO: 33542 - DNA, 120 bp, synthetic construct; identical to SEQ ID NO: 9319
  source 1..120: mol_type = other DNA

SEQ ID NO: 33543 - DNA, 120 bp, synthetic construct
  source 1..120: mol_type = other DNA
agaggacccatgatgtaatacatataaaacacttagacctattttatggcatacataggcctcaaataatgttatctaagggtatgacttatataatctgtacttgggactccagtttca

SEQ ID NO: 33544 - DNA, 120 bp, synthetic construct
  source 1..120: mol_type = other DNA
ttcttttccttctttatttctctctctctctctttctttctttctctctctctctttctttctttctctttctttcttccttccttccttccttccttccttccttccttccttccttcc

SEQ ID NO: 33545 - DNA, 120 bp, synthetic construct
  source 1..120: mol_type = other DNA
tctccagaacttttcctcatcccaaactggaactctgtaaccataaacaactccttattccttcctcctcccagccactagtgaccaccattctactttctgtctctgtttgatcactca

SEQ ID NO: 33546 - DNA, 120 bp, synthetic construct; identical to SEQ ID NO: 9320
  source 1..120: mol_type = other DNA

SEQ ID NO: 33547 - DNA, 120 bp, synthetic construct
  source 1..120: mol_type = other DNA
actctacctttttccacaacagctgcatcattttacattcccgccagcaaggcacaagggttccaatttctccacatccacagcaacacttatattctcttttttccttttgaataatag

SEQ ID NO: 33548 - DNA, 120 bp, synthetic construct
  source 1..120: mol_type = other DNA
ccatacacacatttttaaaaagtaaataattagcacaaaatcagagtaatgttttcctccaagggaaagatggtaggtagaaggtgcacacacagggcttctgggaagctggataagctt

SEQ ID NO: 33549 - DNA, 120 bp, synthetic construct
  source 1..120: mol_type = other DNA
actcttcaatcatgagctgaagaatagcaatacaagttgttgattgctcttctggatagaaatccaggataagaaatacaaattgaatttactctgagaaatttatctttcaagacatat

SEQ ID NO: 33550 - DNA, 120 bp, synthetic construct; identical to SEQ ID NO: 9321
  source 1..120: mol_type = other DNA

SEQ ID NO: 33551 - DNA, 120 bp, synthetic construct
  source 1..120: mol_type = other DNA
ctcttgtgtatgacacaaagcaagacaatgaggaagaagtaggtatttcatggaaaaacaaaataccctgagaagaaaataaagagagaggggaagtgaatcattggtatagtgagttac

SEQ ID NO: 33552 - DNA, 120 bp, synthetic construct
  source 1..120: mol_type = other DNA
atttcacccctgcagataagcattgaaaaaggcatgaatgtgaaagtgtggttttgagtagcttaatcaaaattgttttctcttgaattttacattgactaaaacaaatctggatctaag

SEQ ID NO: 33553 - DNA, 120 bp, synthetic construct
  source 1..120: mol_type = other DNA
agtggtgagtgaatgaaggtctaggcctttattgtacaccattaagtatttcgtaaacactgtacacagcctacactaaattacagaaaaaaagtctttcttcaatgatgaattaacctt

SEQ ID NO: 33554 - DNA, 120 bp, synthetic construct; identical to SEQ ID NO: 9322
  source 1..120: mol_type = other DNA

SEQ ID NO: 33555 - DNA, 120 bp, synthetic construct
  source 1..120: mol_type = other DNA
tcacttcctatgataacgatgttttcttcaggaatacctccttagggatctacctgaggctgttttatggttaattttctttttataaggaagagtacactctaaaataacaataaaatg

SEQ ID NO: 33556 - DNA, 120 bp, synthetic construct
  source 1..120: mol_type = other DNA
cattattgagtattgtgtactgtacataattgtattgctatacttttatgtgactggcagcacaggagatttgtttgcgccagcatcaccacaaacttgtgagtaatgcattatgctaca

SEQ ID NO: 33557 - DNA, 120 bp, synthetic construct; identical to SEQ ID NO: 3557
  source 1..120: mol_type = other DNA

SEQ ID NO: 33558 - DNA, 120 bp, synthetic construct; identical to SEQ ID NO: 9323
  source 1..120: mol_type = other DNA

SEQ ID NO: 33559 - DNA, 120 bp, synthetic construct
  source 1..120: mol_type = other DNA
agtattgtcatgtgattctgcacaactggggcttcccttgaggcaaagtgggaagagaaaattgagcaaaaatataaagggaaataccccatattccttaggccacagggttccttttcc

SEQ ID NO: 33560 - DNA, 120 bp, synthetic construct
  source 1..120: mol_type = other DNA
acactcagggaagaactagaagtgaaaaaagaagtaaagttccaaaaaaggaatattgctccacacactctctggagaccccctttgcaatctgtacagaaagaggaggtgtctcttgga

SEQ ID NO: 33561 - DNA, 120 bp, synthetic construct
  source 1..120: mol_type = other DNA
ccctaggaactcactcccttactattatttctccaagttctgacttccctccctaatattcatgctattttgtacttttcaaggtccacagatagctgccttttatattctgcctgatgt

SEQ ID NO: 33562 - DNA, 120 bp, synthetic construct
  source 1..120: mol_type = other DNA
ttgttgctgaaggatgtttttctgattttagaattctaggtttgtgttaggtgtagaagttttcttagcgtattttaaggtttcattccattttcctccagattccaaagtttctattga

SEQ ID NO: 33563 - DNA, 120 bp, synthetic construct; identical to SEQ ID NO: 9324
  source 1..120: mol_type = other DNA

SEQ ID NO: 33564 - DNA, 120 bp, synthetic construct
  source 1..120: mol_type = other DNA
tcttcttcattttatcttgtgctatgcttcagagtagatgctttctattaaactgtcttcaagttaactactactgcatttgcctgtgaccagtctgctgttaaattcacccattaagtt

SEQ ID NO: 33565 - DNA, 120 bp, synthetic construct
  source 1..120: mol_type = other DNA
tgactatatggttaaatagagttaatttaaagctcttttgtgctaagtgattaagtctagaaagagctttgtgtctcccaaaaaattgttggtgaggctgttggcattcagagtatcatg

SEQ ID NO: 33566 - DNA, 120 bp, synthetic construct
  source 1..120: mol_type = other DNA
ctgaggttgtttaaaatgtaaaagggcaatggatctgcaactctctatgtaaaagaaacaggctgagaaagttgttcaaagtgccgatcatcctatgtgctctttaaaggtggccaagga

SEQ ID NO: 33567 - DNA, 120 bp, synthetic construct; identical to SEQ ID NO: 9325
  source 1..120: mol_type = other DNA

SEQ ID NO: 33568 - DNA, 120 bp, synthetic construct
  source 1..120: mol_type = other DNA
attccagcactttgggaggctgaggcaggtggatcatgaggtcaggagatggagaccatcctggctaacacggtgaaaccgtgtgtctctactaaaaatacaaaaaataagccaggtatg

SEQ ID NO: 33569 - DNA, 120 bp, synthetic construct
  source 1..120: mol_type = other DNA
gagccgaggtggcgccactgcactcagtcgacagagtgagactccatctcaaaacaaacaaaaaaaaaaaaaaagaaagaaaaagaaagaaagaaagaaagaaaaagaaagaaagagaaa

SEQ ID NO: 33570 - DNA, 120 bp, synthetic construct
  source 1..120: mol_type = other DNA
ctaagttttttaaggattcagagtgggagagtttatccaaggcttggactgcttctgtgtctctttgttgtgcttatctaggagggagagttgtgtgtctgttcccatacatcttttttg

SEQ ID NO: 33571 - DNA, 120 bp, synthetic construct; identical to SEQ ID NO: 9326
  source 1..120: mol_type = other DNA

SEQ ID NO: 33572 - DNA, 120 bp, synthetic construct
  source 1..120: mol_type = other DNA
tctggattaaggagaactgcattctgacctgcatcctgattgtgagattttgaacttgatggctgatgccatgattgcatgagacttctggtgatcccagattaggggtaagcatatttt

SEQ ID NO: 33573 - DNA, 120 bp, synthetic construct
  source 1..120: mol_type = other DNA
ctccctatatccacgccctttgcaatctaactttactatgctctcccattatggatgggtgacttgaattgcctctcaacattaggcctaaccatgtgttcctctacagccaaggagtta

SEQ ID NO: 33574 - DNA, 120 bp, synthetic construct
  source 1..120: mol_type = other DNA
atgagaggcatgtgaagaagagtccaccttggatacataggtgagcttggccaaggttagcagtgccacctagctgacccagacatataagcatattgttatctgccactggtgatttgt

SEQ ID NO: 33575 - DNA, 120 bp, synthetic construct; identical to SEQ ID NO: 9327
  source 1..120: mol_type = other DNA

SEQ ID NO: 33576 - DNA, 120 bp, synthetic construct
  source 1..120: mol_type = other DNA
gtgattctcctgcctcagcctcccaagtagctgggattacaagcatgcaccacaacacctggctaatttttgtatttttagtagagacagggtttcaccatgttggccaggctggtctcg

SEQ ID NO: 33577 - DNA, 120 bp, synthetic construct
  source 1..120: mol_type = other DNA
ccttcttatgaaaagacctcttggagagtttaatgtacatacatattccagagtttggacaattcagtagattggtacctggggtatgctgaagaatgctgaagtccaagagtcaactta

SEQ ID NO: 33578 - DNA, 120 bp, synthetic construct
  source 1..120: mol_type = other DNA
gaggctctgatcccacagcagtgtctgggggtgaatgtttacagctcctgaagccccagtgggtgtgttcctctgctgatgtgctctctctcaacgtccagcagcttctgtccctgcctt

SEQ ID NO: 33579 - DNA, 120 bp, synthetic construct; identical to SEQ ID NO: 9328
  source 1..120: mol_type = other DNA

SEQ ID NO: 33580 - DNA, 120 bp, synthetic construct
  source 1..120: mol_type = other DNA
aagggaaaggtctggggtctgcttgtcttagtatctcaaggcagcctccaagagaaacagatcatagaagaaagaggctgctagtattccagagtgcctagtgactgagaattccatgag

SEQ ID NO: 33581 - DNA, 120 bp, synthetic construct
  source 1..120: mol_type = other DNA
tcaagctcatgaaatatcaggcaagtaaaaactgtcctcttctgctctccatgcctcaactcgcaggggtctgaaactatatcaggtagaagaaatagaagcacaagctgtagaaacaaa

SEQ ID NO: 33582 - DNA, 120 bp, synthetic construct
  source 1..120: mol_type = other DNA
aattgaatacctttctttttttacttaaacattatcagagaggttatgaagccttcctgaatgctcattcaaggtaaggaattggctaaccccaaagaacacattgaaaagaaaaaatga

SEQ ID NO: 33583 - DNA, 120 bp, synthetic construct; identical to SEQ ID NO: 9329
  source 1..120: mol_type = other DNA

SEQ ID NO: 33584 - DNA, 120 bp, synthetic construct
  source 1..120: mol_type = other DNA
cacgcttctaataaagacatatccaatactgggtaaattataaaggaaagaggtttaatggacgcatagttccacatggctggggaggcctcacaatcatggtgggaggcaaaggagaag

SEQ ID NO: 33585 - DNA, 120 bp, synthetic construct
  source 1..120: mol_type = other DNA
tgattcaattacttctgactggaaccctcccaagtcacgtgggaattatgggaactgcagttcaagatgagatttgggtgcggacacagccaaaccatataaactgcagtttatttttta

SEQ ID NO: 33586 - DNA, 120 bp, synthetic construct
  source 1..120: mol_type = other DNA
tttacaaggttttgccttttacacttgatgctgaaatcaagaagtcttttaaaaaataattttcctttaaactttgagtacagcttttcactaggattgccaacatgatgaaacgaagat

SEQ ID NO: 33587 - DNA, 120 bp, synthetic construct; identical to SEQ ID NO: 9330
  source 1..120: mol_type = other DNA

SEQ ID NO: 33588 - DNA, 120 bp, synthetic construct
  source 1..120: mol_type = other DNA
gcttatttacactgggttttactttggtatggaggtaactcttatccaagtgtggttggttcgaaggacaagtagggatgatacgaggctgcttggcactaaggattaggtagagttggg

SEQ ID NO: 33589 - DNA, 120 bp, synthetic construct
  source 1..120: mol_type = other DNA
ggaaggaaggaggctaaatctgctgcacaatttgaaactagggcatgatagtgtggcaaagaagagatagagcttgaaatagaagtagttacttatttagcatgtgtattaattactata

SEQ ID NO: 33590 - DNA, 120 bp, synthetic construct
  source 1..120: mol_type = other DNA
tgttttatgagacaaataaggttgctgctatcaaagaaatcaaataaatgaagaaagattatcatataataatgagtgctctctgaggagaaaaacaaaagtaattgggagtgatttgag

SEQ ID NO: 33591 - DNA, 120 bp, synthetic construct
  source 1..120: mol_type = other DNA
agccagctattcaaaatccatagcaaaccactccacacggcaagaacataagtgaaaattgctaaggaaggaacaaatctgcatgttagagaaacagatagggagttagtgtacttaagt

SEQ ID NO: 33592 - DNA, 120 bp, synthetic construct; identical to SEQ ID NO: 9331
  source 1..120: mol_type = other DNA

SEQ ID NO: 33593 - DNA, 120 bp, synthetic construct
  source 1..120: mol_type = other DNA
tattgacatgtacattatctattctgtaatgatgccatccctcctagtttccattgcagaggattggatctggaaattgtgttactaagaaaaatgcaggagaaggtttgagtgtcccta

SEQ ID NO: 33594 - DNA, 120 bp, synthetic construct
  source 1..120: mol_type = other DNA
tagatttagccaatcagaggcattctggtaaagtttggacatgctgaggggcttttttgacctgaaaaggcaccagtgtaggggtgccttattttctgtgccagaattaggagagatttt

SEQ ID NO: 33595 - DNA, 120 bp, synthetic construct
  source 1..120: mol_type = other DNA
tgttctgagcagcgtgagttcctgattgtagaagaggaggtggtttccttggttgcccgattcagttccttctattgtcctcatgattctctaggctatgttaaggtctgtaataaactc

SEQ ID NO: 33596 - DNA, 120 bp, synthetic construct; identical to SEQ ID NO: 9332
  source 1..120: mol_type = other DNA

SEQ ID NO: 33597 - DNA, 120 bp, synthetic construct
  source 1..120: mol_type = other DNA
ttcagcacactgagtcccaatgggtaactgattgcctctttattttttcatggagaaccagaacagaatggaagacttgagcaacatcaaagagttagctatatttgaaatccatatgaa

SEQ ID NO: 33598 - DNA, 120 bp, synthetic construct
  source 1..120: mol_type = other DNA
aagacaaagccttagaataagaacttcaatattggcagatctggtaggctcaaaaacaaaacaagaacggcagctataacatctactagctgtttattgtatgtcccttccaatgcagta

SEQ ID NO: 33599 - DNA, 120 bp, synthetic construct
  source 1..120: mol_type = other DNA
tgataagagtgtgtagcgagattgttgatttgaaggtcttgtgtgataaagcattgtatttctgtagaaaatacgatattgaagattttttaaataccattttaaataacatcatttcat

SEQ ID NO: 33600 - DNA, 120 bp, synthetic construct; identical to SEQ ID NO: 9333
  source 1..120: mol_type = other DNA

SEQ ID NO: 33601 - DNA, 120 bp, synthetic construct
  source 1..120: mol_type = other DNA
aatattgctgaacaaaatagacaaggtgtctcttttgattttatactctaaataaatagatgaataaatgataatgatagataattgtagatcaatagatggacagaaaccagaaaaata

SEQ ID NO: 33602 - DNA, 120 bp, synthetic construct
  source 1..120: mol_type = other DNA
ttggttcaactggcatatttcatttcttcagtaaacaagctgatgcccatgacatgccaatagctcacagctgttctttggccttcctgtatatttctgcttccattagttgagtttaat

SEQ ID NO: 33603 - DNA, 120 bp, synthetic construct
  source 1..120: mol_type = other DNA
gaaattttaagttcttaaataaatgctttggaaataataaagataagttgtttaataaaattattaaattagaaattggtaaaataacttttaaatggagaaaatggggtgaaatctaaa

SEQ ID NO: 33604 - DNA, 120 bp, synthetic construct; identical to SEQ ID NO: 9334
  source 1..120: mol_type = other DNA

SEQ ID NO: 33605 - DNA, 120 bp, synthetic construct
  source 1..120: mol_type = other DNA
acaattaaatatatggctttcacaaatgtgataactgatatgaagaaaattaatatttaataaagagtaactgagtggcaactccaaatttggtcatcaggaaaatcttaggttatattt

SEQ ID NO: 33606 - DNA, 120 bp, synthetic construct
  source 1..120: mol_type = other DNA
aaaaaaacagaaatgaggtcagtggcagagatggctggatttccaccaaaatttgttcactcctcctcctgcttagcaatattgctcagaaatggcagtccaagtaaggactccactttc

SEQ ID NO: 33607 - DNA, 120 bp, synthetic construct
  source 1..120: mol_type = other DNA
tcttttgcctttcatcattggaagcagagggcagaaagtccagtaaaagagcagaatcacaacatgtgaagggcctgggtccctgagtcactatatggagaaaaatacctagactattag

SEQ ID NO: 33608 - DNA, 120 bp, synthetic construct; identical to SEQ ID NO: 9335
  source 1..120: mol_type = other DNA

SEQ ID NO: 33609 - DNA, 120 bp, synthetic construct
  source 1..120: mol_type = other DNA
aaaatgaactgtaggaatcaagaaggaagtagggtgatgaggtgggaggctatttcaacaattcaggaggaaaatggcagtatcttaaagtcaagtggctacaaagaagatgaataaaat

SEQ ID NO: 33610 - DNA, 120 bp, synthetic construct
  source 1..120: mol_type = other DNA
tcaaggataattcctccttcccctgatggctttctgttatttctgttattaaataaaaccagtgatgtaaactaaaaagtgtggaagacgctaaaggcaagatactcccacacatttgaa

SEQ ID NO: 33611 - DNA, 120 bp, synthetic construct
  source 1..120: mol_type = other DNA
cagagcctcttggggatctatacctgaaaaagttcataaccaaagagactcacatggacatgacaaatctcaaatgacattgatatctgccctaattttgccaaccatattttccttgat

SEQ ID NO: 33612 - DNA, 120 bp, synthetic construct; identical to SEQ ID NO: 9336
  source 1..120: mol_type = other DNA

SEQ ID NO: 33613 - DNA, 120 bp, synthetic construct
  source 1..120: mol_type = other DNA
taaggagaaattcatatcaccagagttcctggagttgaaggtttttataatttggaattttctcattttagaatgggacaaatgaagcttcagttgtataagaactacacatattctact

SEQ ID NO: 33614 - DNA, 120 bp, synthetic construct
  source 1..120: mol_type = other DNA
tttccactattattattacgtatccagccttgttctttttccacctttgtttaggaaaaagaaaatctgtattcctgacacagaagtgggttcaaatctaaggcctggctaatcagagtc

SEQ ID NO: 33615 - DNA, 120 bp, synthetic construct
  source 1..120: mol_type = other DNA
gctgacatgtttgatctgttgctattcagatgatgagctgaaaatatgagatgtccatcttcatagccatgtaggaaatgtttgacttccataggaaaaaataagggtaataaataggaa

SEQ ID NO: 33616 - DNA, 120 bp, synthetic construct
  source 1..120: mol_type = other DNA
gaaagatgcagggaaataaacaacataaacataaaacatagacaaagaaaaagacaatggacggaaggaatgacagggaaaaaatggcagtgaggcacacaggccagtagagagatggca

SEQ ID NO: 33617 - DNA, 120 bp, synthetic construct; identical to SEQ ID NO: 9337
  source 1..120: mol_type = other DNA

SEQ ID NO: 33618 - DNA, 120 bp, synthetic construct
  source 1..120: mol_type = other DNA
agggaactgaaagagaagagagaaaaaggtttcatttgtgtccagtatctaagcatttttcagaagctaaattcacctagaaactttctgattgcatgaaccccaaaattaatttttccc

SEQ ID NO: 33619 - DNA, 120 bp, synthetic construct
  source 1..120: mol_type = other DNA
gccctgaagaacacattgtactcaccagaagatatttgtggtgccatttggttaagttacggtattaggtaccatgagtggtgcaaaacaattctacttacacaaataagtgaaactaat

SEQ ID NO: 33620 - DNA, 120 bp, synthetic construct
  source 1..120: mol_type = other DNA
tagaccaagtatggcgactcatgatttttgagtgtccttgcctggacattgtcttctttgggggtcataactgaactaaagttctagaatctgatccctttcttagctcaatgtttccca

SEQ ID NO: 33621 - DNA, 120 bp, synthetic construct; identical to SEQ ID NO: 9338
  source 1..120: mol_type = other DNA

SEQ ID NO: 33622 - DNA, 120 bp, synthetic construct
  source 1..120: mol_type = other DNA
tgacagaagaggggctgggaattacagacaaaagtaaagtcaagacaagacaagaaagaggtaacagattccagaaagaaaaatgtttgcagccaatgcgtgagccctctgggagacaga

SEQ ID NO: 33623 - DNA, 120 bp, synthetic construct
  source 1..120: mol_type = other DNA
actaaggctaagtttatgtcaacacctgctcctcgttacctttcctggtaactgagtagagatggcaacaggaatgcctcattttattgtgctatgttttgttgtgcttctcaaatattg

SEQ ID NO: 33624 - DNA, 120 bp, synthetic construct
  source 1..120: mol_type = other DNA
ttcattactattacatgccgatctatgatcagtaatgtttgatgttactgttgtaattgttttggggcaccatgagctgaacccatataagacaatgaactttattgttagatgttgtat

SEQ ID NO: 33625 - DNA, 120 bp, synthetic construct; identical to SEQ ID NO: 9339
  source 1..120: mol_type = other DNA

SEQ ID NO: 33626 - DNA, 120 bp, synthetic construct
  source 1..120: mol_type = other DNA
gaaagtaaaacagtcttattgctgatgtggaaaaagtttgagtgatctggatagaccaaactagccacaacattcccttaagccaaagtctaatccagagaaaggccctcattctcttta

SEQ ID NO: 33627 - DNA, 120 bp, synthetic construct
  source 1..120: mol_type = other DNA
gaaaaaagccaccttcataataccaaagtacaagatgatgtagcaagtgctgatatagaagctgtagcaatttatccagaagatctagttaagatcactgatgaaggtggctacattaaa

SEQ ID NO: 33628 - DNA, 120 bp, synthetic construct
  source 1..120: mol_type = other DNA
tgctaaggactaatgcagctggtggctttagattgaagctagtgctaatttaccatttcaaaaatactagggcccttaagaattacactaaatctactctgcctgtgctctataaatgaa

SEQ ID NO: 33629 - DNA, 120 bp, synthetic construct; identical to SEQ ID NO: 9340
  source 1..120: mol_type = other DNA

SEQ ID NO: 33630 - DNA, 120 bp, synthetic construct
  source 1..120: mol_type = other DNA
attgggaacattcatgattcatgggagaaggtcgaaatatcaacattaacaggagattgggagaagctgattccaaccctcatgaatgactttgagatgtttaagacttcagtggaggaa

SEQ ID NO: 33631 - DNA, 120 bp, synthetic construct
  source 1..120: mol_type = other DNA
gatgagcaaagaaagtggtttcttgagatggaatctacccctggtgaagatgctgtgaatgttgttgaagtggcaacaaaggatttagaatattacataacttagttgagaaagcagtag

SEQ ID NO: 33632 - DNA, 120 bp, synthetic construct
  source 1..120: mol_type = other DNA
aaacttcattgttctttcattttaagaaattatcacagccacctcaaactgcagcagcagccatcaacatcaaggaaagaaccttctatcagcaaaaagattataactcactaaaggctc

SEQ ID NO: 33633 - DNA, 120 bp, synthetic construct; identical to SEQ ID NO: 9341
  source 1..120: mol_type = other DNA

SEQ ID NO: 33634 - DNA, 120 bp, synthetic construct
  source 1..120: mol_type = other DNA
tgcaatttggggatatgggggcatcatccaagcctcactgaatgactgataccacaggttggatcttattctgaggaataatccctgaagtttagagcagagacttttcagaatgttcca

SEQ ID NO: 33635 - DNA, 120 bp, synthetic construct
  source 1..120: mol_type = other DNA
gaagcatgttcaggtgtccagaaaaacccactcaactcttttttccaccttatgtgtgtcatatttctgggcaaggagagcagggatcttatctgtgaccagagccctgtctatttaaga

SEQ ID NO: 33636 - DNA, 120 bp, synthetic construct
  source 1..120: mol_type = other DNA
tctatttccatccccaccttagctgcctttccgttatagagtcagacaggacgagttacaacaaaaagcctcggtcgcagcaccagtctctccatcttcttcaaaggtgccttacctttc

SEQ ID NO: 33637 - DNA, 120 bp, synthetic construct
  source 1..120: mol_type = other DNA
aaagcctgtgtgtcagagcctgtccccacaccccacagtgtcctcatctggaagcctggagacctatccaggatgtaagagacagaggtagtctgtcaccaagcaaaggagatgacaggc

SEQ ID NO: 33638 - DNA, 120 bp, synthetic construct; identical to SEQ ID NO: 9342
  source 1..120: mol_type = other DNA

SEQ ID NO: 33639 - DNA, 120 bp, synthetic construct
  source 1..120: mol_type = other DNA
tgtgtaggagagaagatatgaaaatgtataacaagcagaggttagtagtgatctcaccccgacaagacccagaccccccgccacccttccttttttccattgaatctatgatataaataa

SEQ ID NO: 33640 - DNA, 120 bp, synthetic construct
  source 1..120: mol_type = other DNA
aatccctattctgaataggtatggatacaactccagcagtctgctcctgttttttctggaaccatctgagtttcacttggcaaggaaagaaatttgtcaccaaacagaccagcaaattgt

SEQ ID NO: 33641 - DNA, 120 bp, synthetic construct
  source 1..120: mol_type = other DNA
tccttcctttgatactaaagtggagaagatagcagatattaattagtcttctactccaatcccagatctaggttttaattagctaacttgttagcctactctttagaaaagaaatatttt

SEQ ID NO: 33642 - DNA, 120 bp, synthetic construct; identical to SEQ ID NO: 9343
  source 1..120: mol_type = other DNA

SEQ ID NO: 33643 - DNA, 120 bp, synthetic construct
  source 1..120: mol_type = other DNA
atttcgaagctctgtttttaggtgcatacacacttaagattgttttgtgtctttggagaaataaccccttatcattaaataatatccctctttatccctggtaatattccttgttctgac

SEQ ID NO: 33644 - DNA, 120 bp, synthetic construct
  source 1..120: mol_type = other DNA
agaagtgtctgttcatatattttcaccactttttgatggggttgttttttttcttgtaaatttgtttaaattccttgtagattctggatattaaccctttgtcaaatggatagattgcaa

SEQ ID NO: 33645 - DNA, 120 bp, synthetic construct
  source 1..120: mol_type = other DNA
ttgatgttgtaatcatgaagtctttgcccatgcctatatcctgactggtattgcctaggttttcttctagggtttttatggttttaggttttatgtgtaagtctttaatccatcttgagt

SEQ ID NO: 33646 - DNA, 120 bp, synthetic construct; identical to SEQ ID NO: 9344
  source 1..120: mol_type = other DNA

SEQ ID NO: 33647 - DNA, 120 bp, synthetic construct
  source 1..120: mol_type = other DNA
tagatgtgtggcgttatttctggggcctctgttatgttccattggtctatatatctgttttggtgccagtaccatgctgttttggttattgcagccttgtaatatagttcaaattcagat

SEQ ID NO: 33648 - DNA, 120 bp, synthetic construct
  source 1..120: mol_type = other DNA
tagcttgatgaggatagcattgaatctgtaaattactttggccagtatggccattatcacaatactgattcttcctatccatgagcatggaatatttttccatttgtttgtgtcctctct

SEQ ID NO: 33649 - DNA, 120 bp, synthetic construct; identical to SEQ ID NO: 9345
  source 1..120: mol_type = other DNA

SEQ ID NO: 33650 - DNA, 120 bp, synthetic construct
  source 1..120: mol_type = other DNA
tgtaaattagttcaaccattgtggaagacagtgtggcgattcttcaaggatatagtaccagaaatatcatttgacccagcaattccatttttggttatatacccaaaggattataaatca

SEQ ID NO: 33651 - DNA, 120 bp, synthetic construct
  source 1..120: mol_type = other DNA
tacaccatggaatattatgcagccataaaggagaatgagttcatgtcctttgcagggaaatgaatgaagctggaaacgatcattctcagcaaactaacacaggaacagaaaaccaaacac

SEQ ID NO: 33652 - DNA, 120 bp, synthetic construct; identical to SEQ ID NO: 9346
  source 1..120: mol_type = other DNA

SEQ ID NO: 33653 - DNA, 120 bp, synthetic construct
  source 1..120: mol_type = other DNA
ttatagttcaattgtgccatttttactgtctgatcttctttatcacttaattggtgtgtctaggccaattatacctatgaaattatcaacatggttggattacttttgctagatattttt

SEQ ID NO: 33654 - DNA, 120 bp, synthetic construct
  source 1..120: mol_type = other DNA
gtatgctccaaatttctctctctctcattcattgtgcaattgttatcatatattatacttttttatattccataaacacaaaatatattgctactaattttgctgtagaccctctgttac

SEQ ID NO: 33655 - DNA, 120 bp, synthetic construct
  source 1..120: mol_type = other DNA
actacacaataacaaaaaaatagtacggggaaaatactgctgcctaatagtcttctgtgggaaaacacgcaaaattactcccatgtgcagatctgctttcaccatagccccaggttgctc

SEQ ID NO: 33656 - DNA, 120 bp, synthetic construct; identical to SEQ ID NO: 9347
  source 1..120: mol_type = other DNA

SEQ ID NO: 33657 - DNA, 120 bp, synthetic construct
  source 1..120: mol_type = other DNA
tgggaggagtgcaaactgggatggagccacagaagtttgcaccatttgcggcagggaggagactgacccctcttctttgggtggaacgtggaattcaatctgtgaggtgggaagcccact

SEQ ID NO: 33658 - DNA, 120 bp, synthetic construct
  source 1..120: mol_type = other DNA
atttctcgtggctgtgtggcaaggacgctgtcattagctgaactaaggaaaagtcctgtaacactatgtttcccaggctggcctcaaactccttggctcaagtgatcttcctacctcagt

SEQ ID NO: 33659 - DNA, 120 bp, synthetic construct
  source 1..120: mol_type = other DNA
tttatatgaaattattcatatgtatttaccaaaggtcatcatgtatatgtaaagcattttacctagaaattttaagttgtgattttgccagaacattaaaaacagaaataataacacaag

SEQ ID NO: 33660 - DNA, 120 bp, synthetic construct; identical to SEQ ID NO: 9348
  source 1..120: mol_type = other DNA

SEQ ID NO: 33661 - DNA, 120 bp, synthetic construct
  source 1..120: mol_type = other DNA
gagatagtcatgcattcattattatctttgagtcgtgggaatattggtgtccatgggatttatgcaccataagaaatgtaaaaggaagaccttcacacggtagccatatgatatcacata

SEQ ID NO: 33662 - DNA, 120 bp, synthetic construct
  source 1..120: mol_type = other DNA
attttcttgtaggaggctgccatgtgcattgcaggatgtgtaacagcacccctggcctctacccaatacctgccagtagcaccctccccagtaatgacaacaaaagtatctccagacatt

SEQ ID NO: 33663 - DNA, 120 bp, synthetic construct
  source 1..120: mol_type = other DNA
tagaaaaatctgacagatacaacagtcttcaaagaaattctgtttcctagaaatctcttagtgtttctgtggctcacaggctcctatatgcctggagtgccacagggagaagcttaaatg

SEQ ID NO: 33664 - DNA, 120 bp, synthetic construct; identical to SEQ ID NO: 9349
  source 1..120: mol_type = other DNA

SEQ ID NO: 33665 - DNA, 120 bp, synthetic construct
  source 1..120: mol_type = other DNA
ttttgctattctagactctgttattgttgtgaagcacctttaactactgcaagatagaagtcttggccttcagagtaaaatttcatcaatgcataaaattagacctaaagttagggtctt

SEQ ID NO: 33666 - DNA, 120 bp, synthetic construct
  source 1..120: mol_type = other DNA
catgtcaattagtgctttctaagaaagttattagacaaagtagtattttgagctccaaattttattcccactattactttatgaaaaggactttttcttttttcttttcttttttttttt

SEQ ID NO: 33667 - DNA, 120 bp, synthetic construct
  source 1..120: mol_type = other DNA
tcagcctcccgagtagtagctgggactacaggcgcgtgccactacacccagctaatttttttttgttttttgttttttgttttgtagagatggggtttcaccatgttggccaggatggtc

SEQ ID NO: 33668 - DNA, 120 bp, synthetic construct; identical to SEQ ID NO: 9350
  source 1..120: mol_type = other DNA

SEQ ID NO: 33669 - DNA, 120 bp, synthetic construct
  source 1..120: mol_type = other DNA
tgtgagatctgagactgaacccacgacttcccttctaagatacaattctgatcccacatttaacaccctaacttcctaattagagttgagttttttaaactgtgatattaataggggaaa

SEQ ID NO: 33670 - DNA, 120 bp, synthetic construct
  source 1..120: mol_type = other DNA
tggatacaggggaaaaaagatagaaatgtattatttactacacagcaaagaggatgctgcacggtgaagggagcagagctcaactgcaacctcaaaaaccctcttagttcacaatggcag

SEQ ID NO: 33671 - DNA, 120 bp, synthetic construct
  source 1..120: mol_type = other DNA
ttgcccctgtagcatcccatctctactacttacgagccatgtgaccctgggaaaagtcctttacctctctgagttttaatgtcctccttgaaaaatgtggatgatactaaagtatgacaa

SEQ ID NO: 33672 - DNA, 120 bp, synthetic construct; identical to SEQ ID NO: 9351
  source 1..120: mol_type = other DNA

SEQ ID NO: 33673 - DNA, 120 bp, synthetic construct
  source 1..120: mol_type = other DNA
cacagtggaatttccgtttcctcagagaagcctcagctctgctcttaagacttttcaactgcttagactaagctcacccaatttatctcagataaattcttacttaaagttaactgatta

SEQ ID NO: 33674 - DNA, 120 bp, synthetic construct
  source 1..120: mol_type = other DNA
tgtgcttgtgttaggtaattttgaggaggagttaagaaagagggacttcatttttaactggattctgacagaaagcagggagtggggatggcaatgctatgattgggtagcttcataaat

SEQ ID NO: 33675 - DNA, 120 bp, synthetic construct
  source 1..120: mol_type = other DNA
gtctgggtgcagacgtgatgactgagtggccttattttctgtctcaatccatcgcactcacagagtacctgtctgattctgatgttctatgaaattgattatcttcaacaggagaatcaa

SEQ ID NO: 33676 - DNA, 120 bp, synthetic construct; identical to SEQ ID NO: 9352
  source 1..120: mol_type = other DNA

SEQ ID NO: 33677 - DNA, 120 bp, synthetic construct
  source 1..120: mol_type = other DNA
tccctagtcccttgcaatatctgaaatcttaatgtggttggataacaaatatgaaaagatccagtagtttaagaaaagtaaacctattttctaagttaaagcaattctccttattctact

SEQ ID NO: 33678 - DNA, 120 bp, synthetic construct
  source 1..120: mol_type = other DNA
gatcgagaccatcctggctcacacggtgaaaccccatctctactaaaaatacaaaaaattagctgggcgcggtggcgggcgcctgtagtcccagctactcgggaggctggggcaggagaa

SEQ ID NO: 33679 - DNA, 120 bp, synthetic construct
  source 1..120: mol_type = other DNA
aattattagagtaattgagccagccaaagcttttttaatgtaatcaatgtccctaaatttcctttaaatatattcaagcagctccgaaacacagagcataaagattactagaagcaaaac

SEQ ID NO: 33680 - DNA, 120 bp, synthetic construct; identical to SEQ ID NO: 9353
  source 1..120: mol_type = other DNA

SEQ ID NO: 33681 - DNA, 120 bp, synthetic construct
  source 1..120: mol_type = other DNA
accttacctatccaagcggctgctcagaaattcccgcccctcttgacactagcagacatgcacacatgacagaagattcagatttagtatcttccctttatttatagaaaatttcctcaa

SEQ ID NO: 33682 - DNA, 120 bp, synthetic construct
  source 1..120: mol_type = other DNA
tggcaaacaatatgtcaccataggggatttttctgattggccaaaacctgacctggcagggtttggtttgggtgtcttcagatttgcttgtctcgaggtcctcacaattgctctacagct

SEQ ID NO: 33683 - DNA, 120 bp, synthetic construct
  source 1..120: mol_type = other DNA
tgccgtgatgagcccctgtggaggtgaagacattgtgggtgagtacatgagtgaggaatgttctctggagctgaaaaacagtaaattaaaggaaaagagagagtgtaatttgctaagaaa

SEQ ID NO: 33684 - DNA, 120 bp, synthetic construct
  source 1..120: mol_type = other DNA
caaggacgttgttctgtttatattatatccagagactatagcctggaggtctgtgtggcattccatcatgattgcctcaaagactagggatgtttccatgaatggagtatttttttgtta

SEQ ID NO: 33685 - DNA, 120 bp, synthetic construct; identical to SEQ ID NO: 9354
  source 1..120: mol_type = other DNA

SEQ ID NO: 33686 - DNA, 120 bp, synthetic construct
  source 1..120: mol_type = other DNA
ggtaaatgtggtacttactctctgctacctcatatatgtcacctcgcttatgatcaaataaaatgggcatgtagatatgctttatgaatagtaaaaacatgaatgtcaactttttttaac

SEQ ID NO: 33687 - DNA, 120 bp, synthetic construct
  source 1..120: mol_type = other DNA
caacccaaattactagttcttcaccttatctaatgaagtcttataaagagaaaaatgggcaggcacagataattatttggtcccttagtcccctctgcctttgtcgtccatctcttccca

SEQ ID NO: 33688 - DNA, 120 bp, synthetic construct
  source 1..120: mol_type = other DNA
tgggtttgtaaaacaaaagttggaaagtcaaatagttaaaaggggaagtgaactggaagctactctaaactttcacaaccttattaaccatggctgctcccattctgattttgtttggca

SEQ ID NO: 33689 - DNA, 120 bp, synthetic construct; identical to SEQ ID NO: 3591
  source 1..120: mol_type = other DNA

SEQ ID NO: 33690 - DNA, 120 bp, synthetic construct
  source 1..120: mol_type = other DNA
ccattctcctgcctcagcctcccgagtagctgggactacaggcgcccgccactgtgcacggctaattttttgtatttttagtagagacggggtttcaccgtgttagccaggatggtctcg

SEQ ID NO: 33691 - DNA, 120 bp, synthetic construct
  source 1..120: mol_type = other DNA
acttttaatgtagcctggattgtatttgtctttataccaatacaatcagaagctgtaattttccgtatttttatggaggaaggcgcccacaaaagcaacagtgctcggggctcacaagtc

SEQ ID NO: 33692 - DNA, 120 bp, synthetic construct
  source 1..120: mol_type = other DNA
tgtttgagcacacaatgagctaacttttgggaattcaaagataaaaaatcatgctgtctgccttgcagagggtgcacaaaccagtgatggaaacagtatggggcacaggaaagcagaagg

SEQ ID NO: 33693 - DNA, 120 bp, synthetic construct; identical to SEQ ID NO: 9356
  source 1..120: mol_type = other DNA

SEQ ID NO: 33694 - DNA, 120 bp, synthetic construct
  source 1..120: mol_type = other DNA
gtcacaacgcggtcaaaaacatgttgagaggacttagctgcaaagttgttaactaagtagaaacctcaaggatgaattttaggatttctccaggaaatcctaaaagataacttctttcag

SEQ ID NO: 33695 - DNA, 120 bp, synthetic construct
  source 1..120: mol_type = other DNA
agtacattgtatttgctcccttaccgacctgattctcccactattcagttcattccttgatgctgttttaagcaacccctgctctgtctgacacttttggatgctcagtaaatgaggaag

SEQ ID NO: 33696 - DNA, 120 bp, synthetic construct
  source 1..120: mol_type = other DNA
ctgcccattagaggaaaaagggtttaatttacctgagtcctcgagtgaatgtaattgttgaatcagaacactatagatatttagtaacctccttcagaggaaaaaaaaaagtgggggcaa

SEQ ID NO: 33697 - DNA, 120 bp, synthetic construct; identical to SEQ ID NO: 9357
  source 1..120: mol_type = other DNA

SEQ ID NO: 33698 - DNA, 120 bp, synthetic construct
  source 1..120: mol_type = other DNA
ctgagtaagaaaactaaatcctatgataactcattcattccttcctttgtttattgcaatattcatcataagcttatgatgcgccaggcactaagtaggcactcaggaaataacagacgt

SEQ ID NO: 33699 - DNA, 120 bp, synthetic construct
  source 1..120: mol_type = other DNA
caaggaggaagcaggtgttaggaagattgttcagggactgtgccaaagatgaagcccataatatttgaaagtgagtttcttcaatcactttctgtattaaggttctttctccctgtgttc

SEQ ID NO: 33700 - DNA, 120 bp, synthetic construct
  source 1..120: mol_type = other DNA
ttctatgtggacctggagacgaaagagactgtctggcagttgcctatgtttagcaaatttataagttttgacccgcagagtgcactgagaaatatggctgtgggaaaacacaccttggaa

SEQ ID NO: 33701 - DNA, 120 bp, synthetic construct; identical to SEQ ID NO: 9358
  source 1..120: mol_type = other DNA

SEQ ID NO: 33702 - DNA, 120 bp, synthetic construct
  source 1..120: mol_type = other DNA
atcaggtggtgaaatgctggtaggagggctcttccaggatgtaatgcagaagctcatggcagagctattcacacttcacatcagtgctgtttcctcaccacagaggttcctgaggtcaca

SEQ ID NO: 33703 - DNA, 120 bp, synthetic construct
  source 1..120: mol_type = other DNA
ggtgtttctgagaccagcttcctctccaagagtgatcattccttcttcaagatcagttacctcaccttcctcccttctgctgatgagatttatgactgcaaggtggagcactggggcctg

SEQ ID NO: 33704 - DNA, 120 bp, synthetic construct
  source 1..120: mol_type = other DNA
accccatcccatcccacacacatgcacatgagcacactgcacattctgacctcaacagctccactttcacagagcctgagattccagcccctatgtcagagctcacagagactttggtct

SEQ ID NO: 33705 - DNA, 120 bp, synthetic construct; identical to SEQ ID NO: 9359
  source 1..120: mol_type = other DNA

SEQ ID NO: 33706 - DNA, 120 bp, synthetic construct
  source 1..120: mol_type = other DNA
gatttatcatatcccttttctcctccaaatgtttcttctctcacctcttctctgggacttaaggtgctatattccctcagagctcacaaatgcctttcaattctttccctgacctccttt

SEQ ID NO: 33707 - DNA, 120 bp, synthetic construct
  source 1..120: mol_type = other DNA
cctttatctaaaatctccatggaagcaataaattcccttttgatgcctctattgaatttttcccatctttcatctcagggctgactgagagcataacttagaatgggcgactcttatgtt

SEQ ID NO: 33708 - DNA, 120 bp, synthetic construct
  source 1..120: mol_type = other DNA
aatttgttgatttcttaactggtgttaatatttctttcttccttttgttcctacccttggccactgccagccacccctcaattcaggtaccaacgaaccctctgcccttggctcagaatg

SEQ ID NO: 33709 - DNA, 120 bp, synthetic construct; identical to SEQ ID NO: 9360
  source 1..120: mol_type = other DNA

SEQ ID NO: 33710 - DNA, 120 bp, synthetic construct
  source 1..120: mol_type = other DNA
accagcctggccaacgtggttacaccctgtctctactaaaaatacaaaaattagctgggcatggtgctgggcacctgtaatcccagctactcaggaggctgaagcaggaaaatcgcttga

SEQ ID NO: 33711 - DNA, 120 bp, synthetic construct
  source 1..120: mol_type = other DNA
attaaaataaggcaataatataagggggtatctgaaaaggaacaaatgcttgttccttacttagggttagtgacaatggaaaacagatagaagtagaagctacagacccatttaggggcc

SEQ ID NO: 33712 - DNA, 120 bp, synthetic construct
  source 1..120: mol_type = other DNA
ctggattcgtggtctcctaatagaaaatctctcagaggaaatgggtccacagggacctgagagctctaaacagctatgaaatctgccaggatatttctgtccatgctatctgcatcagtg

SEQ ID NO: 33713 - DNA, 120 bp, synthetic construct; identical to SEQ ID NO: 9361
  source 1..120: mol_type = other DNA

SEQ ID NO: 33714 - DNA, 120 bp, synthetic construct
  source 1..120: mol_type = other DNA
tagccctttagtgatttaggagattcaagcgtagacgtaaaagtgagtttcttttcatatgttaactggaggatttttttctttcttgagaggctgagattgggttgctaagagaactct

SEQ ID NO: 33715 - DNA, 120 bp, synthetic construct
  source 1..120: mol_type = other DNA
aagtcaaggtgaattatatgcaacagcagtttatccatatttactttggggaggaggtggggagactccgggagaaaataattataaatgcagactgggaattagtaagtgcagggaatc

SEQ ID NO: 33716 - DNA, 120 bp, synthetic construct
  source 1..120: mol_type = other DNA
atagaatgtacaacaccaagaatgaaccttaatataaactatggactttgggtgataatgatgtgtcagtgtaagttcataagttgtagcaaatgtacctctgtcatgaaggatgttact

SEQ ID NO: 33717 - DNA, 120 bp, synthetic construct; identical to SEQ ID NO: 9362
  source 1..120: mol_type = other DNA

SEQ ID NO: 33718 - DNA, 120 bp, synthetic construct
  source 1..120: mol_type = other DNA
tataaccagagtcatacagaaatacacaaatgctcccctatttagaatccttccccaagaaatactgaggaaagcaaatataatggtagttggattttactgaaagaatgtattcaaaaa

SEQ ID NO: 33719 - DNA, 120 bp, synthetic construct
  source 1..120: mol_type = other DNA
ttataaacagttataaatcaggctgcatgattttaaattaaatgattcttaaaaattgttatctgaattatttcagattacatacataaagtatgacttcattaataggtaatatcacat

SEQ ID NO: 33720 - DNA, 120 bp, synthetic construct
  source 1..120: mol_type = other DNA
ctgaggcaggaggattgctgcttgagcccaggagttcgaggctgcagtgagctaggactgactgcaccactgcactcgctccagcctgggcaacacagcgagaccccgtctctaaaaata

SEQ ID NO: 33721 - DNA, 120 bp, synthetic construct; identical to SEQ ID NO: 9363
  source 1..120: mol_type = other DNA

SEQ ID NO: 33722 - DNA, 120 bp, synthetic construct
  source 1..120: mol_type = other DNA
gaaatatagtaaccaaacgctgagctttgtctagattcatattcaaacaaaacatctgttaaaaaatttatatgaggcaatcagaaaaattgacactgagtgtattaaggaattatttat

SEQ ID NO: 33723 - DNA, 120 bp, synthetic construct
  source 1..120: mol_type = other DNA
cagtatgtgcctgtatgataactgggtgggtttacaaaattgctcatgaattgattattgttaaagcaaggctgttgatacatggaattcttctctgtactattgcacacagttgaaatt

SEQ ID NO: 33724 - DNA, 120 bp, synthetic construct
  source 1..120: mol_type = other DNA
aggaaaccctgtccaaggcctgcccaagactgtaagaacctctcaggaatgcaactataaagaatgtgtatgcaggaactaataataacaaaggaaagcaaagtaatgcttgctttatta

SEQ ID NO: 33725 - DNA, 120 bp, synthetic construct; identical to SEQ ID NO: 9364
  source 1..120: mol_type = other DNA

SEQ ID NO: 33726 - DNA, 120 bp, synthetic construct
  source 1..120: mol_type = other DNA
aggttgaagaggccagagcaaatgtttgagaaactcttacaatatgaaagagaagatgagaataaaataacatgaaaattatcacagatttaatagagaaagttcatgtaacagcaaaca

SEQ ID NO: 33727 - DNA, 120 bp, synthetic construct
  source 1..120: mol_type = other DNA
taaaaggcaaaaaaaaaatgtaatatatggtagaaaaaataagatggagaacagaccaaggaagtcaaacatcaagtgacaaagctagagagaccaacagggaagatgaagggagaaaat

SEQ ID NO: 33728 - DNA, 120 bp, synthetic construct
  source 1..120: mol_type = other DNA
aatttcagaacttcaggtgttatagaaaagtcataaaatattccagtggcggaaaccaaaatgaaacaaactgacaacaaaaaaaatacttctattattaagataatgagaaagtccttg

SEQ ID NO: 33729 - DNA, 120 bp, synthetic construct; identical to SEQ ID NO: 9365
  source 1..120: mol_type = other DNA

SEQ ID NO: 33730 - DNA, 120 bp, synthetic construct
  source 1..120: mol_type = other DNA
tgctacagcagaatgtcaatattttcagctttgacaatattggggggaaaaaaaagatgtagatacttcattatggcaactggaagtgtaaaggagaggggaaagggagggtgaaaatgc

SEQ ID NO: 33731 - DNA, 120 bp, synthetic construct
  source 1..120: mol_type = other DNA
attagagcaaggttttagaaattggactattatttcagttacaaaaaaaatggactgttattcttcggcctaagctattcagaagctgcaagagcccctcagagtcggcccaaattagag

SEQ ID NO: 33732 - DNA, 120 bp, synthetic construct
  source 1..120: mol_type = other DNA
agggcagtcagccagcaacattcccagcaatgacagaataaatcgttcagtctcaaagggaggagtttaggtacagtggaacagcactgacggcagaaacactgttctagttcctgggag

SEQ ID NO: 33733 - DNA, 120 bp, synthetic construct; identical to SEQ ID NO: 9366
  source 1..120: mol_type = other DNA

SEQ ID NO: 33734 - DNA, 120 bp, synthetic construct
  source 1..120: mol_type = other DNA
acgacatgacctaacttatatgcagaatcttaaaaagtcaaagtcatggagggggtggggtgtggggagagggagaaaaaggaatgagatgttggtcaaaaggtataagtttcagttaga

SEQ ID NO: 33735 - DNA, 120 bp, synthetic construct
  source 1..120: mol_type = other DNA
taagaatgctcaagtctcttattaaaaatggcttagtttttgtacatcacctaagtatgttttcccatatactttaaatcatctttggattacttataatacttaacgcaatgtaaatgc

SEQ ID NO: 33736 - DNA, 120 bp, synthetic construct
  source 1..120: mol_type = other DNA
aaaacacacaaatacagggccagctgtattgtatatttgaaaattgctaagacagattttaaatattcacaccacataaaaaaataagtatgtgaagtgatggatatgttaattagcttg

SEQ ID NO: 33737 - DNA, 120 bp, synthetic construct; identical to SEQ ID NO: 9367
  source 1..120: mol_type = other DNA

SEQ ID NO: 33738 - DNA, 120 bp, synthetic construct
  source 1..120: mol_type = other DNA
tctcagtgatgtcactcaataaagagacttaattccacagtttctccagtgactcaggttatatggagtttccatcgtctcatcgtgcatctacttgcaagttccattggctagtattag

SEQ ID NO: 33739 - DNA, 120 bp, synthetic construct
  source 1..120: mol_type = other DNA
tgaaagatatgctgatatttcctaaggtaaggacaaatgctcacaactggcaggttgttctctagaacacccacatactttcctccaagttatatgccgactaagactcaattcttcttg

SEQ ID NO: 33740 - DNA, 120 bp, synthetic construct
  source 1..120: mol_type = other DNA
gggaaaaagactttgatcctctcataaccaggatgtgttcagtgtgacaatgttgaactgaatgttctagaatctgtgttggactgcattaaatacggtcataggctgcatgcagcccgc

SEQ ID NO: 33741 - DNA, 120 bp, synthetic construct
  source 1..120: mol_type = other DNA
acatcaaaggggtcacagtgtgtagtaacatccctcataatcgggaagagggtgtcatcaggaatgaacaggttacgatgtcaatgacaaagggagctcagacaaggaatgagatggctg

SEQ ID NO: 33742 - DNA, 120 bp, synthetic construct; identical to SEQ ID NO: 9368
  source 1..120: mol_type = other DNA

SEQ ID NO: 33743 - DNA, 120 bp, synthetic construct
  source 1..120: mol_type = other DNA
atcctgtgcacaggatggtgtgtttgggaggtgtgcatgttacccaggcttggacaatcagaatctttccccaaattattaaaactctggtagacacttcagaaacatatacaacaaaga

SEQ ID NO: 33744 - DNA, 120 bp, synthetic construct
  source 1..120: mol_type = other DNA
gataaatagtgacaaaggattacaaacatagagaaaggcaacaatgcagtgaaagagacacaagaagggaacaaagacaaaactggagagagacacacagaaagaactacacagggacaa

SEQ ID NO: 33745 - DNA, 120 bp, synthetic construct
  source 1..120: mol_type = other DNA
tctggaactagtcacttctgaaaccaacattccttgtaacatgaatcaaatatctttgggttgggtgtctatcatttggaaccaaaaatagtactttcattgctggttatgctttcttaa

SEQ ID NO: 33746 - DNA, 120 bp, synthetic construct
  source 1..120: mol_type = other DNA
aagagaggctgggatgtcctaaggccattgcactgaacatcaatattaaagaaccatgaatgatgtgatgactgaattgattttctacctcctctgcctacccttactttgcaccccaag

SEQ ID NO: 33747 - DNA, 120 bp, synthetic construct; identical to SEQ ID NO: 9369
  source 1..120: mol_type = other DNA

SEQ ID NO: 33748 - DNA, 120 bp, synthetic construct
  source 1..120: mol_type = other DNA
catgagccactgtaggactctgacctcagtgggacagggtgacacaggcagctaggaattctgggcaggggcaggtgggcattacagaagagtgatgaccaatcccagacaaaagtcctc

SEQ ID NO: 33749 - DNA, 120 bp, synthetic construct
  source 1..120: mol_type = other DNA
gaggtccagggcatatcatcatcacgttccccaatatctgtgtaaaggtaaaatcagctcatgaggacacagaacttcagcttgatgcagatatgtggaggtgggggaacagcagttacc

SEQ ID NO: 33750 - DNA, 120 bp, synthetic construct
  source 1..120: mol_type = other DNA
acaaagtgggcatcaccctactatctcacattcaagatgtggctctgtccccacatttcacaaaaagatgccaccaaagttaaggcctggttctaggaaacaatctctggagattcgtag

SEQ ID NO: 33751 - DNA, 120 bp, synthetic construct; identical to SEQ ID NO: 9370
  source 1..120: mol_type = other DNA

SEQ ID NO: 33752 - DNA, 120 bp, synthetic construct
  source 1..120: mol_type = other DNA
tggaggccctcgaggtcctacaaaaggaagttatacagagaaaggtcttgttaaacaaacaaccactatcttaccccaaaggaaaatgacacatgtagtttaattggggttatatcctct

SEQ ID NO: 33753 - DNA, 120 bp, synthetic construct
  source 1..120: mol_type = other DNA
gaaaggagccagtgagacgatgatgaacggtaaggacgccctggaataagctctatcagtcagctctggcagcgctaccattcacccagtaaaatcagattccaatgcctcctccaatct

SEQ ID NO: 33754 - DNA, 120 bp, synthetic construct
  source 1..120: mol_type = other DNA
ctcacctttctgacccctgtgacggatgataaggcccagcccgaggaagatcagccccagcacgaagcctccaatgccactcagcatcttgctctgggcagattcagactgagcccctaa

SEQ ID NO: 33755 - DNA, 120 bp, synthetic construct; identical to SEQ ID NO: 9371
  source 1..120: mol_type = other DNA

SEQ ID NO: 33756 - DNA, 120 bp, synthetic construct
  source 1..120: mol_type = other DNA
aggtgactggatcattagaccagattcttgtcaccatctcccttagtactgtcattacaatagtgagttctcatgagatctggttatgtaaaactgcgtagcaccaaccccctctctctc

SEQ ID NO: 33757 - DNA, 120 bp, synthetic construct
  source 1..120: mol_type = other DNA
cataagccaattaaacctcttctctttataaattacccattctcaggtatttctttatagtggagtgagaagagccaattaaacctcttttctttataaattactcagtctcagagattt

SEQ ID NO: 33758 - DNA, 120 bp, synthetic construct
  source 1..120: mol_type = other DNA
tctcctgtgattcccagctcagtagtgatgtcagggacaagagatgggatgggaaggatcagcgggagctctgccctttgtcttgtggggcccacagtaaaaggaaaccagtttcccctt

SEQ ID NO: 33759 - DNA, 120 bp, synthetic construct; identical to SEQ ID NO: 9372
  source 1..120: mol_type = other DNA

SEQ ID NO: 33760 - DNA, 120 bp, synthetic construct
  source 1..120: mol_type = other DNA
ccctccttggaaccagaatagaaagatacctggagtccaagtcttggattaaggttccttcaacaaatataaatttgacaatcactgagaatccaaaaataaacaacaaaccctggttcc
